United States Patent Application Publication US 2011/0183924 A1 - sequence listing, part 127

SEQ ID NO: 354643 - DNA, 1069 bp, Homo sapiens
gaagactgaataagccgtgaactgggcagctgtgacacgcgcaccttgtcaccttgtcaccaatttcctgcccgggatcccagagctacccttcttggagcccacaggggaccctgactgtggccctcttcaccctgatctgctgtccaggatcggatgagaaggtattcgaggtacacgtgaggccaaagaagctggcggttgagcccaaagggtccctcgaggtcaactgcagcaccacctgtaaccagcctgaagtgggtggtctggagacctctctagataagattctgctggacgaacaggctcagtggaaacattacttggtctcaaacatctcccatgacacggtcctccaatgccacttcacctgctccgggaagcaggagtcaatgaattccaacgtcagcgtgtaccagcctccaaggcaggtcatcctgacactgcaacccactttggtggctgtgggcaagtccttcaccattgagtgcagggtgcccaccgtggagcccctggacagcctcaccctcttcctgttccgtggcaatgagactctgcactatgagaccttcgggaaggcagcccctgctccgcaggaggccacagccacattcaacagcacggctgacagagaggatggccaccgcaacttctcctgcctggctgtgctggacttgatgtctcgcggtggcaacatctttcacaaacactcagccccgaagatgttggagatctatgagcctgtgtcggacagccagatggtcatcatagtcacggtggtgtcggtgttgctgtccctgttcgtgacatctgtcctgctctgcttcatcttcggccagcacttgcgccagcagcggatgggcacctacggggtgcgagcggcttggaggaggctgccccaggccttccggccatagcaaccatgagtggcatggccaccaccacggtggtcactggaactcagtgtgactcctcagggttgaggtccagccctggctgaaggactgtgacaggcagcagagacttgggacattgccttttctagcccgaatacaaacacctggactta

SEQ ID NO: 354644 - DNA, 1064 bp, Homo sapiens
gcttctgcggattcctccctaggaataaagtgaaacacctcaggctccaaccctcccaacccaaggctccctcctggagggagagagaggatggaggacatcaggaccctgactgtggccctcttcaccctgatctgctgtccaggatcggatgagaaggtattcgaggtacacgtgaggccaaagaagctggcggttgagcccaaagggtccctcgaggtcaactgcagcaccacctgtaaccagcctgaagtgggtggtctggagacctctctagataagattctgctggacgaacaggctcagtggaaacattacttggtctcaaacatctcccatgacacggtcctccaatgccacttcacctgctccgggaagcaggagtcaatgaattccaacgtcagcgtgtaccagcctccaaggcaggtcatcctgacactgcaacccactttggtggctgtgggcaagtccttcaccattgagtgcagggtgcccaccgtggagcccctggacagcctcaccctcttcctgttccgtggcaatgagactctgcactatgagaccttcgggaaggcagcccctgctccgcaggaggccacagccacattcaacagcacggctgacagagaggatggccaccgcaacttctcctgcctggctgtgctggacttgatgtctcgcggtggcaacatctttcacaaacactcagccccgaagatgttggagatctatgagcctgtgtcggacagccagatggtcatcatagtcacggtggtgtcggtgttgctgtccctgttcgtgacatctgtcctgctctgcttcatcttcggccagcacttgcgccagcagcggatgggcacctacggggtgcgagcggcttggaggaggctgccccaggccttccggccatagcaaccatgagtggcatggccaccaccacggtggtcactggaactcagtgtgactcctcagggttgaggtccagccctggctgaaggactgtgacaggcagcagagacttgggacattgccttttctagcccgaatacaaacacctggactta

SEQ ID NO: 354645 - DNA, 1099 bp, Homo sapiens
gactgggttatgccctgcttatcagcagcttcccagcttcctctgcctggattcttagaggcctggggtcctagaacgagctggtgcacgtggcttcccaaagatctctcagataatgagaggaaatgcagtcatcagtttgcagaaggctagggattctgggccatagctcagacctgcgcccaccatctccctccaggcagcccttggctggtccctgcgagcccgtggagactgccagagatgtcctctttcggttacaggaccctgactgtggccctcttcaccctgatctgctgtccaggatcggatgagaaggtattcgaggtacacgtgaggccaaagaagctggcggttgagcccaaagggtccctcgaggtcaactgcagcaccacctgtaaccagcctgaagtgggtggtctggagacctctctagataagattctgctggacgaacaggctcagtggaaacattacttggtctcaaacatctcccatgacacggtcctccaatgccacttcacctgctccgggaagcaggagtcaatgaattccaacgtcagcgtgtaccagcctccaaggcaggtcatcctgacactgcaacccactttggtggctgtgggcaagtcgccacagccacattcaacagcacggctgacagagaggatggccaccgcaacttctcctgcctggctgtgctggacttgatgtctcgcggtggcaacatctttcacaaacactcagccccgaagatgttggagatctatgagcctgtgtcggacagccagatggtcatcatagtcacggtggtgtcggtgttgctgtccctgttcgtgacatctgtcctgctctgcttcatcttcggccagcacttgcgccagcagcggatgggcacctacggggtgcgagcggcttggaggaggctgccccaggccttccggccatagcaaccatgagtggcatggccaccaccacggtggtcactggaactcagtgtgactcctcagggttgaggtccagccctggctgaaggactgtgacaggcagcagagacttgggacattgccttttctagcccgaatacaaacacctggactta

SEQ ID NO: 354646 - DNA, 1096 bp, Homo sapiens
gaagactgaataagccgtgaactgggcagctgtgacacgcgcaccttgtcaccttgtcaccaatttcctgcccgggatcccagagctacccttcttggagcccacagggtaaggttgagcttctcactttccctccaatgaagcatggcagcatgggaaggattttggcagtgtcgaggtctgagttttagtccgttcccctctctgggtctcagtttctcgctggcagcccttggctggtccctgcgagcccgtggagactgccagagatgtcctctttcggttacaggaccctgactgtggccctcttcaccctgatctgctgtccaggatcggatgagaaggtattcgaggtacacgtgaggccaaagaagctggcggttgagcccaaagggtccctcgaggtcaactgcagcaccacctgtaaccagcctgaagtgggtggtctggagacctctctagataagattctgctggacgaacaggctcagtggaaacattacttggtctcaaacatctcccatgacacggtcctccaatgccacttcacctgctccgggaagcaggagtcaatgaattccaacgtcagcgtgtaccagcctccaaggcaggtcatcctgacactgcaacccactttggtggctgtgggcaagtccttcaccattgagtgcagggtgcccaccgtggagcccctggacagcctcaccctcttcctgttccgtggcaatgagactctgcactatgagaccttcgggaaggcagcccctgctccgcaggaggccacagccacattcaacagcacggctgacagagaggatggccaccgcaacttctcctctgtcctgctctgcttcatcttcggccagcacttgcgccagcagcggatgggcacctacggggtgcgagcggcttggaggaggctgccccaggccttccggccatagcaaccatgagtggcatggccaccaccacggtggtcactggaactcagtgtgactcctcagggttgaggtccagccctggctgaaggactgtgacaggcagcagagacttgggacattgccttttctagcccgaatacaaacacctggactta

SEQ ID NO: 354647 - DNA, 755 bp, Homo sapiens
gaagactgaataagccgtgaactgggcagctgtgacacgcgcaccttgtcaccttgtcaccaatttcctgcccgggatcccagagctacccttcttggagcccacagggtaaggttgagcttctcactttccctccaatgaagcatggcagcatgggaaggattttggcagtgtcgaggtctgagttttagtccgttcccctctctgggtctcagtttctcgctggcagcccttggctggtccctgcgagcccgtggagactgccagagatgtcctctttcggttacaggaccctgactgtggccctcttcaccctgatctgctgtccaggatcggatgagaaggtattcgaggtacacgtgaggccaaagaagctggcggttgagcccaaagggtccctcgaggtcaactgcagcaccacctgtaaccagcctgaagtgggtggtctggagacctctctagataagattctgctggacgaacaggctcagtggaaacattacttggtctcaaacatctcccatgacacggtcctccaatgccacttcacctgctccgggaagcaggagtcaatgaattccaacgtcagcgtgtaccgtgagtggctgtgctgcggggccctcctctcccctgggacagaggctgtgtctactgaatgcacacagagcccctctgtgcctgctcctgggcactgtcatcgtggggccctgcctccctgagctcctggggtgacaaggggcaggaccaggccagcc

SEQ ID NO: 354648 - DNA, 728 bp, Homo sapiens
gaagactgaataagccgtgaactgggcagctgtgacacgcgcaccttgtcaccttgtcaccaatttcctgcccgggatcccagagctacccttcttggagcccacaggggcagcccttggctggtccctgcgagcccgtggagactgccagagatgtcctctttcggttacaggaccctgactgtggccctcttcaccctgatctgctgtccaggatcggatgagaaggtattcgaggtacacgtgaggccaaagaagctggcggttgagcccaaagggtccctcgaggtcaactgcagcaccacctgtaaccagcgcctggctgtgctggacttgatgtctcgcggtggcaacatctttcacaaacactcagccccgaagatgttggagatctatgagcctgtgtcggacagccagatggtcatcatagtcacggtggtgtcggtgttgctgtccctgttcgtgacatctgtcctgctctgcttcatcttcggccagcacttgcgccagcagcggatgggcacctacggggtgcgagcggcttggaggaggctgccccaggccttccggccatagcaaccatgagtggcatggccaccaccacggtggtcactggaactcagtgtgactcctcagggttgaggtccagccctggctgaaggactgtgacaggcagcagagacttgggacattgccttttctagcccgaatacaaacacctggactta

SEQ ID NO: 354649 - DNA, 1025 bp, Homo sapiens
gactgggttatgccctgcttatcagcagcttcccagcttcctctgcctggattcttagaggcctggggtcctagaacgagctggtgcacgtggcttcccaaagatctctcagataatgagaggaaatgcagtcatcagtttgcagaaggctagggattctgggccatagctcagacctgcgcccaccatctccctccaggcagcccttggctggtccctgcgagcccgtggagactgccagagatgtcctctttcggttacaggaccctgactgtggccctcttcaccctgatctgctgtccaggatcggatgagaaggtattcgaggtacacgtgaggccaaagaagctggcggttgagcccaaagggtccctcgaggtcaactgcagcaccacctgtaaccagcctgaagtgggtggtctggagacctctctagataagattctgctggacgaacaggctcagtggaaacattacttggtctcaaacatctcccatgacacggtcctccaatgccacttcacctgctccgggaagcaggagtcaatgaattccaacgtcagcgtgtaccagcctccaaggcaggtcatcctgacactgcaacccactttggtggctgtgggcaagtccttcaccattgagtgcagggtgcccaccgtggagcccctggacagcctcaccctcttcctgttccgtggcaatgagactctgcactatgagaccttcgggaaggcagcccctgctccgcaggaggccacagccacattcaacagcacggctgacagagaggatggccaccgcaacttctcctgcctggctgtgctggacttgatgtctcgcggtggcaacatctttcacaaacactcagccccgaagatgttggagatctatgagctgtgtcggacagccgatggtcatcataagtcaccgggggcggggtgtggcctggttgggaatttgtctggttggttatcttcggcagattgggcagagggatgggcctagggtggaaggtgtgggagggc

SEQ ID NO: 354650 - DNA, 1249 bp, Homo sapiens
gaagactgaataagccgtgaactgggcagctgtgacacgcgcaccttgtcaccttgtcaccaatttcctgcccgggatcccagagctacccttcttggagcccacagggtaaggttgagcttctcactttccctccaatgaagcatggcagcatgggaaggattttggcagtgtcgaggtctgagttttagtccgttcccctctctgggtctcagtttctcgctggcagcccttggctggtccctgcgagcccgtggagactgccagagatgtcctctttcggttacaggaccctgactgtggccctcttcaccctgatctgctgtccaggatcggatgagaaggtattcgaggtacacgtgaggccaaagaagctggcggttgagcccaaagggtccctcgaggtcaactgcagcaccacctgtaaccagcctgaagtgggtggtctggagacctctctagataagattctgctggacgaacaggctcagtggaaacattacttggtctcaaacatctcccatgacacggtcctccaatgccacttcacctgctccgggaagcaggagtcaatgaattccaacgtcagcgtgtaccagcctccaaggcaggtcatcctgacactgcaacccactttggtggctgtgggcaagtccttcaccattgagtgcagggtgcccaccgtggagcccctggacagcctcaccctcttcctgttccgtggcaatgagactctgcactatgagaccttcgggaaggcagcccctgctccgcaggaggccacagccacattcaacagcacggctgacagagaggatggccaccgcaacttctcctgcctggctgtgctggacttgatgtctcgcggtggcaacatctttcacaaacactcagccccgaagatgttggagatctatgagcctgtgtcggacagccagatggtcatcatagtcacggtggtgtcggtgttgctgtccctgttcgtgacatctgtcctgctctgcttcatcttcggccagcacttgcgccagcagcggatgggcacctacggggtgcgagcggcttggaggaggctgccccaggccttccggccatagcaaccatgagtggcatggccaccaccacggtggtcactggaactcagtgtgactcctcagggttgaggtccagccctggctgaaggactgtgacaggcagcagagacttgggacattgccttttctagcccgaatacaaacacctggactta

SEQ ID NO: 354651 - DNA, 1365 bp, Homo sapiens
gaagactgaataagccgtgaactgggcagctgtgacacgcgcaccttgtcaccttgtcaccaatttcctgcccgggatcccagagctacccttcttggagcccacagggtaaggttgagcttctcactttccctccaatgaagcatggcagcatgggaaggattttggcagtgtcgaggtctgagttttagtccgttcccctctctgggtctcagtttctcgctggcagcccttggctggtccctgcgagcccgtggagactgccagagatgtcctctttcggttacaggaccctgactgtggccctcttcaccctgatctgctgtccagacagggtctcggtctatcacccaggctggagtacagtggcatgatcatggctcactgcacctccctgggctcgggtgatcctcccacctcagcctcctgagtagctgggatcacaggatcggatgagaaggtattcgaggtacacgtgaggccaaagaagctggcggttgagcccaaagggtccctcgaggtcaactgcagcaccacctgtaaccagcctgaagtgggtggtctggagacctctctagataagattctgctggacgaacaggctcagtggaaacattacttggtctcaaacatctcccatgacacggtcctccaatgccacttcacctgctccgggaagcaggagtcaatgaattccaacgtcagcgtgtaccagcctccaaggcaggtcatcctgacactgcaacccactttggtggctgtgggcaagtccttcaccattgagtgcagggtgcccaccgtggagcccctggacagcctcaccctcttcctgttccgtggcaatgagactctgcactatgagaccttcgggaaggcagcccctgctccgcaggaggccacagccacattcaacagcacggctgacagagaggatggccaccgcaacttctcctgcctggctgtgctggacttgatgtctcgcggtggcaacatctttcacaaacactcagccccgaagatgttggagatctatgagcctgtgtcggacagccagatggtcatcatagtcacggtggtgtcggtgttgctgtccctgttcgtgacatctgtcctgctctgcttcatcttcggccagcacttgcgccagcagcggatgggcacctacggggtgcgagcggcttggaggaggctgccccaggccttccggccatagcaaccatgagtggcatggccaccaccacggtggtcactggaactcagtgtgactcctcagggttgaggtccagccctggctgaaggactgtgacaggcagcagagacttgggacattgccttttctagcccgaatacaaacacctggactta

SEQ ID NO: 354652 - DNA, 1299 bp, Homo sapiens
gaagactgaataagccgtgaactgggcagctgtgacacgcgcaccttgtcaccttgtcaccaatttcctgcccgggatcccagagctacccttcttggagcccacaggggcagcccttggctggtccctgcgagcccgtggagactgccagagatgtcctctttcggttacaggaccctgactgtggccctcttcaccctgatctgctgtccaggatcggatgagaaggtattcgaggtacacgtgaggccaaagaagctggcggttgagcccaaagggtccctcgaggtcaactgcagcaccacctgtaaccagcctgaagtgggtggtctggagacctctctagataagattctgctggacgaacaggctcagtggaaacattacttggtctcaaacatctcccatgacacggtcctccaatgccacttcacctgctccgggaagcaggagtcaatgaattccaacgtcagcgtgtaccttggctgtacaatttctgaaccttgtccttgtagacacctggtcaccggaaaccatcatgtctgtaaaactaccacacagtccagcctccatcctcaactgctgccctcttcctctctgcactggagccggccaggccacctcctccccaaccgtggaacaccatgagcctccaaggcaggtcatcctgacactgcaacccactttggtggctgtgggcaagtccttcaccattgagtgcagggtgcccaccgtggagcccctggacagcctcaccctcttcctgttccgtggcaatgagactctgcactatgagaccttcgggaaggcagcccctgctccgcaggaggccacagccacattcaacagcacggctgacagagaggatggccaccgcaacttctcctgcctggctgtgctggacttgatgtctcgcggtggcaacatctttcacaaacactcagccccgaagatgttggagatctatgagcctgtgtcggacagccagatggtcatcatagtcacggtggtgtcggtgttgctgtccctgttcgtgacatctgtcctgctctgcttcatcttcggccagcacttgcgccagcagcggatgggcacctacggggtgcgagcggcttggaggaggctgccccaggccttccggccatagcaaccatgagtggcatggccaccaccacggtggtcactggaactcagtgtgactcctcagggttgaggtccagccctggctgaaggactgtgacaggcagcagagacttgggacattgccttttctagcccgaatacaaacacctggactta

SEQ ID NO: 354653 - DNA, 1215 bp, Homo sapiens
gaagactgaataagccgtgaactgggcagctgtgacacgcgcaccttgtcaccttgtcaccaatttcctgcccgggatcccagagctacccttcttggagcccacaggggaataaagtgaaacacctcaggctccaaccctcccaacccaaggctccctcctggagggagagagaggatggaggacatcaggcagcccttggctggtccctgcgagcccgtggagactgccagagatgtcctctttcggttacaggaccctgactgtggccctcttcaccctgatctgctgtccaggatcggatgagaaggtattcgaggtacacgtgaggccaaagaagctggcggttgagcccaaagggtccctcgaggtcaactgcagcaccacctgtaaccagcctgaagtgggtggtctggagacctctctagataagattctgctggacgaacaggctcagtggaaacattacttggtctcaaacatctcccatgacacggtcctccaatgccacttcacctgctccgggaagcaggagtcaatgaattccaacgtcagcgtgtaccagcctccaaggcaggtcatcctgacactgcaacccactttggtggctgtgggcaagtccttcaccattgagtgcagggtgcccaccgtggagcccctggacagcctcaccctcttcctgttccgtggcaatgagactctgcactatgagaccttcgggaaggcagcccctgctccgcaggaggccacagccacattcaacagcacggctgacagagaggatggccaccgcaacttctcctgcctggctgtgctggacttgatgtctcgcggtggcaacatctttcacaaacactcagccccgaagatgttggagatctatgagcctgtgtcggacagccagatggtcatcatagtcacggtggtgtcggtgttgctgtccctgttcgtgacatctgtcctgctctgcttcatcttcggccagcacttgcgccagcagcggatgggcacctacggggtgcgagcggcttggaggaggctgccccaggccttccggccatagcaaccatgagtggcatggccaccccctcgcctgcctttgtcccccggcgtcagtcctgggccttttgttgctgcggcggtgggtgccctgttggctcccgctgagaatgtgagcactgccttctctagttcgaatacattcacttgtgtgtc

SEQ ID NO: 354654 - DNA, 252 bp, Homo sapiens
ggtagttaaacgtaacatacttacttaaaggaatccaaatctacttgaaaaacaaaacacaaacacgtttgtttcagactcagcctgtgggttgtcagttttcaaccccttgggttaaagaacaaagggcatgagaccatagtcaataacccccatctaccaggcagactgtcaaatcagctttttttaaaaaaatagccttactcttaaatatgagcagacaatcagatacctgaagaaaactgttaccat

SEQ ID NO: 354655 - DNA, 3296 bp, Homo sapiens
ggccggaccctgcgagaacgggtgggcgtgtgcccggtgggcgcgggaggggcccgggctgcacgagcgcgcgtgcgcgtcggaactggagccgcgggaggaggcgggagctgaggaggcggcggagggggcgggtcgcgtcgggcgccacgtccgcagccagaggcctccgcctccaccaccgccgccacagtcttccagctccacatcctgagaggacgcctctggagccgcgactgcccggggttgtgccggccgccgctgccgcccaggccgcctcagctctcctctgcgccggcccgctcactccgcccggccccagccctagcgctggccgcgaccccggcggagatcatgaatcagacagataaaaatcaacaagaaatcccatcataccttaatgatgaaccaccagaaggttcaatgaaagatcacccacagcagcagccaggcatgttgtcccgtgtgactgggggtatcttcagtgttacaaagggagctgttggtgccaccattggtggtgtggcttggattggtggaaagagtctggaagtgaccaaaacagctgttacaactgtgccttccatgggaatagggctggtgaaagggggtgtctctgctgtggctggaggtgttacagctgttgggtctgctgttgtaaacaaagtgcccttaacaggaaagaagaaagacaaatctgactgaaatatagagatacacttgcgctccacagcactgtaatgccagtggcattgaattgctaaattatggactacaaccaagtcaactgttttggacgtttatcttctaaactgctgtgttgaaagtattgatgactggctttcatctaaaaagaagagaccaatacgagcacagtatatgaaggtttctcatacttaagttccaggtttttatctggtaaaatgttacacttactcggttgtaactgaagatatggtatgtttgaatatttactataagtctttcagtttgactaaaaatgtgaaagttgaatttagtagatgatcttcacagttccatatgtataatgtgccaggtaactcacctgccccttaagaagggaaccttgaattacataagccgtacctttgatgtgcctaatagtttcagatgtcttagttttttataaccatagttgattaggccaagaggcattcatttcttatttaagctggcaaaattagcaggaattagagaagtttaaaaagataaatggttttatgataatgttaaccatcttttgttagtaaatatgcgttctattattttaatcattgatgccttacaaaagaaaacatcttttctaataccctgaatatgtgctgttcttagaatcatctatggattcttttaaaggttgtttgtgaaattagttttccctttttagaatctcaggagtagtggggtaaagacatttcctgctgtcagtggataagacagagcttgttaactgttttggcagtagttaaaatcaaattgtacacttctcagcctgggttcatgcttcatcattaatacacctcacagtgcctaaggaacatttacttactggtcagaaggtattttggaagagtttcatattaaggaggaacaaataataattttaagttcttaaaaattacctaaaacaccccaaatataaaaagaagccttcacacctattctgtctttaggatgtcttaaattattagcagtactccttttttaaaaacactgtaaaagtaaccacaaatatgtgaggacttactattttaaatggaatggaatgagctccatagattagttttgaatataaagtatataaaagtgcatcagtggtttatataggctttaaaaacatgttatcttacagtcctttaaagcagccatagagtttgtatcatttttcaagccaatttcagtcagggatttgaattgtttgattatggatgataaatgtgtcatatcttattaatatgtctcatgtctcgttccttcttaatatgatttagctggaattcattttcttttcgtttcatgtttaatttcataaaacgtttaacaattggcatatatacttggcattcctgtccaccaaggattgtaatccaagcctgggaaaatcttaaatttctttttacttaaatctggaaatttgtctccattctgccacctttttttttttttttttttatagtggaggggaggaaaggggggtgataccttgcagtaagtaagtcgaaatagcatgcctgaaaatttgaaacagaccattctaacacccaaggcttgtttataaaatacttgagaattacattaatgtggaatcaacagatgcagaagaatataacataacttttaaaagctttcataaataccagcagcaattgtaagcaaatctacaaaggttcttgaacctttctattatatacaaaactgaaaagtcattaaggagttcaactaatcaggaattaaatggtcatttatttcatgcagtatgatttaaggtatttcttgagattctggtcaaatgtcataatcagcaaacgggattaaaaaaaaaactccaaaatcactaaataattatctaaataatggtattggagaacttgtttcctgctatttggaagagattgttgcttcattgctagtttgtatttctaacttctacagttatagactccactgtgctttgtgtctgaatttctcagtatagacattttgtttactgtatgcttgcatatttattttcaactttgcctgtctttaaaattgcttgaggaaaaatggttgtaattaatttctgctacagaaaagccacctggtacgttttgtctcatcaggattgttttaaattctaaactataagtttgttcagaggggcttttgcaatgatagcagaaaactgtacaaatgtacagttagttatagaggttcttgttgaaatgaacttaccatctgatgatatgtatgtacagctgtgtacttgagtcttttttagtttacttagaaagactagcagtttgacctgttaaacaggactagttcaagtcaagaaactaaggttgttgtatacacctggaggcatctgttattcagcttatcctttgagtgggtatttggcacaatgaggataaacttatgtgacccacttgaatggctgatctaataatgttgacattatgcattctgtacttagtgaaatgtcagatgaaaataactgatgaataatttttttgtattaaagggatgggaaaagaacacatgaatttgttaataaagcactatgatctgca

SEQ ID NO: 354656 - DNA, 438 bp, Homo sapiens
ttttctaaaaagctccatttatttcaaatgtatataaattagataattttgaattagaacactttatagagaggttttcataaatgtccccgaatttgttgttagtacttattccttttggcctgtcaggtaggggtgacttctcttatgccaattcataagtaatccttccagttcacaaggtttaaacagaagtcagagcccagttaataaacccagactctgccatttggcagctgagtggcctctcagcttcagtttcctcatgtgtaaaatgaggaaagtaatgaatgcacatggtgttttataagagttataataatggtcaattctaagcaaactgaccacacaagtaggctccaactcttctttttggatgagtaatacttgattctcaaagacagtaatttattccaaacacaagatgaaattttctcc

SEQ ID NO: 354657 - DNA, 3030 bp, Homo sapiens
aatgtgtttgtatgtttttttttttaggagatcatgaatcagacagataaaaatcaacaagaaatcccatcataccttaatgatgaaccaccagaaggttcaatgaaagatcacccacagcagcagccaggcatgttgtcccgtgtgactgggggtatcttcagtgttacaaagggagctgttggtgccaccattggtggtgtggcttggattggtggaaagagtctggaagtgaccaaaacagctgttacaactgtgccttccatgggaatagggctggtgaaagggggtgtctctgctgtggctggaggtgttacagctgttgggtctgctgttgtaaacaaagtgcccttaacaggaaagaagaaagacaaatctgactgaaatatagagatacacttgcgctccacagcactgtaatgccagtggcattgaattgctaaattatggactacaaccaagtcaactgttttggacgtttatcttctaaactgctgtgttgaaagtattgatgactggctttcatctaaaaagaagagaccaatacgagcacagtatatgaaggtttctcatacttaagttccaggtttttatctggtaaaatgttacacttactcggttgtaactgaagatatggtatgtttgaatatttactataagtctttcagtttgactaaaaatgtgaaagttgaatttagtagatgatcttcacagttccatatgtataatgtgccaggtaactcacctgccccttaagaagggaaccttgaattacataagccgtacctttgatgtgcctaatagtttcagatgtcttagttttttataaccatagttgattaggccaagaggcattcatttcttatttaagctggcaaaattagcaggaattagagaagtttaaaaagataaatggttttatgataatgttaaccatcttttgttagtaaatatgcgttctattattttaatcattgatgccttacaaaagaaaacatcttttctaataccctgaatatgtgctgttcttagaatcatctatggattcttttaaaggttgtttgtgaaattagttttccctttttagaatctcaggagtagtggggtaaagacatttcctgctgtcagtggataagacagagcttgttaactgttttggcagtagttaaaatcaaattgtacacttctcagcctgggttcatgcttcatcattaatacacctcacagtgcctaaggaacatttacttactggtcagaaggtattttggaagagtttcatattaaggaggaacaaataataattttaagttcttaaaaattacctaaaacaccccaaatataaaaagaagccttcacacctattctgtctttaggatgtcttaaattattagcagtactccttttttaaaaacactgtaaaagtaaccacaaatatgtgaggacttactattttaaatggaatggaatgagctccatagattagttttgaatataaagtatataaaagtgcatcagtggtttatataggctttaaaaacatgttatcttacagtcctttaaagcagccatagagtttgtatcatttttcaagccaatttcagtcagggatttgaattgtttgattatggatgataaatgtgtcatatcttattaatatgtctcatgtctcgttccttcttaatatgatttagctggaattcattttcttttcgtttcatgtttaatttcataaaacgtttaacaattggcatatatacttggcattcctgtccaccaaggattgtaatccaagcctgggaaaatcttaaatttctttttacttaaatctggaaatttgtctccattctgccacctttttttttttttttttttatagtggaggggaggaaaggggggtgataccttgcagtaagtaagtcgaaatagcatgcctgaaaatttgaaacagaccattctaacacccaaggcttgtttataaaatacttgagaattacattaatgtggaatcaacagatgcagaagaatataacataacttttaaaagctttcataaataccagcagcaattgtaagcaaatctacaaaggttcttgaacctttctattatatacaaaactgaaaagtcattaaggagttcaactaatcaggaattaaatggtcatttatttcatgcagtatgatttaaggtatttcttgagattctggtcaaatgtcataatcagcaaacgggattaaaaaaaaaactccaaaatcactaaataattatctaaataatggtattggagaacttgtttcctgctatttggaagagattgttgcttcattgctagtttgtatttctaacttctacagttatagactccactgtgctttgtgtctgaatttctcagtatagacattttgtttactgtatgcttgcatatttattttcaactttgcctgtctttaaaattgcttgaggaaaaatggttgtaattaatttctgctacagaaaagccacctggtacgttttgtctcatcaggattgttttaaattctaaactataagtttgttcagaggggcttttgcaatgatagcagaaaactgtacaaatgtacagttagttatagaggttcttgttgaaatgaacttaccatctgatgatatgtatgtacagctgtgtacttgagtcttttttagtttacttagaaagactagcagtttgacctgttaaacaggactagttcaagtcaagaaactaaggttgttgtatacacctggaggcatctgttattcagcttatcctttgagtgggtatttggcacaatgaggataaacttatgtgacccacttgaatggctgatctaataatgttgacattatgcattctgtacttagtgaaatgtcagatgaaaataactgatgaataatttttttgtattaaagggatgggaaaagaacacatgaatttgttaataaagcactatgatctgcaaacgatggaatgtttcataaagatctaaagaaataaaggaaactttaaaacagag

SEQ ID NO: 354658 - DNA, 3351 bp, Homo sapiens
ggccggaccctgcgagaacgggtgggcgtgtgcccggtgggcgcgggaggggcccgggctgcacgagcgcgcgtgcgcgtcggaactggagccgcgggaggaggcgggagctgaggaggcggcggagggggcgggtcgcgtcgggcgccacgtccgcagccagaggcctccgcctccaccaccgccgccacagtcttccagctccacatcctgagaggacgcctctggagccgcgactgcccggggttgtgccggccgccgctgccgcccaggccgcctcagctctcctctgcgccggcccgctcactccgcccggccccagccctagcgctggccgcgaccccggcggagatcatgaatcagacagataaaaatcaacaagaaatcccatcataccttaatgatgaaccaccagaaggttcaatgaaagatcacccacagcagcagccaggcatgttgtcccgtgtgactgggggtatcttcagtgttacaaagggagctgttggtgccaccattggtggtgtggcttggattggtggaaagagtctggaagtgaccaaaacagctgttacaactgtgccttccatgggaatagggctggtgaaagggggtgtctctgctgtggctggaggtgttacagctgttgggtctgctgttgtaaacaaagtgcccttaacaggaaagaagaaagacaaatctgactgaaatatagagatacacttgcgctccacagcactgtaatgccagtggcattgaattgctaaattatggactacaaccaagtcaactgttttggacgtttatcttctaaactgctgtgttgaaagtattgatgactggctttcatctaaaaagaagagaccaatacgagcacagtatatgaaggtttctcatacttaagttccaggtttttatctggtaaaatgttacacttactcggttgtaactgaagatatggtatgtttgaatatttactataagtctttcagtttgactaaaaatgtgaaagttgaatttagtagatgatcttcacagttccatatgtataatgtgccaggtaactcacctgccccttaagaagggaaccttgaattacataagccgtacctttgatgtgcctaatagtttcagatgtcttagttttttataaccatagttgattaggccaagaggcattcatttcttatttaagctggcaaaattagcaggaattagagaagtttaaaaagataaatggttttatgataatgttaaccatcttttgttagtaaatatgcgttctattattttaatcattgatgccttacaaaagaaaacatcttttctaataccctgaatatgtgctgttcttagaatcatctatggattcttttaaaggttgtttgtgaaattagttttccctttttagaatctcaggagtagtggggtaaagacatttcctgctgtcagtggataagacagagcttgttaactgttttggcagtagttaaaatcaaattgtacacttctcagcctgggttcatgcttcatcattaatacacctcacagtgcctaaggaacatttacttactggtcagaaggtattttggaagagtttcatattaaggaggaacaaataataattttaagttcttaaaaattacctaaaacaccccaaatataaaaagaagccttcacacctattctgtctttaggatgtcttaaattattagcagtactccttttttaaaaacactgtaaaagtaaccacaaatatgtgaggacttactattttaaatggaatggaatgagctccatagattagttttgaatataaagtatataaaagtgcatcagtggtttatataggctttaaaaacatgttatcttacagtcctttaaagcagccatagagtttgtatcatttttcaagccaatttcagtcagggatttgaattgtttgattatggatgataaatgtgtcatatcttattaatatgtctcatgtctcgttccttcttaatatgatttagctggaattcattttcttttcgtttcatgtttaatttcataaaacgtttaacaattggcatatatacttggcattcctgtccaccaaggattgtaatccaagcctgggaaaatcttaaatttctttttacttaaatctggaaatttgtctccattctgccacctttttttttttttttttttatagtggaggggaggaaaggggggtgataccttgcagtaagtaagtcgaaatagcatgcctgaaaatttgaaacagaccattctaacacccaaggcttgtttataaaatacttgagaattacattaatgtggaatcaacagatgcagaagaatataacataacttttaaaagctttcataaataccagcagcaattgtaagcaaatctacaaaggttcttgaacctttctattatatacaaaactgaaaagtcattaaggagttcaactaatcaggaattaaatggtcatttatttcatgcagtatgatttaaggtatttcttgagattctggtcaaatgtcataatcagcaaacgggattaaaaaaaaaactccaaaatcactaaataattatctaaataatggtattggagaacttgtttcctgctatttggaagagattgttgcttcattgctagtttgtatttctaacttctacagttatagactccactgtgctttgtgtctgaatttctcagtatagacattttgtttactgtatgcttgcatatttattttcaactttgcctgtctttaaaattgcttgaggaaaaatggttgtaattaatttctgctacagaaaagccacctggtacgttttgtctcatcaggattgttttaaattctaaactataagtttgttcagaggggcttttgcaatgatagcagaaaactgtacaaatgtacagttagttatagaggttcttgttgaaatgaacttaccatctgatgatatgtatgtacagctgtgtacttgagtcttttttagtttacttagaaagactagcagtttgacctgttaaacaggactagttcaagtcaagaaactaaggttgttgtatacacctggaggcatctgttattcagcttatcctttgagtgggtatttggcacaatgaggataaacttatgtgacccacttgaatggctgatctaataatgttgacattatgcattctgtacttagtgaaatgtcagatgaaaataactgatgaataatttttttgtattaaagggatgggaaaagaacacatgaatttgttaataaagcactatgatctgcaaacgatggaatgtttcataaagatctaaagaaataaaggaaactttaaaacagag

SEQ ID NO: 354659 - DNA, 3517 bp, Homo sapiens
ggccggaccctgcgagaacgggtgggcgtgtgcccggtgggcgcgggaggggcccgggctgcacgagcgcgcgtgcgcgtcggaactggagccgcgggaggaggcgggagctgaggaggcggcggagggggcgggtcgcgtcgggcgccacgtccgcagccagaggcctccgcctccaccaccgccgccacagtcttccagctccacatcctgagaggacgcctctggagccgcgactgcccggggttgtgccggccgccgctgccgcccaggccgcctcagctctcctctgcgccggcccgctcactccgcccggccccagccctagcgctggccgcgaccccggcgcctttgaaacttctgctggtgtgagtgccctcaggggttccccaggaatatcgatacaacaccaacaggctggagtgcagtggcttgatctccactcactgcaacatccgtctcccaggttcaagagattttcctgcctcagcctccctggtagctgggattacaggagatcatgaatcagacagataaaaatcaacaagaaatcccatcataccttaatgatgaaccaccagaaggttcaatgaaagatcacccacagcagcagccaggcatgttgtcccgtgtgactgggggtatcttcagtgttacaaagggagctgttggtgccaccattggtggtgtggcttggattggtggaaagagtctggaagtgaccaaaacagctgttacaactgtgccttccatgggaatagggctggtgaaagggggtgtctctgctgtggctggaggtgttacagctgttgggtctgctgttgtaaacaaagtgcccttaacaggaaagaagaaagacaaatctgactgaaatatagagatacacttgcgctccacagcactgtaatgccagtggcattgaattgctaaattatggactacaaccaagtcaactgttttggacgtttatcttctaaactgctgtgttgaaagtattgatgactggctttcatctaaaaagaagagaccaatacgagcacagtatatgaaggtttctcatacttaagttccaggtttttatctggtaaaatgttacacttactcggttgtaactgaagatatggtatgtttgaatatttactataagtctttcagtttgactaaaaatgtgaaagttgaatttagtagatgatcttcacagttccatatgtataatgtgccaggtaactcacctgccccttaagaagggaaccttgaattacataagccgtacctttgatgtgcctaatagtttcagatgtcttagttttttataaccatagttgattaggccaagaggcattcatttcttatttaagctggcaaaattagcaggaattagagaagtttaaaaagataaatggttttatgataatgttaaccatcttttgttagtaaatatgcgttctattattttaatcattgatgccttacaaaagaaaacatcttttctaataccctgaatatgtgctgttcttagaatcatctatggattcttttaaaggttgtttgtgaaattagttttccctttttagaatctcaggagtagtggggtaaagacatttcctgctgtcagtggataagacagagcttgttaactgttttggcagtagttaaaatcaaattgtacacttctcagcctgggttcatgcttcatcattaatacacctcacagtgcctaaggaacatttacttactggtcagaaggtattttggaagagtttcatattaaggaggaacaaataataattttaagttcttaaaaattacctaaaacaccccaaatataaaaagaagccttcacacctattctgtctttaggatgtcttaaattattagcagtactccttttttaaaaacactgtaaaagtaaccacaaatatgtgaggacttactattttaaatggaatggaatgagctccatagattagttttgaatataaagtatataaaagtgcatcagtggtttatataggctttaaaaacatgttatcttacagtcctttaaagcagccatagagtttgtatcatttttcaagccaatttcagtcagggatttgaattgtttgattatggatgataaatgtgtcatatcttattaatatgtctcatgtctcgttccttcttaatatgatttagctggaattcattttcttttcgtttcatgtttaatttcataaaacgtttaacaattggcatatatacttggcattcctgtccaccaaggattgtaatccaagcctgggaaaatcttaaatttctttttacttaaatctggaaatttgtctccattctgccacctttttttttttttttttttatagtggaggggaggaaaggggggtgataccttgcagtaagtaagtcgaaatagcatgcctgaaaatttgaaacagaccattctaacacccaaggcttgtttataaaatacttgagaattacattaatgtggaatcaacagatgcagaagaatataacataacttttaaaagctttcataaataccagcagcaattgtaagcaaatctacaaaggttcttgaacctttctattatatacaaaactgaaaagtcattaaggagttcaactaatcaggaattaaatggtcatttatttcatgcagtatgatttaaggtatttcttgagattctggtcaaatgtcataatcagcaaacgggattaaaaaaaaaactccaaaatcactaaataattatctaaataatggtattggagaacttgtttcctgctatttggaagagattgttgcttcattgctagtttgtatttctaacttctacagttatagactccactgtgctttgtgtctgaatttctcagtatagacattttgtttactgtatgcttgcatatttattttcaactttgcctgtctttaaaattgcttgaggaaaaatggttgtaattaatttctgctacagaaaagccacctggtacgttttgtctcatcaggattgttttaaattctaaactataagtttgttcagaggggcttttgcaatgatagcagaaaactgtacaaatgtacagttagttatagaggttcttgttgaaatgaacttaccatctgatgatatgtatgtacagctgtgtacttgagtcttttttagtttacttagaaagactagcagtttgacctgttaaacaggactagttcaagtcaagaaactaaggttgttgtatacacctggaggcatctgttattcagcttatcctttgagtgggtatttggcacaatgaggataaacttatgtgacccacttgaatggctgatctaataatgttgacattatgcattctgtacttagtgaaatgtcagatgaaaataactgatgaataatttttttgtattaaagggatgggaaaagaacacatgaatttgttaataaagcactatgatctgcaaacgatggaatgtttcataaagatctaaagaaataaaggaaactttaaaacagag

SEQ ID NO: 354660 - DNA, 2983 bp, Homo sapiens
gcagatcatgaggtcaggagatcgagaccatcctggccaacatggtgaaaccccgtctctactaaaaatataaaaattaccaggcatgttgtcccgtgtgactgggggtatcttcagtgttacaaagggagctgttggtgccaccattggtggtgtggcttggattggtggaaagagtctggaagtgaccaaaacagctgttacaactgtgccttccatgggaatagggctggtgaaagggggtgtctctgctgtggctggaggtgttacagctgttgggtctgctgttgtaaacaaagtgcccttaacaggaaagaagaaagacaaatctgactgaaatatagagatacacttgcgctccacagcactgtaatgccagtggcattgaattgctaaattatggactacaaccaagtcaactgttttggacgtttatcttctaaactgctgtgttgaaagtattgatgactggctttcatctaaaaagaagagaccaatacgagcacagtatatgaaggtttctcatacttaagttccaggtttttatctggtaaaatgttacacttactcggttgtaactgaagatatggtatgtttgaatatttactataagtctttcagtttgactaaaaatgtgaaagttgaatttagtagatgatcttcacagttccatatgtataatgtgccaggtaactcacctgccccttaagaagggaaccttgaattacataagccgtacctttgatgtgcctaatagtttcagatgtcttagttttttataaccatagttgattaggccaagaggcattcatttcttatttaagctggcaaaattagcaggaattagagaagtttaaaaagataaatggttttatgataatgttaaccatcttttgttagtaaatatgcgttctattattttaatcattgatgccttacaaaagaaaacatcttttctaataccctgaatatgtgctgttcttagaatcatctatggattcttttaaaggttgtttgtgaaattagttttccctttttagaatctcaggagtagtggggtaaagacatttcctgctgtcagtggataagacagagcttgttaactgttttggcagtagttaaaatcaaattgtacacttctcagcctgggttcatgcttcatcattaatacacctcacagtgcctaaggaacatttacttactggtcagaaggtattttggaagagtttcatattaaggaggaacaaataataattttaagttcttaaaaattacctaaaacaccccaaatataaaaagaagccttcacacctattctgtctttaggatgtcttaaattattagcagtactccttttttaaaaacactgtaaaagtaaccacaaatatgtgaggacttactattttaaatggaatggaatgagctccatagattagttttgaatataaagtatataaaagtgcatcagtggtttatataggctttaaaaacatgttatcttacagtcctttaaagcagccatagagtttgtatcatttttcaagccaatttcagtcagggatttgaattgtttgattatggatgataaatgtgtcatatcttattaatatgtctcatgtctcgttccttcttaatatgatttagctggaattcattttcttttcgtttcatgtttaatttcataaaacgtttaacaattggcatatatacttggcattcctgtccaccaaggattgtaatccaagcctgggaaaatcttaaatttctttttacttaaatctggaaatttgtctccattctgccacctttttttttttttttttttatagtggaggggaggaaaggggggtgataccttgcagtaagtaagtcgaaatagcatgcctgaaaatttgaaacagaccattctaacacccaaggcttgtttataaaatacttgagaattacattaatgtggaatcaacagatgcagaagaatataacataacttttaaaagctttcataaataccagcagcaattgtaagcaaatctacaaaggttcttgaacctttctattatatacaaaactgaaaagtcattaaggagttcaactaatcaggaattaaatggtcatttatttcatgcagtatgatttaaggtatttcttgagattctggtcaaatgtcataatcagcaaacgggattaaaaaaaaaactccaaaatcactaaataattatctaaataatggtattggagaacttgtttcctgctatttggaagagattgttgcttcattgctagtttgtatttctaacttctacagttatagactccactgtgctttgtgtctgaatttctcagtatagacattttgtttactgtatgcttgcatatttattttcaactttgcctgtctttaaaattgcttgaggaaaaatggttgtaattaatttctgctacagaaaagccacctggtacgttttgtctcatcaggattgttttaaattctaaactataagtttgttcagaggggcttttgcaatgatagcagaaaactgtacaaatgtacagttagttatagaggttcttgttgaaatgaacttaccatctgatgatatgtatgtacagctgtgtacttgagtcttttttagtttacttagaaagactagcagtttgacctgttaaacaggactagttcaagtcaagaaactaaggttgttgtatacacctggaggcatctgttattcagcttatcctttgagtgggtatttggcacaatgaggataaacttatgtgacccacttgaatggctgatctaataatgttgacattatgcattctgtacttagtgaaatgtcagatgaaaataactgatgaataatttttttgtattaaagggatgggaaaagaacacatgaatttgttaataaagcactatgatctgcaaacgatggaatgtttcataaagatctaaagaaataaaggaaactttaaaacagag

SEQ ID NO: 354661 - DNA, 1910 bp, Homo sapiens
ggccggaccctgcgagaacgggtgggcgtgtgcccggtgggcgcgggaggggcccgggctgcacgagcgcgcgtgcgcgtcggaactggagccgcgggaggaggcgggagctgaggaggcggcggagggggcgggtcgcgtcgggcgccacgtccgcagccagaggcctccgcctccaccaccgccgccacagtcttccagctccacatcctgagaggacgcctctggagccgcgactgcccggggttgtgccggccgccgctgccgcccaggccgcctcagctctcctctgcgccggcccgctcactccgcccggccccagccctagcgctggccgcgaccccggcgcctttgaaacttctgctggtgtgagtgccctcaggggttccccaggaatatcgatacaacaccaacaggagatcatgaatcagacagataaaaatcaacaagaaatcccatcataccttaatgatgaaccaccagaaggttcaatgaaagatcacccacagcagcagccaggcatgttgtcccgtgtgactgggggtatcttcagtgttacaaagggagctgttggtgccaccattggtggtgtggcttggattggtggaaagagtctggaagtgaccaaaacagctgttacaactgtgccttccatgggaatagggctggtgaaagggggtgtctctgctgtggctggaggtgttacagctgttgggtctgctgttgtaaacaaagtgcccttaacaggaaagaagaaagacaaatctgactgaaatatagagatacacttgcgctccacagcactgtaatgccagtggcattgaattgctaaattatggactacaaccaagtcaactgttttggacgtttatcttctaaactgctgtgttgaaagtattgatgactggctttcatctaaaaagaagagaccaatacgagcacagtatatgaaggtttctcatacttaagttccaggtttttatctggtaaaatgttacacttactcggttgtaactgaagatatggaagatctgagttagaatgtatgaatggaaaaaaaaggcaaagcagaacaatttcagaggttcaagagccaaaagcaatggaatggaccctaagggaaaataaaatggacctgtgctgcctctttcctcttgtgccactctcccaatcactcaaccctgctccaactgtactggctgctattcttcttgaacaaaccttcctgcatgaccttggaccaactgccagagttttctctgggtgttaacagcggttggactacagacaattgcttccgggcagcgttccaaaatactggctacagcagtctcatcggcacctagttcttgtaaaatattcgcaatttcttcaacataggtttcatcctctaaaagtacccatccttttaatctacgaattttcctaatgtcaactgaacatttatagagcttttccactgttcttgtattttctttgctcgactgtttatcagttgtataggtgaagcatgctaagaaaggtctgtattttggaggtgatcgcatctttctgaaagaacacagcctgcaggactgggatctcagcagcagcttccacaacatggctgcaatctactagctagtttccaccgtcctgggacttaaatggactcattctatcttacagtctctccccacagatcttgtcctcatccagatattcagttcatccacttgggattctttccaacttcttctcaaaatgtgatcttgtcagttccccgtcggcgtcagctccaagcaaggcacagggagtcccgggggccaggccccgtccttccctctctctccggccagcctccccacagtccgcagtccccgaggcctggagccgggatttcggtcctcggtctcaagaagctcccgaca

SEQ ID NO: 354662 - DNA, 860 bp, Homo sapiens
ggacaagaagcataaactgaaaactccaagcgtttcctatcacacttcaaatgagattctgctccttagatggacctgtgctgcctctttcctcttgtgccactctcccaatcactcaaccctgctccaactgtactggctgctattcttcttgaacaaaccttcctgcatgaccttgggtaagtgacttaccctgagtctcctcatccatagaagagtgaacaatggtactttagaatcgtaaagcacttatatacagagctccctataggaagtgaacagatttggatagtaagggttacttgcatttgctgaaggagtgaagagtgaggatactgcctgcattttccataattttttcattatacttaagccatgtacaaatagtgcacagatgttgtcagtcaattgtttggctgtgcatttgttacaaagttcagacttcacagctgaaagtgagtcagttctttatctgggtatgtttatcttggaacaaggttcagaaatggaaacttgaaacaccacccctaaaattagtactaaccatcacccactttcccttacaggcagacctggatcttcagaaagttttctaaaaagctccatttatttcaaatgtatataaattagataattttgaattagaacactttatagagaggttttcataaatgtccccgaatttgttgttagtacttattccttttggcctgtcaggtaggggtgacttctcttatgccaattcataagtaatccttccagttcacaaggtttaaacagaagtcagagcccagttaataaacccagactctgccatttggcagctgagtggcctctcagcttcagtttcctcatgtgta

SEQ ID NO: 354663 - DNA, 3364 bp, Homo sapiens
ggccggaccctgcgagaacgggtgggcgtgtgcccggtgggcgcgggaggggcccgggctgcacgagcgcgcgtgcgcgtcggaactggagccgcgggaggaggcgggagctgaggaggcggcggagggggcgggtcgcgtcgggcgccacgtccgcagccagaggcctccgcctccaccaccgccgccacagtcttccagctccacatcctgagaggacgcctctggagccgcgactgcccggggttgtgccggccgccgctgccgcccaggccgcctcagctctcctctgcgccggcccgctcactccgcccggccccagccctagcgctggccgcgaccccggcgcctttgaaacttctgctggtgtgagtgccctcaggggttccccaggaatatcgatacaacaccaacaggagatcatgaatcagacagataaaaatcaacaagaaatcccatcataccttaatgatgaaccaccagaaggttcaatgaaagatcacccacagcagcagccaggcatgttgtcccgtgtgactgggggtatcttcagtgttacaaagggagctgttggtgccaccattggtggtgtggcttggattggtggaaagagtctggaagtgaccaaaacagctgttacaactgtgccttccatgggaatagggctggtgaaagggggtgtctctgctgtggctggaggtgttacagctgttgggtctgctgttgtaaacaaagtgcccttaacaggaaagaagaaagacaaatctgactgaaatatagagatacacttgcgctccacagcactgtaatgccagtggcattgaattgctaaattatggactacaaccaagtcaactgttttggacgtttatcttctaaactgctgtgttgaaagtattgatgactggctttcatctaaaaagaagagaccaatacgagcacagtatatgaaggtttctcatacttaagttccaggtttttatctggtaaaatgttacacttactcggttgtaactgaagatatggtatgtttgaatatttactataagtctttcagtttgactaaaaatgtgaaagttgaatttagtagatgatcttcacagttccatatgtataatgtgccaggtaactcacctgccccttaagaagggaaccttgaattacataagccgtacctttgatgtgcctaatagtttcagatgtcttagttttttataaccatagttgattaggccaagaggcattcatttcttatttaagctggcaaaattagcaggaattagagaagtttaaaaagataaatggttttatgataatgttaaccatcttttgttagtaaatatgcgttctattattttaatcattgatgccttacaaaagaaaacatcttttctaataccctgaatatgtgctgttcttagaatcatctatggattcttttaaaggttgtttgtgaaattagttttccctttttagaatctcaggagtagtggggtaaagacatttcctgctgtcagtggataagacagagcttgttaactgttttggcagtagttaaaatcaaattgtacacttctcagcctgggttcatgcttcatcattaatacacctcacagtgcctaaggaacatttacttactggtcagaaggtattttggaagagtttcatattaaggaggaacaaataataattttaagttcttaaaaattacctaaaacaccccaaatataaaaagaagccttcacacctattctgtctttaggatgtcttaaattattagcagtactccttttttaaaaacactgtaaaagtaaccacaaatatgtgaggacttactattttaaatggaatggaatgagctccatagattagttttgaatataaagtatataaaagtgcatcagtggtttatataggctttaaaaacatgttatcttacagtcctttaaagcagccatagagtttgtatcatttttcaagccaatttcagtcagggatttgaattgtttgattatggatgataaatgtgtcatatcttattaatatgtctcatgtctcgttccttcttaatatgatttagctggaattcattttcttttcgtttcatgtttaatttcataaaacgtttaacaattggcatatatacttggcattcctgtccaccaaggattgtaatccaagcctgggaaaatcttaaatttctttttacttaaatctggaaatttgtctccattctgccacctttttttttttttttttttatagtggaggggaggaaaggggggtgataccttgcagtaagtaagtcgaaatagcatgcctgaaaatttgaaacagaccattctaacacccaaggcttgtttataaaatacttgagaattacattaatgtggaatcaacagatgcagaagaatataacataacttttaaaagctttcataaataccagcagcaattgtaagcaaatctacaaaggttcttgaacctttctattatatacaaaactgaaaagtcattaaggagttcaactaatcaggaattaaatggtcatttatttcatgcagtatgatttaaggtatttcttgagattctggtcaaatgtcataatcagcaaacgggattaaaaaaaaaactccaaaatcactaaataattatctaaataatggtattggagaacttgtttcctgctatttggaagagattgttgcttcattgctagtttgtatttctaacttctacagttatagactccactgtgctttgtgtctgaatttctcagtatagacattttgtttactgtatgcttgcatatttattttcaactttgcctgtctttaaaattgcttgaggaaaaatggttgtaattaatttctgctacagaaaagccacctggtacgttttgtctcatcaggattgttttaaattctaaactataagtttgttcagaggggcttttgcaatgatagcagaaaactgtacaaatgtacagttagttatagaggttcttgttgaaatgaacttaccatctgatgatatgtatgtacagctgtgtacttgagtcttttttagtttacttagaaagactagcagtttgacctgttaaacaggactagttcaagtcaagaaactaaggttgttgtatacacctggaggcatctgttattcagcttatcctttgagtgggtatttggcacaatgaggataaacttatgtgacccacttgaatggctgatctaataatgttgacattatgcattctgtacttagtgaaatgtcagatgaaaataactgatgaataatttttttgtattaaagggatgggaaaagaacacatgaatttgttaataaagcactatgatctgca

SEQ ID NO: 354664 - DNA, 3419 bp, Homo sapiens
ggccggaccctgcgagaacgggtgggcgtgtgcccggtgggcgcgggaggggcccgggctgcacgagcgcgcgtgcgcgtcggaactggagccgcgggaggaggcgggagctgaggaggcggcggagggggcgggtcgcgtcgggcgccacgtccgcagccagaggcctccgcctccaccaccgccgccacagtcttccagctccacatcctgagaggacgcctctggagccgcgactgcccggggttgtgccggccgccgctgccgcccaggccgcctcagctctcctctgcgccggcccgctcactccgcccggccccagccctagcgctggccgcgaccccggcgcctttgaaacttctgctggtgtgagtgccctcaggggttccccaggaatatcgatacaacaccaacaggagatcatgaatcagacagataaaaatcaacaagaaatcccatcataccttaatgatgaaccaccagaaggttcaatgaaagatcacccacagcagcagccaggcatgttgtcccgtgtgactgggggtatcttcagtgttacaaagggagctgttggtgccaccattggtggtgtggcttggattggtggaaagagtctggaagtgaccaaaacagctgttacaactgtgccttccatgggaatagggctggtgaaagggggtgtctctgctgtggctggaggtgttacagctgttgggtctgctgttgtaaacaaagtgcccttaacaggaaagaagaaagacaaatctgactgaaatatagagatacacttgcgctccacagcactgtaatgccagtggcattgaattgctaaattatggactacaaccaagtcaactgttttggacgtttatcttctaaactgctgtgttgaaagtattgatgactggctttcatctaaaaagaagagaccaatacgagcacagtatatgaaggtttctcatacttaagttccaggtttttatctggtaaaatgttacacttactcggttgtaactgaagatatggtatgtttgaatatttactataagtctttcagtttgactaaaaatgtgaaagttgaatttagtagatgatcttcacagttccatatgtataatgtgccaggtaactcacctgccccttaagaagggaaccttgaattacataagccgtacctttgatgtgcctaatagtttcagatgtcttagttttttataaccatagttgattaggccaagaggcattcatttcttatttaagctggcaaaattagcaggaattagagaagtttaaaaagataaatggttttatgataatgttaaccatcttttgttagtaaatatgcgttctattattttaatcattgatgccttacaaaagaaaacatcttttctaataccctgaatatgtgctgttcttagaatcatctatggattcttttaaaggttgtttgtgaaattagttttccctttttagaatctcaggagtagtggggtaaagacatttcctgctgtcagtggataagacagagcttgttaactgttttggcagtagttaaaatcaaattgtacacttctcagcctgggttcatgcttcatcattaatacacctcacagtgcctaaggaacatttacttactggtcagaaggtattttggaagagtttcatattaaggaggaacaaataataattttaagttcttaaaaattacctaaaacaccccaaatataaaaagaagccttcacacctattctgtctttaggatgtcttaaattattagcagtactccttttttaaaaacactgtaaaagtaaccacaaatatgtgaggacttactattttaaatggaatggaatgagctccatagattagttttgaatataaagtatataaaagtgcatcagtggtttatataggctttaaaaacatgttatcttacagtcctttaaagcagccatagagtttgtatcatttttcaagccaatttcagtcagggatttgaattgtttgattatggatgataaatgtgtcatatcttattaatatgtctcatgtctcgttccttcttaatatgatttagctggaattcattttcttttcgtttcatgtttaatttcataaaacgtttaacaattggcatatatacttggcattcctgtccaccaaggattgtaatccaagcctgggaaaatcttaaatttctttttacttaaatctggaaatttgtctccattctgccacctttttttttttttttttttatagtggaggggaggaaaggggggtgataccttgcagtaagtaagtcgaaatagcatgcctgaaaatttgaaacagaccattctaacacccaaggcttgtttataaaatacttgagaattacattaatgtggaatcaacagatgcagaagaatataacataacttttaaaagctttcataaataccagcagcaattgtaagcaaatctacaaaggttcttgaacctttctattatatacaaaactgaaaagtcattaaggagttcaactaatcaggaattaaatggtcatttatttcatgcagtatgatttaaggtatttcttgagattctggtcaaatgtcataatcagcaaacgggattaaaaaaaaaactccaaaatcactaaataattatctaaataatggtattggagaacttgtttcctgctatttggaagagattgttgcttcattgctagtttgtatttctaacttctacagttatagactccactgtgctttgtgtctgaatttctcagtatagacattttgtttactgtatgcttgcatatttattttcaactttgcctgtctttaaaattgcttgaggaaaaatggttgtaattaatttctgctacagaaaagccacctggtacgttttgtctcatcaggattgttttaaattctaaactataagtttgttcagaggggcttttgcaatgatagcagaaaactgtacaaatgtacagttagttatagaggttcttgttgaaatgaacttaccatctgatgatatgtatgtacagctgtgtacttgagtcttttttagtttacttagaaagactagcagtttgacctgttaaacaggactagttcaagtcaagaaactaaggttgttgtatacacctggaggcatctgttattcagcttatcctttgagtgggtatttggcacaatgaggataaacttatgtgacccacttgaatggctgatctaataatgttgacattatgcattctgtacttagtgaaatgtcagatgaaaataactgatgaataatttttttgtattaaagggatgggaaaagaacacatgaatttgttaataaagcactatgatctgcaaacgatggaatgtttcataaagatctaaagaaataaaggaaactttaaaacagag

SEQ ID NO: 354665 - DNA, 3130 bp, Homo sapiens
gctaattccaaatgaaaatatttgctatatgtgattatttgctgtatgctattgtttagcctttgaaacttctgctggtgtgagtgccctcaggggttccccaggaatatcgatacaacaccaacaggagatcatgaatcagacagataaaaatcaacaagaaatcccatcataccttaatgatgaaccaccagaaggttcaatgaaagatcacccacagcagcagccaggcatgttgtcccgtgtgactgggggtatcttcagtgttacaaagggagctgttggtgccaccattggtggtgtggcttggattggtggaaagagtctggaagtgaccaaaacagctgttacaactgtgccttccatgggaatagggctggtgaaagggggtgtctctgctgtggctggaggtgttacagctgttgggtctgctgttgtaaacaaagtgcccttaacaggaaagaagaaagacaaatctgactgaaatatagagatacacttgcgctccacagcactgtaatgccagtggcattgaattgctaaattatggactacaaccaagtcaactgttttggacgtttatcttctaaactgctgtgttgaaagtattgatgactggctttcatctaaaaagaagagaccaatacgagcacagtatatgaaggtttctcatacttaagttccaggtttttatctggtaaaatgttacacttactcggttgtaactgaagatatggtatgtttgaatatttactataagtctttcagtttgactaaaaatgtgaaagttgaatttagtagatgatcttcacagttccatatgtataatgtgccaggtaactcacctgccccttaagaagggaaccttgaattacataagccgtacctttgatgtgcctaatagtttcagatgtcttagttttttataaccatagttgattaggccaagaggcattcatttcttatttaagctggcaaaattagcaggaattagagaagtttaaaaagataaatggttttatgataatgttaaccatcttttgttagtaaatatgcgttctattattttaatcattgatgccttacaaaagaaaacatcttttctaataccctgaatatgtgctgttcttagaatcatctatggattcttttaaaggttgtttgtgaaattagttttccctttttagaatctcaggagtagtggggtaaagacatttcctgctgtcagtggataagacagagcttgttaactgttttggcagtagttaaaatcaaattgtacacttctcagcctgggttcatgcttcatcattaatacacctcacagtgcctaaggaacatttacttactggtcagaaggtattttggaagagtttcatattaaggaggaacaaataataattttaagttcttaaaaattacctaaaacaccccaaatataaaaagaagccttcacacctattctgtctttaggatgtcttaaattattagcagtactccttttttaaaaacactgtaaaagtaaccacaaatatgtgaggacttactattttaaatggaatggaatgagctccatagattagttttgaatataaagtatataaaagtgcatcagtggtttatataggctttaaaaacatgttatcttacagtcctttaaagcagccatagagtttgtatcatttttcaagccaatttcagtcagggatttgaattgtttgattatggatgataaatgtgtcatatcttattaatatgtctcatgtctcgttccttcttaatatgatttagctggaattcattttcttttcgtttcatgtttaatttcataaaacgtttaacaattggcatatatacttggcattcctgtccaccaaggattgtaatccaagcctgggaaaatcttaaatttctttttacttaaatctggaaatttgtctccattctgccacctttttttttttttttttttatagtggaggggaggaaaggggggtgataccttgcagtaagtaagtcgaaatagcatgcctgaaaatttgaaacagaccattctaacacccaaggcttgtttataaaatacttgagaattacattaatgtggaatcaacagatgcagaagaatataacataacttttaaaagctttcataaataccagcagcaattgtaagcaaatctacaaaggttcttgaacctttctattatatacaaaactgaaaagtcattaaggagttcaactaatcaggaattaaatggtcatttatttcatgcagtatgatttaaggtatttcttgagattctggtcaaatgtcataatcagcaaacgggattaaaaaaaaaactccaaaatcactaaataattatctaaataatggtattggagaacttgtttcctgctatttggaagagattgttgcttcattgctagtttgtatttctaacttctacagttatagactccactgtgctttgtgtctgaatttctcagtatagacattttgtttactgtatgcttgcatatttattttcaactttgcctgtctttaaaattgcttgaggaaaaatggttgtaattaatttctgctacagaaaagccacctggtacgttttgtctcatcaggattgttttaaattctaaactataagtttgttcagaggggcttttgcaatgatagcagaaaactgtacaaatgtacagttagttatagaggttcttgttgaaatgaacttaccatctgatgatatgtatgtacagctgtgtacttgagtcttttttagtttacttagaaagactagcagtttgacctgttaaacaggactagttcaagtcaagaaactaaggttgttgtatacacctggaggcatctgttattcagcttatcctttgagtgggtatttggcacaatgaggataaacttatgtgacccacttgaatggctgatctaataatgttgacattatgcattctgtacttagtgaaatgtcagatgaaaataactgatgaataatttttttgtattaaagggatgggaaaagaacacatgaatttgttaataaagcactatgatctgcaaacgatggaatgtttcataaagatctaaagaaataaaggaaactttaaaacagag

SEQ ID NO: 354666 - DNA, 1782 bp, Homo sapiens
ggccggaccctgcgagaacgggtgggcgtgtgcccggtgggcgcgggaggggcccgggctgcacgagcgcgcgtgcgcgtcggaactggagccgcgggaggaggcgggagctgaggaggcggcggagggggcgggtcgcgtcgggcgccacgtccgcagccagaggcctccgcctccaccaccgccgccacagtcttccagctccacatcctgagaggacgcctctggagccgcgactgcccggggttgtgccggccgccgctgccgcccaggccgcctcagctctcctctgcgccggcccgctcactccgcccggccccagccctagcgctggccgcgaccccggcgcctttgaaacttctgctggtgtgagtgccctcaggggttccccaggaatatcgatacaacaccaacaggagatcatgaatcagacagataaaaatcaacaagaaatcccatcataccttaatgatgaaccaccagaaggttcaatgaaagatcacccacagcagcagccaggcatgttgtcccgtgtgactgggggtatcttcagtgttacaaagggagctgttggtgccaccattggtggtgtggcttggattggtggaaagagtctggaagtgaccaaaacagctgttacaactgtgccttccatgggaatagggctggtgaaagggggtgtctctgctgtggctggaggtgttacagctgttgggtctgctgttgtaaacaaagtgcccttaacaggaaagaagaaagacaaatctgactgaaatatagagatacacttgcgctccacagcactgtaatgccagtggcattgaattgctaaattatggactacaaccaagtcaactgttttggacgtttatcttctaaactgctgtgttgaaagtattgatgactggctttcatctaaaaagaagagaccaatacgagcacagtatatgaaggtttctcatacttaagttccaggtttttatctggtaaaatgttacacttactcggttgtaactgaagatatggaagatctgagttagaatgtatgaatggaaaaaaaaggcaaagcagaacaatttcagaggttcaagagccaaaagcaatggaatggaccctaagggaaaataaaatggacctgtgctgcctctttcctcttgtgccactctcccaatcactcaaccctgctccaactgtactggctgctattcttcttgaacaaaccttcctgcatgaccttggaccaactgccagagttttctctgggtgttaacagcggttggactacagacaattgcttccgggcagcgttccaaaatactggctacagcagtctcatcggcacctagttcttgtaaaatattcgcaatttcttcaacataggtttcatcctctaaaagtacccatccttttaatctacgaattttcctaatgtcaactgaacatttatagagcttttccactgttcttgtattttctttgctcgactgtttatcagttgtataggtgaagcatgctaagaaaggtctgtattttggaggtgatcgcatctttctgaaagaacacagcctgcaggactgggatctcagcagcagcttccacaacatggctgcaatctactagctagtttccaccgtcctgggacttaaatggactcattctatctgaaaaaaagaaaataaaggtttttagtataagggtgttgactttcagaacacatacacttacaaatttgagctgttgaagtctggaaataaagtggatttaaattagacaagaaaactg

SEQ ID NO: 354667 - DNA, 320 bp, Homo sapiens
tatggagaaaagccaggggagtacacttctgtgactgtctgtgttgagctcatttaattgcaggggagaaggaagcacaatatttttgttctagtcacccaatcatcagttcatttattcacttaatacttattaagcaactacagatgcaaagggagaattggaatctgcagtcaacatttgaacaacacaggtttgaacagcaagtgtccacttataggtggatttctttcaaccaataccgatcaagaatacagtatctgagagtccaaagcctgcatgtagggagggttgactttctgtatacaaggcttccacag

SEQ ID NO: 354668 - DNA, 456 bp, Homo sapiens
gatgccaagacaggaggattgcttgatgccaagacaggaggattgcttgaggccaagtattcaagaccagcctgggcaacacagacattgcaacatccctgtctttaccaaaaaggaaaaaattagccagccatggtggcatgcacctatgggcctagttactcaagaggctgacgtgggaagatagcttgagcccaggagttcaaggttacagtgtccagcctgggtgacagaataagaccacgtctcaaaaaacaaagaaacaaacaaaccagcctgggacctcctccctgctttgcttcctcttcagcatgtgtgatctctttgcacatgccgattcccctttcacattccaccttgagctgaagcagcctgagaccctcaccagaggcccaatcttgaactttccagccaccagaattgcaagctaaataaacctcttttcttcataaacta

SEQ ID NO: 354669 - DNA, 2986 bp, Homo sapiens
  misc_feature (6)..(7): n is a, c, g, or t
  misc_feature (9)..(9): n is a, c, g, or t
ggcacnngncccttgcgcctccttgcccggccgcgcccagcccggcgtcccgagcagcgcaggggaggatccccgcgcagtgacccgggagccaccacagactctgggaggctcggcggctggagcagcaggcagctccccgcagctcccggcgcttccaggcagctctctgagccgtgccagaggcccggcccgccattcccagccccgagccatgatgaagactttgtccagcgggaactgcacgctcagtgtgcccgccaaaaactcataccgcatggtggtgctgggtgcctctcgggtgggcaagagctccatcgtgtctcgcttcctcaatggccgctttgaggaccagtacacacccaccatcgaggacttccaccgtaaggtatacaacatccgcggcgacatgtaccagctcgacatcctggatacctctggcaaccaccccttccccgccatgcgcaggctgtccatcctcacaggggatgtcttcatcctggtgttcagcctggataaccgggagtccttcgatgaggtcaagcgccttcagaagcagatcctggaggtcaagtcctgcctgaagaacaagaccaaggaggcggcggagctgcccatggtcatctgtggcaacaagaacgaccacggcgagctgtgccgccaggtgcccaccaccgaggccgagctgctggtgtcgggcgacgagaactgcgcctacttcgaggtgtcggccaagaagaacaccaacgtggacgagatgttctacgtgctcttcagcatggccaagctgccacacgagatgagccccgccctgcatcgcaagatctccgtgcagtacggtgacgccttccaccccaggcccttctgcatgcgccgcgtcaaggagatggacgcctatggcatggtctcgcccttcgcccgccgccccagcgtcaacagtgacctcaagtacatcaaggccaaggtccttcgggaaggccaggcccgtgagagggacaagtgcaccatccagtgagcgagggatgctggggcggggcttggccagtgccttcagggaggtggccccagatgcccactgtgcgcatctccccaccgaggccccggcagcagtcttgttcacagaccttaggcaccagactggaggcccccgggcgctggcctccgcacattcgtctgccttctcacagctttcctgagtccgcttgtccacagctccttggtggtttcatctcctctgtgggaggacacatctctgcagcctcaagagttaggcagagactcaagttacaccttcctctcctggggttggaagaaatgttgatgccagaggggtgaggattgctgcgtcatatggagcctcctgggacaagcctcaggatgaaaaggacacagaaggccagatgagaaaggtctcctctctcctggcataacacccagcttggtttgggtggcagctgggagaacttctctcccagccctgcaactcttacgctctggttcagctgcctctgcaccccctcccacccccagcacacacacaagttggcccccagctgcgcctgacattgagccagtggactctgtgtctgaagggggcgtggccacacctcctagaccacgcccaccacttagaccacgcccacctcctgaccgcgttcctcagcctcctctcctaggtccctccgcccgacagttgtgctttgttgtggttgcagctgttttcgtgtcatgtatagtagtagaaatggaaatcattgtactgtaaaagcctagtgactccctccttggccaggccctcacccagttcagatccacggcctccacccgggacgccttcctcctctgctcccaaacagggtttccgtggcctgtttgcagctagacattgacctccgccattgagctccacggtttacagacaattgcacaagcgtggggtgggcaggccaggactgcttttttttaatgctcccatttcacagaggataccaccgagactcggaggggacacgatgagcaccaggccccacctttgtcccctagcaaattcagggtacagctccacctagaaccaggctgccctctactgtgctcgttcctcaagcatttattaagcacctactgggtgctgggttcactgtgtcctaggaaaccaagagggtccccagtcctggcctctgcccgcccctgctgccccaccaccttctgcacacacagcggtggggaggcggggaggagcagctgggacccagaactgagcctgggagggatccgacagaaaagctcagggcgggtcttctccttgtgcccgggattgggctatgctgggtaccaccatgtactcaggcatggtgggttttgaacccataaaccaaaggcccttgtcatcagctcttaacaagtatattttgtattttaatctctctaaacatattgaagttttagggccctaaggaaccttagtgatcttctattgggtctttctgaggttcagagagggtaagtaacttcctccaggtcacacagcaagtctgtgggtggcagaagcaagctagcgctgggcattcagtacataccacgatgtgctccctctcttgatgcttggcccctggggccttcagggctttgggacatcttgtcctcaaccctctccctagatcagtctgtgagggtccctgtagatattgtgtacaccatgcccatgtatatacaagtacacacagatgtacacacagatgtacacatgctccagccccagctctgcatacctgcacctgcaccccagccttggcccctgcctgcgtctgtgctcaaagcagcagctccaaccctgcctctgtccccttccccacccactgcctgagccttctgagcagaccaggtaccttggctgcaccggtgtgtggcccgctctcacccaggcacagccccgccaccatggatctccgtgtacactatcaataaaagtgggtttgttacaaaaaaa

SEQ ID NO: 354670 - DNA, 2808 bp, Homo sapiens
atgcctgcttctctcgctttgttgcagccccgagccatgatgaagactttgtccagcgggaactgcacgctcagtgtgcccgccaaaaactcataccgcatggtggtgctgggtgcctctcgggtgggcaagagctccatcgtgtctcgcttcctcaatggccgctttgaggaccagtacacacccaccatcgaggacttccaccgtaaggtatacaacatccgcggcgacatgtaccagctcgacatcctggatacctctggcaaccaccccttccccgccatgcgcaggctgtccatcctcacaggggatgtcttcatcctggtgttcagcctggataaccgggagtccttcgatgaggtcaagcgccttcagaagcagatcctggaggtcaagtcctgcctgaagaacaagaccaaggaggcggcggagctgcccatggtcatctgtggcaacaagaacgaccacggcgagctgtgccgccaggtgcccaccaccgaggccgagctgctggtgtcgggcgacgagaactgcgcctacttcgaggtgtcggccaagaagaacaccaacgtggacgagatgttctacgtgctcttcagcatggccaagctgccacacgagatgagccccgccctgcatcgcaagatctccgtgcagtacggtgacgccttccaccccaggcccttctgcatgcgccgcgtcaaggagatggacgcctatggcatggtctcgcccttcgcccgccgccccagcgtcaacagtgacctcaagtacatcaaggccaaggtccttcgggaaggccaggcccgtgagagggacaagtgcaccatccagtgagcgagggatgctggggcggggcttggccagtgccttcagggaggtggccccagatgcccactgtgcgcatctccccaccgaggccccggcagcagtcttgttcacagaccttaggcaccagactggaggcccccgggcgctggcctccgcacattcgtctgccttctcacagctttcctgagtccgcttgtccacagctccttggtggtttcatctcctctgtgggaggacacatctctgcagcctcaagagttaggcagagactcaagttacaccttcctctcctggggttggaagaaatgttgatgccagaggggtgaggattgctgcgtcatatggagcctcctgggacaagcctcaggatgaaaaggacacagaaggccagatgagaaaggtctcctctctcctggcataacacccagcttggtttgggtggcagctgggagaacttctctcccagccctgcaactcttacgctctggttcagctgcctctgcaccccctcccacccccagcacacacacaagttggcccccagctgcgcctgacattgagccagtggactctgtgtctgaagggggcgtggccacacctcctagaccacgcccaccacttagaccacgcccacctcctgaccgcgttcctcagcctcctctcctaggtccctccgcccgacagttgtgctttgttgtggttgcagctgttttcgtgtcatgtatagtagtagaaatggaaatcattgtactgtaaaagcctagtgactccctccttggccaggccctcacccagttcagatccacggcctccacccgggacgccttcctcctctgctcccaaacagggtttccgtggcctgtttgcagctagacattgacctccgccattgagctccacggtttacagacaattgcacaagcgtggggtgggcaggccaggactgcttttttttaatgctcccatttcacagaggataccaccgagactcggaggggacacgatgagcaccaggccccacctttgtcccctagcaaattcagggtacagctccacctagaaccaggctgccctctactgtgctcgttcctcaagcatttattaagcacctactgggtgctgggttcactgtgtcctaggaaaccaagagggtccccagtcctggcctctgcccgcccctgctgccccaccaccttctgcacacacagcggtggggaggcggggaggagcagctgggacccagaactgagcctgggagggatccgacagaaaagctcagggcgggtcttctccttgtgcccgggattgggctatgctgggtaccaccatgtactcaggcatggtgggttttgaacccataaaccaaaggcccttgtcatcagctcttaacaagtatattttgtattttaatctctctaaacatattgaagttttagggccctaaggaaccttagtgatcttctattgggtctttctgaggttcagagagggtaagtaacttcctccaggtcacacagcaagtctgtgggtggcagaagcaagctagcgctgggcattcagtacataccacgatgtgctccctctcttgatgcttggcccctggggccttcagggctttgggacatcttgtcctcaaccctctccctagatcagtctgtgagggtccctgtagatattgtgtacaccatgcccatgtatatacaagtacacacagatgtacacacagatgtacacatgctccagccccagctctgcatacctgcacctgcaccccagccttggcccctgcctgcgtctgtgctcaaagcagcagctccaaccctgcctctgtccccttccccacccactgcctgagccttctgagcagaccaggtaccttggctgcaccggtgtgtggcccgctctcacccaggcacagccccgccaccatggatctccgtgtacactatcaataaaagtgggtttgttacaaaaaaa

SEQ ID NO: 354671 - DNA, 472 bp, Homo sapiens
  misc_feature (15)..(15): n is a, c, g, or t
  misc_feature (54)..(54): n is a, c, g, or t
  misc_feature (64)..(64): n is a, c, g, or t
  misc_feature (134)..(134): n is a, c, g, or t
  misc_feature (139)..(139): n is a, c, g, or t
  misc_feature (162)..(162): n is a, c, g, or t
  misc_feature (194)..(194): n is a, c, g, or t
ctatacatttgtgtncttcccagtagggcccatctcaagttgaatagtgcaggntggcccaggnctgcttccaggacttgcctgtcctccctgagtttggatgggagagacacaagggcctggacctcagtttnctgtnctctgccccagctcagtgcaccngtgcaacaactccatccagaagcacctggagnactcatgccatcggcatccactgcttccgccagaaccacaaatatcgggttctggcgtggccacacctcctagaccacgcccaccacttagaccacgcccacctcctgaccgcgttcctcagcctcctctcctaggtccctccgcccgacagttgtgctttgttgtggttgcagctgttttcgtgtcatgtatagtagtagaaatggaaatcattgtactgtaaaagcctagtgactccctccttggccagaaccacaaatatcgggggatcctctag

SEQ ID NO: 354672 - DNA, 969 bp, Homo sapiens
ttccttttttcccggcgtgcaccgcgaatccctcctcctcttctttacctctctccctcctcctcaggttctctatcgacgagtctggtagctgagcgttgggctgtaggtcgctgtgctgtgtgatcccccagagccatgcccgagatagtggatacctgttcgttggcctctccggcttccgtctgccggaccaagcacctgcacctgcgctgcagcgtcgactttactcgccggacgctgaccgggactgctgctctcacggtccagtctcaggaggacaatctgcgcagcctggttttggatacaaaggaccttacaatagaaaaagtagtgatcaatggacaagaagtcaaatatgctcttggagaaagacaaagttacaagggatcgccaatggaaatctctcttcctatcgctttgagcaaaaatcaagaaattgttatagaaatttcttttgagacctctccaaaatcttctgctctccagtggctcactcctgaacagacttctgggaaggaacacccatatctctttagtcagtgccaggccatccactgcagagcaatccttccttgtcaggacactccttctgtgaaattaacctatactgcagaggtgtctgtccctaaagaactggtggcacttatgagtgctattcgtgatggagaaacacctgacccagaagacccaagcaggaaaatatacaaattcatccaaaaagtcaataacctggtactgatgttagttgtgggcttagaagggggaattggcagacttgtgtggctgaaaggagggaaagttgtatagtttggagattatgtaaaacgaactggagccgtttgggagatgcatggtgcaactctatggggggactggtgaccacagggcgaaaccaggcggagattacgggaggcagggcgttgatgtcgcgagggaagggagaagtgatgttgtttttgttttcgt

SEQ ID NO: 354673 - DNA, 359 bp, Homo sapiens
aaattaaaaatgactgagcagagatgtaataaagattcagctcaatccagcacacatttattgtcaggcactaatatgatgaataaggaactcacagagcaaatatgtatgtatcaagtaattataatacaatgaaaagtattttttttaaaatattaagtgttgtgggtgaggaaactattaattttaatggtgatggatttggacatcgtcttggagatgacttacaaaggagaatacaagaagtaaactgtagaaccttagaggatcttcattttagagctaggacagaggaaaggtagcaaaataaatggaaaactaaaaagatttcaaaggttcattgttaagaaagctgtggg

SEQ ID NO: 354674 - DNA, 2079 bp, Homo sapiens
ttccttttttcccggcgtgcaccgcgaatccctcctcctcttctttacctctctccctcctcctcaggttctctatcgacgagtctggtagctgagcgttgggctgtaggtcgctgtgctgtgtgatcccccagagccatgcccgagatagtggatacctgttcgttggcctctccggcttccgtctgccggaccaagcacctgcacctgcgctgcagcgtcgactttactcgccggacgctgaccgggactgctgctctcacggtccagtctcaggaggacaatctgcgcagcctggttttggatacaaaggaccttacaatagaaaaagtagtgatcaatggacaagaagtcaaatatgctcttggagaaagacaaagttacaagggatcgccaatggaaatctctcttcctatcgctttgagcaaaaatcaagaaattgttatagaaatttcttttgagacctctccaaaatcttctgctctccagtggctcactcctgaacagacttctgggaaggaacacccatatctctttagtcagtgccaggccatccactgcagagcaatccttccttgtcaggacactccttctgtgaaattaacctatactgcagaggtgtctgtccctaaagaactggtggcacttatgagtgctattcgtgatggagaaacacctgacccagaagacccaagcaggaaaatatacaaattcatccaaaaagttccaataccctgctacctgattgctttagttgttggagctttagaaagcaggcaaattggcccaagaactttggtgtggtctgagaaagagcaggtggaaaagtctgcttatgagttttctgagactgaatctatgcttaaaatagcagaagatctgggaggaccgtatgtatggggacagtatgacctattggtcctgccaccatccttcccttatggtggcatggagaatccttgccttacttttgtaactcctactctactggcaggcgacaagtcactctccaatgtcattgcacatgaaatatctcatagctggacagggaatctagtgaccaacaaaacttgggatcacttttggttaaatgagggacatactgtgtacttggaacgccacatttgcggacgattgtttggtgtaaagacatttggggagacacatcctttcaccaaacttgtggttgatctgacagatatagaccctgatgtagcttattcttcagttccctatgagaagggctttgctttacttttttaccttgaacaactgcttggaggaccagagattttcctaggattcttaaaagcttatgttgagaagttttcctataagagcataactactgatgactggaaggatttcctgtattcctattttaaagataaggttgatgttctcaatcaagttgattggaatgcctggctctactctcctggactgcctcccataaagcccaattatgatatgactctgacaaatgcttgtattgccttaagtcaaagatggattactgccaaagaagatgatttaaattcattcaatgccacagacctgaaggatctctcttctcatcaattgaatgagtttttagcacagacgctccagagggcacctcttccattggggcacataaagcgaatgcaagaggtgtacaacttcaatgccattaacaattctgaaatacgattcagatggctgcggctctgcattcaatccaagtgggaggacgcaattcctttggcgctaaagatggcaactgaacaaggaagaatgaagtttacccggcccttattcaaggatcttgctgcctttgacaaatcccatgatcaagctgtccgaacctaccaagagcacaaagcaagcatgcatcccgtgactgcaatgctggtggggaaagacttaaaagtggattaaagacctgcgtattgatgattttagagatttctcttttttaaatggaattcgtaaagaaatataaaacttcagctcacaattaaaactgtctttttagttttggctttttattgttttgttggtgattttactgaaataaagttgagctacttcttctta

SEQ ID NO: 354675 - DNA, 2091 bp, Homo sapiens
ttccttttttcccggcgtgcaccgcgaatccctcctcctcttctttacctctctccctcctcctcaggttctctatcgacgagtctggtagctgagcgttgggctgtaggtcgctgtgctgtgtgatcccccagagccatgcccgagatagtggatacctgttcgttggcctctccggcttccgtctgccggaccaagcacctgcacctgcgctgcagcgtcgactttactcgccggacgctgaccgggactgctgctctcacggtccagtctcaggaggacaatctgcgcagcctggttttggatacaaaggaccttacaatagaaaaagtagtgatcaatggacaagaagtcaaatatgctcttggagaaagacaaagttacaagggatcgccaatggaaatctctcttcctatcgctttgagcaaaaatcaagaaattgttatagaaatttcttttgagacctctccaaaatcttctgctctccagtggctcactcctgaacagacttctgggaaggaacacccatatctctttagtcagtgccaggccatccactgcagagcaatccttccttgtcaggacactccttctgtgaaattaacctatactgcagaggtgtctgtccctaaagaactggtggcacttatgagtgctattcgtgatggagaaacacctgacccagaagacccaagcaggaaaatatacaaattcatccaaaaagttccaataccctgctacctgattgctttagttgttggagctttagaaagcaggcaaattggcccaagaactttggtgtggtctgagaaagagcaggtggaaaagtctgcttatgagttttctgagactgaatctatgcttaaaatagcagaagatctgggaggaccgtatgtatggggacagtatgacctattggtcctgccaccatccttcccttatggtggcatggagaatccttgccttacttttgtaactcctactctactggcaggcgacaagtcactctccaatgtcattgcacatgaaatatctcatagctggacagggaatctagtgaccaacaaaacttgggatcacttttggttaaatgagggacatactgtgtacttggaacgccacatttgcggacgattgtttggtgaaaagttcagacattttaatgctctgggaggatggggagaactacagaattcggtaaagacatttggggagacacatcctttcaccaaacttgtggttgatctgacagatatagaccctgatgtagcttattcttcagttccctatgagaagggctttgctttacttttttaccttgaacaactgcttggaggaccagagattttcctaggattcttaaaagcttatgttgagaagttttcctataagagcataactactgatgactggaaggatttcctgtattcctattttaaagataagtctcctggactgcctcccataaagcccaattatgatatgactctgacaaatgcttgtattgccttaagtcaaagatggattactgccaaagaagatgatttaaattcattcaatgccacagacctgaaggatctctcttctcatcaattgaatgagtttttagcacagacgctccagagggcacctcttccattggggcacataaagcgaatgcaagaggtgtacaacttcaatgccattaacaattctgaaatacgattcagatggctgcggctctgcattcaatccaagtgggaggacgcaattcctttggcgctaaagatggcaactgaacaaggaagaatgaagtttacccggcccttattcaaggatcttgctgcctttgacaaatcccatgatcaagctgtccgaacctaccaagagcacaaagcaagcatgcatcccgtgactgcaatgctggtggggaaagacttaaaagtggattaaagacctgcgtattgatgattttagagatttctcttttttaaatggaattcgtaaagaaatataaaacttcagctcacaattaaaactgtctttttagttttggctttttattgttttgttggtgattttactgaaataaagttgagctacttcttctta

SEQ ID NO: 354676 - DNA, 2171 bp, Homo sapiens
ttccttttttcccggcgtgcaccgcgaatccctcctcctcttctttacctctctccctcctcctcaggttctctatcgacgagtctggtagctgagcgttgggctgtaggtcgctgtgctgtgtgatcccccagagccatgcccgagatagtggatacctgttcgttggcctctccggcttccgtctgccggaccaagcacctgcacctgcgctgcagcgtcgactttactcgccggacgctgaccgggactgctgctctcacggtccagtctcaggaggacaatctgcgcagcctggttttggatacaaaggaccttacaatagaaaaagtagtgatcaatggacaagaagtcaaatatgctcttggagaaagacaaagttacaagggatcgccaatggaaatctctcttcctatcgctttgagcaaaaatcaagaaattgttatagaaatttcttttgagacctctccaaaatcttctgctctccagtggctcactcctgaacagacttctgggaaggaacacccatatctctttagtcagtgccaggccatccactgcagagcaatccttccttgtcaggacactccttctgtgaaattaacctatactgcagaggtgtctgtccctaaagaactggtggcacttatgagtgctattcgtgatggagaaacacctgacccagaagacccaagcaggaaaatatacaaattcatccaaaaagttccaataccctgctacctgattgctttagttgttggagctttagaaagcaggcaaattggcccaagaactttggtgtggtctgagaaagagcaggtggaaaagtctgcttatgagttttctgagactgaatctatgcttaaaatagcagaagatctgggaggaccgtatgtatggggacagtatgacctattggtcctgccaccatccttcccttatggtggcatggagaatccttgccttacttttgtaactcctactctactggcaggcgacaagtcactctccaatgtcattgcacatgaaatatctcatagctggacagggaatctagtgaccaacaaaacttgggatcacttttggttaaatgagggacatactgtgtacttggaacgccacatttgcggacgattgtttggtgaaaagttcagacattttaatgctctgggaggatggggagaactacagaattcggtaaagacatttggggagacacatcctttcaccaaacttgtggttgatctgacagatatagaccctgatgtagcttattcttcagttccctatgagaagggctttgctttacttttttaccttgaacaactgcttggaggaccagagattttcctaggattcttaaaagcttatgttgagaagttttcctataagagcataactactgatgactggaaggatttcctgtattcctattttaaagataaggttgatgttctcaatcaagttgattggaatgcctggctctactctcctggactgcctcccataaagcccaattatgatatgactctgacaaatgcttgtattgccttaagtcaaagatggattactgccaaagaagatgatttaaattcattcaatgccacagacctgaaggatctctcttctcatcaattgaatgagtttttagcacagacgctccagagggcacctcttccattggggcacataaagcgaatgcaagaggtgtacaacttcaatgccattaacaattctgaaatacgattcagatggctgcggctctgcattcaatccaagtgggaggacgcaattcctttggcgctaaagatggcaactgaacaaggaagaatgaagtttacccggcccttattcaaggatcttgctgcctttgacaaatcccatgatcaagctgtccgaacctaccaagagcacaaagcaagcatgcatcccgtgactgcaatgctggtggggaaagacttaaaagtggattaaagacctgcgtattgatgattttagagatttctcttttttaaatggaattcgtaaagaaatataaaacttcagctcacaattaaaactgtctttttagttttggctttttattgttttgttggtgattttactgaaataaagttgagctacttcttcttaaaaaaaaaaaaaggggggcggcctaaaatacctcacag

SEQ ID NO: 354677 - DNA, 2210 bp, Homo sapiens
ttccttttttcccggcgtgcaccgcgaatccctcctcctcttctttacctctctccctcctcctcaggttctctatcgacgagtctggtagctgagcgttgggctgtaggtcgctgtgctgtgtgatcccccagagccatgcccgagatagtggatacctgttcgttggcctctccggcttccgtctgccggaccaagcacctgcacctgcgctgcagcgtcgactttactcgccggacgctgaccgggactgctgctctcacggtccagtctcaggaggacaatctgcgcagcctggttttggatacaaaggaccttacaatagaaaaagtagtgatcaatggacaagaagtcaaatatgctcttggagaaagacaaagttacaagggatcgccaatggaaatctctcttcctatcgctttgagcaaaaatcaagaaattgttatagaaatttcttttgagacctctccaaaatcttctgctctccagtggctcactcctgaacagacttctgggaaggaacacccatatctctttagtcagtgccaggccatccactgcagagcaatccttccttgtcaggacactccttctgtgaaattaacctatactgcagaggtgtctgtccctaaagaactggtggcacttatgagtgctattcgtgatggagaaacacctgacccagaagacccaagcaggaaaatatacaaattcatccaaaaagttccaataccctgctacctgattgctttagttgttggagctttagaaagcaggcaaattggcccaagaactttggtgtggtctgagaaagagcaggtggaaaagtctgcttatgagttttctgagactgaatctatgcttaaaatagcagaagatctgggaggaccgtatgtatggggacagtatgacctattggtcctgccaccatccttcccttatggtggcatggagaatccttgccttacttttgtaactcctactctactggcaggcgacaagtcactctccaatgtcattgcacatgaaatatctcatagctggacagggaatctagtgaccaacaaaacttgggatcacttttggttaaatgagggacatactgtgtacttggaacgccacatttgcggacgattgtttggtgaaaagttcagacattttaatgctctgggaggatggggagaactacagaattcggtaaagacatttggggagacacatcctttcaccaaacttgtggttgatctgacagatatagaccctgatgtagcttattcttcagttccctatgagaagggctttgctttacttttttaccttgaacaactgcttggaggaccagagattttcctaggattcttaaaagcttatgttgagaagttttcctataagagcataactactgatgactggaaggatttcctgtattcctattttaaagataaggttgatgttctcaatcaagttgattggaatgcctggctctactctcctggactgcctcccataaagcccaattatgatatgactctgacaaatgcttgtattgccttaagtcaaagatggattactgccaaagaagatgatttaaattcattcaatgccacagacctgaaggatctctcttctcatcaattgaatgagtttttagcacagacgctccagagggcacctcttccattggggcacataaagcgaatgcaagaggtgtacaacttcaatgccattaacaattctgaaatacgattcagatggctgcggctctgcattcaatccaagtgggaggacgcaattcctttggcgctaaagatggcaactgaacaaggaagaatgaagtttacccggcccttattcaaggatcttgctgcctttgacaaatcccatgatcaagctgtccgaacctaccaagagcacaaagcaagcatgcatcccgtgactgcaatgctggtggggaaagacttaaaagtggattaaagacctgcgtattgatgattttagagatttctcttttttaaatggaattcgtaaagaaatataaaacttcagctcacaattaaaactgtctttttagttttggctttttattgttttgttggtgattttactgaaataaagttgagctacttcttcttatagtggcatattctttgtaaattttaacaaggtttaatcttttgatttacaaattaaaaaattttgaattagcttta

SEQ ID NO: 354678 - DNA, 2050 bp, Homo sapiens
ttccttttttcccggcgtgcaccgcgaatccctcctcctcttctttacctctctccctcctcctcaggttctctatcgacgagtctggtagctgagcgttgggctgtaggtcgctgtgctgtgtgatcccccagagccatgcccgagatagtggatacctgttcgttggcctctccggcttccgtctgccggaccaagcacctgcacctgcgctgcagcgtcgactttactcgccggacgctgaccgggactgctgctctcacggtccagtctcaggaggacaatctgcgcagcctggttttggatacaaaggaccttacaatagaaaaagtagtgatcaatggacaagaagtcaaatatgctcttggagaaagacaaagttacaagggatcgccaatggaaatctctcttcctatcgctttgagcaaaaatcaagaaattgttatagaaatttcttttgagacctctccaaaatcttctgctctccagtggctcactcctgaacagacttctgggaaggaacacccatatctctttagtcagtgccaggccatccactgcagagcaatccttccttgtcaggacactccttctgtgaaattaacctatactgcagaggtgtctgtccctaaagaactggtggcacttatgagtgctattcgtgatggagaaacacctgacccagaagacccaagcaggaaaatatacaaattcatccaaaaagttccaataccctgctacctgattgctttagttgttggagctttagaaagcaggcaaattggcccaagaactttggtgtggtctgagaaagagcaggtggaaaagtctgcttatgagttttctgagactgaatctatgcttaaaatagcagaagatctgggaggaccgtatgtatggggacagtatgacctattggtcctgccaccatccttcccttatggtggcatggagaatccttgccttacttttgtaactcctactctactggcaggcgacaagtcactctccaatgtcattgcacatgaaatatctcatagctggacagggaatctagtgaccaacaaaacttgggatcacttttggttaaatgagggacatactgtgtacttggaacgccacatttgcggacgattgtttggtgaaaagttcagacattttaatgctctgggaggatggggagaactacagaattcggtaaagacatttggggagacacatcctttcaccaaacttgtggttgatctgacagatatagaccctgatgtagcttattcttcagttccctatgagaagggctttgctttacttttttaccttgaacaactgcttggaggaccagagattttcctaggattcttaaaagcttatgttgagaagttttcctataagagcataactactgatgactggaaggatttcctgtattcctattttaaagataaggttgatgttctcaatcaagttgattggaatgcctggctctactctcctggactgcctcccataaagcccaattatgatatgactctgacaaatgcttgtattgccttaagtcaaagatggattactgccaaagaagatgatttaaattcattcaatgccacagacctgaaggatctctcttctcatcaattgaatgagtttttagcacagacgctccagaggatggctgcggctctgcattcaatccaagtgggaggacgcaattcctttggcgctaaagatggcaactgaacaaggaagaatgaagtttacccggcccttattcaaggatcttgctgcctttgacaaatcccatgatcaagctgtccgaacctaccaagagcacaaagcaagcatgcatcccgtgactgcaatgctggtggggaaagacttaaaagtggattaaagacctgcgtattgatgattttagagatttctcttttttaaatggaattcgtaaagaaatataaaacttcagctcacaattaaaactgtctttttagttttggctttttattgttttgttggtgattttactgaaataaagttgagctacttcttctta

SEQ ID NO: 354679 - DNA, 1357 bp, Homo sapiens
atagatcgaggtgtaaccggatggagatgttgagaaagagctggtggaaaagttgcttatgagttttctgagactgaatctatgcttaaaatagcagaagatctgggaggaccgtatgtatggggacagtatgacctattggtcctgccaccatccttcccttatggtggcatggagaatccttgccttacttttgtaactcctactctactggcaggcgaccaagtcactctcccacgtcattgcacatgaaatatctcatagctggacagggaatctagtgaccaacaaaacttgggatcacttttggttaaatgagggacatactgtgtacttggaacgccacatttgcggacgattgtttggtgaaaagttcagacattttaatgctctgggaggatggggagaactacagaattcggtaaagacatttggggagacacatcctttcaccaaacttgtggttgatctgacagatatagaccctgatgtagcttattcttcagttccctatgagaagggctttgctttacttttttaccttgaacaactgcttggaggaccagagattttcctaggattcttaaaagcttatgttgagaagttttcctataagagcataactactgatgactggaaggatttcctgtattcctattttaaagataaggttgatgttctcaatcaagttgattggaatgcctggctctactctcctggactgcctcccataaagcccaattatgatatgactctgacaaatgcttgtattgccttaagtcaaagatggattactgccaaagaagatgatttaaattcattcaatgccacagacctgaaggatctctcttctcatcaattgaatgagtttttagcacagacgctccagagggcacctcttccattggggcacataaagcgaatgcaagaggtgtacaacttcaatgccattaacaattctgaaatacgattcagatggctgcggctctgcattcaatccaagtgggaggacgcaattcctttggcgctaaagatggcaactgaacaaggaagaatgaagtttacccggcccttattcaaggatcttgctgcctttgacaaatcccatgatcaagctgtccgaacctaccaagagcacaaagcaagcatgcatcccgtgactgcaatgctggtggggaaagacttaaaagtggattaaagacctgcgtattgatgattttagagatttctcttttttaaatggaattcgtaaagaaatataaaacttcagctcacaattaaaactgtctttttagttttggctttttattgttttgttggtgattttactgaaataaagttgagctacttcttctta

SEQ ID NO: 354680 - DNA, 2969 bp, Homo sapiens
ttccttttttcccggcgtgcaccgcgaatccctcctcctcttctttacctctctccctcctcctcaggttctctatcgacgagtctggtagctgagcgttgggctgtaggtcgctgtgctgtgtgatcccccagagccatgcccgagatagtggatacctgttcgttggcctctccggcttccgtctgccggaccaagcacctgcacctgcgctgcagcgtcgactttactcgccggacgctgaccgggactgctgctctcacggtccagtctcaggaggacaatctgcgcagcctggttttggatacaaaggaccttacaatagaaaaagtagtgatcaatggacaagaagtcaaatatgctcttggagaaagacaaagttacaagggatcgccaatggaaatctctcttcctatcgctttgagcaaaaatcaagaaattgttatagaaatttcttttgagacctctccaaaatcttctgctctccagtggctcactcctgaacagacttctgggaaggaacacccatatctctttagtcagtgccaggccatccactgcagagcaatccttccttgtcaggacactccttctgtgaaattaacctatactgcagaggtgtctgtccctaaagaactggtggcacttatgagtgctattcgtgatggagaaacacctgacccagaagacccaagcaggaaaatatacaaattcatccaaaaagttccaataccctgctacctgattgctttagttgttggagctttagaaagcaggcaaattggcccaagaactttggtgtggtctgagaaagagcaggtggaaaagtctgcttatgagttttctgagactgaatctatgcttaaaatagcagaagatctgggaggaccgtatgtatggggacagtatgacctattggtcctgccaccatccttcccttatggtggcatggagaatccttgccttacttttgtaactcctactctactggcaggcgacaagtcactctccaatgtcattgcacatgaaatatctcatagctggacagggaatctagtgaccaacaaaacttgggatcacttttggttaaatgagggacatactgtgtacttggaacgccacatttgcggacgattgtttggtgaaaagttcagacattttaatgctctgggaggatggggagaactacagaattcggtaaagacatttggggagacacatcctttcaccaaacttgtggttgatctgacagatatagaccctgatgtagcttattcttcagttccctatgagaagggctttgctttacttttttaccttgaacaactgcttggaggaccagagattttcctaggattcttaaaagcttatgttgagaagttttcctataagagcataactactgatgactggaaggatttcctgtattcctattttaaagataaggttgatgttctcaatcaagttgattggaatgcctggctctactctcctggactgcctcccataaagcccaattatgatatgactctgacaaatgcttgtattgccttaagtcaaagatggattactgccaaagaagatgatttaaattcattcaatgccacagacctgaaggatctctcttctcatcaattgaatgagtttttagcacagacgctccagaggctcctttcttccaaggaatcctgttgaaatgatacggtatacttctttattttgctcttaggcacctcttccattggggcacataaagcgaatgcaagaggtgtacaacttcaatgccattaacaattctgaaatacgattcaggtacatcattttaacttgtctctgtggaagaaagcagaaaactaaactcctttgaaagatggagaaagggaatgcagagtatgagacatacttgagtcttgagaattccttgtcaaactgactgcttctatataaatacttatagtggtatttaaggaatagttgcaatatgtaatctggtagtattaatctttttgttagactttgctctaaacctctcttgccttaaaagaaaaaaaaaaaattagaatgaaggattccgtggtaaataggctttctccacaaccaactaaatctactttgaaatgggaatagttagaaatattttattctattatatgttaatctttcttaattcaaatttgtaatgtgaggcttaaaccaaagtttaattccttcagaaattgcatgtataaggtatgtgagcacctacctgatctttcttaattcaaatttgtaatgtgaggcttaaaccaaagtttaattccttcagaaattggatttataaggtatgtgagcacctacctgatccagacctttaaaaatatatgatctttttcaagaaccagctcctcttctttctcttcaccaattattaaattgtatatataaggatttgagagtctcagaatcaagacataccataaagtggtgtacagtataactatagtggggttattcatatcactacagaagtaatattaagatatacctgtcatatcctgccccttcctcattttctactccatgctccccccaaatcctccttttagatatggctgcggctctgcattcaatccaagtgggaggacgcaattcctttggcgctaaagatggcaactgaacaaggaagaatgaagtttacccggcccttattcaaggatcttgctgcctttgacaaatcccatgatcaagctgtccgaacctaccaagagcacaaagcaagcatgcatcccgtgactgcaatgctggtggggaaagacttaaaagtggattaaagacctgcgtattgatgattttagagatttctcttttttaaatggaattcgtaaagaaatataaaacttcagctcacaattaaaactgtctttttagttttggctttttattgttttgttggtgattttactgaaataaagttgagctacttcttctta

SEQ ID NO: 354681 - DNA, 2149 bp, Homo sapiens
  misc_feature (1645)..(1645): n is a, c, g, or t
  misc_feature (1647)..(1648): n is a, c, g, or t
  misc_feature (1673)..(1674): n is a, c, g, or t
  misc_feature (1677)..(1677): n is a, c, g, or t
  misc_feature (1685)..(1685): n is a, c, g, or t
  misc_feature (1723)..(1723): n is a, c, g, or t
  misc_feature (1728)..(1728): n is a, c, g, or t
  misc_feature (1735)..(1735): n is a, c, g, or t
ttccttttttcccggcgtgcaccgcgaatccctcctcctcttctttacctctctccctcctcctcaggttctctatcgacgagtctggtagctgagcgttgggctgtaggtcgctgtgctgtgtgatcccccagagccatgcccgagatagtggatacctgttcgttggcctctccggcttccgtctgccggaccaagcacctgcacctgcgctgcagcgtcgactttactcgccggacgctgaccgggactgctgctctcacggtccagtctcaggaggacaatctgcgcagcctggttttggatacaaaggaccttacaatagaaaaagtagtgatcaatggacaagaagtcaaatatgctcttggagaaagacaaagttacaagggatcgccaatggaaatctctcttcctatcgctttgagcaaaaatcaagaaattgttatagaaatttcttttgagacctctccaaaatcttctgctctccagtggctcactcctgaacagacttctgggaaggaacacccatatctctttagtcagtgccaggccatccactgcagagcaatccttccttgtcaggacactccttctgtgaaattaacctatactgcagaggtgtctgtccctaaagaactggtggcacttatgagtgctattcgtgatggagaaacacctgacccagaagacccaagcaggaaaatatacaaattcatccaaaaagttccaataccctgctacctgattgctttagttgttggagctttagaaagcaggcaaattggcccaagaactttggtgtggtctgagaaagagcaggtggaaaagtctgcttatgagttttctgagactgaatctatgcttaaaatagcagaagatctgggaggaccgtatgtatggggacagtatgacctattggtcctgccaccatccttcccttatggtggcatggagaatccttgccttacttttgtaactcctactctactggcaggcgacaagtcactctccaatgtcattgcacatgaaatatctcatagctggacagggaatctagtgaccaacaaaacttgggatcacttttggttaaatgagggacatactgtgtacttggaacgccacatttgcggacgattgtttggtgaaaagttcagacattttaatgctctgggaggatggggagaactacagaattcggtaaagacatttggggagacacatcctttcaccaaacttgtggttgatctgacagatatagaccctgatgtagcttattcttcagttccctatgagaagggctttgctttacttttttaccttgaacaactgcttggaggaccagagattttcctaggattcttaaaagcttatgttgagaagttttcctataagagcataactactgatgactggaaggatttcctgtattcctattttaaagataaggttgatgttctcaatcaagttgattggaatgcctggctctactctcctggactgcctcccataaagcccaattatgatatgactctgacaaatgcttgtattgccttaagtcaaagatggattactgccaaagaagatgatttaaattcattcaatgccacagacctgaaggatctctcttctcatcaattgaatgacncnntaccacacaccccccaaagcccacnncanccaatggngcacaaaaaacaaaaacaaaaaaaaaacaacaacaaanccaanaacaaancaaaaaaaccacccagatccctcccgccccccatggctgcggctctgcattcaatccaagtgggaggacgcaattcctttggcgctaaagatggcaactgaacaaggaagaatgaagtttacccggcccttattcaaggatcttgctgcctttgacaaatcccatgatcaagctgtccgaacctaccaagagcacaaagcaagcatgcatcccgtgactgcaatgctggtggggaaagacttaaaagtggattaaagacctgcgtattgatgattttagagatttctcttttttaaatggaattcgtaaagaaatataaaacttcagctcacaattaaaactgtctttttagttttggctttttattgttttgttggtgattttactgaaataaagttgagctacttcttctta

SEQ ID NO: 354682 - DNA, 1262 bp, Homo sapiens
tactttttaatgccatcatactagttcatgataaagctatgctgagttatgtacccatcccccactgatggacattgaggtgttctccttggttgattgacttggaaggctgtctgtcacctggatccattctgcctgtccagtcttatttttctcctttctagtcatgtgaaggttattgcttttagaacttgggttatgcattccttttctgtgtcttcatgtgttatccccttacctataattagaatttctcttctcccttccactgaattacatatattcttcaaggcccaacttaagtcccacctccttttttgaacattctttcactctgaaagtcctcgtagatttccctattctctgaatgttctctgttctctgtggttaatagtacaatgccaaacacgcacacaaaatgtcaaataattacctttctatgaattgatttcttttcttttttactcttagagattttcctaggattcttaaaagcttatgttgagaagttttcctataagagcataactactgatgactggaaggatttcctgtattcctattttaaagataaggttgatgttctcaatcaagttgattggaatgcctggctctactctcctggactgcctcccataaagcccaattatgatatgactctgacaaatgcttgtattgccttaagtcaaagatggattactgccaaagaagatgatttaaattcattcaatgccacagacctgaaggatctctcttctcatcaattgaatgagtttttagcacagacgctccagagggcacctcttccattggggcacataaagcgaatgcaagaggtgtacaacttcaatgccattaacaattctgaaatacgattcagatggctgcggctctgcattcaatccaagtgggaggacgcaattcctttggcgctaaagatggcaactgaacaaggaagaatgaagtttacccggcccttattcaaggatcttgctgcctttgacaaatcccatgatcaagctgtccgaacctaccaagagcacaaagcaagcatgcatcccgtgactgcaatgctggtggggaaagacttaaaagtggattaaagacctgcgtattgatgattttagagatttctcttttttaaatggaattcgtaaagaaatataaaacttcagctcacaattaaaactgtctttttagttttggctttttattgttttgttggtgattttactgaaataaagttgagctacttcttctta

SEQ ID NO: 354683 - DNA, 1024 bp, Homo sapiens
atcctagtgttccagtctccaagttttagattcccctaaagttacaccactgagtgaagtaaagacatttggggagacacatcctttcaccaaacttgtggttgatctgacagatatagaccctgatgtagcttattcttcagttccctatgagaagggctttgctttacttttttaccttgaacaactgcttggaggaccagagattttcctaggattcttaaaagcttatgttgagaagttttcctataagagcataactactgatgactggaaggatttcctgtattcctattttaaagataaggttgatgttctcaatcaagttgattggaatgcctggctctactctcctggactgcctcccataaagcccaaccttgctagagattatgaggacctgaagtcatacaaaggcagtggaaaagaaaggagtaactgagagaagagacgtttgggggctagaatctattggcaactgattggctgtgttatgatatgactctgacaaatgcttgtattgccttaagtcaaagatggattactgccaaagaagatgatttaaattcattcaatgccacagacctgaaggatctctcttctcatcaattgaatgagtttttagcacagacgctccagaggatggctgcggctctgcattcaatccaagtgggaggacgcaattcctttggcgctaaagatggcaactgaacaaggaagaatgaagtttacccggcccttattcaaggatcttgctgcctttgacaaatcccatgatcaagctgtccgaacctaccaagagcacaaagcaagcatgcatcccgtgactgcaatgctggtggggaaagacttaaaagtggattaaagacctgcgtattgatgattttagagatttctcttttttaaatggaattcgtaaagaaatataaaacttcagctcacaattaaaactgtctttttagttttggctttttattgttttgttggtgattttactgaaataaagttgagctacttcttctta

SEQ ID NO: 354684 - DNA, 1473 bp, Homo sapiens
ctgaatacttcacaaagtaaattatccctgtgctcccagtagaatatcctcatctggaataagtttgcacagaatttacttagtgtgcaatttgtttcttttatttttatctgacttatttctatattataaaatatttaggattttaatctggctatgcatttctctccagctcctttcttccaaggaatcctgttgaaatgatacggtatacttctttattttgctcttaggcacctcttccattggggcacataaagcgaatgcaagaggtgtacaacttcaatgccattaacaattctgaaatacgattcaggtacatcattttaacttgtctctgtggaagaaagcagaaaactaaactcctttgaaagatggagaaagggaatgcagagtatgagacatacttgagtcttgagaattccttgtcaaactgactgcttctatataaatacttatagtggtatttaaggaatagttgcaatatgtaatctggtagtattaatctttttgttagactttgctctaaacctctcttgccttaaaagaaaaaaaaaaaattagaatgaaggattccgtggtaaataggctttctccacaaccaactaaatctactttgaaatgggaatagttagaaatattttattctattatatgttaatctttcttaattcaaatttgtaatgtgaggcttaaaccaaagtttaattccttcagaaattgcatgtataaggtatgtgagcacctacctgatctttcttaattcaaatttgtaatgtgaggcttaaaccaaagtttaattccttcagaaattggatttataaggtatgtgagcacctacctgatccagacctttaaaaatatatgatctttttcaagaaccagctcctcttctttctcttcaccaattattaaattgtatatataaggatttgagagtctcagaatcaagacataccataaagtggtgtacagtataactatagtggggttattcatatcactacagaagtaatattaagatatacctgtcatatcctgccccttcctcattttctactccatgctccccccaaatcctccttttagatatggctgcggctctgcattcaatccaagtgggaggacgcaattcctttggcgctaaagatggcaactgaacaaggaagaatgaagtttacccggcccttattcaaggatcttgctgcctttgacaaatcccatgatcaagctgtccgaacctaccaagagcacaaagcaagcatgcatcccgtgactgcaatgctggtggggaaagacttaaaagtggattaaagacctgcgtattgatgattttagagatttctcttttttaaatggaattcgtaaagaaatataaaacttcagctcacaattaaaactgtctttttagttttggctttttattgttttgttggtgattttactgaaataaagttgagctacttcttctta

SEQ ID NO: 354685 - DNA, 607 bp, Homo sapiens
gtcatatcctgccccttcctcattttctactccatgctccccccaaatcctccttttagatatggctgcggctctgcattcaatccaagtgggaggacgcaattcctttggcgctaaagatggcaactgaacaaggaagaatgaagtttacccggcccttattcaagtaagaacccactcagaccgtactttgaattcatctaagaaacaggaagaaaactgtcaaatatttaaacgtaatctatatgacaatattttttaatttgttaaagtttatcagtataattttggaatagggattcacacttataaatatttaaaatgtgaaataatttcattcctctttttagaagcattatatatggattactattttggatcaaatagagttagatactgataaaatagaaataaatcaaagatagccttatatacacaaagatttttaaaggtaactagaagataattggtgggtaggtatagacaagaaagagagtctgaagttaaatgtaaggagaaataagcagataaagctaactcttttgtgttcaaatgttgcatagaggtcaagggtaggttgcttgacataataaaggaatgcttagtg

SEQ ID NO: 354686 - DNA, 465 bp, Homo sapiens
atcataggctgtggtgggaaacaggagctcaggtagggaggggtgattacgatagaatgtttcgaattttgtgttggaaacaggtggcacaaatcatcagtaaacccttttaacgtctaaaaaaggtatcagcaaaaataatactttagatttttttcctagcacttcattaagaagtgccatacattatctcgttaatttttacaacagccttgctagagattatgaggacctgaagtcatacaaaggcagtggaaaagaaaggagtaactgagagaagagacgtttgggggctagaatctattggcaactgattggctgtggtgagaaaagaagaaattaaaaatgactgagcagagatgtaataaagattcagctcaatccagcacacatttattgtcaggcactaatatgatgaataaggaactcacagagcaaatatgtatgtatcaagtaattataata

SEQ ID NO: 354687 - DNA, 2133 bp, Homo sapiens
ttccttttttcccggcgtgcaccgcgaatccctcctcctcttctttacctctctccctcctcctcaggttctctatcgacgagtctggtagctgagcgttgggctgtaggtcgctgtgctgtgtgatcccccagagccatgcccgagatagtggatacctgttcgttggcctctccggcttccgtctgccggaccaagcacctgcacctgcgctgcagcgtcgactttactcgccggacgctgaccgggactgctgctctcacggtccagtctcaggaggacaatctgcgcagcctggttttggatacaaaggaccttacaatagaaaaagtagtgatcaatggacaagaagtcaaatatgctcttggagaaagacaaagttacaagggatcgccaatggaaatctctcttcctatcgctttgagcaaaaatcaagaaattgttatagaaatttcttttgagacctctccaaaatcttctgctctccagtggctcactcctgaacagacttctgggaaggaacacccatatctctttagtcagtgccaggccatccactgcagagcaatccttccttgtcaggacactccttctgtgaaattaacctatactgcagaggtgtctgtccctaaagaactggtggcacttatgagtgctattcgtgatggagaaacacctgacccagaagacccaagcaggaaaatatacaaattcatccaaaaagttccaataccctgctacctgattgctttagttgttggagctttagaaagcaggcaaattggcccaagaactttggtgtggtctgagaaagagcaggtggaaaagtctgcttatgagttttctgagactgaatctatgcttaaaatagcagaagatctgggaggaccgtatgtatggggacagtatgacctattggtcctgccaccatccttcccttatggtggcatggagaatccttgccttacttttgtaactcctactctactggcaggcgacaagtcactctccaatgtcattgcacatgaaatatctcatagctggacagggaatctagtgaccaacaaaacttgggatcacttttggttaaatgagggacatactgtgtacttggaacgccacatttgcggacgattgtttggtgaaaagttcagacattttaatgctctgggaggatggggagaactacagaattcggtaaagacatttggggagacacatcctttcaccaaacttgtggttgatctgacagatatagaccctgatgtagcttattcttcagttccctatgagaagggctttgctttacttttttaccttgaacaactgcttggaggaccagagattttcctaggattcttaaaagcttatgttgagaagttttcctataagagcataactactgatgactggaaggatttcctgtattcctattttaaagataaggttgatgttctcaatcaagttgattggaatgcctggctctactctcctggactgcctcccataaagcccaattatgatatgactctgacaaatgcttgtattgccttaagtcaaagatggattactgccaaagaagatgatttaaattcattcaatgccacagacctgaaggatctctcttctcatcaattgaatgagtttttagcacagacgctccagagggcacctcttccattggggcacataaagcgaatgcaagaggtgtacaacttcaatgccattaacaattctgaaatacgattcagatggctgcggctctgcattcaatccaagtgggaggacgcaattcctttggcgctaaagatggcaactgaacaaggaagaatgaagtttacccggcccttattcaaggatcttgctgcctttgacaaatcccatgatcaagctgtccgaacctaccaagagcacaaagcaagcatgcatcccgtgactgcaatgctggtggggaaagacttaaaagtggattaaagacctgcgtattgatgattttagagatttctcttttttaaatggaattcgtaaagaaatataaaacttcagctcacaattaaaactgtctttttagttttggctttttattgttttgttggtgattttactgaaataaagttgagctacttcttctta

SEQ ID NO: 354688 - DNA, 457 bp, Homo sapiens
ttccttttttcccggcgtgcaccgcgaatccctcctcctcttctttacctctctccctcctcctcaggttctctatcgacgagtctggtagctgagcgttgggctgtaggtcgctgtgctgtgtgatcccccagagccatgcccgagatagtggatacctgttcgttggcctctccggcttccgtctgccggaccaagcacctgcacctgcgctgcagcgtcgactttactcgccggacgctgaccgggactgctgctctcacggtccagtctcaggaggacaatctgcgcagcctggttttggatacaaaggaccttacaatagaaaaagtagtgatcaatggacaagaagtcaaatatgctcttggagaaagacaaagttacaagggatcgccaatggaaatctctcttcctatcgctttgagcaatcaagattgttatgatctttctcttttac

SEQ ID NO: 354689 - DNA, 2078 bp, Homo sapiens
ttccttttttcccggcgtgcaccgcgaatccctcctcctcttctttacctctctccctcctcctcaggttctctatcgacgagtctggtagctgagcgttgggctgtaggtcgctgtgctgtgtgatcccccagagccatgcccgagatagtggatacctgttcgttggcctctccggcttccgtctgccggaccaagcacctgcacctgcgctgcagcgtcgactttactcgccggacgctgaccgggactgctgctctcacggtccagtctcaggaggacaatctgcgcagcctggttttggatacaaaggaccttacaatagaaaaagtagtgatcaatggacaagaagtcaaatatgctcttggagaaagacaaagttacaagggatcgccaatggaaatctctcttcctatcgctttgagcaaaaatcaagaaattgttatagaaatttcttttgagacctctccaaaatcttctgctctccagtggctcactcctgaacagacttctgggaaggaacacccatatctctttagtcagtgccaggccatccactgcagagcaatccttccttgtcaggacactccttctgtgaaattaacctatactgcagaggtgtctgtccctaaagaactggtggcacttatgagtgctattcgtgatggagaaacacctgacccagaagacccaagcaggaaaatatacaaattcatccaaaaagttccaataccctgctacctgattgctttagttgttggagctttagaaagcaggcaaattggcccaagaactttggtgtggtctgagaaagagcaggtggaaaagtctgcttatgagttttctgagactgaatctatgcttaaaatagcagaagatctgggaggaccgtatgtatggggacagtatgacctattggtcctgccaccatccttcccttatggtggcatggagaatccttgccttacttttgtaactcctactctactggcaggcgacaagtcactctccaatgtcattgcacatgaaatatctcatagctggacagggaatctagtgaccaacaaaacttgggatcacttttggttaaatgagggacatactgtgtacttggaacgccacatttgcggacgattgtttggtgaaaagttcagacattttaatgctctgggaggatggggagaactacagaattcggtaaagacatttggggagacacatcctttcaccaaacttgtggttgatctgacagatatagaccctgatgtagcttattcttcagttccctatgagaagggctttgctttacttttttaccttgaacaactgcttggaggaccagagattttcctaggattcttagatttccctgattcctattttaaagataggttgatgttctcaatcaagttgattggaatgcctggctctactctcctggactgcctcccataaagcccaattatgatatgactctgacaaatgcttgtattgccttaagtcaaagatggattactgccaaagaagatgatttaaattcattcaatgccacagacctgaaggatctctcttctcatcaattgaatgagtttttagcacagacgctccagagggcacctcttccattggggcacataaagcgaatgcaagaggtgtacaacttcaatgccattaacaattctgaaatacgattcagatggctgcggctctgcattcaatccaagtgggaggacgcaattcctttggcgctaaagatggcaactgaacaaggaagaatgaagtttacccggcccttattcaaggatcttgctgcctttgacaaatcccatgatcaagctgtccgaacctaccaagagcacaaagcaagcatgcatcccgtgactgcaatgctggtggggaaagacttaaaagtggattaaagacctgcgtattgatgattttagagatttctcttttttaaatggaattcgtaaagaaatataaaacttcagctcacaattaaaactgtctttttagttttggctttttattgttttgttggtgattttactgaaataaagttgagctacttcttctta

SEQ ID NO: 354690 - DNA, 2334 bp, Homo sapiens
ttccttttttcccggcgtgcaccgcgaatccctcctcctcttctttacctctctccctcctcctcaggttctctatcgacgagtctggtagctgagcgttgggctgtaggtcgctgtgctgtgtgatcccccagagccatgcccgagatagtggatacctgttcgttggcctctccggcttccgtctgccggaccaagcacctgcacctgcgctgcagcgtcgactttactcgccggacgctgaccgggactgctgctctcacggtccagtctcaggaggacaatctgcgcagcctggttttggatacaaaggaccttacaatagaaaaagtagtgatcaatggacaagaagtcaaatatgctcttggagaaagacaaagttacaagggatcgccaatggaaatctctcttcctatcgctttgagcaaaaatcaagaaattgttatagaaatttcttttgagacctctccaaaatcttctgctctccagtggctcactcctgaacagacttctgggaaggaacacccatatctctttagtcagtgccaggccatccactgcagagcaatccttccttgtcaggacactccttctgtgaaattaacctatactgcagaggtgtctgtccctaaagaactggtggcacttatgagtgctattcgtgatggagaaacacctgacccagaagacccaagcaggaaaatatacaaattcatccaaaaagttccaataccctgctacctgattgctttagttgttggagctttagaaagcaggcaaattggcccaagaactttggtgtggtctgagaaagagcaggtggaaaagtctgcttatgagttttctgagactgaatctatgcttaaaatagcagaagatctgggaggaccgtatgtatggggacagtatgacctattggtcctgccaccatccttcccttatggtggcatggagaatccttgccttacttttgtaactcctactctactggcaggcgacaagtcactctccaatgtcattgcacatgaaatatctcatagctggacagggaatctagtgaccaacaaaacttgggatcacttttggttaaatgagggacatactgtgtacttggaacgccacatttgcggacgattgtttggtgaaaagttcagacattttaatgctctgggaggatggggagaactacagaattcggtaaagacatttggggagacacatcctttcaccaaacttgtggttgatctgacagatatagaccctgatgtagcttattcttcagttccctatgagaagggctttgctttacttttttaccttgaacaactgcttggaggaccagagattttcctaggattcttaaaagcttatgttgagaagttttcctataagagcataactactgatgactggaaggatttcctgtattcctattttaaagataaggttgatgttctcaatcaagttgattggaatgcctggctctactctcctggactgcctcccataaagcccaattatgatatgactctgacaaatgcttgtattgccttaagtcaaagatggattactgccaaagaagatgatttaaattcattcaatgccacagacctgaaggatctctcttctcatcaattgaatgagtttttagcacagacgctccagagggcacctcttccattggggcacataaagcgaatgcaagaggtgtacaacttcaatgccattaacaattctgaaatacgattcagatggctgcggctctgcattcaatccaagtgggaggacgcaattcctttggcgctaaagatggcaactgaacaaggaagaatgaagtttacccggcccttattcaaggatcttgctgcctttgacaaatcccatgatcaagctgtccgaacctaccaagagcacaaagcaagcatgcatcccgtgactgcaatgctggtggggaaagacttaaaagtggattaaagacctgcgtattgatgattttagagatttctcttttttaaatggaattcgtaaagaaatataaaacttcagctcacaattaaaactgtctttttagttttggctttttattgttttgttggtgattttactgaaataaagttgagctacttcttcttatagtggcatattctttgtaatttacagttcactttggttccattaaatttgattatttaagaacacaaaaaaaaaaaaaaaaaaaggggggcaaaattacggggcaatagcacatttgaagaggacaagagaaaaagagggaaaagggaaaggttgacactgggagcaacacaacgaaatgttagtggtggataaaaaaat

SEQ ID NO: 354691 - DNA, 1142 bp, Homo sapiens
attaatcacactgttttctttaggtcattgcacatgaaatatctcatagctggacagggaatctagtgaccaacaaaacttgggatcacttttggttaaatgagggacatactgtgtacttggaacgccacatttgcggacgattgtttggtgaaaagttcagacattttaatgctctgggaggatggggagaactacagaattcggtaaagacatttggggagacacatcctttcaccaaacttgtggttgatctgacagatatagaccctgatgtagcttattcttcagttccctatgagaagggctttgctttacttttttaccttgaacaactgcttggaggaccagagattttcctaggattcttaaaagcttatgttgagaagttttcctataagagcataactactgatgactggaaggatttcctgtattcctattttaaagataaggttgatgttctcaatcaagttgattggaatgcctggctctactctcctggactgcctcccataaagcccaattatgatatgactctgacaaatgcttgtattgccttaagtcaaagatggattactgccaaagaagatgatttaaattcattcaatgccacagacctgaaggatctctcttctcatcaattgaatgagtttttagcacagacgctccagagggcacctcttccattggggcacataaagcgaatgcaagaggtgtacaacttcaatgccattaacaattctgaaatacgattcagatggctgcggctctgcattcaatccaagtgggaggacgcaattcctttggcgctaaagatggcaactgaacaaggaagaatgaagtttacccggcccttattcaaggatcttgctgcctttgacaaatcccatgatcaagctgtccgaacctaccaagagcacaaagcaagcatgcatcccgtgactgcaatgctggtggggaaagacttaaaagtggattaaagacctgcgtattgatgattttagagatttctcttttttaaatggaattcgtaaagaaatataaaacttcagctcacaattaaaactgtctttttagttttggctttttattgttttgttggtgattttactgaaataaagttgagctacttcttctta

SEQ ID NO: 354692 - DNA, 2908 bp, Homo sapiens
ttccttttttcccggcgtgcaccgcgaatccctcctcctcttctttacctctctccctcctcctcaggttctctatcgacgagtctggtagctgagcgttgggctgtaggtcgctgtgctgtgtgatcccccagagccatgcccgagatagtggatacctgttcgttggcctctccggcttccgtctgccggaccaagcacctgcacctgcgctgcagcgtcgactttactcgccggacgctgaccgggactgctgctctcacggtccagtctcaggaggacaatctgcgcagcctggttttggatacaaaggaccttacaatagaaaaagtagtgatcaatggacaagaagtcaaatatgctcttggagaaagacaaagttacaagggatcgccaatggaaatctctcttcctatcgctttgagcaaaaatcaagaaattgttatagaaatttcttttgagacctctccaaaatcttctgctctccagtggctcactcctgaacagacttctgggaaggaacacccatatctctttagtcagtgccaggccatccactgcagagcaatccttccttgtcaggacactccttctgtgaaattaacctatactgcagaggtgtctgtccctaaagaactggtggcacttatgagtgctattcgtgatggagaaacacctgacccagaagacccaagcaggaaaatatacaaattcatccaaaaagttccaataccctgctacctgattgctttagttgttggagctttagaaagcaggcaaattggcccaagaactttggtgtggtctgagaaagagcaggtggaaaagtctgcttatgagttttctgagactgaatctatgcttaaaatagcagaagatctgggaggaccgtatgtatggggacagtatgacctattggtcctgccaccatccttcccttatggtggcatggagaatccttgccttacttttgtaactcctactctactggcaggcgacaagtcactctccaatgtcattgcacatgaaatatctcatagctggacagggaatctagtgaccaacaaaacttgggatcacttttggttaaatgagggacatactgtgtacttggaacgccacatttgcggacgattgtttggtgaaaagttcagacattttaatgctctgggaggatggggagaactacagaattcggtaaagacatttggggagacacatcctttcaccaaacttgtggttgatctgacagatatagaccctgatgtagcttattcttcagttccctatgagaagggctttgctttacttttttaccttgaacaactgcttggaggaccagagattttcctaggattcttaaaagcttatgttgagaagttttcctataagagcataactactgatgactggaaggatttcctgtattcctattttaaagataaggttgatgttctcaatcaagttgattggaatgcctggctctactctcctggactgcctcccataaagcccaattatgatatgactctgacaaatgcttgtattgccttaagtcaaagatggattactgccaaagaagatgatttaaattcattcaatgccacagacctgaaggatctctcttctcatcaattgaatgagtttttagcacagacgctccagagggcacctcttccattggggcacataaagcgaatgcaagaggtgtacaacttcaatgccattaacaattctgaaatacgattcaggtacatcattttaacttgtctctgtggaagaaagcagaaaactaaactcctttgaaagatggagaaagggaatgcagagtatgagacatacttgagtcttgagaattccttgtcaaactgactgcttctatataaatacttatagtggtatttaaggaatagttgcaatatgtaatctggtagtattaatctttttgttagactttgctctaaacctctcttgccttaaaagaaaaaaaaaaaattagaatgaaggattccgtggtaaataggctttctccacaaccaactaaatctactttgaaatgggaatagttagaaatattttattctattatatgttaatctttcttaattcaaatttgtaatgtgaggcttaaaccaaagtttaattccttcagaaattgcatgtataaggtatgtgagcacctacctgatctttcttaattcaaatttgtaatgtgaggcttaaaccaaagtttaattccttcagaaattggatttataaggtatgtgagcacctacctgatccagacctttaaaaatatatgatctttttcaagaaccagctcctcttctttctcttcaccaattattaaattgtatatataaggatttgagagtctcagaatcaagacataccataaagtggtgtacagtataactatagtggggttattcatatcactacagaagtaatattaagatatacctgtcatatcctgccccttcctcattttctactccatgctccccccaaatcctccttttagatatggctgcggctctgcattcaatccaagtgggaggacgcaattcctttggcgctaaagatggcaactgaacaaggaagaatgaagtttacccggcccttattcaaggatcttgctgcctttgacaaatcccatgatcaagctgtccgaacctaccaagagcacaaagcaagcatgcatcccgtgactgcaatgctggtggggaaagacttaaaagtggattaaagacctgcgtattgatgattttagagatttctcttttttaaatggaattcgtaaagaaatataaaacttcagctcacaattaaaactgtctttttagttttggctttttattgttttgttggtgattttactgaaataaagttgagctacttcttctta

SEQ ID NO: 354693 - DNA, 2127 bp, Homo sapiens
ttccttttttcccggcgtgcaccgcgaatccctcctcctcttctttacctctctccctcctcctcaggttctctatcgacgagtctggtagctgagcgttgggctgtaggtcgctgtgctgtgtgatcccccagagccatgcccgagatagtggatacctgttcgttggcctctccggcttccgtctgccggaccaagcacctgcacctgcgctgcagcgtcgactttactcgccggacgctgaccgggactgctgctctcacggtccagtctcaggaggacaatctgcgcagcctggttttggatacaaaggaccttacaatagaaaaagtagtgatcaatggacaagaagtcaaatatgctcttggagaaagacaaagttacaagggatcgccaatggaaatctctcttcctatcgctttgagcaaaaatcaagaaattgttatagaaatttcttttgagacctctccaaaatcttctgctctccagtggctcactcctgaacagacttctgggaaggaacacccatatctctttagtcagtgccaggccatccactgcagagcaatccttccttgtcaggacactccttctgtgaaattaacctatactgcagaggtgtctgtccctaaagaactggtggcacttatgagtgctattcgtgatggagaaacacctgacccagaagacccaagcaggaaaatatacaaattcatccaaaaagttccaataccctgctacctgattgctttagttgttggagctttagaaagcaggcaaattggcccaagaactttggtgtggtctgagaaagagcaggtggaaaagtctgcttatgagttttctgagactgaatctatgcttaaaatagcagaagatctgggaggaccgtatgtatggggacagtatgacctattggtcctgccaccatccttcccttatggtggcatggagaatccttgccttacttttgtaactcctactctactggcaggcgacaagtcactctccaatgtcattgcacatgaaatatctcatagctggacagggaatctagtgaccaacaaaacttgggatcacttttggttaaatgagggacatactgtgtacttggaacgccacatttgcggacgattgtttggtgaaaagttcagacattttaatgctctgggaggatggggagaactacagaattcggtaaagacatttggggagacacatcctttcaccaaacttgtggttgatctgacagatatagaccctgatgtagcttattcttcagttccctatgagaagggctttgctttacttttttaccttgaacaactgcttggaggaccagagattttcctaggattcttaaaagcttatgttgagaagttttcctataagagcataactactgatgactggaaggatttcctgtattcctattttaaagataaggttgatgttctcaatcaagttgattggaatgcctggctctactctcctggactgcctcccataaagcccaattatgatatgactctgacaaatgcttgtattgccttaagtcaaagatggattactgccaaagaagatgatttaaattcattcaatgccacagacctgaaggatctctcttctcatcaattgaatgagtttttagcacagacgctccagaggatggctgcggctctgcattcaatccaagtgggaggacgcaattcctttggcgctaaagatggcaactgaacaaggaagaatgaagtttacccggcccttattcaaggatcttgctgcctttgacaaatcccatgatcaagctgtccgaacctaccaagagcacaaagcaagcatgcatcccgtgactgcaatgctggtggggaaagacttaaaagtggattaaagacctgcgtattgatgattttagagatttctcttttttaaatggaattcgtaaagaaatataaaacttcagctcacaattaaaactgtctttttagttttggctttttattgttttgttggtgattttactgaaataaagttgagctacttcttcttatagtggcatattctttgtaaattttaacaaggtttaatcttttgatttacaaattaaaaaattttgaattagcttta

SEQ ID NO: 354694 - DNA, 1276 bp, Homo sapiens
gaaagagggatgttttgcaagaattttgcacacactacatgttctttcccattgttgcaaaatatgatttctaagttgagaacacacaaatattggtataatttgcttaacaattaccatgtgttaatttcattttcttctaaaaaggaatgaaatcatcaggcaatggtatcgggctctctcaagggtctagcatctagaacggtgccaattatgtagcaggtgcttgcaggtttgttagatgattagatgtttggaacaaccaagtaaaatccatgacagcaaggacttgatgttgttcatcttgttgtcttgagtgcctagaactgttcctgccatgtactaaatatgctccaactgattccaactactttagcatatactactcgagcacatgacagtcttttgctgaggtgctttggcattctttctaaaagatagatgggtgtttcattaatgtggtatccatttgggtttgtgagttcttggatgatgccagtagtatgtaagttaggtaaaatatttcctattttcctcactttggagtttgttttccttatttaaaagggactttgaaatttaagtatgtactgtagctttaaaactgcatttctgcaaaagcacgtgcatttttaaacaatgtaatctttatctttgcagttatgatatgactctgacaaatgcttgtattgccttaagtcaaagatggattactgccaaagaagatgatttaaattcattcaatgccacagacctgaaggatctctcttctcatcaattgaatgagtttttagcacagacgctccagagggcacctcttccattggggcacataaagcgaatgcaagaggtgtacaacttcaatgccattaacaattctgaaatacgattcagatggctgcggctctgcattcaatccaagtgggaggacgcaattcctttggcgctaaagatggcaactgaacaaggaagaatgaagtttacccggcccttattcaaggatcttgctgcctttgacaaatcccatgatcaagctgtccgaacctaccaagagcacaaagcaagcatgcatcccgtgactgcaatgctggtggggaaagacttaaaagtggattaaagacctgcgtattgatgattttagagatttctcttttttaaatggaattcgtaaagaaatataaaacttcagctcacaattaaaactgtctttttagttttggctttttattgttttgttggtgattttactgaaataaagttgagctacttcttctta

SEQ ID NO: 354695 - DNA, 506 bp, Homo sapiens
agaaagaaagagtagtcacgtgctcccagaaggactctaagtcaagtcacagagctaaaaatacatgaaggtggcaccagctcatggggcactgggcctggctctgcagaggcctctgccttccttcactgtgcaccctgggctcatgcaccaaggcagagaacaggaagaagtgaggggacaagaagaaggcagaatgtccagatggaggataagaccaaagagccagcacctacaggacttgggctgcttcaggctgaacgctgggagaccacttcctgtgctgacacacagagctcccatctccatgaagaccgcacagcgcgtgtaagccagcccagctgacctaaagcgacatgagactactagaaagaaacgacacccttccccaagcccccacagctactccaacccaaacaacaaccaagccagtttaatggtaggaatttgtattttttgcctttgttcagaatacatgacattggtaaatatgccacatgcctttg

SEQ ID NO: 354696 - DNA, 872 bp, Homo sapiens
tggtaacaccaagtgacttgtcaaaggtcacggagccagtaagtggaacaaccagggtttcagagctttttctgctactctagtagttcttacctgaagattgatggtaactcttaattttgcatgtgtatttttcctggtgggagatccatagctttcactaaattatcctagagtaagtgatcccaaaatggtgatggccatcatgtgtaccatgctacctttccagagccccatttctttgtggttccatgtgatggaaaataagctcaaccggcctgtcaggcgaggaagaggcaggtgtatgcccacaacatgcccacagcttggagatcaggtgacctcaaggaggaagtagcccacaaatcacccctcttttcctcttcacagtggagttccaggtgatgacacagacccaatccctgagcttcctgctggggtcctcagcctccttggactgtggcttctccatggcaccgggcttggacctcatcagtgtggagtggcgactgcagcacaagggcaggggtcagttggtgtacagctggaccgcagggcaggggcaggctgtgcggaagggcgctaccctggagcctgcacaactgggcatggccagggatgcctccctcaccctgcccggcctcactatacaggacgaggggacctacatttgccagatcaccacctctctgtaccgagctcagcagatcatccagctcaacatccaaggtgaggccaggacatggttatcccagggaaggggatataacatgtctactgggagcgtttccagattgggacccaaatgcaagaatgatttcctgagaagcaggcttcaatcccacaacttaaatgccatcaccaccatggaa

SEQ ID NO: 354697 - DNA, 3357 bp, Homo sapiens
tgccatcttgctctaagtgaaagtgaaagaaaagtcggcagcagagggaacagggaagaaacctaaaggctgcaggctgccaggtgtgcttggagagcccccttcttccgccgggcctcgcaagcagcgtaggactgtggagaagggcggtgggcaaggagggaactcgagagcagcctccatgggcacacaggagggctggtgcctgctgctctgcctggctctatctggagcagcagaaaccaagccccacccagcagaggggcagtggcgggcagtggacgtggtcctagactgtttcctggcgaaggacggtgcgcaccgtggagctctcgccagcagtgaggacagggcaagggcctcccttgtgctgaagcaggtgccagtgctggacgatggctccctggaggacttcaccgatttccaagggggcacactggcccaagatgacccacctattatctttgaggcctcagtggacctggtccagattccccaggccgaggccttgctccatgctgactgcagtgggaaggaggtgacctgtgagatctcccgctactttctccagatgacagagaccactgttaagacagcagcttggttcatggccaacgtgcaggtctctggagggggacctagcatctccttggtgatgaagactcccagggtcgccaagaatgaggcgctctggcacccgacgctgaacttgccactgagcccccaggggactgtgcgaactgcagtggagttccaggtgatgacacagacccaatccctgagcttcctgctggggtcctcagcctccttggactgtggcttctccatggcaccgggcttggacctcatcagtgtggagtggcgactgcagcacaagggcaggggtcagttggtgtacagctggaccgcagggcaggggcaggctgtgcggaagggcgctaccctggagcctgcacaactgggcatggccagggatgcctccctcaccctgcccggcctcactatacaggacgaggggacctacatttgccagatcaccacctctctgtaccgagctcagcagatcatccagctcaacatccaagcttcccctaaagtacgactgagcttggcaaacgaagctctgctgcccaccctcatctgcgacattgctggctattaccctctggatgtggtggtgacgtggacccgagaggagctgggtggatccccagcccaagtctctggtgcctccttctccagcctcaggcaaagcgtggcaggcacctacagcatctcctcctctctcaccgcagaacctggctctgcaggtgccacttacacctgccaggtcacacacatctctctggaggagccccttggggccagcacccaggttgtcccaccagagcggagaacagccttgggagtcatctttgccagcagtctcttccttcttgcactgatgttcctggggcttcagagacggcaagcacctacaggacttgggctgcttcaggctgaacgctgggagaccacttcctgtgctgacacacagagctcccatctccatgaagaccgcacagcgcgtgtaagccagcccagctgacctaaagcgacatgagactactagaaagaaacgacacccttccccaagcccccacagctactccaacccaaacaacaaccaagccagtttaatggtaggaatttgtattttttgcctttgttcagaatacatgacattggtaaatatgccacatgcctttggtggaagtacaactgttgttattactctatacaagtatgagatcagggttaggaaaaaaagacaaagaggtgatgacagacacacagtggaaaccccacatcgtctcatggcaaaccgaagaacgggatgtgggaagctcagcttcatttgactgcaaagtcccagggttttgttgcacatttgctcatgcacatgggtggtgggaggaaagggggatagcaaagacacacagaagagggtacagggtgggtgagaaagaaagtagaagggctaatacccccaaagaacaaggccaactacacctggtgagcctcagagggacagaaacccaggaatgattcctgtgatagggctgggagagccaagaggacggattcgctccaggcttgggacacatcgaggacagtggtggttcttctccagcggtgaccccctgcattaggcaaggaggagcccagaggagagtggagaccttcgaggggggccgttgggagggtactgactgctttcttccagctcttcagtcccgcccttgggcaggacgaagggaatgtgggaaacaagggcgaagggaaaggaaggatggttttgagcaatgaaatgctgctgcatggaaagtgggcatccagaccctgcccagcatggcctcagcctcttcctgttcgtggaccgagggaagaaggaataaagggccatgggcattctccgctctgctcccagcctgccctcctccccttgcacctgggcttatcccacattaatagcccatcctgaagctcagcaattgccccgaagataggctgagcagatcccatcctcaggttccactgtctatacacacaaaccatgcaaagaggaggaagagaaaggaggcaaagtagaattcagacaggaaagggtggttcaaaggggaatatactacaggaagaacagagaggcggctctcaaggagagggccccatgacagcacagcaatacacaagcacacctgacacaggctggcacgcctccccccaaggtggggctggtgggtctacatgacttctctgcatcctgaggatcggccgggccccaggaagaaccacttgcctcatccctgtctttggcaagtgcacgggtggtgtggaggaaaggattccatgggtgtccaaagatctcacactgctaacaccctcacgctccttcatcaacaggaagagaggaacaggaccctctttaacgagggcaaggagtggcttcctctgagcttgttactttcaaattaagcacttgactcactgtttctctataactaacaggcaatctctctctttatgccaacaattaactgggagctaggttaaattatttggctagataaaactaccagctagatggatttatttggtgccctcatacagaatgctgtagaaaatgtaaagaagagaaagctccttccagctagaagcacatgggactgcttctaggatggaaacaagtcctgctattttcacaatccctaagtgttctccaggcctctggagaacaaagtaaagttgtaagatccccaaagacacggaaaatcctggacgaacagattagaaataactacaaaaaacaagttttta

SEQ ID NO: 354698 - DNA, 3232 bp, Homo sapiens
tgccatcttgctctaagtgaaagtgaaagaaaagtcggcagcagagggaacagggaagaaacctaaaggctgcaggctgccaggtgtgcttggagagcccccttcttccgccgggcctcgcaagcagcgtaggactgtggagaagggcggtgggcaaggagggaactcgagagcagcctccatgggcacacaggagggctggtgcctgctgctctgcctggctctatctggagcagcagaaaccaagccccacccagcagaggggcagtggcgggcagtggacgtggtcctagactgtttcctggcgaaggacggtgcgcaccgtggagctctcgccagcagtgaggacagggcaagggcctcccttgtgctgaagcaggtgccagtgctggacgatggctccctggaggacttcaccgatttccaagggggcacactggcccaagatgacccacctattatctttgaggcctcagtggacctggtccagattccccaggccgaggccttgctccatgctgactgcagtgggaaggaggtgacctgtgagatctcccgctactttctccagatgacagagaccactgttaagacagcagcttggttcatggccaacgtgcaggtctctggagggggacctagcatctccttggtgatgaagactcccagggtcgccaagaatgaggcgctctggcacccgacgctgaacttgccactgagcccccaggggactgtgcgaactgcagtggagttccaggtgatgacacagacccaatccctgagcttcctgctggggtcctcagcctccttggactgtggcttctccatggcaccgggcttggacctcatcagtgtggagtggcgactgcagcacaagggcaggggacgaggggacctacatttgccagatcaccacctctctgtaccgagctcagcagatcatccagctcaacatccaagcttcccctaaagtacgactgagcttggcaaacgaagctctgctgcccaccctcatctgcgacattgctggctattaccctctggatgtggtggtgacgtggacccgagaggagctgggtggatccccagcccaagtctctggtgcctccttctccagcctcaggcaaagcgtggcaggcacctacagcatctcctcctctctcaccgcagaacctggctctgcaggtgccacttacacctgccaggtcacacacatctctctggaggagccccttggggccagcacccaggttgtcccaccagagcggagaacagccttgggagtcatctttgccagcagtctcttccttcttgcactgatgttcctggggcttcagagacggcaagcacctacaggacttgggctgcttcaggctgaacgctgggagaccacttcctgtgctgacacacagagctcccatctccatgaagaccgcacagcgcgtgtaagccagcccagctgacctaaagcgacatgagactactagaaagaaacgacacccttccccaagcccccacagctactccaacccaaacaacaaccaagccagtttaatggtaggaatttgtattttttgcctttgttcagaatacatgacattggtaaatatgccacatgcctttggtggaagtacaactgttgttattactctatacaagtatgagatcagggttaggaaaaaaagacaaagaggtgatgacagacacacagtggaaaccccacatcgtctcatggcaaaccgaagaacgggatgtgggaagctcagcttcatttgactgcaaagtcccagggttttgttgcacatttgctcatgcacatgggtggtgggaggaaagggggatagcaaagacacacagaagagggtacagggtgggtgagaaagaaagtagaagggctaatacccccaaagaacaaggccaactacacctggtgagcctcagagggacagaaacccaggaatgattcctgtgatagggctgggagagccaagaggacggattcgctccaggcttgggacacatcgaggacagtggtggttcttctccagcggtgaccccctgcattaggcaaggaggagcccagaggagagtggagaccttcgaggggggccgttgggagggtactgactgctttcttccagctcttcagtcccgcccttgggcaggacgaagggaatgtgggaaacaagggcgaagggaaaggaaggatggttttgagcaatgaaatgctgctgcatggaaagtgggcatccagaccctgcccagcatggcctcagcctcttcctgttcgtggaccgagggaagaaggaataaagggccatgggcattctccgctctgctcccagcctgccctcctccccttgcacctgggcttatcccacattaatagcccatcctgaagctcagcaattgccccgaagataggctgagcagatcccatcctcaggttccactgtctatacacacaaaccatgcaaagaggaggaagagaaaggaggcaaagtagaattcagacaggaaagggtggttcaaaggggaatatactacaggaagaacagagaggcggctctcaaggagagggccccatgacagcacagcaatacacaagcacacctgacacaggctggcacgcctccccccaaggtggggctggtgggtctacatgacttctctgcatcctgaggatcggccgggccccaggaagaaccacttgcctcatccctgtctttggcaagtgcacgggtggtgtggaggaaaggattccatgggtgtccaaagatctcacactgctaacaccctcacgctccttcatcaacaggaagagaggaacaggaccctctttaacgagggcaaggagtggcttcctctgagcttgttactttcaaattaagcacttgactcactgtttctctataactaacaggcaatctctctctttatgccaacaattaactgggagctaggttaaattatttggctagataaaactaccagctagatggatttatttggtgccctcatacagaatgctgtagaaaatgtaaagaagagaaagctccttccagctagaagcacatgggactgcttctaggatggaaacaagtcctgctattttcacaatccctaagtgttctccaggcctctggagaacaaagtaaagttgtaagatccccaaagacacggaaaatcctggacgaacagattagaaataactacaaaaaacaagttttta

SEQ ID NO: 354699 - DNA, 3195 bp, Homo sapiens
tgccatcttgctctaagtgaaagtgaaagaaaagtcggcagcagagggaacagggaagaaacctaaaggctgcaggctgccagagccccacccagcagaggggcagtggcgggcagtggacgtggtcctagactgtttcctggcgaaggacggtgcgcaccgtggagctctcgccagcagtgaggacagggcaagggcctcccttgtgctgaagcaggtgccagtgctggacgatggctccctggaggacttcaccgatttccaagggggcacactggcccaagatgacccacctattatctttgaggcctcagtggacctggtccagattccccaggccgaggccttgctccatgctgactgcagtgggaaggaggtgacctgtgagatctcccgctactttctccagatgacagagaccactgttaagacagcagcttggttcatggccaacgtgcaggtctctggagggggacctagcatctccttggtgatgaagactcccagggtcgccaagaatgaggcgctctggcacccgacgctgaacttgccactgagcccccaggggactgtgcgaactgcagtggagttccaggtgatgacacagacccaatccctgagcttcctgctggggtcctcagcctccttggactgtggcttctccatggcaccgggcttggacctcatcagtgtggagtggcgactgcagcacaagggcaggggtcagttggtgtacagctggaccgcagggcaggggcaggctgtgcggaagggcgctaccctggagcctgcacaactgggcatggccagggatgcctccctcaccctgcccggcctcactatacaggacgaggggacctacatttgccagatcaccacctctctgtaccgagctcagcagatcatccagctcaacatccaagcttcccctaaagtacgactgagcttggcaaacgaagctctgctgcccaccctcatctgcgacattgctggctattaccctctggatgtggtggtgacgtggacccgagaggagctgggtggatccccagcccaagtctctggtgcctccttctccagcctcaggcaaagcgtggcaggcacctacagcatctcctcctctctcaccgcagaacctggctctgcaggtgccacttacacctgccaggtcacacacatctctctggaggagccccttggggccagcacccaggttgtcccaccagagcggagaacagccttgggagtcatctttgccagcagtctcttccttcttgcactgatgttcctggggcttcagagacggcaagcacctacaggacttgggctgcttcaggctgaacgctgggagaccacttcctgtgctgacacacagagctcccatctccatgaagaccgcacagcgcgtgtaagccagcccagctgacctaaagcgacatgagactactagaaagaaacgacacccttccccaagcccccacagctactccaacccaaacaacaaccaagccagtttaatggtaggaatttgtattttttgcctttgttcagaatacatgacattggtaaatatgccacatgcctttggtggaagtacaactgttgttattactctatacaagtatgagatcagggttaggaaaaaaagacaaagaggtgatgacagacacacagtggaaaccccacatcgtctcatggcaaaccgaagaacgggatgtgggaagctcagcttcatttgactgcaaagtcccagggttttgttgcacatttgctcatgcacatgggtggtgggaggaaagggggatagcaaagacacacagaagagggtacagggtgggtgagaaagaaagtagaagggctaatacccccaaagaacaaggccaactacacctggtgagcctcagagggacagaaacccaggaatgattcctgtgatagggctgggagagccaagaggacggattcgctccaggcttgggacacatcgaggacagtggtggttcttctccagcggtgaccccctgcattaggcaaggaggagcccagaggagagtggagaccttcgaggggggccgttgggagggtactgactgctttcttccagctcttcagtcccgcccttgggcaggacgaagggaatgtgggaaacaagggcgaagggaaaggaaggatggttttgagcaatgaaatgctgctgcatggaaagtgggcatccagaccctgcccagcatggcctcagcctcttcctgttcgtggaccgagggaagaaggaataaagggccatgggcattctccgctctgctcccagcctgccctcctccccttgcacctgggcttatcccacattaatagcccatcctgaagctcagcaattgccccgaagataggctgagcagatcccatcctcaggttccactgtctatacacacaaaccatgcaaagaggaggaagagaaaggaggcaaagtagaattcagacaggaaagggtggttcaaaggggaatatactacaggaagaacagagaggcggctctcaaggagagggccccatgacagcacagcaatacacaagcacacctgacacaggctggcacgcctccccccaaggtggggctggtgggtctacatgacttctctgcatcctgaggatcggccgggccccaggaagaaccacttgcctcatccctgtctttggcaagtgcacgggtggtgtggaggaaaggattccatgggtgtccaaagatctcacactgctaacaccctcacgctccttcatcaacaggaagagaggaacaggaccctctttaacgagggcaaggagtggcttcctctgagcttgttactttcaaattaagcacttgactcactgtttctctataactaacaggcaatctctctctttatgccaacaattaactgggagctaggttaaattatttggctagataaaactaccagctagatggatttatttggtgccctcatacagaatgctgtagaaaatgtaaagaagagaaagctccttccagctagaagcacatgggactgcttctaggatggaaacaagtcctgctattttcacaatccctaagtgttctccaggcctctggagaacaaagtaaagttgtaagatccccaaagacacggaaaatcctggacgaacagattagaaataactacaaaaaacaagttttta

SEQ ID NO: 354700 - DNA, 3001 bp, Homo sapiens
tgccatcttgctctaagtgaaagtgaaagaaaagtcggcagcagagggaacagggaagaaacctaaaggctgcaggctgccaggtgtgcttggagagcccccttcttccgccgggcctcgcaagcagcgtaggactgtggagaagggcggtgggcaaggagggaactcgagagcagcctccatgggcacacaggagggctggtgcctgctgctctgcctggctctatctggagcagcagaaaccatggacctggtccagattccccaggccgaggccttgctccatgctgactgcagtgggaaggaggtgacctgtgagatctcccgctactttctccagatgacagagaccactgttaagacagcagcttggttcatggccaacgtgcaggtctctggagggggacctagcatctccttggtgatgaagactcccagggtcgccaagaatgaggcgctctggcacccgacgctgaacttgccactgagcccccaggggactgtgcgaactgcagtggagttccaggtgatgacacagacccaatccctgagcttcctgctggggtcctcagcctccttggactgtggcttctccatggcaccgggcttggacctcatcagtgtggagtggcgactgcagcacaagggcaggggacgaggggacctacatttgccagatcaccacctctctgtaccgagctcagcagatcatccagctcaacatccaagcttcccctaaagtacgactgagcttggcaaacgaagctctgctgcccaccctcatctgcgacattgctggctattaccctctggatgtggtggtgacgtggacccgagaggagctgggtggatccccagcccaagtctctggtgcctccttctccagcctcaggcaaagcgtggcaggcacctacagcatctcctcctctctcaccgcagaacctggctctgcaggtgccacttacacctgccaggtcacacacatctctctggaggagccccttggggccagcacccaggttgtcccaccagagcggagaacagccttgggagtcatctttgccagcagtctcttccttcttgcactgatgttcctggggcttcagagacggcaagcacctacaggacttgggctgcttcaggctgaacgctgggagaccacttcctgtgctgacacacagagctcccatctccatgaagaccgcacagcgcgtgtaagccagcccagctgacctaaagcgacatgagactactagaaagaaacgacacccttccccaagcccccacagctactccaacccaaacaacaaccaagccagtttaatggtaggaatttgtattttttgcctttgttcagaatacatgacattggtaaatatgccacatgcctttggtggaagtacaactgttgttattactctatacaagtatgagatcagggttaggaaaaaaagacaaagaggtgatgacagacacacagtggaaaccccacatcgtctcatggcaaaccgaagaacgggatgtgggaagctcagcttcatttgactgcaaagtcccagggttttgttgcacatttgctcatgcacatgggtggtgggaggaaagggggatagcaaagacacacagaagagggtacagggtgggtgagaaagaaagtagaagggctaatacccccaaagaacaaggccaactacacctggtgagcctcagagggacagaaacccaggaatgattcctgtgatagggctgggagagccaagaggacggattcgctccaggcttgggacacatcgaggacagtggtggttcttctccagcggtgaccccctgcattaggcaaggaggagcccagaggagagtggagaccttcgaggggggccgttgggagggtactgactgctttcttccagctcttcagtcccgcccttgggcaggacgaagggaatgtgggaaacaagggcgaagggaaaggaaggatggttttgagcaatgaaatgctgctgcatggaaagtgggcatccagaccctgcccagcatggcctcagcctcttcctgttcgtggaccgagggaagaaggaataaagggccatgggcattctccgctctgctcccagcctgccctcctccccttgcacctgggcttatcccacattaatagcccatcctgaagctcagcaattgccccgaagataggctgagcagatcccatcctcaggttccactgtctatacacacaaaccatgcaaagaggaggaagagaaaggaggcaaagtagaattcagacaggaaagggtggttcaaaggggaatatactacaggaagaacagagaggcggctctcaaggagagggccccatgacagcacagcaatacacaagcacacctgacacaggctggcacgcctccccccaaggtggggctggtgggtctacatgacttctctgcatcctgaggatcggccgggccccaggaagaaccacttgcctcatccctgtctttggcaagtgcacgggtggtgtggaggaaaggattccatgggtgtccaaagatctcacactgctaacaccctcacgctccttcatcaacaggaagagaggaacaggaccctctttaacgagggcaaggagtggcttcctctgagcttgttactttcaaattaagcacttgactcactgtttctctataactaacaggcaatctctctctttatgccaacaattaactgggagctaggttaaattatttggctagataaaactaccagctagatggatttatttggtgccctcatacagaatgctgtagaaaatgtaaagaagagaaagctccttccagctagaagcacatgggactgcttctaggatggaaacaagtcctgctattttcacaatccctaagtgttctccaggcctctggagaacaaagtaaagttgtaagatccccaaagacacggaaaatcctggacgaacagattagaaataactacaaaaaacaagttttta

SEQ ID NO: 354701 - DNA, 2756 bp, Homo sapiens
agaaagaaagagtagtcacgtgctcccagaaggactctaagtcaagtcacagagctaaaaatacatgaaggtggcaccagctcatggggcactgggcctggctctgcagaggcctctgccttccttcactgtgcaccctgggctcatgcaccaaggcagagaacaggaagaagtgaggggacaagaagaaggcagaatgtccagatggaggataagaccaaagagccaggttggtggtgtgacggtaggaaaacaaagctggaggaaatggagaaggaacaagtgagggacaatgaggcatgggttggggctgggctacccctcccaaactcagctctgtcaaaataaaaggcccttgtgtctgctgcgaccaagcttttccactttcctgtctttctccacactggtcccaactgagccctgtcaccaagcctagcggctccaacttgcaaagtgtttaagtatgaaacaaaggccctcagaggcacccccgtggctccatctcagttgcacctcagctgcaattagggttctgctccctcgggtgactgctgggaggttcaggatacctgcaaatgcctcactccctcagctgcaaggagagacttctcctttttattcgtttctaaaatgtgcctaatcaatacggtggaactcagcataccaaaactgtacgtgaggatgatggggaaaagggggtaagggggtgttcactgacagccttatctgggcacatcccctgggacaggacaagcaggccaaggacctaggaaggagcacaggaggcagatggaagaggcctgagggaacctgtgcttgtttgccagtgtgagatgcccacgcaacttcctgtcttcacttcctcttaccacacctacaggacttgggctgcttcaggctgaacgctgggagaccacttcctgtgctgacacacagagctcccatctccatgaagaccgcacagcgcgtgtaagccagcccagctgacctaaagcgacatgagactactagaaagaaacgacacccttccccaagcccccacagctactccaacccaaacaacaaccaagccagtttaatggtaggaatttgtattttttgcctttgttcagaatacatgacattggtaaatatgccacatgcctttggtggaagtacaactgttgttattactctatacaagtatgagatcagggttaggaaaaaaagacaaagaggtgatgacagacacacagtggaaaccccacatcgtctcatggcaaaccgaagaacgggatgtgggaagctcagcttcatttgactgcaaagtcccagggttttgttgcacatttgctcatgcacatgggtggtgggaggaaagggggatagcaaagacacacagaagagggtacagggtgggtgagaaagaaagtagaagggctaatacccccaaagaacaaggccaactacacctggtgagcctcagagggacagaaacccaggaatgattcctgtgatagggctgggagagccaagaggacggattcgctccaggcttgggacacatcgaggacagtggtggttcttctccagcggtgaccccctgcattaggcaaggaggagcccagaggagagtggagaccttcgaggggggccgttgggagggtactgactgctttcttccagctcttcagtcccgcccttgggcaggacgaagggaatgtgggaaacaagggcgaagggaaaggaaggatggttttgagcaatgaaatgctgctgcatggaaagtgggcatccagaccctgcccagcatggcctcagcctcttcctgttcgtggaccgagggaagaaggaataaagggccatgggcattctccgctctgctcccagcctgccctcctccccttgcacctgggcttatcccacattaatagcccatcctgaagctcagcaattgccccgaagataggctgagcagatcccatcctcaggttccactgtctatacacacaaaccatgcaaagaggaggaagagaaaggaggcaaagtagaattcagacaggaaagggtggttcaaaggggaatatactacaggaagaacagagaggcggctctcaaggagagggccccatgacagcacagcaatacacaagcacacctgacacaggctggcacgcctccccccaaggtggggctggtgggtctacatgacttctctgcatcctgaggatcggccgggccccaggaagaaccacttgcctcatccctgtctttggcaagtgcacgggtggtgtggaggaaaggattccatgggtgtccaaagatctcacactgctaacaccctcacgctccttcatcaacaggaagagaggaacaggaccctctttaacgagggcaaggagtggcttcctctgagcttgttactttcaaattaagcacttgactcactgtttctctataactaacaggcaatctctctctttatgccaacaattaactgggagctaggttaaattatttggctagataaaactaccagctagatggatttatttggtgccctcatacagaatgctgtagaaaatgtaaagaagagaaagctccttccagctagaagcacatgggactgcttctaggatggaaacaagtcctgctattttcacaatccctaagtgttctccaggcctctggagaacaaagtaaagttgtaagatccccaaagacacggaaaatcctggacgaacagattagaaataactacaaaaaacaagttttta

SEQ ID NO: 354702 - DNA, 1845 bp, Homo sapiens
accacacaagaagcttccacactttctgtctcttagaacggctaaaggcagggtcccctgcccatccgcaggctgacctaaagcgacatgagactactagaaagaaacgacacccttccccaagcccccacagctactccaacccaaacaacaaccaagccagtttaatggtaggaatttgtattttttgcctttgttcagaatacatgacattggtaaatatgccacatgcctttggtggaagtacaactgttgttattactctatacaagtatgagatcagggttaggaaaaaaagacaaagaggtgatgacagacacacagtggaaaccccacatcgtctcatggcaaaccgaagaacgggatgtgggaagctcagcttcatttgactgcaaagtcccagggttttgttgcacatttgctcatgcacatgggtggtgggaggaaagggggatagcaaagacacacagaagagggtacagggtgggtgagaaagaaagtagaagggctaatacccccaaagaacaaggccaactacacctggtgagcctcagagggacagaaacccaggaatgattcctgtgatagggctgggagagccaagaggacggattcgctccaggcttgggacacatcgaggacagtggtggttcttctccagcggtgaccccctgcattaggcaaggaggagcccagaggagagtggagaccttcgaggggggccgttgggagggtactgactgctttcttccagctcttcagtcccgcccttgggcaggacgaagggaatgtgggaaacaagggcgaagggaaaggaaggatggttttgagcaatgaaatgctgctgcatggaaagtgggcatccagaccctgcccagcatggcctcagcctcttcctgttcgtggaccgagggaagaaggaataaagggccatgggcattctccgctctgctcccagcctgccctcctccccttgcacctgggcttatcccacattaatagcccatcctgaagctcagcaattgccccgaagataggctgagcagatcccatcctcaggttccactgtctatacacacaaaccatgcaaagaggaggaagagaaaggaggcaaagtagaattcagacaggaaagggtggttcaaaggggaatatactacaggaagaacagagaggcggctctcaaggagagggccccatgacagcacagcaatacacaagcacacctgacacaggctggcacgcctccccccaaggtggggctggtgggtctacatgacttctctgcatcctgaggatcggccgggccccaggaagaaccacttgcctcatccctgtctttggcaagtgcacgggtggtgtggaggaaaggattccatgggtgtccaaagatctcacactgctaacaccctcacgctccttcatcaacaggaagagaggaacaggaccctctttaacgagggcaaggagtggcttcctctgagcttgttactttcaaattaagcacttgactcactgtttctctataactaacaggcaatctctctctttatgccaacaattaactgggagctaggttaaattatttggctagataaaactaccagctagatggatttatttggtgccctcatacagaatgctgtagaaaatgtaaagaagagaaagctccttccagctagaagcacatgggactgcttctaggatggaaacaagtcctgctattttcacaatccctaagtgttctccaggcctctggagaacaaagtaaagttgtaagatccccaaagacacggaaaatcctggacgaacagattagaaataactacaaaaaacaagttttta

SEQ ID NO: 354703 - DNA, 628 bp, Homo sapiens
gaccaccctgcagctctccagcttcctctctgaaatcccagtcccaaaatccagtttcctggccgcctcctggctcagagccccacccagcagaggggcagtggcgggcagtggacgtggtcctagactgtttcctggcgaaggacggtgcgcaccgtggagctctcaccgcagaacctggctctgcaggtgccacttacacctgccaggtcacacacatctctctggaggagccccttggggccagcacccaggttgtcccaccagagcggagaacagccttgggagtcatctttgccagcagtctcttccttcttgcactgatgttcctggggcttcagagacggcaagcacctacaggacttgggctgcttcaggctgaacgctgggagaccacttcctgtgctgacacacagagctcccatctccatgaagaccgcacagcgcgtgtaagccagcccagctgacctaaagcgacatgagactactagaaagaaacgacacccttccccaagcccccacagctactccaacccaaacaacaaccaagccagtttaatggtaggaatttgtattttttgcctttgttcagaatacatgacattggtaaatatgccacatgcctttg

SEQ ID NO: 354704 - DNA, 1148 bp, Homo sapiens
agaaagaaagagtagtcacgtgctcccagaaggactctaagtcaagtcacagagctaaaaatacatgaaggtggcaccagctcatggggcactgggcctggctctgcagaggcctctgccttccttcactgtgcaccctgggctcatgcaccaaggcagagaacaggaagaagtgaggggacaagaagaaggcagaatgtccagatggaggataagaccaaagagccaggttggtggtgtgacggtaggaaaacaaagctggaggaaatggagaaggaacaagtgagggacaatgaggcatgggttggggctgggctacccctcccaaactcagctctgtcaaaataaaaggcccttgtgtctgctgcgaccaagcttttccactttcctgtctttctccacactggtcccaactgagccctgtcaccaagcctagcggctccaacttgcaaagtgtttaagtatgaaacaaaggccctcagaggcacccccgtggctccatctcagttgcacctcagctgcaattagggttctgctccctcgggtgactgctgggaggttcaggatacctgcaaatgcctcactccctcagctgcaaggagagacttctcctttttattcgtttctaaaatgtgcctaatcaatacggtggaactcagcataccaaaactgtacgtgaggatgatggggaaaagggggtaagggggtgttcactgacagccttatctgggcacatcccctgggacaggacaagcaggccaaggacctaggaaggagcacaggaggcagatggaagaggcctgagggaacctgtgcttgtttgccagtgtgagatgcccacgcaacttcctgtcttcacttcctcttaccacacctacaggacttgggctgcttcaggctgaacgctgggagaccacttcctgtgctgacacacagagctcccatctccatgaagaccgcacagcgcgtgtaagccagcccagctgacctaaagcgacatgagactactagaaagaaacgacacccttccccaagcccccacagctactccaacccaaacaacaaccaagccagtttaatggtaggaatttgtattttttgcctttgttcagaatacatgacattggtaaatatgccacatgcctttg

SEQ ID NO: 354705 - DNA, 952 bp, Homo sapiens
agaaagaaagagtagtcacgtgctcccagaaggactctaagtcaagtcacagagctaaaaatacatgaaggtggcaccagctcatggggcactgggcctggctctgcagaggcctctgccttccttcactgtgcaccctgggctcatgcaccaaggcagagaacaggaagaagtgaggggacaagaagaaggcagaatgtccagatggaggataagaccaaagagccaggttggtggtgtgacggtaggaaaacaaagctggaggaaatggagaaggaacaagtgagggacaatgaggcatgggttggggctgggctacccctcccaaactcagctctgtcaaaataaaaggcccttgtgtctgctgcgaccaagcttttccactttcctgtctttctccacactggtcccaactgagccctgtcaccaagcctagcggctccaacttgcaaagtgtttaagtatgaaacaaaggccctcagaggcacccccgtggctccatctcagttgcacctcagctgcaattagggttctgctccctcgggtgactgctgggaggttcaggatacctgcaaatgcctcactccctcagctgcaaggagagacttctcctttttattcgtttctaaaatgtgcctaatcaatacggtggaactcagcataccaaaactgtacgtgaggatgatggggaaaagggggtaagggggtgttcactgacagccttatctgggcacatcccctgggacaggacaagcaggccaaggacctaggaaggagcacaggaggcagatggaagaggcctgagggaacctgtgcttgtttgccagtgtgagatgcccacgcaacttcctgtcttcacttcctcttaccaacctacggatgctctggctacgtggagaccctctctgacaccgagctcatctccctggccaccgcgcgtgtacccgccgct

SEQ ID NO: 354706 - DNA, 892 bp, Homo sapiens
agaaagaaagagtagtcacgtgctcccagaaggactctaagtcaagtcacagagctaaaaatacatgaaggtggcaccagctcatggggcactgggcctggctctgcagaggcctctgccttccttcactgtgcaccctgggctcatgcaccaaggcagagaacaggaagaagtgaggggacaagaagaaggcagaatgtccagatggaggataagaccaaagagccaggttggtggtgtgacggtaggaaaacaaagctggaggaaatggagaaggaacaagtgagggacaatgaggcatgggttggggctgggctacccctcccaaactcagctctgtcaaaataaaaggcccttgtgtctgctgcgaccaagcttttccactttcctgtctttctccacactggtcccaactgagccctgtcaccaagcctagcggctccaacttgcaaagtgtttaagtatgaaacaaaggccctcagaggcacccccgtggctccatctcagttgcacctcagctgcaattagggttctgctccctcgggtgactgctgggaggttcaggatacctgcaaatgcctcactccctcagctgcaaggagagacttctcctttttattcgtttctaaaatgtgcctaatcaatacggtggaactcagcataccaaaactgtacgtgaggatgatggggaaaagggggtaagggggtgttctttattttctcacatggggactttattggtgtgagcattctggtcattgtcctttttatgagcactggtagttagtgtataatgccttatggaaccttttcttgtttccagtgtgtaattcccactctaacttatgttatttttttactttttccatctacatcatgtctttttcctgtt

SEQ ID NO: 354707 - DNA, 315 bp, Homo sapiens
gacgtggacccgagaggagctgggtggatccccagcccaagtctctggtgcctccttctccagcctcaggcaaagcgtggcaggcacctacagcatctcctcctctctcaccgcagaacctggctctgcaggtgccacttacacctgccaggtcacacacatctctctggaggagccccttggggccagcacccaggttgtcccaccaggtactgggagtgtcctccttttccccacctccacactagggctcatggctctcctgccccagctcatctatggccttgttctgctgcccatccactttgttcgcag

SEQ ID NO: 354708 - DNA, 1749 bp, Homo sapiens
tgccatcttgctctaagtgaaagtgaaagaaaagtcggcagcagagggaacagggaagaaacctaaaggctgcaggctgccaggtgtgcttggagagcccccttcttccgccgggcctcgcaagcagcgtaggactgtggagaagggcggtgggcaaggagggaactcgagagcagcctccatgggcacacaggagggctggtgcctgctgctctgcctggctctatctggagcagcagaaaccaagccccacccagcagaggggcagtggcgggcagtggacgtggtcctagactgtttcctggcgaaggacggtgcgcaccgtggagctctcgccagcagtgaggacagggcaagggcctcccttgtgctgaagcaggtgccagtgctggacgatggctccctggaggacttcaccgatttccaagggggcacactggcccaagatgacccacctattatctttgaggcctcagtggacctggtccagattccccaggccgaggccttgctccatgctgactgcagtgggaaggaggtgacctgtgagatctcccgctactttctccagatgacagagaccactgttaagacagcagcttggttcatggccaacgtgcaggtctctggagggggacctagcatctccttggtgatgaagactcccagggtcgccaagaatgaggcgctctggcacccgacgctgaacttgccactgagcccccaggggactgtgcgaactgcagtggagttccaggtgatgacacagacccaatccctgagcttcctgctggggtcctcagcctccttggactgtggcttctccatggcaccgggcttggacctcatcagtgtggagtggcgactgcagcacaagggcaggggtcagttggtgtacagctggaccgcagggcaggggcaggctgtgcggaagggcgctaccctggagcctgcacaactgggcatggccagggatgcctccctcaccctgcccggcctcactatacaggacgaggggacctacatttgccagatcaccacctctctgtaccgagctcagcagatcatccagctcaacatccaagcttcccctaaagtacgactgagcttggcaaacgaagctctgctgcccaccctcatctgcgacattgctggctattaccctctggatgtggtggtgacgtggacccgagaggagctgggtggatccccagcccaagtctctggtgcctccttctccagcctcaggcaaagcgtggcaggcacctacagcatctcctcctctctcaccgcagaacctggctctgcaggtgccacttacacctgccaggtcacacacatctctctggaggagccccttggggccagcacccaggttgtcccaccagagcggagaacagccttgggagtcatctttgccagcagtctcttccttcttgcactgatgttcctggggcttcagagacggcaagcacctacaggacttgggctgcttcaggctgaacgctgggagaccacttcctgtgctgacacacagagctcccatctccatgaagaccgcacagcgcgtgtaagccagcccagctgacctaaagcgacatgagactactagaaagaaacgacacccttccccaagcccccacagctactccaacccaaacaacaaccaagccagtttaatggtaggaatttgtattttttgcctttgttcagaatacatgacattggtaaatatgccacatgcctttg

SEQ ID NO: 354709 - DNA, 600 bp, Homo sapiens
aaggactcacatgcatcctcaccccaaaccacttaaacaattatgattaggctatacaaaactagaatggattcttgctccttggcaatctgaagtagggagacaaaccatagaggcaagaagtaaaagatgaaagactctgcaacaacatttggatggggttcagggacatccaggatggcatcaagacatctcatctggggctatcctttgactcaactcaaacaagtcctctgccatgatggctacagggacatatggcctagccttgtcctaaatggcatttccccgctgatatggtttggctgtgtccccacccaaatctcaacttcaattgtatcacccagaattcccacatgttgtgggagggactcaggggaggtaactgaatcatggggcccatctttccggtgctattctggtgatagtgacgaagtctcatgagatctgatgggtttatcagtggtttctgcttttgcttcttccacattttctcttgctgctgccatgtaagaagtgcctttcacctgccgccatgattctgaggccttcccagccatgtggaactgtaagtccaattaaacctctttttcttcccag

SEQ ID NO: 354710 - DNA, 3190 bp, Homo sapiens
gaccaccctgcagctctccagcttcctctctgaaatcccagtcccaaaatccagtttcctggccgcctcctggctcagagccccacccagcagaggggcagtggcgggcagtggacgtggtcctagactgtttcctggcgaaggacggtgcgcaccgtggagctctcgccagcagtgaggacagggcaagggcctcccttgtgctgaagcaggtgccagtgctggacgatggctccctggaggacttcaccgatttccaagggggcacactggcccaagatgacccacctattatctttgaggcctcagtggacctggtccagattccccaggccgaggccttgctccatgctgactgcagtgggaaggaggtgacctgtgagatctcccgctactttctccagatgacagagaccactgttaagacagcagcttggttcatggccaacgtgcaggtctctggagggggacctagcatctccttggtgatgaagactcccagggtcgccaagaatgaggcgctctggcacccgacgctgaacttgccactgagcccccaggggactgtgcgaactgcagtggagttccaggtgatgacacagacccaatccctgagcttcctgctggggtcctcagcctccttggactgtggcttctccatggcaccgggcttggacctcatcagtgtggagtggcgactgcagcacaagggcaggggtcagttggtgtacagctggaccgcagggcaggggcaggctgtgcggaagggcgctaccctggagcctgcacaactgggcatggccagggatgcctccctcaccctgcccggcctcactatacaggacgaggggacctacatttgccagatcaccacctctctgtaccgagctcagcagatcatccagctcaacatccaagcttcccctaaagtacgactgagcttggcaaacgaagctctgctgcccaccctcatctgcgacattgctggctattaccctctggatgtggtggtgacgtggacccgagaggagctgggtggatccccagcccaagtctctggtgcctccttctccagcctcaggcaaagcgtggcaggcacctacagcatctcctcctctctcaccgcagaacctggctctgcaggtgccacttacacctgccaggtcacacacatctctctggaggagccccttggggccagcacccaggttgtcccaccagagcggagaacagccttgggagtcatctttgccagcagtctcttccttcttgcactgatgttcctggggcttcagagacggcaagcacctacaggacttgggctgcttcaggctgaacgctgggagaccacttcctgtgctgacacacagagctcccatctccatgaagaccgcacagcgcgtgtaagccagcccagctgacctaaagcgacatgagactactagaaagaaacgacacccttccccaagcccccacagctactccaacccaaacaacaaccaagccagtttaatggtaggaatttgtattttttgcctttgttcagaatacatgacattggtaaatatgccacatgcctttggtggaagtacaactgttgttattactctatacaagtatgagatcagggttaggaaaaaaagacaaagaggtgatgacagacacacagtggaaaccccacatcgtctcatggcaaaccgaagaacgggatgtgggaagctcagcttcatttgactgcaaagtcccagggttttgttgcacatttgctcatgcacatgggtggtgggaggaaagggggatagcaaagacacacagaagagggtacagggtgggtgagaaagaaagtagaagggctaatacccccaaagaacaaggccaactacacctggtgagcctcagagggacagaaacccaggaatgattcctgtgatagggctgggagagccaagaggacggattcgctccaggcttgggacacatcgaggacagtggtggttcttctccagcggtgaccccctgcattaggcaaggaggagcccagaggagagtggagaccttcgaggggggccgttgggagggtactgactgctttcttccagctcttcagtcccgcccttgggcaggacgaagggaatgtgggaaacaagggcgaagggaaaggaaggatggttttgagcaatgaaatgctgctgcatggaaagtgggcatccagaccctgcccagcatggcctcagcctcttcctgttcgtggaccgagggaagaaggaataaagggccatgggcattctccgctctgctcccagcctgccctcctccccttgcacctgggcttatcccacattaatagcccatcctgaagctcagcaattgccccgaagataggctgagcagatcccatcctcaggttccactgtctatacacacaaaccatgcaaagaggaggaagagaaaggaggcaaagtagaattcagacaggaaagggtggttcaaaggggaatatactacaggaagaacagagaggcggctctcaaggagagggccccatgacagcacagcaatacacaagcacacctgacacaggctggcacgcctccccccaaggtggggctggtgggtctacatgacttctctgcatcctgaggatcggccgggccccaggaagaaccacttgcctcatccctgtctttggcaagtgcacgggtggtgtggaggaaaggattccatgggtgtccaaagatctcacactgctaacaccctcacgctccttcatcaacaggaagagaggaacaggaccctctttaacgagggcaaggagtggcttcctctgagcttgttactttcaaattaagcacttgactcactgtttctctataactaacaggcaatctctctctttatgccaacaattaactgggagctaggttaaattatttggctagataaaactaccagctagatggatttatttggtgccctcatacagaatgctgtagaaaatgtaaagaagagaaagctccttccagctagaagcacatgggactgcttctaggatggaaacaagtcctgctattttcacaatccctaagtgttctccaggcctctggagaacaaagtaaagttgtaagatccccaaagacacggaaaatcctggacgaacagattagaaataactacaaaaaacaagttttta

SEQ ID NO: 354711 - DNA, 3001 bp, Homo sapiens
tggtaacaccaagtgacttgtcaaaggtcacggagccagtaagtggaacaaccagggtttcagagctttttctgctactctagtagttcttacctgaagattgatggtaactcttaattttgcatgtgtatttttcctggtgggagatccatagctttcactaaattatcctagagtaagtgatcccaaaatggtgatggccatcatgtgtaccatgctacctttccagagccccatttctttgtggttccatgtgatggaaaataagctcaaccggcctgtcaggcgaggaagaggcaggtgtatgcccacaacatgcccacagcttggagatcaggtgacctcaaggaggaagtagcccacaaatcacccctcttttcctcttcacagtggagttccaggtgatgacacagacccaatccctgagcttcctgctggggtcctcagcctccttggactgtggcttctccatggcaccgggcttggacctcatcagtgtggagtggcgactgcagcacaagggcaggggtcagttggtgtacagctggaccgcagggcaggggcaggctgtgcggaagggcgctaccctggagcctgcacaactgggcatggccagggatgcctccctcaccctgcccggcctcactatacaggacgaggggacctacatttgccagatcaccacctctctgtaccgagctcagcagatcatccagctcaacatccaagcttcccctaaagtacgactgagcttggcaaacgaagctctgctgcccaccctcatctgcgacattgctggctattaccctctggatgtggtggtgacgtggacccgagaggagctgggtggatccccagcccaagtctctggtgcctccttctccagcctcaggcaaagcgtggcaggcacctacagcatctcctcctctctcaccgcagaacctggctctgcaggtgccacttacacctgccaggtcacacacatctctctggaggagccccttggggccagcacccaggttgtcccaccagagcggagaacagccttgggagtcatctttgccagcagtctcttccttcttgcactgatgttcctggggcttcagagacggcaagcacctacaggacttgggctgcttcaggctgaacgctgggagaccacttcctgtgctgacacacagagctcccatctccatgaagaccgcacagcgcgtgtaagccagcccagctgacctaaagcgacatgagactactagaaagaaacgacacccttccccaagcccccacagctactccaacccaaacaacaaccaagccagtttaatggtaggaatttgtattttttgcctttgttcagaatacatgacattggtaaatatgccacatgcctttggtggaagtacaactgttgttattactctatacaagtatgagatcagggttaggaaaaaaagacaaagaggtgatgacagacacacagtggaaaccccacatcgtctcatggcaaaccgaagaacgggatgtgggaagctcagcttcatttgactgcaaagtcccagggttttgttgcacatttgctcatgcacatgggtggtgggaggaaagggggatagcaaagacacacagaagagggtacagggtgggtgagaaagaaagtagaagggctaatacccccaaagaacaaggccaactacacctggtgagcctcagagggacagaaacccaggaatgattcctgtgatagggctgggagagccaagaggacggattcgctccaggcttgggacacatcgaggacagtggtggttcttctccagcggtgaccccctgcattaggcaaggaggagcccagaggagagtggagaccttcgaggggggccgttgggagggtactgactgctttcttccagctcttcagtcccgcccttgggcaggacgaagggaatgtgggaaacaagggcgaagggaaaggaaggatggttttgagcaatgaaatgctgctgcatggaaagtgggcatccagaccctgcccagcatggcctcagcctcttcctgttcgtggaccgagggaagaaggaataaagggccatgggcattctccgctctgctcccagcctgccctcctccccttgcacctgggcttatcccacattaatagcccatcctgaagctcagcaattgccccgaagataggctgagcagatcccatcctcaggttccactgtctatacacacaaaccatgcaaagaggaggaagagaaaggaggcaaagtagaattcagacaggaaagggtggttcaaaggggaatatactacaggaagaacagagaggcggctctcaaggagagggccccatgacagcacagcaatacacaagcacacctgacacaggctggcacgcctccccccaaggtggggctggtgggtctacatgacttctctgcatcctgaggatcggccgggccccaggaagaaccacttgcctcatccctgtctttggcaagtgcacgggtggtgtggaggaaaggattccatgggtgtccaaagatctcacactgctaacaccctcacgctccttcatcaacaggaagagaggaacaggaccctctttaacgagggcaaggagtggcttcctctgagcttgttactttcaaattaagcacttgactcactgtttctctataactaacaggcaatctctctctttatgccaacaattaactgggagctaggttaaattatttggctagataaaactaccagctagatggatttatttggtgccctcatacagaatgctgtagaaaatgtaaagaagagaaagctccttccagctagaagcacatgggactgcttctaggatggaaacaagtcctgctattttcacaatccctaagtgttctccaggcctctggagaacaaagtaaagttgtaagatccccaaagacacggaaaatcctggacgaacagattagaaataactacaaaaaacaagttttta

SEQ ID NO: 354712 - DNA, 1768 bp, Homo sapiens
tgccatcttgctctaagtgaaagtgaaagaaaagtcggcagcagagggaacagggaagaaacctaaaggctgcaggctgccaggtgtgcttggagagcccccttcttccgccgggcctcgcaagcagcgtaggactgtggagaagggcggtgggcaaggagggaactcgagagcagcctccatgggcacacaggagggctggtgcctgctgctctgcctggctctatctggagcagcagaaaccaagccccacccagcagaggggcagtggcgggcagtggacgtggtcctagactgtttcctggcgaaggacggtgcgcaccgtggagctctcgccagcagtgaggacagggcaagggcctcccttgtgctgaagcaggtgccagtgctggacgatggctccctggaggacttcaccgatttccaagggggcacactggcccaagatgacccacctattatctttgaggcctcagtggacctggtccagattccccaggccgaggccttgctccatgctgactgcagtgggaaggaggtgacctgtgagatctcccgctactttctccagatgacagagaccactgttaagacagcagcttggttcatggccaacgtgcaggtctctggagggggacctagcatctccttggtgatgaagactcccagggtcgccaagaatgaggcgctctggcacccgacgctgaacttgccactgagcccccaggggactgtgcgaactgcagtggagttccaggtgatgacacagacccaatccctgagcttcctgctggggtcctcagcctccttggactgtggcttctccatggcaccgggcttggacctcatcagtgtggagtggcgactgcagcacaagggcaggggtcagttggtgtacagctggaccgcagggcaggggcaggctgtgcggaagggcgctaccctggagcctgcacaactgggcatggccagggatgcctccctcaccctgcccggcctcactatacaggacgaggggacctacatttgccagatcaccacctctctgtaccgagctcagcagatcatccagctcaacatccaagcttcccctaaagtacgactgagcttggcaaacgaagctctgctgcccaccctcatctgcgacattgctggctattaccctctggatgtggtggtgacgtggacccgagaggagctgggtggatccccagcccaagtctctggtgcctccttctccagcctcaggcaaagcgtggcaggcacctacagcatctcctcctctctcaccgcagaacctggctctgcaggtgccacttacacctgccaggtcacacacatctctctggaggagccccttggggccagcacccaggttgtcccaccagagcggagaacagccttgggagtcatctttgccagcagtctcttccttcttgcactgatgttcctggggcttcagagacggcaagcacctacaggacttgggctgcttcaggctgaacgctgggagaccacttcctgtgctgacacacagagctcccatctccatgaagaccgcacagcgcgtgtaagccagcccagctgacctaaagcgacatgagactactagaaagaaacgacacccttccccaagcccccacagctactccaacccaaacaacaaccaagccagtttaatgaagtgcctttcacctgccgccatgattctgaggccttcccagccatgtggaactgtaagtccaattaaacctctttttcttcccag

SEQ ID NO: 354713 - DNA, 474 bp, Homo sapiens
tttgactgaaaagatagtcttttattcaacagttggaaatgcaagcataaactcctctgagcaaggcaaatccaggactttaactctcaccaagaagtatttgcctggactagcaggtgctctccagaaagctggtttggggatgacgggagaatagagggacacagaaacagctaggatcttggatggcaacttttaccctttgatgactccacagcttgagggcgggggcaggaagcaagtgtggagtagctttctggggaaggcggtgctcaccccagcctttgtctgcagagagccccacccagcagaggggcagtggcgggcagtggacgtggtcctagactgtttcctggcgaaggacggtgcgcaccgtggagctctcgccagcagtgaggacagggcaagggcctcccttgtgctgaagcaggtgccagtgctggacgatggctccctggaggacttcaccgattt

SEQ ID NO: 354714 - DNA, 1528 bp, Homo sapiens
ctgatggctgttctcctagtccccaagagttgaaccggagaggcttttactttgcaccaggtcgagaacgtgatcagccctttagagaaggaacctccttgtaacaggaattctgctgggaaacgccgtgtaggcactacctccgaagataagatgcatgtttggagctgtgtaaaatgcccactggctgtttgaaagaaggaaaaggtgactagggttgcaaattaaccttagtatcacttaaaaatattctatctagtcaaatgtacgtaagcaaagaagagagcaccaggatataaaactgccacagcagcttggaagacagatgattcagattttggggactttcttttgcgtgttacatagatttgtttgtcatcatgcagttaagcaggtgttgagggaaagctgagagaatgaaggctctaaatccccagtggaagcatgatatggcgaagcagagctggtgctgaattgttctctctgatggctctatgggagtggatagcactgagtcttcattgctgggttttagcggttgctgctgtttcggatcagcatgccacaagccccttcgactggctcctctctgataagggacccttccatcgctcacaggaatacacagattttgtggacagaagccggcagggatttagcacaagatacaagatatacagggagtttggccgctggaaagtaaataaccttgcagttgagagaagaaatttccttggctctcctctgcctcttgcccctgaattcttccgcaacataagacttttgggacgtcgacctacccttcagcaaatcacagaaaaccttatcaagaaatatgggacacatttcttgctatctgctactctgggaggagaggagtcactcacaatttttgtggacaagcggaagttgagcaaacgagctgaaggaagtgattccaccaccaatagctcttcggtcactctggagacgctacatcagctagccgcttcttatttcattgacagggacagcacccttcggagacttcaccacattcaaattgcatccactgccataaaggtaacagaaacacggactggtcctcttggctgcagtaactatgacaacctagattctgtcagttctgttctggttcagagtcctgagaataagattcagttgcaagggcttcaagtacttctcccagactatcttcaggaacgttttgtacaagcagctttgagctacattgcttgcaattcagagggagagtttatctgcaaggaaaatgactgctggtgtcactgtggtcccaaatttccagaatgcaactgcccctccatggacattcaagccatggaagagaatcttcttcgaataactgaaacctggaaagcttacaacagtgactttgaggaatcaggcttgaaattcaaatcctgttatactctacatagacaataaaaattggaatggagttttaggttactttcaaaggctgattcaatgtaatgtgaaaaattaaacaaatgcaagtaaataactt

SEQ ID NO: 354715 - DNA, 200 bp, Homo sapiens
catcagctagccgcttcttatttcattgacagggacagcacccttcggagacttcaccacattcaaattgcatccactgccataaaggtaagaatgagtttacgctaaaattatcaccttccattgtttgtttcctctatatccaaaaggcatttttatgtatttgcttattccatgaatttaaacaattattttataaa

SEQ ID NO: 354716 - DNA, 2236 bp, Homo sapiens
ctgatggctgttctcctagtccccaagagttgaaccggagaggcttttactttgcaccaggtcgagaacgtgatcagccctttagagaaggaacctccttgtaacaggaattctgctgggaaacgccgtgtaggcactacctccgaagataagatgcatgtttggagctgtgtaaaatgcccactggctgtttgaaagaaggaaaaggtgactagggttgcaaattaaccttagtatcacttaaaaatattctatctagtcaaatgtacgtaagcaaagaagagagcaccaggatataaaactgccacagcagcttggaagacagatgattcagattttggggactttcttttgcgtgttacatagatttgtttgtcatcatgcagttaagcaggtgttgagggaaagctgagagaatgaaggctctaaatccccagtggaagcatgatatggcgaagcagagctggtgctgaattgttctctctgatggctctatgggagtggatagcactgagtcttcattgctgggttttagcggttgctgctgtttcggatcagcatgccacaagccccttcgactggctcctctctgataagggacccttccatcgctcacaggaatacacagattttgtggacagaagccggcagggatttagcacaagatacaagatatacagggagtttggccgctggaaagtaaataaccttgcagttgagagaagaaatttccttggctctcctctgcctcttgcccctgaattcttccgcaacataagacttttgggacgtcgacctacccttcagcaaatcacagaaaaccttatcaagaaatatgggacacatttcttgctatctgctactctgggaggagaggagtcactcacaatttttgtggacaagcggaagttgagcaaacgagctgaaggaagtgattccaccaccaatagctcttcggtcactctggagacgctacatcagctagccgcttcttatttcattgacagggacagcacccttcggagacttcaccacattcaaattgcatccactgccataaaggtaacagaaacacggactggtcctcttggctgcagtaactatgacaacctagattctgtcagttctgttctggttcagagtcctgagaataagattcagttgcaagggcttcaagtacttctcccagactatcttcaggaacgttttgtacaagcagctttgagctacattgcttgcaattcagagggagagtttatctgcaaggaaaatgactgctggtgtcactgtggtcccaaatttccagaatgcaactgcccctccatggacattcaagccatggaagagaatcttcttcgaataactgaaacctggaaagcttacaacagtgactttgaggaatcagatgaattcaagttatttatgaaaaggctacctatgaattatttcctcaacacatctactataatgcatttgtggacaatggattctaattttcagcgccgttatgaacaactggagaacagcatgaaacaacttttcctaaaggcgcagaaaattgtacacaagctttttagccttagcaagaggtgtcataaacaacccctcatcagcctgccaagacaaagaacctcaacctactggcttactcgcatccagtcttttctctactgcaatgagaacggcctcctaggcagcttttcagaagagacgcactcgtgcacgtgtccgaatgaccaggtggtctgcaccgcgttcctgccctgcacagtgggagacgcctctgcctgcctgacatgcgcaccagacaaccgcacccgctgcggcacctgcaacaccggctacatgctcagccaggggctctgcaagcctgaagtcgccgagtccaccgatcactatattggctttgaaactgacctgcaagatctcgagatgaaatatctgctgcagaaaacggacagacgaatagaagtccatgccatttttatcagcaatgacatgcgcctcaatagctggtttgatccctcctggcgtaagcggatgctcctcaccttgaagagcaataagtgcaagtcaagtctggtccatatgattttgggtctctctttacagatttgcttaactaaaaacagcaccttggagccagtgttggctgtttatgtcaatcccttcggaggcagccactctgagagctggtttatgcctgtgaatgaaaacagctttccagactgggagc

SEQ ID NO: 354717 - DNA, 2024 bp, Homo sapiens
ttcgtggctctctgtgtaactggtttttacttggttacatgccaccaggaactgctgattattttaaagtcctactaccctgcagctcactactttaccttgatttggaagatcatggaatatctatttgaatcctggatgtatttttctcacagtcttcttgcttcctgaaatttcctctggtgttgagggaaagctgagagaatgaaggctctaaatccccagtggaagcatgatatggcgaagcagagctggtgctgaattgttctctctgatggctctatgggagtggatagcactgagtcttcattgctgggttttagcggttgctgctgtttcggatcagcatgccacaagccccttcgactggctcctctctgataagggacccttccatcgctcacaggaatacacagattttgtggacagaagccggcagggatttagcacaagatacaagatatacagggagtttggccgctggaaagtaaataaccttgcagttgagagaagaaatttccttggctctcctctgcctcttgcccctgaattcttccgcaacataagacttttgggacgtcgacctacccttcagcaaatcacagaaaaccttatcaagaaatatgggacacatttcttgctatctgctactctgggaggagaggagtcactcacaatttttgtggacaagcggaagttgagcaaacgagctgaaggaagtgattccaccaccaatagctcttcggtcactctggagacgctacatcagctagccgcttcttatttcattgacagggacagcacccttcggagacttcaccacattcaaattgcatccactgccataaaggtaacagaaacacggactggtcctcttggctgcagtaactatgacaacctagattctgtcagttctgttctggttcagagtcctgagaataagattcagttgcaagggcttcaagtacttctcccagactatcttcaggaacgttttgtacaagcagctttgagctacattgcttgcaattcagagggagagtttatctgcaaggaaaatgactgctggtgtcactgtggtcccaaatttccagaatgcaactgcccctccatggacattcaagccatggaagagaatcttcttcgaataactgaaacctggaaagcttacaacagtgactttgaggaatcagatgaattcaagttatttatgaaaaggctacctatgaattatttcctcaacacatctactataatgcatttgtggacaatggattctaattttcagcgccgttatgaacaactggagaacagcatgaaacaacttttcctaaaggcgcagaaaattgtacacaagctttttagccttagcaagaggtgtcataaacaacccctcatcagcctgccaagacaaagaacctcaacctactggcttactcgcatccagtcttttctctactgcaatgagaacggcctcctaggcagcttttcagaagagacgcactcgtgcacgtgtccgaatgaccaggtggtctgcaccgcgttcctgccctgcacagtgggagacgcctctgcctgcctgacatgcgcaccagacaaccgcacccgctgcggcacctgcaacaccggctacatgctcagccaggggctctgcaagcctgaagtcgccgagtccaccgatcactatattggctttgaaactgacctgcaagatctcgagatgaaatatctgctgcagaaaacggacagacgaatagaagtccatgccatttttatcagcaatgacatgcgcctcaatagctggtttgatccctcctggcgtaagcggatgctcctcaccttgaagagcaataagtgcaagtcaagtctggtccatatgattttgggtctctctttacagatttgcttaactaaaaacagcaccttggagccagtgttggctgtttatgtcaatcccttcggaggcagccactctgagagctggtttatgcctgtgaatgaaaacagctttccagactgggagc

SEQ ID NO: 354718 - DNA, 397 bp, Homo sapiens
tccgggagactctgcagatgtatttttatccaccaacaaacgggatttgctagaaagaaggagcttgggtgaatggaagagtaaaaatgaagtacaactatgaagttacagaattattcccagtctttaaaaatcttcaaaacttcacttcgttcagaacttccaattatacagaagaggctgtcaactccattaacaaagcttttttttcctttcactggatttcaaaccactggctacagtgagttctgctgccacatcctgggtcatcgattctgccattggtgtcctaggacagcattaagaccttcagctgtcttctgattgaggacaagatcatggtgtctcatcgtccccaccccactgtaattcaaaataaaaacaatgctaaaccaca

SEQ ID NO: 354719 - DNA, 577 bp, Homo sapiens
cagagtctgcaaattactttcccagactccatgctactgagtgcaagcgtgtgacccaagttctatggctgggattttcccatagactccagttaaaaacaaacaacataaacaacatgaaccaagacgagctgccagtgtctgctggggcaagggtgacggagagagacctccgaagcttggagggtgctgtggccaggttcctggtggtcgagccctgtactcagcgagaatggtagttagttactcaggcatcctggacagagatggctgaaacagacaccctcgcaggagtggcctgcactttaatttgagcatcgattcaggacgcttccttgcaagatggagtctccatctcccgagattccatgagctacctagcagtgtttaacacactccttttctgattcagctggctacagtgagttctgctgccacatcctgggtcatcgattctgccattggtgtcctaggacagcattaagaccttcagctgtcttctgattgaggacaagatcatggtgtctcatcgtccccaccccactgtaattcaaaataaaaacaatgctaaaccaca

SEQ ID NO: 354720 - DNA, 3194 bp, Homo sapiens
ggcacgagctaggactgatctccaggaccagcactcttctcccagcccttagggtcctgctcggccaaggccttccctgccatgcgacctgtcagtgtctggcagtggagcccctgggggctgctgctgtgcctgctgtgcagttcgtgcttggggtctccgtccccttccacgggccctgagaagaaggccgggagccaggggcttcggttccggctggctggcttccccaggaagccctacgagggccgcgtggagatacagcgagctggtgaatggggcaccatctgcgatgatgacttcacgctgcaggctgcccacatcctctgccgggagctgggcttcacagaggccacaggctggacccacagtgccaaatatggccctggaacaggccgcatctggctggacaacttgagctgcagtgggaccgagcagagtgtgactgaatgtgcctcccggggctgggggaacagtgactgtacgcacgatgaggatgctggggtcatctgcaaagaccagcgcctccctggcttctcggactccaatgtcattgaggtagagcatcacctgcaagtggaggaggtgcgaattcgacccgccgttgggtggggcagacgacccctgcccgtgacggaggggctggtggaagtcaggcttcctgacggctggtcgcaagtgtgcgacaaaggctggagcgcccacaacagccacgtggtctgcgggatgctgggcttccccagcgaaaagagggtcaacgcggccttctacaggctgctagcccaacggcagcaacactcctttggtctgcatggggtggcgtgcgtgggcacggaggcccacctctccctctgttccctggagttctatcgtgccaatgacaccgccaggtgccctggggggggccctgcagtggtgagctgtgtgccaggccctgtctacgcggcatccagtggccagaagaagcaacaacagtcgaagcctcagggggaggcccgtgtccgtctaaagggcggcgcccaccctggagagggccgggtagaagtcctgaaggccagcacatggggcacagtctgtgaccgcaagtgggacctgcatgcagccagcgtggtgtgtcgggagctgggcttcgggagtgctcgagaagctctgagtggcgctcgcatggggcagggcatgggtgctatccacctgagtgaagttcgctgctctggacaggagctctccctctggaagtgcccccacaagaacatcacagctgaggattgttcacatagccaggatgccggggtccggtgcaacctaccttacactggggcagagaccaggatccgactcagtgggggccgcagccaacatgaggggcgagtcgaggtgcaaatagggggacctgggccccttcgctggggcctcatctgtggggatgactgggggaccctggaggccatggtggcctgtaggcaactgggtctgggctacgccaaccacggcctgcaggagacctggtactgggactctgggaatataacagaggtggtgatgagtggagtgcgctgcacagggactgagctgtccctggatcagtgtgcccatcatggcacccacatcacctgcaagaggacagggacccgcttcactgctggagtcatctgttctgagactgcatcagatctgttgctgcactcagcactggtgcaggagaccgcctacatcgaagaccggcccctgcatatgttgtactgtgctgcggaagagaactgcctggccagctcagcccgctcagccaactggccctatggtcaccggcgtctgctccgattctcctcccagatccacaacctgggacgagctgacttcaggcccaaggctgggcgccactcctgggtgtggcacgagtgccatgggcattaccacagcatggacatcttcactcactatgatatcctcaccccaaatggcaccaaggtggctgagggccacaaagctagtttctgtctcgaagacactgagtgtcaggaggatgtctccaagcggtatgagtgtgccaactttggagagcaaggcatcactgtgggttgctgggatctctaccggcatgacattgactgtcagtggattgacatcacggatgtgaagccaggaaactacattctccaggttgtcatcaacccaaactttgaagtagcagagagtgactttaccaacaatgcaatgaaatgtaactgcaaatatgatggacatagaatctgggtgcacaactgccacattggtgatgccttcagtgaagaggccaacaggaggtttgaacgctaccctggccagaccagcaaccagattatctaagtgccactgccctctgcaaaccaccactggcccctaatggcaggggtctgaggctgccattacctcaggagcttaccaagaaacccatgtcagcaaccgcactcatcagaccatgcactatggatgtggaactgtcaagcagaagttttcaccctccttcagaggccagctgtcagtatctgtagccaagcatgggaatctttgctcccaggcccagcaccgagcagaacagaccagagcccaccacaccacaaagagcagcacctgactaactgcccacaaaagatggcagcagctcattttctttaataggaggtcaggatggtcagctccagtatctcccctaagtttagggggatacagctttacctctagccttttggtgggggaaaagatccagccctcccacctcattttttactataatatgttgctaggtataattttattttatataaaaagtgtttctgtgattcttcagagcccaggagtcagtgctggtggttggagggacctgcccccactggttcatttaaccctctgtctcggtgccctcagaacctcagccagaaaggcaaggaggaaatcagagcaggagcctcatactcttggtgatctattcattctgtgacctcaggggtcacatataaggtcagtgtttctcgtccccgccggatctgcactgccaactgggattgggttcgaacagcttcataaacatcttcagcattttgtaccatctgctccccaatggccaaaatcacatcaccaggccgcagaccagcccgtgtgcaggggagcccaggatgactttatggatgagtacaccatgctgaacatcgggaaagctt

SEQ ID NO: 354721 - DNA, 477 bp, Homo sapiens
tattagccaaacccaggcattctccccatcctgagttccacctcaagtctctcatcaacacattgataaatatatggacaggacatgggctaggtactacaaaatacaatggcaactcactttctgtcttctagcaataaagtgcaacatgtacataaaagatgtacaccacatgagggcaccaaatgacaaacagtgttaaatcaatagcactaatgtcattctagaatactaagagaagctttaaggggaaagaacttaagttgagcctaaaaggatggatctgatattaaccatataaaacaagaacagcataaataaaaaacatgggagtaggaaatcaggttggctgagtattcatataggaaggtattacagccaggtctagaaagttgatttacagacagatggaaaatggcccttaaatgccaagttaatggattgaaggcttgaaatcaaagcagtaacaggatgaaa

SEQ ID NO: 354722 - DNA, 3413 bp, Homo sapiens
ggcacgagctaggactgatctccaggaccagcactcttctcccagcccttagggtcctgctcggccaaggtagggggagtcacgctaaccgcagagggaatgagtaggggatggagaggatgtggagggaccagggaaaacgggtggtgtgggatggagtcgaggggaagccacccaactgagagtttgatttcttgtcaatccctctccttctcacccgcggtgtgcttggttcccctatactgagtgcttagttctttgcctatcactttctatccgttgtctctctcctctgtgtctttctggttttctctctctcattcccacagtctcccttcctctcacatcctgtctgtctgggtcttcctctctctctacgtgtctcttgctcagtctctatctctttttattgacccttctctgactctcgatctctcatagtgtctcttatctctgggtctctcaggctgtgcctctatgacctgtgcctcagcccttatttaatgtgtttctctccctgtctcttggtccctggggctctttctctcctgttgtctctcgctgtctctgtcttactcagtgtctgtttttctttcgtgacttctccctctctttctgactctgggccccactcaatctgtttctctcacgcacactttgtctctggggcacccaggccttccctgccatgcgacctgtcagtgtctggcagtggagcccctgggggctgctgctgtgcctgctgtgcagttcgtgcttggggtctccgtccccttccacgggccctgagaagaaggccgggagccaggggcttcggttccggctggctggcttccccaggaagccctacgagggccgcgtggagatacagcgagctggtgaatggggcaccatctgcgatgatgacttcacgctgcaggctgcccacatcctctgccgggagctgggcttcacagaggccacaggctggacccacagtgccaaatatggccctggaacaggccgcatctggctggacaacttgagctgcagtgggaccgagcagagtgtgactgaatgtgcctcccggggctgggggaacagtgactgtacgcacgatgaggatgctggggtcatctgcaaagaccagcgcctccctggcttctcggactccaatgtcattgaggtagagcatcacctgcaagtggaggaggtgcgaattcgacccgccgttgggtggggcagacgacccctgcccgtgacggaggggctggtggaagtcaggcttcctgacggctggtcgcaagtgtgcgacaaaggctggagcgcccacaacagccacgtggtctgcgggatgctgggcttccccagcgaaaagagggtcaacgcggccttctacaggcccgtgtccgtctaaagggcggcgcccaccctggagagggccgggtagaagtcctgaaggccagcacatggggcacagtctgtgaccgcaagtgggacctgcatgcagccagcgtggtgtgtcgggagctgggcttcgggagtgctcgagaagctctgagtggcgctcgcatggggcagggcatgggtgctatccacctgagtgaagttcgctgctctggacaggagctctccctctggaagtgcccccacaagaacatcacagctgaggattgttcacatagccaggatgccggggtccggtgcaacctaccttacactggggcagagaccagggagacctggtactgggactctgggaatataacagaggtggtgatgagtggagtgcgctgcacagggactgagctgtccctggatcagtgtgcccatcatggcacccacatcacctgcaagaggacagggacccgcttcactgctggagtcatctgttctgagactgcatcagatctgttgctgcactcagcactggtgcaggagaccgcctacatcgaagaccggcccctgcatatgttgtactgtgctgcggaagagaactgcctggccagctcagcccgctcagccaactggccctatggtcaccggcgtctgctccgattctcctcccagatccacaacctgggacgagctgacttcaggcccaaggctgggcgccactcctgggtgtggcacgagtgccatgggcattaccacagcatggacatcttcactcactatgatatcctcaccccaaatggcaccaaggtggctgagggccacaaagctagtttctgtctcgaagacactgagtgtcaggaggatgtctccaagcggtatgagtgtgccaactttggagagcaaggcatcactgtgggttgctgggatctctaccggcatgacattgactgtcagtggattgacatcacggatgtgaagccaggaaactacattctccaggttgtcatcaacccaaactttgaagtagcagagagtgactttaccaacaatgcaatgaaatgtaactgcaaatatgatggacatagaatctgggtgcacaactgccacattggtgatgccttcagtgaagaggccaacaggaggtttgaacgctaccctggccagaccagcaaccagattatctaagtgccactgccctctgcaaaccaccactggcccctaatggcaggggtctgaggctgccattacctcaggagcttaccaagaaacccatgtcagcaaccgcactcatcagaccatgcactatggatgtggaactgtcaagcagaagttttcaccctccttcagaggccagctgtcagtatctgtagccaagcatgggaatctttgctcccaggcccagcaccgagcagaacagaccagagcccaccacaccacaaagagcagcacctgactaactgcccacaaaagatggcagcagctcattttctttaataggaggtcaggatggtcagctccagtatctcccctaagtttagggggatacagctttacctctagccttttggtgggggaaaagatccagccctcccacctcattttttactataatatgttgctaggtataattttattttatataaaaagtgtttctgtgattcttcagagcccaggagtcagtgctggtggttggagggacctgcccccactggttcatttaaccctctgtctcggtgccctcagaacctcagccagaaaggcaaggaggaaatcagagcaggagcctcatactcttggtgatctattcattctgtgacctcaggggtcacatataaggtcagtgtttctcgtccccgccggatctgcactgccaactgggattgggttcgaacagcttcataaacatcttcagcattttgtaccatctgctccccaatggccaaaatcacatcaccaggccgcagaccagcccgtgtgcaggggagcccaggatgactttatggatgagtacaccatgctgaacatcgggaaagctt

SEQ ID NO: 354723 - DNA, 3318 bp, Homo sapiens
ggcacgagctaggactgatctccaggaccagcactcttctcccagcccttagggtcctgctcggccaaggtagggggagtcacgctaaccgcagagggaatgagtaggggatggagaggatgtggagggaccagggaaaacgggtggtgtgggatggagtcgaggggaagccacccaactgagagtttgatttcttgtcaatccctctccttctcacccgcggtgtgcttggttcccctatactgagtgcttagttctttgcctatcactttctatccgttgtctctctcctctgtgtctttctggttttctctctctcattcccacagtctcccttcctctcacatcctgtctgtctgggtcttcctctctctctacgtgtctcttgctcagtctctatctctttttattgacccttctctgactctcgatctctcatagtgtctcttatctctgggtctctcaggctgtgcctctatgacctgtgcctcagcccttatttaatgtgtttctctccctgtctcttggtccctggggctctttctctcctgttgtctctcgctgtctctgtcttactcagtgtctgtttttctttcgtgacttctccctctctttctgactctgggccccactcaatctgtttctctcacgcacactttgtctctggggcacccaggccttccctgccatgcgacctgtcagtgtctggcagtggagcccctgggggctgctgctgtgcctgctgtgcagttcgtgcttggggtctccgtccccttccacgggccctgagaagaaggccgggagccaggggcttcggttccggctggctggcttccccaggaagccctacgagggccgcgtggagatacagcgagctggtgaatggggcaccatctgcgatgatgacttcacgctgcaggctgcccacatcctctgccgggagctgggcttcacagaggccacaggctggacccacagtgccaaatatggccctggaacaggccgcatctggctggacaacttgagctgcagtgggaccgagcagagtgtgactgaatgtgcctcccggggctgggggaacagtgactgtacgcacgatgaggatgctggggtcatctgcaaagaccagcgcctccctggcttctcggactccaatgtcattgaggtagagcatcacctgcaagtggaggaggtgcgaattcgacccgccgttgggtggggcagacgacccctgcccgtgacggaggggctggtggaagtcaggcttcctgacggctggtcgcaagtgtgcgacaaaggctggagcgcccacaacagccacgtggtctgcgggatgctgggcttccccagcgaaaagagggtcaacgcggccttctacaggcccgtgtccgtctaaagggcggcgcccaccctggagagggccgggtagaagtcctgaaggccagcacatggggcacagtctgtgaccgcaagtgggacctgcatgcagccagcgtggtgtgtcgggagctgggcttcgggagtgctcgagaagctctgagtggcgctcgcatggggcagggcatgggtgctatccacctgagtgaagttcgctgctctggacaggagctctccctctggaagtgcccccacaagaacatcacagctgaggattgttcacatagccaggatgccggggtccggtgcaacctaccttacactggggcagagaccagggagacctggtactgggactctgggaatataacagaggtggtgatgagtggagtgcgctgcacagggactgagctgtccctggatcagtgtgcccatcatggcacccacatcacctgcaagaggacagggacccgcttcactgctggagtcatctgttctgagactgcatcagatctgttgctgcactcagcactggtgcaggagaccgcctacatcgaagaccggcccctgcatatgttgtactgtgctgcggaagagaactgcctggccagctcagcccgctcagccaactggccctatggtcaccggcgtctgctccgattctcctcccagatccacaacctgggacgagctgacttcaggcccaaggctgggcgccactcctgggtgtggcacgagtgccatgggcattaccacagcatggacatcttcactcactatgatatcctcaccccaaatggcaccaaggtggctgagggccacaaagctagtttctgtctcgaagacactgagtgtcaggaggatgtctccaagcggtatgagtgtgccaactttggagagcaaggcatcactgtgggttgctgggatctctaccggcatgacattgactgtcagtggattgacatcacggatgtgaagccaggaaactacattctccaggttgtcatcaacccaaactttgaagtagcagagagtgactttaccaacaatgcaatgaaatgtaactgcaaatatgatggacatagaatctgggtgcacaactgccacattgcaccactggcccctaatggcaggggtctgaggctgccattacctcaggagcttaccaagaaacccatgtcagcaaccgcactcatcagaccatgcactatggatgtggaactgtcaagcagaagttttcaccctccttcagaggccagctgtcagtatctgtagccaagcatgggaatctttgctcccaggcccagcaccgagcagaacagaccagagcccaccacaccacaaagagcagcacctgactaactgcccacaaaagatggcagcagctcattttctttaataggaggtcaggatggtcagctccagtatctcccctaagtttagggggatacagctttacctctagccttttggtgggggaaaagatccagccctcccacctcattttttactataatatgttgctaggtataattttattttatataaaaagtgtttctgtgattcttcagagcccaggagtcagtgctggtggttggagggacctgcccccactggttcatttaaccctctgtctcggtgccctcagaacctcagccagaaaggcaaggaggaaatcagagcaggagcctcatactcttggtgatctattcattctgtgacctcaggggtcacatataaggtcagtgtttctcgtccccgccggatctgcactgccaactgggattgggttcgaacagcttcataaacatcttcagcattttgtaccatctgctccccaatggccaaaatcacatcaccaggccgcagaccagcccgtgtgcaggggagcccaggatgactttatggatgagtacaccatgctgaacatcgggaaagctt

SEQ ID NO: 354724 - DNA, 1053 bp, Homo sapiens
  misc_feature (591)..(591): n is a, c, g, or t
  misc_feature (603)..(603): n is a, c, g, or t
  misc_feature (607)..(607): n is a, c, g, or t
  misc_feature (614)..(614): n is a, c, g, or t
  misc_feature (627)..(627): n is a, c, g, or t
cccccttttgtttcttcttagtcgcgccctcgctgattaaatatagttttgcatcaactagatattatcgcttctgtgttcctcagtctttttttctgactcgccacgggccttaaatatagcgctcgctttgtttcacacccccgtcttagtcaaggctttctcaaaaattagtgaatatattatccccccagtcgagtggttctatttatatttctcttctgtgttggaagagggtgttggtgtcgcccccaatgtgtcttcgctcttgcccgccgatacagaaagtggctctcctctctccacaaaagaacttcccacgtgtacagcgtgttgtttcgtccccttctcctactgtttgtttaatatacgcgcgcgcgctccgcgcgctgctccgtgcatctgtataataaactataccctacctccctctcctatgtatgaggggcgcgccgcccgtttgctctactataaattcgtggggtgcgtgttggggcgccccccccggggaggagagttatttttgtcgccgcgcgccgcccctctttttttttttttttttttttttttttttttttttttttttttttntttttttttttntttnttttttnttttttttttttntttttttgctaggtataattttattttatataaaaagtgtttctgtgattcttcagagcccaggagtcagtgctggtggttggagggacctgcccccactggttcatttaaccctctgtctcggtgccctcagaacctcagccagaaaggcaaggaggaaatcagagcaggagcctcatactcttggtgatctattcattctgtgacctcaggggtcacatataaggtcagtgtttctcgtccccgccggatctgcactgccaactgggattgggttcgaacagcttcataaacatcttcagcattttgtaccatctgctccccaatggccaaaatcacatcaccaggccgcagaccagcccgtgtgcaggggagcccaggatgactttatggatgagtacaccatgctgaacatcgggaaagctt

SEQ ID NO: 354725 - DNA, 1828 bp, Homo sapiens
agtgggaaggaaaggggagccgaggctgttgtctcaaagcctgtgttttgggcagagggctgaggaatgagtccctttggccccagatgctggatcctgggccttacagaaacatctgcatatgtccccaggagacctggtactgggactctgggaatataacagaggtggtgatgagtggagtgcgctgcacagggactgagctgtccctggatcagtgtgcccatcatggcacccacatcacctgcaagaggacagggacccgcttcactgctggagtcatctgttctgagactgcatcagatctgttgctgcactcagcactggtgcaggagaccgcctacatcgaagaccggcccctgcatatgttgtactgtgctgcggaagagaactgcctggccagctcagcccgctcagccaactggccctatggtcaccggcgtctgctccgattctcctcccagatccacaacctgggacgagctgacttcaggcccaaggctgggcgccactcctgggtgtggcacgagtgccatgggcattaccacagcatggacatcttcactcactatgatatcctcaccccaaatggcaccaaggtggctgagggccacaaagctagtttctgtctcgaagacactgagtgtcaggaggatgtctccaagcggtatgagtgtgccaactttggagagcaaggcatcactgtgggttgctgggatctctaccggcatgacattgactgtcagtggattgacatcacggatgtgaagccaggaaactacattctccaggttgtcatcaacccaaactttgaagtagcagagagtgactttaccaacaatgcaatgaaatgtaactgcaaatatgatggacatagaatctgggtgcacaactgccacattggtgatgccttcagtgaagaggccaacaggaggtttgaacgctaccctggccagaccagcaaccagattatctaagtgccactgccctctgcaaaccaccactggcccctaatggcaggggtctgaggctgccattacctcaggagcttaccaagaaacccatgtcagcaaccgcactcatcagaccatgcactatggatgtggaactgtcaagcagaagttttcaccctccttcagaggccagctgtcagtatctgtagccaagcatgggaatctttgctcccaggcccagcaccgagcagaacagaccagagcccaccacaccacaaagagcagcacctgactaactgcccacaaaagatggcagcagctcattttctttaataggaggtcaggatggtcagctccagtatctcccctaagtttagggggatacagctttacctctagccttttggtgggggaaaagatccagccctcccacctcattttttactataatatgttgctaggtataattttattttatataaaaagtgtttctgtgattcttcagagcccaggagtcagtgctggtggttggagggacctgcccccactggttcatttaaccctctgtctcggtgccctcagaacctcagccagaaaggcaaggaggaaatcagagcaggagcctcatactcttggtgatctattcattctgtgacctcaggggtcacatataaggtcagtgtttctcgtccccgccggatctgcactgccaactgggattgggttcgaacagcttcataaacatcttcagcattttgtaccatctgctccccaatggccaaaatcacatcaccaggccgcagaccagcccgtgtgcaggggagcccaggatgactttatggatgagtacaccatgctgaacatcgggaaagctt

SEQ ID NO: 354726 - DNA, 406 bp, Homo sapiens
aatcacatcaccaggccgcagaccagccctatagagaaaaatggacagagagaaaggaaggagtacaaagcctagttcaaggacacatgcacaccttgcccatccccatatcacactgcagcctctccctcaccgtgtgcaggggagcccaggatgactttatggatgagtacaccatgctgaacatcgggaaagcttggttctcgaagctgtagttcagcaaggatgctgaaagtacacagatcaccctattagccaaacccaggcattctccccatcctgagttccacctcaagtctctcatcaacacattgataaatatatggacaggacatgggctaggtactacaaaatacaatggcaactcactttctgtcttctagcaataaagtgcaacatgtacata

SEQ ID NO: 354727 - DNA, 6890 bp, Homo sapiens
acccgccccggctactccaacccctgggcgggcgggggtaccgcctgggcaagggccggggcgccgggccgagccacctcttcccctcccccgcttccctgtcgcgctccgctggctggacgcgctggaggagtggagcagcacccggccggccctgggggctgacagtcggcaaagtttggcccgaagaggaagtggtctcaaaccccggcaggtggcgaccaggccagaccaggggcgctcgctgcctgcgggcgggctgtaggcgagggcgcgccccagtgccgagacccggggcttcaggagccggccccgggagagaagagtgcggcggcggacggagaaaacaactccaaagttggcgaaaggcaccgcccctactcccgggctgccgccgcctccccgcccccagccctggcatccagagtacgggtcgagcccgggccatggagcccccctggggaggcggcaccagggagcctgggcgcccggggctccgccgcgaccccatcgggtagaccacagaagctccgggacccttccggcacctctggacagcccaggatgctgttggccaccctcctcctcctcctccttggaggcgctctggcccatccagaccggattatttttccaaatcatgcttgtgaggaccccccagcagtgctcttagaagtgcagggcaccttacagaggcccctggtccgggacagccgcacctcccctgccaactgcacctggctcatcctgggcagcaaggaacagactgtcaccatcaggttccagaagctacacctggcctgtggctcagagcgcttaaccctacgctcccctctccagccactgatctccctgtgtgaggcacctcccagccctctgcagctgcccgggggcaacgtcaccatcacttacagctatgctggggccagagcacccatgggccagggcttcctgctctcctacagccaagattggctgatgtgcctgcaggaagagtttcagtgcctgaaccaccgctgtgtatctgctgtccagcgctgtgatggggttgatgcctgtggcgatggctctgatgaagcaggttgcagctcagaccccttccctggcctgaccccaagacccgtcccctccctgccttgcaatgtcaccttggaggacttctatggggtcttctcctctcctggatatacacacctagcctcagtctcccacccccagtcctgccattggctgctggacccccatgatggccggcggctggccgtgcgcttcacagccctggacttgggctttggagatgcagtgcatgtgtatgacggccctgggccccctgagagctcccgactactgcgtagtctcacccacttcagcaatggcaaggctgtcactgtggagacactgtctggccaggctgttgtgtcctaccacacagttgcttggagcaatggtcgtggcttcaatgccacctaccatgtgcggggctattgcttgccttgggacagaccctgtggcttaggctctggcctgggagctggcgaaggcctaggtgagcgctgctacagtgaggcacagcgctgtgacggctcatgggactgtgctgacggcacagatgaggaggactgcccaggctgcccacctggacacttcccctgtggggctgctggcacctctggtgccacagcctgctacctgcctgctgaccgctgcaactaccagactttctgtgctgatggagcagatgagagacgctgtcggcattgccagcctggcaatttccgatgccgggacgagaagtgcgtgtatgagacgtgggtgtgcgatgggcagccagactgtgcggacggcagtgatgagtgggactgctcctatgttctgccccgcaaggtcattacagctgcagtcattggcagcctagtgtgcggcctgctcctggtcatcgccctgggctgcacctgcaagctctatgccattcgcacccaggagtacagcatctttgcccccctctcccggatggaggctgagattgtgcagcagcaggcacccccttcctacgggcagctcattgcccagggtgccatcccacctgtagaagactttcctacagagaatcctaatgataactcagtgctgggcaacctgcgttctctgctacagatcttacgccaggatatgactccaggaggtggcccaggtgcccgccgtcgtcagcggggccgcttgatgcgacgcctggtacgccgtctccgccgctggggcttgctccctcgaaccaacaccccggctcgggcctctgaggccagatcccaggtcacaccttctgctgctccccttgaggccctagatggtggcacaggtccagcccgtgagggcggggcagtgggtgggcaagatggggagcaggcacccccactgcccatcaaggctcccctcccatctgctagcacgtctccagcccccactactgtccctgaagccccagggccactgccctcactgcccctagagccatcactattgtctggagtggtgcaggccctgcgaggccgcctgttgcccagcctggggcccccaggaccaacccggagcccccctggaccccacacagcagtcctggccctggaagatgaggacgatgtgctactggtgccactggctgagccgggggtgtgggtagctgaggcagaggatgagccactgcttacctgaggggacctgggggctctactgaggcctctcccctgggggctctactcatagtggcacaaccttttagaggtgggtcagcctcccctccaccacttccttccctgtccctggatttcagggacttggtgggcctcccgttgaccctatgtagctgctataaagttaagtgtccctcaggcagggagagggctcacagagtctcctctgtacgtggccatggccagacaccccagtcccttcaccaccacctgctccccacgccaccaccatttgggtggctgtttttaaaaagtaaagttcttagaggatcataggtctggacactccatccttgccaaacctctacccaaaagtggccttaagcaccggaatgccaattaactagagaccctccagcccccaaggggaggatttgggcagaacctgaggttttgccatccacaatccctcctacagggcctggctcacaaaaagagtgcaacaaatgcttctattccatagctacggcattgctcagtaagttgaggtcaaaaataaaggaatcatacatctcaaaattttgcaaattagctgcgagcctgagccccgcctctgcccatctcagtctatgctcacctcatcccactcctccctgtggagccctttgcttggccctctacctcctgccctcttcctgttcatctcccaaccactgcactcttgatttttataccacacagaaggtaagaaaattctaggaaccctaaggatcaatcctctccattttcactcaaatgcctggggcccagctctgcaatgactgactccagggcctctttcctcactgccagcatagaagtcaggggagccagctgggccctgcggtcaggaaggttctcatttttggagcattccctgagcccagatcataggagcagctgtccctggtgggacacaggagtcatgactcctaccctccaccctccacacccaccaggcatttagcagtctgtcctatgcaagacagatgaattctcagccaggatacctcaaggcaggcaaaggtgagtggagggaaaattcacaaacattcagggtgtgtggtgctggcatcaccatggccaaatccaagaggtcttcctggaagagggcccaaactggaaccaaaagaatgctgtcagcagttggaatagagctgtgaattctagacagggggagtgtccccagaacaagcaaacggaggagacaagagggcaagggttataggaaagaccctgggcctgagagcacaagcagcggccagagctgcagcgctggggtgggtgatggagggaatgattcgcaagcagtgttggaacccagcccctagtgagcaaagtgacagaagctgccccagagtttggaaggaagatcgaggcagaagatgtagaaggaagctgtgggggtgggagtgatgcctcaggaacaaaactgaggaattccctaacggacccagtccctggggaaagaggctcccctcaggctctccttgtctagccccacacctggcagagcctgtcacccagcctagccccacgcctggcagagcccatcacccagcctagccccacacctggtggagaggccctgttgattacaccctgtcagcctcctcaaacccagcactaattgcacaattttcctctcttctagtgagcaagagcctgaggaagtagcagagaggggtgtgggcccatgtgcagttctgggaccctggcaccttggctcagggaagacccgagctcctttcactgcagaccctctccagagactggggagagggctctggagaacctggttcttgcttactgttctccctttgggccctccttcccaaacgcaaacaatccaggatccactcagcgtcaggcccaatggaaatagtgaagcagtgattttccctcccctgcctctccatagcctggtcttttgccctctcctttgctcttctcttcccccatagccacctcaaatacctgcagcctgatatcttcatcccttcatccagaccttttctctcctagtggtattgcaaactgaaagtggacaaagacttaaggtaaacctgctcctcatggtggaatgcttccaaatgctggaaggaggactttagggcagagttcactaaggaggcttgtgcttatagatcagtgggcctgaaagaagtttctctaggttctggttgtgtgctgtacgaggtgtaggtagtaataatactcttgtcagccacagtgaagccccaagctagccgggataggggactgaccttgtacaggcagcatggagaaactaagacagagtgtcctgcccaagtgatggcactggggagcagtcactcaggtttatttccaccagggcccaagaaaaaaagaaatgaggcaacctaaaattccatcaagatagataccaatatccaaggtgcttggtcttagcggtgtgggacccacgttaaggctcttggtgggaaggtgggaggtgttttcagcatgagatagggttcaggctgtgaatcagagtctagagcctaagataaaagaagataccagggctgggccacggtggctttcgcctgtaatcctagcactttgggaggccaaggcaggcagactgcctgagctcaggagttcgagactagcctgagcaacacggtgaaaccctgtctctactaaaatacaaaaaagtagccaggtgtggcggcatgcacctgtagtcccagctactcgagaggctgaggcaggagaattgcttgaacccgggaggcggaggttgcagtgagtggagatcgcgccactgcactctagcctgggtgacagagcgagactccttctccaaaaaaaaagaaaagaagataccagaactcagtccttaagaaacaaaattctgccaggcgcagtagctcacacctgtaatcccagcactttggaggggccaaggcaggcggatcgcttgaggccaagagttcaagaacagcctgggcaacatgatgaaaccctgtctctaccaaaaatactaaaaattagccagtctcacaacctggtctcaaaataaataaatagatttaaaaaaaaaatcatgggcctgaaccaagctccagacctcactaggaggggagaaggaccccccagccacacagcccaaggctgcagaagcacctaggtggttagagagtgagtgcctggatggggcgcagtggctcacacctgtaatcccagcactttgggaggccgaggcaggcggatcacgaggtcaagagatcaagaccatcctggccaacatggtgacaccgtgtctctactaaaaatacaaaaataagctgggcatggtggtgcgtgcctgtagtcccatctactcgggaggctgaagcaggagaatcacttgaacctgggaggcaaaggttgcagtgagctgagatcgcgccactgcactccagcctggcaacagagcgagacaagactccatcttcaaaaaaaaaagtgagtgcccgatgatgccagattcttcatcacctgaagtgaacccacacaacagggctgggccatgggcatcataaaccccattttgcaagctcaggaggagctttagggaaatcagaagactggcccagtctctaccaagtggtggatttagagccggcatggcttcgttccaaatctcacccttgtcccaccattccatgggacctcccattcctgagggagcctggatacgggcaagtgcacaacccgggaggttgaggttacagtgagccatgatcgcaccactgcagtccagcccgagcaatagggtgagaccctccctctgaaaaaaataaaaatactcattttggaaggaagtcattctaaaatgttacacttgtcttcagcatatctgcaatataataattttctgcataactgaggatcattcacagaaaccaatggcttttctccagcagtgtcttctgaagttgtaacagtaggggcacggggagctatttgcttttatgctaaatgaccttagaccacttataaaatgcatatgagtgctttaaatgttattttgtgtgtgtgtggtgttgcctccctgactacaaggggtcacttgctactctaaatgtgtttctaatctactagtacaggaacacacatggacacgttaaaattgtgaataaaagtaagtaaaaagta

SEQ ID NO: 354728 - DNA, 6751 bp, Homo sapiens
acccgccccggctactccaacccctgggcgggcgggggtaccgcctgggcaagggccggggcgccgggccgagccacctcttcccctcccccgcttccctgtcgcgctccgctggctggacgcgctggaggagtggagcagcacccggccggccctgggggctgacagtcggcaaagtttggcccgaagaggaagtggtctcaaaccccggcaggtggcgaccaggccagaccaggggcgctcgctgcctgcgggcgggctgtaggcgagggcgcgccccagtgccgagacccggggcttcaggagccggccccgggagagaagagtgcggcggcggacggagaaaacaactccaaagttggcgaaaggcaccgcccctactcccgggctgccgccgcctccccgcccccagccctggcatccagagtacgggtcgagcccgggccatggagcccccctggggaggcggcaccagggagcctgggcgcccggggctccgccgcgaccccatcgggtagaccacagaagctccgggacccttccggcacctctggacagcccaggatgctgttggccaccctcctcctcctcctccttggaggcgctctggcccatccagaccggattatttttccaaatcatgcttgtgaggaccccccagcagtgctcttagaagtgcagggcaccttacagaggcccctggtccgggacagccgcacctcccctgccaactgcacctggctcatcctgggcagcaaggaacagactgtcaccatcaggttccagaagctacacctggcctgtggctcagagcgcttaaccctacgctcccctctccagccactgatctccctgtgtgaggcacctcccagccctctgcagctgcccgggggcaacgtcaccatcacttacagctatgctggggccagagcacccatgggccagggcttcctgctctcctacagccaagattggctgatgtgcctgcaggaagagtttcagtgcctgaaccaccgctgtgtatctgctgtccagcgctgtgatggggttgatgcctgtggcgatggctctgatgaagcaggttgcagctcagaccccttccctggcctgaccccaagacccgtcccctccctgccttgcaatgtcaccttggaggacttctatggggtcttctcctctcctggatatacacacctagcctcagtctcccacccccagtcctgccattggctgctggacccccatgatggccggcggctggccgtgcgcttcacagccctggacttgggctttggagatgcagtgcatgtgtatgacggccctgggccccctgagagctcccgactactgcgtagtctcacccacttcagcaatggcaaggctgtcactgtggagacactgtctggccaggctgttgtgtcctaccacacagttgcttggagcaatggtcgtggcttcaatgccacctaccatgtgcggggctattgcttgccttgggacagaccctgtggcttaggctctggcctgggagctggcgaaggcctaggtgagcgctgctacagtgaggcacagcgctgtgacggctcatgggactgtgctgacggcacagatgaggaggactgcccaggctgcccacctggacacttcccctgtggggctgctggcacctctggtgccacagcctgctacctgcctgctgaccgctgcaactaccagactttctgtgctgatggagcagatgagagacgctgtcggcattgccagcctggcaatttccgatgccgggacgagaagtgcgtgtatgagacgtgggtgtgcgatgggcagccagactgtgcggacggcagtgatgagtgggactgctcctatgttctgccccgcaaggtcattacagctgcagtcattggcagcctagtgtgcggcctgctcctggtcatcgccctgggctgcacctgcaagctctatgccattcgcacccaggagtacagcatctttgcccccctctcccggatggaggctgagattgtgcagcagcaggcacccccttcctacgggcagctcattgcccagggtgccatcccacctgtagaagactttcctacagagaatcctaatgataactcagtgctgggcaacctgcgttctctgctacagatcttacgccaggatatgactccaggaggtggcccaggtgcccgccgtcgtcagcggggccgcttgatgcgacgcctggtacgccgtctccgccgctggggcttgctccctcgaaccaacaccccggctcgggcctctgaggccagatcccaggtcacaccttctgctgctccccttgaggccctagatggtggcacaggtccagcccgtgagggcggggcagtgggtgggcaagatggggagcaggcacccccactgcccatcaaggctcccctcccatctgctagcacgtctccagcccccactactgtccctgaagccccagggccactgccctcactgcccctagagccatcactattgtctggagtggtgcaggccctgcgaggccgcctgttgcccagcctggggcccccaggaccaacccggagcccccctggaccccacacagcagtcctggccctggaagatgaggacgatgtgctactggtgccactggctgagccgggggtgtgggtagctgaggcagaggatgagccactgcttacctgaggggacctgggggctctactgaggcctctcccctgggggctctactcatagtggcacaaccttttagaggtgggtcagcctcccctccaccacttccttccctgtccctggatttcagggacttggtgggcctcccgttgaccctatgtagctgctataaagttaagtgtccctcaggcagggagagggctcacagagtctcctctgtacgtggccatggccagacaccccagtcccttcaccaccacctgctccccacgccaccaccatttgggtggctgtttttaaaaagtaaagttcttagaggatcataggtctggacactccatccttgccaaacctctacccaaaagtggccttaagcaccggaatgccaattaactagagaccctccagcccccaaggggaggatttgggcagaacctgaggttttgccatccacaatccctcctacagggcctggctcacaaaaagagtgcaacaaatgcttctattccatagctacggcattgctcagtaagttgaggtcaaaaataaaggaatcatacatctcaaaattttgcaaattagctgcgagcctgagccccgcctctgcccatctcagtctatgctcacctcatcccactcctccctgtggagccctttgcttggccctctacctcctgccctcttcctgttcatctcccaaccactgcactcttgatttttataccacacagaaggtaagaaaattctaggaaccctaaggatcaatcctctccattttcactcaaatgcctggggcccagctctgcaatgactgactccagggcctctttcctcactgccagcatagaagtcaggggagccagctgggccctgcggtcaggaaggttctcatttttggagcattccctgagcccagatcataggagcagctgtccctggtgggacacaggagtcatgactcctaccctccaccctccacacccaccaggcatttagcagtctgtcctatgcaagacagatgaattctcagccaggatacctcaaggcaggcaaaggtgagtggagggaaaattcacaaacattcagggtgtgtggtgctggcatcaccatggccaaatccaagaggtcttcctggaagagggcccaaactggaaccaaaagaatgctgtcagcagttggaatagagctgtgaattctagacagggggagtgtccccagaacaagcaaacggaggagacaagagggcaagggttataggaaagaccctgggcctgagagcacaagcagcggccagagctgcagcgctggggtgggtgatggagggaatgattcgcaagcagtgttggaacccagcccctagtgagcaaagtgacagaagctgccccagagtttggaaggaagatcgaggcagaagatgtagaaggaagctgtgggggtgggagtgatgcctcaggaacaaaactgaggaattccctaacggacccagtccctggggaaagaggctcccctcaggctctccttgtctagccccacacctggcagagcctgtcacccagcctagccccacgcctggcagagcccatcacccagcctagccccacacctggtggagaggccctgttgattacaccctgtcagcctcctcaaacccagcactaattgcacaattttcctctcttctagtgagcaagagcctgaggaagtagcagagaggggtgtgggcccatgtgcagttctgggaccctggcaccttggctcagggaagacccgagctcctttcactgcagaccctctccagagactggggagagggctctggagaacctggttcttgcttactgttctccctttgggccctccttcccaaacgcaaacaatccaggatccactcagcgtcaggcccaatggaaatagtgaagcagtgattttccctcccctgcctctccatagcctggtcttttgccctctcctttgctcttctcttcccccatagccacctcaaatacctgcagcctgatatcttcatcccttcatccagaccttttctctcctagtggtattgcaaactgaaagtggacaaagacttaaggtaaacctgctcctcatggtggaatgcttccaaatgctggaaggaggactttagggcagagttcactaaggaggcttgtgcttatagatcagtgggcctgaaagaagtttctctaggttctggttgtgtgctgtacgaggtgtaggtagtaataatactcttgtcagccacagtgaagccccaagctagccgggataggggactgaccttgtacaggcagcatggagaaactaagacagagtgtcctgcccaagtgatggcactggggagcagtcactcaggtttatttccaccagggcccaagaaaaaaagaaatgaggcaacctaaaattccatcaagatagataccaatatccaaggtgcttggtcttagcggtgtgggacccacgttaaggctcttggtgggaaggtgggaggtgttttcagcatgagatagggttcaggctgtgaatcagagtctagagcctaagataaaagaagataccagggctgggccacggtggctttcgcctgtaatcctagcactttgggaggccaaggcaggcagactgcctgagctcaggagttcgagactagcctgagcaacacggtgaaaccctgtctctactaaaatacaaaaaagtagccaggtgtggcggcatgcacctgtagtcccagctactcgagaggctgaggcaggagaattgcttgaacccgggaggcggaggttgcagtgagtggagatcgcgccactgcactctagcctgggtgacagagcgagactccttctccaaaaaaaaagaaaagaagataccagaactcagtccttaagaaacaaaattctgccaggcgcagtagctcacacctgtaatcccagcactttggaggggccaaggcaggcggatcgcttgaggccaagagttcaagaacagcctgggcaacatgatgaaaccctgtctctaccaaaaatactaaaaattagccagtctcacaacctggtctcaaaataaataaatagatttaaaaaaaaaatcatgggcctgaaccaagctccagacctcactaggaggggagaaggaccccccagccacacagcccaaggctgcagaagcacctaggtggttagagagtgagtgcctggatggggcgcagtggctcacacctgtaatcccagcactttgggaggccgaggcaggcggatcacgaggtcaagagatcaagaccatcctggccaacatggtgacaccgtgtctctactaaaaatacaaaaataagctgggcatggtggtgcgtgcctgtagtcccatctactcgggaggctgaagcaggagaatcacttgaacctgggaggcaaaggttgcagtgagctgagatcgcgccactgcactccagcctggcaacagagcgagacaagactccatcttcaaaaaaaaaagtgagtgcccgatgatgccagattcttcatcacctgaagtgaacccacacaacagggctgggccatgggcatcataaaccccattttgcaagctcaggaggagctttagggaaatcagaagactggcccagtctctaccaagtggtggatttagagccggcatggcttcgttccaaatctcacccttgtcccaccattccatgggacctcccattcctgagggagcctggatacgggcaagtgcacaacccgggaggttgaggttacagtgagccatgatcgcaccactgcagtccagcccgagcaatagggtgagaccctccctctgaaaaaaataaaaatactcattttggaaggaagtcattctaaaatgttacacttgtcttcagcatatctgcaatataataattttctgcataactgaggatcattcacagaaaccaatggcttttctccagcagtgtcttctgaagttgtaacagtaggggcacggggagctatttgcttttatgctaaatgaccttagaccacttataaaatgcatatgagtgctt

SEQ ID NO: 354729 - DNA, 2607 bp, Homo sapiens
cccctgagagctcccgactactgcgtagtctcacccacttcagcaatggcaaggctgtcactgtggagacactgtctggccaggctgttgtgtcctaccacacagttgcttggagcaatggtcgtggcttcaatgccacctaccatgtgcggggctattgcttgccttgggacagaccctgtggcttaggctctggcctgggagctggcgaaggcctatgtgagcgctgctacagtgaggcaacgtcaccatcacttacagctatgctggggccagagcacccatgggccagggcttcctgctctcctacagccaagattggctgatgtgcctgcaggaagagtttcagtgcctgaaccaccgctgtgtatctgctgtccagcgctgtgatggggttgatgcctgtggcgatggctctgatgaagcaggttgcagctcagaccccttccctggcctgaccccaagacccgtcccctccctgccttgcaatgtcaccttggaggacttctatggggtcttctcctctcctggatatacacacctagcctcagtctcccacccccagtcctgccattggctgctggacccccatgatggccggcggctggccgtgcgcttcacagccctggacttgggctttggagatgcagtgcatgtgtatgacggccctgggccccctgagagctcccgactactgcgtagtctcacccacttcagcaatggcaaggctgtcactgtggagacactgtctggccaggctgttgtgtcctaccacacagttgcttggagcaatggtcgtggcttcaatgccacctaccatgtgcggggctattgcttgccttgggacagaccctgtggcttaggctctggcctgggagctggcgaaggcctaggtgagcgctgctacagtgaggcacagcgctgtgacggctcatgggactgtgctgacggcacagatgaggaggactgcccaggctgcccacctggacacttcccctgtggggctgctggcacctctggtgccacagcctgctacctgcctgctgaccgctgcaactaccagactttctgtgctgatggagcagatgagagacgctgtcggcattgccagcctggcaatttccgatgccgggacgagaagtgcgtgtatgagacgtgggtgtgcgatgggcagccagactgtgcggacggcagtgatgagtgggactgctcctatgttctgccccgcaaggtcattacagctgcagtcattggcagcctagtgtgcggcctgctcctggtcatcgccctgggctgcacctgcaagctctatgccattcgcacccaggagtacagcatctttgcccccctctcccggatggaggctgagattgtgcagcagcaggcacccccttcctacgggcagctcattgcccagggtgccatcccacctgtagaagactttcctacagagaatcctaatgataactcagtgctgggcaacctgcgttctctgctacagatcttacgccaggatatgactccaggaggtggcccaggtgcccgccgtcgtcagcggggccgcttgatgcgacgcctggtacgccgtctccgccgctggggcttgctccctcgaaccaacaccccggctcgggcctctgaggccagatcccaggtcacaccttctgctgctccccttgaggccctagatggtggcacaggtccagcccgtgagggcggggcagtgggtgggcaagatggggagcaggcacccccactgcccatcaaggctcccctcccatctgctagcacgtctccagcccccactactgtccctgaagccccagggccactgccctcactgcccctagagccatcactattgtctggagtggtgcaggccctgcgaggccgcctgttgcccagcctggggcccccaggaccaacccggagcccccctggaccccacacagcagtcctggccctggaagatgaggacgatgtgctactggtgccactggctgagccgggggtgtgggtagctgaggcagaggatgagccactgcttacctgaggggacctgggggctctactgaggcctctcccctgggggctctactcatagtggcacaaccttttagaggtgggtcagcctcccctccaccacttccttccctgtccctggatttcagggacttggtgggcctcccgttgaccctatgtagctgctataaagttaagtgtccctcaggcagggagagggctcacagagtctcctctgtacgtggccatggccagacaccccagtcccttcaccaccacctgctccccacgccaccaccatttgggtggctgtttttaaaaagtaaagttcttagaggatcataggtctggacactccatccttgccaaacctctacccaaaagtggccttaagcaccggaatgccaattaactagagaccctccagcccccaaggggaggatttgggcagaacctgaggttttgccatccacaatccctcctacagggcctggctcacaaaaagagtgcaacaaatgcttctattccatagctacggcattgctcagtaagttgaggtcaaaaataaaggaatcatacatctca

SEQ ID NO: 354730 - DNA, 2229 bp, Homo sapiens
gggacttctatggggtcttctcctctcctggatatacacacctagcctcagtctcccacccccagtcctgcaaggtgacattgcaaggcagggaggggacgggtcttgcaatgtcaccttggaggacttctatggggtcttctcctctcctggatatacacacctagcctcagtctcccacccccagtcctgccattggctgctggacccccatgatggccggcggctggccgtgcgcttcacagccctggacttgggctttggagatgcagtgcatgtgtatgacggccctgggccccctgagagctcccgactactgcgtagtctcacccacttcagcaatggcaaggctgtcactgtggagacactgtctggccaggctgttgtgtcctaccacacagttgcttggagcaatggtcgtggcttcaatgccacctaccatgtgcggggctattgcttgccttgggacagaccctgtggcttaggctctggcctgggagctggcgaaggcctaggtgagcgctgctacagtgaggcacagcgctgtgacggctcatgggactgtgctgacggcacagatgaggaggactgcccaggctgcccacctggacacttcccctgtggggctgctggcacctctggtgccacagcctgctacctgcctgctgaccgctgcaactaccagactttctgtgctgatggagcagatgagagacgctgtcggcattgccagcctggcaatttccgatgccgggacgagaagtgcgtgtatgagacgtgggtgtgcgatgggcagccagactgtgcggacggcagtgatgagtgggactgctcctatgttctgccccgcaaggtcattacagctgcagtcattggcagcctagtgtgcggcctgctcctggtcatcgccctgggctgcacctgcaagctctatgccattcgcacccaggagtacagcatctttgcccccctctcccggatggaggctgagattgtgcagcagcaggcacccccttcctacgggcagctcattgcccagggtgccatcccacctgtagaagactttcctacagagaatcctaatgataactcagtgctgggcaacctgcgttctctgctacagatcttacgccaggatatgactccaggaggtggcccaggtgcccgccgtcgtcagcggggccgcttgatgcgacgcctggtacgccgtctccgccgctggggcttgctccctcgaaccaacaccccggctcgggcctctgaggccagatcccaggtcacaccttctgctgctccccttgaggccctagatggtggcacaggtccagcccgtgagggcggggcagtgggtgggcaagatggggagcaggcacccccactgcccatcaaggctcccctcccatctgctagcacgtctccagcccccactactgtccctgaagccccagggccactgccctcactgcccctagagccatcactattgtctggagtggtgcaggccctgcgaggccgcctgttgcccagcctggggcccccaggaccaacccggagcccccctggaccccacacagcagtcctggccctggaagatgaggacgatgtgctactggtgccactggctgagccgggggtgtgggtagctgaggcagaggatgagccactgcttacctgaggggacctgggggctctactgaggcctctcccctgggggctctactcatagtggcacaaccttttagaggtgggtcagcctcccctccaccacttccttccctgtccctggatttcagggacttggtgggcctcccgttgaccctatgtagctgctataaagttaagtgtccctcaggcagggagagggctcacagagtctcctctgtacgtggccatggccagacaccccagtcccttcaccaccacctgctccccacgccaccaccatttgggtggctgtttttaaaaagtaaagttcttagaggatcataggtctggacactccatccttgccaaacctctacccaaaagtggccttaagcaccggaatgccaattaactagagaccctccagcccccaaggggaggatttgggcagaacctgaggttttgccatccacaatccctcctacagggcctggctcacaaaaagagtgcaacaaatgcttctattccatagctacggcattgctcagtaagttgaggtcaaaaataaaggaatcatacatctca

SEQ ID NO: 354731 - DNA, 5174 bp, Homo sapiens
tgaggctgggctgtgcagctacaggagaccacgaaagtgcccaccttggggagaggctcccatgatcagcttgtcagttgtgtcctgtaagggacaggtccagatcctgaaagcagtttcaagggaggagggacctcagatgacctttgggaaagccatggcacagctccagctggcctggcccgggtgtggaagtgggaggactgtccaggctgaggtggtctactctggccgagaactaccagtgactgagcagtcctcattccttctagcatctttgcccccctctcccggatggaggctgagattgtgcagcagcaggcacccccttcctacgggcagctcattgcccagggtgccatcccacctgtagaagactttcctacagagaatcctaatgataactcagtgctgggcaacctgcgttctctgctacagatcttacgccaggatatgactccaggaggtggcccaggtgcccgccgtcgtcagcggggccgcttgatgcgacgcctggtacgccgtctccgccgctggggcttgctccctcgaaccaacaccccggctcgggcctctgaggccagatcccaggtcacaccttctgctgctccccttgaggccctagatggtggcacaggtccagcccgtgagggcggggcagtgggtgggcaagatggggagcaggcacccccactgcccatcaaggctcccctcccatctgctagcacgtctccagcccccactactgtccctgaagccccagggccactgccctcactgcccctagagccatcactattgtctggagtggtgcaggccctgcgaggccgcctgttgcccagcctggggcccccaggaccaacccggagcccccctggaccccacacagcagtcctggccctggaagatgaggacgatgtgctactggtgccactggctgagccgggggtgtgggtagctgaggcagaggatgagccactgcttacctgaggggacctgggggctctactgaggcctctcccctgggggctctactcatagtggcacaaccttttagaggtgggtcagcctcccctccaccacttccttccctgtccctggatttcagggacttggtgggcctcccgttgaccctatgtagctgctataaagttaagtgtccctcaggcagggagagggctcacagagtctcctctgtacgtggccatggccagacaccccagtcccttcaccaccacctgctccccacgccaccaccatttgggtggctgtttttaaaaagtaaagttcttagaggatcataggtctggacactccatccttgccaaacctctacccaaaagtggccttaagcaccggaatgccaattaactagagaccctccagcccccaaggggaggatttgggcagaacctgaggttttgccatccacaatccctcctacagggcctggctcacaaaaagagtgcaacaaatgcttctattccatagctacggcattgctcagtaagttgaggtcaaaaataaaggaatcatacatctcaaaattttgcaaattagctgcgagcctgagccccgcctctgcccatctcagtctatgctcacctcatcccactcctccctgtggagccctttgcttggccctctacctcctgccctcttcctgttcatctcccaaccactgcactcttgatttttataccacacagaaggtaagaaaattctaggaaccctaaggatcaatcctctccattttcactcaaatgcctggggcccagctctgcaatgactgactccagggcctctttcctcactgccagcatagaagtcaggggagccagctgggccctgcggtcaggaaggttctcatttttggagcattccctgagcccagatcataggagcagctgtccctggtgggacacaggagtcatgactcctaccctccaccctccacacccaccaggcatttagcagtctgtcctatgcaagacagatgaattctcagccaggatacctcaaggcaggcaaaggtgagtggagggaaaattcacaaacattcagggtgtgtggtgctggcatcaccatggccaaatccaagaggtcttcctggaagagggcccaaactggaaccaaaagaatgctgtcagcagttggaatagagctgtgaattctagacagggggagtgtccccagaacaagcaaacggaggagacaagagggcaagggttataggaaagaccctgggcctgagagcacaagcagcggccagagctgcagcgctggggtgggtgatggagggaatgattcgcaagcagtgttggaacccagcccctagtgagcaaagtgacagaagctgccccagagtttggaaggaagatcgaggcagaagatgtagaaggaagctgtgggggtgggagtgatgcctcaggaacaaaactgaggaattccctaacggacccagtccctggggaaagaggctcccctcaggctctccttgtctagccccacacctggcagagcctgtcacccagcctagccccacgcctggcagagcccatcacccagcctagccccacacctggtggagaggccctgttgattacaccctgtcagcctcctcaaacccagcactaattgcacaattttcctctcttctagtgagcaagagcctgaggaagtagcagagaggggtgtgggcccatgtgcagttctgggaccctggcaccttggctcagggaagacccgagctcctttcactgcagaccctctccagagactggggagagggctctggagaacctggttcttgcttactgttctccctttgggccctccttcccaaacgcaaacaatccaggatccactcagcgtcaggcccaatggaaatagtgaagcagtgattttccctcccctgcctctccatagcctggtcttttgccctctcctttgctcttctcttcccccatagccacctcaaatacctgcagcctgatatcttcatcccttcatccagaccttttctctcctagtggtattgcaaactgaaagtggacaaagacttaaggtaaacctgctcctcatggtggaatgcttccaaatgctggaaggaggactttagggcagagttcactaaggaggcttgtgcttatagatcagtgggcctgaaagaagtttctctaggttctggttgtgtgctgtacgaggtgtaggtagtaataatactcttgtcagccacagtgaagccccaagctagccgggataggggactgaccttgtacaggcagcatggagaaactaagacagagtgtcctgcccaagtgatggcactggggagcagtcactcaggtttatttccaccagggcccaagaaaaaaagaaatgaggcaacctaaaattccatcaagatagataccaatatccaaggtgcttggtcttagcggtgtgggacccacgttaaggctcttggtgggaaggtgggaggtgttttcagcatgagatagggttcaggctgtgaatcagagtctagagcctaagataaaagaagataccagggctgggccacggtggctttcgcctgtaatcctagcactttgggaggccaaggcaggcagactgcctgagctcaggagttcgagactagcctgagcaacacggtgaaaccctgtctctactaaaatacaaaaaagtagccaggtgtggcggcatgcacctgtagtcccagctactcgagaggctgaggcaggagaattgcttgaacccgggaggcggaggttgcagtgagtggagatcgcgccactgcactctagcctgggtgacagagcgagactccttctccaaaaaaaaagaaaagaagataccagaactcagtccttaagaaacaaaattctgccaggcgcagtagctcacacctgtaatcccagcactttggaggggccaaggcaggcggatcgcttgaggccaagagttcaagaacagcctgggcaacatgatgaaaccctgtctctaccaaaaatactaaaaattagccagtctcacaacctggtctcaaaataaataaatagatttaaaaaaaaaatcatgggcctgaaccaagctccagacctcactaggaggggagaaggaccccccagccacacagcccaaggctgcagaagcacctaggtggttagagagtgagtgcctggatggggcgcagtggctcacacctgtaatcccagcactttgggaggccgaggcaggcggatcacgaggtcaagagatcaagaccatcctggccaacatggtgacaccgtgtctctactaaaaatacaaaaataagctgggcatggtggtgcgtgcctgtagtcccatctactcgggaggctgaagcaggagaatcacttgaacctgggaggcaaaggttgcagtgagctgagatcgcgccactgcactccagcctggcaacagagcgagacaagactccatcttcaaaaaaaaaagtgagtgcccgatgatgccagattcttcatcacctgaagtgaacccacacaacagggctgggccatgggcatcataaaccccattttgcaagctcaggaggagctttagggaaatcagaagactggcccagtctctaccaagtggtggatttagagccggcatggcttcgttccaaatctcacccttgtcccaccattccatgggacctcccattcctgagggagcctggatacgggcaagtgcacaacccgggaggttgaggttacagtgagccatgatcgcaccactgcagtccagcccgagcaatagggtgagaccctccctctgaaaaaaataaaaatactcattttggaaggaagtcattctaaaatgttacacttgtcttcagcatatctgcaatataataattttctgcataactgaggatcattcacagaaaccaatggcttttctccagcagtgtcttctgaagttgtaacagtaggggcacggggagctatttgcttttatgctaaatgaccttagaccacttataaaatgcatatgagtgctttaaatgttattttgtgtgtgtgtggtgttgcctccctgactacaaggggtcacttgctactctaaatgtgtttctaatctactagtacaggaacacacatggacacgttaaaattgtgaataaaagtaagtaaaaagta

SEQ ID NO: 354732 - DNA, 4531 bp, Homo sapiens
acccgccccggctactccaacccctgggcgggcgggggtaccgcctgggcaagggccggggcgccgggccgagccacctcttcccgtctccagcccccactactgtccctgaagccccagggccactgccctcactgcccctagagccatcactattgtctggagtggtgcaggccctgcgaggccgcctgttgcccagcctggggcccccaggaccaacccggagcccccctggaccccacacagcagtcctggccctggaagatgaggacgatgtgctactggtgccactggctgagccgggggtgtgggtagctgaggcagaggatgagccactgcttacctgaggggacctgggggctctactgaggcctctcccctgggggctctactcatagtggcacaaccttttagaggtgggtcagcctcccctccaccacttccttccctgtccctggatttcagggacttggtgggcctcccgttgaccctatgtagctgctataaagttaagtgtccctcaggcagggagagggctcacagagtctcctctgtacgtggccatggccagacaccccagtcccttcaccaccacctgctccccacgccaccaccatttgggtggctgtttttaaaaagtaaagttcttagaggatcataggtctggacactccatccttgccaaacctctacccaaaagtggccttaagcaccggaatgccaattaactagagaccctccagcccccaaggggaggatttgggcagaacctgaggttttgccatccacaatccctcctacagggcctggctcacaaaaagagtgcaacaaatgcttctattccatagctacggcattgctcagtaagttgaggtcaaaaataaaggaatcatacatctcaaaattttgcaaattagctgcgagcctgagccccgcctctgcccatctcagtctatgctcacctcatcccactcctccctgtggagccctttgcttggccctctacctcctgccctcttcctgttcatctcccaaccactgcactcttgatttttataccacacagaaggtaagaaaattctaggaaccctaaggatcaatcctctccattttcactcaaatgcctggggcccagctctgcaatgactgactccagggcctctttcctcactgccagcatagaagtcaggggagccagctgggccctgcggtcaggaaggttctcatttttggagcattccctgagcccagatcataggagcagctgtccctggtgggacacaggagtcatgactcctaccctccaccctccacacccaccaggcatttagcagtctgtcctatgcaagacagatgaattctcagccaggatacctcaaggcaggcaaaggtgagtggagggaaaattcacaaacattcagggtgtgtggtgctggcatcaccatggccaaatccaagaggtcttcctggaagagggcccaaactggaaccaaaagaatgctgtcagcagttggaatagagctgtgaattctagacagggggagtgtccccagaacaagcaaacggaggagacaagagggcaagggttataggaaagaccctgggcctgagagcacaagcagcggccagagctgcagcgctggggtgggtgatggagggaatgattcgcaagcagtgttggaacccagcccctagtgagcaaagtgacagaagctgccccagagtttggaaggaagatcgaggcagaagatgtagaaggaagctgtgggggtgggagtgatgcctcaggaacaaaactgaggaattccctaacggacccagtccctggggaaagaggctcccctcaggctctccttgtctagccccacacctggcagagcctgtcacccagcctagccccacgcctggcagagcccatcacccagcctagccccacacctggtggagaggccctgttgattacaccctgtcagcctcctcaaacccagcactaattgcacaattttcctctcttctagtgagcaagagcctgaggaagtagcagagaggggtgtgggcccatgtgcagttctgggaccctggcaccttggctcagggaagacccgagctcctttcactgcagaccctctccagagactggggagagggctctggagaacctggttcttgcttactgttctccctttgggccctccttcccaaacgcaaacaatccaggatccactcagcgtcaggcccaatggaaatagtgaagcagtgattttccctcccctgcctctccatagcctggtcttttgccctctcctttgctcttctcttcccccatagccacctcaaatacctgcagcctgatatcttcatcccttcatccagaccttttctctcctagtggtattgcaaactgaaagtggacaaagacttaaggtaaacctgctcctcatggtggaatgcttccaaatgctggaaggaggactttagggcagagttcactaaggaggcttgtgcttatagatcagtgggcctgaaagaagtttctctaggttctggttgtgtgctgtacgaggtgtaggtagtaataatactcttgtcagccacagtgaagccccaagctagccgggataggggactgaccttgtacaggcagcatggagaaactaagacagagtgtcctgcccaagtgatggcactggggagcagtcactcaggtttatttccaccagggcccaagaaaaaaagaaatgaggcaacctaaaattccatcaagatagataccaatatccaaggtgcttggtcttagcggtgtgggacccacgttaaggctcttggtgggaaggtgggaggtgttttcagcatgagatagggttcaggctgtgaatcagagtctagagcctaagataaaagaagataccagggctgggccacggtggctttcgcctgtaatcctagcactttgggaggccaaggcaggcagactgcctgagctcaggagttcgagactagcctgagcaacacggtgaaaccctgtctctactaaaatacaaaaaagtagccaggtgtggcggcatgcacctgtagtcccagctactcgagaggctgaggcaggagaattgcttgaacccgggaggcggaggttgcagtgagtggagatcgcgccactgcactctagcctgggtgacagagcgagactccttctccaaaaaaaaagaaaagaagataccagaactcagtccttaagaaacaaaattctgccaggcgcagtagctcacacctgtaatcccagcactttggaggggccaaggcaggcggatcgcttgaggccaagagttcaagaacagcctgggcaacatgatgaaaccctgtctctaccaaaaatactaaaaattagccagtctcacaacctggtctcaaaataaataaatagatttaaaaaaaaaatcatgggcctgaaccaagctccagacctcactaggaggggagaaggaccccccagccacacagcccaaggctgcagaagcacctaggtggttagagagtgagtgcctggatggggcgcagtggctcacacctgtaatcccagcactttgggaggccgaggcaggcggatcacgaggtcaagagatcaagaccatcctggccaacatggtgacaccgtgtctctactaaaaatacaaaaataagctgggcatggtggtgcgtgcctgtagtcccatctactcgggaggctgaagcaggagaatcacttgaacctgggaggcaaaggttgcagtgagctgagatcgcgccactgcactccagcctggcaacagagcgagacaagactccatcttcaaaaaaaaaagtgagtgcccgatgatgccagattcttcatcacctgaagtgaacccacacaacagggctgggccatgggcatcataaaccccattttgcaagctcaggaggagctttagggaaatcagaagactggcccagtctctaccaagtggtggatttagagccggcatggcttcgttccaaatctcacccttgtcccaccattccatgggacctcccattcctgagggagcctggatacgggcaagtgcacaacccgggaggttgaggttacagtgagccatgatcgcaccactgcagtccagcccgagcaatagggtgagaccctccctctgaaaaaaataaaaatactcattttggaaggaagtcattctaaaatgttacacttgtcttcagcatatctgcaatataataattttctgcataactgaggatcattcacagaaaccaatggcttttctccagcagtgtcttctgaagttgtaacagtaggggcacggggagctatttgcttttatgctaaatgaccttagaccacttataaaatgcatatgagtgctttaaatgttattttgtgtgtgtgtggtgttgcctccctgactacaaggggtcacttgctactctaaatgtgtttctaatctactagtacaggaacacacatggacacgttaaaattgtgaataaaagtaagtaaaaagta

SEQ ID NO: 354733 - DNA, 3285 bp, Homo sapiens
acccgccccggctactccaacccctgggcgggcgggggtaccgcctgggcaagggccggggcgccgggccgagccacctcttcccctcccccgcttccctgtcgcgctccgctggctggacgcgctggaggagtggagcagcacccggccggccctgggggctgacagtcggcaaagtttggcccgaagaggaagtggtctcaaaccccggcaggtggcgaccaggccagaccaggggcgctcgctgcctgcgggcgggctgtaggcgagggcgcgccccagtgccgagacccggggcttcaggagccggccccgggagagaagagtgcggcggcggacggagaaaacaactccaaagttggcgaaaggcaccgcccctactcccgggctgccgccgcctccccgcccccagccctggcatccagagtacgggtcgagcccgggccatggagcccccctggggaggcggcaccagggagcctgggcgcccggggctccgccgcgaccccatcgggtagaccacagaagctccgggacccttccggcacctctggacagcccaggatgctgttggccaccctcctcctcctcctccttggaggcgctctggcccatccagaccggattatttttccaaatcatgcttgtgaggaccccccagcagtgctcttagaagtgcagggcaccttacagaggcccctggtccgggacagccgcacctcccctgccaactgcacctggctcatcctgggcagcaaggaacagactgtcaccatcaggttccagaagctacacctggcctgtggctcagagcgcttaaccctacgctcccctctccagccactgatctccctgtgtgaggcacctcccagccctctgcagctgcccgggggcaacgtcaccatcacttacagctatgctggggccagagcacccatgggccagggcttcctgctctcctacagccaagattggctgatgtgcctgcaggaagagtttcagtgcctgaaccaccgctgtgtatctgctgtccagcgctgtgatggggttgatgcctgtggcgatggctctgatgaagcaggttgcagctcagaccccttccctggcctgaccccaagacccgtcccctccctgccttgcaatgtcaccttggaggacttctatggggtcttctcctctcctggatatacacacctagcctcagtctcccacccccagtcctgccattggctgctggacccccatgatggccggcggctggccgtgcgcttcacagccctggacttgggctttggagatgcagtgcatgtgtatgacggccctgggccccctgagagctcccgactactgcgtagtctcacccacttcagcaatggcaaggctgtcactgtggagacactgtctggccaggctgttgtgtcctaccacacagttgcttggagcaatggtcgtggcttcaatgccacctaccatgtgcggggctattgcttgccttgggacagaccctgtggcttaggctctggcctgggagctggcgaaggcctaggtgagcgctgctacagtgaggcacagcgctgtgacggctcatgggactgtgctgacggcacagatgaggaggactgcccaggctgcccacctggacacttcccctgtggggctgctggcacctctggtgccacagcctgctacctgcctgctgaccgctgcaactaccagactttctgtgctgatggagcagatgagagacgctgtcggcattgccagcctggcaatttccgatgccgggacgagaagtgcgtgtatgagacgtgggtgtgcgatgggcagccagactgtgcggacggcagtgatgagtgggactgctcctatgttctgccccgcaaggtcattacagctgcagtcattggcagcctagtgtgcggcctgctcctggtcatcgccctgggctgcacctgcaagctctatgccattcgcacccaggagtacagcatctttgcccccctctcccggatggaggctgagattgtgcagcagcaggcacccccttcctacgggcagctcattgcccagggtgccatcccacctgtagaagactttcctacagagaatcctaatgataactcagtgctgggcaacctgcgttctctgctacagatcttacgccaggatatgactccaggaggtggcccaggtgcccgccgtcgtcagcggggccgcttgatgcgacgcctggtacgccgtctccgccgctggggcttgctccctcgaaccaacaccccggctcgggcctctgaggccagatcccaggtcacaccttctgctgctccccttgaggccctagatggtggcacaggtccagcccgtgagggcggggcagtgggtgggcaagatggggagcaggcacccccactgcccatcaaggctcccctcccatctgctagcacgtctccagcccccactactgtccctgaagccccagggccactgccctcactgcccctagagccatcactattgtctggagtggtgcaggccctgcgaggccgcctgttgcccagcctggggcccccaggaccaacccggagcccccctggaccccacacagcagtcctggccctggaagatgaggacgatgtgctactggtgccactggctgagccgggggtgtgggtagctgaggcagaggatgagccactgcttacctgaggggacctgggggctctactgaggcctctcccctgggggctctactcatagtggcacaaccttttagaggtgggtcagcctcccctccaccacttccttccctgtccctggatttcagggacttggtgggcctcccgttgaccctatgtagctgctataaagttaagtgtccctcaggcagggagagggctcacagagtctcctctgtacgtggccatggccagacaccccagtcccttcaccaccacctgctcccgtaccagctggtacgggagtggccttggtgccccttggcgggggcgggaggactaaaggggccatgctgtggccacagcgggtccaaatggaagtatctgcagtgtacatacaggagggttggagagaggcatccttttccctaggctgtgcctggggacaagagagaggggaagtacagctggcactgccgtgccaggggcagggtccaggccagccgtgccacctgagcgggcacagcgagctggagctcggctactccttggcgcggcaatgatggtgaggatgtacaggaagatgttgatgatgtctgtgtacaggttc

SEQ ID NO: 354734 - DNA, 3045 bp, Homo sapiens
acccgccccggctactccaacccctgggcgggcgggggtaccgcctgggcaagggccggggcgccgggccgagccacctcttcccctcccccgcttccctgtcgcgctccgctggctggacgcgctggaggagtggagcagcacccggccggccctgggggctgacagtcggcaaagtttggcccgaagaggaagtggtctcaaaccccggcaggtggcgaccaggccagaccaggggcgctcgctgcctgcgggcgggctgtaggcgagggcgcgccccagtgccgagacccggggcttcaggagccggccccgggagagaagagtgcggcggcggacggagaaaacaactccaaagttggcgaaaggcaccgcccctactcccgggctgccgccgcctccccgcccccagccctggcatccagagtacgggtcgagcccgggccatggagcccccctggggaggcggcaccagggagcctgggcgcccggggctccgccgcgaccccatcgggtagaccacagaagctccgggacccttccggcacctctggacagcccaggatgctgttggccaccctcctcctcctcctccttggaggcgctctggcccatccagaccggattatttttccaaatcatgcttgtgaggaccccccagcagtgctcttagaagtgcagggcaccttacagaggcccctggtccgggacagccgcacctcccctgccaactgcacctggctcatcctgggcagcaaggaacagactgtcaccatcaggttccagaagctacacctggcctgtggctcagagcgcttaaccctacgctcccctctccagccactgatctccctgtgtgaggcacctcccagccctctgcagctgcccgggggcaacgtcaccatcacttacagctatgctggggccagagcacccatgggccagggcttcctgctctcctacagccaagattggctgatgtgcctgcaggaagagtttcagtgcctgaaccaccgctgtgtatctgctgtccagcgctgtgatggggttgatgcctgtggcgatggctctgatgaagcaggttgcagctcagaccccttccctggcctgaccccaagacccgtcccctccctgccttgcaatgtcaccttggaggacttctatggggtcttctcctctcctggatatacacacctagcctcagtctcccacccccagtcctgccattggctgctggacccccatgatggccggcggctggccgtgcgcttcacagccctggacttgggctttggagatgcagtgcatgtgtatgacggccctgggccccctgagagctcccgactactgcgtagtctcacccacttcagcaatggcaaggctgtcactgtggagacactgtctggccaggctgttgtgtcctaccacacagttgcttggagcaatggtcgtggcttcaatgccacctaccatgtgcggggctattgcttgccttgggacagaccctgtggcttaggctctggcctgggagctggcgaaggcctaggtgagcgctgctacagtgaggcacagcgctgtgacggctcatgggactgtgctgacggcacagatgaggaggactgcccaggctgcccacctggacacttcccctgtggggctgctggcacctctggtgccacagcctgctacctgcctgctgaccgctgcaactaccagactttctgtgctgatggagcagatgagagacgctgtcggcattgccagcctggcaatttccgatgccgggacgagaagtgcgtgtatgagacgtgggtgtgcgatgggcagccagactgtgcggacggcagtgatgagtgggactgctcctatgttctgccccgcaaggtcattacagctgcagtcattggcagcctagtgtgcggcctgctcctggtcatcgccctgggctgcacctgcaagctctatgccattcgcacccaggagtacagcatctttgcccccctctcccggatggaggctgagattgtgcagcagcaggcacccccttcctacgggcagctcattgcccagggtgccatcccacctgtagaagactttcctacagagaatcctaatgataactcagtgctgggcaacctgcgttctctgctacagatcttacgccaggatatgactccaggaggtggcccaggtgcccgccgtcgtcagcggggccgcttgatgcgacgcctggtacgccgtctccgccgctggggcttgctccctcgaaccaacaccccggctcgggcctctgaggccagatcccaggtcacaccttctgctgctccccttgaggccctagatggtggcacaggtccagcccgtgagggcggggcagtgggtgggcaagatggggagcaggcacccccactgcccatcaaggctcccctcccatctgctagcacgtctccagcccccactactgtccctgaagccccagggccactgccctcactgcccctagagccatcactattgtctggagtggtgcaggccctgcgaggccgcctgttgcccagcctggggcccccaggaccaacccggagcccccctggaccccacacagcagtcctggccctggaagatgaggacgatgtgctactggtgccactggctgagccgggggtgtgggtagctgaggcagaggatgagccactgcttacctgaggggacctgggggctctactgaggcctctcccctgggggctctactcatagtggcacaaccttttagaggtgggtcagcctcccctccaccacttccttccctgtccctggatttcagggacttggtgggcctcccgttgaccctatgtagctgctataaagttaagtgtccctcaggcagggagagggctcacagagtctcctctgtacgtccggccacggacacgtaaggaagcattgtaaaataattctgagttttgtgtttgttgtagattgattgtattgttgaaaaagtttgtttttgcgtgggagtgtgtgcctgcgtgggtgtgtacgtgt

SEQ ID NO: 354735 - DNA, 2161 bp, Homo sapiens
acccgccccggctactccaacccctgggcgggcgggggtaccgcctgggcaagggccggggcgccgggccgagccacctcttcccctcccccgcttccctgtcgcgctccgctggctggacgcgctggaggagtggagcagcacccggccggccctgggggctgacagtcggcaaagtttggcccgaagaggaagtggtctcaaaccccggcaggtggcgaccaggccagaccaggggcgctcgctgcctgcgggcgggctgtaggcgagggcgcgccccagtgccgagacccggggcttcaggagccggccccgggagagaagagtgcggcggcggacggagaaaacaactccaaagttggcgaaaggcaccgcccctactcccgggctgccgccgcctccccgcccccagccctggcatccagagtacgggtcgagcccgggccatggagcccccctggggaggcggcaccagggagcctgggcgcccggggctccgccgcgaccccatcgggtagaccacagaagctccgggacccttccggcacctctggacagcccaggatgctgttggccaccctcctcctcctcctccttggaggcgctctggcccatccagaccggattatttttccaaatcatgcttgtgaggaccccccagcagtgctcttagaagtgcagggcaccttacagaggcccctggtccgggacagccgcacctcccctgccaactgcacctggctcatcctgggcagcaaggaacagactgtcaccatcaggttccagaagctacacctggcctgtggctcagagcgcttaaccctacgctcccctctccagccactgatctccctgtgtgaggcacctcccagccctctgcagctgcccgggggcaacgtcaccatcacttacagctatgctggggccagagcacccatgggccagggcttcctgctctcctacagccaagattggctgatgtgcctgcaggaagagtttcagtgcctgaaccaccgctgtgtatctgctgtccagcgctgtgatggggttgatgcctgtggcgatggctctgatgaagcaggttgcagctcagaccccttccctggcctgaccccaagacccgtcccctccctgccttgcaatgtcaccttggaggacttctatggggtcttctcctctcctggatatacacacctagcctcagtctcccacccccagtcctgccattggctgctggacccccatgatggccggcggctggccgtgcgcttcacagccctggacttgggctttggagatgcagtgcatgtgtatgacggccctgggccccctgagagctcccgactactgcgtagtctcacccacttcagcaatggcaaggctgtcactgtggagacactgtctggccaggctgttgtgtcctaccacacagttgcttggagcaatggtcgtggcttcaatgccacctaccatgtgcggggctattgcttgccttgggacagaccctgtggcttaggctctggcctgggagctggcgaaggcctaggtgagcgctgctacagtgaggcacagcgctgtgacggctcatgggactgtgctgacggcacagatgaggaggactgcccaggctgcccacctggacacttcccctgtggggctgctggcacctctggtgccacagcctgctacctgcctgctgaccgctgcaactaccagactttctgtgctgatggagcagatgagagacgctgtcggcattgccagcctggcaatttccgatgccgggacgagaagtgcgtgtatgagacgtgggtgtgcgatgggcagccagactgtgcggacggcagtgatgagtgggactgctcctatgttctgccccgcaaggtcattacagctgcagtcattggcagcctagtgtgcggcctgctcctggtcatcgccctgggctgcacctgcaagctctatgccattcgcacccaggagtacagcatctttgcccccctctcccggatggaggctgagattgtgcagcagcaggcacccccttcctacgggcagctcattgcccagggtgccatcccacctgtagaagactttcctacagagaatcctaatgatgacggcgggcacctgggccacctcctggagtcatatccgtcga

SEQ ID NO: 354736 - DNA, 1723 bp, Homo sapiens
acccgccccggctactccaacccctgggcgggcgggggtaccgcctgggcaagggccggggcgccgggccgagccacctcttcccctcccccgcttccctgtcgcgctccgctggctggacgcgctggaggagtggagcagcacccggccggccctgggggctgacagtcggcaaagtttggcccgaagaggaagtggtctcaaaccccggcaggtggcgaccaggccagaccaggggcgctcgctgcctgcgggcgggctgtaggcgagggcgcgccccagtgccgagacccggggcttcaggagccggccccgggagagaagagtgcggcggcggacggagaaaacaactccaaagttggcgaaaggcaccgcccctactcccgggctgccgccgcctccccgcccccagccctggcatccagagtacgggtcgagcccgggccatggagcccccctggggaggcggcaccagggagcctgggcgcccggggctccgccgcgaccccatcgggtagaccacagaagctccgggacccttccggcacctctggacagcccaggatgctgttggccaccctcctcctcctcctccttggaggcgctctggcccatccagaccggattatttttccaaatcatgcttgtgaggaccccccagcagtgctcttagaagtgcagggcaccttacagaggcccctggtccgggacagccgcacctcccctgccaactgcacctggctcatcctgggcagcaaggaacagactgtcaccatcaggttccagaagctacacctggcctgtggctcagagcgcttaaccctacgctcccctctccagccactgatctccctgtgtgaggcacctcccagccctctgcagctgcccgggggcaacgtcaccatcacttacagctatgctggggccagagcacccatgggccagggcttcctgctctcctacagccaagattggctgatgtgcctgcaggaagagtttcagtgcctgaaccaccgctgtgtatctgctgtccagcgctgtgatggggttgatgcctgtggcgatggctctgatgaagcaggttgcagctcagaccccttccctggcctgaccccaagacccgtcccctccctgccttgcaatgtcaccttggaggacttctatggggtcttctcctctcctggatatacacacctagcctcagtctcccacccccagtcctgccattggctgctggacccccatgatggccggcggctggccgtgcgcttcacagccctggacttgggctttggagatgcagtgcatgtgtatgacggccctgggccccctgagagctcccgactactgcgtagtctcacccacttcagcaatggcaaggctgtcactgtggagacactgtctggccaggctgttgtgtcctaccacgccaccaccatttgggtggctgtttttaaaaagtaaagttcttagaggatcataggtctggacactccatccttgccaaacctctacccaaaagtggccttaagcaccggaatgccaattaactagagaccctccagcccccaaggggaggatttgggcagaacctgaggttttgccatccacaatccctcctacagggcctggctcacaaaaagagtgcaacaaatgcttctattccatagctacggcattgctcagtaagttgaggtcaaaaataaaggaatcatacatctca

SEQ ID NO: 354737 - DNA, 2424 bp, Homo sapiens
cagagtctgatcttatttatttgttactcaatcttatttctgactggattcagacttagaagtagaagctcgcagagaggaaagtctgcgtctcttcgcaatttgttcctggcgcttctccttagcctccttcattctcttggccttcagtgattttccctcccctgcctctccatagcctggtcttttgccctctcctttgctcttctcttcccccatagccacctcaaatacctgcagcctgatatcttcatcccttcatccagaccttttctctcctagtggtattgcaaactgaaagtggacaaagacttaaggtaaacctgctcctcatggtggaatgcttccaaatgctggaaggaggactttagggcagagttcactaaggaggcttgtgcttatagatcagtgggcctgaaagaagtttctctaggttctggttgtgtgctgtacgaggtgtaggtagtaataatactcttgtcagccacagtgaagccccaagctagccgggataggggactgaccttgtacaggcagcatggagaaactaagacagagtgtcctgcccaagtgatggcactggggagcagtcactcaggtttatttccaccagggcccaagaaaaaaagaaatgaggcaacctaaaattccatcaagatagataccaatatccaaggtgcttggtcttagcggtgtgggacccacgttaaggctcttggtgggaaggtgggaggtgttttcagcatgagatagggttcaggctgtgaatcagagtctagagcctaagataaaagaagataccagggctgggccacggtggctttcgcctgtaatcctagcactttgggaggccaaggcaggcagactgcctgagctcaggagttcgagactagcctgagcaacacggtgaaaccctgtctctactaaaatacaaaaaagtagccaggtgtggcggcatgcacctgtagtcccagctactcgagaggctgaggcaggagaattgcttgaacccgggaggcggaggttgcagtgagtggagatcgcgccactgcactctagcctgggtgacagagcgagactccttctccaaaaaaaaagaaaagaagataccagaactcagtccttaagaaacaaaattctgccaggcgcagtagctcacacctgtaatcccagcactttggaggggccaaggcaggcggatcgcttgaggccaagagttcaagaacagcctgggcaacatgatgaaaccctgtctctaccaaaaatactaaaaattagccagtctcacaacctggtctcaaaataaataaatagatttaaaaaaaaaatcatgggcctgaaccaagctccagacctcactaggaggggagaaggaccccccagccacacagcccaaggctgcagaagcacctaggtggttagagagtgagtgcctggatggggcgcagtggctcacacctgtaatcccagcactttgggaggccgaggcaggcggatcacgaggtcaagagatcaagaccatcctggccaacatggtgacaccgtgtctctactaaaaatacaaaaataagctgggcatggtggtgcgtgcctgtagtcccatctactcgggaggctgaagcaggagaatcacttgaacctgggaggcaaaggttgcagtgagctgagatcgcgccactgcactccagcctggcaacagagcgagacaagactccatcttcaaaaaaaaaagtgagtgcccgatgatgccagattcttcatcacctgaagtgaacccacacaacagggctgggccatgggcatcataaaccccattttgcaagctcaggaggagctttagggaaatcagaagactggcccagtctctaccaagtggtggatttagagccggcatggcttcgttccaaatctcacccttgtcccaccattccatgggacctcccattcctgagggagcctggatacgggcaagtgcacaacccgggaggttgaggttacagtgagccatgatcgcaccactgcagtccagcccgagcaatagggtgagaccctccctctgaaaaaaataaaaatactcattttggaaggaagtcattctaaaatgttacacttgtcttcagcatatctgcaatataataattttctgcataactgaggatcattcacagaaaccaatggcttttctccagcagtgtcttctgaagttgtaacagtaggggcacggggagctatttgcttttatgctaaatgaccttagaccacttataaaatgcatatgagtgctttaaatgttattttgtgtgtgtgtggtgttgcctccctgactacaaggggtcacttgctactctaaatgtgtttctaatctactagtacaggaacacacatggacacgttaaaattgtgaataaaagtaagtaaaaagta

SEQ ID NO: 354738 - DNA, 3260 bp, Homo sapiens
acccgccccggctactccaacccctgggcgggcgggggtaccgcctgggcaagggccggggcgccgggccgagccacctcttcccctcccccgcttccctgtcgcgctccgctggctggacgcgctggaggagtggagcagcacccggccggccctgggggctgacagtcggcaaagtttggcccgaagaggaagtggtctcaaaccccggcaggtggcgaccaggccagaccaggggcgctcgctgcctgcgggcgggctgtaggcgagggcgcgccccagtgccgagacccggggcttcaggagccggccccgggagagaagagtgcggcggcggacggagaaaacaactccaaagttggcgaaaggcaccgcccctactcccgggctgccgccgcctccccgcccccagccctggcatccagagtacgggtcgagcccgggccatggagcccccctggggaggcggcaccagggagcctgggcgcccggggctccgccgcgaccccatcgggtagaccacagaagctccgggacccttccggcacctctggacagcccaggatgctgttggccaccctcctcctcctcctccttggaggcgctctggcccatccagaccggattatttttccaaatcatgcttgtgaggaccccccagcagtgctcttagaagtgcagggcaccttacagaggcccctggtccgggacagccgcacctcccctgccaactgcacctggctcatcctgggcagcaaggaacagactgtcaccatcaggttccagaagctacacctggcctgtggctcagagcgcttaaccctacgctcccctctccagccactgatctccctgtgtgaggcacctcccagccctctgcagctgcccgggggcaacgtcaccatcacttacagctatgctggggccagagcacccatgggccagggcttcctgctctcctacagccaagattggctgatgtgcctgcaggaagagtttcagtgcctgaaccaccgctgtgtatctgctgtccagcgctgtgatggggttgatgcctgtggcgatggctctgatgaagcaggttgcagctcagaccccttccctggcctgaccccaagacccgtcccctccctgccttgcaatgtcaccttggaggacttctatggggtcttctcctctcctggatatacacacctagcctcagtctcccacccccagtcctgccattggctgctggacccccatgatggccggcggctggccgtgcgcttcacagccctggacttgggctttggagatgcagtgcatgtgtatgacggccctgggccccctgagagctcccgactactgcgtagtctcacccacttcagcaatggcaaggctgtcactgtggagacactgtctggccaggctgttgtgtcctaccacacagttgcttggagcaatggtcgtggcttcaatgccacctaccatgtgcggggctattgcttgccttgggacagaccctgtggcttaggctctggcctgggagctggcgaaggcctaggtgagcgctgctacagtgaggcacagcgctgtgacggctcatgggactgtgctgacggcacagatgaggaggactgcccaggctgcccacctggacacttcccctgtggggctgctggcacctctggtgccacagcctgctacctgcctgctgaccgctgcaactaccagactttctgtgctgatggagcagatgagagacgctgtcggcattgccagcctggcaatttccgatgccgggacgagaagtgcgtgtatgagacgtgggtgtgcgatgggcagccagactgtgcggacggcagtgatgagtgggactgctcctatgttctgccccgcaaggtcattacagctgcagtcattggcagcctagtgtgcggcctgctcctggtcatcgccctgggctgcacctgcaagctctatgccattcgcacccaggagtacagcatctttgcccccctctcccggatggaggctgagattgtgcagcagcaggcacccccttcctacgggcagctcattgcccagggtgccatcccacctgtagaagactttcctacagagaatcctaatgataactcagtgctgggcaacctgcgttctctgctacagatcttacgccaggatatgactccaggaggtggcccaggtgcccgccgtcgtcagcggggccgcttgatgcgacgcctggtacgccgtctccgccgctggggcttgctccctcgaaccaacaccccggctcgggcctctgaggccagatcccaggtcacaccttctgctgctccccttgaggccctagatggtggcacaggtccagcccgtgagggcggggcagtgggtgggcaagatggggagcaggcacccccactgcccatcaaggctcccctcccatctgctagcacgtctccagcccccactactgtccctgaagccccagggccactgccctcactgcccctagagccatcactattgtctggagtggtgcaggccctgcgaggccgcctgttgcccagcctggggcccccaggaccaacccggagcccccctggaccccacacagcagtcctggccctggaagatgaggacgatgtgctactggtgccactggctgagccgggggtgtgggtagctgaggcagaggatgagccactgcttacctgaggggacctgggggctctactgaggcctctcccctgggggctctactcatagtggcacaaccttttagaggtgggtcagcctcccctccaccacttccttccctgtccctggatttcagggacttggtgggcctcccgttgaccctatgtagctgctataaagttaagtgtccctcaggcagggagagggctcacagagtctcctctgtacgtggccatggccagacaccccagtcccttcaccaccacctgctccccacgccaccaccatttgggtggctgtttttaaaaagtaaagttcttagaggatcataggtctggacactccatccttgccaaacctctacccaaaagtggccttaagcaccggaatgccaattaactagagaccctccagcccccaaggggaggatttgggcagaacctgaggttttgccatccacaatccctcctacagggcctggctcacaaaaagagtgcaacaaatgcttctattccatagctacggcattgctcagtaagttgaggtcaaaaataaaggaatcatacatctca

SEQ ID NO: 354739 - DNA, 2843 bp, Homo sapiens
cagaattgttcgtgatattagtatttactggtgaagctatgaagaatgtggagagaaagagcgaagctagaaggctgtaactctaggctgtgtgtgggcaggggcagatactctgctcctccttgcagagcccagacttttggaaacctcaagcctccaagcggaaggggaagggtgggatgcaaaggggctgtctactacccgtgtcctaccttcctctctccagcttgtgaggaccccccagcagtgctcttagaagtgcagggcaccttacagaggcccctggtccgggacagccgcacctcccctgccaactgcacctggctcatcctgggcagcaaggaacagactgtcaccatcaggttccagaagctacacctggcctgtggctcagagcgcttaaccctacgctcccctctccagccactgatctccctgtgtgaggcacctcccagccctctgcagctgcccgggggcaacgtcaccatcacttacagctatgctggggccagagcacccatgggccagggcttcctgctctcctacagccaagattggctgatgtgcctgcaggaagagtttcagtgcctgaaccaccgctgtgtatctgctgtccagcgctgtgatggggttgatgcctgtggcgatggctctgatgaagcaggttgcagctcagaccccttccctggcctgaccccaagacccgtcccctccctgccttgcaatgtcaccttggaggacttctatggggtcttctcctctcctggatatacacacctagcctcagtctcccacccccagtcctgccattggctgctggacccccatgatggccggcggctggccgtgcgcttcacagccctggacttgggctttggagatgcagtgcatgtgtatgacggccctgggccccctgagagctcccgactactgcgtagtctcacccacttcagcaatggcaaggctgtcactgtggagacactgtctggccaggctgttgtgtcctaccacacagttgcttggagcaatggtcgtggcttcaatgccacctaccatgtgcggggctattgcttgccttgggacagaccctgtggcttaggctctggcctgggagctggcgaaggcctaggtgagcgctgctacagtgaggcacagcgctgtgacggctcatgggactgtgctgacggcacagatgaggaggactgcccaggctgcccacctggacacttcccctgtggggctgctggcacctctggtgccacagcctgctacctgcctgctgaccgctgcaactaccagactttctgtgctgatggagcagatgagagacgctgtcggcattgccagcctggcaatttccgatgccgggacgagaagtgcgtgtatgagacgtgggtgtgcgatgggcagccagactgtgcggacggcagtgatgagtgggactgctcctatgttctgccccgcaaggtcattacagctgcagtcattggcagcctagtgtgcggcctgctcctggtcatcgccctgggctgcacctgcaagctctatgccattcgcacccaggagtacagcatctttgcccccctctcccggatggaggctgagattgtgcagcagcaggcacccccttcctacgggcagctcattgcccagggtgccatcccacctgtagaagactttcctacagagaatcctaatgataactcagtgctgggcaacctgcgttctctgctacagatcttacgccaggatatgactccaggaggtggcccaggtgcccgccgtcgtcagcggggccgcttgatgcgacgcctggtacgccgtctccgccgctggggcttgctccctcgaaccaacaccccggctcgggcctctgaggccagatcccaggtcacaccttctgctgctccccttgaggccctagatggtggcacaggtccagcccgtgagggcggggcagtgggtgggcaagatggggagcaggcacccccactgcccatcaaggctcccctcccatctgctagcacgtctccagcccccactactgtccctgaagccccagggccactgccctcactgcccctagagccatcactattgtctggagtggtgcaggccctgcgaggccgcctgttgcccagcctggggcccccaggaccaacccggagcccccctggaccccacacagcagtcctggccctggaagatgaggacgatgtgctactggtgccactggctgagccgggggtgtgggtagctgaggcagaggatgagccactgcttacctgaggggacctgggggctctactgaggcctctcccctgggggctctactcatagtggcacaaccttttagaggtgggtcagcctcccctccaccacttccttccctgtccctggatttcagggacttggtgggcctcccgttgaccctatgtagctgctataaagttaagtgtccctcaggcagggagagggctcacagagtctcctctgtacgtggccatggccagacaccccagtcccttcaccaccacctgctccccacgccaccaccatttgggtggctgtttttaaaaagtaaagttcttagaggatcataggtctggacactccatccttgccaaacctctacccaaaagtggccttaagcaccggaatgccaattaactagagaccctccagcccccaaggggaggatttgggcagaacctgaggttttgccatccacaatccctcctacagggcctggctcacaaaaagagtgcaacaaatgcttctattccatagctacggcattgctcagtaagttgaggtcaaaaataaaggaatcatacatctca

SEQ ID NO: 354740 - DNA, 6790 bp, Homo sapiens
acccgccccggctactccaacccctgggcgggcgggggtaccgcctgggcaagggccggggcgccgggccgagccacctcttcccctcccccgcttccctgtcgcgctccgctggctggacgcgctggaggagtggagcagcacccggccggccctgggggctgacagtcggcaaagtttggcccgaagaggaagtggtctcaaaccccggcaggtggcgaccaggccagaccaggggcgctcgctgcctgcgggcgggctgtaggcgagggcgcgccccagtgccgagacccggggcttcaggagccggccccgggagagaagagtgcggcggcggacggagaaaacaactccaaagttggcgaaaggcaccgcccctactcccgggctgccgccgcctccccgcccccagccctggcatccagagtacgggtcgagcccgggccatggagcccccctggggaggcggcaccagggagcctgggcgcccggggctccgccgcgaccccatcgggtagaccacagaagctccgggacccttccggcacctctggacagcccaggatgctgttggccaccctcctcctcctcctccttggaggcgctctggcccatccagaccggattatttttccaaatcatgcttgtgaggaccccccagcagtgctcttagaagtgcagggcaccttacagaggcccctggtccgggacagccgcacctcccctgccaactgcacctggctcatcctgggcagcaaggaacagactgtcaccatcaggttccagaagctacacctggcctgtggctcagagcgcttaaccctacgctcccctctccagccactgatctccctgtgtgaggcacctcccagccctctgcagctgcccgggggcaacgtcaccatcacttacagctatgctggggccagagcacccatgggccagggcttcctgctctcctacagccaagattggctgatgtgcctgcaggaagagtttcagtgcctgaaccaccgctgtgtatctgctgtccagcgctgtgatggggttgatgcctgtggcgatggctctgatgaagcaggttgcagctcagaccccttccctggcctgaccccaagacccgtcccctccctgccttgcaatgtcaccttggaggacttctatggggtcttctcctctcctggatatacacacctagcctcagtctcccacccccagtcctgccattggctgctggacccccatgatggccggcggctggccgtgcgcttcacagccctggacttgggctttggagatgcagtgcatgtgtatgacggccctgggccccctgagagctcccgactactgcgtagtctcacccacttcagcaatggcaaggctgtcactgtggagacactgtctggccaggctgttgtgtcctaccacacagttgcttggagcaatggtcgtggcttcaatgccacctaccatgtgcggggctattgcttgccttgggacagaccctgtggcttaggctctggcctgggagctggcgaaggcctaggtgagcgctgctacagtgaggcacagcgctgtgacggctcatgggactgtgctgacggcacagatgaggaggactgcccaggctgcccacctggacacttcccctgtggggctgctggcacctctggtgccacagcctgctacctgcctgctgaccgctgcaactaccagactttctgtgctgatggagcagatgagagacgctgtcggcattgccagcctggcaatttccgatgccgggacgagaagtgcgtgtatgagacgtgggtgtgcgatgggcagccagactgtgcggacggcagtgatgagtgggactgctcctatgttctgccccgcaaggtcattacagctgcagtcattggcagcctagtgtgcggcctgctcctggtcatcgccctgggctgcacctgcaagctctatgccattcgcacccaggagtacagcatctttgcccccctctcccggatggaggctgagattgtgcagcagcaggcacccccttcctacgggcagctcattgcccagggtgccatcccacctgtagaagactttcctacagagaatcctaatgataactcagtgctgggcaacctgcgttctctgctacagatcttacgccaggatatgactccaggaggtggcccaggtgcccgccgtcgtcagcggggccgcttgatgcgacgcctggtacgccgtctccgccgctggggcttgctccctcgaaccaacaccccggctcgggcctctgaggccagatcccaggtcacaccttctgctgctccccttgaggccctagatggtggcacaggtccagcccgtgagggcggggcagtgggtgggcaagatggggagcaggcacccccactgcccatcaaggctcccctcccatctgctagcacgtctccagcccccactactgtccctgaagccccagggccactgccctcactgcccctagagccatcactattgtctggagtggtgcaggccctgcgaggccgcctgttgcccagcctggggcccccaggaccaacccggagcccccctggaccccacacagcagtcctggccctggaagatgaggacgatgtgctactggtgccactggctgagccgggggtgtgggtagctgaggcagaggatgagccactgcttacctgaggggacctgggggctctactgaggcctctcccctgggggctctactcatagtggcacaaccttttagaggtgggtcagcctcccctccaccacttccttccctgtccctggatttcagggacttggtgggcctcccgttgaccctatgtagctgctataaagttaagtgtccctcaggcagggagagggctcacagagtctcctctgtacgtggccatggccagacaccccagtcccttcaccaccacctgctccccacgccaccaccatttgggtggctgtttttaaaaagtaaagttcttagaggatcataggtctggacactccatccttgccaaacctctacccaaaagtggccttaagcaccggaatgccaattaactagagaccctccagcccccaaggggaggatttgggcagaacctgaggttttgccatccacaatccctcctacagggcctggctcacaaaaagagtgcaacaaatgcttctattccatagctacggcattgctcagtaagttgaggtcaaaaataaaggaatcatacatctcaaaattttgcaaattagctgcgagcctgagccccgcctctgcccatctcagtctatgctcacctcatcccactcctccctgtggagccctttgcttggccctctacctcctgccctcttcctgttcatctcccaaccactgcactcttgatttttataccacacagaaggtaagaaaattctaggaaccctaaggatcaatcctctccattttcactcaaatgcctggggcccagctctgcaatgactgactccagggcctctttcctcactgccagcatagaagtcaggggagccagctgggccctgcggtcaggaaggttctcatttttggagcattccctgagcccagatcataggagcagctgtccctggtgggacacaggagtcatgactcctaccctccaccctccacacccaccaggcatttagcagtctgtcctatgcaagacagatgaattctcagccaggatacctcaaggcaggcaaaggtgagtggagggaaaattcacaaacattcagggtgtgtggtgctggcatcaccatggccaaatccaagaggtcttcctggaagagggcccaaactggaaccaaaagaatgctgtcagcagttggaatagagctgtgaattctagacagggggagtgtccccagaacaagcaaacggaggagacaagagggcaagggttataggaaagaccctgggcctgagagcacaagcagcggccagagctgcagcgctggggtgggtgatggagggaatgattcgcaagcagtgttggaacccagcccctagtgagcaaagtgacagaagctgccccagagtttggaaggaagatcgaggcagaagatgtagaaggaagctgtgggggtgggagtgatgcctcaggaacaaaactgaggaattccctaacggacccagtccctggggaaagaggctcccctcaggctctccttgtctagccccacacctggcagagcctgtcacccagcctagccccacgcctggcagagcccatcacccagcctagccccacacctggtggagaggccctgttgattacaccctgtcagcctcctcaaacccagcactaattgcacaattttcctctcttctagtgagcaagagcctgaggaagtagcagagaggggtgtgggcccatgtgcagttctgggaccctggcaccttggctcagggaagacccgagctcctttcactgcagaccctctccagagactggggagagggctctggagaacctggttcttgcttactgttctccctttgggccctccttcccaaacgcaaacaatccaggatccactcagcgtcaggcccaatggaaatagtgaagcagtgattttccctcccctgcctctccatagcctggtcttttgccctctcctttgctcttctcttcccccatagccacctcaaatacctgcagcctgatatcttcatcccttcatccagaccttttctctcctagtggtattgcaaactgaaagtggacaaagacttaaggtaaacctgctcctcatggtggaatgcttccaaatgctggaaggaggactttagggcagagttcactaaggaggcttgtgcttatagatcagtgggcctgaaagaagtttctctaggttctggttgtgtgctgtacgaggtgtaggtagtaataatactcttgtcagccacagtgaagccccaagctagccgggataggggactgaccttgtacaggcagcatggagaaactaagacagagtgtcctgcccaagtgatggcactggggagcagtcactcaggtttatttccaccagggcccaagaaaaaaagaaatgaggcaacctaaaattccatcaagatagataccaatatccaaggtgcttggtcttagcggtgtgggacccacgttaaggctcttggtgggaaggtgggaggtgttttcagcatgagatagggttcaggctgtgaatcagagtctagagcctaagataaaagaagataccagggctgggccacggtggctttcgcctgtaatcctagcactttgggaggccaaggcaggcagactgcctgagctcaggagttcgagactagcctgagcaacacggtgaaaccctgtctctactaaaatacaaaaaagtagccaggtgtggcggcatgcacctgtagtcccagctactcgagaggctgaggcaggagaattgcttgaacccgggaggcggaggttgcagtgagtggagatcgcgccactgcactctagcctgggtgacagagcgagactccttctccaaaaaaaaagaaaagaagataccagaactcagtccttaagaaacaaaattctgccaggcgcagtagctcacacctgtaatcccagcactttggaggggccaaggcaggcggatcgcttgaggccaagagttcaagaacagcctgggcaacatgatgaaaccctgtctctaccaaaaatactaaaaattagccagtctcacaacctggtctcaaaataaataaatagatttaaaaaaaaaatcatgggcctgaaccaagctccagacctcactaggaggggagaaggaccccccagccacacagcccaaggctgcagaagcacctaggtggttagagagtgagtgcctggatggggcgcagtggctcacacctgtaatcccagcactttgggaggccgaggcaggcggatcacgaggtcaagagatcaagaccatcctggccaacatggtgacaccgtgtctctactaaaaatacaaaaataagctgggcatggtggtgcgtgcctgtagtcccatctactcgggaggctgaagcaggagaatcacttgaacctgggaggcaaaggttgcagtgagctgagatcgcgccactgcactccagcctggcaacagagcgagacaagactccatcttcaaaaaaaaaagtgagtgcccgatgatgccagattcttcatcacctgaagtgaacccacacaacagggctgggccatgggcatcataaaccccattttgcaagctcaggaggagctttagggaaatcagaagactggcccagtctctaccaagtggtggatttagagccggcatggcttcgttccaaatctcacccttgtcccaccattccatgggacctcccattcctgagggagcctggatacgggcaagtgcacaacccgggaggttgaggttacagtgagccatgatcgcaccactgcagtccagcccgagcaatagggtgagaccctccctctgaaaaaaataaaaatactcattttggaaggaagtcattctaaaatgttacacttgtcttcagcatatctgcaatataataattttctgcataactgaggatcattcacagaaaccaatggcttttctccagcagtgtcttctgaagttgtaacactaccgccgcccgaacgctctccgcccccagcggacagcgcgcgccaccagacgttgggtgggggtggagggggagcgcctggcgcccgccgggctccccgggggcggccgc

SEQ ID NO: 354741 - DNA, 5983 bp, Homo sapiens
acccgccccggctactccaacccctgggcgggcgggggtaccgcctgggcaagggccggggcgccgggccgagccacctcttcccctcccccgcttccctgtcgcgctccgctggctggacgcgctggaggagtggagcagcacccggccggccctgggggctgacagtcggcaaagtttggcccgaagaggaagtggtctcaaaccccggcaggtggcgaccaggccagaccaggggcgctcgctgcctgcgggcgggctgtaggcgagggcgcgccccagtgccgagacccggggcttcaggagccggccccgggagagaagagtgcggcggcggacggagaaaacaactccaaagttggcgaaaggcaccgcccctactcccgggctgccgccgcctccccgcccccagccctggcatccagagtacgggtcgagcccgggccatggagcccccctggggaggcggcaccagggagcctgggcgcccggggctccgccgcgaccccatcgggtagaccacagaagctccgggacccttccggcacctctggacagcccaggatgctgttggccaccctcctcctcctcctccttggaggcgctctggcccatccagaccggattatttttccaaatcatgcttgtgaggaccccccagcagtgctcttagaagtgcagggcaccttacagaggcccctggtccgggacagccgcacctcccctgccaactgcacctggctcatcctgggcagcaaggaacagactgtcaccatcaggttccagaagctacacctggcctgtggctcagagcgcttaaccctacgctcccctctccagccactgatctccctgtgtgaggcacctcccagccctctgcagctgcccgggggcaacgtcaccatcacttacagctatgctggggccagagcacccatgggccagggcttcctgctctcctacagccaagattggctgatgtgcctgcaggaagagtttcagtgcctgaaccaccgctgtgtatctgctgtccagcgctgtgatggggttgatgcctgtggcgatggctctgatgaagcagcatctttgcccccctctcccggatggaggctgagattgtgcagcagcaggcacccccttcctacgggcagctcattgcccagggtgccatcccacctgtagaagactttcctacagagaatcctaatgataactcagtgctgggcaacctgcgttctctgctacagatcttacgccaggatatgactccaggaggtggcccaggtgcccgccgtcgtcagcggggccgcttgatgcgacgcctggtacgccgtctccgccgctggggcttgctccctcgaaccaacaccccggctcgggcctctgaggccagatcccaggtcacaccttctgctgctccccttgaggccctagatggtggcacaggtccagcccgtgagggcggggcagtgggtgggcaagatggggagcaggcacccccactgcccatcaaggctcccctcccatctgctagcacgtctccagcccccactactgtccctgaagccccagggccactgccctcactgcccctagagccatcactattgtctggagtggtgcaggccctgcgaggccgcctgttgcccagcctggggcccccaggaccaacccggagcccccctggaccccacacagcagtcctggccctggaagatgaggacgatgtgctactggtgccactggctgagccgggggtgtgggtagctgaggcagaggatgagccactgcttacctgaggggacctgggggctctactgaggcctctcccctgggggctctactcatagtggcacaaccttttagaggtgggtcagcctcccctccaccacttccttccctgtccctggatttcagggacttggtgggcctcccgttgaccctatgtagctgctataaagttaagtgtccctcaggcagggagagggctcacagagtctcctctgtacgtggccatggccagacaccccagtcccttcaccaccacctgctccccacgccaccaccatttgggtggctgtttttaaaaagtaaagttcttagaggatcataggtctggacactccatccttgccaaacctctacccaaaagtggccttaagcaccggaatgccaattaactagagaccctccagcccccaaggggaggatttgggcagaacctgaggttttgccatccacaatccctcctacagggcctggctcacaaaaagagtgcaacaaatgcttctattccatagctacggcattgctcagtaagttgaggtcaaaaataaaggaatcatacatctcaaaattttgcaaattagctgcgagcctgagccccgcctctgcccatctcagtctatgctcacctcatcccactcctccctgtggagccctttgcttggccctctacctcctgccctcttcctgttcatctcccaaccactgcactcttgatttttataccacacagaaggtaagaaaattctaggaaccctaaggatcaatcctctccattttcactcaaatgcctggggcccagctctgcaatgactgactccagggcctctttcctcactgccagcatagaagtcaggggagccagctgggccctgcggtcaggaaggttctcatttttggagcattccctgagcccagatcataggagcagctgtccctggtgggacacaggagtcatgactcctaccctccaccctccacacccaccaggcatttagcagtctgtcctatgcaagacagatgaattctcagccaggatacctcaaggcaggcaaaggtgagtggagggaaaattcacaaacattcagggtgtgtggtgctggcatcaccatggccaaatccaagaggtcttcctggaagagggcccaaactggaaccaaaagaatgctgtcagcagttggaatagagctgtgaattctagacagggggagtgtccccagaacaagcaaacggaggagacaagagggcaagggttataggaaagaccctgggcctgagagcacaagcagcggccagagctgcagcgctggggtgggtgatggagggaatgattcgcaagcagtgttggaacccagcccctagtgagcaaagtgacagaagctgccccagagtttggaaggaagatcgaggcagaagatgtagaaggaagctgtgggggtgggagtgatgcctcaggaacaaaactgaggaattccctaacggacccagtccctggggaaagaggctcccctcaggctctccttgtctagccccacacctggcagagcctgtcacccagcctagccccacgcctggcagagcccatcacccagcctagccccacacctggtggagaggccctgttgattacaccctgtcagcctcctcaaacccagcactaattgcacaattttcctctcttctagtgagcaagagcctgaggaagtagcagagaggggtgtgggcccatgtgcagttctgggaccctggcaccttggctcagggaagacccgagctcctttcactgcagaccctctccagagactggggagagggctctggagaacctggttcttgcttactgttctccctttgggccctccttcccaaacgcaaacaatccaggatccactcagcgtcaggcccaatggaaatagtgaagcagtgattttccctcccctgcctctccatagcctggtcttttgccctctcctttgctcttctcttcccccatagccacctcaaatacctgcagcctgatatcttcatcccttcatccagaccttttctctcctagtggtattgcaaactgaaagtggacaaagacttaaggtaaacctgctcctcatggtggaatgcttccaaatgctggaaggaggactttagggcagagttcactaaggaggcttgtgcttatagatcagtgggcctgaaagaagtttctctaggttctggttgtgtgctgtacgaggtgtaggtagtaataatactcttgtcagccacagtgaagccccaagctagccgggataggggactgaccttgtacaggcagcatggagaaactaagacagagtgtcctgcccaagtgatggcactggggagcagtcactcaggtttatttccaccagggcccaagaaaaaaagaaatgaggcaacctaaaattccatcaagatagataccaatatccaaggtgcttggtcttagcggtgtgggacccacgttaaggctcttggtgggaaggtgggaggtgttttcagcatgagatagggttcaggctgtgaatcagagtctagagcctaagataaaagaagataccagggctgggccacggtggctttcgcctgtaatcctagcactttgggaggccaaggcaggcagactgcctgagctcaggagttcgagactagcctgagcaacacggtgaaaccctgtctctactaaaatacaaaaaagtagccaggtgtggcggcatgcacctgtagtcccagctactcgagaggctgaggcaggagaattgcttgaacccgggaggcggaggttgcagtgagtggagatcgcgccactgcactctagcctgggtgacagagcgagactccttctccaaaaaaaaagaaaagaagataccagaactcagtccttaagaaacaaaattctgccaggcgcagtagctcacacctgtaatcccagcactttggaggggccaaggcaggcggatcgcttgaggccaagagttcaagaacagcctgggcaacatgatgaaaccctgtctctaccaaaaatactaaaaattagccagtctcacaacctggtctcaaaataaataaatagatttaaaaaaaaaatcatgggcctgaaccaagctccagacctcactaggaggggagaaggaccccccagccacacagcccaaggctgcagaagcacctaggtggttagagagtgagtgcctggatggggcgcagtggctcacacctgtaatcccagcactttgggaggccgaggcaggcggatcacgaggtcaagagatcaagaccatcctggccaacatggtgacaccgtgtctctactaaaaatacaaaaataagctgggcatggtggtgcgtgcctgtagtcccatctactcgggaggctgaagcaggagaatcacttgaacctgggaggcaaaggttgcagtgagctgagatcgcgccactgcactccagcctggcaacagagcgagacaagactccatcttcaaaaaaaaaagtgagtgcccgatgatgccagattcttcatcacctgaagtgaacccacacaacagggctgggccatgggcatcataaaccccattttgcaagctcaggaggagctttagggaaatcagaagactggcccagtctctaccaagtggtggatttagagccggcatggcttcgttccaaatctcacccttgtcccaccattccatgggacctcccattcctgagggagcctggatacgggcaagtgcacaacccgggaggttgaggttacagtgagccatgatcgcaccactgcagtccagcccgagcaatagggtgagaccctccctctgaaaaaaataaaaatactcattttggaaggaagtcattctaaaatgttacacttgtcttcagcatatctgcaatataataattttctgcataactgaggatcattcacagaaaccaatggcttttctccagcagtgtcttctgaagttgtaacagtaggggcacggggagctatttgcttttatgctaaatgaccttagaccacttataaaatgcatatgagtgctttaaatgttattttgtgtgtgtgtggtgttgcctccctgactacaaggggtcacttgctactctaaatgtgtttctaatctactagtacaggaacacacatggacacgttaaaattgtgaataaaagtaagtaaaaagta

SEQ ID NO: 354742 - DNA, 6130 bp, Homo sapiens
acccgccccggctactccaacccctgggcgggcgggggtaccgcctgggcaagggccggggcgccgggccgagccacctcttcccctcccccgcttccctgtcgcgctccgctggctggacgcgctggaggagtggagcagcacccggccggccctgggggctgacagtcggcaaagtttggcccgaagaggaagtggtctcaaaccccggcaggtggcgaccaggccagaccaggggcgctcgctgcctgcgggcgggctgtaggcgagggcgcgccccagtgccgagacccggggcttcaggagccggccccgggagagaagagtgcggcggcggacggagaaaacaactccaaagttggcgaaaggcaccgcccctactcccgggctgccgccgcctccccgcccccagccctggcatccagagtacgggtcgagcccgggccatggagcccccctggggaggcggcaccagggagcctgggcgcccggggctccgccgcgaccccatcgggtagaccacagaagctccgggacccttccggcacctctggacagcccaggatgctgttggccaccctcctcctcctcctccttggaggcgctctggcccatccagaccggattatttttccaaatcatgcttgtgaggaccccccagcagtgctcttagaagtgcagggcaccttacagaggcccctggtccgggacagccgcacctcccctgccaactgcacctggctcatcctgggcagcaaggaacagactgtcaccatcaggttccagaagctacacctggcctgtggctcagagcgcttaaccctacgctcccctctccagccactgatctccctgtgtgaggcacctcccagccctctgcagctgcccgggggcaacgtcaccatcacttacagctatgctggggccagagcacccatgggccagggcttcctgctctcctacagccaagattggctgatgtgcctgcaggaagagtttcagtgcctgaaccaccgctgtgtatctgctgtccagcgctgtgatggggttgatgcctgtggcgatggctctgatgaagcaggttgcagctcagaccccttccctggcctgaccccaagacccgtcccctccctgccttgcaatgtcaccttggaggacttctatggggtcttctcctctcctggatatacacacctagcctcagtctcccacccccagtcctgccattggctgctggacccccatgatggccggcggctggccgtgcgcttcacagccctggacttgggctttggagatgcagtgcatgtgtatgacggccctgggccccctgagagctcccgactactgcgtagtctcacccacttcagcaatggcaaggctgtcactgtggagacactgtctggccaggctgttgtgtcctaccacacagttgcttggagcaatggtcgtggcttcaatgccacctaccatgtgcggggctattgcttgccttgggacagaccctgtggcttaggctctggcctgggagctggcgaaggcctaggtgagcgctgctacagtgaggcacagcgctgtgacggctcatgggactgtgctgacggcacagatgaggaggactgcccaggctgcccacctggacacttcccctgtggggctgctggcacctctggtgccacagcctgctacctgcctgctgaccgctgcaactaccagactttctgtgctgatggagcagatgagagacgctgtcggcattgccagcctggcaatttccgatgccgggacgagaagtgcgtgtatgagacgtgggtgtgcgatgggcagccagactgtgcggacggcagtgatgagtgggactgctcctatgttctgccccgcaaggtcattacagctgcagtcattggcagcctagtgtgcggcctgctcctggtcatcgccctgggctgcacctgcaagctctatgccattcgcacccaggagtacagcatctttgcccccctctcccggatggaggctgagattgtgcagcagcaggcacccccttcctacgggcagctcattgcccagggtgccatcccacctgtagaagactttcctacagagaatcctaatgataactcagtgctgggcaacctgcgttctctgctacagatcttacgccaggatatgactccaggaggtggcccaggtgcccgccgtcgtcagcggggccgcttgatgcgacgcctgcagtcctggccctggaagatgaggacgatgtgctactggtgccactggctgagccgggggtgtgggtagctgaggcagaggatgagccactgcttacctgaggggacctgggggctctactgaggcctctcccctgggggctctactcatagtggcacaaccttttagagggcctggctcacaaaaagagtgcaacaaatgcttctattccatagctacggcattgctcagtaagttgaggtcaaaaataaaggaatcatacatctcaaaattttgcaaattagctgcgagcctgagccccgcctctgcccatctcagtctatgctcacctcatcccactcctccctgtggagccctttgcttggccctctacctcctgccctcttcctgttcatctcccaaccactgcactcttgatttttataccacacagaaggtaagaaaattctaggaaccctaaggatcaatcctctccattttcactcaaatgcctggggcccagctctgcaatgactgactccagggcctctttcctcactgccagcatagaagtcaggggagccagctgggccctgcggtcaggaaggttctcatttttggagcattccctgagcccagatcataggagcagctgtccctggtgggacacaggagtcatgactcctaccctccaccctccacacccaccaggcatttagcagtctgtcctatgcaagacagatgaattctcagccaggatacctcaaggcaggcaaaggtgagtggagggaaaattcacaaacattcagggtgtgtggtgctggcatcaccatggccaaatccaagaggtcttcctggaagagggcccaaactggaaccaaaagaatgctgtcagcagttggaatagagctgtgaattctagacagggggagtgtccccagaacaagcaaacggaggagacaagagggcaagggttataggaaagaccctgggcctgagagcacaagcagcggccagagctgcagcgctggggtgggtgatggagggaatgattcgcaagcagtgttggaacccagcccctagtgagcaaagtgacagaagctgccccagagtttggaaggaagatcgaggcagaagatgtagaaggaagctgtgggggtgggagtgatgcctcaggaacaaaactgaggaattccctaacggacccagtccctggggaaagaggctcccctcaggctctccttgtctagccccacacctggcagagcctgtcacccagcctagccccacgcctggcagagcccatcacccagcctagccccacacctggtggagaggccctgttgattacaccctgtcagcctcctcaaacccagcactaattgcacaattttcctctcttctagtgagcaagagcctgaggaagtagcagagaggggtgtgggcccatgtgcagttctgggaccctggcaccttggctcagggaagacccgagctcctttcactgcagaccctctccagagactggggagagggctctggagaacctggttcttgcttactgttctccctttgggccctccttcccaaacgcaaacaatccaggatccactcagcgtcaggcccaatggaaatagtgaagcagtgattttccctcccctgcctctccatagcctggtcttttgccctctcctttgctcttctcttcccccatagccacctcaaatacctgcagcctgatatcttcatcccttcatccagaccttttctctcctagtggtattgcaaactgaaagtggacaaagacttaaggtaaacctgctcctcatggtggaatgcttccaaatgctggaaggaggactttagggcagagttcactaaggaggcttgtgcttatagatcagtgggcctgaaagaagtttctctaggttctggttgtgtgctgtacgaggtgtaggtagtaataatactcttgtcagccacagtgaagccccaagctagccgggataggggactgaccttgtacaggcagcatggagaaactaagacagagtgtcctgcccaagtgatggcactggggagcagtcactcaggtttatttccaccagggcccaagaaaaaaagaaatgaggcaacctaaaattccatcaagatagataccaatatccaaggtgcttggtcttagcggtgtgggacccacgttaaggctcttggtgggaaggtgggaggtgttttcagcatgagatagggttcaggctgtgaatcagagtctagagcctaagataaaagaagataccagggctgggccacggtggctttcgcctgtaatcctagcactttgggaggccaaggcaggcagactgcctgagctcaggagttcgagactagcctgagcaacacggtgaaaccctgtctctactaaaatacaaaaaagtagccaggtgtggcggcatgcacctgtagtcccagctactcgagaggctgaggcaggagaattgcttgaacccgggaggcggaggttgcagtgagtggagatcgcgccactgcactctagcctgggtgacagagcgagactccttctccaaaaaaaaagaaaagaagataccagaactcagtccttaagaaacaaaattctgccaggcgcagtagctcacacctgtaatcccagcactttggaggggccaaggcaggcggatcgcttgaggccaagagttcaagaacagcctgggcaacatgatgaaaccctgtctctaccaaaaatactaaaaattagccagtctcacaacctggtctcaaaataaataaatagatttaaaaaaaaaatcatgggcctgaaccaagctccagacctcactaggaggggagaaggaccccccagccacacagcccaaggctgcagaagcacctaggtggttagagagtgagtgcctggatggggcgcagtggctcacacctgtaatcccagcactttgggaggccgaggcaggcggatcacgaggtcaagagatcaagaccatcctggccaacatggtgacaccgtgtctctactaaaaatacaaaaataagctgggcatggtggtgcgtgcctgtagtcccatctactcgggaggctgaagcaggagaatcacttgaacctgggaggcaaaggttgcagtgagctgagatcgcgccactgcactccagcctggcaacagagcgagacaagactccatcttcaaaaaaaaaagtgagtgcccgatgatgccagattcttcatcacctgaagtgaacccacacaacagggctgggccatgggcatcataaaccccattttgcaagctcaggaggagctttagggaaatcagaagactggcccagtctctaccaagtggtggatttagagccggcatggcttcgttccaaatctcacccttgtcccaccattccatgggacctcccattcctgagggagcctggatacgggcaagtgcacaacccgggaggttgaggttacagtgagccatgatcgcaccactgcagtccagcccgagcaatagggtgagaccctccctctgaaaaaaataaaaatactcattttggaaggaagtcattctaaaatgttacacttgtcttcagcatatctgcaatataataattttctgcataactgaggatcattcacagaaaccaatggcttttctccagcagtgtcttctgaagttgtaacagtaggggcacggggagctatttgcttttatgctaaatgaccttagaccacttataaaatgcatatgagtgctttaaatgttattttgtgtgtgtgtggtgttgcctccctgactacaaggggtcacttgctactctaaatgtgtttctaatctactagtacaggaacacacatggacacgttaaaattgtgaataaaagtaagtaaaaagta

SEQ ID NO: 354743 - DNA, 4745 bp, Homo sapiens
acccgccccggctactccaacccctgggcgggcgggggtaccgcctgggcaagggccggggcgccgggccgagccacctcttcccctcccccgcttccctgtcgcgctccgctggctggacgcgctggaggagtggagcagcacccggccggccctgggggctgacagtcggcaaagtttggcccgaagaggaagtggtctcaaaccccggcaggtggcgaccaggccagaccaggggcgctcgctgcctgcgggcgggctgtaggcgagggcgcgccccagtgccgagacccggggcttcaggagccggccccgggagagaagagtgcggcggcggacggagaaaacaactccaaagttggcgaaaggcaccgcccctactcccgggctgccgccgcctccccgcccccagccctggcatccagagtacgggtcgagcccgggccatggagcccccctggggaggcggcaccagggagcctgggcgcccggggctccgccgcgaccccatcgggtagaccacagaagctccgggacccttccggcacctctggacagcccaggatgctgttggccaccctcctcctcctcctccttggaggcgctctggcccatccagaccggattatttttccaaatcatgcttgtgaggaccccccagcagtgctcttagaagtgcagggcaccttacagaggcccctggtccgggacagccgcacctcccctgccaactgcacctggctcatcctgggcagcaaggaacagactgtcaccatcaggttccagaagctacacctggcctgtggctcagagcgcttaaccctacgctcccctctccagccactgatctccctgtgtgaggcacctcccagccctctgcagctgcccgggggcaacgtcaccatcacttacagctatgctggggccagagcacccatgggccagggcttcctgctctcctacagccaagattggctgatgtgcctgcaggaagagtttcagtgcctgaaccaccgctgtgtatctgctgtccagcgctgtgatggggttgatgcctgtggcgatggctctgatgaagcaggttgcagctcagaccccttccctggcctgaccccaagacccgtcccctccctgccttgcaatgtcaccttggaggacttctatggggtcttctcctctcctggatatacacacctagcctcagtctcccacccccagtcctgccattggctgctggacccccatgatggccggcggctggccgtgcgcttcacagccctggacttgggctttggagatgcagtgcatgtgtatgacggccctgggccccctgagagctcccgactactgcgtagtctcacccacttcagcaatggcaaggctgtcactgtggagacactgtctggccaggctgttgtgtcctaccacacagttgcttggagcaatggtcgtggcttcaatgccacctaccatgtgcggggctattgcttgccttgggacagaccctgtggcttaggctctggcctgggagctggcgaaggcctaggtgagcgctgctacagtgaggcacagcgctgtgacggctcatgggactgtgctgacggcacagatgaggaggactgcccaggctgcccacctggacacttcccctgtggggctgctggcacctctggtgccacagcctgctacctgcctgctgaccgctgcaactaccagactttctgtgctgatggagcagatgagagacgctgtcggcattgccagcctggcaatttccgatgccgggacgagaagtgcgtgtatgagacgtgggtgtgcgatgggcagccagactgtgcggacggcagtgatgagtgggactgctcctatgttctgccccgcaaggtcattacagctgcagtcattggcagcctagtgtgcggcctgctcctggtcatcgccctgggctgcacctgcaagctctatgccattcgcacccaggagtacagcatctttgcccccctctcccggatggaggctgagattgtgcagcagcaggcacccccttcctacgggcagctcattgcccagggtgccatcccacctgtagaagactttcctacagagaatcctaatgataactcagtgctgggcaacctgcgttctctgctacagatcttacgccaggatatgactccaggaggtggcccaggtgcccgccgtcgtcagcggggccgcttgatgcgacgcctgtgagcaagagcctgaggaagtagcagagaggggtgtgggcccatgtgcagttctgggaccctggcaccttggctcagggaagacccgagctcctttcactgcagaccctctccagagactggggagagggctctggagaacctggttcttgcttactgttctccctttgggccctccttcccaaacgcaaacaatccaggatccactcagcgtcaggcccaatggaaatagtgaagcagtgattttccctcccctgcctctccatagcctggtcttttgccctctcctttgctcttctcttcccccatagccacctcaaatacctgcagcctgatatcttcatcccttcatccagaccttttctctcctagtggtattgcaaactgaaagtggacaaagacttaaggtaaacctgctcctcatggtggaatgcttccaaatgctggaaggaggactttagggcagagttcactaaggaggcttgtgcttatagatcagtgggcctgaaagaagtttctctaggttctggttgtgtgctgtacgaggtgtaggtagtaataatactcttgtcagccacagtgaagccccaagctagccgggataggggactgaccttgtacaggcagcatggagaaactaagacagagtgtcctgcccaagtgatggcactggggagcagtcactcaggtttatttccaccagggcccaagaaaaaaagaaatgaggcaacctaaaattccatcaagatagataccaatatccaaggtgcttggtcttagcggtgtgggacccacgttaaggctcttggtgggaaggtgggaggtgttttcagcatgagatagggttcaggctgtgaatcagagtctagagcctaagataaaagaagataccagggctgggccacggtggctttcgcctgtaatcctagcactttgggaggccaaggcaggcagactgcctgagctcaggagttcgagactagcctgagcaacacggtgaaaccctgtctctactaaaatacaaaaaagtagccaggtgtggcggcatgcacctgtagtcccagctactcgagaggctgaggcaggagaattgcttgaacccgggaggcggaggttgcagtgagtggagatcgcgccactgcactctagcctgggtgacagagcgagactccttctccaaaaaaaaagaaaagaagataccagaactcagtccttaagaaacaaaattctgccaggcgcagtagctcacacctgtaatcccagcactttggaggggccaaggcaggcggatcgcttgaggccaagagttcaagaacagcctgggcaacatgatgaaaccctgtctctaccaaaaatactaaaaattagccagtctcacaacctggtctcaaaataaataaatagatttaaaaaaaaaatcatgggcctgaaccaagctccagacctcactaggaggggagaaggaccccccagccacacagcccaaggctgcagaagcacctaggtggttagagagtgagtgcctggatggggcgcagtggctcacacctgtaatcccagcactttgggaggccgaggcaggcggatcacgaggtcaagagatcaagaccatcctggccaacatggtgacaccgtgtctctactaaaaatacaaaaataagctgggcatggtggtgcgtgcctgtagtcccatctactcgggaggctgaagcaggagaatcacttgaacctgggaggcaaaggttgcagtgagctgagatcgcgccactgcactccagcctggcaacagagcgagacaagactccatcttcaaaaaaaaaagtgagtgcccgatgatgccagattcttcatcacctgaagtgaacccacacaacagggctgggccatgggcatcataaaccccattttgcaagctcaggaggagctttagggaaatcagaagactggcccagtctctaccaagtggtggatttagagccggcatggcttcgttccaaatctcacccttgtcccaccattccatgggacctcccattcctgagggagcctggatacgggcaagtgcacaacccgggaggttgaggttacagtgagccatgatcgcaccactgcagtccagcccgagcaatagggtgagaccctccctctgaaaaaaataaaaatactcattttggaaggaagtcattctaaaatgttacacttgtcttcagcatatctgcaatataataattttctgcataactgaggatcattcacagaaaccaatggcttttctccagcagtgtcttctgaagttgtaacagtaggggcacggggagctatttgcttttatgctaaatgaccttagaccacttataaaatgcatatgagtgctttaaatgttattttgtgtgtgtgtggtgttgcctccctgactacaaggggtcacttgctactctaaatgtgtttctaatctactagtacaggaacacacatggacacgttaaaattgtgaataaaagtaagtaaaaagta

SEQ ID NO: 354744 - DNA, 3458 bp, Homo sapiens
acccgccccggctactccaacccctgggcgggcgggggtaccgcctgggcaagggccggggcgccgggccgagccacctcttcccctcccccgcttccctgtcgcgctccgctggctggacgcgctggaggagtggagcagcacccggccggccctgggggctgacagtcggcaaagtttggcccgaagaggaagtggtctcaaaccccggcaggtggcgaccaggccagaccaggggcgctcgctgcctgcgggcgggctgtaggcgagggcgcgccccagtgccgagacccggggcttcaggagccggccccgggagagaagagtgcggcggcggacggagaaaacaactccaaagttggcgaaaggcaccgcccctactcccgggctgccgccgcctccccgcccccagccctggcatccagagtacgggtcgagcccgggccatggagcccccctggggaggcggcaccagggagcctgggcgcccggggctccgccgcgaccccatcgggtagaccacagaagctccgggacccttccggcacctctggacagcccaggatgctgttggccaccctcctcctcctcctccttggaggcgctctggcccatccagaccggattatttttccaaatcatgcttgtgaggaccccccagcagtgctcttagaagtgcagggcaccttacagaggcccctggtccgggacagccgcacctcccctgccaactgcacctggctcatcctgggcagcaaggaacagactgtcaccatcaggttccagaagctacacctggcctgtggctcagagcgcttaaccctacgctcccctctccagccactgatctccctgtgtgaggcacctcccagccctctgcagctgcccgggggcaacgtcaccatcacttacagctatgctggggccagagcacccatgggccagggcttcctgctctcctacagccaagattggctgatgtgcctgcaggaagagtttcagtgcctgaaccaccgctgtgtatctgctgtccagcgctgtgatggggttgatgcctgtggcgatggctctgatgaagcaggttgcagctcagaccccttccctggcctgaccccaagacccgtcccctccctgccttgcaatgtcaccttggaggacttctatggggtcttctcctctcctggatatacacacctagcctcagtctcccacccccagtcctgccattggctgctggacccccatgatggccggcggctggccgtgcgcttcacagccctggacttgggctttggagatgcagtgcatgtgtatgacggccctgggccccctgagagctcccgactactgcgtagtctcacccacttcagcaatggcaaggctgtcactgtggagacactgtctggccaggctgttgtgtcctaccacacagttgcttggagcaatggtcgtggcttcaatgccacctaccatgtgcggggctattgcttgccttgggacagaccctgtggcttaggctctggcctgggagctggcgaaggcctaggtgagcgctgctacagtgaggcacagcgctgtgacggctcatgggactgtgctgacggcacagatgaggaggactgcccaggctgcccacctggacacttcccctgtggggctgctggcacctctggtgccacagcctgctacctgcctgctgaccgctgcaactaccagactttctgtgctgatggagcagatgagagacgctgtcggcattgccagcctggcaatttccgatgccgggacgagaagtgcgtgtatgagacgtgggtgtgcgatgggcagccagactgtgcggacggcagtgatgagtgggactgctcctatgttctgccccgcaaggtcattacagctgcagtcattggcagcctagtgtgcggcctgctcctggtcatcgccctgggctgcacctgcaagctctatgccattcgcacccaggagtacagcatctttgcccccctctcccggatggaggctgagattgtgcagcagcaggcacccccttcctacgggcagctcattgcccagggtgccatcccacctgtagaagactttcctacagagaatcctaatgataactcagtgctgggcaacctgcgttctctgctacagatcttacgccaggatatgactccaggaggtggcccaggtgcccgccgtcgtcagcggggccgcttgatgcgacgcctggtacgccgtctccgccgctggggcttgctccctcgaaccaacaccccggctcgggcctctgaggccagatcccaggtcacaccttctgctgctccccttgaggccctagatggtggcacaggtccagcccgtgagggcggggcagtgggtgggcaagatggggagcaggcacccccactgcccatcaaggctcccctcccatctgctagcacgtctccagcccccactactgtccctgaagccccagggccactgccctcactgcccctagagccatcactattgtctggagtggtgcaggccctgcgaggccgcctgttgcccagcctggggcccccaggaccaacccggagcccccctggaccccacacagcagtcctggccctggaagatgaggacgatgtgctactggtgccactggctgagccgggggtgtgggtagctgaggcagaggatgagccactgcttacctgaggggacctgggggctctactgaggcctctcccctgggggctctactcatagtggcacaaccttttagaggtgggtcagcctcccctccaccacttccttccctgtccctggatttcagggacttggtgggcctcccgttgaccctttatagcagctacatagggtcaacgggaggccctatgtagctgctataaagttaagtgtccctcaggcagggagagggctcacagagtctcctctgtacgtggccatggccagacaccccagtcccttcaccaccacctgctccccacgccaccaccatttgggtggctgtttttaaaaagtaaagttcttagaggaaaaaaaaaaaaaaaaaaaaacaacaaaaaaaaaaaaaaacaaaaaaacaaaaaaaagaagagggcggcggcggcgcatcacaaaagagatctaccctccgcgggggggccgccacgatctgtgagccgcgttccccccacgtgttgttctgtttgttccacacagacggggtggcccccccaacatgagtggcggactcgcttttttaactaggaccctcgatcgccgcgtgcgccgggcgcttgttttcaacacacggtccttgcgctcgtcgggacaacagatcgtcgtcctatcagcccgtgggggcacctccttcgtgcggacgacgagagcacacccccttactctgcggggggcaggcggcgacaccaacttggtgtgcggcccgacctcgtgctccctggtga

SEQ ID NO: 354745 - DNA, 2030 bp, Homo sapiens
acccgccccggctactccaacccctgggcgggcgggggtaccgcctgggcaagggccggggcgccgggccgagccacctcttcccctcccccgcttccctgtcgcgctccgctggctggacgcgctggaggagtggagcagcacccggccggccctgggggctgacagtcggcaaagtttggcccgaagaggaagtggtctcaaaccccggcaggtggcgaccaggccagaccaggggcgctcgctgcctgcgggcgggctgtaggcgagggcgcgccccagtgccgagacccggggcttcaggagccggccccgggagagaagagtgcggcggcggacggagaaaacaactccaaagttggcgaaaggcaccgcccctactcccgggctgccgccgcctccccgcccccagccctggcatccagagtacgggtcgagcccgggccatggagcccccctggggaggcggcaccagggagcctgggcgcccggggctccgccgcgaccccatcgggtagaccacagaagctccgggacccttccggcacctctggacagcccaggatgctgttggccaccctcctcctcctcctccttggaggcgctctggcccatccagaccggattatttttccaaatcatgcttgtgaggaccccccagcagtgctcttagaagtgcagggcaccttacagaggcccctggtccgggacagccgcacctcccctgccaactgcacctggctcatcctgggcagcaaggaacagactgtcaccatcaggttccagaagctacacctggcctgtggctcagagcgcttaaccctacgctcccctctccagccactgatctccctgtgtgaggcacctcccagccctctgcagctgcccgggggcaacgtcaccatcacttacagctatgctggggccagagcacccatgggccagggcttcctgctctcctacagccaagattggctgatgtgcctgcaggaagagtttcagtgcctgaaccaccgctgtgtatctgctgtccagcgctgtgatggggttgatgcctgtggcgatggctctgatgaagcaggttgcagctcagaccccttccctggcctgaccccaagacccgtcccctccctgccttgcaatgtcaccttggaggacttctatggggtcttctcctctcctggatatacacacctagcctcagtctcccacccccagtcctgccattggctgctggacccccatgatggccggcggctggccgtgcgcttcacagccctggacttgggctttggagatgcagtgcatgtgtatgacggccctgggccccctgagagctcccgactactgcgtagtctcacccacttcagcaatggcaaggctgtcactgtggagacactgtctggccaggctgttgtgtcctaccacacagttgcttggagcaatggtcgtggcttcaatgccacctaccatgtgcggggctattgcttgccttgggacagaccctgtggcttaggctctggcctgggagctggcgaaggcctaggtgagcgctgctacagtgaggcacagcgctgtgacggctcatgggactgtgctgacggcacagatgaggaggactgcccaggctgcccacctggacacttcccctgtggggctgctggcacctctggtgccacagcctgctacctgcctgctgaccgctgcaactaccagactttctgtgctgatggagcagatgagagacgctgtcggcattgccagcctggcaatttccgatgccgggacgagaagtgcgtgtatgagacgtgggtgtgcgatgggcagccagactgtgcggacggcagtgatgagtgggactgctcctatgttctgccccgcaaggtcattacagctgcagtcattggcagcctagtgtgcggcctgctcctggtcatcgccctgggctgcacctgcaagctctatgccattcgcacccaggagtacaggtcagtgggagtggggctggcagtagaagagtagaccctgag

SEQ ID NO: 354746 - DNA, 550 bp, Homo sapiens
acttaatataaatgacggactttaatacttctggatgattctgtgatctgttttgaaaaatacatgtatttttacaattttaggtttttattctaaatcatcaagtggattttctgatagtccttgggtaacttgtagcaagacccattttgttaacatagaatgactaggacctcatgtatcagctagaaaaagctattaaaaatgagagattcttttgttctatctggctgccacattttgagtcatttaagaaaatctttttcctaaattttaatttagtagtttcattaattattttggctagtaacactgacttgcctttttaatttaacttggttttccaaagtatcaaaacgaatgtcttttactaggaaatatgtgtattttttctcgttcagaatgttttttcatgtgtctagtccctactgcatcttctccttcatgttgcctggtatgtcatttcatgcagtaatagggagaatatacatttagttgtgtgaagtgatctattagaaaatattctgcatccagtttttggtaatctgtc

SEQ ID NO: 354747 - DNA, 351 bp, Homo sapiens
actaatttttttctgcaaatatactatttcaaatagccataatatgagagccccctataccctacaaaaaggtgtttgtggactgcactgctcagaatctttgtttaaatttcagtttgctggactggggcatggctgaccaatctttttaaattctactctccagtgactgatgggttactccatatattttttctcctacttaaaaacacatacacacacacttattttgttatagaataatatagggagcagtagaagacgttcaattgttttacagaatagaagatgacctctttagatggtttgtaagtaaaagtagtagacgcacaggttaagactggagaacaa

SEQ ID NO: 354748 - DNA, 737 bp, Homo sapiens
ctgcctggaaattttaatatagagattattttaaaagatatgggcagagtgtaggaagatcatagagataatgaaacactcccagacttgtaacctttactatccatagacctaatgaggcaagagaataaagcaattactaaagagaaaaagcaagcactgcgtagagggccacctaacaagagcaatgaccttcagctgagtgacaaaggcaggtgcacgatgactacaaaagtagagatctgggggaataaattatctaatcttactctcttcccactctctgatcccttgctagtgctccccaagggccaaaccaaatgaaagtcagaaggcaaggttgccaacagattttatccacagaggtcaggctcctagggcacagagcagagcaaagatgatggagaggatatatggtgaggcacacaaaagggatccagtttgatcatgtcaccctcccatataaaatccttcattctctatcttgattagagataatagtccttggctgggcacagtggcttatgcctgtaatcccaacactttgggaagttgaggcgggcagatcacttgaagtcaggagttcaagaccagcctggccaacatggtgaaacctcatctctactaaaaatacaaaaatcagctgggcgtggtggtgcgtgactgtaatctcagctatttaggaggctgaggcaggagaatcacttgaacccaggagacagaggttgcagtgaggc

SEQ ID NO: 354749 - DNA, 337 bp, Homo sapiens
aataaaattttgttaattatatataatccatttttaaaaacttagatgagtaaaaagcagtcggtctatgtgtatgtttatgaaaaagatatggttataggagcatggatgagagtatggaaggatttgcactgtttttaacagagtaagctgggcttggagagtagcagcaaaccaagagtctgcctttagaggccactgctttagaccctttcccccgatgcattgttaaattggaaagaaagagaagcggcctggcacagtggcccacgcctgtaatcccagcactttaagaggccgaggcagaaggatcatttgagtttaggagtttgagacc

SEQ ID NO: 354750 - DNA, 436 bp, Homo sapiens
ggatcttgctgggatgcccaggctggttgcaaactcctgagctcaagcaattctctccccttggcctcccataacactgggattaccggcatgagccattgtgtccagccattttgcctgttttttaaatgaggttatttgtggattttttgttgttgttcttattctcgttactttttacactgagggtgggactctatgggtgccagttctatgcaagcatttcgtatgagactcctgctctaaattggtttctgcaccctatgcagtcatccaggtagaagttcaagctctcagcacacagtttgagatgagtgctggctcagacccactaagctgtcagggtttctgccttctctttgcttctggccgctatggcagcctgaggatgcctctaacaagatgcgttttacattttctccagcattttagctgt

SEQ ID NO: 354751 - DNA, 330 bp, Homo sapiens
ttttttccaaagtcttatttctctttattattactatttttttacttctcttctgtttattgatttatacaagttgtcatcctaggacaaatttttgaggctttaaaaggtggatattattagacccaattttgacagatgatgaaactgaggcatagacaggttaaacgagttgtgcatgactgagtcacttactcttcacttggccaagcttttaaccattatacaatactgtctacacatgataacacattaaacacagtgttctatactttgctttttttcacctatcttagatattttcaaattcagtatataaacagttcattt

SEQ ID NO: 354752 - DNA, 413 bp, Homo sapiens
gcaccaccgcactccagcctgacagagcgagactccatctcaaaaaaaaagaaagaaaagcaaattctgctgcagacagtgggtatcgtgcaaatgaacaacaacttcctttgcatgctgtcactgctggtatcataggtatttgttacatatttaacacttcatatttgtaccacgctacaatggcaagtgtggcaaacacttatcgcccagtatatagtttcctttctcttcttagtaataaactcttggtttttagcttgctaataaatgatctaaggcttcctggtataaaaactacacttcccagcctcctttgcagttggccaggcaactaagtaggggacaacgggatggatgtagaactgtgactttcaggaaatgtctttaaagacagcaggggcctgtctttg

SEQ ID NO: 354753 - DNA, 3124 bp, Homo sapiens
tgcgtgtcttcgagaatgcgagattcataatgtttgctgtctatatgcatggctgagtacgtgcctcccgcgtacgtgcgtggtgtgcatacatgcgtgattgcgcgcccacgtacgttcttcgtgaaagggatgacgggagctgtatgaaagcggaagagttatagaccgctaacacctgtcactggccactggtttcccggagttagcggcaacgaccttgcagcctggacactagccaggcgctccctcttctcacagcggcccacgtctccttgcttgggagcccatcgtcctggctccggtggcctcgctgggtctcggggaagcagaggactgttcattcctgtggcgaaaagccggagtcggccctagacacccacgactcgcagggtccatggttccggaggccgtgagacctgccggggctgacaggtgccagggcccatgctgcgggagcctgtgtgctcagccttcttgcggacggtaaagaagctaagtggaagagtgtttcctcctctggccgtaaagcagctgtccccgccctactccggaccgccccaaagactccatgggatggacctgagtcagccgaatcccagccccttcccttgggcctgctgtggtgctggacatcagtgacagacggaagcaggagaccatcaaggctacgggaggcccggggcgcttgcgaagatgaagtttggctgcctctccttccggcagccttatgctggctttgtcttaaatggaatcaagactgtggagacgcgctggcgtcccctgctgagcagccagcggaactgtaccatcgccgtccacattgctcacagggactgggaaggcgatgcctggcgggagctgctggtggagagactcgggatgactcctgctcagattcaggccttgctcaggaaaggggaaaagtttggtcgaggagtgatagcgggactcgttgacattggggaaactttgcaatgccccgaagacttaactcccgatgaggttgtggaactagaaaatcaagctgtactgaccaacctgaagcagaagtacctgactgtgatttcaaaccccaggtggttactggagcccatacctaggaaaggaggcaaggatgtattccaggtagacatcccagagcacctgatccctttggggcatgaagtgtgacaagtgtgggctcctgaaaggaatgttccagagaaaccagctaaatcatgacaccttcaatttgccatcatgacgcagacctgtatacattaggttaaatctgaatttccactgctttggagagtcccacccactaagcactgtgcatgtaaacaggttcctttgctcagatgaaggaagtagggggtggggctttccttgtgtgatgcctccttaggcacacaggcaatgtctcaagtactttgaccttagggtagaaggcaaagctgccagtaaatgtctcagcattgctgctaattttggtcctgctagtttctggattgtacaaataaatgtgttgtagatgactggttagtgtttgaggctttgttctatgttttcccctgatttgttctggtcaaaactcatcaaatgtgtaactagcatccaggcgacaatacagaaagtctgggacctggcactgaatgtttgcctggtagtgactagccgttaatcaaccgactcatccaggatgaagaggacgtcagacttagagcagctgtctgtcctttcaggttactctcactcttctgaaagtgtctgtcagtttctgaagcatgtgtgttacctgcatcacacagctacttcctatcctagcaatacatccaaaatacagctctagtagagtgaggttaacttggaaatgtgatcagtagtgttgttttattttgtagtaatttttttttttttttggtgatttagcaaagtttctagttgttatccatgaggatgatgggcatttccccccaggtattgactgcagtggcccttctcttctgagccaggatgttatggtggttgtacatcccatggcagatggggtggcctgactttcaagtgggcctctttggaggcccctggatgctaggctagggatgctgagctgctgaccagacacttcctggcaacattgggagggacccatgaggaaacaatctcctgtttgaagatacaggaagatattgccggaatcaggcgtctattctttctcctgaccagcaggccaatctcaggggaccaggtcttcctgggcttggcctcgacacttcctagcaacatcctttgctgagtgtgtgaaaatgctgcttctccaaataaacgaggacaatggggaccaaagcctgtcttggacaggatttccagcctcccctggtttctgccaatgagatgtatataatatacaaggttaaaaaaaacacagacaacagttctcatttaaattgtttattatttatttccatggaattttgtttttctttattaagaccaaaaatgtgtttctcattaaaaaatggcaacttttatgggccattagtggcctgtgacttcacgaatttgcagtgtttctgaactgttcacagagtctacacttgtaatctgaggagccttcctactcctcctcatcgtcagagggctcatttggagacatgactgagagggaggccaacagagcatagtaacagatattgtacaaagacattacactaccattatctgagtaaaccagactactaagaatccctgtgccttccatccaggtagtagccgaagatgtaaatgtgacattcccagaggtgccctcccaacttgggccatttggttcctgagggggcccatttcccaggggatgcctagtggcactcttcttggaccacatgccagagcgcctgaaggactgggtgccactgggcccctgaacactgggggctccctgctgacacattttgattgcttctttcctggcattgatgtgatagatacgtagggagcgtcttgtagctaccagattctttctctttggagttgggacacgggtcgcttgctgagcggtgtttctgaggcatcctttctctggatattctccaggagcctgggcttgtctctctgaaaattggagttgcagtagatctaa

SEQ ID NO: 354754 - DNA, 3036 bp, Homo sapiens
tgcgtgtcttcgagaatgcgagattcataatgtttgctgtctatatgcatggctgagtacgtgcctcccgcgtacgtgcgtggtgtgcatacatgcgtgattgcgcgcccacgtacgttcttcgtgaaagggatgacgggagctgtatgaaagcggaagagttatagaccgctaacacctgtcactggccactggtttcccggagttagcggcaacgaccttgcagcctggacactagccaggcgctccctcttctcacagcggcccacgtctccttgcttgggagcccatcgtcctggctccggtggcctcgctgggtctcggggaagcagaggactgttcattcctgtggcgaaaagccggagtcggccctagacacccacgactcgcagggtccatggttccggaggccgtgagacctgccggggctgacaggtgccagggcccatgctgcgggagcctgtgtgctcagccttcttgcggacggtaaagaagctaagtggaagagtgtttcctcctctggccgtaaagcagctgtccccgccctactccggaccgccccaaagactccatgggatggacctgagtcagccgaatcccagccccttcccttgggcctgctgtggtgctggacatcagtgacagacggaagcaggagaccatcaaggctacgggaggcccggggcgcttgcgaagatgaagtttggctgcctctccttccggcagccttatgctggctttgtcttaaatggaatcaagactgtggagacgcgctggcgtcccctgctgagcagccagcggaactgtaccatcgccgtccacattgctcacagggactgggaaggcgatgcctggcgggagctgctggtggagagactcgggatgactcctgctcagattcaggccttgctcaggaaaggggaaaagtttggtcgaggagtgatagcgggactcgttgacattggggaaactttgcaatgccccgaagacttaactcccgatgaggttgtggaactagaaaatcaagctgtactgaccaacctgaagcagaagtacctgactgtgatttcaaaccccaggtggttactggagcccatacctaggaaaggaggcaaggatgtattccaggtagacatcccagagcacctgatccctttggggcatgaagtgtgacaagtgtgggctcctgaaaggaatgttccagagaaaccagctaaatcatgacaccttcaatttgccatcatgacgcagacctgtatacattaggttaaatctgaatttccttgtgtgatgcctccttaggcacacaggcaatgtctcaagtactttgaccttagggtagaaggcaaagctgccagtaaatgtctcagcattgctgctaattttggtcctgctagtttctggattgtacaaataaatgtgttgtagatgactggttagtgtttgaggctttgttctatgttttcccctgatttgttctggtcaaaactcatcaaatgtgtaactagcatccaggcgacaatacagaaagtctgggacctggcactgaatgtttgcctggtagtgactagccgttaatcaaccgactcatccaggatgaagaggacgtcagacttagagcagctgtctgtcctttcaggttactctcactcttctgaaagtgtctgtcagtttctgaagcatgtgtgttacctgcatcacacagctacttcctatcctagcaatacatccaaaatacagctctagtagagtgaggttaacttggaaatgtgatcagtagtgttgttttattttgtagtaatttttttttttttttggtgatttagcaaagtttctagttgttatccatgaggatgatgggcatttccccccaggtattgactgcagtggcccttctcttctgagccaggatgttatggtggttgtacatcccatggcagatggggtggcctgactttcaagtgggcctctttggaggcccctggatgctaggctagggatgctgagctgctgaccagacacttcctggcaacattgggagggacccatgaggaaacaatctcctgtttgaagatacaggaagatattgccggaatcaggcgtctattctttctcctgaccagcaggccaatctcaggggaccaggtcttcctgggcttggcctcgacacttcctagcaacatcctttgctgagtgtgtgaaaatgctgcttctccaaataaacgaggacaatggggaccaaagcctgtcttggacaggatttccagcctcccctggtttctgccaatgagatgtatataatatacaaggttaaaaaaaacacagacaacagttctcatttaaattgtttattatttatttccatggaattttgtttttctttattaagaccaaaaatgtgtttctcattaaaaaatggcaacttttatgggccattagtggcctgtgacttcacgaatttgcagtgtttctgaactgttcacagagtctacacttgtaatctgaggagccttcctactcctcctcatcgtcagagggctcatttggagacatgactgagagggaggccaacagagcatagtaacagatattgtacaaagacattacactaccattatctgagtaaaccagactactaagaatccctgtgccttccatccaggtagtagccgaagatgtaaatgtgacattcccagaggtgccctcccaacttgggccatttggttcctgagggggcccatttcccaggggatgcctagtggcactcttcttggaccacatgccagagcgcctgaaggactgggtgccactgggcccctgaacactgggggctccctgctgacacattttgattgcttctttcctggcattgatgtgatagatacgtagggagcgtcttgtagctaccagattctttctctttggagttgggacacgggtcgcttgctgagcggtgtttctgaggcatcctttctctggatattctccaggagcctgggcttgtctctctgaaaattggagttgcagtagatctaa

SEQ ID NO: 354755 - DNA, 3092 bp, Homo sapiens
tgcgtgtcttcgagaatgcgagattcataatgtttgctgtctatatgcatggctgagtacgtgcctcccgcgtacgtgcgtggtgtgcatacatgcgtgattgcgcgcccacgtacgttcttcgtgaaagggatgacgggagctgtatgaaagcggaagagttatagaccgctaacacctgtcactggccactggtttcccggagttagcggcaacgaccttgcagcctggacactagccaggcgctccctcttctcacagcggcccacgtctccttgcttgggagcccatcgtcctggctccggtggcctcgctgggtctcggggaagcagaggactgttcattcctgtggcgaaaagccggagtcggccctagacacccacgactcgcagggtccatggttccggaggccgtgagacctgccggggctgacaggtaaagaagctaagtggaagagtgtttcctcctctggccgtaaagcaggtactctctgcagcaccagctgtccccgccctactccggaccgccccaaagactccatgggatggacctgagtcagccgaatcccagccccttcccttgggcctgctgtggtgctggacatcagtgacagacggaagcaggagaccatcaaggctacgggaggcccggggcgcttgcgaagatgaagtttggctgcctctccttccggcagccttatgctggctttgtcttaaatggaatcaagactgtggagacgcgctggcgtcccctgctgagcagccagcggaactgtaccatcgccgtccacattgctcacagggactgggaaggcgatgcctggcgggagctgctggtggagagactcgggatgactcctgctcagattcaggccttgctcaggaaaggggaaaagtttggtcgaggagtgatagcgggactcgttgacattggggaaactttgcaatgccccgaagacttaactcccgatgaggttgtggaactagaaaatcaagctgtactgaccaacctgaagcagaagtacctgactgtgatttcaaaccccaggtggttactggagcccatacctaggaaaggaggcaaggatgtattccaggtagacatcccagagcacctgatccctttggggcatgaagtgtgacaagtgtgggctcctgaaaggaatgttccagagaaaccagctaaatcatgacaccttcaatttgccatcatgacgcagacctgtatacattaggttaaatctgaatttccactgctttggagagtcccacccactaagcactgtgcatgtaaacaggttcctttgctcagatgaaggaagtagggggtggggctttccttgtgtgatgcctccttaggcacacaggcaatgtctcaagtactttgaccttagggtagaaggcaaagctgccagtaaatgtctcagcattgctgctaattttggtcctgctagtttctggattgtacaaataaatgtgttgtagatgactggttagtgtttgaggctttgttctatgttttcccctgatttgttctggtcaaaactcatcaaatgtgtaactagcatccaggcgacaatacagaaagtctgggacctggcactgaatgtttgcctggtagtgactagccgttaatcaaccgactcatccaggatgaagaggacgtcagacttagagcagctgtctgtcctttcaggttactctcactcttctgaaagtgtctgtcagtttctgaagcatgtgtgttacctgcatcacacagctacttcctatcctagcaatacatccaaaatacagctctagtagagtgaggttaacttggaaatgtgatcagtagtgttgttttattttgtagtaatttttttttttttttggtgatttagcaaagtttctagttgttatccatgaggatgatgggcatttccccccaggtattgactgcagtggcccttctcttctgagccaggatgttatggtggttgtacatcccatggcagatggggtggcctgactttcaagtgggcctctttggaggcccctggatgctaggctagggatgctgagctgctgaccagacacttcctggcaacattgggagggacccatgaggaaacaatctcctgtttgaagatacaggaagatattgccggaatcaggcgtctattctttctcctgaccagcaggccaatctcaggggaccaggtcttcctgggcttggcctcgacacttcctagcaacatcctttgctgagtgtgtgaaaatgctgcttctccaaataaacgaggacaatggggaccaaagcctgtcttggacaggatttccagcctcccctggtttctgccaatgagatgtatataatatacaaggttaaaaaaaacacagacaacagttctcatttaaattgtttattatttatttccatggaattttgtttttctttattaagaccaaaaatgtgtttctcattaaaaaatggcaacttttatgggccattagtggcctgtgacttcacgaatttgcagtgtttctgaactgttcacagagtctacacttgtaatctgaggagccttcctactcctcctcatcgtcagagggctcatttggagacatgactgagagggaggccaacagagcatagtaacagatattgtacaaagacattacactaccattatctgagtaaaccagactactaagaatccctgtgccttccatccaggtagtagccgaagatgtaaatgtgacattcccagaggtgccctcccaacttgggccatttggttcctgagggggcccatttcccaggggatgcctagtggcactcttcttggaccacatgccagagcgcctgaaggactgggtgccactgggcccctgaacactgggggctccctgctgacacattttgattgcttctttcctggcattgatgtgatagatacgtagggagcgtcttgtagctaccagattctttctctttggagttgggacacgggtcgcttgctgagcggtgtttctgaggcatcctttctctggatattctccaggagcctgggcttgtctctctgaaaattggagttgcagtagatctaa

SEQ ID NO: 354756 - DNA, 3013 bp, Homo sapiens
aagacgtccaagccttaaacatcagtgtgccgtatggtccaattcctgtggactttcagcggaaaatccgccagagctactttgcctctgtgtcatatttggatacacaggtcggccgcctcttgagtgctttggacgatcttcagctggccaacagcaccatcattgcatttacctcggatcatggtgtcctccctcccaggagtggccctcaccttatcactggctgccaggtagggtgaccaacagtcccagtttgctgagtgaattgcagtgctaaaagccggcgagtcccagggaagcaggacgaattggtgagccgactgccagacccgtgaccagagtgaaggtgcagcgcagcgccatgcaggcagggtaaagaagctaagtggaagagtgtttcctcctctggccgtaaagcagctgtccccgccctactccggaccgccccaaagactccatgggatggacctgagtcagccgaatcccagccccttcccttgggcctgctgtggtgctggacatcagtgacagacggaagcaggagaccatcaaggctacgggaggcccggggcgcttgcgaagatgaagtttggctgcctctccttccggcagccttatgctggctttgtcttaaatggaatcaagactgtggagacgcgctggcgtcccctgctgagcagccagcggaactgtaccatcgccgtccacattgctcacagggactgggaaggcgatgcctggcgggagctgctggtggagagactcgggatgactcctgctcagattcaggccttgctcaggaaaggggaaaagtttggtcgaggagtgatagcgggactcgttgacattggggaaactttgcaatgccccgaagacttaactcccgatgaggttgtggaactagaaaatcaagctgtactgaccaacctgaagcagaagtacctgactgtgatttcaaaccccaggtggttactggagcccatacctaggaaaggaggcaaggatgtattccaggtagacatcccagagcacctgatccctttggggcatgaagtgtgacaagtgtgggctcctgaaaggaatgttccagagaaaccagctaaatcatgacaccttcaatttgccatcatgacgcagacctgtatacattaggttaaatctgaatttccactgctttggagagtcccacccactaagcactgtgcatgtaaacaggttcctttgctcagatgaaggaagtagggggtggggctttccttgtgtgatgcctccttaggcacacaggcaatgtctcaagtactttgaccttagggtagaaggcaaagctgccagtaaatgtctcagcattgctgctaattttggtcctgctagtttctggattgtacaaataaatgtgttgtagatgactggttagtgtttgaggctttgttctatgttttcccctgatttgttctggtcaaaactcatcaaatgtgtaactagcatccaggcgacaatacagaaagtctgggacctggcactgaatgtttgcctggtagtgactagccgttaatcaaccgactcatccaggatgaagaggacgtcagacttagagcagctgtctgtcctttcaggttactctcactcttctgaaagtgtctgtcagtttctgaagcatgtgtgttacctgcatcacacagctacttcctatcctagcaatacatccaaaatacagctctagtagagtgaggttaacttggaaatgtgatcagtagtgttgttttattttgtagtaatttttttttttttttggtgatttagcaaagtttctagttgttatccatgaggatgatgggcatttccccccaggtattgactgcagtggcccttctcttctgagccaggatgttatggtggttgtacatcccatggcagatggggtggcctgactttcaagtgggcctctttggaggcccctggatgctaggctagggatgctgagctgctgaccagacacttcctggcaacattgggagggacccatgaggaaacaatctcctgtttgaagatacaggaagatattgccggaatcaggcgtctattctttctcctgaccagcaggccaatctcaggggaccaggtcttcctgggcttggcctcgacacttcctagcaacatcctttgctgagtgtgtgaaaatgctgcttctccaaataaacgaggacaatggggaccaaagcctgtcttggacaggatttccagcctcccctggtttctgccaatgagatgtatataatatacaaggttaaaaaaaacacagacaacagttctcatttaaattgtttattatttatttccatggaattttgtttttctttattaagaccaaaaatgtgtttctcattaaaaaatggcaacttttatgggccattagtggcctgtgacttcacgaatttgcagtgtttctgaactgttcacagagtctacacttgtaatctgaggagccttcctactcctcctcatcgtcagagggctcatttggagacatgactgagagggaggccaacagagcatagtaacagatattgtacaaagacattacactaccattatctgagtaaaccagactactaagaatccctgtgccttccatccaggtagtagccgaagatgtaaatgtgacattcccagaggtgccctcccaacttgggccatttggttcctgagggggcccatttcccaggggatgcctagtggcactcttcttggaccacatgccagagcgcctgaaggactgggtgccactgggcccctgaacactgggggctccctgctgacacattttgattgcttctttcctggcattgatgtgatagatacgtagggagcgtcttgtagctaccagattctttctctttggagttgggacacgggtcgcttgctgagcggtgtttctgaggcatcctttctctggatattctccaggagcctgggcttgtctctctgaaaattggagttgcagtagatctaa

SEQ ID NO: 354757 - DNA, 2827 bp, Homo sapiens
tgctggtatagcagctctgggcccaaaactcctgcctggtgtcctcgtcccacccttccacttactcttcctccctcccgttccttttcctccttccggttcttcgtcgaggctgccggtctcgaggtcccctggccttggcctggttggctggcgcgcatcagggccaggtaaagaagctaagtggaagagtgtttcctcctctggccgtaaagcaggtactctctgcagcaccagctgtccccgccctactccggaccgccccaaagactccatgggatggacctgagtcagccgaatcccagccccttcccttgggcctgctgtggtgctggacatcagtgacagacggaagcaggagaccatcaaggctacgggaggcccggggcgcttgcgaagatgaagtttggctgcctctccttccggcagccttatgctggctttgtcttaaatggaatcaagactgtggagacgcgctggcgtcccctgctgagcagccagcggaactgtaccatcgccgtccacattgctcacagggactgggaaggcgatgcctggcgggagctgctggtggagagactcgggatgactcctgctcagattcaggccttgctcaggaaaggggaaaagtttggtcgaggagtgatagcgggactcgttgacattggggaaactttgcaatgccccgaagacttaactcccgatgaggttgtggaactagaaaatcaagctgtactgaccaacctgaagcagaagtacctgactgtgatttcaaaccccaggtggttactggagcccatacctaggaaaggaggcaaggatgtattccaggtagacatcccagagcacctgatccctttggggcatgaagtgtgacaagtgtgggctcctgaaaggaatgttccagagaaaccagctaaatcatgacaccttcaatttgccatcatgacgcagacctgtatacattaggttaaatctgaatttccactgctttggagagtcccacccactaagcactgtgcatgtaaacaggttcctttgctcagatgaaggaagtagggggtggggctttccttgtgtgatgcctccttaggcacacaggcaatgtctcaagtactttgaccttagggtagaaggcaaagctgccagtaaatgtctcagcattgctgctaattttggtcctgctagtttctggattgtacaaataaatgtgttgtagatgactggttagtgtttgaggctttgttctatgttttcccctgatttgttctggtcaaaactcatcaaatgtgtaactagcatccaggcgacaatacagaaagtctgggacctggcactgaatgtttgcctggtagtgactagccgttaatcaaccgactcatccaggatgaagaggacgtcagacttagagcagctgtctgtcctttcaggttactctcactcttctgaaagtgtctgtcagtttctgaagcatgtgtgttacctgcatcacacagctacttcctatcctagcaatacatccaaaatacagctctagtagagtgaggttaacttggaaatgtgatcagtagtgttgttttattttgtagtaatttttttttttttttggtgatttagcaaagtttctagttgttatccatgaggatgatgggcatttccccccaggtattgactgcagtggcccttctcttctgagccaggatgttatggtggttgtacatcccatggcagatggggtggcctgactttcaagtgggcctctttggaggcccctggatgctaggctagggatgctgagctgctgaccagacacttcctggcaacattgggagggacccatgaggaaacaatctcctgtttgaagatacaggaagatattgccggaatcaggcgtctattctttctcctgaccagcaggccaatctcaggggaccaggtcttcctgggcttggcctcgacacttcctagcaacatcctttgctgagtgtgtgaaaatgctgcttctccaaataaacgaggacaatggggaccaaagcctgtcttggacaggatttccagcctcccctggtttctgccaatgagatgtatataatatacaaggttaaaaaaaacacagacaacagttctcatttaaattgtttattatttatttccatggaattttgtttttctttattaagaccaaaaatgtgtttctcattaaaaaatggcaacttttatgggccattagtggcctgtgacttcacgaatttgcagtgtttctgaactgttcacagagtctacacttgtaatctgaggagccttcctactcctcctcatcgtcagagggctcatttggagacatgactgagagggaggccaacagagcatagtaacagatattgtacaaagacattacactaccattatctgagtaaaccagactactaagaatccctgtgccttccatccaggtagtagccgaagatgtaaatgtgacattcccagaggtgccctcccaacttgggccatttggttcctgagggggcccatttcccaggggatgcctagtggcactcttcttggaccacatgccagagcgcctgaaggactgggtgccactgggcccctgaacactgggggctccctgctgacacattttgattgcttctttcctggcattgatgtgatagatacgtagggagcgtcttgtagctaccagattctttctctttggagttgggacacgggtcgcttgctgagcggtgtttctgaggcatcctttctctggatattctccaggagcctgggcttgtctctctgaaaattggagttgcagtagatctaa

SEQ ID NO: 354758 - DNA, 2808 bp, Homo sapiens
tgctggtatagcagctctgggcccaaaactcctgcctggtgtcctcgtcccacccttccacttactcttcctccctcccgttccttttcctccttccggttcttcgtcgaggctgccggtctcgaggtcccctggccttggcctggttggctggcgcgcatcagggccaggtaaagaagctaagtggaagagtgtttcctcctctggccgtaaagcagctgtccccgccctactccggaccgccccaaagactccatgggatggacctgagtcagccgaatcccagccccttcccttgggcctgctgtggtgctggacatcagtgacagacggaagcaggagaccatcaaggctacgggaggcccggggcgcttgcgaagatgaagtttggctgcctctccttccggcagccttatgctggctttgtcttaaatggaatcaagactgtggagacgcgctggcgtcccctgctgagcagccagcggaactgtaccatcgccgtccacattgctcacagggactgggaaggcgatgcctggcgggagctgctggtggagagactcgggatgactcctgctcagattcaggccttgctcaggaaaggggaaaagtttggtcgaggagtgatagcgggactcgttgacattggggaaactttgcaatgccccgaagacttaactcccgatgaggttgtggaactagaaaatcaagctgtactgaccaacctgaagcagaagtacctgactgtgatttcaaaccccaggtggttactggagcccatacctaggaaaggaggcaaggatgtattccaggtagacatcccagagcacctgatccctttggggcatgaagtgtgacaagtgtgggctcctgaaaggaatgttccagagaaaccagctaaatcatgacaccttcaatttgccatcatgacgcagacctgtatacattaggttaaatctgaatttccactgctttggagagtcccacccactaagcactgtgcatgtaaacaggttcctttgctcagatgaaggaagtagggggtggggctttccttgtgtgatgcctccttaggcacacaggcaatgtctcaagtactttgaccttagggtagaaggcaaagctgccagtaaatgtctcagcattgctgctaattttggtcctgctagtttctggattgtacaaataaatgtgttgtagatgactggttagtgtttgaggctttgttctatgttttcccctgatttgttctggtcaaaactcatcaaatgtgtaactagcatccaggcgacaatacagaaagtctgggacctggcactgaatgtttgcctggtagtgactagccgttaatcaaccgactcatccaggatgaagaggacgtcagacttagagcagctgtctgtcctttcaggttactctcactcttctgaaagtgtctgtcagtttctgaagcatgtgtgttacctgcatcacacagctacttcctatcctagcaatacatccaaaatacagctctagtagagtgaggttaacttggaaatgtgatcagtagtgttgttttattttgtagtaatttttttttttttttggtgatttagcaaagtttctagttgttatccatgaggatgatgggcatttccccccaggtattgactgcagtggcccttctcttctgagccaggatgttatggtggttgtacatcccatggcagatggggtggcctgactttcaagtgggcctctttggaggcccctggatgctaggctagggatgctgagctgctgaccagacacttcctggcaacattgggagggacccatgaggaaacaatctcctgtttgaagatacaggaagatattgccggaatcaggcgtctattctttctcctgaccagcaggccaatctcaggggaccaggtcttcctgggcttggcctcgacacttcctagcaacatcctttgctgagtgtgtgaaaatgctgcttctccaaataaacgaggacaatggggaccaaagcctgtcttggacaggatttccagcctcccctggtttctgccaatgagatgtatataatatacaaggttaaaaaaaacacagacaacagttctcatttaaattgtttattatttatttccatggaattttgtttttctttattaagaccaaaaatgtgtttctcattaaaaaatggcaacttttatgggccattagtggcctgtgacttcacgaatttgcagtgtttctgaactgttcacagagtctacacttgtaatctgaggagccttcctactcctcctcatcgtcagagggctcatttggagacatgactgagagggaggccaacagagcatagtaacagatattgtacaaagacattacactaccattatctgagtaaaccagactactaagaatccctgtgccttccatccaggtagtagccgaagatgtaaatgtgacattcccagaggtgccctcccaacttgggccatttggttcctgagggggcccatttcccaggggatgcctagtggcactcttcttggaccacatgccagagcgcctgaaggactgggtgccactgggcccctgaacactgggggctccctgctgacacattttgattgcttctttcctggcattgatgtgatagatacgtagggagcgtcttgtagctaccagattctttctctttggagttgggacacgggtcgcttgctgagcggtgtttctgaggcatcctttctctggatattctccaggagcctgggcttgtctctctgaaaattggagttgcagtagatctaa

SEQ ID NO: 354759 - DNA, 2952 bp, Homo sapiens
aagacgtccaagccttaaacatcagtgtgccgtatggtccaattcctgtggactttcagcggaaaatccgccagagctactttgcctctgtgtcatatttggatacacaggtcggccgcctcttgagtgctttggacgatcttcagctggccaacagcaccatcattgcatttacctcggatcatggtgtcctccctcccaggagtggccctcaccttatcactggctgccaggtagggtgaccaacagtcccagtttgctgagtgaattgcagtgctaaaagccggcgagtcccagggaagcaggacgaattggtaaagaagctaagtggaagagtgtttcctcctctggccgtaaagcagctgtccccgccctactccggaccgccccaaagactccatgggatggacctgagtcagccgaatcccagccccttcccttgggcctgctgtggtgctggacatcagtgacagacggaagcaggagaccatcaaggctacgggaggcccggggcgcttgcgaagatgaagtttggctgcctctccttccggcagccttatgctggctttgtcttaaatggaatcaagactgtggagacgcgctggcgtcccctgctgagcagccagcggaactgtaccatcgccgtccacattgctcacagggactgggaaggcgatgcctggcgggagctgctggtggagagactcgggatgactcctgctcagattcaggccttgctcaggaaaggggaaaagtttggtcgaggagtgatagcgggactcgttgacattggggaaactttgcaatgccccgaagacttaactcccgatgaggttgtggaactagaaaatcaagctgtactgaccaacctgaagcagaagtacctgactgtgatttcaaaccccaggtggttactggagcccatacctaggaaaggaggcaaggatgtattccaggtagacatcccagagcacctgatccctttggggcatgaagtgtgacaagtgtgggctcctgaaaggaatgttccagagaaaccagctaaatcatgacaccttcaatttgccatcatgacgcagacctgtatacattaggttaaatctgaatttccactgctttggagagtcccacccactaagcactgtgcatgtaaacaggttcctttgctcagatgaaggaagtagggggtggggctttccttgtgtgatgcctccttaggcacacaggcaatgtctcaagtactttgaccttagggtagaaggcaaagctgccagtaaatgtctcagcattgctgctaattttggtcctgctagtttctggattgtacaaataaatgtgttgtagatgactggttagtgtttgaggctttgttctatgttttcccctgatttgttctggtcaaaactcatcaaatgtgtaactagcatccaggcgacaatacagaaagtctgggacctggcactgaatgtttgcctggtagtgactagccgttaatcaaccgactcatccaggatgaagaggacgtcagacttagagcagctgtctgtcctttcaggttactctcactcttctgaaagtgtctgtcagtttctgaagcatgtgtgttacctgcatcacacagctacttcctatcctagcaatacatccaaaatacagctctagtagagtgaggttaacttggaaatgtgatcagtagtgttgttttattttgtagtaatttttttttttttttggtgatttagcaaagtttctagttgttatccatgaggatgatgggcatttccccccaggtattgactgcagtggcccttctcttctgagccaggatgttatggtggttgtacatcccatggcagatggggtggcctgactttcaagtgggcctctttggaggcccctggatgctaggctagggatgctgagctgctgaccagacacttcctggcaacattgggagggacccatgaggaaacaatctcctgtttgaagatacaggaagatattgccggaatcaggcgtctattctttctcctgaccagcaggccaatctcaggggaccaggtcttcctgggcttggcctcgacacttcctagcaacatcctttgctgagtgtgtgaaaatgctgcttctccaaataaacgaggacaatggggaccaaagcctgtcttggacaggatttccagcctcccctggtttctgccaatgagatgtatataatatacaaggttaaaaaaaacacagacaacagttctcatttaaattgtttattatttatttccatggaattttgtttttctttattaagaccaaaaatgtgtttctcattaaaaaatggcaacttttatgggccattagtggcctgtgacttcacgaatttgcagtgtttctgaactgttcacagagtctacacttgtaatctgaggagccttcctactcctcctcatcgtcagagggctcatttggagacatgactgagagggaggccaacagagcatagtaacagatattgtacaaagacattacactaccattatctgagtaaaccagactactaagaatccctgtgccttccatccaggtagtagccgaagatgtaaatgtgacattcccagaggtgccctcccaacttgggccatttggttcctgagggggcccatttcccaggggatgcctagtggcactcttcttggaccacatgccagagcgcctgaaggactgggtgccactgggcccctgaacactgggggctccctgctgacacattttgattgcttctttcctggcattgatgtgatagatacgtagggagcgtcttgtagctaccagattctttctctttggagttgggacacgggtcgcttgctgagcggtgtttctgaggcatcctttctctggatattctccaggagcctgggcttgtctctctgaaaattggagttgcagtagatctaa

SEQ ID NO: 354760 - DNA, 2926 bp, Homo sapiens
tgcgtgtcttcgagaatgcgagattcataatgtttgctgtctatatgcatggctgagtacgtgcctcccgcgtacgtgcgtggtgtgcatacatgcgtgattgcgcgcccacgtacgttcttcgtgaaagggatgacgggagctgtatgaaagcggaagagttatagaccgctaacacctgtcactggccactggtttcccggagttagcggcaacgaccttgcagcctggacactagccaggcgctccctcttctcacagcggcccacgtctccttgcttgggagcccatcgtcctggctccggtggcctcgctgggtctcggggaagcagaggactgttcattcctgtggcgaaaagccggagtcggccctagacacccacgactcgcagggtccatggttccggaggccgtgagacctgccggggctgacaggtaaagaagctaagtggaagagtgtttcctcctctggccgtaaagcaggtactctctgcagcaccagctgtccccgccctactccggaccgccccaaagactccatgggatggacctgagtcagccgaatcccagccccttcccttgggcctgctgtggtgctggacatcagtgacagacggaagcaggagaccatcaagggactgggaaggcgatgcctggcgggagctgctggtggagagactcgggatgactcctgctcagattcaggccttgctcaggaaaggggaaaagtttggtcgaggagtgatagcgggactcgttgacattggggaaactttgcaatgccccgaagacttaactcccgatgaggttgtggaactagaaaatcaagctgtactgaccaacctgaagcagaagtacctgactgtgatttcaaaccccaggtggttactggagcccatacctaggaaaggaggcaaggatgtattccaggtagacatcccagagcacctgatccctttggggcatgaagtgtgacaagtgtgggctcctgaaaggaatgttccagagaaaccagctaaatcatgacaccttcaatttgccatcatgacgcagacctgtatacattaggttaaatctgaatttccactgctttggagagtcccacccactaagcactgtgcatgtaaacaggttcctttgctcagatgaaggaagtagggggtggggctttccttgtgtgatgcctccttaggcacacaggcaatgtctcaagtactttgaccttagggtagaaggcaaagctgccagtaaatgtctcagcattgctgctaattttggtcctgctagtttctggattgtacaaataaatgtgttgtagatgactggttagtgtttgaggctttgttctatgttttcccctgatttgttctggtcaaaactcatcaaatgtgtaactagcatccaggcgacaatacagaaagtctgggacctggcactgaatgtttgcctggtagtgactagccgttaatcaaccgactcatccaggatgaagaggacgtcagacttagagcagctgtctgtcctttcaggttactctcactcttctgaaagtgtctgtcagtttctgaagcatgtgtgttacctgcatcacacagctacttcctatcctagcaatacatccaaaatacagctctagtagagtgaggttaacttggaaatgtgatcagtagtgttgttttattttgtagtaatttttttttttttttggtgatttagcaaagtttctagttgttatccatgaggatgatgggcatttccccccaggtattgactgcagtggcccttctcttctgagccaggatgttatggtggttgtacatcccatggcagatggggtggcctgactttcaagtgggcctctttggaggcccctggatgctaggctagggatgctgagctgctgaccagacacttcctggcaacattgggagggacccatgaggaaacaatctcctgtttgaagatacaggaagatattgccggaatcaggcgtctattctttctcctgaccagcaggccaatctcaggggaccaggtcttcctgggcttggcctcgacacttcctagcaacatcctttgctgagtgtgtgaaaatgctgcttctccaaataaacgaggacaatggggaccaaagcctgtcttggacaggatttccagcctcccctggtttctgccaatgagatgtatataatatacaaggttaaaaaaaacacagacaacagttctcatttaaattgtttattatttatttccatggaattttgtttttctttattaagaccaaaaatgtgtttctcattaaaaaatggcaacttttatgggccattagtggcctgtgacttcacgaatttgcagtgtttctgaactgttcacagagtctacacttgtaatctgaggagccttcctactcctcctcatcgtcagagggctcatttggagacatgactgagagggaggccaacagagcatagtaacagatattgtacaaagacattacactaccattatctgagtaaaccagactactaagaatccctgtgccttccatccaggtagtagccgaagatgtaaatgtgacattcccagaggtgccctcccaacttgggccatttggttcctgagggggcccatttcccaggggatgcctagtggcactcttcttggaccacatgccagagcgcctgaaggactgggtgccactgggcccctgaacactgggggctccctgctgacacattttgattgcttctttcctggcattgatgtgatagatacgtagggagcgtcttgtagctaccagattctttctctttggagttgggacacgggtcgcttgctgagcggtgtttctgaggcatcctttctctggatattctccaggagcctgggcttgtctctctgaaaattggagttgcagtagatctaa

SEQ ID NO: 354761 - DNA, 2628 bp, Homo sapiens
atactttcaatcatcgggactgcgcttaacctgttagattagctgggcacgtggtccgtacgattagacatagcctcctctggaccgtaaagcagctgtccccgccctactccggaccgccccaaagactccatgggatggacctgagtcagccgaatcccagccccttccgctacgggaggcccggggcgcttgcgaagatgaagtttggctgcctctccttccggcagccttatgctggctttgtcttaaatggaatcaagactgtggagacgcgctggcgtcccctgctgagcagccagcggaactgtaccatcgccgtccacattgctcacagggactgggaaggcgatgcctggcgggagctgctggtggagagactcgggatgactcctgctcagattcaggccttgctcaggaaaggggaaaagtttggtcgaggagtgatagcgggactcgttgacattggggaaactttgcaatgccccgaagacttaactcccgatgaggttgtggaactagaaaatcaagctgtactgaccaacctgaagcagaagtacctgactgtgatttcaaaccccaggtggttactggagcccatacctaggaaaggaggcaaggatgtattccaggtagacatcccagagcacctgatccctttggggcatgaagtgtgacaagtgtgggctcctgaaaggaatgttccagagaaaccagctaaatcatgacaccttcaatttgccatcatgacgcagacctgtatacattaggttaaatctgaatttccactgctttggagagtcccacccactaagcactgtgcatgtaaacaggttcctttgctcagatgaaggaagtagggggtggggctttccttgtgtgatgcctccttaggcacacaggcaatgtctcaagtactttgaccttagggtagaaggcaaagctgccagtaaatgtctcagcattgctgctaattttggtcctgctagtttctggattgtacaaataaatgtgttgtagatgactggttagtgtttgaggctttgttctatgttttcccctgatttgttctggtcaaaactcatcaaatgtgtaactagcatccaggcgacaatacagaaagtctgggacctggcactgaatgtttgcctggtagtgactagccgttaatcaaccgactcatccaggatgaagaggacgtcagacttagagcagctgtctgtcctttcaggttactctcactcttctgaaagtgtctgtcagtttctgaagcatgtgtgttacctgcatcacacagctacttcctatcctagcaatacatccaaaatacagctctagtagagtgaggttaacttggaaatgtgatcagtagtgttgttttattttgtagtaatttttttttttttttggtgatttagcaaagtttctagttgttatccatgaggatgatgggcatttccccccaggtattgactgcagtggcccttctcttctgagccaggatgttatggtggttgtacatcccatggcagatggggtggcctgactttcaagtgggcctctttggaggcccctggatgctaggctagggatgctgagctgctgaccagacacttcctggcaacattgggagggacccatgaggaaacaatctcctgtttgaagatacaggaagatattgccggaatcaggcgtctattctttctcctgaccagcaggccaatctcaggggaccaggtcttcctgggcttggcctcgacacttcctagcaacatcctttgctgagtgtgtgaaaatgctgcttctccaaataaacgaggacaatggggaccaaagcctgtcttggacaggatttccagcctcccctggtttctgccaatgagatgtatataatatacaaggttaaaaaaaacacagacaacagttctcatttaaattgtttattatttatttccatggaattttgtttttctttattaagaccaaaaatgtgtttctcattaaaaaatggcaacttttatgggccattagtggcctgtgacttcacgaatttgcagtgtttctgaactgttcacagagtctacacttgtaatctgaggagccttcctactcctcctcatcgtcagagggctcatttggagacatgactgagagggaggccaacagagcatagtaacagatattgtacaaagacattacactaccattatctgagtaaaccagactactaagaatccctgtgccttccatccaggtagtagccgaagatgtaaatgtgacattcccagaggtgccctcccaacttgggccatttggttcctgagggggcccatttcccaggggatgcctagtggcactcttcttggaccacatgccagagcgcctgaaggactgggtgccactgggcccctgaacactgggggctccctgctgacacattttgattgcttctttcctggcattgatgtgatagatacgtagggagcgtcttgtagctaccagattctttctctttggagttgggacacgggtcgcttgctgagcggtgtttctgaggcatcctttctctggatattctccaggagcctgggcttgtctctctgaaaattggagttgcagtagatctaa

SEQ ID NO: 354762 - DNA, 983 bp, Homo sapiens
tgcgtgtcttcgagaatgcgagattcataatgtttgctgtctatatgcatggctgagtacgtgcctcccgcgtacgtgcgtggtgtgcatacatgcgtgattgcgcgcccacgtacgttcttcgtgaaagggatgacgggagctgtatgaaagcggaagagttatagaccgctaacacctgtcactggccactggtttcccggagttagcggcaacgaccttgcagcctggacactagccaggcgctccctcttctcacagcggcccacgtctccttgcttgggagcccatcgtcctggctccggtggcctcgctgggtctcggggaagcagaggactgttcattcctgtggcgaaaagccggagtcggccctagacacccacgactcgcagggtccatggttccggaggccgtgagacctgccggggctgacaggtgccagggcccatgctgcgggagcctgtgtgctcagccttcttgcggacggtacctgagggctggggtttccctggatgtggggctgggaactcgtgcggggcgcgaccgaggcgccttttcctgtcccctgctgtcggcagggtctcggctccgctccttctaagcgcgtgtacccgcgacgtgcgtctgcgagtagaaagcccgtgtactgctccacacacagcggccccacctcagtccggtcttccctgcctcccgttggcccttctgctgtgagctcgcctggacctgaggccgggcggtgcacagctctgtggcctgtggcgccgtgctcagcgtgacctacccagaattaagctgaggacaatgggatttagagtcccaaacactcgccccgtgacaatgggaggggaagtgtcatttttctcccttcgaatggagcatgcttggctgcaagaatgctgctcaacatggtgaaatgattttctgccctgcgggctggtgcaccctgtggtccttgacccagacaggtgcggagggtccca

SEQ ID NO: 354763 - DNA, 416 bp, Homo sapiens
tgcgtgtcttcgagaatgcgagattcataatgtttgctgtctatatgcatggctgagtacgtgcctcccgcgtacgtgcgtggtgtgcatacatgcgtgattgcgcgcccacgtacgttcttcgtgaaagggatgacgggagctgtatgaaagcggaagagttatagaccgctaacacctgtcactggcctgtggcgccgtgctcagcgtgacctacccagaattaagctgaggacaatgggatttagagtcccaaacactcgccccgtgacaatgggaggggaagtgtcatttttctcccttcgaatggagcatgcttggctgcaagaatgctgctcaacatggtgaaatgattttctgccctgcgggctggtgcaccctgtggtccttgacccagacaggtgcggagggtccca

SEQ ID NO: 354764 - DNA, 3059 bp, Homo sapiens
tgcgtgtcttcgagaatgcgagattcataatgtttgctgtctatatgcatggctgagtacgtgcctcccgcgtacgtgcgtggtgtgcatacatgcgtgattgcgcgcccacgtacgttcttcgtgaaagggatgacgggagctgtatgaaagcggaagagttatagaccgctaacacctgtcactggccactggtttcccggagttagcggcaacgaccttgcagcctggacactagccaggcgctccctcttctcacagcggcccacgtctccttgcttgggagcccatcgtcctggctccggtggcctcgctgggtctcggggaagcagaggactgttcattcctgtggcgaaaagccggagtcggccctagacacccacgactcgcagggtccatggttccggaggccgtgagacctgccggggctgacaggtgccagggcccatgctgcgggagcctgtgtgctcagccttcttgcggacggtaaagaagctaagtggaagagtgtttcctcctctggccgtaaagcagctgtccccgccctactccggaccgccccaaagactccatgggatggacctgagtcagccgaatcccagccccttcccttgggcctgctgtggtgctggacatcagtgacagacggaagcaggagaccatcaaggctacgggaggcccggggcgcttgcgaagatgaagtttggctgcctctccttccggcagccttatgctggctttgtcttaaatggaatcaagactgtggagacgcgctggcgtcccctgctgagcagccagcggaactgtaccatcgccgtccacattgctcacagggactgggaaggcgatgcctggcgggagctgctggtggagagactcgggatgactcctgctcagattcaggccttgctcaggaaaggggaaaagtttggtcgaggagtgatagcgggactcgttgacattggggaaactttgcaatgccccgaagacttaactcccgatgaggttgtggaactagaaaatcaagctgtactgaccaacctgaagcagaagtacctgactgtgatttcaaaccccaggtggttactggagcccatacctaggaaaggaggcaaggatgtattccaggaatgttccagagaaaccagctaaatcatgacaccttcaatttgccatcatgacgcagacctgtatacattaggttaaatctgaatttccactgctttggagagtcccacccactaagcactgtgcatgtaaacaggttcctttgctcagatgaaggaagtagggggtggggctttccttgtgtgatgcctccttaggcacacaggcaatgtctcaagtactttgaccttagggtagaaggcaaagctgccagtaaatgtctcagcattgctgctaattttggtcctgctagtttctggattgtacaaataaatgtgttgtagatgactggttagtgtttgaggctttgttctatgttttcccctgatttgttctggtcaaaactcatcaaatgtgtaactagcatccaggcgacaatacagaaagtctgggacctggcactgaatgtttgcctggtagtgactagccgttaatcaaccgactcatccaggatgaagaggacgtcagacttagagcagctgtctgtcctttcaggttactctcactcttctgaaagtgtctgtcagtttctgaagcatgtgtgttacctgcatcacacagctacttcctatcctagcaatacatccaaaatacagctctagtagagtgaggttaacttggaaatgtgatcagtagtgttgttttattttgtagtaatttttttttttttttggtgatttagcaaagtttctagttgttatccatgaggatgatgggcatttccccccaggtattgactgcagtggcccttctcttctgagccaggatgttatggtggttgtacatcccatggcagatggggtggcctgactttcaagtgggcctctttggaggcccctggatgctaggctagggatgctgagctgctgaccagacacttcctggcaacattgggagggacccatgaggaaacaatctcctgtttgaagatacaggaagatattgccggaatcaggcgtctattctttctcctgaccagcaggccaatctcaggggaccaggtcttcctgggcttggcctcgacacttcctagcaacatcctttgctgagtgtgtgaaaatgctgcttctccaaataaacgaggacaatggggaccaaagcctgtcttggacaggatttccagcctcccctggtttctgccaatgagatgtatataatatacaaggttaaaaaaaacacagacaacagttctcatttaaattgtttattatttatttccatggaattttgtttttctttattaagaccaaaaatgtgtttctcattaaaaaatggcaacttttatgggccattagtggcctgtgacttcacgaatttgcagtgtttctgaactgttcacagagtctacacttgtaatctgaggagccttcctactcctcctcatcgtcagagggctcatttggagacatgactgagagggaggccaacagagcatagtaacagatattgtacaaagacattacactaccattatctgagtaaaccagactactaagaatccctgtgccttccatccaggtagtagccgaagatgtaaatgtgacattcccagaggtgccctcccaacttgggccatttggttcctgagggggcccatttcccaggggatgcctagtggcactcttcttggaccacatgccagagcgcctgaaggactgggtgccactgggcccctgaacactgggggctccctgctgacacattttgattgcttctttcctggcattgatgtgatagatacgtagggagcgtcttgtagctaccagattctttctctttggagttgggacacgggtcgcttgctgagcggtgtttctgaggcatcctttctctggatattctccaggagcctgggcttgtctctctgaaaattggagttgcagtagatctaa

SEQ ID NO: 354765 - DNA, 3568 bp, Homo sapiens
tgcgtgtcttcgagaatgcgagattcataatgtttgctgtctatatgcatggctgagtacgtgcctcccgcgtacgtgcgtggtgtgcatacatgcgtgattgcgcgcccacgtacgttcttcgtgaaagggatgacgggagctgtatgaaagcggaagagttatagaccgctaacacctgtcactggccactggtttcccggagttagcggcaacgaccttgcagcctggacactagccaggcgctccctcttctcacagcggcccacgtctccttgcttgggagcccatcgtcctggctccggtggcctcgctgggtctcggggaagcagaggactgttcattcctgtggcgaaaagccggagtcggccctagacacccacgactcgcagggtccatggttccggaggccgtgagacctgccggggctgacaggtgccagggcccatgctgcgggagcctgtgtgctcagccttcttgcggacggtacctgagggctggggtttccctggatgtggggctgggaactcgtgcggggcgcgaccgaggcgccttttcctgtcccctgctgtcggcagggtctcggctccgctccttctaagcgcgtgtacccgcgacgtgcgtctgcgagtagaaagcccgtgtactgctccacacacagcggccccacctcagtccggtcttccctgcctcccgttggcccttctgctgtgagctcgcctggacctgaggccgggcggtgcacagctctgtggcctgtggcgccgtgctcagcgtgacctacccagaattaagctgaggacaatgggatttagagtcccaaacactcgccccgtgacaatgggaggggaagtgtcatttttctcccttcgaatggagcatgcttggctgcaagaatgctgctcaacatggtaaagaagctaagtggaagagtgtttcctcctctggccgtaaagcaggtactctctgcagcaccagctgtccccgccctactccggaccgccccaaagactccatgggatggacctgagtcagccgaatcccagccccttcccttgggcctgctgtggtgctggacatcagtgacagacggaagcaggagaccatcaaggctacgggaggcccggggcgcttgcgaagatgaagtttggctgcctctccttccggcagccttatgctggctttgtcttaaatggaatcaagactgtggagacgcgctggcgtcccctgctgagcagccagcggaactgtaccatcgccgtccacattgctcacagggactgggaaggcgatgcctggcgggagctgctggtggagagactcgggatgactcctgctcagattcaggccttgctcaggaaaggggaaaagtttggtcgaggagtgatagcgggactcgttgacattggggaaactttgcaatgccccgaagacttaactcccgatgaggttgtggaactagaaaatcaagctgtactgaccaacctgaagcagaagtacctgactgtgatttcaaaccccaggtggttactggagcccatacctaggaaaggaggcaaggatgtattccaggtagacatcccagagcacctgatccctttggggcatgaagtgtgacaagtgtgggctcctgaaaggaatgttccagagaaaccagctaaatcatgacaccttcaatttgccatcatgacgcagacctgtatacattaggttaaatctgaatttccactgctttggagagtcccacccactaagcactgtgcatgtaaacaggttcctttgctcagatgaaggaagtagggggtggggctttccttgtgtgatgcctccttaggcacacaggcaatgtctcaagtactttgaccttagggtagaaggcaaagctgccagtaaatgtctcagcattgctgctaattttggtcctgctagtttctggattgtacaaataaatgtgttgtagatgactggttagtgtttgaggctttgttctatgttttcccctgatttgttctggtcaaaactcatcaaatgtgtaactagcatccaggcgacaatacagaaagtctgggacctggcactgaatgtttgcctggtagtgactagccgttaatcaaccgactcatccaggatgaagaggacgtcagacttagagcagctgtctgtcctttcaggttactctcactcttctgaaagtgtctgtcagtttctgaagcatgtgtgttacctgcatcacacagctacttcctatcctagcaatacatccaaaatacagctctagtagagtgaggttaacttggaaatgtgatcagtagtgttgttttattttgtagtaatttttttttttttttggtgatttagcaaagtttctagttgttatccatgaggatgatgggcatttccccccaggtattgactgcagtggcccttctcttctgagccaggatgttatggtggttgtacatcccatggcagatggggtggcctgactttcaagtgggcctctttggaggcccctggatgctaggctagggatgctgagctgctgaccagacacttcctggcaacattgggagggacccatgaggaaacaatctcctgtttgaagatacaggaagatattgccggaatcaggcgtctattctttctcctgaccagcaggccaatctcaggggaccaggtcttcctgggcttggcctcgacacttcctagcaacatcctttgctgagtgtgtgaaaatgctgcttctccaaataaacgaggacaatggggaccaaagcctgtcttggacaggatttccagcctcccctggtttctgccaatgagatgtatataatatacaaggttaaaaaaaacacagacaacagttctcatttaaattgtttattatttatttccatggaattttgtttttctttattaagaccaaaaatgtgtttctcattaaaaaatggcaacttttatgggccattagtggcctgtgacttcacgaatttgcagtgtttctgaactgttcacagagtctacacttgtaatctgaggagccttcctactcctcctcatcgtcagagggctcatttggagacatgactgagagggaggccaacagagcatagtaacagatattgtacaaagacattacactaccattatctgagtaaaccagactactaagaatccctgtgccttccatccaggtagtagccgaagatgtaaatgtgacattcccagaggtgccctcccaacttgggccatttggttcctgagggggcccatttcccaggggatgcctagtggcactcttcttggaccacatgccagagcgcctgaaggactgggtgccactgggcccctgaacactgggggctccctgctgacacattttgattgcttctttcctggcattgatgtgatagatacgtagggagcgtcttgtagctaccagattctttctctttggagttgggacacgggtcgcttgctgagcggtgtttctgaggcatcctttctctggatattctccaggagcctgggcttgtctctctgaaaattggagttgcagtagatctaa

SEQ ID NO: 354766 - DNA, 3143 bp, Homo sapiens
tgcgtgtcttcgagaatgcgagattcataatgtttgctgtctatatgcatggctgagtacgtgcctcccgcgtacgtgcgtggtgtgcatacatgcgtgattgcgcgcccacgtacgttcttcgtgaaagggatgacgggagctgtatgaaagcggaagagttatagaccgctaacacctgtcactggccactggtttcccggagttagcggcaacgaccttgcagcctggacactagccaggcgctccctcttctcacagcggcccacgtctccttgcttgggagcccatcgtcctggctccggtggcctcgctgggtctcggggaagcagaggactgttcattcctgtggcgaaaagccggagtcggccctagacacccacgactcgcagggtccatggttccggaggccgtgagacctgccggggctgacaggtgccagggcccatgctgcgggagcctgtgtgctcagccttcttgcggacggtaaagaagctaagtggaagagtgtttcctcctctggccgtaaagcaggtactctctgcagcaccagctgtccccgccctactccggaccgccccaaagactccatgggatggacctgagtcagccgaatcccagccccttcccttgggcctgctgtggtgctggacatcagtgacagacggaagcaggagaccatcaaggctacgggaggcccggggcgcttgcgaagatgaagtttggctgcctctccttccggcagccttatgctggctttgtcttaaatggaatcaagactgtggagacgcgctggcgtcccctgctgagcagccagcggaactgtaccatcgccgtccacattgctcacagggactgggaaggcgatgcctggcgggagctgctggtggagagactcgggatgactcctgctcagattcaggccttgctcaggaaaggggaaaagtttggtcgaggagtgatagcgggactcgttgacattggggaaactttgcaatgccccgaagacttaactcccgatgaggttgtggaactagaaaatcaagctgtactgaccaacctgaagcagaagtacctgactgtgatttcaaaccccaggtggttactggagcccatacctaggaaaggaggcaaggatgtattccaggtagacatcccagagcacctgatccctttggggcatgaagtgtgacaagtgtgggctcctgaaaggaatgttccagagaaaccagctaaatcatgacaccttcaatttgccatcatgacgcagacctgtatacattaggttaaatctgaatttccactgctttggagagtcccacccactaagcactgtgcatgtaaacaggttcctttgctcagatgaaggaagtagggggtggggctttccttgtgtgatgcctccttaggcacacaggcaatgtctcaagtactttgaccttagggtagaaggcaaagctgccagtaaatgtctcagcattgctgctaattttggtcctgctagtttctggattgtacaaataaatgtgttgtagatgactggttagtgtttgaggctttgttctatgttttcccctgatttgttctggtcaaaactcatcaaatgtgtaactagcatccaggcgacaatacagaaagtctgggacctggcactgaatgtttgcctggtagtgactagccgttaatcaaccgactcatccaggatgaagaggacgtcagacttagagcagctgtctgtcctttcaggttactctcactcttctgaaagtgtctgtcagtttctgaagcatgtgtgttacctgcatcacacagctacttcctatcctagcaatacatccaaaatacagctctagtagagtgaggttaacttggaaatgtgatcagtagtgttgttttattttgtagtaatttttttttttttttggtgatttagcaaagtttctagttgttatccatgaggatgatgggcatttccccccaggtattgactgcagtggcccttctcttctgagccaggatgttatggtggttgtacatcccatggcagatggggtggcctgactttcaagtgggcctctttggaggcccctggatgctaggctagggatgctgagctgctgaccagacacttcctggcaacattgggagggacccatgaggaaacaatctcctgtttgaagatacaggaagatattgccggaatcaggcgtctattctttctcctgaccagcaggccaatctcaggggaccaggtcttcctgggcttggcctcgacacttcctagcaacatcctttgctgagtgtgtgaaaatgctgcttctccaaataaacgaggacaatggggaccaaagcctgtcttggacaggatttccagcctcccctggtttctgccaatgagatgtatataatatacaaggttaaaaaaaacacagacaacagttctcatttaaattgtttattatttatttccatggaattttgtttttctttattaagaccaaaaatgtgtttctcattaaaaaatggcaacttttatgggccattagtggcctgtgacttcacgaatttgcagtgtttctgaactgttcacagagtctacacttgtaatctgaggagccttcctactcctcctcatcgtcagagggctcatttggagacatgactgagagggaggccaacagagcatagtaacagatattgtacaaagacattacactaccattatctgagtaaaccagactactaagaatccctgtgccttccatccaggtagtagccgaagatgtaaatgtgacattcccagaggtgccctcccaacttgggccatttggttcctgagggggcccatttcccaggggatgcctagtggcactcttcttggaccacatgccagagcgcctgaaggactgggtgccactgggcccctgaacactgggggctccctgctgacacattttgattgcttctttcctggcattgatgtgatagatacgtagggagcgtcttgtagctaccagattctttctctttggagttgggacacgggtcgcttgctgagcggtgtttctgaggcatcctttctctggatattctccaggagcctgggcttgtctctctgaaaattggagttgcagtagatctaa

SEQ ID NO: 354767 - DNA, 1686 bp, Homo sapiens
tgcgtgtcttcgagaatgcgagattcataatgtttgctgtctatatgcatggctgagtacgtgcctcccgcgtacgtgcgtggtgtgcatacatgcgtgattgcgcgcccacgtacgttcttcgtgaaagggatgacgggagctgtatgaaagcggaagagttatagaccgctaacacctgtcactggccactggtttcccggagttagcggcaacgaccttgcagcctggacactagccaggcgctccctcttctcacagcggcccacgtctccttgcttgggagcccatcgtcctggctccggtggcctcgctgggtctcggggaagcagaggactgttcattcctgtggcgaaaagccggagtcggccctagacacccacgactcgcagggtccatggttccggaggccgtgagacctgccggggctgacaggtgccagggcccatgctgcgggagcctgtgtgctcagccttcttgcggacggtaaagaagctaagtggaagagtgtttcctcctctggccgtaaagcagctgtccccgccctactccggaccgccccaaagactccatgggatggacctgagtcagccgaatcccagccccttcccttgggcctgctgtggtgctggacatcagtgacagacggaagcaggagaccatcaaggctacgggaggcccggggcgcttgcgaagatgaagtttggctgcctctccttccggcagccttatgctggctttgtcttaaatggaatcaagactgtggagacgcgctggcgtcccctgctgagcagccagcggaactgtaccatcgccgtccacattgctcacagggactgggaaggcgatgcctggcgggagctgctggtggagagactcgggatgactcctgctcagattcaggccttgctcaggaaaggggaaaagtttggtcgaggagtgatagcgggactcgttgacattggggaaactttgcaatgccccgaagacttaactcccgatgaggttgtggaactagaaaatcaagctgtactgaccaacctgaagcagaagtacctgactgtgatttcaaaccccaggtggttactggagcccatacctaggaaaggaggcaaggatgtattccagaatccatagaggttcagctggcgaatgaaactcgtcaagctgtctgttttgaagatcctctctgcacctttccgttgaagaacctccctctggaagagatccttgtcgatgatcacggcgtctccatcatcgttccagctcacagacttgaatgtgtcttcctccacaatcgtccaaagctttcttgggaaggagagcctaaaaaggttgtggttgtcttccacgttgaccacgcgttggtttcggtcttctggtggtgagttatcttgggagcctggatcttggctcatggcttggtcctcgtgcctgtccaaaacctcgctggaatctggatttggatcaggtgaagaaccagatgggcccccgcttgttggctctccaccaacagatggggccagcttggcttcatattcctgttcagtgttctgactcgccatggagctacaccagaatcaggagcattttgtacccaaggcccttatcactgtcctagcaagtccaaaatgccttcagtcagagtaggcgtgcccaataaatactgtccacaaaaaaaaaaaa

SEQ ID NO: 354768 - DNA, 2640 bp, Homo sapiens
tcggctaggtacgaggctgggtgtggcgggagcctgtgtgctcagccttcttgcggacggtaaagaagctaagtggaagagtgtttcctcctctggccgtaaagcagctgtccccgccctactccggaccgccccaaagactccatgggatggacctgagtcagccgaatcccagccccttccgctacgggaggcccggggcgcttgcgaagatgaagtttggctgcctctccttccggcagccttatgctggctttgtcttaaatggaatcaagactgtggagacgcgctggcgtcccctgctgagcagccagcggaactgtaccatcgccgtccacattgctcacagggactgggaaggcgatgcctggcgggagctgctggtggagagactcgggatgactcctgctcagattcaggccttgctcaggaaaggggaaaagtttggtcgaggagtgatagcgggactcgttgacattggggaaactttgcaatgccccgaagacttaactcccgatgaggttgtggaactagaaaatcaagctgtactgaccaacctgaagcagaagtacctgactgtgatttcaaaccccaggtggttactggagcccatacctaggaaaggaggcaaggatgtattccaggtagacatcccagagcacctgatccctttggggcatgaagtgtgacaagtgtgggctcctgaaaggaatgttccagagaaaccagctaaatcatgacaccttcaatttgccatcatgacgcagacctgtatacattaggttaaatctgaatttccactgctttggagagtcccacccactaagcactgtgcatgtaaacaggttcctttgctcagatgaaggaagtagggggtggggctttccttgtgtgatgcctccttaggcacacaggcaatgtctcaagtactttgaccttagggtagaaggcaaagctgccagtaaatgtctcagcattgctgctaattttggtcctgctagtttctggattgtacaaataaatgtgttgtagatgactggttagtgtttgaggctttgttctatgttttcccctgatttgttctggtcaaaactcatcaaatgtgtaactagcatccaggcgacaatacagaaagtctgggacctggcactgaatgtttgcctggtagtgactagccgttaatcaaccgactcatccaggatgaagaggacgtcagacttagagcagctgtctgtcctttcaggttactctcactcttctgaaagtgtctgtcagtttctgaagcatgtgtgttacctgcatcacacagctacttcctatcctagcaatacatccaaaatacagctctagtagagtgaggttaacttggaaatgtgatcagtagtgttgttttattttgtagtaatttttttttttttttggtgatttagcaaagtttctagttgttatccatgaggatgatgggcatttccccccaggtattgactgcagtggcccttctcttctgagccaggatgttatggtggttgtacatcccatggcagatggggtggcctgactttcaagtgggcctctttggaggcccctggatgctaggctagggatgctgagctgctgaccagacacttcctggcaacattgggagggacccatgaggaaacaatctcctgtttgaagatacaggaagatattgccggaatcaggcgtctattctttctcctgaccagcaggccaatctcaggggaccaggtcttcctgggcttggcctcgacacttcctagcaacatcctttgctgagtgtgtgaaaatgctgcttctccaaataaacgaggacaatggggaccaaagcctgtcttggacaggatttccagcctcccctggtttctgccaatgagatgtatataatatacaaggttaaaaaaaacacagacaacagttctcatttaaattgtttattatttatttccatggaattttgtttttctttattaagaccaaaaatgtgtttctcattaaaaaatggcaacttttatgggccattagtggcctgtgacttcacgaatttgcagtgtttctgaactgttcacagagtctacacttgtaatctgaggagccttcctactcctcctcatcgtcagagggctcatttggagacatgactgagagggaggccaacagagcatagtaacagatattgtacaaagacattacactaccattatctgagtaaaccagactactaagaatccctgtgccttccatccaggtagtagccgaagatgtaaatgtgacattcccagaggtgccctcccaacttgggccatttggttcctgagggggcccatttcccaggggatgcctagtggcactcttcttggaccacatgccagagcgcctgaaggactgggtgccactgggcccctgaacactgggggctccctgctgacacattttgattgcttctttcctggcattgatgtgatagatacgtagggagcgtcttgtagctaccagattctttctctttggagttgggacacgggtcgcttgctgagcggtgtttctgaggcatcctttctctggatattctccaggagcctgggcttgtctctctgaaaattggagttgcagtagatctaa

SEQ ID NO: 354769 - DNA, 1163 bp, Homo sapiens
tgcgtgtcttcgagaatgcgagattcataatgtttgctgtctatatgcatggctgagtacgtgcctcccgcgtacgtgcgtggtgtgcatacatgcgtgattgcgcgcccacgtacgttcttcgtgaaagggatgacgggagctgtatgaaagcggaagagttatagaccgctaacacctgtcactggccactggtttcccggagttagcggcaacgaccttgcagcctggacactagccaggcgctccctcttctcacagcggcccacgtctccttgcttgggagcccatcgtcctggctccggtggcctcgctgggtctcggggaagcagaggactgttcattcctgtggcgaaaagccggagtcggccctagacacccacgactcgcagggtccatggttccggaggccgtgagacctgccggggctgacaggtgccagggcccatgctgcgggagcctgtgtgctcagccttcttgcggacggtaaagaagctaagtggaagagtgtttcctcctctggccgtaaagcagctgtccccgccctactccggaccgccccaaagactccatgggatggacctgagtcagccgaatcccagccccttcccttgggcctgctgtggtgctggacatcagtgacagacggaagcaggagaccatcaaggctacgggaggcccggggcgcttgcgaagatgaagtttggctgcctctccttccggcagccttatgctggctttgtcttaaatggaatcaagactgtggagacgcgctggcgtcccctgctgagcagccagcggaactgtaccatcgccgtccacattgctcacagggactgggaaggcgatgcctggcgggagctgctggtggagagactcgggatgactcctgctcagattcaggccttgctcaggaaaggggaaaagtttggtcgaggagtgatagcgggactcgttgacattggggaaactttgcaatgccccgaagacttaactcccgatgaggttgtggtgctggacatcagtgacagacggaagcaggagaccatcaaggctacgggaggcccggggcgcttgcgaagatgaagtttggctgcctctccttccggcagccttatgctggctttgtcttaaatggaatcaagactgtggagacgcgctgg

SEQ ID NO: 354770 - DNA, 433 bp, Homo sapiens
catggtaaattttttttttttttttttgagacgggtctcgctgtgtcacccaggctggagtgcagtggcgcaatctcggctccctgcaacctctgcctcccaggttcaagtgattctcctgcctcagcctctcgaatagctgggaccacaggcgggtgccgatggtggatgttttaatgatgacgttgatggtactgacactgatattactatttctttcccaacaatcttggaacaaggatgtacacaatgcatagtacccaggggcactctgtcactcaaaaccaggttttgggataatatatgaagttgggcattctatttaggttaaagattgtggataaaattgatatcatcatcatcatcatcattattcaccttctccccagtcatgtaaaagtaatggataagaacatcacttagacaaataatt

SEQ ID NO: 354771 - DNA, 367 bp, Homo sapiens
tggtcaaaataaggtaaatattgattatggatttaatccaaaactgtatagctacattgggaggatgaataaaagggaaattaggccgggtgcggtagctcacgcctgtaatcccagcactttgggaggccaaggcaggcggatcaccttaggtcaggagttcgagaccagcctggccaacatggtgaaaccctgtctgtactaaaaatacaaaaattagccgggcatggtggtgggcgcctgtaaatcccagctactcaggaggctgagtcaggagaatcccttgaacccagaagacggaggttgcagtgagccaagattgcaccactgcactccagcctgggtgacagagggagactccgtctca

SEQ ID NO: 354772 - DNA, 659 bp, Homo sapiens
aggcctcttattagggctctggtggcggcggcggcagacacttggggtctggacgcaacggaggcgggagcgtgaacgcccctccagccttcgagtcgttcttgctcttcgagggcgagaagaagatcaccattaacaaggacaccaaggtacccaatgcctgtttattcaccatcaacaaagaagaccacacactgggaaacatcattaaatcacagtgtgacctaaaggacccgcaagtgctatttgctggctacaaagtcccccaccccttggagcacaagatcatcatccgagtgcagaccacgccggactacagcccccaggaagcctttaccaacgccatcaccgacctcatcagtgagctgtccctgctggaggagcgcttccgggccataaaagacaagcaggaaggaattgagtaggggccagagggggctctgctcggcctgtgagccccgttcctacctgtgcctgaccctccgctccaggtaccacaccgaggagagcggccggtcccagccatggcccgccttgtggccacccctcaccctgacaccgacgtgttggccacccctcaccctgacaccgacgtgtcctgtacatagattaggttttatattcctaataaagtatagcgggagagacctggaaaaaaa

SEQ ID NO: 354773 - DNA, 866 bp, Homo sapiens
aggcctcttattagggctctggtggcggcggcggcagacacttggggtctggacgcaacggaggcgggagcgtgaacgcccctccagccttcgagtcgttcttgctcttcgagggcgagaagaagatcaccattaacaaggacaccaaggtacccaatgcctgtttattcaccatcaacaaagaagaccacacactgggaaacatcattaaatcacagtgtgacctaaaggacccgcaagtgctatttgctggctacaaagtcccccaccccttggagcacaagatcatcatccgagtgcagaccacgccggactacagcccccaggaagcctttaccaacgccatcaccgacctcatcagtgagctgtccctgctggaggagcgcttccggacgtgcctgcttccccttcgccttctgccgtgattgtcagtttcctgaggcctccccagccacgctttctgtacagcctgcagaactgtgagtcaattaaacctcttttcttcataaaaaaaaaaaaaaaaaaaaatttgtggggggggcggggccggaaaaaggttttaacaccacgtggtggggcgccgcgggcgccaagaggtgtaactggcgccctggccacagcgctgggcaaaaaagaaaccgggcaagacacaggggtgggttccccccccataaaagaaccgcgggggcacccgcggtgtcgacccgaacccaggggggttcgggggcagcgtggcttaacaccacggtccacggagtcgattacgccccccggggggggtcaggcaggcacagacccacacgcacacggaccacgccacaccgtcaggatcaacccgatgcatcatccactccgaacaaacacca

SEQ ID NO: 354774 - DNA, 850 bp, Homo sapiens
tgattctcctgtctcagcctcctgagtagctgggattacaggtgtgcaccactaccacttggctaatttttatacttttagtagagatggggtttcaccatattggccaggctggccttgaactcctgacctcagatgatccgcccgcctcggcctcccaaagtgctggggttacaggcgtgagccaccgcacccggcccccttccttcgtcttagtcaatcctatcccacctcttcttccaccagtcccctcacctgatggtcccaacacttcatcatccaccacctcctggagggggtaccccgaggtgctccgctggggactctgctcattctggcggtgcggttgacggctggtcgtgatctttcccgtaatctgtcccctcttacggaacctagtctccgttctgtccatggccttcttctggacactgctaggatccagaagagtatgttatcaattctcaagcctaggagaagtcaggagtggagaacagctctgagaagatactgttgtccaactgatctccaggcaccacggagtccggtccctccaatcaggaaggtcggaatctctgatgtcatcgttcatgccaacctggcaaccagtttgaaaaaaaaacacatgtaactgccaggctgatctcttgtcctggagatcctgggtgaatggtatctcctgccactgtcccaacctcagaccattgtccaaaagcatcttcagggactccacatccctctgttccctgtcccagcagaggctgtgtcctctccactcaaagcctgaagcatgttggggtctcttcgtctctgtacgtgcccatttcagagtccagtctggtgggagagg

SEQ ID NO: 354775 - DNA, 317 bp, Homo sapiens
gttgttgttgttgagaaacagttccagcctgggcaacaagagcaaaactccatctcaaaaaaaataaagaacctgcgagtgagttcccacacgttttcctgatgggctgctgctttcctaggagtctctcgctcatagaaaaggcacaaactgaaagaggaagcagatcccattgctgtggaagtcccattgttaggaagctctgcttttgctggagtgcagtggcacgatcttggctcactgcaacctctgcctcctgggttcaagcgattctcctgcctcagcctcccaagtagctgggattacaggcatgtgcc

SEQ ID NO: 354776 - DNA, 355 bp, Homo sapiens
tccacctcagcctcccaaagtgttgggattacaggcacgagccaccacacctggccgggaggagacagggtttagactcagggtgggaggaggggagcccctgctcctcatctgtggcctctgtgtcttcctaggatcaccattaacaaggacaccaaggtacccaatgcctgtttattcaccatcaacaaagaagaccacacactgggaaacatcattaaatcgtaagtttcccgtcacaggctctcaggggctgtgtttaatgggcccctctgggcaaagcacaagttccaagtcttcctcagtctctctgagctacaggaagtccttctgggggcttgctctgggcatttta

SEQ ID NO: 354777 - DNA, 1894 bp, Homo sapiens
aggcctcttattagggctctggtggcggcggcggcagacacttggggtctggacgcaacggaggcgggagcgtgaacgcccctccagccttcgagtcgttcttgctcttcgagggcgagaagaagatcaccattaacaaggacaccaaggtacccaatgcctgtttattcaccatcaacaaagaagaccacacactgggaaacatcattaaatcacagtgtgacctaaaggacccgcaagtgctatttgctggctacaaagtcccccaccccttggagcacaagatcatcatccgagtgcagaccacgccggactacagcccccaggaagcctttaccaacgccatcaccgacctcatcagtgagctgtccctgctggaggagcgcttccgggtgagggcggggcctggaggggcagacggggtgggctggacactggcccgtgtgcccaggcctgggacagccctggcctgtttcttcggaggtcctgggggagaggcggcggtgatggaagagcagggacttccaccacaggctccaggacatgtggactgaggggctgtggagtctgggcctgtggctcccgtctgccccatgggacttctgtagtgctgcagggtccctcgggtgctgtgggccagatcagggcggggacctactgtcctttgggggtgctcttctatgtcccttgtcggtgattggcaaggcctggtccttccaggcctctgggaggcagctcacaccagggtggcccacacctgttcctggcagggcgcctgggaatctagaacagtttagaggggaaagagccacagcaaagaaaagccgaggcagggtgatcacgaggtcaggagttcaagaccagcctggcaaacatggtgaagccctgtctctactaaaaatacaaaaattagctaggcatggtgtcatgtgctgtagtcccagctactcaggaggctgaggcaggagaatcgcttgaacccgggaggcggaggttgcggtgagccgagattgtgccactgcactccagcctaggtaacagagcaggactccatctcagtcaatcaatcaatcaatcaatctcagcggttgaactacccttgacatggttcagctctgtatccacacccaaatctcatgtcaaattgtaattcccagtgttgtgggagggacctggtgggaggtgattggctcatgggggccgacttcccccttgctgttctcgtgatattgagtgagcgcttgtgggatctggttgtttaaaagcttgcagccctcccacttcactctctctgtctctcctgctccaacatggccagacgtgcctgcttccccttcgccttctgccgtgattgtcagtttcctgaggcctccccagccacgctttctgtacagcctgcagaactctgccccagagcacatcagctatgtgccccagctctcaaacgacaccctggcggggaggctcaccctgtccaccttcacgctggagcagcctctaggccagttcagcagccacaacatctctgacttggataccatctggctggtggtggccctcagcaacgccacccagagcttcacggccccacggacaaaccaggacatccctgctcctgccaacttctcccagaggggctactatctcacactgagggccaaccgggtgctgtaccaggccagaggccagctccatgtcctccgtgttggcaatgatacccactgccaaccaacaaaaattggctgcaaccatcccctaccaggaccgagcccctacagggtgaagttcctggtgatgaatgacaaaggacccgtggctgaaacaaagtggtccagcaacactcgcctgcagcaagcccaggcacttcgggctgtccctggcccccagagcccgg

SEQ ID NO: 354778 - DNA, 1802 bp, Homo sapiens
tccacctcagcctcccaaagtgttgggattacaggcacgagccaccacacctggccgggaggagacagggtttagactcagggtgggaggaggggagcccctgctcctcatctgtggcctctgtgtcttcctaggatcaccattaacaaggacaccaaggtacccaatgcctgtttattcaccatcaacaaagaagaccacacactgggaaacatcattaaatcacagtgtgacctaaaggacccgcaagtgctatttgctggctacaaagtcccccaccccttggagcacaagatcatcatccgagtgcagaccacgccggactacagcccccaggaagcctttaccaacgccatcaccgacctcatcagtgagctgtccctgctggaggagcgcttccgggtgagggcggggcctggaggggcagacggggtgggctggacactggcccgtgtgcccaggcctgggacagccctggcctgtttcttcggaggtcctgggggagaggcggcggtgatggaagagcagggacttccaccacaggctccaggacatgtggactgaggggctgtggagtctgggcctgtggctcccgtctgccccatgggacttctgtagtgctgcagggtccctcgggtgctgtgggccagatcagggcggggacctactgtcctttgggggtgctcttctatgtcccttgtcggtgattggcaaggcctggtccttccaggcctctgggaggcagctcacaccagggtggcccacacctgttcctggcagggcgcctgggaatctagaacagtttagaggggaaagagccacagcaaagaaaagccgaggcagggtgatcacgaggtcaggagttcaagaccagcctggcaaacatggtgaagccctgtctctactaaaaatacaaaaattagctaggcatggtgtcatgtgctgtagtcccagctactcaggaggctgaggcaggagaatcgcttgaacccgggaggcggaggttgcggtgagccgagattgtgccactgcactccagcctaggtaacagagcaggactccatctcagtcaatcaatcaatcaatcaatctcagcggttgaactacccttgacatggttcagctctgtatccacacccaaatctcatgtcaaattgtaattcccagtgttgtgggagggacctggtgggaggtgattggctcatgggggccgacttcccccttgctgttctcgtgatattgagtgagcgcttgtgggatctggttgtttaaaagcttgcagccctcccacttcactctctctgtctctcctgctccaacatggccagacgtgcctgcttccccttcgccttctgccgtgattgtcagtttcctgaggcctccccagccacgctttctgtacagcctgcagaactgtgagtcaattaaacctcttttcttcataaaaaaaaaaaaaaaaaaaaatttgtggggggggcggggccggaaaaaggttttaacaccacgtggtggggcgccgcgggcgccaagaggtgtaactggcgccctggccacagcgctgggcaaaaaagaaaccgggcaagacacaggggtgggttccccccccataaaagaaccgcgggggcacccgcggtgtcgacccgaacccaggggggttcgggggcagcgtggcttaacaccacggtccacggagtcgattacgccccccggggggggtcaggcaggcacagacccacacgcacacggaccacgccacaccgtcaggatcaacccgatgcatcatccactccgaacaaacacca

SEQ ID NO: 354779 - DNA, 642 bp, Homo sapiens
aggcctcttattagggctctggtggcggcggcggcagacacttggggtctggacgcaacggaggcgggagcgtgaacgcccctccagccttcgagtcgttcttgctcttcgagggcgagaagaagatcaccattaacaaggacaccaaggtacccaatgcctgtttattcaccatcaacaaagaagaccacacactgggaaacatcattaaatcacagtgtgacctaaaggacccgcaagtgctatttgctggctacaaagtcccccaccccttggagcacaagatcatcatccgagtgcagaccacgccggactacagcccccaggaagcctttaccaacgccatcaccgacctcatcagtgagctgtccctgctggaggagcgcttccgggagtctctcgctcatagaaaaggcacaaactgaaagaggaagcagatcccattgctgtggaagtcccattgttaggaagctctgcttttctggagttcaaattcgcattcatgacgctttaaaccgtcagagctgggtgggtcctcctacaacaaaatcgtttgctctctctctcctagttaacaggctttcaaatattagaagatcaatgttctgaccccattaaaatttctcttttgtggaatgaaaa

SEQ ID NO: 354780 - DNA, 1265 bp, Homo sapiens
tcagcccccgactagcccgacagcccccgactagcccgacagcccccgactagcccgacagcacccatgggacttctgtagtgctgcagggtccctcgggtgctgtgggccagatcagggcggggacctactgtcctttgggggtgctcttctatgtcccttgtcggtgattggcaaggcctggtccttccaggcctctgggaggcagctcacaccagggtggcccacacctgttcctggcagggcgcctgggaatctagaacagtttagaggggaaagagccacagcaaagaaaagccgaggcagggtgatcacgaggtcaggagttcaagaccagcctggcaaacatggtgaagccctgtctctactaaaaatacaaaaattagctaggcatggtgtcatgtgctgtagtcccagctactcaggaggctgaggcaggagaatcgcttgaacccgggaggcggaggttgcggtgagccgagattgtgccactgcactccagcctaggtaacagagcaggactccatctcagtcaatcaatcaatcaatcaatctcagcggttgaactacccttgacatggttcagctctgtatccacacccaaatctcatgtcaaattgtaattcccagtgttgtgggagggacctggtgggaggtgattggctcatgggggccgacttcccccttgctgttctcgtgatattgagtgagcgcttgtgggatctggttgtttaaaagcttgcagccctcccacttcactctctctgtctctcctgctccaacatggccagacgtgcctgcttccccttcgccttctgccgtgattgtcagtttcctgaggcctccccagccacgctttctgtacagcctgcagaactgtgagtcaattaaacctcttttcttcataaaaaaaaaaaaaaaaaaaaatttgtggggggggcggggccggaaaaaggttttaacaccacgtggtggggcgccgcgggcgccaagaggtgtaactggcgccctggccacagcgctgggcaaaaaagaaaccgggcaagacacaggggtgggttccccccccataaaagaaccgcgggggcacccgcggtgtcgacccgaacccaggggggttcgggggcagcgtggcttaacaccacggtccacggagtcgattacgccccccggggggggtcaggcaggcacagacccacacgcacacggaccacgccacaccgtcaggatcaacccgatgcatcatccactccgaacaaacacca

SEQ ID NO: 354781 - DNA, 380 bp, Homo sapiens
gcgtgatctcagctcactgcaacctcttcctcccagtctcaagtgattctcctgtctcagcctcctgagtagctgggattacaggtgtgcaccactaccacttggctaatttttatacttttagtagagatggggtttcaccatattggccaggctggccttgaactcctgacctcagatgatccgcccgcctcggcctcccaaagtgctggggttacaggcgtgagccaccgcacccggcccccttccttcgtcttagtcaatcctatcccacctcttcttccaccagtcccctcacctgatggtcccaacacttcatcatccaccacctcctggagggggtaccccgaggtgctccgctggggactctgctcattctg

SEQ ID NO: 354782 - DNA, 968 bp, Homo sapiens
aggcctcttattagggctctggtggcggcggcggcagacacttggggtctggacgcaacggaggcgggagcgtgaacgcccctccagccttcgagtcgttcttgctcttcgagggcgagaagaagatcaccattaacaaggacaccaaggtacccaatgcctgtttattcaccatcaacaaagaagaccacacactgggaaacatcattaaatcacagtgtgacctaaaggacccgcaagtgctatttgctggctacaaagtcccccaccccttggagcacaagatcatcatccgagtgcagaccacgccggactacagcccccaggaagcctttaccaacgccatcaccgacctcatcagtgagctgtccctgctggaggagcgcttccggacgtgcctgcttccccttcgccttctgccgtgattgtcagtttcctgaggcctccccagccacgctttctgtacagcctgcagaactctgccccagagcacatcagctatgtgccccagctctcaaacgacaccctggcggggaggctcaccctgtccaccttcacgctggagcagcctctaggccagttcagcagccacaacatctctgacttggataccatctggctggtggtggccctcagcaacgccacccagagcttcacggccccacggacaaaccaggacatccctgctcctgccaacttctcccagaggggctactatctcacactgagggccaaccgggtgctgtaccaggccagaggccagctccatgtcctccgtgttggcaatgatacccactgccaaccaacaaaaattggctgcaaccatcccctaccaggaccgagcccctacagggtgaagttcctggtgatgaatgacaaaggacccgtggctgaaacaaagtggtccagcaacactcgcctgcagcaagcccaggcacttcgggctgtccctggcccccagagcccgg

SEQ ID NO: 354783 - DNA, 996 bp, Homo sapiens
aggcctcttattagggctctggtggcggcggcggcagacacttggggtctggacgcaacggaggcgggagcgtgaacgcccctccagccttcgagtcgttcttgctcttcgagggcgagaagaagatcaccattaacaaggacaccaaggtacccaatgcctgtttattcaccatcaacaaagaagaccacacactgggaaacatcattaaatcacagtgtgacctaaaggacccgcaagtgctatttgctggctacaaagtcccccaccccttggagcacaagatcatcatccgagtgcagaccacgccggactacagcccccaggaagcctttaccaacgccatcaccgacctcatcagtgagctgtccctgctggaggagcgcttccggtcccctcacctgatggtcccaacacttcatcatccaccacctcctggagggggtaccccgaggtgctccgctggggactctgctcattctggcggtgcggttgacggctggtcgtgatctttcccgtaatctgtcccctcttacggaacctagtctccgttctgtccatggccttcttctggacactgctaggatccagaagagtatgttatcaattctcaagcctaggagaagtcaggagtggagaacagctctgagaagatactgttgtccaactgatctccaggcaccacggagtccggtccctccaatcaggaaggtcggaatctctgatgtcatcgttcatgccaacctggcaaccagtttgaaaaaaaaacacatgtaactgccaggctgatctcttgtcctggagatcctgggtgaatggtatctcctgccactgtcccaacctcagaccattgtccaaaagcatcttcagggactccacatccctctgttccctgtcccagcagaggctgtgtcctctccactcaaagcctgaagcatgttggggtctcttcgtctctgtacgtgcccatttcagagtccagtctggtgggagagg

SEQ ID NO: 354784 - DNA, 1792 bp, Homo sapiens
aggcctcttattagggctctggtggcggcggcggcagacacttggggtctggacgcaacggaggcgggagcgtgaacgcccctccagccttcgagtcgttcttgctcttcgagggcgagaagaagatcaccattaacaaggacaccaaggtacccaatgcctgtttattcaccatcaacaaagaagaccacacactgggaaacatcattaaatcacagtgtgacctaaaggacccgcaagtgctatttgctggctacaaagtcccccaccccttggagcacaagatcatcatccgagtgcagaccacgccggactacagcccccaggaagcctttaccaacgccatcaccgacctcatcagtgagctgtccctgctggaggagcgcttccgggtgagggcggggcctggaggggcagacggggtgggctggacactggcccgtgtgcccaggcctgggacagccctggcctgtttcttcggaggtcctgggggagaggcggcggtgatggaagagcagggacttccaccacaggctccaggacatgtggactgaggggctgtggagtctgggcctgtggctcccgtctgccccatgggacttctgtagtgctgcagggtccctcgggtgctgtgggccagatcagggcggggacctactgtcctttgggggtgctcttctatgtcccttgtcggtgattggcaaggcctggtccttccaggcctctgggaggcagctcacaccagggtggcccacacctgttcctggcagggcgcctgggaatctagaacagtttagaggggaaagagccacagcaaagaaaagccgaggcagggtgatcacgaggtcaggagttcaagaccagcctggcaaacatggtgaagccctgtctctactaaaaatacaaaaattagctaggcatggtgtcatgtgctgtagtcccagctactcaggaggctgaggcaggagaatcgcttgaacccgggaggcggaggttgcggtgagccgagattgtgccactgcactccagcctaggtaacagagcaggactccatctcagtcaatcaatcaatcaatcaatctcagcggttgaactacccttgacatggttcagctctgtatccacacccaaatctcatgtcaaattgtaattcccagtgttgtgggagggacctggtgggaggtgattggctcatgggggccgacttcccccttgctgttctcgtgatattgagtgagcgcttgtgggatctggttgtttaaaagcttgcagccctcccacttcactctctctgtctctcctgctccaacatggccagacgtgcctgcttccccttcgccttctgccgtgattgtcagtttcctgaggcctccccagccacgctttctgtacagcctgcagaactgtgagtcaattaaacctcttttcttcataaaaaaaaaaaaaaaaaaaaatttgtggggggggcggggccggaaaaaggttttaacaccacgtggtggggcgccgcgggcgccaagaggtgtaactggcgccctggccacagcgctgggcaaaaaagaaaccgggcaagacacaggggtgggttccccccccataaaagaaccgcgggggcacccgcggtgtcgacccgaacccaggggggttcgggggcagcgtggcttaacaccacggtccacggagtcgattacgccccccggggggggtcaggcaggcacagacccacacgcacacggaccacgccacaccgtcaggatcaacccgatgcatcatccactccgaacaaacacca

SEQ ID NO: 354785 - DNA, 1719 bp, Homo sapiens
gtgttactttccttgaagacttttgggaaaaaaagttgggggggatttttggctagaaagtctgttcttctgctctgatctggctgctacccagcttgggcatgaggctagaccctcacactgtctgtccctggacctcagacagtgtgacctaaaggacccgcaagtgctatttgctggctacaaagtcccccaccccttggagcacaagatcatcatccgagtgcagaccacgccggactacagcccccaggaagcctttaccaacgccatcaccgacctcatcagtgagctgtccctgctggaggagcgcttccgggtgagggcggggcctggaggggcagacggggtgggctggacactggcccgtgtgcccaggcctgggacagccctggcctgtttcttcggaggtcctgggggagaggcggcggtgatggaagagcagggacttccaccacaggctccaggacatgtggactgaggggctgtggagtctgggcctgtggctcccgtctgccccatgggacttctgtagtgctgcagggtccctcgggtgctgtgggccagatcagggcggggacctactgtcctttgggggtgctcttctatgtcccttgtcggtgattggcaaggcctggtccttccaggcctctgggaggcagctcacaccagggtggcccacacctgttcctggcagggcgcctgggaatctagaacagtttagaggggaaagagccacagcaaagaaaagccgaggcagggtgatcacgaggtcaggagttcaagaccagcctggcaaacatggtgaagccctgtctctactaaaaatacaaaaattagctaggcatggtgtcatgtgctgtagtcccagctactcaggaggctgaggcaggagaatcgcttgaacccgggaggcggaggttgcggtgagccgagattgtgccactgcactccagcctaggtaacagagcaggactccatctcagtcaatcaatcaatcaatcaatctcagcggttgaactacccttgacatggttcagctctgtatccacacccaaatctcatgtcaaattgtaattcccagtgttgtgggagggacctggtgggaggtgattggctcatgggggccgacttcccccttgctgttctcgtgatattgagtgagcgcttgtgggatctggttgtttaaaagcttgcagccctcccacttcactctctctgtctctcctgctccaacatggccagacgtgcctgcttccccttcgccttctgccgtgattgtcagtttcctgaggcctccccagccacgctttctgtacagcctgcagaactgtgagtcaattaaacctcttttcttcataaaaaaaaaaaaaaaaaaaaatttgtggggggggcggggccggaaaaaggttttaacaccacgtggtggggcgccgcgggcgccaagaggtgtaactggcgccctggccacagcgctgggcaaaaaagaaaccgggcaagacacaggggtgggttccccccccataaaagaaccgcgggggcacccgcggtgtcgacccgaacccaggggggttcgggggcagcgtggcttaacaccacggtccacggagtcgattacgccccccggggggggtcaggcaggcacagacccacacgcacacggaccacgccacaccgtcaggatcaacccgatgcatcatccactccgaacaaacacca

SEQ ID NO: 354786 - DNA, 2041 bp, Homo sapiens
caacatttcagtgtcaagtggtccattagtagtctcttgacttacacacagaaagcctgtctgtattttttgtactcattggttagaaactacagcacattatttttcttcaagctgtattttatgtagaggaaaaacagttggtatatctgtgttgatgttgattcatatatattgggtattttatttatttttatagtaaaatgtattttgacaaatgtaaaatgaaaaggggaagatatctaaattcttgaatttgtttttataggagttccatctggaatatgacaaattagaagaacggcctcacctgccatccaccttcaactacaaccctgctcagcaagccttctaaaaaaaaaaaaaaaaaaaaaaaaaaagacttcccttttcttggggtatggctgtctcagcacaatactcaacataactgcagaactgatgtggctcaggcaccctggttttaattccttgaggatctggcaattggcttacgcaaaaggtcaccatttgaggtcctgccttactaattatgtgctgcccaacaactaaatttgtaatttgtttttctctagtttgagcagggtctgaattttttcatttatttccttttttgccagcagacagacttgagtctgtaaagacaagcaaatacactgacagaagtttaccatagtttctaaaatgtaaaaaagaaaacccccaaaagactcaagaaaattagaccacaaattttgcattgttcattgtagcactattggtaataaaataacaaatgtttgtgcatttttatgtgaagatccttctcgtatttcatttggaaagatgagcaagaggtctgcttccttcattttacttccccttctgtttttgaaaggcagtttcgccaagcttaatgcaagaatatctgactgtttagaagaaagatattgccacaatctctggatggttttccagggttgtgttattactgagcttcatctttccagaatgagcaaaacactgtccagtctttgttacgattttgtaataaatgtgtacattttttttaaatttttggacatcacatgaataaaggtatgtatgtacgaatgtgtatatattatatatatgacatctattttggaaaatgtttgccctgctgtacctcatttttaggaggtgtgcatggatgcaatatatgaaaatgggacattctggaactgctggtcaggggactttgtcgccctgtgcactaaaagggccagattttcagcagccaaggacatccatacccaagtgaatgtgatgggacttaaaagaagtgaactgagacaattcactctggctgtttgaacagcagcgtttcataggaagagaaaaaaagatcaatcttgtattttctgaccacataaaggcttcttctctttgtaataaagtagaaaagctctcctcaaaaaaaaaaaaaaaaaaaaaaaaaaaaaaaaaaaaaaaaaaaaaaaaaaaaaaaaaaaaaaccaacaaaacaaaaaaaaaaaaaaaaaaaagaaaaaaaaaagaaagaacaagaaggagccaacaaaaaaaaaagagaagcgacaaaaaagaaaacacacacaaacaacaaaaaaccaggacgaaacaaccacaaggggatgcgcctccacaaacaaccgcaacgcgtggaaaacattgagagaagcggcaccctaactattaggttgggaggctgggacacacgccccgcagcaccagccacaacacacgacacaagagcaacgagctgccaacccagacccagcagcgatcaactaactaacaccaacagtacagaagaacgagaaaccaaaaacgccgtcgacaacagacacagcaggtaaactacaaaagagccgccacctcgcacaggtcatcggtgtacacccaaaaacgactggacgccagacaccaaaaacccaagcatactacacacgacgaactccagccacacaagacagacctacaccgcagacgacaaccagagaaggacacccaacaaacacacactcagagagaacaagac

SEQ ID NO: 354787 - DNA, 598 bp, Homo sapiens
cacgtacagctgtacaaaaatattttcttcccttatattcatacttagcttttttctatttgaatttttttgtttttttactttttagatgtttttgttttgttgaaaactgatacacacactcatgtatttgcttaggtctatcaaggcatcactaggcaataggaatttttcagcttgtttataatcttacgggaccaccgttgtatatatggtccatcattgactgaaatgtcatgctgcacatgactgtcgtttattaaaatttttatttaccaaattaactttttaacatacgttgtaaccagtaatttcaatgtatttcgatataattgacatatcctctttgaaatttatagaaattgatttttatgtaccctaatttctctttcagggagaagatgggtatagtttaaccctttcatatcatccatccatccattcctactagttctgcctcagagtatatcctttattcaactactactcaccaccctattaggccatcattatctatcactggcctcctaatgcattttcctgctttcgttttataccctctttagcccattcctcatggagtagctaggacctttaa

SEQ ID NO: 354788 - DNA, 801 bp, Homo sapiens
ccgcagtccccctcggactcagggccagagccttctgcgaagcaacctagccccagggaaacggtagcggccgcagaagccccgctctctgtaacggccgcggaggagcagcaagcctccctgtgagtcggtgggagacaagacggagcggcggtaagggcggtagggaagtgaagcgcctctctccaccttgttagaagcgcgctgaaagcggcctgcctacccaccccatcgctgccgttttgcagtcgtcgctcccaccttccgctgccgcctggagggaagccggagcgacgggggtcacggcggcggtcagagggtaaaggtcttgctcccagcagcctccgcggtggatacgtcgccatcttggatccgcgggacaagaaaattcatgcgagggagacgtggtgggcggtccttcctgtgacacgacccttgagtgacagttctatttgattgcctccggtactgtgaggaaaggacacgactctatggtgaggactgatggacatacattatctgagaaaagaaactaccagcctccagctctgagctttccaatccccagagtagcaaatgttgaaagaagttgcacagggagaagatgggtatagtttaaccctttcatatcatccatccatccattcctactagttctgcctcagagtatatcctttattcaactactactcaccaccctattaggccatcattatctatcactggcctcctaatgcattttcctgctttcgttttataccctctttagcccattcctcatggagtagctaggacctttaa

SEQ ID NO: 354789 - DNA, 707 bp, Homo sapiens
gaaagagtagtgctgctgtaactcaagttagtgtgacttttagaaaacttatagtattaaaaattaatttcatttctacagtttggttttatcgaattgtgatattctcttaagaaacatggaatatattatagaatgtttgttttatgtttttctgaagaatgagaaaatgttagattttcacatttatggtatgatttacagatttgtggagtgtaaatgcaatgctctgctctgttttctttatgctctaatataattaatttgtttctagatgctggcatcaccatctacatcaggtcagctgtctcagtttggggcaagtttatacgggcaacaaaacggaagtgaaaatgtgacaggattggacctttcagatttcccagcattagcagaccgaaacaggagggaaggaagtggtaacccaactccattaataaaccccttggctggaagagctccttatggtaattaagctttttaatgatggccagtagaaagtttccattgtatgtgcacacacatatacatttacatgtacgtatacatatgcttgtgtgtgtacacatgtatgtttgcattttctaatcaggttagtgtaattttttcagaattgatatattagaagtgatttttcttcccagaataccatgatagcaaagttaaatgggaaaactttgtacaaaaacccaagaggaagtcctcat

SEQ ID NO: 354790 - DNA, 3194 bp, Homo sapiens
ccgcagtccccctcggactcagggccagagccttctgcgaagcaacctagccccagggaaacggtagcggccgcagaagccccgctctctgtaacggccgcggaggagcagcaagcctccctgtgagtcggtgggagacaagacggagcggcggtaagggcggtagggaagtgaagcgcctctctccaccttgttagaagcgcgctgaaagcggcctgcctacccaccccatcgctgccgttttgcagtcgtcgctcccaccttccgctgccgcctggagggaagccggagcgacgggggtcacggcggcggtcagagggtaaaggtcttgctcccagcagcctccgcggtggatacgtcgccatcttggatccgcgggacaagaaaattcatgcgagggagacgtggtgggcggtccttcctgtgacacgacccttgagtgacagttctatttgattgcctccggtactgtgaggaaaggacacgactctatggtgaggactgatggacatacattatctgagaaaagaaactaccaggtgacaaacagcatgtttggtgcttcaagaaagaagtttgtagagggggtcgacagtgactaccatgacgaaaacatgtactacagccagtcttctatgtttccacatcggtcagaaaaagatatgctggcatcaccatctacatcaggtcagctgtctcagtttggggcaagtttatacgggcaacaaagtgcactaggccttccaatgagggggatgagcaacaatacccctcagttaaatcgcagcttatcacaaggcactcagttaccgagccacgtcacgccaacaacaggggtaccaacaatgtcacttcacacgcctccatctccaagcaggggtattttgcctatgaatcctaggaatatgatgaaccactcccaggttggtcagggcattggaattcctagcaggacaaatagcatgagcagttcagggttaggtagccccaacagaagctcgccaagcataatatgtatgccaaagcagcagccttctcgacagccttttactgtgaacagtatgtctggatttggaatgaacaggaatcaggcatttggaatgaataactccttatcaagtaacatttttaatggaacagacggaagtgaaaatgtgacaggattggacctttcagatttcccagcattagcagaccgaaacaggagggaaggaagtggtaacccaactccattaataaaccccttggctggaagagctccttatgttggaatggtaacaaaaccagcaaatgaacaatcccaggacttctcaatacacaatgaagattttccagcattaccaggctccagctataaagatccaacatcaagtaatgatgacagtaaatctaatttgaatacatctggcaagacaacttcaagtacagatggacccaaattccctggagataaaagttcaacaacacaaaataataaccagcagaaaaaagggatccaggtgttacctgatggtcgggttactaacattcctcaagggatggtgacggaccaatttggaatgattggcctgttaacatttatcagggcagcagagacagacccaggaatggtacatcttgcattaggaagtgacttaacaacattaggcctcaatctgaactctcctgaaaatctctaccccaaatttgcgtcaccctgggcatcttcaccttgtcgacctcaagacatagacttccatgttccatctgagtacttaacgaacattcacattagggataagctggctgcaataaaacttggccgatatggtgaagaccttctcttctatctctattacatgaatggaggagacgtattacaacttttagctgcagtggagctttttaaccgtgattggagataccacaaagaagaacgagtatggattaccagggcaccaggcatggagccaacaatgaaaaccaatacctatgagaggggaacatattacttctttgactgtcttaactggaggaaagtagctaaggagttccatctggaatatgacaaattagaagaacggcctcacctgccatccaccttcaactacaaccctgctcagcaagccttctaaaaaaaaaaaaaaaaaaaaaaaaaaagacttcccttttcttggggtatggctgtctcagcacaatactcaacataactgcagaactgatgtggctcaggcaccctggttttaattccttgaggatctggcaattggcttacgcaaaaggtcaccatttgaggtcctgccttactaattatgtgctgcccaacaactaaatttgtaatttgtttttctctagtttgagcagggtctgaattttttcatttatttccttttttgccagcagacagacttgagtctgtaaagacaagcaaatacactgacagaagtttaccatagtttctaaaatgtaaaaaagaaaacccccaaaagactcaagaaaattagaccacaaattttgcattgttcattgtagcactattggtaataaaataacaaatgtttgtgcatttttatgtgaagatccttctcgtatttcatttggaaagatgagcaagaggtctgcttccttcattttacttccccttctgtttttgaaaggcagtttcgccaagcttaatgcaagaatatctgactgtttagaagaaagatattgccacaatctctggatggttttccagggttgtgttattactgagcttcatctttccagaatgagcaaaacactgtccagtctttgttacgattttgtaataaatgtgtacattttttttaaatttttggacatcacatgaataaaggtatgtatgtacgaatgtgtatatattatatatatgacatctattttggaaaatgtttgccctgctgtacctcatttttaggaggtgtgcatggatgcaatatatgaaaatgggacattctggaactgctggtcaggggactttgtcgccctgtgcactaaaagggccagattttcagcagccaaggacatccatacccaagtgaatgtgatgggacttaaaagaagtgaactgagacaattcactctggctgtttgaacagcagcgtttcataggaagagaaaaaaagatcaatcttgtattttctgaccacataaaggcttcttctctttgtaataaagtagaaaagctctcctca

SEQ ID NO: 354791 - DNA, 3800 bp, Homo sapiens
ccgcagtccccctcggactcagggccagagccttctgcgaagcaacctagccccagggaaacggtagcggccgcagaagccccgctctctgtaacggccgcggaggagcagcaagcctccctgtgagtcggtgggagacaagacggagcggcggtaagggcggtagggaagtgaagcgcctctctccaccttgttagaagcgcgctgaaagcggcctgcctacccaccccatcgctgccgttttgcagtcgtcgctcccaccttccgctgccgcctggagggaagccggagcgacgggggtcacggcggcggtcagagggtaaaggtcttgctcccagcagcctccgcggtggatacgtcgccatcttggatccgcgggacaagaaaattcatgcgagggagacgtggtgggcggtccttcctgtgacacgacccttgagtgacagttctatttgattgcctccggtactgtgaggaaaggacacgactctatggtgaggactgatggacatacattatctgagaaaagaaactaccaggtgacaaacagcatgtttggtgcttcaagaaagaagtttgtagagggggtcgacagtgactaccatgacgaaaacatgtactacagccagtcttctatgtttccacatcggtcagaaaaagatatgctggcatcaccatctacatcaggtcagctgtctcagtttggggcaagtttatacgggcaacaaagtgcactaggccttccaatgagggggatgagcaacaatacccctcagttaaatcgcagcttatcacaaggcactcagttaccgagccacgtcacgccaacaacaggggtaccaacaatgtcacttcacacgcctccatctccaagcaggggtattttgcctatgaatcctaggaatatgatgaaccactcccaggttggtcagggcattggaattcctagcaggacaaatagcatgagcagttcagggttaggtagccccaacagaagctcgccaagcataatatgtatgccaaagcagcagccttctcgacagccttttactgtgaacagtatgtctggatttggaatgaacaggaatcaggcatttggaatgaataactccttatcaagtaacatttttaatggaacagacggaagtgaaaatgtgacaggattggacctttcagatttcccagcattagcagaccgaaacaggagggaaggaagtggtaacccaactccattaataaaccccttggctggaagagctccttatgttggaatggtaacaaaaccagcaaatgaacaatcccaggacttctcaatacacaatgaagattttccagcattaccaggctccagctataaagatccaacatcaagtaatgatgacagtaaatctaatttgaatacatctggcaagacaacttcaagtacagatggacccaaattccctggagataaaagttcaacaacacaaaataataaccagcagaaaaaagggatccaggtgttacctgatggtcgggttactaacattcctcaagggatggtgacggaccaatttggaatgattggcctgttaacatttatcagggcagcagagacagacccaggaatggtacatcttgcattaggaagtgacttaacaacattaggcctcaatctgaactctcctgaaaatctctaccccaaatttgcgtcaccctgggcatcttcaccttgtcgacctcaagacatagacttccatgttccatctgagtacttaacgaacattcacattagggataagctggctgcaataaaacttggccgatatggtgaagaccttctcttctatctctattacatgaatggaggagacgtattacaacttttagctgcagtggagctttttaaccgtgattggagataccacaaagaagaacgagtatggattaccagggcaccaggcatggagccaacaatgaaaaccaatacctatgagaggggaacatattacttctttgactgtcttaactggaggaaagtagctaaggagttccatctggaatatgacaaattagaagaacggcctcacctgccatccaccttcaactacaaccctgctcagcaagccttctaaaaaaaaaaaaaaaaaaaaaaaaaaagacttcccttttcttggggtatggctgtctcagcacaatactcaacataactgcagaactgatgtggctcaggcaccctggttttaattccttgaggatctggcaattggcttacgcaaaaggtcaccatttgaggtcctgccttactaattatgtgctgcccaacaactaaatttgtaatttgtttttctctagtttgagcagggtctgaattttttcatttatttccttttttgccagcagacagacttgagtctgtaaagacaagcaaatacactgacagaagtttaccatagtttctaaaatgtaaaaaagaaaacccccaaaagactcaagaaaattagaccacaaattttgcattgttcattgtagcactattggtaataaaataacaaatgtttgtgcatttttatgtgaagatccttctcgtatttcatttggaaagatgagcaagaggtctgcttccttcattttacttccccttctgtttttgaaaggcagtttcgccaagcttaatgcaagaatatctgactgtttagaagaaagatattgccacaatctctggatggttttccagggttgtgttattactgagcttcatctttccagaatgagcaaaacactgtccagtctttgttacgattttgtaataaatgtgtacattttttttaaatttttggacatcacatgaataaaggtatgtatgtacgaatgtgtatatattatatatatgacatctattttggaaaatgtttgccctgctgtacctcatttttaggaggtgtgcatggatgcaatatatgaaaatgggacattctggaactgctggtcaggggactttgtcgccctgtgcactaaaagggccagattttcagcagccaaggacatccatacccaagtgaatgtgatgggacttaaaagaagtgaactgagacaattcactctggctgtttgaacagcagcgtttcataggaagagaaaaaaagatcaatcttgtattttctgaccacataaaggcttcttctctttgtaataaagtagaaaagctctcctcaaaaaaaaaaaaaaaaaaaaaaaaaaaaaaaaaaaaaaaaaaaaaaaaaaaaaaaaaaaaaaccaacaaaacaaaaaaaaaaaaaaaaaaaagaaaaaaaaaagaaagaacaagaaggagccaacaaaaaaaaaagagaagcgacaaaaaagaaaacacacacaaacaacaaaaaaccaggacgaaacaaccacaaggggatgcgcctccacaaacaaccgcaacgcgtggaaaacattgagagaagcggcaccctaactattaggttgggaggctgggacacacgccccgcagcaccagccacaacacacgacacaagagcaacgagctgccaacccagacccagcagcgatcaactaactaacaccaacagtacagaagaacgagaaaccaaaaacgccgtcgacaacagacacagcaggtaaactacaaaagagccgccacctcgcacaggtcatcggtgtacacccaaaaacgactggacgccagacaccaaaaacccaagcatactacacacgacgaactccagccacacaagacagacctacaccgcagacgacaaccagagaaggacacccaacaaacacacactcagagagaacaagac

SEQ ID NO: 354792 - DNA, 3224 bp, Homo sapiens
ccgcagtccccctcggactcagggccagagccttctgcgaagcaacctagccccagggaaacggtagcggccgcagaagccccgctctctgtaacggccgcggaggagcagcaagcctccctgtgagtcggtgggagacaagacggagcggcggtaagggcggtagggaagtgaagcgcctctctccaccttgttagaagcgcgctgaaagcggcctgcctacccaccccatcgctgccgttttgcagtcgtcgctcccaccttccgctgccgcctggagggaagccggagcgacgggggtcacggcggcggtcagagggtaaaggtcttgctcccagcagcctccgcggtggatacgtcgccatcttggatccgcgggacaagaaaattcatgcgagggagacgtggtgggcggtccttcctgtgacacgacccttgagtgacagttctatttgattgcctccggtactgtgaggaaaggacacgactctatggtgaggactgatggacatacattatctgagaaaagaaactaccaggtgacaaacagcatgtttggtgcttcaagaaagaagtttgtagagggggtcgacagtgactaccatgacgaaaacatgtactacagccagtcttctatgtttccacatcggtcagaaaaagatatgctggcatcaccatctacatcaggtcagctgtctcagtttggggcaagtttatacgggcaacaaagtgcactaggccttccaatgagggggatgagcaacaatacccctcagttaaatcgcagcttatcacaaggcactcagttaccgagccacgtcacgccaacaacaggggtaccaacaatgtcacttcacacgcctccatctccaagcaggggtattttgcctatgaatcctaggaatatgatgaaccactcccaggttggtcagggcattggaattcctagcaggacaaatagcatgagcagttcagggttaggtagccccaacagaagctcgccaagcataatatgtatgccaaagcagcagccttctcgacagccttttactgtgaacagtatgtctggatttggaatgaacaggaatcaggcatttggaatgaataactccttatcaagtaacatttttaatggaacagacggaagtgaaaatgtgacaggattggacctttcagatttcccagcattagcagaccgaaacaggagggaaggaagtggtaacccaactccattaataaaccccttggctggaagagctccttatgttggaatggtaacaaaaccagcaaatgaacaatcccaggacttctcaatacacaatgaagattttccagcattaccaggctccagctataaagatccaacatcaagtaatgatgacagtaaatctaatttgaatacatctggcaagacaacttcaagtacagatggacccaaattccctggagataaaagttcaacaacacaaaataataaccagcagaaaaaagggatccaggtgttacctgatggtcgggttactaacattcctcaagggatggtgacggaccaatttggaatgattggcctgttaacatttatcagggcagcagagacagacccaggaatggtacatcttgcattaggaagtgacttaacaacattaggcctcaatctgaactctcctgaaaatctctaccccaaatttgcgtcaccctgggcatcttcaccttgtcgacctcaagacatagacttccatgttccatctgagtacttaacgaacattcacattagggataagctggctgcaataaaacttggccgatatggtgaagaccttctcttctatctctattacatgaatggaggagacgtattacaacttttagctgcagtggagctttttaaccgtgattggagataccacaaagaagaacgagtatggattaccagggcaccaggcatggagccaacaatgaaaaccaatacctatgagaggggaacatattacttctttgactgtcttaactggaggaaagtagctaaggagttccatctggaatatgacaaattagaagaacggcctcacctgccatccaccttcaactacaaccctgctcagcaagccttctaaaaaaaaaaaaaaaaaaaaaaaaaaagattctcccttttctcttggggggttatgtggcctgtgtgtctctcagccaaaaatacctctcaaaattaactgtgcagaaaccgtgattgatgtggctcaggcaccctggttttaattccttgaggatctggcaattggcttacgcaaaaggtcaccatttgaggtcctgccttactaattatgtgctgcccaacaactaaatttgtaatttgtttttctctagtttgagcagggtctgaattttttcatttatttccttttttgccagcagacagacttgagtctgtaaagacaagcaaatacactgacagaagtttaccatagtttctaaaatgtaaaaaagaaaacccccaaaagactcaagaaaattagaccacaaattttgcattgttcattgtagcactattggtaataaaataacaaatgtttgtgcatttttatgtgaagatccttctcgtatttcatttggaaagatgagcaagaggtctgcttccttcattttacttccccttctgtttttgaaaggcagtttcgccaagcttaatgcaagaatatctgactgtttagaagaaagatattgccacaatctctggatggttttccagggttgtgttattactgagcttcatctttccagaatgagcaaaacactgtccagtctttgttacgattttgtaataaatgtgtacattttttttaaatttttggacatcacatgaataaaggtatgtatgtacgaatgtgtatatattatatatatgacatctattttggaaaatgtttgccctgctgtacctcatttttaggaggtgtgcatggatgcaatatatgaaaatgggacattctggaactgctggtcaggggactttgtcgccctgtgcactaaaagggccagattttcagcagccaaggacatccatacccaagtgaatgtgatgggacttaaaagaagtgaactgagacaattcactctggctgtttgaacagcagcgtttcataggaagagaaaaaaagatcaatcttgtattttctgaccacataaaggcttcttctctttgtaataaagtagaaaagctctcctca

SEQ ID NO: 354793 - DNA, 3043 bp, Homo sapiens
ccgcagtccccctcggactcagggccagagccttctgcgaagcaacctagccccagggaaacggtagcggccgcagaagccccgctctctgtaacggccgcggaggagcagcaagcctccctgtgagtcggtgggagacaagacggagcggcggtaagggcggtagggaagtgaagcgcctctctccaccttgttagaagcgcgctgaaagcggcctgcctacccaccccatcgctgccgttttgcagtcgtcgctcccaccttccgctgccgcctggagggaagccggagcgacgggggtcacggcggcggtcagagggtaaaggtcttgctcccagcagcctccgcggtggatacgtcgccatcttggatccgcgggacaagaaaattcatgcgagggagacgtggtgggcggtccttcctgtgacacgacccttgagtgacagttctatttgattgcctccggtactgtgaggaaaggacacgactctatggtgaggactgatggacatacattatctgagaaaagaaactaccaggtgacaaacagcatgtttggtgcttcaagaaagaagtttgtagagggggtcgacagtgactaccatgacgaaaacatgtactacagccagtcttctatgtttccacatcggtcagaaaaagatatgctggcatcaccatctacatcaggtcagctgtctcagtttggggcaagtttatacgggcaacaaagtgcactaggccttccaatgagggggatgagcaacaatacccctcagttaaatcgcagcttatcacaaggcactcagttaccgagccacgtcacgccaacaacaggggtaccaacaatgtcacttcacacgcctccatctccaagcaggggtattttgcctatgaatcctaggaatatgatgaaccactcccaggttggtcagggcattggaattcctagcaggacaaatagcatgagcagttcagggttaggtagccccaacagaagctcgccaagcataatatgtatgccaaagcagcagccttctcgacagccttttactgtgaacagtatgtctggatttggaatgaacaggaatcaggcatttggaatgaataactccttatcaagtaacatttttaatggaacagacggaagtgaaaatgtgacaggattggacctttcagatttcccacattaccaggctccagctataaagatccaacatcaagtaatgatgacagtaaatctaatttgaatacatctggcaagacaacttcaagtacagatggacccaaattccctggagataaaagttcaacaacacaaaataataaccagcagaaaaaagggatccaggtgttacctgatggtcgggttactaacattcctcaagggatggtgacggaccaatttggaatgattggcctgttaacatttatcagggcagcagagacagacccaggaatggtacatcttgcattaggaagtgacttaacaacattaggcctcaatctgaactctcctgaaaatctctaccccaaatttgcgtcaccctgggcatcttcaccttgtcgacctcaagacatagacttccatgttccatctgagtacttaacgaacattcacattagggataagctggctgcaataaaacttggccgatatggtgaagaccttctcttctatctctattacatgaatggaggagacgtattacaacttttagctgcagtggagctttttaaccgtgattggagataccacaaagaagaacgagtatggattaccagggcaccaggcatggagccaacaatgaaaaccaatacctatgagaggggaacatattacttctttgactgtcttaactggaggaaagtagctaaggagttccatctggaatatgacaaattagaagaacggcctcacctgccatccaccttcaactacaaccctgctcagcaagccttctaaaaaaaaaaaaaaaaaaaaaaaaaaagacttcccttttcttggggtatggctgtctcagcacaatactcaacataactgcagaactgatgtggctcaggcaccctggttttaattccttgaggatctggcaattggcttacgcaaaaggtcaccatttgaggtcctgccttactaattatgtgctgcccaacaactaaatttgtaatttgtttttctctagtttgagcagggtctgaattttttcatttatttccttttttgccagcagacagacttgagtctgtaaagacaagcaaatacactgacagaagtttaccatagtttctaaaatgtaaaaaagaaaacccccaaaagactcaagaaaattagaccacaaattttgcattgttcattgtagcactattggtaataaaataacaaatgtttgtgcatttttatgtgaagatccttctcgtatttcatttggaaagatgagcaagaggtctgcttccttcattttacttccccttctgtttttgaaaggcagtttcgccaagcttaatgcaagaatatctgactgtttagaagaaagatattgccacaatctctggatggttttccagggttgtgttattactgagcttcatctttccagaatgagcaaaacactgtccagtctttgttacgattttgtaataaatgtgtacattttttttaaatttttggacatcacatgaataaaggtatgtatgtacgaatgtgtatatattatatatatgacatctattttggaaaatgtttgccctgctgtacctcatttttaggaggtgtgcatggatgcaatatatgaaaatgggacattctggaactgctggtcaggggactttgtcgccctgtgcactaaaagggccagattttcagcagccaaggacatccatacccaagtgaatgtgatgggacttaaaagaagtgaactgagacaattcactctggctgtttgaacagcagcgtttcataggaagagaaaaaaagatcaatcttgtattttctgaccacataaaggcttcttctctttgtaataaagtagaaaagctctcctca

SEQ ID NO: 354794 - DNA, 3283 bp, Homo sapiens
ccgcagtccccctcggactcagggccagagccttctgcgaagcaacctagccccagggaaacggtagcggccgcagaagccccgctctctgtaacggccgcggaggagcagcaagcctccctgtgagtcggtgggagacaagacggagcggcggtaagggcggtagggaagtgaagcgcctctctccaccttgttagaagcgcgctgaaagcggcctgcctacccaccccatcgctgccgttttgcagtcgtcgctcccaccttccgctgccgcctggagggaagccggagcgacgggggtcacggcggcggtcagagggtaaaggtcttgctcccagcagcctccgcggtggatacgtcgccatcttggatccgcgggacaagaaaattcatgcgagggagacgtggtgggcggtccttcctgtgacacgacccttgagtgacagttctatttgattgcctccggtactgtgaggaaaggacacgactctatggtgaggactgatggacatacattatctgagaaaagaaactaccaggtgacaaacagcatgtttggtgcttcaagaaagaagtttgtagagggggtcgacagtgactaccatgacgaaaacatgtactacagccagtcttctatgtttccacatcggtcagaaaaagatatgctggcatcaccatctacatcaggtcagctgtctcagtttggggcaagtttatacgggcaacaaagtgcactaggccttccaatgagggggatgagcaacaatacccctcagttaaatcgcagcttatcacaaggcactcagttaccgagccacgtcacgccaacaacaggggtaccaacaatgtcacttcacacgcctccatctccaagcaggggtattttgcctatgaatcctaggaatatgatgaaccactcccaggttggtcagggcattggaattcctagcaggacaaatagcatgagcagttcagggttaggtagccccaacagaagctcgccaagcataatatgtatgccaaagcagcagccttctcgacagccttttactgtgaacagtatgtctggatttggaatgaacaggaatcaggcatttggaatgaataactccttatcaagtaacatttttaatggaacagacggaagtgaaaatgtgacaggattggacctttcagatttcccagcattagcagaccgaaacaggagggaaggaagtggtaacccaactccattaataaaccccttggctggaagagctccttatgttggaatggtaacaaaaccagcaaatgaacaatcccaggacttctcaatacacaatgaagattttccagcattaccaggctccagctataaagatccaacatcaagtaatgatgacagtaaatctaatttgaatacatctggcaagacaacttcaagtacagatggacccaaattccctggagataaaagttcaacaacacaaaataataaccagcagaaaaaagggatccaggtgttacctgatggtcgggttactaacattcctcaagggatggtgacggaccaatttggaatgattggcctgttaacatttatcagggcagcagagacagacccaggaatggtacatcttgcattaggaagtgacttaacaacattaggcctcaatctgaactctcctgaaaatctctaccccaaatttgcgtcaccctgggcatcttcaccttgtcgacctcaagacataggtaggagaatctatttgtgtttagaccttttaaaaagaaatttacaattgagaatcagttaataaggcttttttcattttattatccagacttccatgttccatctgagtacttaacgaacattcacattagggataagctggctgcaataaaacttggccgatatggtgaagaccttctcttctatctctattacatgaatggaggagacgtattacaacttttagctgcagtggagctttttaaccgtgattggagataccacaaagaagaacgagtatggattaccagggcaccaggcatggagccaacaatgaaaaccaatacctatgagaggggaacatattacttctttgactgtcttaactggaggaaagtagctaaggagttccatctggaatatgacaaattagaagaacggcctcacctgccatccaccttcaactacaaccctgctcagcaagccttctaaaaaaaaaaaaaaaaaaaaaaaaaaagacttcccttttcttggggtatggctgtctcagcacaatactcaacataactgcagaactgatgtggctcaggcaccctggttttaattccttgaggatctggcaattggcttacgcaaaaggtcaccatttgaggtcctgccttactaattatgtgctgcccaacaactaaatttgtaatttgtttttctctagtttgagcagggtctgaattttttcatttatttccttttttgccagcagacagacttgagtctgtaaagacaagcaaatacactgacagaagtttaccatagtttctaaaatgtaaaaaagaaaacccccaaaagactcaagaaaattagaccacaaattttgcattgttcattgtagcactattggtaataaaataacaaatgtttgtgcatttttatgtgaagatccttctcgtatttcatttggaaagatgagcaagaggtctgcttccttcattttacttccccttctgtttttgaaaggcagtttcgccaagcttaatgcaagaatatctgactgtttagaagaaagatattgccacaatctctggatggttttccagggttgtgttattactgagcttcatctttccagaatgagcaaaacactgtccagtctttgttacgattttgtaataaatgtgtacattttttttaaatttttggacatcacatgaataaaggtatgtatgtacgaatgtgtatatattatatatatgacatctattttggaaaatgtttgccctgctgtacctcatttttaggaggtgtgcatggatgcaatatatgaaaatgggacattctggaactgctggtcaggggactttgtcgccctgtgcactaaaagggccagattttcagcagccaaggacatccatacccaagtgaatgtgatgggacttaaaagaagtgaactgagacaattcactctggctgtttgaacagcagcgtttcataggaagagaaaaaaagatcaatcttgtattttctgaccacataaaggcttcttctctttgtaataaagtagaaaagctctcctca

SEQ ID NO: 354795 - DNA, 3252 bp, Homo sapiens
ccgcagtccccctcggactcagggccagagccttctgcgaagcaacctagccccagggaaacggtagcggccgcagaagccccgctctctgtaacggccgcggaggagcagcaagcctccctgtgagtcggtgggagacaagacggagcggcggtaagggcggtagggaagtgaagcgcctctctccaccttgttagaagcgcgctgaaagcggcctgcctacccaccccatcgctgccgttttgcagtcgtcgctcccaccttccgctgccgcctggagggaagccggagcgacgggggtcacggcggcggtcagagggtaaaggtcttgctcccagcagcctccgcggtggatacgtcgccatcttggatccgcgggacaagaaaattcatgcgagggagacgtggtgggcggtccttcctgtgacacgacccttgagtgacagttctatttgattgcctccggtactgtgaggaaaggacacgactctatggtgaggactgatggacatacattatctgagaaaagaaactaccagcctccagctctgagctttccaatccccagagtagcaaatgttgaaagaagttgcacaggtgacaaacagcatgtttggtgcttcaagaaagaagtttgtagagggggtcgacagtgactaccatgacgaaaacatgtactacagccagtcttctatgtttccacatcggtcagaaaaagatatgctggcatcaccatctacatcaggtcagctgtctcagtttggggcaagtttatacgggcaacaaagtgcactaggccttccaatgagggggatgagcaacaatacccctcagttaaatcgcagcttatcacaaggcactcagttaccgagccacgtcacgccaacaacaggggtaccaacaatgtcacttcacacgcctccatctccaagcaggggtattttgcctatgaatcctaggaatatgatgaaccactcccaggttggtcagggcattggaattcctagcaggacaaatagcatgagcagttcagggttaggtagccccaacagaagctcgccaagcataatatgtatgccaaagcagcagccttctcgacagccttttactgtgaacagtatgtctggatttggaatgaacaggaatcaggcatttggaatgaataactccttatcaagtaacatttttaatggaacagacggaagtgaaaatgtgacaggattggacctttcagatttcccagcattagcagaccgaaacaggagggaaggaagtggtaacccaactccattaataaaccccttggctggaagagctccttatgttggaatggtaacaaaaccagcaaatgaacaatcccaggacttctcaatacacaatgaagattttccagcattaccaggctccagctataaagatccaacatcaagtaatgatgacagtaaatctaatttgaatacatctggcaagacaacttcaagtacagatggacccaaattccctggagataaaagttcaacaacacaaaataataaccagcagaaaaaagggatccaggtgttacctgatggtcgggttactaacattcctcaagggatggtgacggaccaatttggaatgattggcctgttaacatttatcagggcagcagagacagacccaggaatggtacatcttgcattaggaagtgacttaacaacattaggcctcaatctgaactctcctgaaaatctctaccccaaatttgcgtcaccctgggcatcttcaccttgtcgacctcaagacatagacttccatgttccatctgagtacttaacgaacattcacattagggataagctggctgcaataaaacttggccgatatggtgaagaccttctcttctatctctattacatgaatggaggagacgtattacaacttttagctgcagtggagctttttaaccgtgattggagataccacaaagaagaacgagtatggattaccagggcaccaggcatggagccaacaatgaaaaccaatacctatgagaggggaacatattacttctttgactgtcttaactggaggaaagtagctaaggagttccatctggaatatgacaaattagaagaacggcctcacctgccatccaccttcaactacaaccctgctcagcaagccttctaaaaaaaaaaaaaaaaaaaaaaaaaaagacttcccttttcttggggtatggctgtctcagcacaatactcaacataactgcagaactgatgtggctcaggcaccctggttttaattccttgaggatctggcaattggcttacgcaaaaggtcaccatttgaggtcctgccttactaattatgtgctgcccaacaactaaatttgtaatttgtttttctctagtttgagcagggtctgaattttttcatttatttccttttttgccagcagacagacttgagtctgtaaagacaagcaaatacactgacagaagtttaccatagtttctaaaatgtaaaaaagaaaacccccaaaagactcaagaaaattagaccacaaattttgcattgttcattgtagcactattggtaataaaataacaaatgtttgtgcatttttatgtgaagatccttctcgtatttcatttggaaagatgagcaagaggtctgcttccttcattttacttccccttctgtttttgaaaggcagtttcgccaagcttaatgcaagaatatctgactgtttagaagaaagatattgccacaatctctggatggttttccagggttgtgttattactgagcttcatctttccagaatgagcaaaacactgtccagtctttgttacgattttgtaataaatgtgtacattttttttaaatttttggacatcacatgaataaaggtatgtatgtacgaatgtgtatatattatatatatgacatctattttggaaaatgtttgccctgctgtacctcatttttaggaggtgtgcatggatgcaatatatgaaaatgggacattctggaactgctggtcaggggactttgtcgccctgtgcactaaaagggccagattttcagcagccaaggacatccatacccaagtgaatgtgatgggacttaaaagaagtgaactgagacaattcactctggctgtttgaacagcagcgtttcataggaagagaaaaaaagatcaatcttgtattttctgaccacataaaggcttcttctctttgtaataaagtagaaaagctctcctca

SEQ ID NO: 354796 - DNA, 3355 bp, Homo sapiens
ccgcagtccccctcggactcagggccagagccttctgcgaagcaacctagccccagggaaacggtagcggccgcagaagccccgctctctgtaacggccgcggaggagcagcaagcctccctgtgagtcggtgggagacaagacggagcggcggtaagggcggtagggaagtgaagcgcctctctccaccttgttagaagcgcgctgaaagcggcctgcctacccaccccatcgctgccgttttgcagtcgtcgctcccaccttccgctgccgcctggagggaagccggagcgacgggggtcacggcggcggtcagagggtaaaggtcttgctcccagcagcctccgcggtggatacgtcgccatcttggatccgcgggacaagaaaattcatgcgagggagacgtggtgggcggtccttcctgtgacacgacccttgagtgacagttctatttgattgcctccggtactgtgaggaaaggacacgactctatggtgaggactgatggacatacattatctgagaaaagaaactaccaggctttggtatcaggatgatgctggcctcataaaatgaattagggaggattccctctttttctatttattggaatagtttcagaaggaatggtaccagctcctccttgtacctctggtagaattcggctgtgaatccatctggtcctggatttttttggttggtgacaaacagcatgtttggtgcttcaagaaagaagtttgtagagggggtcgacagtgactaccatgacgaaaacatgtactacagccagtcttctatgtttccacatcggtcagaaaaagatatgctggcatcaccatctacatcaggtcagctgtctcagtttggggcaagtttatacgggcaacaaagtgcactaggccttccaatgagggggatgagcaacaatacccctcagttaaatcgcagcttatcacaaggcactcagttaccgagccacgtcacgccaacaacaggggtaccaacaatgtcacttcacacgcctccatctccaagcaggggtattttgcctatgaatcctaggaatatgatgaaccactcccaggttggtcagggcattggaattcctagcaggacaaatagcatgagcagttcagggttaggtagccccaacagaagctcgccaagcataatatgtatgccaaagcagcagccttctcgacagccttttactgtgaacagtatgtctggatttggaatgaacaggaatcaggcatttggaatgaataactccttatcaagtaacatttttaatggaacagacggaagtgaaaatgtgacaggattggacctttcagatttcccagcattagcagaccgaaacaggagggaaggaagtggtaacccaactccattaataaaccccttggctggaagagctccttatgttggaatggtaacaaaaccagcaaatgaacaatcccaggacttctcaatacacaatgaagattttccagcattaccaggctccagctataaagatccaacatcaagtaatgatgacagtaaatctaatttgaatacatctggcaagacaacttcaagtacagatggacccaaattccctggagataaaagttcaacaacacaaaataataaccagcagaaaaaagggatccaggtgttacctgatggtcgggttactaacattcctcaagggatggtgacggaccaatttggaatgattggcctgttaacatttatcagggcagcagagacagacccaggaatggtacatcttgcattaggaagtgacttaacaacattaggcctcaatctgaactctcctgaaaatctctaccccaaatttgcgtcaccctgggcatcttcaccttgtcgacctcaagacatagacttccatgttccatctgagtacttaacgaacattcacattagggataagctggctgcaataaaacttggccgatatggtgaagaccttctcttctatctctattacatgaatggaggagacgtattacaacttttagctgcagtggagctttttaaccgtgattggagataccacaaagaagaacgagtatggattaccagggcaccaggcatggagccaacaatgaaaaccaatacctatgagaggggaacatattacttctttgactgtcttaactggaggaaagtagctaaggagttccatctggaatatgacaaattagaagaacggcctcacctgccatccaccttcaactacaaccctgctcagcaagccttctaaaaaaaaaaaaaaaaaaaaaaaaaaagacttcccttttcttggggtatggctgtctcagcacaatactcaacataactgcagaactgatgtggctcaggcaccctggttttaattccttgaggatctggcaattggcttacgcaaaaggtcaccatttgaggtcctgccttactaattatgtgctgcccaacaactaaatttgtaatttgtttttctctagtttgagcagggtctgaattttttcatttatttccttttttgccagcagacagacttgagtctgtaaagacaagcaaatacactgacagaagtttaccatagtttctaaaatgtaaaaaagaaaacccccaaaagactcaagaaaattagaccacaaattttgcattgttcattgtagcactattggtaataaaataacaaatgtttgtgcatttttatgtgaagatccttctcgtatttcatttggaaagatgagcaagaggtctgcttccttcattttacttccccttctgtttttgaaaggcagtttcgccaagcttaatgcaagaatatctgactgtttagaagaaagatattgccacaatctctggatggttttccagggttgtgttattactgagcttcatctttccagaatgagcaaaacactgtccagtctttgttacgattttgtaataaatgtgtacattttttttaaatttttggacatcacatgaataaaggtatgtatgtacgaatgtgtatatattatatatatgacatctattttggaaaatgtttgccctgctgtacctcatttttaggaggtgtgcatggatgcaatatatgaaaatgggacattctggaactgctggtcaggggactttgtcgccctgtgcactaaaagggccagattttcagcagccaaggacatccatacccaagtgaatgtgatgggacttaaaagaagtgaactgagacaattcactctggctgtttgaacagcagcgtttcataggaagagaaaaaaagatcaatcttgtattttctgaccacataaaggcttcttctctttgtaataaagtagaaaagctctcctca

SEQ ID NO: 354797 - DNA, 2678 bp, Homo sapiens
agtcagttaacttacatgaggctcaggttccttacctgtgtgtaaaatgggaacattgaactaggtgatctttaagatcccttccggctctaaaattgtttgacattatcttggtggtcagtaactgtgagaaacacattcctgaggaaaatttgcagctatagttgacttcaggacagcatgtttagggagtagaatgtaagctccctgagggtgcactaggccttccaatgagggggatgagcaacaatacccctcagttaaatcgcagcttatcacaaggcactcagttaccgagccacgtcacgccaacaacaggggtaccaacaatgtcacttcacacgcctccatctccaagcaggggtattttgcctatgaatcctaggaatatgatgaaccactcccaggttggtcagggcattggaattcctagcaggacaaatagcatgagcagttcagggttaggtagccccaacagaagctcgccaagcataatatgtatgccaaagcagcagccttctcgacagccttttactgtgaacagtatgtctggatttggaatgaacaggaatcaggcatttggaatgaataactccttatcaagtaacatttttaatggaacagacggaagtgaaaatgtgacaggattggacctttcagatttcccagcattagcagaccgaaacaggagggaaggaagtggtaacccaactccattaataaaccccttggctggaagagctccttatgttggaatggtaacaaaaccagcaaatgaacaatcccaggacttctcaatacacaatgaagattttccagcattaccaggctccagctataaagatccaacatcaagtaatgatgacagtaaatctaatttgaatacatctggcaagacaacttcaagtacagatggacccaaattccctggagataaaagttcaacaacacaaaataataaccagcagaaaaaagggatccaggtgttacctgatggtcgggttactaacattcctcaagggatggtgacggaccaatttggaatgattggcctgttaacatttatcagggcagcagagacagacccaggaatggtacatcttgcattaggaagtgacttaacaacattaggcctcaatctgaactctcctgaaaatctctaccccaaatttgcgtcaccctgggcatcttcaccttgtcgacctcaagacatagacttccatgttccatctgagtacttaacgaacattcacattagggataagctggctgcaataaaacttggccgatatggtgaagaccttctcttctatctctattacatgaatggaggagacgtattacaacttttagctgcagtggagctttttaaccgtgattggagataccacaaagaagaacgagtatggattaccagggcaccaggcatggagccaacaatgaaaaccaatacctatgagaggggaacatattacttctttgactgtcttaactggaggaaagtagctaaggagttccatctggaatatgacaaattagaagaacggcctcacctgccatccaccttcaactacaaccctgctcagcaagccttctaaaaaaaaaaaaaaaaaaaaaaaaaaagacttcccttttcttggggtatggctgtctcagcacaatactcaacataactgcagaactgatgtggctcaggcaccctggttttaattccttgaggatctggcaattggcttacgcaaaaggtcaccatttgaggtcctgccttactaattatgtgctgcccaacaactaaatttgtaatttgtttttctctagtttgagcagggtctgaattttttcatttatttccttttttgccagcagacagacttgagtctgtaaagacaagcaaatacactgacagaagtttaccatagtttctaaaatgtaaaaaagaaaacccccaaaagactcaagaaaattagaccacaaattttgcattgttcattgtagcactattggtaataaaataacaaatgtttgtgcatttttatgtgaagatccttctcgtatttcatttggaaagatgagcaagaggtctgcttccttcattttacttccccttctgtttttgaaaggcagtttcgccaagcttaatgcaagaatatctgactgtttagaagaaagatattgccacaatctctggatggttttccagggttgtgttattactgagcttcatctttccagaatgagcaaaacactgtccagtctttgttacgattttgtaataaatgtgtacattttttttaaatttttggacatcacatgaataaaggtatgtatgtacgaatgtgtatatattatatatatgacatctattttggaaaatgtttgccctgctgtacctcatttttaggaggtgtgcatggatgcaatatatgaaaatgggacattctggaactgctggtcaggggactttgtcgccctgtgcactaaaagggccagattttcagcagccaaggacatccatacccaagtgaatgtgatgggacttaaaagaagtgaactgagacaattcactctggctgtttgaacagcagcgtttcataggaagagaaaaaaagatcaatcttgtattttctgaccacataaaggcttcttctctttgtaataaagtagaaaagctctcctca

SEQ ID NO: 354798 - DNA, 2783 bp, Homo sapiens
ccgcagtccccctcggactcagggccagagccttctgcgaagcaacctagccccagggaaacggtagcggccgcagaagccccgctctctgtaacggccgcggaggagcagcaagcctccctgtgagtcggtgggagacaagacggagcggcggtaagggcggtagggaagtgaagcgcctctctccaccttgttagaagcgcgctgaaagcggcctgcctacccaccccatcgctgccgttttgcagtcgtcgctcccaccttccgctgccgcctggagggaagccggagcgacgggggtcacggcggcggtcagagggtaaaggtcttgctcccagcagcctccgcggtggatacgtcgccatcttggatccgcgggacaagaaaattcatgcgagggagacgtggtgggcggtccttcctgtgacacgacccttgagtgacagttctatttgattgcctccggtactgtgaggaaaggacacgactctatggtgaggactgatggacatacattatctgagaaaagaaactaccaggtgacaaacagcatgtttggtgcttcaagaaagaagtttgtagagggggtcgacagtgactaccatgacgaaaacatgtactacagccagtcttctatgtttccacatcggtcagaaaaagatatgctggcatcaccatctacatcaggtcagctgtctcagtttggggcaagtttatacgggcaacaaaacggaagtgaaaatgtgacaggattggacctttcagatttcccagcattagcagaccgaaacaggagggaaggaagtggtaacccaactccattaataaaccccttggctggaagagctccttatgttggaatggtaacaaaaccagcaaatgaacaatcccaggacttctcaatacacaatgaagattttccagcattaccaggctccagctataaagatccaacatcaagtaatgatgacagtaaatctaatttgaatacatctggcaagacaacttcaagtacagatggacccaaattccctggagataaaagttcaacaacacaaaataataaccagcagaaaaaagggatccaggtgttacctgatggtcgggttactaacattcctcaagggatggtgacggaccaatttggaatgattggcctgttaacatttatcagggcagcagagacagacccaggaatggtacatcttgcattaggaagtgacttaacaacattaggcctcaatctgaactctcctgaaaatctctaccccaaatttgcgtcaccctgggcatcttcaccttgtcgacctcaagacatagacttccatgttccatctgagtacttaacgaacattcacattagggataagctggctgcaataaaacttggccgatatggtgaagaccttctcttctatctctattacatgaatggaggagacgtattacaacttttagctgcagtggagctttttaaccgtgattggagataccacaaagaagaacgagtatggattaccagggcaccaggcatggagccaacaatgaaaaccaatacctatgagaggggaacatattacttctttgactgtcttaactggaggaaagtagctaaggagttccatctggaatatgacaaattagaagaacggcctcacctgccatccaccttcaactacaaccctgctcagcaagccttctaaaaaaaaaaaaaaaaaaaaaaaaaaagacttcccttttcttggggtatggctgtctcagcacaatactcaacataactgcagaactgatgtggctcaggcaccctggttttaattccttgaggatctggcaattggcttacgcaaaaggtcaccatttgaggtcctgccttactaattatgtgctgcccaacaactaaatttgtaatttgtttttctctagtttgagcagggtctgaattttttcatttatttccttttttgccagcagacagacttgagtctgtaaagacaagcaaatacactgacagaagtttaccatagtttctaaaatgtaaaaaagaaaacccccaaaagactcaagaaaattagaccacaaattttgcattgttcattgtagcactattggtaataaaataacaaatgtttgtgcatttttatgtgaagatccttctcgtatttcatttggaaagatgagcaagaggtctgcttccttcattttacttccccttctgtttttgaaaggcagtttcgccaagcttaatgcaagaatatctgactgtttagaagaaagatattgccacaatctctggatggttttccagggttgtgttattactgagcttcatctttccagaatgagcaaaacactgtccagtctttgttacgattttgtaataaatgtgtacattttttttaaatttttggacatcacatgaataaaggtatgtatgtacgaatgtgtatatattatatatatgacatctattttggaaaatgtttgccctgctgtacctcatttttaggaggtgtgcatggatgcaatatatgaaaatgggacattctggaactgctggtcaggggactttgtcgccctgtgcactaaaagggccagattttcagcagccaaggacatccatacccaagtgaatgtgatgggacttaaaagaagtgaactgagacaattcactctggctgtttgaacagcagcgtttcataggaagagaaaaaaagatcaatcttgtattttctgaccacataaaggcttcttctctttgtaataaagtagaaaagctctcctca

SEQ ID NO: 354799 - DNA, 3084 bp, Homo sapiens
ccgcagtccccctcggactcagggccagagccttctgcgaagcaacctagccccagggaaacggtagcggccgcagaagccccgctctctgtaacggccgcggaggagcagcaagcctccctgtgagtcggtgggagacaagacggagcggcggtaagggcggtagggaagtgaagcgcctctctccaccttgttagaagcgcgctgaaagcggcctgcctacccaccccatcgctgccgttttgcagtcgtcgctcccaccttccgctgccgcctggagggaagccggagcgacgggggtcacggcggcggtcagagggtaaaggtcttgctcccagcagcctccgcggtggatacgtcgccatcttggatccgcgggacaagaaaattcatgcgagggagacgtggtgggcggtccttcctgtgacacgacccttgagtgacagttctatttgattgcctccggtactgtgaggaaaggacacgactctatggtgaggactgatggacatacattatctgagaaaagaaactaccagagacagggtctcactatgttgcccaggcttgtcaagtgatcctcccacctcagcctctcaagatgctgggattacagagcggaagaatcccatcgtttatcatgttctggttggactttcttactgtttgctggagttgaacttcagagctatggcgtcaaccctgctgtaatatctcaggggagctcctagggtggggctggtgccatggctcaccctccaacctttccttcttcacttcagcctccagctctgagctttccaatccccagagtagcaaatgttgaaagaagttgcacaggtgacaaacagcatgtttggtgcttcaagaaagaagtttgtagagggggtcgacagtgactaccatgacgaaaacatgtactacagccagtcttctatgtttccacatcggtcagaaaaagatatgctggcatcaccatctacatcaggtcagctgtctcagtttggggcaagtttatacgggcaacaaaacggaagtgaaaatgtgacaggattggacctttcagatttcccagcattagcagaccgaaacaggagggaaggaagtggtaacccaactccattaataaaccccttggctggaagagctccttatgttggaatggtaacaaaaccagcaaatgaacaatcccaggacttctcaatacacaatgaagattttccagcattaccaggctccagctataaagatccaacatcaagtaatgatgacagtaaatctaatttgaatacatctggcaagacaacttcaagtacagatggacccaaattccctggagataaaagttcaacaacacaaaataataaccagcagaaaaaagggatccaggtgttacctgatggtcgggttactaacattcctcaagggatggtgacggaccaatttggaatgattggcctgttaacatttatcagggcagcagagacagacccaggaatggtacatcttgcattaggaagtgacttaacaacattaggcctcaatctgaactctcctgaaaatctctaccccaaatttgcgtcaccctgggcatcttcaccttgtcgacctcaagacatagacttccatgttccatctgagtacttaacgaacattcacattagggataagctggctgcaataaaacttggccgatatggtgaagaccttctcttctatctctattacatgaatggaggagacgtattacaacttttagctgcagtggagctttttaaccgtgattggagataccacaaagaagaacgagtatggattaccagggcaccaggcatggagccaacaatgaaaaccaatacctatgagaggggaacatattacttctttgactgtcttaactggaggaaagtagctaaggagttccatctggaatatgacaaattagaagaacggcctcacctgccatccaccttcaactacaaccctgctcagcaagccttctaaaaaaaaaaaaaaaaaaaaaaaaaaagacttcccttttcttggggtatggctgtctcagcacaatactcaacataactgcagaactgatgtggctcaggcaccctggttttaattccttgaggatctggcaattggcttacgcaaaaggtcaccatttgaggtcctgccttactaattatgtgctgcccaacaactaaatttgtaatttgtttttctctagtttgagcagggtctgaattttttcatttatttccttttttgccagcagacagacttgagtctgtaaagacaagcaaatacactgacagaagtttaccatagtttctaaaatgtaaaaaagaaaacccccaaaagactcaagaaaattagaccacaaattttgcattgttcattgtagcactattggtaataaaataacaaatgtttgtgcatttttatgtgaagatccttctcgtatttcatttggaaagatgagcaagaggtctgcttccttcattttacttccccttctgtttttgaaaggcagtttcgccaagcttaatgcaagaatatctgactgtttagaagaaagatattgccacaatctctggatggttttccagggttgtgttattactgagcttcatctttccagaatgagcaaaacactgtccagtctttgttacgattttgtaataaatgtgtacattttttttaaatttttggacatcacatgaataaaggtatgtatgtacgaatgtgtatatattatatatatgacatctattttggaaaatgtttgccctgctgtacctcatttttaggaggtgtgcatggatgcaatatatgaaaatgggacattctggaactgctggtcaggggactttgtcgccctgtgcactaaaagggccagattttcagcagccaaggacatccatacccaagtgaatgtgatgggacttaaaagaagtgaactgagacaattcactctggctgtttgaacagcagcgtttcataggaagagaaaaaaagatcaatcttgtattttctgaccacataaaggcttcttctctttgtaataaagtagaaaagctctcctca

SEQ ID NO: 354800 - DNA, 2091 bp, Homo sapiens
ccgcagtccccctcggactcagggccagagccttctgcgaagcaacctagccccagggaaacggtagcggccgcagaagccccgctctctgtaacggccgcggaggagcagcaagcctccctgtgagtcggtgggagacaagacggagcggcggtaagggcggtagggaagtgaagcgcctctctccaccttgttagaagcgcgctgaaagcggcctgcctacccaccccatcgctgccgttttgcagtcgtcgctcccaccttccgctgccgcctggagggaagccggagcgacgggggtcacggcggcggtcagagggtaaaggtcttgctcccagcagcctccgcggtggatacgtcgccatcttggatccgcgggacaagaaaattcatgcgagggagacgtggtgggcggtccttcctgtgacacgacccttgagtgacagttctatttgattgcctccggtactgtgaggaaaggacacgactctatggtgaggactgatggacatacattatctgagaaaagaaactaccaggtgacaaacagcatgtttggtgcttcaagaaagaagtttgtagagggggtcgacagtgactaccatgacgaaaacatgtactacagccagtcttctatgtttccacatcggtcagaaaaagatatgctggcatcaccatctacatcaggtcagctgtctcagtttggggcaagtttatacgggcaacaaagtgcactaggccttccaatgagggggatgagcaacaatacccctcagttaaatcgcagcttatcacaaggcactcagttaccgagccacgtcacgccaacaacaggggtaccaacaatgtcacttcacacgcctccatctccaagcaggggtattttgcctatgaatcctaggaatatgatgaaccactcccaggttggtcagggcattggaattcctagcaggacaaatagcatgagcagttcagggttaggtagccccaacagaagctcgccaagcataatatgtatgccaaagcagcagccttctcgacagccttttactgtgaacagtatgtctggatttggaatgaacaggaatcaggcatttggaatgaataactccttatcaagtaacatttttaatggaacagacggaagtgaaaatgtgacaggattggacctttcagatttcccagcattagcagaccgaaacaggagggaaggaagtggtaacccaactccattaataaaccccttggctggaagagctccttatgttggaatggtaacaaaaccagcaaatgaacaatcccaggacttctcaatacacaatgaagattttccagcattaccaggctccagctataaagatccaacatcaagtaatgatgacagtaaatctaatttgaatacatctggcaagacaacttcaagtacagatggacccaaattccctggagataaaagttcaacaacacaaaataataaccagcagaaaaaagggatccaggtgttacctgatggtcgggttactaacattcctcaagggatggtgacggaccaatttggaatgattggcctgttaacatttatcagggcagcagagacagacccaggaatggtacatcttgcattaggaagtgacttaacaacattaggcctcaatctgaactctcctgaaaatctctaccccaaatttgcgtcaccctgggcatcttcaccttgtcgacctcaagacatagacttccatgttccatctgagtacttaacgaacattcacattagggataagctggctgcaataaaacttggccgatatggtgaagaccttctcttctatctctattacatgaatggaggagacgtattacaacttttagctgcagtggagctttttaaccgtgattggagataccacaaagaagaacgagtatggattaccagggcaccaggcatggagccaacaatgaaaaccaatacctatgagaggggaacatattacttctttgactgtcttaactggaggaaagtagctaagagttccatctggaatatgacaaattagaaggcttgctgagcagggttgtagttgaaggtggatg

SEQ ID NO: 354801 - DNA, 2394 bp, Homo sapiens
ccgcagtccccctcggactcagggccagagccttctgcgaagcaacctagccccagggaaacggtagcggccgcagaagccccgctctctgtaacggccgcggaggagcagcaagcctccctgtgagtcggtgggagacaagacggagcggcggtaagggcggtagggaagtgaagcgcctctctccaccttgttagaagcgcgctgaaagcggcctgcctacccaccccatcgctgccgttttgcagtcgtcgctcccaccttccgctgccgcctggagggaagccggagcgacgggggtcacggcggcggtcagagggtaaaggtcttgctcccagcagcctccgcggtggatacgtcgccatcttggatccgcgggacaagaaaattcatgcgagggagacgtggtgggcggtccttcctgtgacacgacccttgagtgacagttctatttgattgcctccggtactgtgaggaaaggacacgactctatggtgaggactgatggacatacattatctgagaaaagaaactaccaggtgacaaacagcatgtttggtgcttcaagaaagaagtttgtagagggggtcgacagtgactaccatgacgaaaacatgtactacagccagtcttctatgtttccacatcggtcagaaaaagatatgctggcatcaccatctacatcaggtcagctgtctcagtttggggcaagtttatacgggcaacaaagtgcactaggccttccaatgagggggatgagcaacaatacccctcagttaaatcgcagcttatcacaaggcactcagttaccgagccacgtcacgccaacaacaggggtaccaacaatgtcacttcacacgcctccatctccaagcaggggtattttgcctatgaatcctaggaatatgatgaaccactcccaggttggtcagggcattggaattcctagcaggacaaatagcatgagcagttcagggttaggtagccccaacagaagctcgccaagcataatatgtatgccaaagcagcagccttctcgacagccttttactgtgaacagtatgtctggatttggaatgaacaggaatcaggcatttggaatgaataactccttatcaagtaacatttttaatggaacagacggaagtgaaaatgtgacaggattggacctttcagatttcccagcattagcagaccgaaacaggagggaaggaagtggtaacccaactccattaataaaccccttggctggaagagctccttatgttggaatggtaacaaaaccagcaaatgaacaatcccaggacttctcaatacacaatgaagattttccagcattaccaggctccagctataaagatccaacatcaagtaatgatgacagtaaatctaatttgaatacatctggcaagacaacttcaagtacagatggacccaaattccctggagataaaagttcaacaacacaaaataataaccagcagaaaaaagggatccaggtgttacctgatggtcgggttactaacattcctcaagggatggtgacggaccaatttggaatgattggcctgttaacatttatcagggcagcagagacagacccaggaatggtacatcttgcattaggaagtgacttaacaacattaggcctcaatctgaactctcctgaaaatctctaccccaaatttgcgtcaccctgggcatcttcaccttgtcgacctcaagacatagacttccatgttccatctgagtacttaacgaacattcacattagggataagctggctgcaataaaacttggccgatatggtgaagaccttctcttctatctctattacatgaatggaggagacgtattacaacttttagctgcagtggagctttttaaccgtgattggagataccacaaagaagaacgagtatggattaccagggcaccaggcatggagccaacaatgaaaaccaatacctatgagaggggaacatattacttctttgactgtcttaactggaggaaagtagctaaggtatatttctttccatgtgcaaatgtataaatctaaacttgaaaaaagaagtgtcctcttttatctgtttataagtaccaatacatccagttccagtaatgtgccacatatttgccaactgtttaattccatctccttggcttgacactcttagaagagtgtcccaaaacaattggtttcactgatagttacattattgaatttggtaagaggttttgtaattttgcataagccttggtaacatttgaaatattttttgtgtctactgctttgtaaaataaagatactctcttgcaaccccagtcatatatttttatatttttgtaactttaagcaaggatgagatttttctaaaagcagtatataa

SEQ ID NO: 354802 - DNA, 2187 bp, Homo sapiens
gggacacttttaaggtttatttaaatgtgaaaatttgagactattgaacctatgttttacagtttggtaagcagttatgtttctaccttggggagagaaatgtaaagcaatcatctttcagacatctatttaaacaaactgaaaagccatttctttatgatttttgtattcatcatctgtgatttgctgaaagcatacaactgacttgtgaatcattcactgtcagatatagattcagtttaacattttttataagccgtctatatatttggcactctacaaggtgctttcatataccttcactcattttatttactttcttagtaaccctcataggtgtcattgtccacatttgacaagtaaagctaagagattttaaataactaggacacagtcatattaatgagtaataaaaccaggacttgaatacaagtcctagatctctgagcacaatgctattgttaggttcttttccccattgggtattaaatccttttagtggatcttgcttggaagtctttattgagcttttcttccagtcagcatatcaattagatgtatcagaaataattgtttaaatgacttcagtcatttaaatgaggaaattcccttttagaatcttaactacctatctgtgtaatcatgtaataacagttatctactacaaagtggggagtttctgtttatctctccattttttctttagtagtagcaactatatattaggatttgcagatttgttttatatttcagaataagttatttttctttttcctggctgcaataaaacttggccgatatggtgaagaccttctcttctatctctattacatgaatggaggagacgtattacaacttttagctgcagtggagctttttaaccgtgattggagataccacaaagaagaacgagtatggattaccagggcaccaggcatggagccaacaatgaaaaccaatacctatgagaggggaacatattacttctttgactgtcttaactggaggaaagtagctaaggagttccatctggaatatgacaaattagaagaacggcctcacctgccatccaccttcaactacaaccctgctcagcaagccttctaaaaaaaaaaaaaaaaaaaaaaaaaaagacttcccttttcttggggtatggctgtctcagcacaatactcaacataactgcagaactgatgtggctcaggcaccctggttttaattccttgaggatctggcaattggcttacgcaaaaggtcaccatttgaggtcctgccttactaattatgtgctgcccaacaactaaatttgtaatttgtttttctctagtttgagcagggtctgaattttttcatttatttccttttttgccagcagacagacttgagtctgtaaagacaagcaaatacactgacagaagtttaccatagtttctaaaatgtaaaaaagaaaacccccaaaagactcaagaaaattagaccacaaattttgcattgttcattgtagcactattggtaataaaataacaaatgtttgtgcatttttatgtgaagatccttctcgtatttcatttggaaagatgagcaagaggtctgcttccttcattttacttccccttctgtttttgaaaggcagtttcgccaagcttaatgcaagaatatctgactgtttagaagaaagatattgccacaatctctggatggttttccagggttgtgttattactgagcttcatctttccagaatgagcaaaacactgtccagtctttgttacgattttgtaataaatgtgtacattttttttaaatttttggacatcacatgaataaaggtatgtatgtacgaatgtgtatatattatatatatgacatctattttggaaaatgtttgccctgctgtacctcatttttaggaggtgtgcatggatgcaatatatgaaaatgggacattctggaactgctggtcaggggactttgtcgccctgtgcactaaaagggccagattttcagcagccaaggacatccatacccaagtgaatgtgatgggacttaaaagaagtgaactgagacaattcactctggctgtttgaacagcagcgtttcataggaagagaaaaaaagatcaatcttgtattttctgaccacataaaggcttcttctctttgtaataaagtagaaaagctctcctca

SEQ ID NO: 354803 - DNA, 1485 bp, Homo sapiens
gcagcccctactactactaaattggcggccgtacgtactgagtacttaacgaacattcacattagggataagctggctgcaataaaacttggccgatatggtgaagaccttctcttctatctctattacatgaatggaggagacgtattacaacttttagctgcagtggagctttttaaccgtgattggagataccacaaagaagaacgagtatggattaccagggcaccaggcatggagccaacaatgaaaaccaatacctatgagaggggaacatattacttctttgactgtcttaactggaggaaagtagctaaggagttccatctggaatatgacaaattagaagaacggcctcacctgccatccaccttcaactacaaccctgctcagcaagccttctaaaaaaaaaaaaaaaaaaaaaaaaaaagacttcccttttcttggggtatggctgtctcagcacaatactcaacataactgcagaactgatgtggctcaggcaccctggttttaattccttgaggatctggcaattggcttacgcaaaaggtcaccatttgaggtcctgccttactaattatgtgctgcccaacaactaaatttgtaatttgtttttctctagtttgagcagggtctgaattttttcatttatttccttttttgccagcagacagacttgagtctgtaaagacaagcaaatacactgacagaagtttaccatagtttctaaaatgtaaaaaagaaaacccccaaaagactcaagaaaattagaccacaaattttgcattgttcattgtagcactattggtaataaaataacaaatgtttgtgcatttttatgtgaagatccttctcgtatttcatttggaaagatgagcaagaggtctgcttccttcattttacttccccttctgtttttgaaaggcagtttcgccaagcttaatgcaagaatatctgactgtttagaagaaagatattgccacaatctctggatggttttccagggttgtgttattactgagcttcatctttccagaatgagcaaaacactgtccagtctttgttacgattttgtaataaatgtgtacattttttttaaatttttggacatcacatgaataaaggtatgtatgtacgaatgtgtatatattatatatatgacatctattttggaaaatgtttgccctgctgtacctcatttttaggaggtgtgcatggatgcaatatatgaaaatgggacattctggaactgctggtcaggggactttgtcgccctgtgcactaaaagggccagattttcagcagccaaggacatccatacccaagtgaatgtgatgggacttaaaagaagtgaactgagacaattcactctggctgtttgaacagcagcgtttcataggaagagaaaaaaagatcaatcttgtattttctgaccacataaaggcttcttctctttgtaataaagtagaaaagctctcctca

SEQ ID NO: 354804 - DNA, 1435 bp, Homo sapiens
caacatttcagtgtcaagtggtccattagtagtctcttgacttacacacagaaagcctgtctgtattttttgtactcattggttagaaactacagcacattatttttcttcaagctgtattttatgtagaggaaaaacagttggtatatctgtgttgatgttgattcatatatattgggtattttatttatttttatagtaaaatgtattttgacaaatgtaaaatgaaaaggggaagatatctaaattcttgaatttgtttttataggagttccatctggaatatgacaaattagaagaacggcctcacctgccatccaccttcaactacaaccctgctcagcaagccttctaaaaaaaaaaaaaaaaaaaaaaaaaaagacttcccttttcttggggtatggctgtctcagcacaatactcaacataactgcagaactgatgtggctcaggcaccctggttttaattccttgaggatctggcaattggcttacgcaaaaggtcaccatttgaggtcctgccttactaattatgtgctgcccaacaactaaatttgtaatttgtttttctctagtttgagcagggtctgaattttttcatttatttccttttttgccagcagacagacttgagtctgtaaagacaagcaaatacactgacagaagtttaccatagtttctaaaatgtaaaaaagaaaacccccaaaagactcaagaaaattagaccacaaattttgcattgttcattgtagcactattggtaataaaataacaaatgtttgtgcatttttatgtgaagatccttctcgtatttcatttggaaagatgagcaagaggtctgcttccttcattttacttccccttctgtttttgaaaggcagtttcgccaagcttaatgcaagaatatctgactgtttagaagaaagatattgccacaatctctggatggttttccagggttgtgttattactgagcttcatctttccagaatgagcaaaacactgtccagtctttgttacgattttgtaataaatgtgtacattttttttaaatttttggacatcacatgaataaaggtatgtatgtacgaatgtgtatatattatatatatgacatctattttggaaaatgtttgccctgctgtacctcatttttaggaggtgtgcatggatgcaatatatgaaaatgggacattctggaactgctggtcaggggactttgtcgccctgtgcactaaaagggccagattttcagcagccaaggacatccatacccaagtgaatgtgatgggacttaaaagaagtgaactgagacaattcactctggctgtttgaacagcagcgtttcataggaagagaaaaaaagatcaatcttgtattttctgaccacataaaggcttcttctctttgtaataaagtagaaaagctctcctca

SEQ ID NO: 354805 - DNA, 1321 bp, Homo sapiens
accgcccgcgccgcctccacccaagttcaggacaagagggagggagcgcttagctggctgcaataaaacttggccgatatggtgaagaccttctcttctatctctattacatgaatggaggagacgtattacaacttttagctgcagtggagctgagttccatctggaatatgacaaattagaagaacggcctcacctgccatccaccttcaactacaaccctgctcagcaagccttctaaaaaaaaaaaaaaaaaaaaaaaaaaagacttcccttttcttggggtatggctgtctcagcacaatactcaacataactgcagaactgatgtggctcaggcaccctggttttaattccttgaggatctggcaattggcttacgcaaaaggtcaccatttgaggtcctgccttactaattatgtgctgcccaacaactaaatttgtaatttgtttttctctagtttgagcagggtctgaattttttcatttatttccttttttgccagcagacagacttgagtctgtaaagacaagcaaatacactgacagaagtttaccatagtttctaaaatgtaaaaaagaaaacccccaaaagactcaagaaaattagaccacaaattttgcattgttcattgtagcactattggtaataaaataacaaatgtttgtgcatttttatgtgaagatccttctcgtatttcatttggaaagatgagcaagaggtctgcttccttcattttacttccccttctgtttttgaaaggcagtttcgccaagcttaatgcaagaatatctgactgtttagaagaaagatattgccacaatctctggatggttttccagggttgtgttattactgagcttcatctttccagaatgagcaaaacactgtccagtctttgttacgattttgtaataaatgtgtacattttttttaaatttttggacatcacatgaataaaggtatgtatgtacgaatgtgtatatattatatatatgacatctattttggaaaatgtttgccctgctgtacctcatttttaggaggtgtgcatggatgcaatatatgaaaatgggacattctggaactgctggtcaggggactttgtcgccctgtgcactaaaagggccagattttcagcagccaaggacatccatacccaagtgaatgtgatgggacttaaaagaagtgaactgagacaattcactctggctgtttgaacagcagcgtttcataggaagagaaaaaaagatcaatcttgtattttctgaccacataaaggcttcttctctttgtaataaagtagaaaagctctcctca

SEQ ID NO: 354806 - DNA, 1155 bp, Homo sapiens
gacacacaataagatgatccgcctctaccacccccccccacttcatcatccaaccccggtcatcaagccttctaaaaaaaaaaaaaaaaaaaaaaaaaaagacttcccttttcttggggtatggctgtctcagcacaatactcaacataactgcagaactgatgtggctcaggcaccctggttttaattccttgaggatctggcaattggcttacgcaaaaggtcaccatttgaggtcctgccttactaattatgtgctgcccaacaactaaatttgtaatttgtttttctctagtttgagcagggtctgaattttttcatttatttccttttttgccagcagacagacttgagtctgtaaagacaagcaaatacactgacagaagtttaccatagtttctaaaatgtaaaaaagaaaacccccaaaagactcaagaaaattagaccacaaattttgcattgttcattgtagcactattggtaataaaataacaaatgtttgtgcatttttatgtgaagatccttctcgtatttcatttggaaagatgagcaagaggtctgcttccttcattttacttccccttctgtttttgaaaggcagtttcgccaagcttaatgcaagaatatctgactgtttagaagaaagatattgccacaatctctggatggttttccagggttgtgttattactgagcttcatctttccagaatgagcaaaacactgtccagtctttgttacgattttgtaataaatgtgtacattttttttaaatttttggacatcacatgaataaaggtatgtatgtacgaatgtgtatatattatatatatgacatctattttggaaaatgtttgccctgctgtacctcatttttaggaggtgtgcatggatgcaatatatgaaaatgggacattctggaactgctggtcaggggactttgtcgccctgtgcactaaaagggccagattttcagcagccaaggacatccatacccaagtgaatgtgatgggacttaaaagaagtgaactgagacaattcactctggctgtttgaacagcagcgtttcataggaagagaaaaaaagatcaatcttgtattttctgaccacataaaggcttcttctctttgtaataaagtagaaaagctctcctca

SEQ ID NO: 354807 - DNA, 372 bp, Homo sapiens
cttacctgtgtgtaaaatgggaacattgaactaggtgatctttaagatcccttccggctctaaaattgtttgacattatcttggtggtcagtaactgtgagaaacacattcctgaggaaaatttgcagctatagttgacttcaggacagcatgtttagggagtagaatgtaagctccctgagggtaggggccttttctgttgtgttcactgccatatccccagcagctagcacaatgcgtgttacatagtaggcattcattaaatgtttgttgaatgaatgatgtgaaaagtatgttgatggtttgttaggagcacacctagaaagcctcaaagaaaaatggtgtgctttagggagggaaaagacagatttc

SEQ ID NO: 354808 - DNA, 457 bp, Homo sapiens
ttttaaacttagtactttgaattagtctgaaagatgaatctgggtttggccagtaatgaagaggtgaacagggagtcataatgttgaaactggacattcagatctttatagcatgatttccttatttttcaaagagcggaagaatcccatcgtttatcatgttctggttggactttcttactgtttgctggagttgaacttcagagctatggcgtcaaccctgctgtaatatctcaggggagctcctagggtggggctggtgccatggctcaccctccaacctttccttcttcacttcagcctccagctctgagctttccaatccccagagtagcaaatgttgaaagaagttgcacaggtaagtatgtggtggggaaagccgggggaaaaatggtactgtcatcagtattttgagggtggatgttgggccattttatcaatgagtcattttgttagt

SEQ ID NO: 354809 - DNA, 2488 bp, Homo sapiens
ccgcagtccccctcggactcagggccagagccttctgcgaagcaacctagccccagggaaacggtagcggccgcagaagccccgctctctgtaacggccgcggaggagcagcaagcctccctgtgagtcggtgggagacaagacggagcggcggtaagggcggtagggaagtgaagcgcctctctccaccttgttagaagcgcgctgaaagcggcctgcctacccaccccatcgctgccgttttgcagtcgtcgctcccaccttccgctgccgcctggagggaagccggagcgacgggggtcacggcggcggtcagagggtaaaggtcttgctcccagcagcctccgcggtggatacgtcgccatcttggatccgcgggacaagaaaattcatgcgagggagacgtggtgggcggtccttcctgtgacacgacccttgagtgacagttctatttgattgcctccggtactgtgaggaaaggacacgactctatggtgaggactgatggacatacattatctgagaaaagaaactaccaggtgacaaacagcatgtttggtgcttcaagaaagaagtttgtagagggggtcgacagtgactaccatgacgaaaacatgtactacagccagtcttctatgtttccacatcggtcagaaaaagatatgctggcatcaccatctacatcaggtcagctgtctcagtttggggcaagtttatacgggcaacaaagtgcactaggccttccaatgagggggatgagcaacaatacccctcagttaaatcgcagcttatcacaaggcactcagttaccgagccacgtcacgccaacaacaggggtaccaacaatgtcacttcacacgcctccatctccaagcaggggtattttgcctatgaatcctaggaatatgatgaaccactcccaggttggtcagggcattggaattcctagcaggacaaatagcatgagcagttcagggttaggtagccccaacagaagctcgccaagcataatatgtatgccaaagcagcagccttctcgacagccttttactgtgaacagtatgtctggatttggaatgaacaggaatcaggcatttggaatgaataactccttatcaagtaacatttttaatggaacagacggaagtgaaaatgtgacaggattggacctttcagatttcccagcattagcagaccgaaacaggagggaaggaagtggtaacccaactccattaataaaccccttggctggaagagctccttatgttggaatggtaacaaaaccagcaaatgaacaatcccaggacttctcaatacacaatgaagattttccagcattaccaggctccagctataaagatccaacatcaagtaatgatgacagtaaatctaatttgaatacatctggcaagacaacttcaagtacagatggacccaaattccctggagataaaagttcaacaacacaaaataataaccagcagaaaaaagggatccaggtgttacctgatggtcgggttactaacattcctcaagggatggtgacggaccaatttggaatgattggcctgttaacatttatcagggcagcagagacagacccaggaatggtacatcttgcattaggaagtgacttaacaacattaggcctcaatctgaactctcctgaaaatctctaccccaaatttgcgtcaccctgggcatcttcaccttgtcgacctcaagacatagacttccatgttccatctgagtacttaacgaacattcacattagggataagctggctgcaataaaacttggccgatatggtgaagaccttctcttctatctctattacatgaatggaggagacgtattacaacttttagctgcagtggagctttttaaccgtgattggagataccacaaagaagaacgagtatggattaccagggcaccaggcatggagccaacaatgaaaaccaatacctatgagaggggaacatattacttctttgactgtcttaactggaggaaagtagctaaggagttccatctggaatatgacaaattagaagaacggcctcacctgccatccaccttcaactacaaccctgctcagcaagccttctaaaaaaaaaaaaaaaaaaaaaaaaaaagaattccccttttttgggggaatggggggtccccgcaaatttctccaaattagggggaaatggttggggcccagagcccgtgtgtgtaatccctaggggctctggccatgggttcccagacaaagaggcgccttggggggcccggccttaaataattgtgtgtggccaacacataaatgtggatgggtcctcacaatgagacggggcggaatttcctttattccctttggcgcaaaacaacttgcttgtacacacaatctggaggatgtccctgctcacaggtaaaggaacacagtcagattaccaatttgtggcggcctggtacaccagtcgttggactcgtatgaga

SEQ ID NO: 354810 - DNA, 5143 bp, Homo sapiens
  misc_feature (2491)..(2491): n is a, c, g, or t
  misc_feature (2962)..(2962): n is a, c, g, or t
  misc_feature (3144)..(3144): n is a, c, g, or t
ccgcagtccccctcggactcagggccagagccttctgcgaagcaacctagccccagggaaacggtagcggccgcagaagccccgctctctgtaacggccgcggaggagcagcaagcctccctgtgagtcggtgggagacaagacggagcggcggtaagggcggtagggaagtgaagcgcctctctccaccttgttagaagcgcgctgaaagcggcctgcctacccaccccatcgctgccgttttgcagtcgtcgctcccaccttccgctgccgcctggagggaagccggagcgacgggggtcacggcggcggtcagagggtaaaggtcttgctcccagcagcctccgcggtggatacgtcgccatcttggatccgcgggacaagaaaattcatgcgagggagacgtggtgggcggtccttcctgtgacacgacccttgagtgacagttctatttgattgcctccggtactgtgaggaaaggacacgactctatggtgaggactgatggacatacattatctgagaaaagaaactaccaggtgacaaacagcatgtttggtgcttcaagaaagaagtttgtagagggggtcgacagtgactaccatgacgaaaacatgtactacagccagtcttctatgtttccacatcggtcagaaaaagatatgctggcatcaccatctacatcaggtcagctgtctcagtttggggcaagtttatacgggcaacaaagtgcactaggccttccaatgagggggatgagcaacaatacccctcagttaaatcgcagcttatcacaaggcactcagttaccgagccacgtcacgccaacaacaggggtaccaacaatgtcacttcacacgcctccatctccaagcaggggtattttgcctatgaatcctaggaatatgatgaaccactcccaggttggtcagggcattggaattcctagcaggacaaatagcatgagcagttcagggttaggtagccccaacagaagctcgccaagcataatatgtatgccaaagcagcagccttctcgacagccttttactgtgaacagtatgtctggatttggaatgaacaggaatcaggcatttggaatgaataactccttatcaagtaacatttttaatggaacagacggaagtgaaaatgtgacaggattggacctttcagatttcccagcattagcagaccgaaacaggagggaaggaagtggtaacccaactccattaataaaccccttggctggaagagctccttatgttggaatggtaacaaaaccagcaaatgaacaatcccaggacttctcaatacacaatgaagattttccagcattaccaggctccagctataaagatccaacatcaagtaatgatgacagtaaatctaatttgaatacatctggcaagacaacttcaagtacagatggacccaaattccctggagataaaagttcaacaacacaaaataataaccagcagaaaaaagggatccaggtgttacctgatggtcgggttactaacattcctcaagggatggtgacggaccaatttggaatgattggcctgttaacatttatcagggcagcagagacagacccaggaatggtacatcttgcattaggaagtgacttaacaacattaggcctcaatctgaactctcctgaaaatctctaccccaaatttgcgtcaccctgggcatcttcaccttgtcgacctcaagacatagacttccatgttccatctgagtacttaacgaacattcacattagggataagctggctgcaataaaacttggccgatatggtgaagaccttctcttctatctctattacatgaatggaggagacgtattacaacttttagctgcagtggagctgtatgttcaaagtattttaatcacttttgtattatagtggatcttgactatgctgaaaacatctttaagtgatgatggctatctttaaatggaactatttctccatcaagaaatttatttttacattattaaagtgaatttaatttagattaaaaccgtatcttaaccatggcttcataatctatatacctaaaaagaatttcaaacttaatgctgaagctgggtgcagtggctcacacttgtaatcccagcactttggtgaggtggacagatcacttgaggccagaagttagggacagcctgggcaacacagcaaaccacatttctacaaaaaataaaggaaaatattagctaggtgtggtggcacacatctatatagtcctagctacttgggaggctacagcaggaggatcgcttgagcccaggagtttgaggtgtcagtgagctatgattgtgccattgcactctagtggctgacagtgcaagaccctgtctctaaaaataactaataagtgccaaatttgtaagaagacagaattgacataactcatggatttggtgaatctaatttttgtaaatatgtgaattatatgatattcatgactatgntttttattccttgtggaaccatatgtataaataattcgatactgaatttaatcatttcataaacattattacttataagcaaggcagtgtgcatatttgttgtacgttttgaagtgctgattaaagtccacattttcattatcagcagtctattggccagtttaaacaaatattaatgtaaagaaattggttcattgatattttttccctgagcagttctgtatttacctgatgctctaaaattaagttttctgtcgttactcaaatgtacagttggcaacacattttgttatcaatagacaattatgtttactatagagtaaactattagtaattatttatgaccttatgattgggagaccttttcacaaatttaagtatttcataacatttctaataacatttctataaatggctttggatcaaatagtttaaagtatataattcagtatgttgataatgaattgtttngtttcatttcacaactgagaggatttttcccttatgtttttccttcatttttgtgagaatagagattattacctgttgttccttttaattgttcataagtaaataaatacattcaggcactcattcatctatcactggcagttctgttttcatattttatttatgtcttaaaaactacctcntgacgttggtaggaaagcatttctttacatggaggtttattttgtgggacattacctcctctggatgttacttcctcagtttacaagtagtgtaaattctcattgattcttttatgaattgtaatggattttctcttagcttttgagaatttagaatctgaaatttgaataaaaagtaaatatattcagtataatttttcaaaatgctctagtttcaagatagttaaaaaattatgtggaatttacataattaattcaaatatagtttgtatttagttccttatcaaataatgcaaatagttggagatacctcaatttcttttgagtgttaagaagagcaagaaaggagtgaagtttttgcaacacattgtgtctttatttggtctgcctatgtttttatcacattgcttataaaacttttaaaatccttgtttgtataaaaagtttctttagttaaataaaagtgtgtgtattaattagtgtgccttctggacaaattaagaaatattttttctatatttcaatgcggttgtatttaataacttataataaatgagtaggaagcattcatatttatttattttatgtgtaattttttttttccggaggaaagctttacaaaatgtagaacatgtttgatgtaagccacaggaaaaagttaattatcttttcttttaaaaattgaagttttaaccgtgattggagataccacaaagaagaacgagtatggattaccagggcaccaggcatggagccaacaatgaaaaccaatacctatgagaggggaacatattacttctttgactgtcttaactggaggaaagtagctaaggagttccatctggaatatgacaaattagaagaacggcctcacctgccatccaccttcaactacaaccctgctcagcaagccttctaaaaaaaaaaaaaaaaaaaaaaaaaaagacttcccttttcttggggtatggctgtctcagcacaatactcaacataactgcagaactgatgtggctcaggcaccctggttttaattccttgaggatctggcaattggcttacgcaaaaggtcaccatttgaggtcctgccttactaattatgtgctgcccaacaactaaatttgtaatttgtttttctctagtttgagcagggtctgaattttttcatttatttccttttttgccagcagacagacttgagtctgtaaagacaagcaaatacactgacagaagtttaccatagtttctaaaatgtaaaaaagaaaacccccaaaagactcaagaaaattagaccacaaattttgcattgttcattgtagcactattggtaataaaataacaaatgtttgtgcatttttatgtgaagatccttctcgtatttcatttggaaagatgagcaagaggtctgcttccttcattttacttccccttctgtttttgaaaggcagtttcgccaagcttaatgcaagaatatctgactgtttagaagaaagatattgccacaatctctggatggttttccagggttgtgttattactgagcttcatctttccagaatgagcaaaacactgtccagtctttgttacgattttgtaataaatgtgtacattttttttaaatttttggacatcacatgaataaaggtatgtatgtacgaatgtgtatatattatatatatgacatctattttggaaaatgtttgccctgctgtacctcatttttaggaggtgtgcatggatgcaatatatgaaaatgggacattctggaactgctggtcaggggactttgtcgccctgtgcactaaaagggccagattttcagcagccaaggacatccatacccaagtgaatgtgatgggacttaaaagaagtgaactgagacaattcactctggctgtttgaacagcagcgtttcataggaagagaaaaaaagatcaatcttgtattttctgaccacataaaggcttcttctctttgtaataaagtagaaaagctctcctca

SEQ ID NO: 354811 - DNA, 3049 bp, Homo sapiens
ccgcagtccccctcggactcagggccagagccttctgcgaagcaacctagccccagggaaacggtagcggccgcagaagccccgctctctgtaacggccgcggaggagcagcaagcctccctgtgagtcggtgggagacaagacggagcggcggtaagggcggtagggaagtgaagcgcctctctccaccttgttagaagcgcgctgaaagcggcctgcctacccaccccatcgctgccgttttgcagtcgtcgctcccaccttccgctgccgcctggagggaagccggagcgacgggggtcacggcggcggtcagagggtaaaggtcttgctcccagcagcctccgcggtggatacgtcgccatcttggatccgcgggacaagaaaattcatgcgagggagacgtggtgggcggtccttcctgtgacacgacccttgagtgacagttctatttgattgcctccggtactgtgaggaaaggacacgactctatggtgaggactgatggacatacattatctgagaaaagaaactaccaggtgacaaacagcatgtttggtgcttcaagaaagaagtttgtagagggggtcgacagtgactaccatgacgaaaacatgtactacagccagtcttctatgtttccacatcggtcagaaaaagatatgctggcatcaccatctacatcaggtcagctgtctcagtttggggcaagtttatacgggcaacaaagtgcactaggccttccaatgagggggatgagcaacaatacccctcagttaaatcgcagcttatcacaaggcactcagttaccgagccacgtcacgccaacaacaggggtaccaacaatgtcacttcacacgcctccatctccaagcaggggtattttgcctatgaatcctaggaatatgatgaaccactcccaggttggtcagggcattggaattcctagcaggacaaatagcatgagcagttcagggttaggtagccccaacagaagctcgccaagcataatatgtatgccaaagcagcagccttctcgacagccttttactgtgaacagtatgtctggatttggaatgaacaggaatcaggcatttggaatgaataactccttatcaagtaacatttttaatggaacagacggaagtgaaaatgtgacaggattggacctttcagatttcccagcattagcagaccgaaacaggagggaaggaagtggtaacccaactccattaataaaccccttggctggaagagctccttatgttggaatggtaacaaaaccagcaaatgaacaatcccaggacttctcaatacacaatgaagattttccagcattaccaggctccagctataaagatccaacatcaagtaatgatgacagtaaatctaatttgaatacatctggcaagacaacttcaagtacagatggacccaaattccctggagataaaagttcaacaacacaaaataataaccagcagaaaaaagggatccaggtgttacctgatggtcgggttactaacattcctcaagggatggtgacggaccaatttggaatgattggcctgttaacatttatcagggcagcagagacagacccaggaatggtacatcttgcattaggaagtgacttaacaacattaggcctcaatctgaactctcctgaaaatctctaccccaaatttgcgtcaccctgggcatcttcaccttgtcgacctcaagacatagacttccatgttccatctgagtacttaacgaacattcacattagggataagctggctgcaataaaacttggccgatatggtgaagaccttctcttctatctctattacatgaatggaggagacgtattacaacttttagctgcagtggagctgagttccatctggaatatgacaaattagaagaacggcctcacctgccatccaccttcaactacaaccctgctcagcaagccttctaaaaaaaaaaaaaaaaaaaaaaaaaaagacttcccttttcttggggtatggctgtctcagcacaatactcaacataactgcagaactgatgtggctcaggcaccctggttttaattccttgaggatctggcaattggcttacgcaaaaggtcaccatttgaggtcctgccttactaattatgtgctgcccaacaactaaatttgtaatttgtttttctctagtttgagcagggtctgaattttttcatttatttccttttttgccagcagacagacttgagtctgtaaagacaagcaaatacactgacagaagtttaccatagtttctaaaatgtaaaaaagaaaacccccaaaagactcaagaaaattagaccacaaattttgcattgttcattgtagcactattggtaataaaataacaaatgtttgtgcatttttatgtgaagatccttctcgtatttcatttggaaagatgagcaagaggtctgcttccttcattttacttccccttctgtttttgaaaggcagtttcgccaagcttaatgcaagaatatctgactgtttagaagaaagatattgccacaatctctggatggttttccagggttgtgttattactgagcttcatctttccagaatgagcaaaacactgtccagtctttgttacgattttgtaataaatgtgtacattttttttaaatttttggacatcacatgaataaaggtatgtatgtacgaatgtgtatatattatatatatgacatctattttggaaaatgtttgccctgctgtacctcatttttaggaggtgtgcatggatgcaatatatgaaaatgggacattctggaactgctggtcaggggactttgtcgccctgtgcactaaaagggccagattttcagcagccaaggacatccatacccaagtgaatgtgatgggacttaaaagaagtgaactgagacaattcactctggctgtttgaacagcagcgtttcataggaagagaaaaaaagatcaatcttgtattttctgaccacataaaggcttcttctctttgtaataaagtagaaaagctctcctca

SEQ ID NO: 354812 - DNA, 3127 bp, Homo sapiens
ccgcagtccccctcggactcagggccagagccttctgcgaagcaacctagccccagggaaacggtagcggccgcagaagccccgctctctgtaacggccgcggaggagcagcaagcctccctgtgagtcggtgggagacaagacggagcggcggtaagggcggtagggaagtgaagcgcctctctccaccttgttagaagcgcgctgaaagcggcctgcctacccaccccatcgctgccgttttgcagtcgtcgctcccaccttccgctgccgcctggagggaagccggagcgacgggggtcacggcggcggtcagagggtaaaggtcttgctcccagcagcctccgcggtggatacgtcgccatcttggatccgcgggacaagaaaattcatgcgagggagacgtggtgggcggtccttcctgtgacacgacccttgagtgacagttctatttgattgcctccggtactgtgaggaaaggacacgactctatggtgaggactgatggacatacattatctgagaaaagaaactaccaggtgacaaacagcatgtttggtgcttcaagaaagaagtttgtagagggggtcgacagtgactaccatgacgaaaacatgtactacagccagtcttctatgtttccacatcggtcagaaaaagatgtgcactaggccttccaatgagggggatgagcaacaatacccctcagttaaatcgcagcttatcacaaggcactcagttaccgagccacgtcacgccaacaacaggggtaccaacaatgtcacttcacacgcctccatctccaagcaggggtattttgcctatgaatcctaggaatatgatgaaccactcccaggttggtcagggcattggaattcctagcaggacaaatagcatgagcagttcagggttaggtagccccaacagaagctcgccaagcataatatgtatgccaaagcagcagccttctcgacagccttttactgtgaacagtatgtctggatttggaatgaacaggaatcaggcatttggaatgaataactccttatcaagtaacatttttaatggaacagacggaagtgaaaatgtgacaggattggacctttcagatttcccagcattagcagaccgaaacaggagggaaggaagtggtaacccaactccattaataaaccccttggctggaagagctccttatgttggaatggtaacaaaaccagcaaatgaacaatcccaggacttctcaatacacaatgaagattttccagcattaccaggctccagctataaagatccaacatcaagtaatgatgacagtaaatctaatttgaatacatctggcaagacaacttcaagtacagatggacccaaattccctggagataaaagttcaacaacacaaaataataaccagcagaaaaaagggatccaggtgttacctgatggtcgggttactaacattcctcaagggatggtgacggaccaatttggaatgattggcctgttaacatttatcagggcagcagagacagacccaggaatggtacatcttgcattaggaagtgacttaacaacattaggcctcaatctgaactctcctgaaaatctctaccccaaatttgcgtcaccctgggcatcttcaccttgtcgacctcaagacatagacttccatgttccatctgagtacttaacgaacattcacattagggataagctggctgcaataaaacttggccgatatggtgaagaccttctcttctatctctattacatgaatggaggagacgtattacaacttttagctgcagtggagctttttaaccgtgattggagataccacaaagaagaacgagtatggattaccagggcaccaggcatggagccaacaatgaaaaccaatacctatgagaggggaacatattacttctttgactgtcttaactggaggaaagtagctaaggagttccatctggaatatgacaaattagaagaacggcctcacctgccatccaccttcaactacaaccctgctcagcaagccttctaaaaaaaaaaaaaaaaaaaaaaaaaaagacttcccttttcttggggtatggctgtctcagcacaatactcaacataactgcagaactgatgtggctcaggcaccctggttttaattccttgaggatctggcaattggcttacgcaaaaggtcaccatttgaggtcctgccttactaattatgtgctgcccaacaactaaatttgtaatttgtttttctctagtttgagcagggtctgaattttttcatttatttccttttttgccagcagacagacttgagtctgtaaagacaagcaaatacactgacagaagtttaccatagtttctaaaatgtaaaaaagaaaacccccaaaagactcaagaaaattagaccacaaattttgcattgttcattgtagcactattggtaataaaataacaaatgtttgtgcatttttatgtgaagatccttctcgtatttcatttggaaagatgagcaagaggtctgcttccttcattttacttccccttctgtttttgaaaggcagtttcgccaagcttaatgcaagaatatctgactgtttagaagaaagatattgccacaatctctggatggttttccagggttgtgttattactgagcttcatctttccagaatgagcaaaacactgtccagtctttgttacgattttgtaataaatgtgtacattttttttaaatttttggacatcacatgaataaaggtatgtatgtacgaatgtgtatatattatatatatgacatctattttggaaaatgtttgccctgctgtacctcatttttaggaggtgtgcatggatgcaatatatgaaaatgggacattctggaactgctggtcaggggactttgtcgccctgtgcactaaaagggccagattttcagcagccaaggacatccatacccaagtgaatgtgatgggacttaaaagaagtgaactgagacaattcactctggctgtttgaacagcagcgtttcataggaagagaaaaaaagatcaatcttgtattttctgaccacataaaggcttcttctctttgtaataaagtagaaaagctctcctca

SEQ ID NO: 354813 - DNA, 3011 bp, Homo sapiens
ccgcagtccccctcggactcagggccagagccttctgcgaagcaacctagccccagggaaacggtagcggccgcagaagccccgctctctgtaacggccgcggaggagcagcaagcctccctgtgagtcggtgggagacaagacggagcggcggtaagggcggtagggaagtgaagcgcctctctccaccttgttagaagcgcgctgaaagcggcctgcctacccaccccatcgctgccgttttgcagtcgtcgctcccaccttccgctgccgcctggagggaagccggagcgacgggggtcacggcggcggtcagagggtaaaggtcttgctcccagcagcctccgcggtggatacgtcgccatcttggatccgcgggacaagaaaattcatgcgagggagacgtggtgggcggtccttcctgtgacacgacccttgagtgacagttctatttgattgcctccggtactgtgaggaaaggacacgactctatggtgaggactgatggacatacattatctgagaaaagaaactaccaggtgacaaacagcatgtttggtgcttcaagaaagaagtttgtagagggggtcgacagtgactaccatgacgaaaacatgtactacagccagtcttctatgtttccacatcggtcagaaaaagatatgctggcatcaccatctacatcaggtcagctgtctcagtttggggcaagtttatacgggcaacaaagtgcactaggccttccaatgagggggatgagcaacaatacccctcagttaaatcgcagcttatcacaaggcactcagttaccgagccacgtcacgccaacaacaggggtaccaacaatgtcacttcacacgcctccatctccaagcagtatgtctggatttggaatgaacaggaatcaggcatttggaatgaataactccttatcaagtaacatttttaatggaacagacggaagtgaaaatgtgacaggattggacctttcagatttcccagcattagcagaccgaaacaggagggaaggaagtggtaacccaactccattaataaaccccttggctggaagagctccttatgttggaatggtaacaaaaccagcaaatgaacaatcccaggacttctcaatacacaatgaagattttccagcattaccaggctccagctataaagatccaacatcaagtaatgatgacagtaaatctaatttgaatacatctggcaagacaacttcaagtacagatggacccaaattccctggagataaaagttcaacaacacaaaataataaccagcagaaaaaagggatccaggtgttacctgatggtcgggttactaacattcctcaagggatggtgacggaccaatttggaatgattggcctgttaacatttatcagggcagcagagacagacccaggaatggtacatcttgcattaggaagtgacttaacaacattaggcctcaatctgaactctcctgaaaatctctaccccaaatttgcgtcaccctgggcatcttcaccttgtcgacctcaagacatagacttccatgttccatctgagtacttaacgaacattcacattagggataagctggctgcaataaaacttggccgatatggtgaagaccttctcttctatctctattacatgaatggaggagacgtattacaacttttagctgcagtggagctttttaaccgtgattggagataccacaaagaagaacgagtatggattaccagggcaccaggcatggagccaacaatgaaaaccaatacctatgagaggggaacatattacttctttgactgtcttaactggaggaaagtagctaaggagttccatctggaatatgacaaattagaagaacggcctcacctgccatccaccttcaactacaaccctgctcagcaagccttctaaaaaaaaaaaaaaaaaaaaaaaaaaagacttcccttttcttggggtatggctgtctcagcacaatactcaacataactgcagaactgatgtggctcaggcaccctggttttaattccttgaggatctggcaattggcttacgcaaaaggtcaccatttgaggtcctgccttactaattatgtgctgcccaacaactaaatttgtaatttgtttttctctagtttgagcagggtctgaattttttcatttatttccttttttgccagcagacagacttgagtctgtaaagacaagcaaatacactgacagaagtttaccatagtttctaaaatgtaaaaaagaaaacccccaaaagactcaagaaaattagaccacaaattttgcattgttcattgtagcactattggtaataaaataacaaatgtttgtgcatttttatgtgaagatccttctcgtatttcatttggaaagatgagcaagaggtctgcttccttcattttacttccccttctgtttttgaaaggcagtttcgccaagcttaatgcaagaatatctgactgtttagaagaaagatattgccacaatctctggatggttttccagggttgtgttattactgagcttcatctttccagaatgagcaaaacactgtccagtctttgttacgattttgtaataaatgtgtacattttttttaaatttttggacatcacatgaataaaggtatgtatgtacgaatgtgtatatattatatatatgacatctattttggaaaatgtttgccctgctgtacctcatttttaggaggtgtgcatggatgcaatatatgaaaatgggacattctggaactgctggtcaggggactttgtcgccctgtgcactaaaagggccagattttcagcagccaaggacatccatacccaagtgaatgtgatgggacttaaaagaagtgaactgagacaattcactctggctgtttgaacagcagcgtttcataggaagagaaaaaaagatcaatcttgtattttctgaccacataaaggcttcttctctttgtaataaagtagaaaagctctcctca

SEQ ID NO: 354814 - DNA, 2716 bp, Homo sapiens
ccgcagtccccctcggactcagggccagagccttctgcgaagcaacctagccccagggaaacggtagcggccgcagaagccccgctctctgtaacggccgcggaggagcagcaagcctccctgtgagtcggtgggagacaagacggagcggcggtaagggcggtagggaagtgaagcgcctctctccaccttgttagaagcgcgctgaaagcggcctgcctacccaccccatcgctgccgttttgcagtcgtcgctcccaccttccgctgccgcctggagggaagccggagcgacgggggtcacggcggcggtcagagggtaaaggtcttgctcccagcagcctccgcggtggatacgtcgccatcttggatccgcgggacaagaaaattcatgcgagggagacgtggtgggcggtccttcctgtgacacgacccttgagtgacagttctatttgattgcctccggtactgtgaggaaaggacacgactctatggtgaggactgatggacatacattatctgagaaaagaaactaccaggtgacaaacagcatgtttggtgcttcaagaaagaagtttgtagagggggtcgacagtgactaccatgacgaaaacatgtactacagccagtcttctatgtttccacatcggtcagaaaaagatacggaagtgaaaatgtgacaggattggacctttcagatttcccagcattagcagaccgaaacaggagggaaggaagtggtaacccaactccattaataaaccccttggctggaagagctccttatgttggaatggtaacaaaaccagcaaatgaacaatcccaggacttctcaatacacaatgaagattttccagcattaccaggctccagctataaagatccaacatcaagtaatgatgacagtaaatctaatttgaatacatctggcaagacaacttcaagtacagatggacccaaattccctggagataaaagttcaacaacacaaaataataaccagcagaaaaaagggatccaggtgttacctgatggtcgggttactaacattcctcaagggatggtgacggaccaatttggaatgattggcctgttaacatttatcagggcagcagagacagacccaggaatggtacatcttgcattaggaagtgacttaacaacattaggcctcaatctgaactctcctgaaaatctctaccccaaatttgcgtcaccctgggcatcttcaccttgtcgacctcaagacatagacttccatgttccatctgagtacttaacgaacattcacattagggataagctggctgcaataaaacttggccgatatggtgaagaccttctcttctatctctattacatgaatggaggagacgtattacaacttttagctgcagtggagctttttaaccgtgattggagataccacaaagaagaacgagtatggattaccagggcaccaggcatggagccaacaatgaaaaccaatacctatgagaggggaacatattacttctttgactgtcttaactggaggaaagtagctaaggagttccatctggaatatgacaaattagaagaacggcctcacctgccatccaccttcaactacaaccctgctcagcaagccttctaaaaaaaaaaaaaaaaaaaaaaaaaaagacttcccttttcttggggtatggctgtctcagcacaatactcaacataactgcagaactgatgtggctcaggcaccctggttttaattccttgaggatctggcaattggcttacgcaaaaggtcaccatttgaggtcctgccttactaattatgtgctgcccaacaactaaatttgtaatttgtttttctctagtttgagcagggtctgaattttttcatttatttccttttttgccagcagacagacttgagtctgtaaagacaagcaaatacactgacagaagtttaccatagtttctaaaatgtaaaaaagaaaacccccaaaagactcaagaaaattagaccacaaattttgcattgttcattgtagcactattggtaataaaataacaaatgtttgtgcatttttatgtgaagatccttctcgtatttcatttggaaagatgagcaagaggtctgcttccttcattttacttccccttctgtttttgaaaggcagtttcgccaagcttaatgcaagaatatctgactgtttagaagaaagatattgccacaatctctggatggttttccagggttgtgttattactgagcttcatctttccagaatgagcaaaacactgtccagtctttgttacgattttgtaataaatgtgtacattttttttaaatttttggacatcacatgaataaaggtatgtatgtacgaatgtgtatatattatatatatgacatctattttggaaaatgtttgccctgctgtacctcatttttaggaggtgtgcatggatgcaatatatgaaaatgggacattctggaactgctggtcaggggactttgtcgccctgtgcactaaaagggccagattttcagcagccaaggacatccatacccaagtgaatgtgatgggacttaaaagaagtgaactgagacaattcactctggctgtttgaacagcagcgtttcataggaagagaaaaaaagatcaatcttgtattttctgaccacataaaggcttcttctctttgtaataaagtagaaaagctctcctca

SEQ ID NO: 354815 - DNA, 4343 bp, Homo sapiens
  misc_feature (2491)..(2491): n is a, c, g, or t
  misc_feature (2962)..(2962): n is a, c, g, or t
  misc_feature (3144)..(3144): n is a, c, g, or t
ccgcagtccccctcggactcagggccagagccttctgcgaagcaacctagccccagggaaacggtagcggccgcagaagccccgctctctgtaacggccgcggaggagcagcaagcctccctgtgagtcggtgggagacaagacggagcggcggtaagggcggtagggaagtgaagcgcctctctccaccttgttagaagcgcgctgaaagcggcctgcctacccaccccatcgctgccgttttgcagtcgtcgctcccaccttccgctgccgcctggagggaagccggagcgacgggggtcacggcggcggtcagagggtaaaggtcttgctcccagcagcctccgcggtggatacgtcgccatcttggatccgcgggacaagaaaattcatgcgagggagacgtggtgggcggtccttcctgtgacacgacccttgagtgacagttctatttgattgcctccggtactgtgaggaaaggacacgactctatggtgaggactgatggacatacattatctgagaaaagaaactaccaggtgacaaacagcatgtttggtgcttcaagaaagaagtttgtagagggggtcgacagtgactaccatgacgaaaacatgtactacagccagtcttctatgtttccacatcggtcagaaaaagatatgctggcatcaccatctacatcaggtcagctgtctcagtttggggcaagtttatacgggcaacaaagtgcactaggccttccaatgagggggatgagcaacaatacccctcagttaaatcgcagcttatcacaaggcactcagttaccgagccacgtcacgccaacaacaggggtaccaacaatgtcacttcacacgcctccatctccaagcaggggtattttgcctatgaatcctaggaatatgatgaaccactcccaggttggtcagggcattggaattcctagcaggacaaatagcatgagcagttcagggttaggtagccccaacagaagctcgccaagcataatatgtatgccaaagcagcagccttctcgacagccttttactgtgaacagtatgtctggatttggaatgaacaggaatcaggcatttggaatgaataactccttatcaagtaacatttttaatggaacagacggaagtgaaaatgtgacaggattggacctttcagatttcccagcattagcagaccgaaacaggagggaaggaagtggtaacccaactccattaataaaccccttggctggaagagctccttatgttggaatggtaacaaaaccagcaaatgaacaatcccaggacttctcaatacacaatgaagattttccagcattaccaggctccagctataaagatccaacatcaagtaatgatgacagtaaatctaatttgaatacatctggcaagacaacttcaagtacagatggacccaaattccctggagataaaagttcaacaacacaaaataataaccagcagaaaaaagggatccaggtgttacctgatggtcgggttactaacattcctcaagggatggtgacggaccaatttggaatgattggcctgttaacatttatcagggcagcagagacagacccaggaatggtacatcttgcattaggaagtgacttaacaacattaggcctcaatctgaactctcctgaaaatctctaccccaaatttgcgtcaccctgggcatcttcaccttgtcgacctcaagacatagacttccatgttccatctgagtacttaacgaacattcacattagggataagctggctgcaataaaacttggccgatatggtgaagaccttctcttctatctctattacatgaatggaggagacgtattacaacttttagctgcagtggagctgtatgttcaaagtattttaatcacttttgtattatagtggatcttgactatgctgaaaacatctttaagtgatgatggctatctttaaatggaactatttctccatcaagaaatttatttttacattattaaagtgaatttaatttagattaaaaccgtatcttaaccatggcttcataatctatatacctaaaaagaatttcaaacttaatgctgaagctgggtgcagtggctcacacttgtaatcccagcactttggtgaggtggacagatcacttgaggccagaagttagggacagcctgggcaacacagcaaaccacatttctacaaaaaataaaggaaaatattagctaggtgtggtggcacacatctatatagtcctagctacttgggaggctacagcaggaggatcgcttgagcccaggagtttgaggtgtcagtgagctatgattgtgccattgcactctagtggctgacagtgcaagaccctgtctctaaaaataactaataagtgccaaatttgtaagaagacagaattgacataactcatggatttggtgaatctaatttttgtaaatatgtgaattatatgatattcatgactatgntttttattccttgtggaaccatatgtataaataattcgatactgaatttaatcatttcataaacattattacttataagcaaggcagtgtgcatatttgttgtacgttttgaagtgctgattaaagtccacattttcattatcagcagtctattggccagtttaaacaaatattaatgtaaagaaattggttcattgatattttttccctgagcagttctgtatttacctgatgctctaaaattaagttttctgtcgttactcaaatgtacagttggcaacacattttgttatcaatagacaattatgtttactatagagtaaactattagtaattatttatgaccttatgattgggagaccttttcacaaatttaagtatttcataacatttctaataacatttctataaatggctttggatcaaatagtttaaagtatataattcagtatgttgataatgaattgtttngtttcatttcacaactgagaggatttttcccttatgtttttccttcatttttgtgagaatagagattattacctgttgttccttttaattgttcataagtaaataaatacattcaggcactcattcatctatcactggcagttctgttttcatattttatttatgtcttaaaaactacctcntgacgttggtaggaaagcatttctttacatggaggtttattttgtgggacattacctcctctggatgttacttcctcagtttacaagtagtgtaaattctcattgattcttttatgaattgtaatggattttctcttagcttttgagaatttagaatctgaaatttgaataaaaagtaaatatattcagtataatttttcaaaatgctctagtttcaagatagttaaaaaattatgtggaatttacataattaattcaaatatagtttgtatttagttccttatcaaataatgcaaatagttggagatacctcaatttcttttgagtgttaagaagagcaagaaaggagtgaagtttttgcaacacattgtgtctttatttggtctgcctatgtttttatcacattgcttataaaacttttaaaatccttgtttgtataaaaagtttctttagttaaataaaagtgtgtgtattaattagtgtgccttctggacaaattaagaaatattttttctatatttcaatgcggttgtatttaataacttataataaatgagtaggaagcattcatatttatttattttatgtgtaattttttttttccggaggaaagctttacaaaatgtagaacatgtttgatgtaagccacaggaaaaagttaattatcttttcttttaaaaattgaagttttaaccgtgattggagataccacaaagaagaacgagtatggattaccagggcaccaggcatggagccaacaatgaaaaccaatacctatgagaggggaacatattacttctttgactgtcttaactggaggaaagtagctaaggtatatttctttccatgtgcaaatgtataaatctaaacttgaaaaaagaagtgtcctcttttatctgtttataagtaccaatacatccagttccagtaatgtgccacatatttgccaactgtttaattccatctccttggcttgacactcttagaagagtgtcccaaaacaattggtttcactgatagttacattattgaatttggtaagaggttttgtaattttgcataagccttggtaacatttgaaatattttttgtgtctactgctttgtaaaataaagatactctcttgcaaccccagtcatatatttttatatttttgtaactttaagcaaggatgagatttttctaaaagcagtatataa

SEQ ID NO: 354816 - DNA, 1585 bp, Homo sapiens
  misc_feature (15)..(15): n is a, c, g, or t
  misc_feature (27)..(27): n is a, c, g, or t
  misc_feature (35)..(35): n is a, c, g, or t
ccgacccgggaggtnctctgcagggangtgcttancacttaggcctcatctgactctctgaaatctctaccccaaatttgcgtcaccctgggcatcttcaccttgtcgacctcaagacatagacttccatgttccatctgagtacttaacgaacattcacattagggataagctggctgcaataaaacttggccgatatggtgaagaccttctcttctatctctattacatgaatggaggagacgtattacaacttttagctgcagtggagctttttaaccgtgattggagataccacaaagaagaacgagtatggattaccagggcaccaggcatggagccaacaatgaaaaccaatacctatgagaggggaacatattacttctttgactgtcttaactggaggaaagtagctaaggagttccatctggaatatgacaaattagaagaacggcctcacctgccatccaccttcaactacaaccctgctcagcaagccttctaaaaaaaaaaaaaaaaaaaaaaaaaaagacttcccttttcttggggtatggctgtctcagcacaatactcaacataactgcagaactgatgtggctcaggcaccctggttttaattccttgaggatctggcaattggcttacgcaaaaggtcaccatttgaggtcctgccttactaattatgtgctgcccaacaactaaatttgtaatttgtttttctctagtttgagcagggtctgaattttttcatttatttccttttttgccagcagacagacttgagtctgtaaagacaagcaaatacactgacagaagtttaccatagtttctaaaatgtaaaaaagaaaacccccaaaagactcaagaaaattagaccacaaattttgcattgttcattgtagcactattggtaataaaataacaaatgtttgtgcatttttatgtgaagatccttctcgtatttcatttggaaagatgagcaagaggtctgcttccttcattttacttccccttctgtttttgaaaggcagtttcgccaagcttaatgcaagaatatctgactgtttagaagaaagatattgccacaatctctggatggttttccagggttgtgttattactgagcttcatctttccagaatgagcaaaacactgtccagtctttgttacgattttgtaataaatgtgtacattttttttaaatttttggacatcacatgaataaaggtatgtatgtacgaatgtgtatatattatatatatgacatctattttggaaaatgtttgccctgctgtacctcatttttaggaggtgtgcatggatgcaatatatgaaaatgggacattctggaactgctggtcaggggactttgtcgccctgtgcactaaaagggccagattttcagcagccaaggacatccatacccaagtgaatgtgatgggacttaaaagaagtgaactgagacaattcactctggctgtttgaacagcagcgtttcataggaagagaaaaaaagatcaatcttgtattttctgaccacataaaggcttcttctctttgtaataaagtagaaaagctctcctca

SEQ ID NO: 354817 - DNA, 859 bp, Homo sapiens
cagatcagtttctgccaatttcagtggtttattgttcttagtatagttctttctctcttttttgttgaagttttaaacatgtttaaaacttcaacaaaaaaagagagaaagaactatactaagaacatatattattcagatcagtttctgccaatttcagtggtttattgttcacaaaaaaatcttcaaaacaagtattgactttcacaaaatttaaatcataaacaggcaaaccaaacagcacactgtagctatagttgttatgtgattgttttttaattgctgtaggatcctgttctttcagcaggtgaaaaataaaacgcagttcaaatttcatggttttaattttcaactcagaagcactcaaaaatgcaaaatgtgataatgggcacttgtttaaaagaattagtgtatccagccttcactccagctggttaaaaatgttgcacttatcagcaaccctaccactttcatctgctgaaaggacaaatgtgcttggttttactattatgtaatcacaacttactttctgcttgtagttgcttaaaattatgtattttgtcttgggctgcaatttgttttatgcttattttattattactgcagtagttgactttgctgtatggaaaaataaagtgaaattgccctaataaaacttctctttcttaagtagttgaaaaaaaaaaagggggggggttaaaattcctcgggggcaaggtttgcgtcccagttctggtccaggtcctagggatcgatttaactaggaggcggttaaagtgaggaaacggctggactggaagactcttggggcaggcacaccaaatagcggaatactaggattaacgttcggggagggtta

SEQ ID NO: 354818 - DNA, 2427 bp, Homo sapiens
  misc_feature (1077)..(1077): n is a, c, g, or t
  misc_feature (1079)..(1079): n is a, c, g, or t
  misc_feature (1081)..(1081): n is a, c, g, or t
  misc_feature (1098)..(1098): n is a, c, g, or t
  misc_feature (1756)..(1756): n is a, c, g, or t
cacatttctcagaagcacaccattctgctctgcaaatatctttgtaggagaaattggaaattgacaaatacattcacttaaattttgctttgtgctgaaaattgaggaaaaatttaaattggccatttgcacattattagtagtaaatcaacccatgtaaagatggaaactatggtcatttcaaaagtgattttcatttttggtaagtgggtcctacagcattatgtcctcatatttgtgagttattgcaccctggctagtattttcattgctgccttatgtttatttgctgcaaatccctctcaaaactgtgtgcattggttataatgctaatgaggaagataattcaaactaaaattcaaatcataatagctttaggattttagagagatagtataaggttaactcattttcagcatgtgcagacttaattatgcatgggatgaaatacagtaggcaagtctcagcctaataataaataattgaaaaatataacctgtacaatatttaaactggctttaatattacttaattatcacattattctttttcattcatcatttcttttccaattctctcaccctaccattaagacagtaatgattttataagatgtagatccggtattaagttttgcttgctctactgtctcaaattattataacttctttgttattactggcttgtttctgtttgtctttcacaagtctttgactcagtagtagtagcaaatgacagagatcttcaagtgtcttaatgcttgtcaatataatattattccacttgataggatgtgtccccagatacattacagagtttaatcgttgatcactctgcccacagtctaattgtgataacaaactaatcgcagctgttacagagatgccagttaagtaatccgtgtttcagctgagtttctcaatggcagctttattttatagggccatctctgacgagattcatttggcagatatttttctaacaaatgttcgtcccagatgctgctagtatttaaacaggatatgctaagatttagatagaaatataaaatccttggatatttaaaacctagaattntnanataatcccatagaaagnacagtagttctgcatatgggaaagtgccttgtacttggtaaaataagttaaattttcaatatttacatgtcaaagagaacaaggactatctatatatgcaacatttatttttgcttatcatggttgaacaattgtcagcatcagtgctaacaccccatatgtgatgtatgtattttcactctctcccactcaaggtttttattgaactctaattagcagtttcttgcgtgtgaaattttgtagaacatttgctactcccagaagtcttgaaggtctaaaccagcaatgaaaaccactctgatttcctagatactgtgaagtaaaccaatttgatacttataagaaattatattcccccttaatgcttttcctacattttaatttcaaactaaggaaaggcacaaatttcacttttttatgtataatttattgcttggcatccctccaaatacaaatcctgtatgaataattacaacccctttcatgtttatatggttgctgctacaatgaacaggaaaataaagcaaaaggaatgaaaatgaatgtttgggtttcattatattgttaagtcagttttgtacattgaattatttagtatttaataataaatatctttagtaagttaatatgtgcctgatataaagaaaatgttaaggcnttcataagttaaagtcagaaatagcaaaacgaccagatggttagtaatcagattaaaacaaaacaaattacaatattatttttaaaagaattaagtggatttaaattacttccaaaatacttttgtttataggcaacaattaagagaaacaaagtgtaccagcacacagttaaactggcttttattcttcacttgagactagttctaattgatcactgtgctattgtatgatttgattgtgctgacagttacatgccactgttcccataataacaatttttcttctttgttcaaatgaattttctaattacacgtgtgatgggatgttttaattcttttcccttttcaaatccaccttcctgttgcaatgcatgatgggcaggctcaatattgtgcatgacacccgctacaagtgttggtaggtgccagctttgtttcttgattatcttaaacctatggtgtacctcacagcccctcaaaatccactgctaagtttaacttatatctattgggcaagtccatttcccttttactaacacttgtcaattaaatgccattttctgtttaattgacatggactcacataagtgttttctttacacacaacagtttcctttagtcacctttggtggattttgattggactatgagttctggtgtgtaaaaaaaat

SEQ ID NO: 354819 - DNA, 6491 bp, Homo sapiens
cccccagtctccaaaacttcatcacatcacagacgttcaggattctttccattcaaagcaaagccaagttacatcttatagcacccagtgaattatgatatggggctgcggtttatttgctctggcgacaatatggcttacttgccgtggaatatcccggtatttcagaagtaacatattatttttaaagagggagctttgctttctctaaatcacatggtgcaaagttgggaatacagtggcctgtaaattacaaatattatttacaaactagaaggaaagctgacatgtgtttgtgcctgtgtgacagtttcactaaggaattccaaaactgtggatagcctgttacttgagaaaaatacacggtggcagtcttgcagatgtttttcccgcctgttagccctccaggttcaaaaactgtttggtgcattttaaggcggcagtctcaccagatcgcaggattctagtctaattggcttctaaccttcaatctaaccttgccggcttccttgcaaagcccggtgcaagggcctctttcaaaatgaacccactggtgtgcctagcagtcggtagaagaagcgggagggcgtccggtctgcacgcccgccgcgaggttacaatgctgaacgcatgagatggaagataccaacgggaggccgaggggatccacggcgcccgcgcgggctccggcttcctcctgctctcggcgccgctgggcgaccgcccatgacccgctcttgcgggctctgtccggttgacaggcgaccctgtggcccggggaagcgcgggagggcgccggcggaaagttgaagagcgtttttctcgccgccgcgtgcattaggagctcgacgagtccgccctgggcttcctggtggggctgggcgggcgggggaggggccgcgcagcagcagcggaagccagacctcggcgataagaggctgcacagcgacatgcaacagtcttttcactgcagctgaatgagttgtggcgcccacaatgctcccatgacaaggagctgacaagttccattttccgtcgcgggcatcttggaatcatgactcccacaatgccttgggcacttggtcgacagtggggccgcctctgaaaaaaaaatgtgagaggttggtactaagaagtgcctttcctgacgtctctgctgcttggaaccgcttctagagcagtctctgcttttgccttgcttgctgccagctagactgtgacgacagcacatccaccctccacctctagcccagacacccccatttctacttataatcaagagaaaagctctaagtatctggcattgccctaggctgctttagtgttaaaagaaaagtttgctgaaaaagtaagatatcttctgccaggaaatcaaggaggaaaaaaaaaatcattttctcgattttgctctaaactgctgcatctgtctatgccaaactaatcaataccgattgcaccaccaaactccattgcaaattcagctgtgaggagattccctttcagacaactttgctgaaagcagcttggaaattcggtgtcgaagggtctgccacgttttcatgcttgcattttgggctccaaattggcactgggaaggggttactgagagcacaaggctgataccaggccctacttttaaacgttcatctacttacaatcctagtatttctctaaaaaccaaaacctctttgaattaacagtttcatgctgtgaatttctagtgggagatcttttccttgatattgacgacacaattttccatgtacttttaaagcagggagtggggaaaagtattttgaggggacattttcatcatcagttcagctttttttttttggttgttgctcttttttgggggggttgggtttgttggtttcactgaaacatttaactacctgtaaaatctaaacatggctgttagtgtcacaccaattcgggacacaaaatggctaacactggaagtatgtagagagttccagagggggacttgctcacggccagacacggaatgtaaatttgcacatccttcgaaaagctgccaagttgaaaatggacgagtaatcgcctgctttgattcattgaaaggccgttgctccagggagaactgcaaatatcttcatccacccccacatttaaaaacgcagttggagataaatggacgcaataacttgattcagcagaagaacatggccatgttggcccagcaaatgcaactagccaatgccatgatgcctggtgccccattacaacccgtgccaatgttttcagttgcaccaagcttagccaccaatgcatcagcagccgcctttaatccctatctgggacctgtttctccaagcctggtcccggcagagatcttgccgactgcaccaatgttggttacagggaatccgggtgtccctgtacctgcagctgctgcagctgctgcacagaaattaatgcgaacagacagacttgaggtatgtcgagagtaccaacgtggcaattgcaaccgaggagaaaatgattgtcggtttgctcatcctgctgacagcacaatgattgacaccaatgacaacacagtcactgtgtgtatggattacatcaaagggagatgctctcgggaaaagtgcaaatactttcatccccctgcacatttgcaagccaagatcaaggctgcccaataccaggtcaaccaggctgcagctgcacaggctgcagccaccgcagctgccatgactcagtcggctgtcaaatcactgaagcgacccctcgaggcaacctttgacctgggaattcctcaagctgtacttcccccattaccaaagaggcctgctcttgaaaaaaccaacggtgccaccgcagtctttaacactggtattttccaataccaacaggctctagccaacatgcagttacaacagcatacagcatttctcccaccagttcccatggtgcacggtgctacgccagccactgtgtccgcagcaacaacatctgccacaagtgttcccttcgctgcaacagccacagccaaccagatacccataatatctgccgaacatctgactagccacaagtatgttacccagatgtagaattttcatcactaaacaatcatgctaaagaggaaaggacagtgtgcttggttagagtaaaggacgaggtcattagccatattgtatatatcgtcaagcaacacacacaaaagttcctcagccacaagacatccacatattgcatgttaaccagaagaaaagacaacattttccggaaatccactgcacactgttgcctatacactttgtacatttaattgatatttgtgctgaggtgatattcctgtctaaaagaacaacattgtctttcttttctagcacagagttatgcattcaaagatgcatacctagttagtttcctatatattcatgccatcttgaaaagacagactatggtgtaaccatgattctattatgtattggtacgtctgtagaccaagatataattttttaaaaataagtttatttctttcaaggtttacaaataacaaaggtgcaccttgtatttaaaattgccattatagatgagagcgtgcatgcacagtcatttttgtttaagagtaatatttttaatgtaatagattgtaagacgtggtgagggagggatctgacagagatgaatgtgccaagcaaaaccacaactgtgtatattttaaagcacatcatggctttaagtaccatgttgttaaggattctcatgaagtgccatagactgtacatcaaattagagtattatttcttcagtgttattgttttcagagccacattttgttgcatatttgctagtactaatcagtcaaagggcaccattctttttttttttttttgaaaccaaagctgtctcagaaatggccaatttaactttacagtaacaatagacagcacaacacaaactctctcaatacagataaactcacacatactggagatatatatataatagatatatataaaattattttaatgcattgtagtgtaatatttatgcatactatactgtataacatgttattcaaaagggattgccatttctgagacacagtaacaaaaaaatgaggaaattattttgcttctatttatagcctctgtcaaaagtcaaaagactataaatgctttgcaaaaatggtttcacgtttgcttaaatgcttcatcacagtcacattcaaaatagtgactctaaacaaagaagaaagcagcactgtcatcagatgcatgataaaccaaaatatgaaaatgggaaatgtttaattaacctagtaattgggtgggttaagtacatgggtgaattttatatgtgatttttgttttgttttgttttgttcagattaactgcttatagccttagaaagccttttacaaaattaaaaaaaaaatagatgtgcattcagtttttaagaatggaatcatccaaaggaattcctttttttgaggtttggatgttgcagctagtaaaggatatttttgctctgttcagcagttctaaaaattgctgaagtaggggccaggtcactggtagttatagtatggaatgggagaagtgaaagttcagttatagaactttccatacttccaagtttactgcaagtttttatgcttgagagagatgctttctaatataagactgatgtgttgattttactgattgtactgtacatctattaaagccttagattattacattacgggttggaacccataccaatgtaatttcaatcgtgttaagaaagtaatggtgacttcacatgttattgtagttagttacattatagaatattacttatttttcttgttaaaatgtagtttttcatttcctacatttattagattttcattttctattaacaattgaataccatttcagtttatagacttgttttattagattttaccaatgaatttttcaaaatacaaaaaaaagtagtttttccttcataacatactcagttttgaattacatgtagtgtcacatgaatattcgtattgttaactaaatgatttatattttactgatttaatattacagtgtaagaatgtcagtcattgttagttcttgtctagttttcattaaaagaacaaagatcttttatatggatatcttataaatatataatcattgctaagtaagaagttaagttgttgctatcgcaacaatcctggcagacaattgagtaatattttgatgatttattttgtttgtaattagttattataagaagatctagatcctagatattagaataaaatttattttctactgtatccatttcaaatgttaaaatattgtttaatatttttgaaatccctgagtatcaggccttgttataaataagctgcataatcaataaatagaacaagggactttttgttgataatccaaatactcaaagtttacgtaatgaaaattatagcgtgtgtgcaaactcttgagggttgattatgctgcaatttagcatgttggaacgtctagggagaaggttgactttttgcacttctgtatatagtcaaaagagagaaacctgtataatagtaagatcttattttgaataaaaacgtctataattacaaggagttttgttaaggctaatacaatgacagactgagcaaaattgcttgcaaaagtggcacagagttagcactccataccccttcaaacatgttgctttgctttcttgtggacagcttgtagtttgccaggattttttcagctggaaagatacgccatcctttcaaaccctcatgactgacaaaaactccatggggccaaatctgcctgaagatcattaccaaaaatagcaggtacttctaccattaaggtgaaatcatggatcagatattccttacatttttcaaaactactgcatgtttaaaacttcaacaaaaaaagagagaaagaactatactaagaacatatattattcagatcagtttctgccaatttcagtggtttattgttcacaaaaaaatcttcaaaacaagtattgactttcacaaaatttaaatcataaacaggcaaaccaaacagcacactgtagctatagttgttatgtgattgttttttaattgctgtaggatcctgttctttcagcaggtgaaaaataaaacgcagttcaaatttcatggttttaattttcaactcagaagcactcaaaaatgcaaaatgtgataatgggcacttgtttaaaagaattagtgtatccagccttcactccagctggttaaaaatgttgcacttatcagcaaccctaccactttcatctgctgaaaggacaaatgtgcttggttttactattatgtaatcacaacttactttctgcttgtagttgcttaaaattatgtattttgtcttgggctgcaatttgttttatgcttattttattattactgcagtagttgactttgctgtatggaaaaataaagtgaaattgccctaataaaacttctctttcttaagta

SEQ ID NO: 354820 - DNA, 5643 bp, Homo sapiens
aactgcatgttgggtaaattcaaaacccacatgctcgtcctcttgcagtggaataagtcacatctgatggacattttctgtgcttatagcatagtaatgaacgtctgacaggcgcgacctttcataagacaacccacactattggctttctgcccagaatattgctgcaacactatctgtgattggttatctctctatcatgcattgcttcacaaggggaaacggcccctttttttaataaatctacgatggctggctgcaatatgcctcactgttggtactaagaagtgcctttcctgacgtctctgctgcttggaaccgcttctagagcagtctctgcttttgccttgcttgctgccagctagactgtgacgacagcacatccaccctccacctctagcccagacacccccatttctacttataatcaagagaaaagctctaagtatctggcattgccctaggctgctttagtgttaaaagaaaagtttgctgaaaaagtaagatatcttctgccaggaaatcaaggaggaaaaaaaaaatcattttctcgattttgctctaaactgctgcatctgtctatgccaaactaatcaataccgattgcaccaccaaactccattgcaaattcagctgtgaggagattccctttcagacaactttgctgaaagcagcttggaaattcggtgtcgaagggtctgccacgttttcatgcttgcattttgggctccaaattggcactgggaaggggttactgagagcacaaggctgataccaggccctacttttaaacgttcatctacttacaatcctagtatttctctaaaaaccaaaacctctttgaattaacagtttcatgctgtgaatttctagtgggagatcttttccttgatattgacgacacaattttccatgtacttttaaagcagggagtggggaaaagtattttgaggggacattttcatcatcagttcagctttttttttttggttgttgctcttttttgggggggttgggtttgttggtttcactgaaacatttaactacctgtaaaatctaaacatggctgttagtgtcacaccaattcgggacacaaaatggctaacactggaagtatgtagagagttccagagggggacttgctcacggccagacacggaatgtaaatttgcacatccttcgaaaagctgccaagttgaaaatggacgagtaatcgcctgctttgattcattgaaaggccgttgctccagggagaactgcaaatatcttcatccacccccacatttaaaaacgcagttggagataaatggacgcaataacttgattcagcagaagaacatggccatgttggcccagcaaatgcaactagccaatgccatgatgcctggtgccccattacaacccgtgccaatgttttcagttgcaccaagcttagccaccaatgcatcagcagccgcctttaatccctatctgggacctgtttctccaagcctggtcccggcagagatcttgccgactgcaccaatgttggttacagggaatccgggtgtccctgtacctgcagctgctgcagctgctgcacagaaattaatgcgaacagacagacttgaggtatgtcgagagtaccaacgtggcaattgcaaccgaggagaaaatgattgtcggtttgctcatcctgctgacagcacaatgattgacaccaatgacaacacagtcactgtgtgtatggattacatcaaagggagatgctctcgggaaaagtgcaaatactttcatccccctgcacatttgcaagccaagatcaaggctgcccaataccaggtcaaccaggctgcagctgcacaggctgcagccaccgcagctgccatgactcagtcggctgtcaaatcactgaagcgacccctcgaggcaacctttgacctgggaattcctcaagctgtacttcccccattaccaaagaggcctgctcttgaaaaaaccaacggtgccaccgcagtctttaacactggtattttccaataccaacaggctctagccaacatgcagttacaacagcatacagcatttctcccaccagttcccatggtgcacggtgctacgccagccactgtgtccgcagcaacaacatctgccacaagtgttcccttcgctgcaacagccacagccaaccagatacccataatatctgccgaacatctgactagccacaagtatgttacccagatgtagaattttcatcactaaacaatcatgctaaagaggaaaggacagtgtgcttggttagagtaaaggacgaggtcattagccatattgtatatatcgtcaagcaacacacacaaaagttcctcagccacaagacatccacatattgcatgttaaccagaagaaaagacaacattttccggaaatccactgcacactgttgcctatacactttgtacatttaattgatatttgtgctgaggtgatattcctgtctaaaagaacaacattgtctttcttttctagcacagagttatgcattcaaagatgcatacctagttagtttcctatatattcatgccatcttgaaaagacagactatggtgtaaccatgattctattatgtattggtacgtctgtagaccaagatataattttttaaaaataagtttatttctttcaaggtttacaaataacaaaggtgcaccttgtatttaaaattgccattatagatgagagcgtgcatgcacagtcatttttgtttaagagtaatatttttaatgtaatagattgtaagacgtggtgagggagggatctgacagagatgaatgtgccaagcaaaaccacaactgtgtatattttaaagcacatcatggctttaagtaccatgttgttaaggattctcatgaagtgccatagactgtacatcaaattagagtattatttcttcagtgttattgttttcagagccacattttgttgcatatttgctagtactaatcagtcaaagggcaccattctttttttttttttttgaaaccaaagctgtctcagaaatggccaatttaactttacagtaacaatagacagcacaacacaaactctctcaatacagataaactcacacatactggagatatatatataatagatatatataaaattattttaatgcattgtagtgtaatatttatgcatactatactgtataacatgttattcaaaagggattgccatttctgagacacagtaacaaaaaaatgaggaaattattttgcttctatttatagcctctgtcaaaagtcaaaagactataaatgctttgcaaaaatggtttcacgtttgcttaaatgcttcatcacagtcacattcaaaatagtgactctaaacaaagaagaaagcagcactgtcatcagatgcatgataaaccaaaatatgaaaatgggaaatgtttaattaacctagtaattgggtgggttaagtacatgggtgaattttatatgtgatttttgttttgttttgttttgttcagattaactgcttatagccttagaaagccttttacaaaattaaaaaaaaaatagatgtgcattcagtttttaagaatggaatcatccaaaggaattcctttttttgaggtttggatgttgcagctagtaaaggatatttttgctctgttcagcagttctaaaaattgctgaagtaggggccaggtcactggtagttatagtatggaatgggagaagtgaaagttcagttatagaactttccatacttccaagtttactgcaagtttttatgcttgagagagatgctttctaatataagactgatgtgttgattttactgattgtactgtacatctattaaagccttagattattacattacgggttggaacccataccaatgtaatttcaatcgtgttaagaaagtaatggtgacttcacatgttattgtagttagttacattatagaatattacttatttttcttgttaaaatgtagtttttcatttcctacatttattagattttcattttctattaacaattgaataccatttcagtttatagacttgttttattagattttaccaatgaatttttcaaaatacaaaaaaaagtagtttttccttcataacatactcagttttgaattacatgtagtgtcacatgaatattcgtattgttaactaaatgatttatattttactgatttaatattacagtgtaagaatgtcagtcattgttagttcttgtctagttttcattaaaagaacaaagatcttttatatggatatcttataaatatataatcattgctaagtaagaagttaagttgttgctatcgcaacaatcctggcagacaattgagtaatattttgatgatttattttgtttgtaattagttattataagaagatctagatcctagatattagaataaaatttattttctactgtatccatttcaaatgttaaaatattgtttaatatttttgaaatccctgagtatcaggccttgttataaataagctgcataatcaataaatagaacaagggactttttgttgataatccaaatactcaaagtttacgtaatgaaaattatagcgtgtgtgcaaactcttgagggttgattatgctgcaatttagcatgttggaacgtctagggagaaggttgactttttgcacttctgtatatagtcaaaagagagaaacctgtataatagtaagatcttattttgaataaaaacgtctataattacaaggagttttgttaaggctaatacaatgacagactgagcaaaattgcttgcaaaagtggcacagagttagcactccataccccttcaaacatgttgctttgctttcttgtggacagcttgtagtttgccaggattttttcagctggaaagatacgccatcctttcaaaccctcatgactgacaaaaactccatggggccaaatctgcctgaagatcattaccaaaaatagcaggtacttctaccattaaggtgaaatcatggatcagatattccttacatttttcaaaactactgcatgtttaaaacttcaacaaaaaaagagagaaagaactatactaagaacatatattattcagatcagtttctgccaatttcagtggtttattgttcacaaaaaaatcttcaaaacaagtattgactttcacaaaatttaaatcataaacaggcaaaccaaacagcacactgtagctatagttgttatgtgattgttttttaattgctgtaggatcctgttctttcagcaggtgaaaaataaaacgcagttcaaatttcatggttttaattttcaactcagaagcactcaaaaatgcaaaatgtgataatgggcacttgtttaaaagaattagtgtatccagccttcactccagctggttaaaaatgttgcacttatcagcaaccctaccactttcatctgctgaaaggacaaatgtgcttggttttactattatgtaatcacaacttactttctgcttgtagttgcttaaaattatgtattttgtcttgggctgcaatttgttttatgcttattttattattactgcagtagttgactttgctgtatggaaaaataaagtgaaattgccctaataaaacttctctttcttaagta

SEQ ID NO: 354821 - DNA, 5433 bp, Homo sapiens
gaagtgctggtagtttgtctcaacccatgaagcagcttaacaagcaactattaaagcatagaggttggtactaagaagtgcctttcctgacgtctctgctgcttggaaccgcttctagagcagtctctgcttttgccttgcttgctgccagctagactgtgacgacagcacatccaccctccacctctagcccagacacccccatttctacttataatcaagagaaaagctctaagtatctggcattgccctaggctgctttagtgttaaaagaaaagtttgctgaaaaagtaagatatcttctgccaggaaatcaaggaggaaaaaaaaaatcattttctcgattttgctctaaactgctgcatctgtctatgccaaactaatcaataccgattgcaccaccaaactccattgcaaattcagctgtgaggagattccctttcagacaactttgctgaaagcagcttggaaattcggtgtcgaagggtctgccacgttttcatgcttgcattttgggctccaaattggcactgggaaggggttactgagagcacaaggctgataccaggccctacttttaaacgttcatctacttacaatcctagtatttctctaaaaaccaaaacctctttgaattaacagtttcatgctgtgaatttctagtgggagatcttttccttgatattgacgacacaattttccatgtacttttaaagcagggagtggggaaaagtattttgaggggacattttcatcatcagttcagctttttttttttggttgttgctcttttttgggggggttgggtttgttggtttcactgaaacatttaactacctgtaaaatctaaacatggctgttagtgtcacaccaattcgggacacaaaatggctaacactggaagtatgtagagagttccagagggggacttgctcacggccagacacggaatgtaaatttgcacatccttcgaaaagctgccaagttgaaaatggacgagtaatcgcctgctttgattcattgaaaggccgttgctccagggagaactgcaaatatcttcatccacccccacatttaaaaacgcagttggagataaatggacgcaataacttgattcagcagaagaacatggccatgttggcccagcaaatgcaactagccaatgccatgatgcctggtgccccattacaacccgtgccaatgttttcagttgcaccaagcttagccaccaatgcatcagcagccgcctttaatccctatctgggacctgtttctccaagcctggtcccggcagagatcttgccgactgcaccaatgttggttacagggaatccgggtgtccctgtacctgcagctgctgcagctgctgcacagaaattaatgcgaacagacagacttgaggtatgtcgagagtaccaacgtggcaattgcaaccgaggagaaaatgattgtcggtttgctcatcctgctgacagcacaatgattgacaccaatgacaacacagtcactgtgtgtatggattacatcaaagggagatgctctcgggaaaagtgcaaatactttcatccccctgcacatttgcaagccaagatcaaggctgcccaataccaggtcaaccaggctgcagctgcacaggctgcagccaccgcagctgccatgactcagtcggctgtcaaatcactgaagcgacccctcgaggcaacctttgacctgggaattcctcaagctgtacttcccccattaccaaagaggcctgctcttgaaaaaaccaacggtgccaccgcagtctttaacactggtattttccaataccaacaggctctagccaacatgcagttacaacagcatacagcatttctcccaccagttcccatggtgcacggtgctacgccagccactgtgtccgcagcaacaacatctgccacaagtgttcccttcgctgcaacagccacagccaaccagatacccataatatctgccgaacatctgactagccacaagtatgttacccagatgtagaattttcatcactaaacaatcatgctaaagaggaaaggacagtgtgcttggttagagtaaaggacgaggtcattagccatattgtatatatcgtcaagcaacacacacaaaagttcctcagccacaagacatccacatattgcatgttaaccagaagaaaagacaacattttccggaaatccactgcacactgttgcctatacactttgtacatttaattgatatttgtgctgaggtgatattcctgtctaaaagaacaacattgtctttcttttctagcacagagttatgcattcaaagatgcatacctagttagtttcctatatattcatgccatcttgaaaagacagactatggtgtaaccatgattctattatgtattggtacgtctgtagaccaagatataattttttaaaaataagtttatttctttcaaggtttacaaataacaaaggtgcaccttgtatttaaaattgccattatagatgagagcgtgcatgcacagtcatttttgtttaagagtaatatttttaatgtaatagattgtaagacgtggtgagggagggatctgacagagatgaatgtgccaagcaaaaccacaactgtgtatattttaaagcacatcatggctttaagtaccatgttgttaaggattctcatgaagtgccatagactgtacatcaaattagagtattatttcttcagtgttattgttttcagagccacattttgttgcatatttgctagtactaatcagtcaaagggcaccattctttttttttttttttgaaaccaaagctgtctcagaaatggccaatttaactttacagtaacaatagacagcacaacacaaactctctcaatacagataaactcacacatactggagatatatatataatagatatatataaaattattttaatgcattgtagtgtaatatttatgcatactatactgtataacatgttattcaaaagggattgccatttctgagacacagtaacaaaaaaatgaggaaattattttgcttctatttatagcctctgtcaaaagtcaaaagactataaatgctttgcaaaaatggtttcacgtttgcttaaatgcttcatcacagtcacattcaaaatagtgactctaaacaaagaagaaagcagcactgtcatcagatgcatgataaaccaaaatatgaaaatgggaaatgtttaattaacctagtaattgggtgggttaagtacatgggtgaattttatatgtgatttttgttttgttttgttttgttcagattaactgcttatagccttagaaagccttttacaaaattaaaaaaaaaatagatgtgcattcagtttttaagaatggaatcatccaaaggaattcctttttttgaggtttggatgttgcagctagtaaaggatatttttgctctgttcagcagttctaaaaattgctgaagtaggggccaggtcactggtagttatagtatggaatgggagaagtgaaagttcagttatagaactttccatacttccaagtttactgcaagtttttatgcttgagagagatgctttctaatataagactgatgtgttgattttactgattgtactgtacatctattaaagccttagattattacattacgggttggaacccataccaatgtaatttcaatcgtgttaagaaagtaatggtgacttcacatgttattgtagttagttacattatagaatattacttatttttcttgttaaaatgtagtttttcatttcctacatttattagattttcattttctattaacaattgaataccatttcagtttatagacttgttttattagattttaccaatgaatttttcaaaatacaaaaaaaagtagtttttccttcataacatactcagttttgaattacatgtagtgtcacatgaatattcgtattgttaactaaatgatttatattttactgatttaatattacagtgtaagaatgtcagtcattgttagttcttgtctagttttcattaaaagaacaaagatcttttatatggatatcttataaatatataatcattgctaagtaagaagttaagttgttgctatcgcaacaatcctggcagacaattgagtaatattttgatgatttattttgtttgtaattagttattataagaagatctagatcctagatattagaataaaatttattttctactgtatccatttcaaatgttaaaatattgtttaatatttttgaaatccctgagtatcaggccttgttataaataagctgcataatcaataaatagaacaagggactttttgttgataatccaaatactcaaagtttacgtaatgaaaattatagcgtgtgtgcaaactcttgagggttgattatgctgcaatttagcatgttggaacgtctagggagaaggttgactttttgcacttctgtatatagtcaaaagagagaaacctgtataatagtaagatcttattttgaataaaaacgtctataattacaaggagttttgttaaggctaatacaatgacagactgagcaaaattgcttgcaaaagtggcacagagttagcactccataccccttcaaacatgttgctttgctttcttgtggacagcttgtagtttgccaggattttttcagctggaaagatacgccatcctttcaaaccctcatgactgacaaaaactccatggggccaaatctgcctgaagatcattaccaaaaatagcaggtacttctaccattaaggtgaaatcatggatcagatattccttacatttttcaaaactactgcatgtttaaaacttcaacaaaaaaagagagaaagaactatactaagaacatatattattcagatcagtttctgccaatttcagtggtttattgttcacaaaaaaatcttcaaaacaagtattgactttcacaaaatttaaatcataaacaggcaaaccaaacagcacactgtagctatagttgttatgtgattgttttttaattgctgtaggatcctgttctttcagcaggtgaaaaataaaacgcagttcaaatttcatggttttaattttcaactcagaagcactcaaaaatgcaaaatgtgataatgggcacttgtttaaaagaattagtgtatccagccttcactccagctggttaaaaatgttgcacttatcagcaaccctaccactttcatctgctgaaaggacaaatgtgcttggttttactattatgtaatcacaacttactttctgcttgtagttgcttaaaattatgtattttgtcttgggctgcaatttgttttatgcttattttattattactgcagtagttgactttgctgtatggaaaaataaagtgaaattgccctaataaaacttctctttcttaagta

SEQ ID NO: 354822 - DNA, 6473 bp, Homo sapiens
cccccagtctccaaaacttcatcacatcacagacgttcaggattctttccattcaaagcaaagccaagttacatcttatagcacccagtgaattatgatatggggctgcggtttatttgctctggcgacaatatggcttacttgccgtggaatatcccggtatttcagaagtaacatattatttttaaagagggagctttgctttctctaaatcacatggtgcaaagttgggaatacagtggcctgtaaattacaaatattatttacaaactagaaggaaagctgacatgtgtttgtgcctgtgtgacagtttcactaaggaattccaaaactgtggatagcctgttacttgagaaaaatacacggtggcagtcttgcagatgtttttcccgcctgttagccctccaggttcaaaaactgtttggtgcattttaaggcggcagtctcaccagatcgcaggattctagtctaattggcttctaaccttcaatctaaccttgccggcttccttgcaaagcccggtgcaagggcctctttcaaaatgaacccactggtgtgcctagcagtcggtagaagaagcgggagggcgtccggtctgcacgcccgccgcgaggttacaatgctgaacgcatgagatggaagataccaacgggaggccgaggggatccacggcgcccgcgcgggctccggcttcctcctgctctcggcgccgctgggcgaccgcccatgacccgctcttgcgggctctgtccggttgacaggcgaccctgtggcccggggaagcgcgggagggcgccggcggaaagttgaagagcgtttttctcgccgccgcgtgcattaggagctcgacgagtccgccctgggcttcctggtggggctgggcgggcgggggaggggccgcgcagcagcagcggaagccagacctcggcgataagaggctgcacagcgacatgcaacagtcttttcactgcagctgaatgagttgtggcgcccacaatgctcccatgacaaggagctgacaagttccattttccgtcgcgggcatcttggaatcatgactcccacaatgccttgggcacttggtcgacagtggggccgcctctgaaaaaaaaatgtgagaggttggtactaagaagtgcctttcctgacgtctctgctgcttggaaccgcttctagagcagtctctgcttttgccttgcttgctgccagctagactgtgacgacagcacatccaccctccacctctagcccagacacccccatttctacttataatcaagagaaaagctctaagtatctggcattgccctaggctgctttagtgttaaaagaaaagtttgctgaaaaagtaagatatcttctgccaggaaatcaaggaggaaaaaaaaaatcattttctcgattttgctctaaactgctgcatctgtctatgccaaactaatcaataccgattgcaccaccaaactccattgcaaattcagctgtgaggagattccctttcagacaactttgctgaaagcagcttggaaattcggtgtcgaagggtctgccacgttttcatgcttgcattttgggctccaaattggcactgggaaggggttactgagagcacaaggctgataccaggccctacttttaaacgttcatctacttacaatcctagtatttctctaaaaaccaaaacctctttgaattaacagtttcatgctgtgaatttctagtgggagatcttttccttgatattgacgacacaattttccatgtacttttaaagcagggagtggggaaaagtattttgaggggacattttcatcatcagttcagctttttttttttggttgttgctcttttttgggggggttgggtttgttggtttcactgaaacatttaactacctgtaaaatctaaacatggctgttagtgtcacaccaattcgggacacaaaatggctaacactggaagtatgtagagagttccagagggggacttgctcacggccagacacggaatgtaaatttgcacatccttcgaaaagctgccaagttgaaaatggacgagtaatcgcctgctttgattcattgaaaggccgttgctccagggagaactgcaaatatcttcatccacccccacatttaaaaacgcagttggagataaatggacgcaataacttgattcagcagaagaacatggccatgttggcccagcaaatgcaactagccaatgccatgatgcctggtgccccattacaacccgtgccaatgttttcagttgcaccaagcttagccaccaatgcatcagcagccgcctttaatccctatctgggacctgtttctccaagcctggtcccggcagagatcttgccgactgcaccaatgttggttacagggaatccgggtgtccctgtacctgcagctgctgcagctgctgcacagaaattaatgcgaacagacagacttgaggtatgtcgagagtaccaacgtggcaattgcaaccgaggagaaaatgattgtcggtttgctcatcctgctgacagcacaatgattgacaccaatgacaacacagtcactgtgtgtatggattacatcaaagggagatgctctcgggaaaagtgcaaatactttcatccccctgcacatttgcaagccaagatcaaggctgcccaataccaggtcaaccaggctgcagctgcacaggctgcagccaccgcagctgccatgggaattcctcaagctgtacttcccccattaccaaagaggcctgctcttgaaaaaaccaacggtgccaccgcagtctttaacactggtattttccaataccaacaggctctagccaacatgcagttacaacagcatacagcatttctcccaccaggctcaatattgtgcatgacacccgctacaagtgttgttcccatggtgcacggtgctacgccagccactgtgtccgcagcaacaacatctgccacaagtgttcccttcgctgcaacagccacagccaaccagatacccataatatctgccgaacatctgactagccacaagtatgttacccagatgtagaattttcatcactaaacaatcatgctaaagaggaaaggacagtgtgcttggttagagtaaaggacgaggtcattagccatattgtatatatcgtcaagcaacacacacaaaagttcctcagccacaagacatccacatattgcatgttaaccagaagaaaagacaacattttccggaaatccactgcacactgttgcctatacactttgtacatttaattgatatttgtgctgaggtgatattcctgtctaaaagaacaacattgtctttcttttctagcacagagttatgcattcaaagatgcatacctagttagtttcctatatattcatgccatcttgaaaagacagactatggtgtaaccatgattctattatgtattggtacgtctgtagaccaagatataattttttaaaaataagtttatttctttcaaggtttacaaataacaaaggtgcaccttgtatttaaaattgccattatagatgagagcgtgcatgcacagtcatttttgtttaagagtaatatttttaatgtaatagattgtaagacgtggtgagggagggatctgacagagatgaatgtgccaagcaaaaccacaactgtgtatattttaaagcacatcatggctttaagtaccatgttgttaaggattctcatgaagtgccatagactgtacatcaaattagagtattatttcttcagtgttattgttttcagagccacattttgttgcatatttgctagtactaatcagtcaaagggcaccattctttttttttttttttgaaaccaaagctgtctcagaaatggccaatttaactttacagtaacaatagacagcacaacacaaactctctcaatacagataaactcacacatactggagatatatatataatagatatatataaaattattttaatgcattgtagtgtaatatttatgcatactatactgtataacatgttattcaaaagggattgccatttctgagacacagtaacaaaaaaatgaggaaattattttgcttctatttatagcctctgtcaaaagtcaaaagactataaatgctttgcaaaaatggtttcacgtttgcttaaatgcttcatcacagtcacattcaaaatagtgactctaaacaaagaagaaagcagcactgtcatcagatgcatgataaaccaaaatatgaaaatgggaaatgtttaattaacctagtaattgggtgggttaagtacatgggtgaattttatatgtgatttttgttttgttttgttttgttcagattaactgcttatagccttagaaagccttttacaaaattaaaaaaaaaatagatgtgcattcagtttttaagaatggaatcatccaaaggaattcctttttttgaggtttggatgttgcagctagtaaaggatatttttgctctgttcagcagttctaaaaattgctgaagtaggggccaggtcactggtagttatagtatggaatgggagaagtgaaagttcagttatagaactttccatacttccaagtttactgcaagtttttatgcttgagagagatgctttctaatataagactgatgtgttgattttactgattgtactgtacatctattaaagccttagattattacattacgggttggaacccataccaatgtaatttcaatcgtgttaagaaagtaatggtgacttcacatgttattgtagttagttacattatagaatattacttatttttcttgttaaaatgtagtttttcatttcctacatttattagattttcattttctattaacaattgaataccatttcagtttatagacttgttttattagattttaccaatgaatttttcaaaatacaaaaaaaagtagtttttccttcataacatactcagttttgaattacatgtagtgtcacatgaatattcgtattgttaactaaatgatttatattttactgatttaatattacagtgtaagaatgtcagtcattgttagttcttgtctagttttcattaaaagaacaaagatcttttatatggatatcttataaatatataatcattgctaagtaagaagttaagttgttgctatcgcaacaatcctggcagacaattgagtaatattttgatgatttattttgtttgtaattagttattataagaagatctagatcctagatattagaataaaatttattttctactgtatccatttcaaatgttaaaatattgtttaatatttttgaaatccctgagtatcaggccttgttataaataagctgcataatcaataaatagaacaagggactttttgttgataatccaaatactcaaagtttacgtaatgaaaattatagcgtgtgtgcaaactcttgagggttgattatgctgcaatttagcatgttggaacgtctagggagaaggttgactttttgcacttctgtatatagtcaaaagagagaaacctgtataatagtaagatcttattttgaataaaaacgtctataattacaaggagttttgttaaggctaatacaatgacagactgagcaaaattgcttgcaaaagtggcacagagttagcactccataccccttcaaacatgttgctttgctttcttgtggacagcttgtagtttgccaggattttttcagctggaaagatacgccatcctttcaaaccctcatgactgacaaaaactccatggggccaaatctgcctgaagatcattaccaaaaatagcaggtacttctaccattaaggtgaaatcatggatcagatattccttacatttttcaaaactactgcatgtttaaaacttcaacaaaaaaagagagaaagaactatactaagaacatatattattcagatcagtttctgccaatttcagtggtttattgttcacaaaaaaatcttcaaaacaagtattgactttcacaaaatttaaatcataaacaggcaaaccaaacagcacactgtagctatagttgttatgtgattgttttttaattgctgtaggatcctgttctttcagcaggtgaaaaataaaacgcagttcaaatttcatggttttaattttcaactcagaagcactcaaaaatgcaaaatgtgataatgggcacttgtttaaaagaattagtgtatccagccttcactccagctggttaaaaatgttgcacttatcagcaaccctaccactttcatctgctgaaaggacaaatgtgcttggttttactattatgtaatcacaacttactttctgcttgtagttgcttaaaattatgtattttgtcttgggctgcaatttgttttatgcttattttattattactgcagtagttgactttgctgtatggaaaaataaagtgaaattgccctaataaaacttctctttcttaagta

SEQ ID NO: 354823 - DNA, 6347 bp, Homo sapiens
cccccagtctccaaaacttcatcacatcacagacgttcaggattctttccattcaaagcaaagccaagttacatcttatagcacccagtgaattatgatatggggctgcggtttatttgctctggcgacaatatggcttacttgccgtggaatatcccggtatttcagaagtaacatattatttttaaagagggagctttgctttctctaaatcacatggtgcaaagttgggaatacagtggcctgtaaattacaaatattatttacaaactagaaggaaagctgacatgtgtttgtgcctgtgtgacagtttcactaaggaattccaaaactgtggatagcctgttacttgagaaaaatacacggtggcagtcttgcagatgtttttcccgcctgttagccctccaggttcaaaaactgtttggtgcattttaaggcggcagtctcaccagatcgcaggattctagtctaattggcttctaaccttcaatctaaccttgccggcttccttgcaaagcccggtgcaagggcctctttcaaaatgaacccactggtgtgcctagcagtcggtagaagaagcgggagggcgtccggtctgcacgcccgccgcgaggttacaatgctgaacgcatgagatggaagataccaacgggaggccgaggggatccacggcgcccgcgcgggctccggcttcctcctgctctcggcgccgctgggcgaccgcccatgacccgctcttgcgggctctgtccggttgacaggcgaccctgtggcccggggaagcgcgggagggcgccggcggaaagttgaagagcgtttttctcgccgccgcgtgcattaggagctcgacgagtccgccctgggcttcctggtggggctgggcgggcgggggaggggccgcgcagcagcagcggaagccagacctcggcgataagaggctgcacagcgacatgcaacagtcttttcactgcagctgaatgagttgtggcgcccacaatgctcccatgacaaggagctgacaagttccattttccgtcgcgggcatcttggaatcatgactcccacaatgccttgggcacttggtcgacagtggggccgcctctgaaaaaaaaatgtgagaggttggtactaagaagtgcctttcctgacgtctctgctgcttggaaccgcttctagagcagtctctgcttttgccttgcttgctgccagctagactgtgacgacagcacatccaccctccacctctagcccagacacccccatttctacttataatcaagagaaaagctctaagtatctggcattgccctaggctgctttagtgttaaaagaaaagtttgctgaaaaagtaagatatcttctgccaggaaatcaaggaggaaaaaaaaaatcattttctcgattttgctctaaactgctgcatctgtctatgccaaactaatcaataccgattgcaccaccaaactccattgcaaattcagctgtgaggagattccctttcagacaactttgctgaaagcagcttggaaattcggtgtcgaagggtctgccacgttttcatgcttgcattttgggctccaaattggcactgggaaggggttactgagagcacaaggctgataccaggccctacttttaaacgttcatctacttacaatcctagtatttctctaaaaaccaaaacctctttgaattaacagtttcatgctgtgaatttctagtgggagatcttttccttgatattgacgacacaattttccatgtacttttaaagcagggagtggggaaaagtattttgaggggacattttcatcatcagttcagctttttttttttggttgttgctcttttttgggggggttgggtttgttggtttcactgaaacatttaactacctgtaaaatctaaacatggctgttagtgtcacaccaattcgggacacaaaatggctaacactggaagtatgtagagagttccagagggggacttgctcacggccagacacggaatgtaaatttgcacatccttcgaaaagctgccaagttgaaaatggacgagtaatcgcctgctttgattcattgaaaggccgttgctccagggagaactgcaaatatcttcatccacccccacatttaaaaacgcagttggagataaatggacgcaataacttgattcagcagaagaacatggccatgttggcccagcaaatgcaactagccaatgccatgatgcctggtgccccattacaacccgtgccaatgttttcagttgcaccaagcttagccaccaatgcatcagcagccgcctttaatccctatctgggacctgtttctccaagcctggtcccggcagagatcttgccgactgcaccaatgttggttacagggaatccgggtgtccctgtacctgcagctgctgcagctgctgcacagaaattaatgcgaacagacagacttgaggtatgtcgagagtaccaacgtggcaattgcaaccgaggagaaaatgattgtcggtttgctcatcctgctgacagcacaatgattgacaccaatgacaacacagtcactgtgtgtatggattacatcaaagggagatgctctcgggaaaagtgcaaatactttcatccccctgcacatttgcaagccaagatcaaggctgcccaataccaggtcaaccaggctgcagctgcacaggctgcagccaccgcagctgccatgttcccatggtgcacggtgctacgccagccactgtgtccgcagcaacaacatctgccacaagtgttcccttcgctgcaacagccacagccaaccagccccatccttgatgcttctacactgttgggtgcaacatcctgtcctgcagcagcaggaaaaatgatacccataatatctgccgaacatctgactagccacaagtatgttacccagatgtagaattttcatcactaaacaatcatgctaaagaggaaaggacagtgtgcttggttagagtaaaggacgaggtcattagccatattgtatatatcgtcaagcaacacacacaaaagttcctcagccacaagacatccacatattgcatgttaaccagaagaaaagacaacattttccggaaatccactgcacactgttgcctatacactttgtacatttaattgatatttgtgctgaggtgatattcctgtctaaaagaacaacattgtctttcttttctagcacagagttatgcattcaaagatgcatacctagttagtttcctatatattcatgccatcttgaaaagacagactatggtgtaaccatgattctattatgtattggtacgtctgtagaccaagatataattttttaaaaataagtttatttctttcaaggtttacaaataacaaaggtgcaccttgtatttaaaattgccattatagatgagagcgtgcatgcacagtcatttttgtttaagagtaatatttttaatgtaatagattgtaagacgtggtgagggagggatctgacagagatgaatgtgccaagcaaaaccacaactgtgtatattttaaagcacatcatggctttaagtaccatgttgttaaggattctcatgaagtgccatagactgtacatcaaattagagtattatttcttcagtgttattgttttcagagccacattttgttgcatatttgctagtactaatcagtcaaagggcaccattctttttttttttttttgaaaccaaagctgtctcagaaatggccaatttaactttacagtaacaatagacagcacaacacaaactctctcaatacagataaactcacacatactggagatatatatataatagatatatataaaattattttaatgcattgtagtgtaatatttatgcatactatactgtataacatgttattcaaaagggattgccatttctgagacacagtaacaaaaaaatgaggaaattattttgcttctatttatagcctctgtcaaaagtcaaaagactataaatgctttgcaaaaatggtttcacgtttgcttaaatgcttcatcacagtcacattcaaaatagtgactctaaacaaagaagaaagcagcactgtcatcagatgcatgataaaccaaaatatgaaaatgggaaatgtttaattaacctagtaattgggtgggttaagtacatgggtgaattttatatgtgatttttgttttgttttgttttgttcagattaactgcttatagccttagaaagccttttacaaaattaaaaaaaaaatagatgtgcattcagtttttaagaatggaatcatccaaaggaattcctttttttgaggtttggatgttgcagctagtaaaggatatttttgctctgttcagcagttctaaaaattgctgaagtaggggccaggtcactggtagttatagtatggaatgggagaagtgaaagttcagttatagaactttccatacttccaagtttactgcaagtttttatgcttgagagagatgctttctaatataagactgatgtgttgattttactgattgtactgtacatctattaaagccttagattattacattacgggttggaacccataccaatgtaatttcaatcgtgttaagaaagtaatggtgacttcacatgttattgtagttagttacattatagaatattacttatttttcttgttaaaatgtagtttttcatttcctacatttattagattttcattttctattaacaattgaataccatttcagtttatagacttgttttattagattttaccaatgaatttttcaaaatacaaaaaaaagtagtttttccttcataacatactcagttttgaattacatgtagtgtcacatgaatattcgtattgttaactaaatgatttatattttactgatttaatattacagtgtaagaatgtcagtcattgttagttcttgtctagttttcattaaaagaacaaagatcttttatatggatatcttataaatatataatcattgctaagtaagaagttaagttgttgctatcgcaacaatcctggcagacaattgagtaatattttgatgatttattttgtttgtaattagttattataagaagatctagatcctagatattagaataaaatttattttctactgtatccatttcaaatgttaaaatattgtttaatatttttgaaatccctgagtatcaggccttgttataaataagctgcataatcaataaatagaacaagggactttttgttgataatccaaatactcaaagtttacgtaatgaaaattatagcgtgtgtgcaaactcttgagggttgattatgctgcaatttagcatgttggaacgtctagggagaaggttgactttttgcacttctgtatatagtcaaaagagagaaacctgtataatagtaagatcttattttgaataaaaacgtctataattacaaggagttttgttaaggctaatacaatgacagactgagcaaaattgcttgcaaaagtggcacagagttagcactccataccccttcaaacatgttgctttgctttcttgtggacagcttgtagtttgccaggattttttcagctggaaagatacgccatcctttcaaaccctcatgactgacaaaaactccatggggccaaatctgcctgaagatcattaccaaaaatagcaggtacttctaccattaaggtgaaatcatggatcagatattccttacatttttcaaaactactgcatgtttaaaacttcaacaaaaaaagagagaaagaactatactaagaacatatattattcagatcagtttctgccaatttcagtggtttattgttcacaaaaaaatcttcaaaacaagtattgactttcacaaaatttaaatcataaacaggcaaaccaaacagcacactgtagctatagttgttatgtgattgttttttaattgctgtaggatcctgttctttcagcaggtgaaaaataaaacgcagttcaaatttcatggttttaattttcaactcagaagcactcaaaaatgcaaaatgtgataatgggcacttgtttaaaagaattagtgtatccagccttcactccagctggttaaaaatgttgcacttatcagcaaccctaccactttcatctgctgaaaggacaaatgtgcttggttttactattatgtaatcacaacttactttctgcttgtagttgcttaaaattatgtattttgtcttgggctgcaatttgttttatgcttattttattattactgcagtagttgactttgctgtatggaaaaataaagtgaaattgccctaataaaacttctctttcttaagta

SEQ ID NO: 354824 - DNA, 6418 bp, Homo sapiens
cccccagtctccaaaacttcatcacatcacagacgttcaggattctttccattcaaagcaaagccaagttacatcttatagcacccagtgaattatgatatggggctgcggtttatttgctctggcgacaatatggcttacttgccgtggaatatcccggtatttcagaagtaacatattatttttaaagagggagctttgctttctctaaatcacatggtgcaaagttgggaatacagtggcctgtaaattacaaatattatttacaaactagaaggaaagctgacatgtgtttgtgcctgtgtgacagtttcactaaggaattccaaaactgtggatagcctgttacttgagaaaaatacacggtggcagtcttgcagatgtttttcccgcctgttagccctccaggttcaaaaactgtttggtgcattttaaggcggcagtctcaccagatcgcaggattctagtctaattggcttctaaccttcaatctaaccttgccggcttccttgcaaagcccggtgcaagggcctctttcaaaatgaacccactggtgtgcctagcagtcggtagaagaagcgggagggcgtccggtctgcacgcccgccgcgaggttacaatgctgaacgcatgagatggaagataccaacgggaggccgaggggatccacggcgcccgcgcgggctccggcttcctcctgctctcggcgccgctgggcgaccgcccatgacccgctcttgcgggctctgtccggttgacaggcgaccctgtggcccggggaagcgcgggagggcgccggcggaaagttgaagagcgtttttctcgccgccgcgtgcattaggagctcgacgagtccgccctgggcttcctggtggggctgggcgggcgggggaggggccgcgcagcagcagcggaagccagacctcggcgataagaggctgcacagcgacatgcaacagtcttttcactgcagctgaatgagttgtggcgcccacaatgctcccatgacaaggagctgacaagttccattttccgtcgcgggcatcttggaatcatgactcccacaatgccttgggcacttggtcgacagtggggccgcctctgaaaaaaaaatgtgagaggttggtactaagaagtgcctttcctgacgtctctgctgcttggaaccgcttctagagcagtctctgcttttgccttgcttgctgccagctagactgtgacgacagcacatccaccctccacctctagcccagacacccccatttctacttataatcaagagaaaagctctaagtatctggcattgccctaggctgctttagtgttaaaagaaaagtttgctgaaaaagtaagatatcttctgccaggaaatcaaggaggaaaaaaaaaatcattttctcgattttgctctaaactgctgcatctgtctatgccaaactaatcaataccgattgcaccaccaaactccattgcaaattcagctgtgaggagattccctttcagacaactttgctgaaagcagcttggaaattcggtgtcgaagggtctgccacgttttcatgcttgcattttgggctccaaattggcactgggaaggggttactgagagcacaaggctgataccaggccctacttttaaacgttcatctacttacaatcctagtatttctctaaaaaccaaaacctctttgaattaacagtttcatgctgtgaatttctagtgggagatcttttccttgatattgacgacacaattttccatgtacttttaaagcagggagtggggaaaagtattttgaggggacattttcatcatcagttcagctttttttttttggttgttgctcttttttgggggggttgggtttgttggtttcactgaaacatttaactacctgtaaaatctaaacatggctgttagtgtcacaccaattcgggacacaaaatggctaacactggaagtatgtagagagttccagagggggacttgctcacggccagacacggaatgtaaatttgcacatccttcgaaaagctgccaagttgaaaatggacgagtaatcgcctgctttgattcattgaaaggccgttgctccagggagaactgcaaatatcttcatccacccccacatttaaaaacgcagttggagataaatggacgcaataacttgattcagcagaagaacatggccatgttggcccagcaaatgcaactagccaatgccatgatgcctggtgccccattacaacccgtgccaatgttttcagttgcaccaagcttagccaccaatgcatcagcagccgcctttaatccctatctgggacctgtttctccaagcctggtcccggcagagatcttgccgactgcaccaatgttggttacagggaatccgggtgtccctgtacctgcagctgctgcagctgctgcacagaaattaatgcgaacagacagacttgaggtatgtcgagagtaccaacgtggcaattgcaaccgaggagaaaatgattgtcggtttgctcatcctgctgacagcacaatgattgacaccaatgacaacacagtcactgtgtgtatggattacatcaaagggagatgctctcgggaaaagtgcaaatactttcatccccctgcacatttgcaagccaagatcaaggctgcccaataccaggtcaaccaggctgcagctgcacaggctgcagccaccgcagctgccatgggaattcctcaagctgtacttcccccattaccaaagaggcctgctcttgaaaaaaccaacggtgccaccgcagtctttaacactggtattttccaataccaacaggctctagccaacatgcagttacaacagcatacagcatttctcccaccaggctcaatattgtgcatgacacccgctacaagtgttgttcccatggtgcacggtgctacgccagccactgtgtccgcagcaacaacatctgccacaagtgttcccttcgctgcaacagccacagccaaccagatacccataatatctgccgaacatctgactagccacaagtatgttacccagatgtagaattttcatcactaaacaatcatgctaaagaggaaaggacagtgtgcttggttagagtaaaggacgaggtcattagccatattgtatatatcgtcaagcaacacacacaaaagttcctcagccacaagacatccacatattgcatgttaaccagaagaaaagacaacattttccggaaatccactgcacactgttgcctatacactttgtacatttaattgatatttgtgctgaggtgatattcctgtctaaaagaacaacattgtctttcttttctagcacagagttatgcattcaaagatgcatacctagttagtttcctatatattcatgccatcttgaaaagacagactatggtgtaaccatgattctattatgtattggtacgtctgtagaccaagatataattttttaaaaataagtttatttctttcaaggtttacaaataacaaaggtgcaccttgtatttaaaattgccattatagatgagagcgtgcatgcacagtcatttttgtttaagagtaatatttttaatgtaatagattgtaagacgtggtgagggagggatctgacagagatgaatgtgccaagcaaaaccacaactgtgtatattttaaagcacatcatggctttaagtaccatgttgttaaggattctcatgaagtgccatagactgtacatcaaattagagtattatttcttcagtgttattgttttcagagccacattttgttgcatatttgctagtactaatcagtcaaagggcaccattctttttttttttttttgaaaccaaagctgtctcagaaatggccaatttaactttacagtaacaatagacagcacaacacaaactctctcaatacagataaactcacacatactggagatatatatataatagatatatataaaattattttaatgcattgtagtgtaatatttatgcatactatactgtataacatgttattcaaaagggattgccatttctgagacacagtaacaaaaaaatgaggaaattattttgcttctatttatagcctctgtcaaaagtcaaaagactataaatgctttgcaaaaatggtttcacgtttgcttaaatgcttcatcacagtcacattcaaaatagtgactctaaacaaagaagaaagcagcactgtcatcagatgcatgataaaccaaaatatgaaaatgggaaatgtttaattaacctagtaattgggtgggttaagtacatgggtgaattttatatgtgatttttgttttgttttgttttgttcagattaactgcttatagccttagaaagccttttacaaaattaaaaaaaaaatagatgtgcattcagtttttaagaatggaatcatccaaaggaattcctttttttgaggtttggatgttgcagctagtaaaggatatttttgctctgttcagcagttctaaaaattgctgaagtaggggccaggtcactggtagttatagtatggaatgggagaagtgaaagttcagttatagaactttccatacttccaagtttactgcaagtttttatgcttgagagagatgctttctaatataagactgatgtgttgattttactgattgtactgtacatctattaaagccttagattattacattacgggttggaacccataccaatgtaatttcaatcgtgttaagaaagtaatggtgacttcacatgttattgtagttagttacattatagaatattacttatttttcttgttaaaatgtagtttttcatttcctacatttattagattttcattttctattaacaattgaataccatttcagtttatagacttgttttattagattttaccaatgaatttttcaaaatacaaaatgaatattcgtattgttaactaaatgatttatattttactgatttaatattacagtgtaagaatgtcagtcattgttagttcttgtctagttttcattaaaagaacaaagatcttttatatggatatcttataaatatataatcattgctaagtaagaagttaagttgttgctatcgcaacaatcctggcagacaattgagtaatattttgatgatttattttgtttgtaattagttattataagaagatctagatcctagatattagaataaaatttattttctactgtatccatttcaaatgttaaaatattgtttaatatttttgaaatccctgagtatcaggccttgttataaataagctgcataatcaataaatagaacaagggactttttgttgataatccaaatactcaaagtttacgtaatgaaaattatagcgtgtgtgcaaactcttgagggttgattatgctgcaatttagcatgttggaacgtctagggagaaggttgactttttgcacttctgtatatagtcaaaagagagaaacctgtataatagtaagatcttattttgaataaaaacgtctataattacaaggagttttgttaaggctaatacaatgacagactgagcaaaattgcttgcaaaagtggcacagagttagcactccataccccttcaaacatgttgctttgctttcttgtggacagcttgtagtttgccaggattttttcagctggaaagatacgccatcctttcaaaccctcatgactgacaaaaactccatggggccaaatctgcctgaagatcattaccaaaaatagcaggtacttctaccattaaggtgaaatcatggatcagatattccttacatttttcaaaactactgcatgtttaaaacttcaacaaaaaaagagagaaagaactatactaagaacatatattattcagatcagtttctgccaatttcagtggtttattgttcacaaaaaaatcttcaaaacaagtattgactttcacaaaatttaaatcataaacaggcaaaccaaacagcacactgtagctatagttgttatgtgattgttttttaattgctgtaggatcctgttctttcagcaggtgaaaaataaaacgcagttcaaatttcatggttttaattttcaactcagaagcactcaaaaatgcaaaatgtgataatgggcacttgtttaaaagaattagtgtatccagccttcactccagctggttaaaaatgttgcacttatcagcaaccctaccactttcatctgctgaaaggacaaatgtgcttggttttactattatgtaatcacaacttactttctgcttgtagttgcttaaaattatgtattttgtcttgggctgcaatttgttttatgcttattttattattactgcagtagttgactttgctgtatggaaaaataaagtgaaattgccctaataaaacttctctttcttaagta

SEQ ID NO: 354825 - DNA, 3459 bp, Homo sapiens
agcgcaagtgttcctttcgctgcaacagccacagccacccagatacccatacatcactaaacaatcatgctaaagaggaaaggacagtgtgcttggttagagtaaaggacgaggtcattagccatattgtatatatcgtcaagcaacacacacaaaagttcctcagccacaagacatccacatattgcatgttaaccagaagaaaagacaacattttccggaaatccactgcacactgttgcctatacactttgtacatttaattgatatttgtgctgaggtgatattcctgtctaaaagaacaacattgtctttcttttctagcacagagttatgcattcaaagatgcatacctagttagtttcctatatattcatgccatcttgaaaagacagactatggtgtaaccatgattctattatgtattggtacgtctgtagaccaagatataattttttaaaaataagtttatttctttcaaggtttacaaataacaaaggtgcaccttgtatttaaaattgccattatagatgagagcgtgcatgcacagtcatttttgtttaagagtaatatttttaatgtaatagattgtaagacgtggtgagggagggatctgacagagatgaatgtgccaagcaaaaccacaactgtgtatattttaaagcacatcatggctttaagtaccatgttgttaaggattctcatgaagtgccatagactgtacatcaaattagagtattatttcttcagtgttattgttttcagagccacattttgttgcatatttgctagtactaatcagtcaaagggcaccattctttttttttttttttgaaaccaaagctgtctcagaaatggccaatttaactttacagtaacaatagacagcacaacacaaactctctcaatacagataaactcacacatactggagatatatatataatagatatatataaaattattttaatgcattgtagtgtaatatttatgcatactatactgtataacatgttattcaaaagggattgccatttctgagacacagtaacaaaaaaatgaggaaattattttgcttctatttatagcctctgtcaaaagtcaaaagactataaatgctttgcaaaaatggtttcacgtttgcttaaatgcttcatcacagtcacattcaaaatagtgactctaaacaaagaagaaagcagcactgtcatcagatgcatgataaaccaaaatatgaaaatgggaaatgtttaattaacctagtaattgggtgggttaagtacatgggtgaattttatatgtgatttttgttttgttttgttttgttcagattaactgcttatagccttagaaagccttttacaaaattaaaaaaaaaatagatgtgcattcagtttttaagaatggaatcatccaaaggaattcctttttttgaggtttggatgttgcagctagtaaaggatatttttgctctgttcagcagttctaaaaattgctgaagtaggggccaggtcactggtagttatagtatggaatgggagaagtgaaagttcagttatagaactttccatacttccaagtttactgcaagtttttatgcttgagagagatgctttctaatataagactgatgtgttgattttactgattgtactgtacatctattaaagccttagattattacattacgggttggaacccataccaatgtaatttcaatcgtgttaagaaagtaatggtgacttcacatgttattgtagttagttacattatagaatattacttatttttcttgttaaaatgtagtttttcatttcctacatttattagattttcattttctattaacaattgaataccatttcagtttatagacttgttttattagattttaccaatgaatttttcaaaatacaaaaaaaagtagtttttccttcataacatactcagttttgaattacatgtagtgtcacatgaatattcgtattgttaactaaatgatttatattttactgatttaatattacagtgtaagaatgtcagtcattgttagttcttgtctagttttcattaaaagaacaaagatcttttatatggatatcttataaatatataatcattgctaagtaagaagttaagttgttgctatcgcaacaatcctggcagacaattgagtaatattttgatgatttattttgtttgtaattagttattataagaagatctagatcctagatattagaataaaatttattttctactgtatccatttcaaatgttaaaatattgtttaatatttttgaaatccctgagtatcaggccttgttataaataagctgcataatcaataaatagaacaagggactttttgttgataatccaaatactcaaagtttacgtaatgaaaattatagcgtgtgtgcaaactcttgagggttgattatgctgcaatttagcatgttggaacgtctagggagaaggttgactttttgcacttctgtatatagtcaaaagagagaaacctgtataatagtaagatcttattttgaataaaaacgtctataattacaaggagttttgttaaggctaatacaatgacagactgagcaaaattgcttgcaaaagtggcacagagttagcactccataccccttcaaacatgttgctttgctttcttgtggacagcttgtagtttgccaggattttttcagctggaaagatacgccatcctttcaaaccctcatgactgacaaaaactccatggggccaaatctgcctgaagatcattaccaaaaatagcaggtacttctaccattaaggtgaaatcatggatcagatattccttacatttttcaaaactactgcatgtttaaaacttcaacaaaaaaagagagaaagaactatactaagaacatatattattcagatcagtttctgccaatttcagtggtttattgttcacaaaaaaatcttcaaaacaagtattgactttcacaaaatttaaatcataaacaggcaaaccaaacagcacactgtagctatagttgttatgtgattgttttttaattgctgtaggatcctgttctttcagcaggtgaaaaataaaacgcagttcaaatttcatggttttaattttcaactcagaagcactcaaaaatgcaaaatgtgataatgggcacttgtttaaaagaattagtgtatccagccttcactccagctggttaaaaatgttgcacttatcagcaaccctaccactttcatctgctgaaaggacaaatgtgcttggttttactattatgtaatcacaacttactttctgcttgtagttgcttaaaattatgtattttgtcttgggctgcaatttgttttatgcttattttattattactgcagtagttgactttgctgtatggaaaaataaagtgaaattgccctaataaaacttctctttcttaagta

SEQ ID NO: 354826 - DNA, 6058 bp, Homo sapiens
cccccagtctccaaaacttcatcacatcacagacgttcaggattctttccattcaaagcaaagccaagttacatcttatagcacccagtgaattatgatatggggctgcggtttatttgctctggcgacaatatggcttacttgccgtggaatatcccggtatttcagaagtaacatattatttttaaagagggagctttgctttctctaaatcacatggtgcaaagttgggaatacagtggcctgtaaattacaaatattatttacaaactagaaggaaagctgacatgtgtttgtgcctgtgtgacagtttcactaaggaattccaaaactgtggatagcctgttacttgagaaaaatacacggtggcagtcttgcagatgtttttcccgcctgttagccctccaggttcaaaaactgtttggtgcattttaaggcggcagtctcaccagatcgcaggattctagtctaattggcttctaaccttcaatctaaccttgccggcttccttgcaaagcccggtgcaagggcctctttcaaaatgaacccactggtgtgcctagcagtcggtagaagaagcgggagggcgtccggtctgcacgcccgccgcgaggttacaatgctgaacgcatgagatggaagataccaacgggaggccgaggggatccacggcgcccgcgcgggctccggcttcctcctgctctcggcgccgctgggcgaccgcccatgacccgctcttgcgggctctgtccggttgacaggcgaccctgtggcccggggaagcgcgggagggcgccggcggaaagttgaagagcgtttttctcgccgccgcgtgcattaggagctcgacgagtccgccctgggcttcctggtggggctgggcgggcgggggaggggccgcgcagcagcagcggaagccagacctcggcgataagaggctgcacagcgacatgcaacagtcttttcactgcagctgaatgagttgtggcgcccacaatgctcccatgacaaggagctgacaagttccattttccgtcgcgggcatcttggaatcatgactcccacaatgccttgggcacttggtcgacagtggggccgcctctgaaaaaaaaatgtgagaggttggtactaagaagtgcctttcctgacgtctctgctgcttggaaccgcttctagagcagtctctgcttttgccttgcttgctgccagctagactgtgacgacagcacatccaccctccacctctagcccagacacccccatttctacttataatcaagagaaaagctctaagtatctggcattgccctaggctgctttagtgttaaaagaaaagtttgctgaaaaagtaagatatcttctgccaggaaatcaaggaggaaaaaaaaaatcattttctcgattttgctctaaactgctgcatctgtctatgccaaactaatcaataccgattgcaccaccaaactccattgcaaattcagctgtgaggagattccctttcagacaactttgctgaaagcagcttggaaattcggtgtcgaagggtctgccacgttttcatgcttgcattttgggctccaaattggcactgggaaggggttactgagagcacaaggctgataccaggccctacttttaaacgttcatctacttacaatcctagtatttctctaaaaaccaaaacctctttgaattaacagtttcatgctgtgaatttctagtgggagatcttttccttgatattgacgacacaattttccatgtacttttaaagcagggagtggggaaaagtattttgaggggacattttcatcatcagttcagctttttttttttggttgttgctcttttttgggggggttgggtttgttggtttcactgaaacatttaactacctgtaaaatctaaacatggctgttagtgtcacaccaattcgggacacaaaatggctaacactggaagtatgtagagagttccagagggggacttgctcacggccagacacggaatgtaaatttgcacatccttcgaaaagctgccaagttgaaaatggacgagtaatcgcctgctttgattcattgaaaggccgttgctccagggagaactgcaaatatcttcatccacccccacatttaaaaacgcagttggagataaatggacgcaataacttgattcagcagaagaacatggccatgttggcccagcaaatgcaactagccaatgccatgatgcctggtgccccattacaacccgtggtatgtcgagagtaccaacgtggcaattgcaaccgaggagaaaatgattgtcggtttgctcatcctgctgacagcacaatgattgacaccaatgacaacacagtcactgtgtgtatggattacatcaaagggagatgctctcgggaaaagtgcaaatactttcatccccctgcacatttgcaagccaagatcaaggctgcccaataccaggtcaaccaggctgcagctgcacaggctgcagccaccgcagctgccatgggaattcctcaagctgtacttcccccattaccaaagaggcctgctcttgaaaaaaccaacggtgccaccgcagtctttaacactggtattttccaataccaacaggctctagccaacatgcagttacaacagcatacagcatttctcccaccagttcccatggtgcacggtgctacgccagccactgtgtccgcagcaacaacatctgccacaagtgttcccttcgctgcaacagccacagccaaccagatacccataatatctgccgaacatctgactagccacaagtatgttacccagatgtagaattttcatcactaaacaatcatgctaaagaggaaaggacagtgtgcttggttagagtaaaggacgaggtcattagccatattgtatatatcgtcaagcaacacacacaaaagttcctcagccacaagacatccacatattgcatgttaaccagaagaaaagacaacattttccggaaatccactgcacactgttgcctatacactttgtacatttaattgatatttgtgctgaggtgatattcctgtctaaaagaacaacattgtctttcttttctagcacagagttatgcattcaaagatgcatacctagttagtttcctatatattcatgccatcttgaaaagacagactatggtgtaaccatgattctattatgtattggtacgtctgtagaccaagatataattttttaaaaataagtttatttctttcaaggtttacaaataacaaaggtgcaccttgtatttaaaattgccattatagatgagagcgtgcatgcacagtcatttttgtttaagagtaatatttttaatgtaatagattgtaagacgtggtgagggagggatctgacagagatgaatgtgccaagcaaaaccacaactgtgtatattttaaagcacatcatggctttaagtaccatgttgttaaggattctcatgaagtgccatagactgtacatcaaattagagtattatttcttcagtgttattgttttcagagccacattttgttgcatatttgctagtactaatcagtcaaagggcaccattctttttttttttttttgaaaccaaagctgtctcagaaatggccaatttaactttacagtaacaatagacagcacaacacaaactctctcaatacagataaactcacacatactggagatatatatataatagatatatataaaattattttaatgcattgtagtgtaatatttatgcatactatactgtataacatgttattcaaaagggattgccatttctgagacacagtaacaaaaaaatgaggaaattattttgcttctatttatagcctctgtcaaaagtcaaaagactataaatgctttgcaaaaatggtttcacgtttgcttaaatgcttcatcacagtcacattcaaaatagtgactctaaacaaagaagaaagcagcactgtcatcagatgcatgataaaccaaaatatgaaaatgggaaatgtttaattaacctagtaattgggtgggttaagtacatgggtgaattttatatgtgatttttgttttgttttgttttgttcagattaactgcttatagccttagaaagccttttacaaaattaaaaaaaaaatagatgtgcattcagtttttaagaatggaatcatccaaaggaattcctttttttgaggtttggatgttgcagctagtaaaggatatttttgctctgttcagcagttctaaaaattgctgaagtaggggccaggtcactggtagttatagtatggaatgggagaagtgaaagttcagttatagaactttccatacttccaagtttactgcaagtttttatgcttgagagagatgctttctaatataagactgatgtgttgattttactgattgtactgtacatctattaaagccttagattattacattacgggttggaacccataccaatgtaatttcaatcgtgttaagaaagtaatggtgacttcacatgttattgtagttagttacattatagaatattacttatttttcttgttaaaatgtagtttttcatttcctacatttattagattttcattttctattaacaattgaataccatttcagtttatagacttgttttattagattttaccaatgaatttttcaaaatacaaaaaaaagtagtttttccttcataacatactcagttttgaattacatgtagtgtcacatgaatattcgtattgttaactaaatgatttatattttactgatttaatattacagtgtaagaatgtcagtcattgttagttcttgtctagttttcattaaaagaacaaagatcttttatatggatatcttataaatatataatcattgctaagtaagaagttaagttgttgctatcgcaacaatcctggcagacaattgagtaatattttgatgatttattttgtttgtaattagttattataagaagatctagatcctagatattagaataaaatttattttctactgtatccatttcaaatgttaaaatattgtttaatatttttgaaatccctgagtatcaggccttgttataaataagctgcataatcaataaatagaacaagggactttttgttgataatccaaatactcaaagtttacgtaatgaaaattatagcgtgtgtgcaaactcttgagggttgattatgctgcaatttagcatgttggaacgtctagggagaaggttgactttttgcacttctgtatatagtcaaaagagagaaacctgtataatagtaagatcttattttgaataaaaacgtctataattacaaggagttttgttaaggctaatacaatgacagactgagcaaaattgcttgcaaaagtggcacagagttagcactccataccccttcaaacatgttgctttgctttcttgtggacagcttgtagtttgccaggattttttcagctggaaagatacgccatcctttcaaaccctcatgactgacaaaaactccatggggccaaatctgcctgaagatcattaccaaaaatagcaggtacttctaccattaaggtgaaatcatggatcagatattccttacatttttcaaaactactgcatgtttaaaacttcaacaaaaaaagagagaaagaactatactaagaacatatattattcagatcagtttctgccaatttcagtggtttattgttcacaaaaaaatcttcaaaacaagtattgactttcacaaaatttaaatcataaacaggcaaaccaaacagcacactgtagctatagttgttatgtgattgttttttaattgctgtaggatcctgttctttcagcaggtgaaaaataaaacgcagttcaaatttcatggttttaattttcaactcagaagcactcaaaaatgcaaaatgtgataatgggcacttgtttaaaagaattagtgtatccagccttcactccagctggttaaaaatgttgcacttatcagcaaccctacctgggttaggtctacctggggtactcgagctt

SEQ ID NO: 354827 - DNA, 1508 bp, Homo sapiens
tttagttaacattcttacactgtaatattaaatgatttatatttaaatgatttatattttactgatttaatattacagtgtaagaatgtcagtcattgttagttcttgtctagttttcattaaaagaacaaagatcttttatatggatatcttataaatatataatcattgctaagtaagaagttaagttgttgctatcgcaacaatcctggcagacaattgagtaatattttgatgatttattttgtttgtaattagttattataagaagatctagatcctagatattagaataaaatttattttctactgtatccatttcaaatgttaaaatattgtttaatatttttgaaatccctgagtatcaggccttgttataaataagctgcataatcaataaatagaacaagggactttttgttgataatccaaatactcaaagtttacgtaatgaaaattatagcgtgtgtgcaaactcttgagggttgattatgctgcaatttagcatgttggaacgtctagggagaaggttgactttttgcacttctgtatatagtcaaaagagagaaacctgtataatagtaagatcttattttgaataaaaacgtctataattacaaggagttttgttaaggctaatacaatgacagactgagcaaaattgcttgcaaaagtggcacagagttagcactccataccccttcaaacatgttgctttgctttcttgtggacagcttgtagtttgccaggattttttcagctggaaagatacgccatcctttcaaaccctcatgactgacaaaaactccatggggccaaatctgcctgaagatcattaccaaaaatagcaggtacttctaccattaaggtgaaatcatggatcagatattccttacatttttcaaaactactgcatgtttaaaacttcaacaaaaaaagagagaaagaactatactaagaacatatattattcagatcagtttctgccaatttcagtggtttattgttcacaaaaaaatcttcaaaacaagtattgactttcacaaaatttaaatcataaacaggcaaaccaaacagcacactgtagctatagttgttatgtgattgttttttaattgctgtaggatcctgttctttcagcaggtgaaaaataaaacgcagttcaaatttcatggttttaattttcaactcagaagcactcaaaaatgcaaaatgtgataatgggcacttgtttaaaagaattagtgtatccagccttcactccagctggttaaaaatgttgcacttatcagcaaccctaccactttcatctgctgaaaggacaaatgtgcttggttttactattatgtaatcacaacttactttctgcttgtagttgcttaaaattatgtattttgtcttgggctgcaatttgttttatgcttattttattattactgcagtagttgactttgctgtatggaaaaataaagtgaaattgccctaataaaacttctctttcttaagta

SEQ ID NO: 354828 - DNA, 5867 bp, Homo sapiens
cccccagtctccaaaacttcatcacatcacagacgttcaggattctttccattcaaagcaaagccaagttacatcttatagcacccagtgaattatgatatggggctgcggtttatttgctctggcgacaatatggcttacttgccgtggaatatcccggtatttcagaagtaacatattatttttaaagagggagctttgctttctctaaatcacatggtgcaaagttgggaatacagtggcctgtaaattacaaatattatttacaaactagaaggaaagctgacatgtgtttgtgcctgtgtgacagtttcactaaggaattccaaaactgtggatagcctgttacttgagaaaaatacacggtggcagtcttgcagatgtttttcccgcctgttagccctccaggttcaaaaactgtttggtgcattttaaggcggcagtctcaccagatcgcaggattctagtctaattggcttctaaccttcaatctaaccttgccggcttccttgcaaagcccggtgcaagggcctctttcaaaatgaacccactggtgtgcctagcagtcggtagaagaagcgggagggcgtccggtctgcacgcccgccgcgaggttacaatgctgaacgcatgagatggaagataccaacgggaggccgaggggatccacggcgcccgcgcgggctccggcttcctcctgctctcggcgccgctgggcgaccgcccatgacccgctcttgcgggctctgtccggttgacaggcgaccctgtggcccggggaagcgcgggagggcgccggcggaaagttgaagagcgtttttctcgccgccgcgtgcattaggagctcgacgagtccgccctgggcttcctggtggggctgggcgggcgggggaggggccgcgcagcagcagcggaagccagacctcggcgataagaggctgcacagcgacatgcaacagtcttttcactgcagctgaatgagttgtggcgcccacaatgctcccatgacaaggagctgacaagttccattttccgtcgcgggcatcttggaatcatgactcccacaatgccttgggcacttggtcgacagtggggccgcctctgaaaaaaaaatgtgagaggttggtactaagaagtgcctttcctgacgtctctgctgcttggaaccgcttctagagcagtctctgcttttgccttgcttgctgccagctagactgtgacgacagcacatccaccctccacctctagcccagacacccccatttctacttataatcaagagaaaagctctaagtatctggcattgccctaggctgctttagtgttaaaagaaaagtttgctgaaaaagtaagatatcttctgccaggaaatcaaggaggaaaaaaaaaatcattttctcgattttgctctaaactgctgcatctgtctatgccaaactaatcaataccgattgcaccaccaaactccattgcaaattcagctgtgaggagattccctttcagacaactttgctgaaagcagcttggaaattcggtgtcgaagggtctgccacgttttcatgcttgcattttgggctccaaattggcactgggaaggggttactgagagcacaaggctgataccaggccctacttttaaacgttcatctacttacaatcctagtatttctctaaaaaccaaaacctctttgaattaacagtttcatgctgtgaatttctagtgggagatcttttccttgatattgacgacacaattttccatgtacttttaaagcagggagtggggaaaagtattttgaggggacattttcatcatcagttcagctttttttttttggttgttgctcttttttgggggggttgggtttgttggtttcactgaaacatttaactacctgtaaaatctaaacatggctgttagtgtcacaccaattcgggacacaaaatggctaacactggaagtatgtagagagttccagagggggacttgctcacggccagacacggaatgtaaatttgcacatccttcgaaaagctgccaagttgaaaatggacgagtaatcgcctgctttgattcattgaaaggccgttgctccagggagaactgcaaatatcttcatccacccccacatttaaaaacgcagttggagataaatggacgcaataacttgattcagcagaagaacatggccatgttggcccagcaaatgcaactagccaatgccatgatgcctggtgccccattacaacccgtggtatgtcgagagtaccaacgtggcaattgcaaccgaggagaaaatgattgtcggtttgctcatcctgctgacagcacaatgattgacaccaatgacaacacagtcactgtgtgtatggattacatcaaagggagatgctctcgggaaaagtgcaaatactttcatccccctgcacatttgcaagccaagatcaaggctgcccaataccaggtcaaccaggctgcagctgcacaggctgcagccaccgcagctgccatgggaattcctcaagctgtacttcccccattaccaaagaggcctgctcttgaaaaaaccaacggtgccaccgcagtctttaacactggtattttccaataccaacaggctctagccaacatgcagttacaacagcatacagcatttctcccaccagttcccatggtgcacggtgctacgccagccactgtgtccgcagcaacaacatctgccacaagtgttcccttcgctgcaacagccacagccaaccagatacccataatatctgccgaacatctgactagccacaagtatgttacccagatgtagaattttcatcactaaacaatcatgctaaagaggaaaggacagtgtgcttggttagagtaaaggacgaggtcattagccatattgtatatatcgtcaagcaacacacacaaaagttcctcagccacaagacatccacatattgcatgttaaccagaagaaaagacaacattttccggaaatccactgcacactgttgcctatacactttgtacatttaattgatatttgtgctgaggtgatattcctgtctaaaagaacaacattgtctttcttttctagcacagagttatgcattcaaagatgcatacctagttagtttcctatatattcatgccatcttgaaaagacagactatggtgtaaccatgattctattatgtattggtacgtctgtagaccaagatataattttttaaaaataagtttatttctttcaaggtttacaaataacaaaggtgcaccttgtatttaaaattgccattatagatgagagcgtgcatgcacagtcatttttgtttaagagtaatatttttaatgtaatagattgtaagacgtggtgagggagggatctgacagagatgaatgtgccaagcaaaaccacaactgtgtatattttaaagcacatcatggctttaagtaccatgttgttaaggattctcatgaagtgccatagactgtacatcaaattagagtattatttcttcagtgttattgttttcagagccacattttgttgcatatttgctagtactaatcagtcaaagggcaccattctttttttttttttttgaaaccaaagctgtctcagaaatggccaatttaactttacagtaacaatagacagcacaacacaaactctctcaatacagataaactcacacatactggagatatatatataatagatatatataaaattattttaatgcattgtagtgtaatatttatgcatactatactgtataacatgttattcaaaagggattgccatttctgagacacagtaacaaaaaaatgaggaaattattttgcttctatttatagcctctgtcaaaagtcaaaagactataaatgctttgcaaaaatggtttcacgtttgcttaaatgcttcatcacagtcacattcaaaatagtgactctaaacaaagaagaaagcagcactgtcatcagatgcatgataaaccaaaatatgaaaatgggaaatgtttaattaacctagtaattgggtgggttaagtacatgggtgaattttatatgtgatttttgttttgttttgttttgttcagattaactgcttatagccttagaaagccttttacaaaattaaaaaaaaaatagatgtgcattcagtttttaagaatggaatcatccaaaggaattcctttttttgaggtttggatgttgcagctagtaaaggatatttttgctctgttcagcagttctaaaaattgctgaagtaggggccaggtcactggtagttatagtatggaatgggagaagtgaaagttcagttatagaactttccatacttccaagtttactgcaagtttttatgcttgagagagatgctttctaatataagactgatgtgttgattttactgattgtactgtacatctattaaagccttagattattacattacgggttggaacccataccaatgtaatttcaatcgtgttaagaaagtaatggtgacttcacatgttattgtagttagttacattatagaatattacttatttttcttgttaaaatgtagtttttcatttcctacatttattagattttcattttctattaacaattgaataccatttcagtttatagacttgttttattagattttaccaatgaatttttcaaaatacaaaaaaaagtagtttttccttcataacatactcagttttgaattacatgtagtgtcacatgaatattcgtattgttaactaaatgatttatattttactgatttaatattacagtgtaagaatgtcagtcattgttagttcttgtctagttttcattaaaagaacaaagatcttttatatggatatcttataaatatataatcattgctaagtaagaagttaagttgttgctatcgcaacaatcctggcagacaattgagtaatattttgatgatttattttgtttgtaattagttattataagaagatctagatcctagatattagaataaaatttattttctactgtatccatttcaaatgttaaaatattgtttaatatttttgaaatccctgagtatcaggccttgttataaataagctgcataatcaataaatagaacaagggactttttgttgataatccaaatactcaaagtttacgtaatgaaaattatagcgtgtgtgcaaactcttgagggttgattatgctgcaatttagcatgttggaacgtctagggagaaggttgactttttgcacttctgtatatagtcaaaagagagaaacctgtataatagtaagatcttattttgaataaaaacgtctataattacaaggagttttgttaaggctaatacaatgacagactgagcaaaattgcttgcaaaagtggcacagagttagcactccataccccttcaaacatgttgctttgctttcttgtggacagcttgtagtttgccaggattttttcagctggaaagatacgccatcctttcaaaccctcatgactgacaaaaactccatggggccaaatctgcctgaagatcattaccaaaaatagcaggtacttctaccattaaggtgaaatcatggatcagatattccttacatttttcaaaactactgcatgtttaaaacttcaacaaaaaaagagaggccagatgatgtgagtgaagagccctaggatgaaatgaaagccttaaaagaatgaatgaattcacccaatcgttcagaaaaaggtggcaatactatagccagatacaagattaaaagacttgcccaaggtcacacagcaagctagtaggtcaagttccaacgcaccgcactcgggatcctgcagagacgaccacagcat

SEQ ID NO: 354829 - DNA, 1259 bp, Homo sapiens
  misc_feature (11)..(11): n is a, c, g, or t
taggaatgcgnaccaagcgctccgctgaatcctgaataatgcaataaaatttattttctactgtatccatttcaaatgttaaaatattgtttaatatttttgaaatccctgagtatcaggccttgttataaataagctgcataatcaataaatagaacaagggactttttgttgataatccaaatactcaaagtttacgtaatgaaaattatagcgtgtgtgcaaactcttgagggttgattatgctgcaatttagcatgttggaacgtctagggagaaggttgactttttgcacttctgtatatagtcaaaagagagaaacctgtataatagtaagatcttattttgaataaaaacgtctataattacaaggagttttgttaaggctaatacaatgacagactgagcaaaattgcttgcaaaagtggcacagagttagcactccataccccttcaaacatgttgctttgctttcttgtggacagcttgtagtttgccaggattttttcagctggaaagatacgccatcctttcaaaccctcatgactgacaaaaactccatggggccaaatctgcctgaagatcattaccaaaaatagcaggtacttctaccattaaggtgaaatcatggatcagatattccttacatttttcaaaactactgcatgtttaaaacttcaacaaaaaaagagagaaagaactatactaagaacatatattattcagatcagtttctgccaatttcagtggtttattgttcacaaaaaaatcttcaaaacaagtattgactttcacaaaatttaaatcataaacaggcaaaccaaacagcacactgtagctatagttgttatgtgattgttttttaattgctgtaggatcctgttctttcagcaggtgaaaaataaaacgcagttcaaatttcatggttttaattttcaactcagaagcactcaaaaatgcaaaatgtgataatgggcacttgtttaaaagaattagtgtatccagccttcactccagctggttaaaaatgttgcacttatcagcaaccctaccactttcatctgctgaaaggacaaatgtgcttggttttactattatgtaatcacaacttactttctgcttgtagttgcttaaaattatgtattttgtcttgggctgcaatttgttttatgcttattttattattactgcagtagttgactttgctgtatggaaaaataaagtgaaattgccctaataaaacttctctttcttaagta

SEQ ID NO: 354830 - DNA, 1306 bp, Homo sapiens
cttcttataatatctaggatctagatcttcttataataagatctagatcctaaattttattctaatatctaggatctagatcttcttataataaaatttattttctactgtatccatttcaaatgttaaaatattgtttaatatttttgaaatccctgagtatcaggccttgttataaataagctgcataatcaataaatagaacaagggactttttgttgataatccaaatactcaaagtttacgtaatgaaaattatagcgtgtgtgcaaactcttgagggttgattatgctgcaatttagcatgttggaacgtctagggagaaggttgactttttgcacttctgtatatagtcaaaagagagaaacctgtataatagtaagatcttattttgaataaaaacgtctataattacaaggagttttgttaaggctaatacaatgacagactgagcaaaattgcttgcaaaagtggcacagagttagcactccataccccttcaaacatgttgctttgctttcttgtggacagcttgtagtttgccaggattttttcagctggaaagatacgccatcctttcaaaccctcatgactgacaaaaactccatggggccaaatctgcctgaagatcattaccaaaaatagcaggtacttctaccattaaggtgaaatcatggatcagatattccttacatttttcaaaactactgcatgtttaaaacttcaacaaaaaaagagagaaagaactatactaagaacatatattattcagatcagtttctgccaatttcagtggtttattgttcacaaaaaaatcttcaaaacaagtattgactttcacaaaatttaaatcataaacaggcaaaccaaacagcacactgtagctatagttgttatgtgattgttttttaattgctgtaggatcctgttctttcagcaggtgaaaaataaaacgcagttcaaatttcatggttttaattttcaactcagaagcactcaaaaatgcaaaatgtgataatgggcacttgtttaaaagaattagtgtatccagccttcactccagctggttaaaaatgttgcacttatcagcaaccctaccactttcatctgctgaaaggacaaatgtgcttggttttactattatgtaatcacaacttactttctgcttgtagttgcttaaaattatgtattttgtcttgggctgcaatttgttttatgcttattttattattactgcagtagttgactttgctgtatggaaaaataaagtgaaattgccctaataaaacttctctttcttaagta

SEQ ID NO: 354831 - DNA, 5780 bp, Homo sapiens
cccccagtctccaaaacttcatcacatcacagacgttcaggattctttccattcaaagcaaagccaagttacatcttatagcacccagtgaattatgatatggggctgcggtttatttgctctggcgacaatatggcttacttgccgtggaatatcccggtatttcagaagtaacatattatttttaaagagggagctttgctttctctaaatcacatggtgcaaagttgggaatacagtggcctgtaaattacaaatattatttacaaactagaaggaaagctgacatgtgtttgtgcctgtgtgacagtttcactaaggaattccaaaactgtggatagcctgttacttgagaaaaatacacggtggcagtcttgcagatgtttttcccgcctgttagccctccaggttcaaaaactgtttggtgcattttaaggcggcagtctcaccagatcgcaggattctagtctaattggcttctaaccttcaatctaaccttgccggcttccttgcaaagcccggtgcaagggcctctttcaaaatgaacccactggtgtgcctagcagtcggtagaagaagcgggagggcgtccggtctgcacgcccgccgcgaggttacaatgctgaacgcatgagatggaagataccaacgggaggccgaggggatccacggcgcccgcgcgggctccggcttcctcctgctctcggcgccgctgggcgaccgcccatgacccgctcttgcgggctctgtccggttgacaggcgaccctgtggcccggggaagcgcgggagggcgccggcggaaagttgaagagcgtttttctcgccgccgcgtgcattaggagctcgacgagtccgccctgggcttcctggtggggctgggcgggcgggggaggggccgcgcagcagcagcggaagccagacctcggcgataagaggctgcacagcgacatgcaacagtcttttcactgcagctgaatgagttgtggcgcccacaatgctcccatgacaaggagctgacaagttccattttccgtcgcgggcatcttggaatcatgactcccacaatgccttgggcacttggtcgacagtggggccgcctctgaaaaaaaaatgtgagaggttggtactaagaagtgcctttcctgacgtctctgctgcttggaaccgcttctagagcagtctctgcttttgccttgcttgctgccagctagactgtgacgacagcacatccaccctccacctctagcccagacacccccatttctacttataatcaagagaaaagctctaagtatctggcattgccctaggctgctttagtgttaaaagaaaagtttgctgaaaaagtaagatatcttctgccaggaaatcaaggaggaaaaaaaaaatcattttctcgattttgctctaaactgctgcatctgtctatgccaaactaatcaataccgattgcaccaccaaactccattgcaaattcagctgtgaggagattccctttcagacaactttgctgaaagcagcttggaaattcggtgtcgaagggtctgccacgttttcatgcttgcattttgggctccaaattggcactgggaaggggttactgagagcacaaggctgataccaggccctacttttaaacgttcatctacttacaatcctagtatttctctaaaaaccaaaacctctttgaattaacagtttcatgctgtgaatttctagtgggagatcttttccttgatattgacgacacaattttccatgtacttttaaagcagggagtggggaaaagtattttgaggggacattttcatcatcagttcagctttttttttttggttgttgctcttttttgggggggttgggtttgttggtttcactgaaacatttaactacctgtaaaatctaaacatggctgttagtgtcacaccaattcgggacacaaaatggctaacactggaagtatgtagagagttccagagggggacttgctcacggccagacacggaatgtaaatttgcacatccttcgaaaagctgccaagttgaaaatggacgagtaatcgcctgctttgattcattgaaaggccgttgctccagggagaactgcaaatatcttcatccacccccacatttaaaaacgcagttggagataaatggacgcaataacttgattcagcagaagaacatggccatgttggcccagcaaatgcaactagccaatgccatgatgcctggtgccccattacaacccgtgccaatgttttcagttgcaccaagcttagccaccaatgcatcagcagccgcctttaatccctatctgggacctgtttctccaagcctggtcccggcagagatcttgccgactgcaccaatgttggttacagggaatccgggtgtccctgtacctgcagctgctgcagctgctgcacagaaattaatgcgaacagacagacttgaggtatgtcgagagtaccaacgtggcaattgcaaccgaggagaaaatgattgtcggtttgctcatcctgctgacagcacaatgattgacaccaatgacaacacagtcactgtgtgtatggattacatcaaagggagatgctctcgggaaaagtgcaaatactttcatccccctgcacatttgcaagccaagatcaaggctgcccaataccaggtcaaccaggctgcagctgcacaggctgcagccaccgcagctgccatgggaattcctcaagctgtacttcccccattaccaaagaggcctgctcttgaaaaaaccaacggtgccaccgcagtctttaacactggtattttccaataccaacaggctctagccaacatgcagttacaacagcatacagcatttctcccaccaggctcaatattgtgcatgacacccgctacaagtgttgttcccatggtgcacggtgctacgccagccactgtgtccgcagcaacaacatctgccacaagtgttcccttcgctgcaacagccacagccaaccagatacccataatatctgccgaacatctgactagccacaagtatgttacccagatgtagaattttcatcactaaacaatcatgctaaagaggaaaggacagtgtgcttggttagagtaaaggacgaggtcattagccatattgtatatatcgtcaagcaacacacacaaaagttcctcagccacaagacatccacatattgcatgttaaccagaagaaaagacaacattttccggaaatccactgcacactgttgcctatacactttgtacatttaattgatatttgtgctgaggtgatattcctgtctaaaagaacaacattgtctttcttttctagcacagagttatgcattcaaagatgcatacctagttagtttcctatatattcatgccatcttgaaaagacagactatggtgtaaccatgattctattatgtattggtacgtctgtagaccaagatataattttttaaaaataagtttatttctttcaaggtttacaaataacaaaggtgcaccttgtatttaaaattgccattatagatgagagcgtgcatgcacagtcatttttgtttaagagtaatatttttaatgtaatagattgtaagacgtggtgagggagggatctgacagagatgaatgtgccaagcaaaaccacaactgtgtatattttaaagcacatcatggctttaagtaccatgttgttaaggattctcatgaagtgccatagactgtacatcaaattagagtattatttcttcagtgttattgttttcagagccacattttgttgcatatttgctagtactaatcagtcaaagggcaccattctttttttttttttttgaaaccaaagctgtctcagaaatggccaatttaactttacagtaacaatagacagcacaacacaaactctctcaatacagataaactcacacatactggagatatatatataatagatatatataaaattattttaatgcattgtagtgtaatatttatgcatactatactgtataacatgttattcaaaagggattgccatttctgagacacagtaacaaaaaaatgaggaaattattttgcttctatttatagcctctgtcaaaagtcaaaagactataaatgctttgcaaaaatggtttcacgtttgcttaaatgcttcatcacagtcacattcaaaatagtgactctaaacaaagaagaaagcagcactgtcatcagatgcatgataaaccaaaatatgaaaatgggaaatgtttaattaacctagtaattgggtgggttaagtacatgggtgaattttatatgtgatttttgttttgttttgttttgttcagattaactgcttatagccttagaaagccttttacaaaattaaaaaaaaaatagatgtgcattcagtttttaagaatggaatcatccaaaggaattcctttttttgaggtttggatgttgcagctagtaaaggatatttttgctctgttcagcagttctaaaaattgctgaagtaggggccaggtcactggtagttatagtatggaatgggagaagtgaaagttcagttatagaactttccatacttccaagtttactgcaagtttttatgcttgagagagatgctttctaatataagactgatgtgttgattttactgattgtactgtacatctattaaagccttagattattacattacgggttggaacccataccaatgtaatttcaatcgtgttaagaaagtaatggtgacttcacatgttattgtagttagttacattatagaatattacttatttttcttgttaaaatgtagtttttcatttcctacatttattagattttcattttctattaacaattgaataccatttcagtttatagacttgttttattagattttaccaatgaatttttcaaaatacaaaaaaaagtagtttttccttcataacatactcagttttgaattacatgtagtgtcacatgaatattcgtattgttaactaaatgatttatattttactgatttaatattacagtgtaagaatgtcagtcattgttagttcttgtctagttttcattaaaagaacaaagatcttttatatggatatcttataaatatataatcattgctaagtaagaagttaagttgttgctatcgcaacaatcctggcagacaattgagtaatattttgatgatttattttgtttgtaattagttattataagaagatctagatcctagatattagaataaaatttattttctactgtatccatttcaaatgttaaaatattgtttaatatttttgaaatccctgagtatcaggccttgttataaataagctgcataatcaataaatagaacaagggactttttgttgataatccaaatactcaaagtttacgtaatgaaaattatagcgcagttcaaatttcatggttttaattttcaactcagaagcactcaaaaatgcaaaatgtgataatgggcacttgtttaaaagaattagtgtatccagccttcactccagctggttaaaaatgttgcacttatcagcaaccctaccactttcatctgctgaaaggacaaatgtgcttggttttactattatgtaatcacaacttactttctgcttgtagttgcttaaaattatgtattttgtcttgggctgcaatttgttttatgcttattttattattactgcagtagttgactttgctgtatggaaaaataaagtgaaattgccctaataaaacttctctttcttaagta

SEQ ID NO: 354832 - DNA, 5685 bp, Homo sapiens
cccccagtctccaaaacttcatcacatcacagacgttcaggattctttccattcaaagcaaagccaagttacatcttatagcacccagtgaattatgatatggggctgcggtttatttgctctggcgacaatatggcttacttgccgtggaatatcccggtatttcagaagtaacatattatttttaaagagggagctttgctttctctaaatcacatggtgcaaagttgggaatacagtggcctgtaaattacaaatattatttacaaactagaaggaaagctgacatgtgtttgtgcctgtgtgacagtttcactaaggaattccaaaactgtggatagcctgttacttgagaaaaatacacggtggcagtcttgcagatgtttttcccgcctgttagccctccaggttcaaaaactgtttggtgcattttaaggcggcagtctcaccagatcgcaggattctagtctaattggcttctaaccttcaatctaaccttgccggcttccttgcaaagcccggtgcaagggcctctttcaaaatgaacccactggtgtgcctagcagtcggtagaagaagcgggagggcgtccggtctgcacgcccgccgcgaggttacaatgctgaacgcatgagatggaagataccaacgggaggccgaggggatccacggcgcccgcgcgggctccggcttcctcctgctctcggcgccgctgggcgaccgcccatgacccgctcttgcgggctctgtccggttgacaggcgaccctgtggcccggggaagcgcgggagggcgccggcggaaagttgaagagcgtttttctcgccgccgcgtgcattaggagctcgacgagtccgccctgggcttcctggtggggctgggcgggcgggggaggggccgcgcagcagcagcggaagccagacctcggcgataagaggctgcacagcgacatgcaacagtcttttcactgcagctgaatgagttgtggcgcccacaatgctcccatgacaaggagctgacaagttccattttccgtcgcgggcatcttggaatcatgactcccacaatgccttgggcacttggtcgacagtggggccgcctctgaaaaaaaaatgtgagaggttggtactaagaagtgcctttcctgacgtctctgctgcttggaaccgcttctagagcagtctctgcttttgccttgcttgctgccagctagactgtgacgacagcacatccaccctccacctctagcccagacacccccatttctacttataatcaagagaaaagctctaagtatctggcattgccctaggctgctttagtgttaaaagaaaagtttgctgaaaaagtaagatatcttctgccaggaaatcaaggaggaaaaaaaaaatcattttctcgattttgctctaaactgctgcatctgtctatgccaaactaatcaataccgattgcaccaccaaactccattgcaaattcagctgtgaggagattccctttcagacaactttgctgaaagcagcttggaaattcggtgtcgaagggtctgccacgttttcatgcttgcattttgggctccaaattggcactgggaaggggttactgagagcacaaggctgataccaggccctacttttaaacgttcatctacttacaatcctagtatttctctaaaaaccaaaacctctttgaattaacagtttcatgctgtgaatttctagtgggagatcttttccttgatattgacgacacaattttccatgtacttttaaagcagggagtggggaaaagtattttgaggggacattttcatcatcagttcagctttttttttttggttgttgctcttttttgggggggttgggtttgttggtttcactgaaacatttaactacctgtaaaatctaaacatggctgttagtgtcacaccaattcgggacacaaaatggctaacactggaagtatgtagagagttccagagggggacttgctcacggccagacacggaatgtaaatttgcacatccttcgaaaagctgccaagttgaaaatggacgagtaatcgcctgctttgattcattgaaaggccgttgctccagggagaactgcaaatatcttcatccacccccacatttaaaaacgcagttggagataaatggacgcaataacttgattcagcagaagaacatggccatgttggcccagcaaatgcaactagccaatgccatgatgcctggtgccccattacaacccgtgccaatgttttcagttgcaccaagcttagccaccaatgcatcagcagccgcctttaatccctatctgggacctgtttctccaagcctggtcccggcagagatcttgccgactgcaccaatgttggttacagggaatccgggtgtccctgtacctgcagctgctgcagctgctgcacagaaattaatgcgaacagacagacttgaggtatgtcgagagtaccaacgtggcaattgcaaccgaggagaaaatgattgtcggtttgctcatcctgctgacagcacaatgattgacaccaatgacaacacagtcactgtgtgtatggattacatcaaagggagatgctctcgggaaaagtgcaaatactttcatccccctgcacatttgcaagccaagatcaaggctgcccaataccaggtcaaccaggctgcagctgcacaggctgcagccaccgcagctgccatgggaattcctcaagctgtacttcccccattaccaaagaggcctgctcttgaaaaaaccaacggtgccaccgcagtctttaacactggtattttccaataccaacaggctctagccaacatgcagttacaacagcatacagcatttctcccaccaggctcaatattgtgcatgacacccgctacaagtgttgttcccatggtgcacggtgctacgccagccactgtgtccgcagcaacaacatctgccacaagtgttcccttcgctgcaacagccacagccaaccagatacccataatatctgccgaacatctgactagccacaagtatgttacccagatgtagaattttcatcactaaacaatcatgctaaagaggaaaggacagtgtgcttggttagagtaaaggacgaggtcattagccatattgtatatatcgtcaagcaacacacacaaaagttcctcagccacaagacatccacatattgcatgttaaccagaagaaaagacaacattttccggaaatccactgcacactgttgcctatacactttgtacatttaattgatatttgtgctgaggtgatattcctgtctaaaagaacaacattgtctttcttttctagcacagagttatgcattcaaagatgcatacctagttagtttcctatatattcatgccatcttgaaaagacagactatggtgtaaccatgattctattatgtattggtacgtctgtagaccaagatataattttttaaaaataagtttatttctttcaaggtttacaaataacaaaggtgcaccttgtatttaaaattgccattatagatgagagcgtgcatgcacagtcatttttgtttaagagtaatatttttaatgtaatagattgtaagacgtggtgagggagggatctgacagagatgaatgtgccaagcaaaaccacaactgtgtatattttaaagcacatcatggctttaagtaccatgttgttaaggattctcatgaagtgccatagactgtacatcaaattagagtattatttcttcagtgttattgttttcagagccacattttgttgcatatttgctagtactaatcagtcaaagggcaccattctttttttttttttttgaaaccaaagctgtctcagaaatggccaatttaactttacagtaacaatagacagcacaacacaaactctctcaatacagataaactcacacatactggagatatatatataatagatatatataaaattattttaatgcattgtagtgtaatatttatgcatactatactgtataacatgttattcaaaagggattgccatttctgagacacagtaacaaaaaaatgaggaaattattttgcttctatttatagcctctgtcaaaagtcaaaagactataaatgctttgcaaaaatggtttcacgtttgcttaaatgcttcatcacagtcacattcaaaatagtgactctaaacaaagaagaaagcagcactgtcatcagatgcatgataaaccaaaatatgaaaatgggaaatgtttaattaacctagtaattgggtgggttaagtacatgggtgaattttatatgtgatttttgttttgttttgttttgttcagattaactgcttatagccttagaaagccttttacaaaattaaaaaaaaaatagatgtgcattcagtttttaagaatggaatcatccaaaggaattcctttttttgaggtttggatgttgcagctagtaaaggatatttttgctctgttcagcagttctaaaaattgctgaagtaggggccaggtcactggtagttatagtatggaatgggagaagtgaaagttcagttatagaactttccatacttccaagtttactgcaagtttttatgcttgagagagatgctttctaatataagactgatgtgttgattttactgattgtactgtacatctattaaagccttagattattacattacgggttggaacccataccaatgtaatttcaatcgtgttaagaaagtaatggtgacttcacatgttattgtagttagttacattatagaatattacttatttttcttgttaaaatgtagtttttcatttcctacatttattagattttcattttctattaacaattgaataccatttcagtttatagacttgttttattagattttaccaatgaatttttcaaaatacaaaaaaaagtagtttttccttcataacatactcagttttgaattacatgtagtgtcacatgaatattcgtattgttaactaaatgatttatattttactgatttaatattacagtgtaagaatgtcagtcattgttagttcttgtctagttttcattaaaagaacaaagatcttttatatggatatcttataaatatataatcattgctaagtaagaagttaagttgttgctatcgcaacaatcctggcagacaattgagtaatattttgatgatttattttgtttgtaattagttattataagaagatctagatcctagatattagaataaaatttattttctactgtatccatttcaaatgttaaaatattgtttaatatttttgaaatccctgagtatcaggccttgttataaataagctgcataatcaataaatagaacaagggactttttgttgataatccaaatactcaaagtttacgtaatgaaaattatagcgtgtgtgcaaactcttgagggttgattatgctgcaatttagcatgttggaacgtctagggagaaggttgactttttgcacttctgtatatagtcaaaagagagaaacctgtataatagtttatgctgtgcataaactattcccccgagcaatctcaattacacatatacaccacaacatgttcaccagtactactactaatcacgcccataatcatacaagcccccgcaccataggtcctcccgatcatcctggtc

SEQ ID NO: 354833 - DNA, 4003 bp, Homo sapiens
cccccagtctccaaaacttcatcacatcacagacgttcaggattctttccattcaaagcaaagccaagttacatcttatagcacccagtgaattatgatatggggctgcggtttatttgctctggcgacaatatggcttacttgccgtggaatatcccggtatttcagaagtaacatattatttttaaagagggagctttgctttctctaaatcacatggtgcaaagttgggaatacagtggcctgtaaattacaaatattatttacaaactagaaggaaagctgacatgtgtttgtgcctgtgtgacagtttcactaaggaattccaaaactgtggatagcctgttacttgagaaaaatacacggtggcagtcttgcagatgtttttcccgcctgttagccctccaggttcaaaaactgtttggtgcattttaaggcggcagtctcaccagatcgcaggattctagtctaattggcttctaaccttcaatctaaccttgccggcttccttgcaaagcccggtgcaagggcctctttcaaaatgaacccactggtgtgcctagcagtcggtagaagaagcgggagggcgtccggtctgcacgcccgccgcgaggttacaatgctgaacgcatgagatggaagataccaacgggaggccgaggggatccacggcgcccgcgcgggctccggcttcctcctgctctcggcgccgctgggcgaccgcccatgacccgctcttgcgggctctgtccggttgacaggcgaccctgtggcccggggaagcgcgggagggcgccggcggaaagttgaagagcgtttttctcgccgccgcgtgcattaggagctcgacgagtccgccctgggcttcctggtggggctgggcgggcgggggaggggccgcgcagcagcagcggaagccagacctcggcgataagaggctgcacagcgacatgcaacagtcttttcactgcagctgaatgagttgtggcgcccacaatgctcccatgacaaggagctgacaagttccattttccgtcgcgggcatcttggaatcatgactcccacaatgccttgggcacttggtcgacagtggggccgcctctgaaaaaaaaatgtgagaggttggtactaagaagtgcctttcctgacgtctctgctgcttggaaccgcttctagagcagtctctgcttttgccttgcttgctgccagctagactgtgacgacagcacatccaccctccacctctagcccagacacccccatttctacttataatcaagagaaaagctctaagtatctggcattgccctaggctgctttagtgttaaaagaaaagtttgctgaaaaagtaagatatcttctgccaggaaatcaaggaggaaaaaaaaaatcattttctcgattttgctctaaactgctgcatctgtctatgccaaactaatcaataccgattgcaccaccaaactccattgcaaattcagctgtgaggagattccctttcagacaactttgctgaaagcagcttggaaattcggtgtcgaagggtctgccacgttttcatgcttgcattttgggctccaaattggcactgggaaggggttactgagagcacaaggctgataccaggccctacttttaaacgttcatctacttacaatcctagtatttctctaaaaaccaaaacctctttgaattaacagtttcatgctgtgaatttctagtgggagatcttttccttgatattgacgacacaattttccatgtacttttaaagcagggagtggggaaaagtattttgaggggacattttcatcatcagttcagctttttttttttggttgttgctcttttttgggggggttgggtttgttggtttcactgaaacatttaactacctgtaaaatctaaacatggctgttagtgtcacaccaattcgggacacaaaatggctaacactggaagtatgtagagagttccagagggggacttgctcacggccagacacggaatgtaaatttgcacatccttcgaaaagctgccaagttgaaaatggacgagtaatcgcctgctttgattcattgaaaacagttgatggtgcactcgtagctgcaaaatgaaggacattaaatttggctgtgacattgagtggttacacagaagacctgcttctacaacatttggaaacattgtgaaacattactattcagttgctatttttccatctcaaaatatttttttttagttgctgctcacttatggccacagaacagtccctttttgagtaaagcagcaaggttgcttaatgacatgctatgtggttaacaagattcaactgccacatcaaggactttaaataatttcaagattttaaatgtatttatgaaatgaactcattacagcagctaatcaatgcaaactttgtcctttttctttgtctttctaagagaaactgaatttaatttaaatttaaattacagtgtctaaaacttggtaaaatattttaaatttgaataagaggaaaaaaaaaacatgaatttatttatgatggagcttcatacccaggacagtagcttcttaaatgttagtaaaataattatgttaagcattaaaacaattttgaatatgtaattaagcatttatgttaaaaaacatgtttcttacgtgtgtgtgtatatatttataactgacacatgtgattctttgtacagtatttagaatccttcccttcagatagcagtcctcttgtattcagtcttgtggctaaaatagatcaaaaacatattttaaaactgttaaagtaactgtatgactcatgcttgaagttctgaaatttgggagcgttatgaggtttccatgccattaaccgctagatcatttgcattctctcacagagtaaacggaaaaaaatttagaaaacttgtaataatcctgacttctttaataaaatgtgtcctgtgtattgcttaaatccatagtccagccttttctgagttcttgagccatgagatggaggtggcctgtgtaatctactatttttagaaagttaggaaagcaaaccaaatactctctgagaggaccctatgaaatggctgtacccttcagctgtgctgcttcagactttggccaggctcccaggtgacttacgttaatagcagacttctagttagaagaggagaatttatttcattaaaaaaaaaaaaataagtcaaacagttcaagaaagtattcatttatgtaaaagaagtcaattggtatgttactaaagataataggaagaaaattagctcactattttagttgcatactgatgattttaaggtttaaataattagatttaaatataccgtatgtaaatgtagaagtctgtatcgtaataaatctgttgctaagtaaaatgggaatacatgacaacgaggaatgtaggtattaagaatgtcagaattagaacgagaacagtaaaagagcaaaagctgtaataatgtgtgctagtatataaacaatactctaaatacttagtttctctaattttccttttacaattgcagttttaatttataatagtctaagagcgtattcaagctgagacttaaattgcttacgtgctatagatttaggtgtattagctatttcagaaatccagaacatttgcaaaggtgcattattttatgccaaagaggattatgttcccctatggcttgtgaaagagataggaaaaaagaaaagaaaaatattaacactgcaagccaccattagaaaattatatttcaaaaatgatgtttcaaatcaatgacaaattgcctattcagtcatgagctctcaactaaaatttggggagtcaatgtaaagaaagcctacagaatgtattttaatatttgccaagttatttataccctcaaaaaaaaagcttttacgatatgatcaacagaaatagacttattgtttactgaattctatttcaaatacccattcatttttcaggtactagggatgggagaaagagaat

SEQ ID NO: 354834 - DNA, 2177 bp, Homo sapiens
cccccagtctccaaaacttcatcacatcacagacgttcaggattctttccattcaaagcaaagccaagttacatcttatagcacccagtgaattatgatatggggctgcggtttatttgctctggcgacaatatggcttacttgccgtggaatatcccggtatttcagaagtaacatattatttttaaagagggagctttgctttctctaaatcacatggtgcaaagttgggaatacagtggcctgtaaattacaaatattatttacaaactagaaggaaagctgacatgtgtttgtgcctgtgtgacagtttcactaaggaattccaaaactgtggatagcctgttacttgagaaaaatacacggtggcagtcttgcagatgtttttcccgcctgttagccctccaggttcaaaaactgtttggtgcattttaaggcggcagtctcaccagatcgcaggattctagtctaattggcttctaaccttcaatctaaccttgccggcttccttgcaaagcccggtgcaagggcctctttcaaaatgaacccactggtgtgcctagcagtcggtagaagaagcgggagggcgtccggtctgcacgcccgccgcgaggttacaatgctgaacgcatgagatggaagataccaacgggaggccgaggggatccacggcgcccgcgcgggctccggcttcctcctgctctcggcgccgctgggcgaccgcccatgacccgctcttgcgggctctgtccggttgacaggcgaccctgtggcccggggaagcgcgggagggcgccggcggaaagttgaagagcgtttttctcgccgccgcgtgcattaggagctcgacgagtccgccctgggcttcctggtggggctgggcgggcgggggaggggccgcgcagcagcagcggaagccagacctcggcgataagaggctgcacagcgacatgcaacagtcttttcactgcagctgaatgagttgtggcgcccacaatgctcccatgacaaggagctgacaagttccattttccgtcgcgggcatcttggaatcatgactcccacaatgccttgggcacttggtcgacagtggggccgcctctgaaaaaaaaatgtgagaggttggtactaagaagtgcctttcctgacgtctctgctgcttggaaccgcttctagagcagtctctgcttttgccttgcttgctgccagctagactgtgacgacagcacatccaccctccacctctagcccagacacccccatttctacttataatcaagagaaaagctctaagtatctggcattgccctaggctgctttagtgttaaaagaaaagtttgctgaaaaagtaagatatcttctgccaggaaatcaaggaggaaaaaaaaaatcattttctcgattttgctctaaactgctgcatctgtctatgccaaactaatcaataccgattgcaccaccaaactccattgcaaattcagctgtgaggagattccctttcagacaactttgctgaaagcagcttggaaattcggtgtcgaagggtctgccacgttttcatgcttgcattttgggctccaaattggcactgggaaggggttactgagagcacaaggctgataccaggccctacttttaaacgttcatctacttacaatcctagtatttctctaaaaaccaaaacctctttgaattaacagtttcatgctgtgaatttctagtgggagatcttttccttgatattgacgacacaattttccatgtacttttaaagcagggagtggggaaaagtattttgaggggacattttcatcatcagttcagctttttttttttggttgttgctcttttttgggggggttgggtttgttggtttcactgaaacatttaactacctgtaaaatctaaacatggctgttagtgtcacaccaattcgggacacaaaatggctaacactggaagtatgtagagagttccagagggggacttgctcacggccagacacggaatgtaaatttgcacatccttcgaaaagctgccaagttgaaaatggacgagtaatcgcctgctttgattcattgaaagtgagtaactattatattcttttaaggatattcaatgattgaatgaggggtatatggacatacagttctctgcatatgagattaaggatagag

SEQ ID NO: 354835 - DNA, 1879 bp, Homo sapiens
cccccagtctccaaaacttcatcacatcacagacgttcaggattctttccattcaaagcaaagccaagttacatcttatagcacccagtgaattatgatatggggctgcggtttatttgctctggcgacaatatggcttacttgccgtggaatatcccggtatttcagaagtaacatattatttttaaagagggagctttgctttctctaaatcacatggtgcaaagttgggaatacagtggcctgtaaattacaaatattatttacaaactagaaggaaagctgacatgtgtttgtgcctgtgtgacagtttcactaaggaattccaaaactgtggatagcctgttacttgagaaaaatacacggtggcagtcttgcagatgtttttcccgcctgttagccctccaggttcaaaaactgtttggtgcattttaaggcggcagtctcaccagatcgcaggattctagtctaattggcttctaaccttcaatctaaccttgccggcttccttgcaaagcccggtgcaagggcctctttcaaaatgaacccactggtgtgcctagcagtcggtagaagaagcgggagggcgtccggtctgcacgcccgccgcgaggttacaatgctgaacgcatgagatggaagataccaacgggaggccgaggggatccacggcgcccgcgcgggctccggcttcctcctgctctcggcgccgctgggcgaccgcccatgacccgctcttgcgggctctgtccggttgacaggcgaccctgtggcccggggaagcgcgggagggcgccggcggaaagttgaagagcgtttttctcgccgccgcgtgcattaggagctcgacgagtccgccctgggcttcctggtggggctgggcgggcgggggaggggccgcgcagcagcagcggaagccagacctcggcgataagaggctgcacagcgacatgcaacagtcttttcactgcagctgaatgagttgtggcgcccacaatgctcccatgacaaggagctgacaagttccattttccgtcgcgggcatcttggaatcatgactcccacaatgccttgggcacttggtcgacagtggggccgcctctgaaaaaaaaatgtgagaggttggtactaagaagtgcctttcctgacgtctctgctgcttggaaccgcttctagagcagtctctgcttttgccttgcttgctgccagctagactgtgacgacagcacatccaccctccacctctagcccagacacccccatttctacttataatcaagagaaaagctctaagtatctggcattgccctaggctgctttagtgttaaaagaaaagtttgctgaaaaagtaagatatcttctgccaggaaatcaaggaggaaaaaaaaaatcattttctcgattttgctctaaactgctgcatctgtctatgccaaactaatcaataccgattgcaccaccaaactccattgcaaattcagctgtgaggagattccctttcagacaactttgctgaaagcagcttggaaattcggtgtcgaagggtctgccacgttttcatgcttgcattttgggctccaaattggcactgggaaggggttactgagagcacaaggctgataccaggccctacttttaaacgttcatctacttacaatcctagtatttctctaaaaaccaaaacctctttgaattaacagtttcatgctgtgaatttctagtgggagatcttttccttgatattgacgacacaattttccatgtacttttaaagcagggagtggggaaaagtattttgaggggacattttcatcatcagttcagcttttttttttggggtcggtggcgatttaagggggggaccaggggggatcctcta

SEQ ID NO: 354836 - DNA, 399 bp, Homo sapiens
cttttagatattacctgttctaacaaagcttatctctttttcccttgtagatcatgctaaagaggaaaggacagtgtgcttggttagagtaaaggacgaggtcattagccatattgtatatatcgtcaagcaacacacacaaaagttcctcagccacaagacatccacatattgcatgttaaccagaagaaaagacaacattttccggaaatccactgcacactgttgcctatacactttgtacatttaattgatatttgtgctgaggtgatattcctgtctaaaagaacaacattgtctttcttttctagcacagagttatgcattcaaagatgcatacctagttagtttcctatatattcatgccatcttgaaaagacagactatggtgtaaccatg

SEQ ID NO: 354837 - DNA, 6437 bp, Homo sapiens
cccccagtctccaaaacttcatcacatcacagacgttcaggattctttccattcaaagcaaagccaagttacatcttatagcacccagtgaattatgatatggggctgcggtttatttgctctggcgacaatatggcttacttgccgtggaatatcccggtatttcagaagtaacatattatttttaaagagggagctttgctttctctaaatcacatggtgcaaagttgggaatacagtggcctgtaaattacaaatattatttacaaactagaaggaaagctgacatgtgtttgtgcctgtgtgacagtttcactaaggaattccaaaactgtggatagcctgttacttgagaaaaatacacggtggcagtcttgcagatgtttttcccgcctgttagccctccaggttcaaaaactgtttggtgcattttaaggcggcagtctcaccagatcgcaggattctagtctaattggcttctaaccttcaatctaaccttgccggcttccttgcaaagcccggtgcaagggcctctttcaaaatgaacccactggtgtgcctagcagtcggtagaagaagcgggagggcgtccggtctgcacgcccgccgcgaggttacaatgctgaacgcatgagatggaagataccaacgggaggccgaggggatccacggcgcccgcgcgggctccggcttcctcctgctctcggcgccgctgggcgaccgcccatgacccgctcttgcgggctctgtccggttgacaggcgaccctgtggcccggggaagcgcgggagggcgccggcggaaagttgaagagcgtttttctcgccgccgcgtgcattaggagctcgacgagtccgccctgggcttcctggtggggctgggcgggcgggggaggggccgcgcagcagcagcggaagccagacctcggcgataagaggctgcacagcgacatgcaacagtcttttcactgcagctgaatgagttgtggcgcccacaatgctcccatgacaaggagctgacaagttccattttccgtcgcgggcatcttggaatcatgactcccacaatgccttgggcacttggtcgacagtggggccgcctctgaaaaaaaaatgtgagaggttggtactaagaagtgcctttcctgacgtctctgctgcttggaaccgcttctagagcagtctctgcttttgccttgcttgctgccagctagactgtgacgacagcacatccaccctccacctctagcccagacacccccatttctacttataatcaagagaaaagctctaagtatctggcattgccctaggctgctttagtgttaaaagaaaagtttgctgaaaaagtaagatatcttctgccaggaaatcaaggaggaaaaaaaaaatcattttctcgattttgctctaaactgctgcatctgtctatgccaaactaatcaataccgattgcaccaccaaactccattgcaaattcagctgtgaggagattccctttcagacaactttgctgaaagcagcttggaaattcggtgtcgaagggtctgccacgttttcatgcttgcattttgggctccaaattggcactgggaaggggttactgagagcacaaggctgataccaggccctacttttaaacgttcatctacttacaatcctagtatttctctaaaaaccaaaacctctttgaattaacagtttcatgctgtgaatttctagtgggagatcttttccttgatattgacgacacaattttccatgtacttttaaagcagggagtggggaaaagtattttgaggggacattttcatcatcagttcagctttttttttttggttgttgctcttttttgggggggttgggtttgttggtttcactgaaacatttaactacctgtaaaatctaaacatggctgttagtgtcacaccaattcgggacacaaaatggctaacactggaagtatgtagagagttccagagggggacttgctcacggccagacacggaatgtaaatttgcacatccttcgaaaagctgccaagttgaaaatggacgagtaatcgcctgctttgattcattgaaaggccgttgctccagggagaactgcaaatatcttcatccacccccacatttaaaaacgcagttggagataaatggacgcaataacttgattcagcagaagaacatggccatgttggcccagcaaatgcaactagccaatgccatgatgcctggtgccccattacaacccgtgccaatgttttcagttgcaccaagcttagccaccaatgcatcagcagccgcctttaatccctatctgggacctgtttctccaagcctggtcccggcagagatcttgccgactgcaccaatgttggttacagggaatccgggtgtccctgtacctgcagctgctgcagctgctgcacagaaattaatgcgaacagacagacttgaggtatgtcgagagtaccaacgtggcaattgcaaccgaggagaaaatgattgtcggtttgctcatcctgctgacagcacaatgattgacaccaatgacaacacagtcactgtgtgtatggattacatcaaagggagatgctctcgggaaaagtgcaaatactttcatccccctgcacatttgcaagccaagatcaaggctgcccaataccaggtcaaccaggctgcagctgcacaggctgcagccaccgcagctgccatgggaattcctcaagctgtacttcccccattaccaaagaggcctgctcttgaaaaaaccaacggtgccaccgcagtctttaacactggtattttccaataccaacaggctctagccaacatgcagttacaacagcatacagcatttctcccaccagttcccatggtgcacggtgctacgccagccactgtgtccgcagcaacaacatctgccacaagtgttcccttcgctgcaacagccacagccaaccagatacccataatatctgccgaacatctgactagccacaagtatgttacccagatgtagaattttcatcactaaacaatcatgctaaagaggaaaggacagtgtgcttggttagagtaaaggacgaggtcattagccatattgtatatatcgtcaagcaacacacacaaaagttcctcagccacaagacatccacatattgcatgttaaccagaagaaaagacaacattttccggaaatccactgcacactgttgcctatacactttgtacatttaattgatatttgtgctgaggtgatattcctgtctaaaagaacaacattgtctttcttttctagcacagagttatgcattcaaagatgcatacctagttagtttcctatatattcatgccatcttgaaaagacagactatggtgtaaccatgattctattatgtattggtacgtctgtagaccaagatataattttttaaaaataagtttatttctttcaaggtttacaaataacaaaggtgcaccttgtatttaaaattgccattatagatgagagcgtgcatgcacagtcatttttgtttaagagtaatatttttaatgtaatagattgtaagacgtggtgagggagggatctgacagagatgaatgtgccaagcaaaaccacaactgtgtatattttaaagcacatcatggctttaagtaccatgttgttaaggattctcatgaagtgccatagactgtacatcaaattagagtattatttcttcagtgttattgttttcagagccacattttgttgcatatttgctagtactaatcagtcaaagggcaccattctttttttttttttttgaaaccaaagctgtctcagaaatggccaatttaactttacagtaacaatagacagcacaacacaaactctctcaatacagataaactcacacatactggagatatatatataatagatatatataaaattattttaatgcattgtagtgtaatatttatgcatactatactgtataacatgttattcaaaagggattgccatttctgagacacagtaacaaaaaaatgaggaaattattttgcttctatttatagcctctgtcaaaagtcaaaagactataaatgctttgcaaaaatggtttcacgtttgcttaaatgcttcatcacagtcacattcaaaatagtgactctaaacaaagaagaaagcagcactgtcatcagatgcatgataaaccaaaatatgaaaatgggaaatgtttaattaacctagtaattgggtgggttaagtacatgggtgaattttatatgtgatttttgttttgttttgttttgttcagattaactgcttatagccttagaaagccttttacaaaattaaaaaaaaaatagatgtgcattcagtttttaagaatggaatcatccaaaggaattcctttttttgaggtttggatgttgcagctagtaaaggatatttttgctctgttcagcagttctaaaaattgctgaagtaggggccaggtcactggtagttatagtatggaatgggagaagtgaaagttcagttatagaactttccatacttccaagtttactgcaagtttttatgcttgagagagatgctttctaatataagactgatgtgttgattttactgattgtactgtacatctattaaagccttagattattacattacgggttggaacccataccaatgtaatttcaatcgtgttaagaaagtaatggtgacttcacatgttattgtagttagttacattatagaatattacttatttttcttgttaaaatgtagtttttcatttcctacatttattagattttcattttctattaacaattgaataccatttcagtttatagacttgttttattagattttaccaatgaatttttcaaaatacaaaaaaaagtagtttttccttcataacatactcagttttgaattacatgtagtgtcacatgaatattcgtattgttaactaaatgatttatattttactgatttaatattacagtgtaagaatgtcagtcattgttagttcttgtctagttttcattaaaagaacaaagatcttttatatggatatcttataaatatataatcattgctaagtaagaagttaagttgttgctatcgcaacaatcctggcagacaattgagtaatattttgatgatttattttgtttgtaattagttattataagaagatctagatcctagatattagaataaaatttattttctactgtatccatttcaaatgttaaaatattgtttaatatttttgaaatccctgagtatcaggccttgttataaataagctgcataatcaataaatagaacaagggactttttgttgataatccaaatactcaaagtttacgtaatgaaaattatagcgtgtgtgcaaactcttgagggttgattatgctgcaatttagcatgttggaacgtctagggagaaggttgactttttgcacttctgtatatagtcaaaagagagaaacctgtataatagtaagatcttattttgaataaaaacgtctataattacaaggagttttgttaaggctaatacaatgacagactgagcaaaattgcttgcaaaagtggcacagagttagcactccataccccttcaaacatgttgctttgctttcttgtggacagcttgtagtttgccaggattttttcagctggaaagatacgccatcctttcaaaccctcatgactgacaaaaactccatggggccaaatctgcctgaagatcattaccaaaaatagcaggtacttctaccattaaggtgaaatcatggatcagatattccttacatttttcaaaactactgcatgtttaaaacttcaacaaaaaaagagagaaagaactatactaagaacatatattattcagatcagtttctgccaatttcagtggtttattgttcacaaaaaaatcttcaaaacaagtattgactttcacaaaatttaaatcataaacaggcaaaccaaacagcacactgtagctatagttgttatgtgattgttttttaattgctgtaggatcctgttctttcagcaggtgaaaaataaaacgcagttcaaatttcatggttttaattttcaactcagaagcactcaaaaatgcaaaatgtgataatgggcacttgtttaaaagaattagtgtatccagccttcactccagctggttaaaaatgttgcacttatcagcaaccctaccactttcatctgctgaaaggacaaatgtgcttggttttactattatgtaatcacaacttactttctgcttgtagttgcttaaaattatgtattttgtcttgggctgcaatttgttttatgcttattttattattactgcagtagttgactttgctgtatggaaaaataaagtgaaattgccctaataaaacttctctttcttaagta

SEQ ID NO: 354838 - DNA, 6443 bp, Homo sapiens
cccccagtctccaaaacttcatcacatcacagacgttcaggattctttccattcaaagcaaagccaagttacatcttatagcacccagtgaattatgatatggggctgcggtttatttgctctggcgacaatatggcttacttgccgtggaatatcccggtatttcagaagtaacatattatttttaaagagggagctttgctttctctaaatcacatggtgcaaagttgggaatacagtggcctgtaaattacaaatattatttacaaactagaaggaaagctgacatgtgtttgtgcctgtgtgacagtttcactaaggaattccaaaactgtggatagcctgttacttgagaaaaatacacggtggcagtcttgcagatgtttttcccgcctgttagccctccaggttcaaaaactgtttggtgcattttaaggcggcagtctcaccagatcgcaggattctagtctaattggcttctaaccttcaatctaaccttgccggcttccttgcaaagcccggtgcaagggcctctttcaaaatgaacccactggtgtgcctagcagtcggtagaagaagcgggagggcgtccggtctgcacgcccgccgcgaggttacaatgctgaacgcatgagatggaagataccaacgggaggccgaggggatccacggcgcccgcgcgggctccggcttcctcctgctctcggcgccgctgggcgaccgcccatgacccgctcttgcgggctctgtccggttgacaggcgaccctgtggcccggggaagcgcgggagggcgccggcggaaagttgaagagcgtttttctcgccgccgcgtgcattaggagctcgacgagtccgccctgggcttcctggtggggctgggcgggcgggggaggggccgcgcagcagcagcggaagccagacctcggcgataagaggctgcacagcgacatgcaacagtcttttcactgcagctgaatgagttgtggcgcccacaatgctcccatgacaaggagctgacaagttccattttccgtcgcgggcatcttggaatcatgactcccacaatgccttgggcacttggtcgacagtggggccgcctctgaaaaaaaaatgtgagaggttggtactaagaagtgcctttcctgacgtctctgctgcttggaaccgcttctagagcagtctctgcttttgcctctagcccagacacccccatttctacttataatcaagagaaaagctctaagtatctggcattgccctaggctgctttagtgttaaaagaaaagtttgctgaaaaagtaagatatcttctgccaggaaatcaaggaggaaaaaaaaaatcattttctcgattttgctctaaactgctgcatctgtctatgccaaactaatcaataccgattgcaccaccaaactccattgcaaattcagctgtgaggagattccctttcagacaactttgctgaaagcagcttggaaattcggtgtcgaagggtctgccacgttttcatgcttgcattttgggctccaaattggcactgggaaggggttactgagagcacaaggctgataccaggccctacttttaaacgttcatctacttacaatcctagtatttctctaaaaaccaaaacctctttgaattaacagtttcatgctgtgaatttctagtgggagatcttttccttgatattgacgacacaattttccatgtacttttaaagcagggagtggggaaaagtattttgaggggacattttcatcatcagttcagctttttttttttggttgttgctcttttttgggggggttgggtttgttggtttcactgaaacatttaactacctgtaaaatctaaacatggctgttagtgtcacaccaattcgggacacaaaatggctaacactggaagtatgtagagagttccagagggggacttgctcacggccagacacggaatgtaaatttgcacatccttcgaaaagctgccaagttgaaaatggacgagtaatcgcctgctttgattcattgaaaggccgttgctccagggagaactgcaaatatcttcatccacccccacatttaaaaacgcagttggagataaatggacgcaataacttgattcagcagaagaacatggccatgttggcccagcaaatgcaactagccaatgccatgatgcctggtgccccattacaacccgtgccaatgttttcagttgcaccaagcttagccaccaatgcatcagcagccgcctttaatccctatctgggacctgtttctccaagcctggtcccggcagagatcttgccgactgcaccaatgttggttacagggaatccgggtgtccctgtacctgcagctgctgcagctgctgcacagaaattaatgcgaacagacagacttgaggtatgtcgagagtaccaacgtggcaattgcaaccgaggagaaaatgattgtcggtttgctcatcctgctgacagcacaatgattgacaccaatgacaacacagtcactgtgtgtatggattacatcaaagggagatgctctcgggaaaagtgcaaatactttcatccccctgcacatttgcaagccaagatcaaggctgcccaataccaggtcaaccaggctgcagctgcacaggctgcagccaccgcagctgccatgactcagtcggctgtcaaatcactgaagcgacccctcgaggcaacctttgacctgggaattcctcaagctgtacttcccccattaccaaagaggcctgctcttgaaaaaaccaacggtgccaccgcagtctttaacactggtattttccaataccaacaggctctagccaacatgcagttacaacagcatacagcatttctcccaccagttcccatggtgcacggtgctacgccagccactgtgtccgcagcaacaacatctgccacaagtgttcccttcgctgcaacagccacagccaaccagatacccataatatctgccgaacatctgactagccacaagtatgttacccagatgtagaattttcatcactaaacaatcatgctaaagaggaaaggacagtgtgcttggttagagtaaaggacgaggtcattagccatattgtatatatcgtcaagcaacacacacaaaagttcctcagccacaagacatccacatattgcatgttaaccagaagaaaagacaacattttccggaaatccactgcacactgttgcctatacactttgtacatttaattgatatttgtgctgaggtgatattcctgtctaaaagaacaacattgtctttcttttctagcacagagttatgcattcaaagatgcatacctagttagtttcctatatattcatgccatcttgaaaagacagactatggtgtaaccatgattctattatgtattggtacgtctgtagaccaagatataattttttaaaaataagtttatttctttcaaggtttacaaataacaaaggtgcaccttgtatttaaaattgccattatagatgagagcgtgcatgcacagtcatttttgtttaagagtaatatttttaatgtaatagattgtaagacgtggtgagggagggatctgacagagatgaatgtgccaagcaaaaccacaactgtgtatattttaaagcacatcatggctttaagtaccatgttgttaaggattctcatgaagtgccatagactgtacatcaaattagagtattatttcttcagtgttattgttttcagagccacattttgttgcatatttgctagtactaatcagtcaaagggcaccattctttttttttttttttgaaaccaaagctgtctcagaaatggccaatttaactttacagtaacaatagacagcacaacacaaactctctcaatacagataaactcacacatactggagatatatatataatagatatatataaaattattttaatgcattgtagtgtaatatttatgcatactatactgtataacatgttattcaaaagggattgccatttctgagacacagtaacaaaaaaatgaggaaattattttgcttctatttatagcctctgtcaaaagtcaaaagactataaatgctttgcaaaaatggtttcacgtttgcttaaatgcttcatcacagtcacattcaaaatagtgactctaaacaaagaagaaagcagcactgtcatcagatgcatgataaaccaaaatatgaaaatgggaaatgtttaattaacctagtaattgggtgggttaagtacatgggtgaattttatatgtgatttttgttttgttttgttttgttcagattaactgcttatagccttagaaagccttttacaaaattaaaaaaaaaatagatgtgcattcagtttttaagaatggaatcatccaaaggaattcctttttttgaggtttggatgttgcagctagtaaaggatatttttgctctgttcagcagttctaaaaattgctgaagtaggggccaggtcactggtagttatagtatggaatgggagaagtgaaagttcagttatagaactttccatacttccaagtttactgcaagtttttatgcttgagagagatgctttctaatataagactgatgtgttgattttactgattgtactgtacatctattaaagccttagattattacattacgggttggaacccataccaatgtaatttcaatcgtgttaagaaagtaatggtgacttcacatgttattgtagttagttacattatagaatattacttatttttcttgttaaaatgtagtttttcatttcctacatttattagattttcattttctattaacaattgaataccatttcagtttatagacttgttttattagattttaccaatgaatttttcaaaatacaaaaaaaagtagtttttccttcataacatactcagttttgaattacatgtagtgtcacatgaatattcgtattgttaactaaatgatttatattttactgatttaatattacagtgtaagaatgtcagtcattgttagttcttgtctagttttcattaaaagaacaaagatcttttatatggatatcttataaatatataatcattgctaagtaagaagttaagttgttgctatcgcaacaatcctggcagacaattgagtaatattttgatgatttattttgtttgtaattagttattataagaagatctagatcctagatattagaataaaatttattttctactgtatccatttcaaatgttaaaatattgtttaatatttttgaaatccctgagtatcaggccttgttataaataagctgcataatcaataaatagaacaagggactttttgttgataatccaaatactcaaagtttacgtaatgaaaattatagcgtgtgtgcaaactcttgagggttgattatgctgcaatttagcatgttggaacgtctagggagaaggttgactttttgcacttctgtatatagtcaaaagagagaaacctgtataatagtaagatcttattttgaataaaaacgtctataattacaaggagttttgttaaggctaatacaatgacagactgagcaaaattgcttgcaaaagtggcacagagttagcactccataccccttcaaacatgttgctttgctttcttgtggacagcttgtagtttgccaggattttttcagctggaaagatacgccatcctttcaaaccctcatgactgacaaaaactccatggggccaaatctgcctgaagatcattaccaaaaatagcaggtacttctaccattaaggtgaaatcatggatcagatattccttacatttttcaaaactactgcatgtttaaaacttcaacaaaaaaagagagaaagaactatactaagaacatatattattcagatcagtttctgccaatttcagtggtttattgttcacaaaaaaatcttcaaaacaagtattgactttcacaaaatttaaatcataaacaggcaaaccaaacagcacactgtagctatagttgttatgtgattgttttttaattgctgtaggatcctgttctttcagcaggtgaaaaataaaacgcagttcaaatttcatggttttaattttcaactcagaagcactcaaaaatgcaaaatgtgataatgggcacttgtttaaaagaattagtgtatccagccttcactccagctggttaaaaatgttgcacttatcagcaaccctaccactttcatctgctgaaaggacaaatgtgcttggttttactattatgtaatcacaacttactttctgcttgtagttgcttaaaattatgtattttgtcttgggctgcaatttgttttatgcttattttattattactgcagtagttgactttgctgtatggaaaaataaagtgaaattgccctaataaaacttctctttcttaagta

SEQ ID NO: 354839 - DNA, 6233 bp, Homo sapiens
cccccagtctccaaaacttcatcacatcacagacgttcaggattctttccattcaaagcaaagccaagttacatcttatagcacccagtgaattatgatatggggctgcggtttatttgctctggcgacaatatggcttacttgccgtggaatatcccggtatttcagaagtaacatattatttttaaagagggagctttgctttctctaaatcacatggtgcaaagttgggaatacagtggcctgtaaattacaaatattatttacaaactagaaggaaagctgacatgtgtttgtgcctgtgtgacagtttcactaaggaattccaaaactgtggatagcctgttacttgagaaaaatacacggtggcagtcttgcagatgtttttcccgcctgttagccctccaggttcaaaaactgtttggtgcattttaaggcggcagtctcaccagatcgcaggattctagtctaattggcttctaaccttcaatctaaccttgccggcttccttgcaaagcccggtgcaagggcctctttcaaaatgaacccactggtgtgcctagcagtcggtagaagaagcgggagggcgtccggtctgcacgcccgccgcgaggttacaatgctgaacgcatgagatggaagataccaacgggaggccgaggggatccacggcgcccgcgcgggctccggcttcctcctgctctcggcgccgctgggcgaccgcccatgacccgctcttgcgggctctgtccggttgacaggcgaccctgtggcccggggaagcgcgggagggcgccggcggaaagttgaagagcgtttttctcgccgccgcgtgcattaggagctcgacgagtccgccctgggcttcctggtggggctgggcgggcgggggaggggccgcgcagcagcagcggaagccagacctcggcgataagaggctgcacagcgacatgcaacagtcttttcactgcagctgaatgagttgtggcgcccacaatgctcccatgacaaggagctgacaagttccattttccgtcgcgggcatcttggaatcatgactcccacaatgccttgggcacttggtcgacagtggggccgcctctgaaaaaaaaatgtgagaggttggtactaagaagtgcctttcctgacgtctctgctgcttggaaccgcttctagagcagtctctgcttttgccttgcttgctgccagctagactgtgacgacagcacatccaccctccacctctagcccagacacccccatttctacttataatcaagagaaaagctctaagtatctggcattgccctaggctgctttagtgttaaaagaaaagtttgctgaaaaagtaagatatcttctgccaggaaatcaaggaggaaaaaaaaaatcattttctcgattttgctctaaactgctgcatctgtctatgccaaactaatcaataccgattgcaccaccaaactccattgcaaattcagctgtgaggagattccctttcagacaactttgctgaaagcagcttggaaattcggtgtcgaagggtctgccacgttttcatgcttgcattttgggctccaaattggcactgggaaggggttactgagagcacaaggctgataccaggccctacttttaaacgttcatctacttacaatcctagtatttctctaaaaaccaaaacctctttgaattaacagtttcatgctgtgaatttctagtgggagatcttttccttgatattgacgacacaattttccatgtacttttaaagcagggagtggggaaaagtattttgaggggacattttcatcatcagttcagctttttttttttggttgttgctcttttttgggggggttgggtttgttggtttcactgaaacatttaactacctgtaaaatctaaacatggctgttagtgtcacaccaattcgggacacaaaatggctaacactggaagtatgtagagagttccagagggggacttgctcacggccagacacggaatgtaaatttgcacatccttcgaaaagctgccaagttgaaaatggacgagtaatcgcctgctttgattcattgaaaggccgttgctccagggagaactgcaaatatcttcatccacccccacatttaaaaacgcagttggagataaatggacgcaataacttgattcagcagaagaacatggccatgttggcccagcaaatgcaactagccaatgccatgatgcctggtgccccattacaacccgtggtatgtcgagagtaccaacgtggcaattgcaaccgaggagaaaatgattgtcggtttgctcatcctgctgacagcacaatgattgacaccaatgacaacacagtcactgtgtgtatggattacatcaaagggagatgctctcgggaaaagtgcaaatactttcatccccctgcacatttgcaagccaagatcaaggctgcccaataccaggtcaaccaggctgcagctgcacaggctgcagccaccgcagctgccatgggaattcctcaagctgtacttcccccattaccaaagaggcctgctcttgaaaaaaccaacggtgccaccgcagtctttaacactggtattttccaataccaacaggctctagccaacatgcagttacaacagcatacagcatttctcccaccagttcccatggtgcacggtgctacgccagccactgtgtccgcagcaacaacatctgccacaagtgttcccttcgctgcaacagccacagccaaccagatacccataatatctgccgaacatctgactagccacaagtatgttacccagatgtagaattttcatcactaaacaatcatgctaaagaggaaaggacagtgtgcttggttagagtaaaggacgaggtcattagccatattgtatatatcgtcaagcaacacacacaaaagttcctcagccacaagacatccacatattgcatgttaaccagaagaaaagacaacattttccggaaatccactgcacactgttgcctatacactttgtacatttaattgatatttgtgctgaggtgatattcctgtctaaaagaacaacattgtctttcttttctagcacagagttatgcattcaaagatgcatacctagttagtttcctatatattcatgccatcttgaaaagacagactatggtgtaaccatgattctattatgtattggtacgtctgtagaccaagatataattttttaaaaataagtttatttctttcaaggtttacaaataacaaaggtgcaccttgtatttaaaattgccattatagatgagagcgtgcatgcacagtcatttttgtttaagagtaatatttttaatgtaatagattgtaagacgtggtgagggagggatctgacagagatgaatgtgccaagcaaaaccacaactgtgtatattttaaagcacatcatggctttaagtaccatgttgttaaggattctcatgaagtgccatagactgtacatcaaattagagtattatttcttcagtgttattgttttcagagccacattttgttgcatatttgctagtactaatcagtcaaagggcaccattctttttttttttttttgaaaccaaagctgtctcagaaatggccaatttaactttacagtaacaatagacagcacaacacaaactctctcaatacagataaactcacacatactggagatatatatataatagatatatataaaattattttaatgcattgtagtgtaatatttatgcatactatactgtataacatgttattcaaaagggattgccatttctgagacacagtaacaaaaaaatgaggaaattattttgcttctatttatagcctctgtcaaaagtcaaaagactataaatgctttgcaaaaatggtttcacgtttgcttaaatgcttcatcacagtcacattcaaaatagtgactctaaacaaagaagaaagcagcactgtcatcagatgcatgataaaccaaaatatgaaaatgggaaatgtttaattaacctagtaattgggtgggttaagtacatgggtgaattttatatgtgatttttgttttgttttgttttgttcagattaactgcttatagccttagaaagccttttacaaaattaaaaaaaaaatagatgtgcattcagtttttaagaatggaatcatccaaaggaattcctttttttgaggtttggatgttgcagctagtaaaggatatttttgctctgttcagcagttctaaaaattgctgaagtaggggccaggtcactggtagttatagtatggaatgggagaagtgaaagttcagttatagaactttccatacttccaagtttactgcaagtttttatgcttgagagagatgctttctaatataagactgatgtgttgattttactgattgtactgtacatctattaaagccttagattattacattacgggttggaacccataccaatgtaatttcaatcgtgttaagaaagtaatggtgacttcacatgttattgtagttagttacattatagaatattacttatttttcttgttaaaatgtagtttttcatttcctacatttattagattttcattttctattaacaattgaataccatttcagtttatagacttgttttattagattttaccaatgaatttttcaaaatacaaaaaaaagtagtttttccttcataacatactcagttttgaattacatgtagtgtcacatgaatattcgtattgttaactaaatgatttatattttactgatttaatattacagtgtaagaatgtcagtcattgttagttcttgtctagttttcattaaaagaacaaagatcttttatatggatatcttataaatatataatcattgctaagtaagaagttaagttgttgctatcgcaacaatcctggcagacaattgagtaatattttgatgatttattttgtttgtaattagttattataagaagatctagatcctagatattagaataaaatttattttctactgtatccatttcaaatgttaaaatattgtttaatatttttgaaatccctgagtatcaggccttgttataaataagctgcataatcaataaatagaacaagggactttttgttgataatccaaatactcaaagtttacgtaatgaaaattatagcgtgtgtgcaaactcttgagggttgattatgctgcaatttagcatgttggaacgtctagggagaaggttgactttttgcacttctgtatatagtcaaaagagagaaacctgtataatagtaagatcttattttgaataaaaacgtctataattacaaggagttttgttaaggctaatacaatgacagactgagcaaaattgcttgcaaaagtggcacagagttagcactccataccccttcaaacatgttgctttgctttcttgtggacagcttgtagtttgccaggattttttcagctggaaagatacgccatcctttcaaaccctcatgactgacaaaaactccatggggccaaatctgcctgaagatcattaccaaaaatagcaggtacttctaccattaaggtgaaatcatggatcagatattccttacatttttcaaaactactgcatgtttaaaacttcaacaaaaaaagagagaaagaactatactaagaacatatattattcagatcagtttctgccaatttcagtggtttattgttcacaaaaaaatcttcaaaacaagtattgactttcacaaaatttaaatcataaacaggcaaaccaaacagcacactgtagctatagttgttatgtgattgttttttaattgctgtaggatcctgttctttcagcaggtgaaaaataaaacgcagttcaaatttcatggttttaattttcaactcagaagcactcaaaaatgcaaaatgtgataatgggcacttgtttaaaagaattagtgtatccagccttcactccagctggttaaaaatgttgcacttatcagcaaccctaccactttcatctgctgaaaggacaaatgtgcttggttttactattatgtaatcacaacttactttctgcttgtagttgcttaaaattatgtattttgtcttgggctgcaatttgttttatgcttattttattattactgcagtagttgactttgctgtatggaaaaataaagtgaaattgccctaataaaacttctctttcttaagta

SEQ ID NO: 354840 - DNA, 6269 bp, Homo sapiens
cccccagtctccaaaacttcatcacatcacagacgttcaggattctttccattcaaagcaaagccaagttacatcttatagcacccagtgaattatgatatggggctgcggtttatttgctctggcgacaatatggcttacttgccgtggaatatcccggtatttcagaagtaacatattatttttaaagagggagctttgctttctctaaatcacatggtgcaaagttgggaatacagtggcctgtaaattacaaatattatttacaaactagaaggaaagctgacatgtgtttgtgcctgtgtgacagtttcactaaggaattccaaaactgtggatagcctgttacttgagaaaaatacacggtggcagtcttgcagatgtttttcccgcctgttagccctccaggttcaaaaactgtttggtgcattttaaggcggcagtctcaccagatcgcaggattctagtctaattggcttctaaccttcaatctaaccttgccggcttccttgcaaagcccggtgcaagggcctctttcaaaatgaacccactggtgtgcctagcagtcggtagaagaagcgggagggcgtccggtctgcacgcccgccgcgaggttacaatgctgaacgcatgagatggaagataccaacgggaggccgaggggatccacggcgcccgcgcgggctccggcttcctcctgctctcggcgccgctgggcgaccgcccatgacccgctcttgcgggctctgtccggttgacaggcgaccctgtggcccggggaagcgcgggagggcgccggcggaaagttgaagagcgtttttctcgccgccgcgtgcattaggagctcgacgagtccgccctgggcttcctggtggggctgggcgggcgggggaggggccgcgcagcagcagcggaagccagacctcggcgataagaggctgcacagcgacatgcaacagtcttttcactgcagctgaatgagttgtggcgcccacaatgctcccatgacaaggagctgacaagttccattttccgtcgcgggcatcttggaatcatgactcccacaatgccttgggcacttggtcgacagtggggccgcctctgaaaaaaaaatgtgagaggttggtactaagaagtgcctttcctgacgtctctgctgcttggaaccgcttctagagcagtctctgcttttgccttgcttgctgccagctagactgtgacgacagcacatccaccctccacctctagcccagacacccccatttctacttataatcaagagaaaagctctaagtatctggcattgccctaggctgctttagtgttaaaagaaaagtttgctgaaaaagtaagatatcttctgccaggaaatcaaggaggaaaaaaaaaatcattttctcgattttgctctaaactgctgcatctgtctatgccaaactaatcaataccgattgcaccaccaaactccattgcaaattcagctgtgaggagattccctttcagacaactttgctgaaagcagcttggaaattcggtgtcgaagggtctgccacgttttcatgcttgcattttgggctccaaattggcactgggaaggggttactgagagcacaaggctgataccaggccctacttttaaacgttcatctacttacaatcctagtatttctctaaaaaccaaaacctctttgaattaacagtttcatgctgtgaatttctagtgggagatcttttccttgatattgacgacacaattttccatgtacttttaaagcagggagtggggaaaagtattttgaggggacattttcatcatcagttcagctttttttttttggttgttgctcttttttgggggggttgggtttgttggtttcactgaaacatttaactacctgtaaaatctaaacatggctgttagtgtcacaccaattcgggacacaaaatggctaacactggaagtatgtagagagttccagagggggacttgctcacggccagacacggaatgtaaatttgcacatccttcgaaaagctgccaagttgaaaatggacgagtaatcgcctgctttgattcattgaaaggccgttgctccagggagaactgcaaatatcttcatccacccccacatttaaaaacgcagttggagataaatggacgcaataacttgattcagcagaagaacatggccatgttggcccagcaaatgcaactagccaatgccatgatgcctggtgccccattacaacccgtggtatgtcgagagtaccaacgtggcaattgcaaccgaggagaaaatgattgtcggtttgctcatcctgctgacagcacaatgattgacaccaatgacaacacagtcactgtgtgtatggattacatcaaagggagatgctctcgggaaaagtgcaaatactttcatccccctgcacatttgcaagccaagatcaaggctgcccaataccaggtcaaccaggctgcagctgcacaggctgcagccaccgcagctgccatgggaattcctcaagctgtacttcccccattaccaaagaggcctgctcttgaaaaaaccaacggtgccaccgcagtctttaacactggtattttccaataccaacaggctctagccaacatgcagttacaacagcatacagcatttctcccaccaggctcaatattgtgcatgacacccgctacaagtgttgttcccatggtgcacggtgctacgccagccactgtgtccgcagcaacaacatctgccacaagtgttcccttcgctgcaacagccacagccaaccagatacccataatatctgccgaacatctgactagccacaagtatgttacccagatgtagaattttcatcactaaacaatcatgctaaagaggaaaggacagtgtgcttggttagagtaaaggacgaggtcattagccatattgtatatatcgtcaagcaacacacacaaaagttcctcagccacaagacatccacatattgcatgttaaccagaagaaaagacaacattttccggaaatccactgcacactgttgcctatacactttgtacatttaattgatatttgtgctgaggtgatattcctgtctaaaagaacaacattgtctttcttttctagcacagagttatgcattcaaagatgcatacctagttagtttcctatatattcatgccatcttgaaaagacagactatggtgtaaccatgattctattatgtattggtacgtctgtagaccaagatataattttttaaaaataagtttatttctttcaaggtttacaaataacaaaggtgcaccttgtatttaaaattgccattatagatgagagcgtgcatgcacagtcatttttgtttaagagtaatatttttaatgtaatagattgtaagacgtggtgagggagggatctgacagagatgaatgtgccaagcaaaaccacaactgtgtatattttaaagcacatcatggctttaagtaccatgttgttaaggattctcatgaagtgccatagactgtacatcaaattagagtattatttcttcagtgttattgttttcagagccacattttgttgcatatttgctagtactaatcagtcaaagggcaccattctttttttttttttttgaaaccaaagctgtctcagaaatggccaatttaactttacagtaacaatagacagcacaacacaaactctctcaatacagataaactcacacatactggagatatatatataatagatatatataaaattattttaatgcattgtagtgtaatatttatgcatactatactgtataacatgttattcaaaagggattgccatttctgagacacagtaacaaaaaaatgaggaaattattttgcttctatttatagcctctgtcaaaagtcaaaagactataaatgctttgcaaaaatggtttcacgtttgcttaaatgcttcatcacagtcacattcaaaatagtgactctaaacaaagaagaaagcagcactgtcatcagatgcatgataaaccaaaatatgaaaatgggaaatgtttaattaacctagtaattgggtgggttaagtacatgggtgaattttatatgtgatttttgttttgttttgttttgttcagattaactgcttatagccttagaaagccttttacaaaattaaaaaaaaaatagatgtgcattcagtttttaagaatggaatcatccaaaggaattcctttttttgaggtttggatgttgcagctagtaaaggatatttttgctctgttcagcagttctaaaaattgctgaagtaggggccaggtcactggtagttatagtatggaatgggagaagtgaaagttcagttatagaactttccatacttccaagtttactgcaagtttttatgcttgagagagatgctttctaatataagactgatgtgttgattttactgattgtactgtacatctattaaagccttagattattacattacgggttggaacccataccaatgtaatttcaatcgtgttaagaaagtaatggtgacttcacatgttattgtagttagttacattatagaatattacttatttttcttgttaaaatgtagtttttcatttcctacatttattagattttcattttctattaacaattgaataccatttcagtttatagacttgttttattagattttaccaatgaatttttcaaaatacaaaaaaaagtagtttttccttcataacatactcagttttgaattacatgtagtgtcacatgaatattcgtattgttaactaaatgatttatattttactgatttaatattacagtgtaagaatgtcagtcattgttagttcttgtctagttttcattaaaagaacaaagatcttttatatggatatcttataaatatataatcattgctaagtaagaagttaagttgttgctatcgcaacaatcctggcagacaattgagtaatattttgatgatttattttgtttgtaattagttattataagaagatctagatcctagatattagaataaaatttattttctactgtatccatttcaaatgttaaaatattgtttaatatttttgaaatccctgagtatcaggccttgttataaataagctgcataatcaataaatagaacaagggactttttgttgataatccaaatactcaaagtttacgtaatgaaaattatagcgtgtgtgcaaactcttgagggttgattatgctgcaatttagcatgttggaacgtctagggagaaggttgactttttgcacttctgtatatagtcaaaagagagaaacctgtataatagtaagatcttattttgaataaaaacgtctataattacaaggagttttgttaaggctaatacaatgacagactgagcaaaattgcttgcaaaagtggcacagagttagcactccataccccttcaaacatgttgctttgctttcttgtggacagcttgtagtttgccaggattttttcagctggaaagatacgccatcctttcaaaccctcatgactgacaaaaactccatggggccaaatctgcctgaagatcattaccaaaaatagcaggtacttctaccattaaggtgaaatcatggatcagatattccttacatttttcaaaactactgcatgtttaaaacttcaacaaaaaaagagagaaagaactatactaagaacatatattattcagatcagtttctgccaatttcagtggtttattgttcacaaaaaaatcttcaaaacaagtattgactttcacaaaatttaaatcataaacaggcaaaccaaacagcacactgtagctatagttgttatgtgattgttttttaattgctgtaggatcctgttctttcagcaggtgaaaaataaaacgcagttcaaatttcatggttttaattttcaactcagaagcactcaaaaatgcaaaatgtgataatgggcacttgtttaaaagaattagtgtatccagccttcactccagctggttaaaaatgttgcacttatcagcaaccctaccactttcatctgctgaaaggacaaatgtgcttggttttactattatgtaatcacaacttactttctgcttgtagttgcttaaaattatgtattttgtcttgggctgcaatttgttttatgcttattttattattactgcagtagttgactttgctgtatggaaaaataaagtgaaattgccctaataaaacttctctttcttaagta

SEQ ID NO: 354841 - DNA, 6419 bp, Homo sapiens
cccccagtctccaaaacttcatcacatcacagacgttcaggattctttccattcaaagcaaagccaagttacatcttatagcacccagtgaattatgatatggggctgcggtttatttgctctggcgacaatatggcttacttgccgtggaatatcccggtatttcagaagtaacatattatttttaaagagggagctttgctttctctaaatcacatggtgcaaagttgggaatacagtggcctgtaaattacaaatattatttacaaactagaaggaaagctgacatgtgtttgtgcctgtgtgacagtttcactaaggaattccaaaactgtggatagcctgttacttgagaaaaatacacggtggcagtcttgcagatgtttttcccgcctgttagccctccaggttcaaaaactgtttggtgcattttaaggcggcagtctcaccagatcgcaggattctagtctaattggcttctaaccttcaatctaaccttgccggcttccttgcaaagcccggtgcaagggcctctttcaaaatgaacccactggtgtgcctagcagtcggtagaagaagcgggagggcgtccggtctgcacgcccgccgcgaggttacaatgctgaacgcatgagatggaagataccaacgggaggccgaggggatccacggcgcccgcgcgggctccggcttcctcctgctctcggcgccgctgggcgaccgcccatgacccgctcttgcgggctctgtccggttgacaggcgaccctgtggcccggggaagcgcgggagggcgccggcggaaagttgaagagcgtttttctcgccgccgcgtgcattaggagctcgacgagtccgccctgggcttcctggtggggctgggcgggcgggggaggggccgcgcagcagcagcggaagccagacctcggcgataagaggctgcacagcgacatgcaacagtcttttcactgcagctgaatgagttgtggcgcccacaatgctcccatgacaaggagctgacaagttccattttccgtcgcgggcatcttggaatcatgactcccacaatgccttgggcacttggtcgacagtggggccgcctctgaaaaaaaaatgtgagaggttggtactaagaagtgcctttcctgacgtctctgctgcttggaaccgcttctagagcagtctctgcttttgccttgcttgctgccagctagactgtgacgacagcacatccaccctccacctctagcccagacacccccatttctacttataatcaagagaaaagctctaagtatctggcattgccctaggctgctttagtgttaaaagaaaagtttgctgaaaaagtaagatatcttctgccaggaaatcaaggaggaaaaaaaaaatcattttctcgattttgctctaaactgctgcatctgtctatgccaaactaatcaataccgattgcaccaccaaactccattgcaaattcagctgtgaggagattccctttcagacaactttgctgaaagcagcttggaaattcggtgtcgaagggtctgccacgttttcatgcttgcattttgggctccaaattggcactgggaaggggttactgagagcacaaggctgataccaggccctacttttaaacgttcatctacttacaatcctagtatttctctaaaaaccaaaacctctttgaattaacagtttcatgctgtgaatttctagtgggagatcttttccttgatattgacgacacaattttccatgtacttttaaagcagggagtggggaaaagtattttgaggggacattttcatcatcagttcagctttttttttttggttgttgctcttttttgggggggttgggtttgttggtttcactgaaacatttaactacctgtaaaatctaaacatggctgttagtgtcacaccaattcgggacacaaaatggctaacactggaagtatgtagagagttccagagggggacttgctcacggccagacacggaatgtaaatttgcacatccttcgaaaagctgccaagttgaaaatggacgagtaatcgcctgctttgattcattgaaaggccgttgctccagggagaactgcaaatatcttcatccacccccacatttaaaaacgcagttggagataaatggacgcaataacttgattcagcagaagaacatggccatgttggcccagcaaatgcaactagccaatgccatgatgcctggtgccccattacaacccgtgccaatgttttcagttgcaccaagcttagccaccaatgcatcagcagccgcctttaatccctatctgggacctgtttctccaagcctggtcccggcagagatcttgccgactgcaccaatgttggttacagggaatccgggtgtccctgtacctgcagctgctgcagctgctgcacagaaattaatgcgaacagacagacttgaggtatgtcgagagtaccaacgtggcaattgcaaccgaggagaaaatgattgtcggtttgctcatcctgctgacagcacaatgattgacaccaatgacaacacagtcactgtgtgtatggattacatcaaagggagatgctctcgggaaaagtgcaaatactttcatccccctgcacatttgcaagccaagatcaaggctgcccaataccaggtcaaccaggctgcagctgcacaggctgcagccaccgcagctgccatgggaattcctcaagctgtacttcccccattaccaaagaggcctgctcttgaaaaaaccaacggtgccaccgcagtctttaacactggtattttccaataccaacaggctctagccaacatgcagttacaacagcatacagcatttctcccaccaggctcaatattgtgcatgacacccgctacaagtgttgttcccatggtgcacggtgctacgccagccactgtgtccgcagcaacaacatctgccacaagtgttcccttcgctgcaacagccacagccaaccagatacccataatatctgccgaacatctgactagccacaagtatgttacccagatgtagaattttcatcactaaacaatcatgctaaagaggaaaggacagtgtgcttggttagagtaaaggacgaggtcattagccatattgtatatatcgtcaagcaacacacacaaaagttcctcagccacaagacatccacatattgcatgttaaccagaagaaaagacaacattttccggaaatccactgcacactgttgcctatacactttgtacatttaattgatatttgtgctgaggtgatattcctgtctaaaagaacaacattgtctttcttttctagcacagagttatgcattcaaagatgcatacctagttagtttcctatatattcatgccatcttgaaaagacagactatggtgtaaccatgattctattatgtattggtacgtctgtagaccaagatataattttttaaaaataagtttatttctttcaaggtttacaaataacaaaggtgcaccttgtatttaaaattgccattatagatgagagcgtgcatgcacagtcatttttgtttaagagtaatatttttaatgtaatagattgtaagacgtggtgagggagggatctgacagagatgaatgtgccaagcttaaggattctcatgaagtgccatagactgtacatcaaattagagtattatttcttcagtgttattgttttcagagccacattttgttgcatatttgctagtactaatcagtcaaagggcaccattctttttttttttttttgaaaccaaagctgtctcagaaatggccaatttaactttacagtaacaatagacagcacaacacaaactctctcaatacagataaactcacacatactggagatatatatataatagatatatataaaattattttaatgcattgtagtgtaatatttatgcatactatactgtataacatgttattcaaaagggattgccatttctgagacacagtaacaaaaaaatgaggaaattattttgcttctatttatagcctctgtcaaaagtcaaaagactataaatgctttgcaaaaatggtttcacgtttgcttaaatgcttcatcacagtcacattcaaaatagtgactctaaacaaagaagaaagcagcactgtcatcagatgcatgataaaccaaaatatgaaaatgggaaatgtttaattaacctagtaattgggtgggttaagtacatgggtgaattttatatgtgatttttgttttgttttgttttgttcagattaactgcttatagccttagaaagccttttacaaaattaaaaaaaaaatagatgtgcattcagtttttaagaatggaatcatccaaaggaattcctttttttgaggtttggatgttgcagctagtaaaggatatttttgctctgttcagcagttctaaaaattgctgaagtaggggccaggtcactggtagttatagtatggaatgggagaagtgaaagttcagttatagaactttccatacttccaagtttactgcaagtttttatgcttgagagagatgctttctaatataagactgatgtgttgattttactgattgtactgtacatctattaaagccttagattattacattacgggttggaacccataccaatgtaatttcaatcgtgttaagaaagtaatggtgacttcacatgttattgtagttagttacattatagaatattacttatttttcttgttaaaatgtagtttttcatttcctacatttattagattttcattttctattaacaattgaataccatttcagtttatagacttgttttattagattttaccaatgaatttttcaaaatacaaaaaaaagtagtttttccttcataacatactcagttttgaattacatgtagtgtcacatgaatattcgtattgttaactaaatgatttatattttactgatttaatattacagtgtaagaatgtcagtcattgttagttcttgtctagttttcattaaaagaacaaagatcttttatatggatatcttataaatatataatcattgctaagtaagaagttaagttgttgctatcgcaacaatcctggcagacaattgagtaatattttgatgatttattttgtttgtaattagttattataagaagatctagatcctagatattagaataaaatttattttctactgtatccatttcaaatgttaaaatattgtttaatatttttgaaatccctgagtatcaggccttgttataaataagctgcataatcaataaatagaacaagggactttttgttgataatccaaatactcaaagtttacgtaatgaaaattatagcgtgtgtgcaaactcttgagggttgattatgctgcaatttagcatgttggaacgtctagggagaaggttgactttttgcacttctgtatatagtcaaaagagagaaacctgtataatagtaagatcttattttgaataaaaacgtctataattacaaggagttttgttaaggctaatacaatgacagactgagcaaaattgcttgcaaaagtggcacagagttagcactccataccccttcaaacatgttgctttgctttcttgtggacagcttgtagtttgccaggattttttcagctggaaagatacgccatcctttcaaaccctcatgactgacaaaaactccatggggccaaatctgcctgaagatcattaccaaaaatagcaggtacttctaccattaaggtgaaatcatggatcagatattccttacatttttcaaaactactgcatgtttaaaacttcaacaaaaaaagagagaaagaactatactaagaacatatattattcagatcagtttctgccaatttcagtggtttattgttcacaaaaaaatcttcaaaacaagtattgactttcacaaaatttaaatcataaacaggcaaaccaaacagcacactgtagctatagttgttatgtgattgttttttaattgctgtaggatcctgttctttcagcaggtgaaaaataaaacgcagttcaaatttcatggttttaattttcaactcagaagcactcaaaaatgcaaaatgtgataatgggcacttgtttaaaagaattagtgtatccagccttcactccagctggttaaaaatgttgcacttatcagcaaccctaccactttcatctgctgaaaggacaaatgtgcttggttttactattatgtaatcacaacttactttctgcttgtagttgcttaaaattatgtattttgtcttgggctgcaatttgttttatgcttattttattattactgcagtagttgactttgctgtatggaaaaataaagtgaaattgccctaataaaacttctctttcttaagta

SEQ ID NO: 354842 - DNA, 6342 bp, Homo sapiens
cccccagtctccaaaacttcatcacatcacagacgttcaggattctttccattcaaagcaaagccaagttacatcttatagcacccagtgaattatgatatggggctgcggtttatttgctctggcgacaatatggcttacttgccgtggaatatcccggtatttcagaagtaacatattatttttaaagagggagctttgctttctctaaatcacatggtgcaaagttgggaatacagtggcctgtaaattacaaatattatttacaaactagaaggaaagctgacatgtgtttgtgcctgtgtgacagtttcactaaggaattccaaaactgtggatagcctgttacttgagaaaaatacacggtggcagtcttgcagatgtttttcccgcctgttagccctccaggttcaaaaactgtttggtgcattttaaggcggcagtctcaccagatcgcaggattctagtctaattggcttctaaccttcaatctaaccttgccggcttccttgcaaagcccggtgcaagggcctctttcaaaatgaacccactggtgtgcctagcagtcggtagaagaagcgggagggcgtccggtctgcacgcccgccgcgaggttacaatgctgaacgcatgagatggaagataccaacgggaggccgaggggatccacggcgcccgcgcgggctccggcttcctcctgctctcggcgccgctgggcgaccgcccatgacccgctcttgcgggctctgtccggttgacaggcgaccctgtggcccggggaagcgcgggagggcgccggcggaaagttgaagagcgtttttctcgccgccgcgtgcattaggagctcgacgagtccgccctgggcttcctggtggggctgggcgggcgggggaggggccgcgcagcagcagcggaagccagacctcggcgataagaggctgcacagcgacatgcaacagtcttttcactgcagctgaatgagttgtggcgcccacaatgctcccatgacaaggagctgacaagttccattttccgtcgcgggcatcttggaatcatgactcccacaatgccttgggcacttggtcgacagtggggccgcctctgaaaaaaaaatgtgagaggttggtactaagaagtgcctttcctgacgtctctgctgcttggaaccgcttctagagcagtctctgcttttgccttgcttgctgccagctagactgtgacgacagcacatccaccctccacctctagcccagacacccccatttctacttataatcaagagaaaagctctaagtatctggcattgccctaggctgctttagtgttaaaagaaaagtttgctgaaaaagtaagatatcttctgccaggaaatcaaggaggaaaaaaaaaatcattttctcgattttgctctaaactgctgcatctgtctatgccaaactaatcaataccgattgcaccaccaaactccattgcaaattcagctgtgaggagattccctttcagacaactttgctgaaagcagcttggaaattcggtgtcgaagggtctgccacgttttcatgcttgcattttgggctccaaattggcactgggaaggggttactgagagcacaaggctgataccaggccctacttttaaacgttcatctacttacaatcctagtatttctctaaaaaccaaaacctctttgaattaacagtttcatgctgtgaatttctagtgggagatcttttccttgatattgacgacacaattttccatgtacttttaaagcagggagtggggaaaagtattttgaggggacattttcatcatcagttcagctttttttttttggttgttgctcttttttgggggggttgggtttgttggtttcactgaaacatttaactacctgtaaaatctaaacatggctgttagtgtcacaccaattcgggacacaaaatggctaacactggaagtatgtagagagttccagagggggacttgctcacggccagacacggaatgtaaatttgcacatccttcgaaaagctgccaagttgaaaatggacgagtaatcgcctgctttgattcattgaaaggccgttgctccagggagaactgcaaatatcttcatccacccccacatttaaaaacgcagttggagataaatggacgcaataacttgattcagcagaagaacatggccatgttggcccagcaaatgcaactagccaatgccatgatgcctggtgccccattacaacccgtgccaatgttttcagttgcaccaagcttagccaccaatgcatcagcagccgcctttaatccctatctgggacctgtttctccaagcctggtcccggcagagatcttgccgactgcaccaatgttggttacagggaatccgggtgtccctgtacctgcagctgctgcagctgctgcacagaaattaatgcgaacagacagacttgaggtatgtcgagagtaccaacgtggcaattgcaaccgaggagaaaatgattgtcggtttgctcatcctgctgacagcacaatgattgacaccaatgacaacacagtcactgtgtgtatggattacatcaaagggagatgctctcgggaaaagtgcaaatactttcatccccctgcacatttgcaagccaagatcaaggctgcccaataccaggtcaaccaggctgcagctgcacaggctgcagccaccgcagctgccatgggaattcctcaagctgtacttcccccattaccaaagaggcctgctcttgaaaaaaccaacggtgccaccgcagtctttaacactggtattttccaataccaacaggctctagccaacatgcagttacaacagcatacagcatttctcccaccagatacccataatatctgccgaacatctgactagccacaagtatgttacccagatgtagaattttcatcactaaacaatcatgctaaagaggaaaggacagtgtgcttggttagagtaaaggacgaggtcattagccatattgtatatatcgtcaagcaacacacacaaaagttcctcagccacaagacatccacatattgcatgttaaccagaagaaaagacaacattttccggaaatccactgcacactgttgcctatacactttgtacatttaattgatatttgtgctgaggtgatattcctgtctaaaagaacaacattgtctttcttttctagcacagagttatgcattcaaagatgcatacctagttagtttcctatatattcatgccatcttgaaaagacagactatggtgtaaccatgattctattatgtattggtacgtctgtagaccaagatataattttttaaaaataagtttatttctttcaaggtttacaaataacaaaggtgcaccttgtatttaaaattgccattatagatgagagcgtgcatgcacagtcatttttgtttaagagtaatatttttaatgtaatagattgtaagacgtggtgagggagggatctgacagagatgaatgtgccaagcaaaaccacaactgtgtatattttaaagcacatcatggctttaagtaccatgttgttaaggattctcatgaagtgccatagactgtacatcaaattagagtattatttcttcagtgttattgttttcagagccacattttgttgcatatttgctagtactaatcagtcaaagggcaccattctttttttttttttttgaaaccaaagctgtctcagaaatggccaatttaactttacagtaacaatagacagcacaacacaaactctctcaatacagataaactcacacatactggagatatatatataatagatatatataaaattattttaatgcattgtagtgtaatatttatgcatactatactgtataacatgttattcaaaagggattgccatttctgagacacagtaacaaaaaaatgaggaaattattttgcttctatttatagcctctgtcaaaagtcaaaagactataaatgctttgcaaaaatggtttcacgtttgcttaaatgcttcatcacagtcacattcaaaatagtgactctaaacaaagaagaaagcagcactgtcatcagatgcatgataaaccaaaatatgaaaatgggaaatgtttaattaacctagtaattgggtgggttaagtacatgggtgaattttatatgtgatttttgttttgttttgttttgttcagattaactgcttatagccttagaaagccttttacaaaattaaaaaaaaaatagatgtgcattcagtttttaagaatggaatcatccaaaggaattcctttttttgaggtttggatgttgcagctagtaaaggatatttttgctctgttcagcagttctaaaaattgctgaagtaggggccaggtcactggtagttatagtatggaatgggagaagtgaaagttcagttatagaactttccatacttccaagtttactgcaagtttttatgcttgagagagatgctttctaatataagactgatgtgttgattttactgattgtactgtacatctattaaagccttagattattacattacgggttggaacccataccaatgtaatttcaatcgtgttaagaaagtaatggtgacttcacatgttattgtagttagttacattatagaatattacttatttttcttgttaaaatgtagtttttcatttcctacatttattagattttcattttctattaacaattgaataccatttcagtttatagacttgttttattagattttaccaatgaatttttcaaaatacaaaaaaaagtagtttttccttcataacatactcagttttgaattacatgtagtgtcacatgaatattcgtattgttaactaaatgatttatattttactgatttaatattacagtgtaagaatgtcagtcattgttagttcttgtctagttttcattaaaagaacaaagatcttttatatggatatcttataaatatataatcattgctaagtaagaagttaagttgttgctatcgcaacaatcctggcagacaattgagtaatattttgatgatttattttgtttgtaattagttattataagaagatctagatcctagatattagaataaaatttattttctactgtatccatttcaaatgttaaaatattgtttaatatttttgaaatccctgagtatcaggccttgttataaataagctgcataatcaataaatagaacaagggactttttgttgataatccaaatactcaaagtttacgtaatgaaaattatagcgtgtgtgcaaactcttgagggttgattatgctgcaatttagcatgttggaacgtctagggagaaggttgactttttgcacttctgtatatagtcaaaagagagaaacctgtataatagtaagatcttattttgaataaaaacgtctataattacaaggagttttgttaaggctaatacaatgacagactgagcaaaattgcttgcaaaagtggcacagagttagcactccataccccttcaaacatgttgctttgctttcttgtggacagcttgtagtttgccaggattttttcagctggaaagatacgccatcctttcaaaccctcatgactgacaaaaactccatggggccaaatctgcctgaagatcattaccaaaaatagcaggtacttctaccattaaggtgaaatcatggatcagatattccttacatttttcaaaactactgcatgtttaaaacttcaacaaaaaaagagagaaagaactatactaagaacatatattattcagatcagtttctgccaatttcagtggtttattgttcacaaaaaaatcttcaaaacaagtattgactttcacaaaatttaaatcataaacaggcaaaccaaacagcacactgtagctatagttgttatgtgattgttttttaattgctgtaggatcctgttctttcagcaggtgaaaaataaaacgcagttcaaatttcatggttttaattttcaactcagaagcactcaaaaatgcaaaatgtgataatgggcacttgtttaaaagaattagtgtatccagccttcactccagctggttaaaaatgttgcacttatcagcaaccctaccactttcatctgctgaaaggacaaatgtgcttggttttactattatgtaatcacaacttactttctgcttgtagttgcttaaaattatgtattttgtcttgggctgcaatttgttttatgcttattttattattactgcagtagttgactttgctgtatggaaaaataaagtgaaattgccctaataaaacttctctttcttaagta

SEQ ID NO: 354843 - DNA, 5510 bp, Homo sapiens
cccccagtctccaaaacttcatcacatcacagacgttcaggattctttccattcaaagcaaagccaagttacatcttatagcacccagtgaattatgatatggggctgcggtttatttgctctggcgacaatatggcttacttgccgtggaatatcccggtatttcagaagtaacatattatttttaaagagggagctttgctttctctaaatcacatggtgcaaagttgggaatacagtggcctgtaaattacaaatattatttacaaactagaaggaaagctgacatgtgtttgtgcctgtgtgacagtttcactaaggaattccaaaactgtggatagcctgttacttgagaaaaatacacggtggcagtcttgcagatgtttttcccgcctgttagccctccaggttcaaaaactgtttggtgcattttaaggcggcagtctcaccagatcgcaggattctagtctaattggcttctaaccttcaatctaaccttgccggcttccttgcaaagcccggtgcaagggcctctttcaaaatgaacccactggtgtgcctagcagtcggtagaagaagcgggagggcgtccggtctgcacgcccgccgcgaggttacaatgctgaacgcatgagatggaagataccaacgggaggccgaggggatccacggcgcccgcgcgggctccggcttcctcctgctctcggcgccgctgggcgaccgcccatgacccgctcttgcgggctctgtccggttgacaggcgaccctgtggcccggggaagcgcgggagggcgccggcggaaagttgaagagcgtttttctcgccgccgcgtgcattaggagctcgacgagtccgccctgggcttcctggtggggctgggcgggcgggggaggggccgcgcagcagcagcggaagccagacctcggcgataagaggctgcacagcgacatgcaacagtcttttcactgcagctgaatgagttgtggcgcccacaatgctcccatgacaaggagctgacaagttccattttccgtcgcgggcatcttggaatcatgactcccacaatgccttgggcacttggtcgacagtggggccgcctctgaaaaaaaaatgtgagagggccgttgctccagggagaactgcaaatatcttcatccacccccacatttaaaaacgcagttggagataaatggacgcaataacttgattcagcagaagaacatggccatgttggcccagcaaatgcaactagccaatgccatgatgcctggtgccccattacaacccgtgccaatgttttcagttgcaccaagcttagccaccaatgcatcagcagccgcctttaatccctatctgggacctgtttctccaagcctggtcccggcagagatcttgccgactgcaccaatgttggttacagggaatccgggtgtccctgtacctgcagctgctgcagctgctgcacagaaattaatgcgaacagacagacttgaggtatgtcgagagtaccaacgtggcaattgcaaccgaggagaaaatgattgtcggtttgctcatcctgctgacagcacaatgattgacaccaatgacaacacagtcactgtgtgtatggattacatcaaagggagatgctctcgggaaaagtgcaaatactttcatccccctgcacatttgcaagccaagatcaaggctgcccaataccaggtcaaccaggctgcagctgcacaggctgcagccaccgcagctgccatgggaattcctcaagctgtacttcccccattaccaaagaggcctgctcttgaaaaaaccaacggtgccaccgcagtctttaacactggtattttccaataccaacaggctctagccaacatgcagttacaacagcatacagcatttctcccaccaggctcaatattgtgcatgacacccgctacaagtgttgttcccatggtgcacggtgctacgccagccactgtgtccgcagcaacaacatctgccacaagtgttcccttcgctgcaacagccacagccaaccagatacccataatatctgccgaacatctgactagccacaagtatgttacccagatgtagaattttcatcactaaacaatcatgctaaagaggaaaggacagtgtgcttggttagagtaaaggacgaggtcattagccatattgtatatatcgtcaagcaacacacacaaaagttcctcagccacaagacatccacatattgcatgttaaccagaagaaaagacaacattttccggaaatccactgcacactgttgcctatacactttgtacatttaattgatatttgtgctgaggtgatattcctgtctaaaagaacaacattgtctttcttttctagcacagagttatgcattcaaagatgcatacctagttagtttcctatatattcatgccatcttgaaaagacagactatggtgtaaccatgattctattatgtattggtacgtctgtagaccaagatataattttttaaaaataagtttatttctttcaaggtttacaaataacaaaggtgcaccttgtatttaaaattgccattatagatgagagcgtgcatgcacagtcatttttgtttaagagtaatatttttaatgtaatagattgtaagacgtggtgagggagggatctgacagagatgaatgtgccaagcaaaaccacaactgtgtatattttaaagcacatcatggctttaagtaccatgttgttaaggattctcatgaagtgccatagactgtacatcaaattagagtattatttcttcagtgttattgttttcagagccacattttgttgcatatttgctagtactaatcagtcaaagggcaccattctttttttttttttttgaaaccaaagctgtctcagaaatggccaatttaactttacagtaacaatagacagcacaacacaaactctctcaatacagataaactcacacatactggagatatatatataatagatatatataaaattattttaatgcattgtagtgtaatatttatgcatactatactgtataacatgttattcaaaagggattgccatttctgagacacagtaacaaaaaaatgaggaaattattttgcttctatttatagcctctgtcaaaagtcaaaagactataaatgctttgcaaaaatggtttcacgtttgcttaaatgcttcatcacagtcacattcaaaatagtgactctaaacaaagaagaaagcagcactgtcatcagatgcatgataaaccaaaatatgaaaatgggaaatgtttaattaacctagtaattgggtgggttaagtacatgggtgaattttatatgtgatttttgttttgttttgttttgttcagattaactgcttatagccttagaaagccttttacaaaattaaaaaaaaaatagatgtgcattcagtttttaagaatggaatcatccaaaggaattcctttttttgaggtttggatgttgcagctagtaaaggatatttttgctctgttcagcagttctaaaaattgctgaagtaggggccaggtcactggtagttatagtatggaatgggagaagtgaaagttcagttatagaactttccatacttccaagtttactgcaagtttttatgcttgagagagatgctttctaatataagactgatgtgttgattttactgattgtactgtacatctattaaagccttagattattacattacgggttggaacccataccaatgtaatttcaatcgtgttaagaaagtaatggtgacttcacatgttattgtagttagttacattatagaatattacttatttttcttgttaaaatgtagtttttcatttcctacatttattagattttcattttctattaacaattgaataccatttcagtttatagacttgttttattagattttaccaatgaatttttcaaaatacaaaaaaaagtagtttttccttcataacatactcagttttgaattacatgtagtgtcacatgaatattcgtattgttaactaaatgatttatattttactgatttaatattacagtgtaagaatgtcagtcattgttagttcttgtctagttttcattaaaagaacaaagatcttttatatggatatcttataaatatataatcattgctaagtaagaagttaagttgttgctatcgcaacaatcctggcagacaattgagtaatattttgatgatttattttgtttgtaattagttattataagaagatctagatcctagatattagaataaaatttattttctactgtatccatttcaaatgttaaaatattgtttaatatttttgaaatccctgagtatcaggccttgttataaataagctgcataatcaataaatagaacaagggactttttgttgataatccaaatactcaaagtttacgtaatgaaaattatagcgtgtgtgcaaactcttgagggttgattatgctgcaatttagcatgttggaacgtctagggagaaggttgactttttgcacttctgtatatagtcaaaagagagaaacctgtataatagtaagatcttattttgaataaaaacgtctataattacaaggagttttgttaaggctaatacaatgacagactgagcaaaattgcttgcaaaagtggcacagagttagcactccataccccttcaaacatgttgctttgctttcttgtggacagcttgtagtttgccaggattttttcagctggaaagatacgccatcctttcaaaccctcatgactgacaaaaactccatggggccaaatctgcctgaagatcattaccaaaaatagcaggtacttctaccattaaggtgaaatcatggatcagatattccttacatttttcaaaactactgcatgtttaaaacttcaacaaaaaaagagagaaagaactatactaagaacatatattattcagatcagtttctgccaatttcagtggtttattgttcacaaaaaaatcttcaaaacaagtattgactttcacaaaatttaaatcataaacaggcaaaccaaacagcacactgtagctatagttgttatgtgattgttttttaattgctgtaggatcctgttctttcagcaggtgaaaaataaaacgcagttcaaatttcatggttttaattttcaactcagaagcactcaaaaatgcaaaatgtgataatgggcacttgtttaaaagaattagtgtatccagccttcactccagctggttaaaaatgttgcacttatcagcaaccctaccactttcatctgctgaaaggacaaatgtgcttggttttactattatgtaatcacaacttactttctgcttgtagttgcttaaaattatgtattttgtcttgggctgcaatttgttttatgcttattttattattactgcagtagttgactttgctgtatggaaaaataaagtgaaattgccctaataaaacttctctttcttaagta

SEQ ID NO: 354844 - DNA, 6443 bp, Homo sapiens
cccccagtctccaaaacttcatcacatcacagacgttcaggattctttccattcaaagcaaagccaagttacatcttatagcacccagtgaattatgatatggggctgcggtttatttgctctggcgacaatatggcttacttgccgtggaatatcccggtatttcagaagtaacatattatttttaaagagggagctttgctttctctaaatcacatggtgcaaagttgggaatacagtggcctgtaaattacaaatattatttacaaactagaaggaaagctgacatgtgtttgtgcctgtgtgacagtttcactaaggaattccaaaactgtggatagcctgttacttgagaaaaatacacggtggcagtcttgcagatgtttttcccgcctgttagccctccaggttcaaaaactgtttggtgcattttaaggcggcagtctcaccagatcgcaggattctagtctaattggcttctaaccttcaatctaaccttgccggcttccttgcaaagcccggtgcaagggcctctttcaaaatgaacccactggtgtgcctagcagtcggtagaagaagcgggagggcgtccggtctgcacgcccgccgcgaggttacaatgctgaacgcatgagatggaagataccaacgggaggccgaggggatccacggcgcccgcgcgggctccggcttcctcctgctctcggcgccgctgggcgaccgcccatgacccgctcttgcgggctctgtccggttgacaggcgaccctgtggcccggggaagcgcgggagggcgccggcggaaagttgaagagcgtttttctcgccgccgcgtgcattaggagctcgacgagtccgccctgggcttcctggtggggctgggcgggcgggggaggggccgcgcagcagcagcggaagccagacctcggcgataagaggctgcacagcgacatgcaacagtcttttcactgcagctgaatgagttgtggcgcccacaatgctcccatgacaaggagctgacaagttccattttccgtcgcgggcatcttggaatcatgactcccacaatgccttgggcacttggtcgacagtggggccgcctctgaaaaaaaaatgtgagaggttggtactaagaagtgcctttcctgacgtctctgctgcttggaaccgcttctagagcagtctctgcttttgccttgcttgctgccagctagactgtgacgacagcacatccaccctccacctctagcccagacacccccatttctacttataatcaagagaaaagctctaagtatctggcattgccctaggctgctttagtgttaaaagaaaagtttgctgaaaaagtaagatatcttctgccaggaaatcaaggaggaaaaaaaaaatcattttctcgattttgctctaaactgctgcatctgtctatgccaaactaatcaataccgattgcaccaccaaactccattgcaaattcagctgtgaggagattccctttcagacaactttgctgaaagcagcttggaaattcggtgtcgaagggtctgccacgttttcatgcttgcattttgggctccaaattggcactgggaaggggttactgagagcacaaggctgataccaggccctacttttaaacgttcatctacttacaatcctagtatttctctaaaaaccaaaacctctttgaattaacagtttcatgctgtgaatttctagtgggagatcttttccttgatattgacgacacaattttccatgtacttttaaagcagggagtggggaaaagtattttgaggggacattttcatcatcagttcagctttttttttttggttgttgctcttttttgggggggttgggtttgttggtttcactgaaacatttaactacctgtaaaatctaaacatggctgttagtgtcacaccaattcgggacacaaaatggctaacactggaagtatgtagagagttccagagggggacttgctcacggccagacacggaatgtaaatttgcacatccttcgaaaagctgccaagttgaaaatggacgagtaatcgcctgctttgattcattgaaaggccgttgctccagggagaactgcaaatatcttcatccacccccacatttaaaaacgcagttggagataaatggacgcaataacttgattcagcagaagaacatggccatgttggcccagcaaatgcaactagccaatgccatgatgcctggtgccccattacaacccgtggtatgtcgagagtaccaacgtggcaattgcaaccgaggagaaaatgattgtcggtttgctcatcctgctgacagcacaatgattgacaccaatgacaacacagtcactgtgtgtatggattacatcaaagggagatgctctcgggaaaagtgcaaatactttcatccccctgcacatttgcaagccaagatcaaggctgcccaataccaggtcaaccaggctgcagctgcacaggctgcagccaccgcagctgccatgggaattcctcaagctgtacttcccccattaccaaagaggcctgctcttgaaaaaaccaacggtgccaccgcagtctttaacactggtattttccaataccaacaggctctagccaacatgcagttacaacagcatacagcatttctcccaccagttcccatggtgcacggtgctacgccagccactgtgtccgcagcaacaacatctgccacaagtgttcccttcgctgcaacagccacagccaaccagatacccataatatctgccgaacatctgactagccacaagtatgttacccagatgtagaattttcatcactaaacaatcatgctaaagaggaaaggacagtgtgcttggttagagtaaaggacgaggtcattagccatattgtatatatcgtcaagcaacacacacaaaagttcctcagccacaagacatccacatattgcatgttaaccagaagaaaagacaacattttccggaaatccactgcacactgttgcctatacactttgtacatttaattgatatttgtgctgaggtgatattcctgtctaaaagaacaacattgtctttcttttctagcacagagttatgcattcaaagatgcatacctagttagtttcctatatattcatgccatcttgaaaagacagactatggtgtaaccatgattctattatgtattggtacgtctgtagaccaagatataattttttaaaaataagtttatttctttcaaggtttacaaataacaaaggtgcaccttgtatttaaaattgccattatagatgagagcgtgcatgcacagtcatttttgtttaagagtaatatttttaatgtaatagattgtaagacgtggtgagggagggatctgacagagatgaatgtgccaagcaaaaccacaactgtgtatattttaaagcacatcatggctttaagtaccatgttgttaaggattctcatgaagtgccatagactgtacatcaaattagagtattatttcttcagtgttattgttttcagagccacattttgttgcatatttgctagtactaatcagtcaaagggcaccattctttttttttttttttgaaaccaaagctgtctcagaaatggccaatttaactttacagtaacaatagacagcacaacacaaactctctcaatacagataaactcacacatactggagatatatatataatagatatatataaaattattttaatgcattgtagtgtaatatttatgcatactatactgtataacatgttattcaaaagggattgccatttctgagacacagtaacaaaaaaatgaggaaattattttgcttctatttatagcctctgtcaaaagtcaaaagactataaatgctttgcaaaaatggtttcacgtttgcttaaatgcttcatcacagtcacattcaaaatagtgactctaaacaaagaagaaagcagcactgtcatcagatgcatgataaaccaaaatatgaaaatgggaaatgtttaattaacctagtaattgggtgggttaagtacatgggtgaattttatatgtgatttttgttttgttttgttttgttcagattaactgcttatagccttagaaagccttttacaaaattaaaaaaaaaatagatgtgcattcagtttttaagaatggaatcatccaaaggaattcctttttttgaggtttggatgttgcagctagtaaaggatatttttgctctgttcagcagttctaaaaattgctgaagtaggggccaggtcactggtagttatagtatggaatgggagaagtgaaagttcagttatagaactttccatacttccaagtttactgcaagtttttatgcttgagagagatgctttctaatataagactgatgtgttgattttactgattgtactgtacatctattaaagccttagattattacattacgggttggaacccataccaatgtaatttcaatcgtgttaagaaagtaatggtgacttcacatgttattgtagttagttacattatagaatattacttatttttcttgttaaaatgtagtttttcatttcctacatttattagattttcattttctattaacaattgaataccatttcagtttatagacttgttttattagattttaccaatgaatttttcaaaatacaaaaaaaagtagtttttccttcataacatactcagttttgaattacatgtagtgtcacatgaatattcgtattgttaactaaatgatttatattttactgatttaatattacagtgtaagaatgtcagtcattgttagttcttgtctagttttcattaaaagaacaaagatcttttatatggatatcttataaatatataatcattgctaagtaagaagttaagttgttgctatcgcaacaatcctggcagacaattgagtaatattttgatgatttattttgtttgtaattagttattataagaagatctagatcctagatattagaataaaatttattttctactgtatccatttcaaatgttaaaatattgtttaatatttttgaaatccctgagtatcaggccttgttataaataagctgcataatcaataaatagaacaagggactttttgttgataatccaaatactcaaagtttacgtaatgaaaattatagcgtgtgtgcaaactcttgagggttgattatgctgcaatttagcatgttggaacgtctagggagaaggttgactttttgcacttctgtatatagtcaaaagagagaaacctgtataatagtaagatcttattttgaataaaaacgtctataattacaaggagttttgttaaggctaatacaatgacagactgagcaaaattgcttgcaaaagtggcacagagttagcactccataccccttcaaacatgttgctttgctttcttgtggacagcttgtagtttgccaggattttttcagctggaaagatacgccatcctttcaaaccctcatgactgacaaaaactccatggggccaaatctgcctgaagatcattaccaaaaatagcaggtacttctaccattaaggtgaaatcatggatcagatattccttacatttttcaaaactactgcatgtttaaaacttcaacaaaaaaagagagaaagaactatactaagaacatatattattcagatcagtttctgccaatttcagtggtttattgttcacaaaaaaatcttcaaaacaagtattgactttcacaaaatttaaatcataaacaggcaaaccaaacagcacactgtagctatagttgttatgtgattgttttttaattgctgtaggatcctgttctttcagcaggtgaaaaataaaacgcagttcaaatttcatggttttaattttcaactcagaagcactcaaaaatgcaaaatgtgataatgggcacttgtttaaaagaattagtgtatccagccttcactccagctggttaaaaatgttgcacttatcagcaaccctaccactttcatctgctgaaaggacaaatgtgcttggttttactattatgtaatcacaacttactttctgcttgtagttgcttaaaattatgtattttgtcttgggctgcaatttgttttatgcttattttattattactgcagtagttgactttgctgtatggaaaaataaagtgaaattgccctaataaaacttctctttcttaagtaaaaaaaaaaagaaaaaaaaaaactttgtttcggggggcgtctggccccctcaaaaaagtttctccaaaccacttccttttgggggcggggccccaaatggtatgggcacactgggcaaagcgcggggtcccaaagaacaccccgggcctaacactagcgggtggtttctccccataaaaaagccggggggacccggggttttaaaatcca

SEQ ID NO: 354845 - DNA, 6294 bp, Homo sapiens
cccccagtctccaaaacttcatcacatcacagacgttcaggattctttccattcaaagcaaagccaagttacatcttatagcacccagtgaattatgatatggggctgcggtttatttgctctggcgacaatatggcttacttgccgtggaatatcccggtatttcagaagtaacatattatttttaaagagggagctttgctttctctaaatcacatggtgcaaagttgggaatacagtggcctgtaaattacaaatattatttacaaactagaaggaaagctgacatgtgtttgtgcctgtgtgacagtttcactaaggaattccaaaactgtggatagcctgttacttgagaaaaatacacggtggcagtcttgcagatgtttttcccgcctgttagccctccaggttcaaaaactgtttggtgcattttaaggcggcagtctcaccagatcgcaggattctagtctaattggcttctaaccttcaatctaaccttgccggcttccttgcaaagcccggtgcaagggcctctttcaaaatgaacccactggtgtgcctagcagtcggtagaagaagcgggagggcgtccggtctgcacgcccgccgcgaggttacaatgctgaacgcatgagatggaagataccaacgggaggccgaggggatccacggcgcccgcgcgggctccggcttcctcctgctctcggcgccgctgggcgaccgcccatgacccgctcttgcgggctctgtccggttgacaggcgaccctgtggcccggggaagcgcgggagggcgccggcggaaagttgaagagcgtttttctcgccgccgcgtgcattaggagctcgacgagtccgccctgggcttcctggtggggctgggcgggcgggggaggggccgcgcagcagcagcggaagccagacctcggcgataagaggctgcacagcgacatgcaacagtcttttcactgcagctgaatgagttgtggcgcccacaatgctcccatgacaaggagctgacaagttccattttccgtcgcgggcatcttggaatcatgactcccacaatgccttgggcacttggtcgacagtggggccgcctctgaaaaaaaaatgtgagaggttggtactaagaagtgcctttcctgacgtctctgctgcttggaaccgcttctagagcagtctctgcttttgccttgcttgctgccagctagactgtgacgacagcacatccaccctccacctctagcccagacacccccatttctacttataatcaagagaaaagctctaagtatctggcattgccctaggctgctttagtgttaaaagaaaagtttgctgaaaaagtaagatatcttctgccaggaaatcaaggaggaaaaaaaaaatcattttctcgattttgctctaaactgctgcatctgtctatgccaaactaatcaataccgattgcaccaccaaactccattgcaaattcagctgtgaggagattccctttcagacaactttgctgaaagcagcttggaaattcggtgtcgaagggtctgccacgttttcatgcttgcattttgggctccaaattggcactgggaaggggttactgagagcacaaggctgataccaggccctacttttaaacgttcatctacttacaatcctagtatttctctaaaaaccaaaacctctttgaattaacagtttcatgctgtgaatttctagtgggagatcttttccttgatattgacgacacaattttccatgtacttttaaagcagggagtggggaaaagtattttgaggggacattttcatcatcagttcagctttttttttttggttgttgctcttttttgggggggttgggtttgttggtttcactgaaacatttaactacctgtaaaatctaaacatggctgttagtgtcacaccaattcgggacacaaaatggctaacactggaagtatgtagagagttccagagggggacttgctcacggccagacacggaatgtaaatttgcacatccttcgaaaagctgccaagttgaaaatggacgagtaatcgcctgctttgattcattgaaaggccgttgctccagggagaactgcaaatatcttcatccacccccacatttaaaaacgcagttggagataaatggacgcaataacttgattcagcagaagaacatggccatgttggcccagcaaatgcaactagccaatgccatgatgcctggtgccccattacaacccgtggtatgtcgagagtaccaacgtggcaattgcaaccgaggagaaaatgattgtcggtttgctcatcctgctgacagcacaatgattgacaccaatgacaacacagtcactgtgtgtatggattacatcaaagggagatgctctcgggaaaagtgcaaatactttcatccccctgcacatttgcaagccaagatcaaggctgcccaataccaggtcaaccaggctgcagctgcacaggctgcagccaccgcagctgccatgggaattcctcaagctgtacttcccccattaccaaagaggcctgctcttgaaaaaaccaacggtgccaccgcagtctttaacactggtattttccaataccaacaggctctagccaacatgcagttacaacagcatacagcatttctcccaccagttcccatggtgcacggtgctacgccagccactgtgtccgcagcaacaacatctgccacaagtgttcccttcgctgcaacagccacagccaaccagatacccataatatctgccgaacatctgactagccacaagtatgttacccagatgtagaattttcatcactaaacaatcatgctaaagaggaaaggacagtgtgcttggttagagtaaaggacgaggtcattagccatattgtatatatcgtcaagcaacacacacaaaagttcctcagccacaagacatccacatattgcatgttaaccagaagaaaagacaacattttccggaaatccactgcacactgttgcctatacactttgtacatttaattgatatttgtgctgaggtgatattcctgtctaaaagaacaacattgtctttcttttctagcacagagttatgcattcaaagatgcatacctagttagtttcctatatattcatgccatcttgaaaagacagactatggtgtaaccatgattctattatgtattggtacgtctgtagaccaagatataattttttaaaaataagtttatttctttcaaggtttacaaataacaaaggtgcaccttgtatttaaaattgccattatagatgagagcgtgcatgcacagtcatttttgtttaagagtaatatttttaatgtaatagattgtaagacgtggtgagggagggatctgacagagatgaatgtgccaagcaaaaccacaactgtgtatattttaaagcacatcatggctttaagtaccatgttgttaaggattctcatgaagtgccatagactgtacatcaaattagagtattatttcttcagtgttattgttttcagagccacattttgttgcatatttgctagtactaatcagtcaaagggcaccattctttttttttttttttgaaaccaaagctgtctcagaaatggccaatttaactttacagtaacaatagacagcacaacacaaactctctcaatacagataaactcacacatactggagatatatatataatagatatatataaaattattttaatgcattgtagtgtaatatttatgcatactatactgtataacatgttattcaaaagggattgccatttctgagacacagtaacaaaaaaatgaggaaattattttgcttctatttatagcctctgtcaaaagtcaaaagactataaatgctttgcaaaaatggtttcacgtttgcttaaatgcttcatcacagtcacattcaaaatagtgactctaaacaaagaagaaagcagcactgtcatcagatgcatgataaaccaaaatatgaaaatgggaaatgtttaattaacctagtaattgggtgggttaagtacatgggtgaattttatatgtgatttttgttttgttttgttttgttcagattaactgcttatagccttagaaagccttttacaaaattaaaaaaaaaatagatgtgcattcagtttttaagaatggaatcatccaaaggaattcctttttttgaggtttggatgttgcagctagtaaaggatatttttgctctgttcagcagttctaaaaattgctgaagtaggggccaggtcactggtagttatagtatggaatgggagaagtgaaagttcagttatagaactttccatacttccaagtttactgcaagtttttatgcttgagagagatgctttctaatataagactgatgtgttgattttactgattgtactgtacatctattaaagccttagattattacattacgggttggaacccataccaatgtaatttcaatcgtgttaagaaagtaatggtgacttcacatgttattgtagttagttacattatagaatattacttatttttcttgttaaaatgtagtttttcatttcctacatttattagattttcattttctattaacaattgaataccatttcagtttatagacttgttttattagattttaccaatgaatttttcaaaatacaaaaaaaagtagtttttccttcataacatactcagttttgaattacatgtagtgtcacatgaatattcgtattgttaactaaatgatttatattttactgatttaatattacagtgtaagaatgtcagtcattgttagttcttgtctagttttcattaaaagaacaaagatcttttatatggatatcttataaatatataatcattgctaagtaagaagttaagttgttgctatcgcaacaatcctggcagacaattgagtaatattttgatgatttattttgtttgtaattagttattataagaagatctagatcctagatattagaataaaatttattttctactgtatccatttcaaatgttaaaatattgtttaatatttttgaaatccctgagtatcaggccttgttataaataagctgcataatcaataaatagaacaagggactttttgttgataatccaaatactcaaagtttacgtaatgaaaattatagcgtgtgtgcaaactcttgagggttgattatgctgcaatttagcatgttggaacgtctagggagaaggttgactttttgcacttctgtatatagtcaaaagagagaaacctgtataatagtaagatcttattttgaataaaaacgtctataattacaaggagttttgttaaggctaatacaatgacagactgagcaaaattgcttgcaaaagtggcacagagttagcactccataccccttcaaacatgttgctttgctttcttgtggacagcttgtagtttgccaggattttttcagctggaaagatacgccatcctttcaaaccctcatgactgacaaaaactccatggggccaaatctgcctgaagatcattaccaaaaatagcaggtacttctaccattaaggtgaaatcatggatcagatattccttacatttttcaaaactactgcatgtttaaaacttcaacaaaaaaagagagaaagaactatactaagaacatatattattcagatcagtttctgccaatttcagtggtttattgttcacaaaaaaatcttcaaaacaagtattgactttcacaaaatttaaatcataaacaggcaaaccaaacagcacactgtagctatagttgttatgtgattgttttttaattgctgtaggatcctgttctttcagcaggtgaaaaataaaacgcagttcaaatttcatggttttaattttcaactcagaagcactcaaaaatgcaaaatgtgataatgggcacttgtttaaaagaattagtgtatccagccttcactccagctggttaaaaatgttgcacttatcagcaaccctaccactttcatctgctgaaaggacaaatgtgcttggttttactattatgtaatcacaacttactttctgcttgtagttgcttaaaattatgtattttgtcttgggctgcaatttgttttatgcttattttattattactgcagtagttgactttgctgtatggaaaaataaagtgaaattgccctaataaaacttctctttcttaagtagtgaaaaaaacatcaaaaaaaactttttgggggcgcaccgggcctcaaaattttttaaaac

SEQ ID NO: 354846 - DNA, 5806 bp, Homo sapiens
cccccagtctccaaaacttcatcacatcacagacgttcaggattctttccattcaaagcaaagccaagttacatcttatagcacccagtgaattatgatatggggctgcggtttatttgctctggcgacaatatggcttacttgccgtggaatatcccggtatttcagaagtaacatattatttttaaagagggagctttgctttctctaaatcacatggtgcaaagttgggaatacagtggcctgtaaattacaaatattatttacaaactagaaggaaagctgacatgtgtttgtgcctgtgtgacagtttcactaaggaattccaaaactgtggatagcctgttacttgagaaaaatacacggtggcagtcttgcagatgtttttcccgcctgttagccctccaggttcaaaaactgtttggtgcattttaaggcggcagtctcaccagatcgcaggattctagtctaattggcttctaaccttcaatctaaccttgccggcttccttgcaaagcccggtgcaagggcctctttcaaaatgaacccactggtgtgcctagcagtcggtagaagaagcgggagggcgtccggtctgcacgcccgccgcgaggttacaatgctgaacgcatgagatggaagataccaacgggaggccgaggggatccacggcgcccgcgcgggctccggcttcctcctgctctcggcgccgctgggcgaccgcccatgacccgctcttgcgggctctgtccggttgacaggcgaccctgtggcccggggaagcgcgggagggcgccggcggaaagttgaagagcgtttttctcgccgccgcgtgcattaggagctcgacgagtccgccctgggcttcctggtggggctgggcgggcgggggaggggccgcgcagcagcagcggaagccagacctcggcgataagaggctgcacagcgacatgcaacagtcttttcactgcagctgaatgagttgtggcgcccacaatgctcccatgacaaggagctgacaagttccattttccgtcgcgggcatcttggaatcatgactcccacaatgccttgggcacttggtcgacagtggggccgcctctgaaaaaaaaatgtgagaggttggtactaagaagtgcctttcctgacgtctctgctgcttggaaccgcttctagagcagtctctgcttttgccttgcttgctgccagctagactgtgacgacagcacatccaccctccacctctagcccagacacccccatttctacttataatcaagagaaaagctctaagtatctggcattgccctaggctgctttagtgttaaaagaaaagtttgctgaaaaagtaagatatcttctgccaggaaatcaaggaggaaaaaaaaaatcattttctcgattttgctctaaactgctgcatctgtctatgccaaactaatcaataccgattgcaccaccaaactccattgcaaattcagctgtgaggagattccctttcagacaactttgctgaaagcagcttggaaattcggtgtcgaagggtctgccacgttttcatgcttgcattttgggctccaaattggcactgggaaggggttactgagagcacaaggctgataccaggccctacttttaaacgttcatctacttacaatcctagtatttctctaaaaaccaaaacctctttgaattaacagtttcatgctgtgaatttctagtgggagatcttttccttgatattgacgacacaattttccatgtacttttaaagcagggagtggggaaaagtattttgaggggacattttcatcatcagttcagctttttttttttggttgttgctcttttttgggggggttgggtttgttggtttcactgaaacatttaactacctgtaaaatctaaacatggctgttagtgtcacaccaattcgggacacaaaatggctaacactggaagtatgtagagagttccagagggggacttgctcacggccagacacggaatgtaaatttgcacatccttcgaaaagctgccaagttgaaaatggacgagtaatcgcctgctttgattcattgaaaggccgttgctccagggagaactgcaaatatcttcatccacccccacatttaaaaacgcagttggagataaatggacgcaataacttgattcagcagaagaacatggccatgttggcccagcaaatgcaactagccaatgccatgatgcctggtgccccattacaacccgtgccaatgttttcagttgcaccaagcttagccaccaatgcatcagcagccgcctttaatccctatctgggacctgtttctccaagcctggtcccggcagagatcttgccgactgcaccaatgttggttacagggaatccgggtgtccctgtacctgcagctgctgcagctgctgcacagaaattaatgcgaacagacagacttgaggtatgtcgagagtaccaacgtggcaattgcaaccgaggagaaaatgattgtcggtttgctcatcctgctgacagcacaatgattgacaccaatgacaacacagtcactgtgtgtatggattacatcaaagggagatgctctcgggaaaagtgcaaatactttcatccccctgcacatttgcaagccaagatcaaggctgcccaataccaggtcaaccaggctgcagctgcacaggctgcagccaccgcagctgccatgggaattcctcaagctgtacttcccccattaccaaagaggcctgctcttgaaaaaaccaacggtgccaccgcagtctttaacactggtattttccaataccaacaggctctagccaacatgcagttacaacagcatacagcatttctcccaccaggctcaatattgtgcatgacacccgctacaagtgttgttcccatggtgcacggtgctacgccagccactgtgtccgcagcaacaacatctgccacaagtgttcccttcgctgcaacagccacagccaaccagatacccataatatctgccgaacatctgactagccacaagtatgttacccagatgtagaattttcatcactaaacaatcatgctaaagaggaaaggacagtgtgcttggttagagtaaaggacgaggtcattagccatattgtatatatcgtcaagcaacacacacaaaagttcctcagccacaagacatccacatattgcatgttaaccagaagaaaagacaacattttccggaaatccactgcacactgttgcctatacactttgtacatttaattgatatttgtgctgaggtgatattcctgtctaaaagaacaacattgtctttcttttctagcacagagttatgcattcaaagatgcatacctagttagtttcctatatattcatgccatcttgaaaagacagactatggtgtaaccatgattctattatgtattggtacgtctgtagaccaagatataattttttaaaaataagtttatttctttcaaggtttacaaataacaaaggtgcaccttgtatttaaaattgccattatagatgagagcgtgcatgcacagtcatttttgtttaagagtaatatttttaatgtaatagattgtaagacgtggtgagggagggatctgacagagatgaatgtgccaagcaaaaccacaactgtgtatattttaaagcacatcatggctttaagtaccatgttgttaaggattctcatgaagtgccatagactgtacatcaaattagagtattatttcttcagtgttattgttttcagagccacattttgttgcatatttgctagtactaatcagtcaaagggcaccattctttttttttttttttgaaaccaaagctgtctcagaaatggccaatttaactttacagtaacaatagacagcacaacacaaactctctcaatacagataaactcacacatactggagatatatatataatagatatatataaaattattttaatgcattgtagtgtaatatttatgcatactatactgtataacatgttattcaaaagggattgccatttctgagacacagtaacaaaaaaatgaggaaattattttgcttctatttatagcctctgtcaaaagtcaaaagactataaatgctttgcaaaaatggtttcacgtttgcttaaatgcttcatcacagtcacattcaaaatagtgactctaaacaaagaagaaagcagcactgtcatcagatgcatgataaaccaaaatatgaaaatgggaaatgtttaattaacctagtaattgggtgggttaagtacatgggtgaattttatatgtgatttttgttttgttttgttttgttcagattaactgcttatagccttagaaagccttttacaaaattaaaaaaaaaatagatgtgcattcagtttttaagaatggaatcatccaaaggaattcctttttttgaggtttggatgttgcagctagtaaaggatatttttgctctgttcagcagttctaaaaattgctgaagtaggggccaggtcactggtagttatagtatggaatgggagaagtgaaagttcagttatagaactttccatacttccaagtttactgcaagtttttatgcttgagagagatgctttctaatataagactgatgtgttgattttactgattgtactgtacatctattaaagccttagattattacattacgggttggaacccataccaatgtaatttcaatcgtgttaagaaagtaatggtgacttcacatgttattgtagttagttacattatagaatattacttatttttcttgttaaaatgtagtttttcatttcctacatttattagattttcattttctattaacaattgaataccatttcagtttatagacttgttttattagattttaccaatgaatttttcaaaatacaaaaaaaagtagtttttccttcataacatactcagttttgaattacatgtagtgtcacatgaatattcgtattgttaactaaatgatttatattttactgatttaatattacagtgtaagaatgtcagtcattgttagttcttgtctagttttcattaaaagaacaaagatcttttatatggatatcttataaatatataatcattaccaaaaatagcaggtacttctaccattaaggtgaaatcatggatcagatattccttacatttttcaaaactactgcatgtttaaaacttcaacaaaaaaagagagaaagaactatactaagaacatatattattcagatcagtttctgccaatttcagtggtttattgttcacaaaaaaatcttcaaaacaagtattgactttcacaaaatttaaatcataaacaggcaaaccaaacagcacactgtagctatagttgttatgtgattgttttttaattgctgtaggatcctgttctttcagcaggtgaaaaataaaacgcagttcaaatttcatggttttaattttcaactcagaagcactcaaaaatgcaaaatgtgataatgggcacttgtttaaaagaattagtgtatccagccttcactccagctggttaaaaatgttgcacttatcagcaaccctaccactttcatctgctgaaaggacaaatgtgcttggttttactattatgtaatcacaacttactttctgcttgtagttgcttaaaattatgtattttgtcttgggctgcaatttgttttatgcttattttattattactgcagtagttgactttgctgtatggaaaaataaagtgaaattgccctaataaaacttctctttcttaagta

SEQ ID NO: 354847 - DNA, 5827 bp, Homo sapiens
cccccagtctccaaaacttcatcacatcacagacgttcaggattctttccattcaaagcaaagccaagttacatcttatagcacccagtgaattatgatatggggctgcggtttatttgctctggcgacaatatggcttacttgccgtggaatatcccggtatttcagaagtaacatattatttttaaagagggagctttgctttctctaaatcacatggtgcaaagttgggaatacagtggcctgtaaattacaaatattatttacaaactagaaggaaagctgacatgtgtttgtgcctgtgtgacagtttcactaaggaattccaaaactgtggatagcctgttacttgagaaaaatacacggtggcagtcttgcagatgtttttcccgcctgttagccctccaggttcaaaaactgtttggtgcattttaaggcggcagtctcaccagatcgcaggattctagtctaattggcttctaaccttcaatctaaccttgccggcttccttgcaaagcccggtgcaagggcctctttcaaaatgaacccactggtgtgcctagcagtcggtagaagaagcgggagggcgtccggtctgcacgcccgccgcgaggttacaatgctgaacgcatgagatggaagataccaacgggaggccgaggggatccacggcgcccgcgcgggctccggcttcctcctgctctcggcgccgctgggcgaccgcccatgacccgctcttgcgggctctgtccggttgacaggcgaccctgtggcccggggaagcgcgggagggcgccggcggaaagttgaagagcgtttttctcgccgccgcgtgcattaggagctcgacgagtccgccctgggcttcctggtggggctgggcgggcgggggaggggccgcgcagcagcagcggaagccagacctcggcgataagaggctgcacagcgacatgcaacagtcttttcactgcagctgaatgagttgtggcgcccacaatgctcccatgacaaggagctgacaagttccattttccgtcgcgggcatcttggaatcatgactcccacaatgccttgggcacttggtcgacagtggggccgcctctgaaaaaaaaatgtgagaggttggtactaagaagtgcctttcctgacgtctctgctgcttggaaccgcttctagagcagtctctgcttttgccttgcttgctgccagctagactgtgacgacagcacatccaccctccacctctagcccagacacccccatttctacttataatcaagagaaaagctctaagtatctggcattgccctaggctgctttagtgttaaaagaaaagtttgctgaaaaagtaagatatcttctgccaggaaatcaaggaggaaaaaaaaaatcattttctcgattttgctctaaactgctgcatctgtctatgccaaactaatcaataccgattgcaccaccaaactccattgcaaattcagctgtgaggagattccctttcagacaactttgctgaaagcagcttggaaattcggtgtcgaagggtctgccacgttttcatgcttgcattttgggctccaaattggcactgggaaggggttactgagagcacaaggctgataccaggccctacttttaaacgttcatctacttacaatcctagtatttctctaaaaaccaaaacctctttgaattaacagtttcatgctgtgaatttctagtgggagatcttttccttgatattgacgacacaattttccatgtacttttaaagcagggagtggggaaaagtattttgaggggacattttcatcatcagttcagctttttttttttggttgttgctcttttttgggggggttgggtttgttggtttcactgaaacatttaactacctgtaaaatctaaacatggctgttagtgtcacaccaattcgggacacaaaatggctaacactggaagtatgtagagagttccagagggggacttgctcacggccagacacggaatgtaaatttgcacatccttcgaaaagctgccaagttgaaaatggacgagtaatcgcctgctttgattcattgaaaggccgttgctccagggagaactgcaaatatcttcatccacccccacatttaaaaacgcagttggagataaatggacgcaataacttgattcagcagaagaacatggccatgttggcccagcaaatgcaactagccaatgccatgatgcctggtgccccattacaacccgtgccaatgttttcagttgcaccaagcttagccaccaatgcatcagcagccgcctttaatccctatctgggacctgtttctccaagcctggtcccggcagagatcttgccgactgcaccaatgttggttacagggaatccgggtgtccctgtacctgcagctgctgcagctgctgcacagaaattaatgcgaacagacagacttgaggtatgtcgagagtaccaacgtggcaattgcaaccgaggagaaaatgattgtcggtttgctcatcctgctgacagcacaatgattgacaccaatgacaacacagtcactgtgtgtatggattacatcaaagggagatgctctcgggaaaagtgcaaatactttcatccccctgcacatttgcaagccaagatcaaggctgcccaataccaggtcaaccaggctgcagctgcacaggctgcagccaccgcagctgccatgggaattcctcaagctgtacttcccccattaccaaagaggcctgctcttgaaaaaaccaacggtgccaccgcagtctttaacactggtattttccaataccaacaggctctagccaacatgcagttacaacagcatacagcatttctcccaccaggctcaatattgtgcatgacacccgctacaagtgttgttcccatggtgcacggtgctacgccagccactgtgtccgcagcaacaacatctgccacaagtgttcccttcgctgcaacagccacagccaaccagatacccataatatctgccgaacatctgactagccacaagtatgttacccagatgtagaattttcatcactaaacaatcatgctaaagaggaaaggacagtgtgcttggttagagtaaaggacgaggtcattagccatattgtatatatcgtcaagcaacacacacaaaagttcctcagccacaagacatccacatattgcatgttaaccagaagaaaagacaacattttccggaaatccactgcacactgttgcctatacactttgtacatttaattgatatttgtgctgaggtgatattcctgtctaaaagaacaacattgtctttcttttctagcacagagttatgcattcaaagatgcatacctagttagtttcctatatattcatgccatcttgaaaagacagactatggtgtaaccatgattctattatgtattggtacgtctgtagaccaagatataattttttaaaaataagtttatttctttcaaggtttacaaataacaaaggtgcaccttgtatttaaaattgccattatagatgagagcgtgcatgcacagtcatttttgtttaagagtaatatttttaatgtaatagattgtaagacgtggtgagggagggatctgacagagatgaatgtgccaagcaaaaccacaactgtgtatattttaaagcacatcatggctttaagtaccatgttgttaaggattctcatgaagtgccatagactgtacatcaaattagagtattatttcttcagtgttattgttttcagagccacattttgttgcatatttgctagtactaatcagtcaaagggcaccattctttttttttttttttgaaaccaaagctgtctcagaaatggccaatttaactttacagtaacaatagacagcacaacacaaactctctcaatacagataaactcacacatactggagatatatatataatagatatatataaaattattttaatgcattgtagtgtaatatttatgcatactatactgtataacatgttattcaaaagggattgccatttctgagacacagtaacaaaaaaatgaggaaattattttgcttctatttatagcctctgtcaaaagtcaaaagactataaatgctttgcaaaaatggtttcacgtttgcttaaatgcttcatcacagtcacattcaaaatagtgactctaaacaaagaagaaagcagcactgtcatcagatgcatgataaaccaaaatatgaaaatgggaaatgtttaattaacctagtaattgggtgggttaagtacatgggtgaattttatatgtgatttttgttttgttttgttttgttcagattaactgcttatagccttagaaagccttttacaaaattaaaaaaaaaatagatgtgcattcagtttttaagaatggaatcatccaaaggaattcctttttttgaggtttggatgttgcagctagtaaaggatatttttgctctgttcagcagttctaaaaattgctgaagtaggggccaggtcactggtagttatagtatggaatgggagaagtgaaagttcagttatagaactttccatacttccaagtttactgcaagtttttatgcttgagagagatgctttctaatataagactgatgtgttgattttactgattgtactgtacatctattaaagccttagattattacattacgggttggaacccataccaatgtaatttcaatcgtgttaagaaagtaatggtgacttcacatgttattgtagttagttacattatagaatattacttatttttcttgttaaaatgtagtttttcatttcctacatttattagattttcattttctattaacaattgaataccatttcagtttatagacttgttttattagattttaccaatgaatttttcaaaatacaaaaaaaagtagtttttccttcataacatactcagttttgaattacatgtagtgtcacatgaatattcgtattgttaactaaatgatttatattttactgatttaatattacagtgtaagaatgtcagtcattgttagttcttgtctagttttcattaaaagaacaaagatcttttatatggatatcttataaatatataatcattgctaagtaagaagttaagttgttgctatcgcaacaatcctggcagacaattgagtaatattttgatgatttattttgtttgtaattagttattataagaagatctagatcctagatattagaataaaatttattttctactgtatccatttcaaatgttaaaatattgtttaatatttttgaaatccctgagtatcaggccttgttataaataagctgcataatcaataaatagaacaagggactttttgttgataatccaaatactcaaagtttacgtaatgaaaattatagcgtgtgtgcaaactcttgagggttgattatgctgcaatttagcatgttggaacgtctagggagaaggttgactttttgcacttctgtatatagtcaaaagagagaaacctgtataatagtaagatcttattttgaataaaaacgtctataattacaaaaaaaaaaaaaaaaaaaaaaaaaaaaaaaaaaaaaaaaaaaagaaaaaaaaaaactttgtttcggggggcgtctggccccctcaaaaaagtttctccaaaccacttccttttgggggcggggccccaaatggtatgggcacactgggcaaagcgcggggtcccaaagaacaccccgggcctaacactagcgggtggtttctccccataaaaaagccggggggacccggggttttaaaatcca

SEQ ID NO: 354848 - DNA, 4052 bp, Homo sapiens
cccccagtctccaaaacttcatcacatcacagacgttcaggattctttccattcaaagcaaagccaagttacatcttatagcacccagtgaattatgatatggggctgcggtttatttgctctggcgacaatatggcttacttgccgtggaatatcccggtatttcagaagtaacatattatttttaaagagggagctttgctttctctaaatcacatggtgcaaagttgggaatacagtggcctgtaaattacaaatattatttacaaactagaaggaaagctgacatgtgtttgtgcctgtgtgacagtttcactaaggaattccaaaactgtggatagcctgttacttgagaaaaatacacggtggcagtcttgcagatgtttttcccgcctgttagccctccaggttcaaaaactgtttggtgcattttaaggcggcagtctcaccagatcgcaggattctagtctaattggcttctaaccttcaatctaaccttgccggcttccttgcaaagcccggtgcaagggcctctttcaaaatgaacccactggtgtgcctagcagtcggtagaagaagcgggagggcgtccggtctgcacgcccgccgcgaggttacaatgctgaacgcatgagatggaagataccaacgggaggccgaggggatccacggcgcccgcgcgggctccggcttcctcctgctctcggcgccgctgggcgaccgcccatgacccgctcttgcgggctctgtccggttgacaggcgaccctgtggcccggggaagcgcgggagggcgccggcggaaagttgaagagcgtttttctcgccgccgcgtgcattaggagctcgacgagtccgccctgggcttcctggtggggctgggcgggcgggggaggggccgcgcagcagcagcggaagccagacctcggcgataagaggctgcacagcgacatgcaacagtcttttcactgcagctgaatgagttgtggcgcccacaatgctcccatgacaaggagctgacaagttccattttccgtcgcgggcatcttggaatcatgactcccacaatgccttgggcacttggtcgacagtggggccgcctctgaaaaaaaaatgtgagaggttggtactaagaagtgcctttcctgacgtctctgctgcttggaaccgcttctagagcagtctctgcttttgccttgcttgctgccagctagactgtgacgacagcacatccaccctccacctctagcccagacacccccatttctacttataatcaagagaaaagctctaagtatctggcattgccctaggctgctttagtgttaaaagaaaagtttgctgaaaaagtaagatatcttctgccaggaaatcaaggaggaaaaaaaaaatcattttctcgattttgctctaaactgctgcatctgtctatgccaaactaatcaataccgattgcaccaccaaactccattgcaaattcagctgtgaggagattccctttcagacaactttgctgaaagcagcttggaaattcggtgtcgaagggtctgccacgttttcatgcttgcattttgggctccaaattggcactgggaaggggttactgagagcacaaggctgataccaggccctacttttaaacgttcatctacttacaatcctagtatttctctaaaaaccaaaacctctttgaattaacagtttcatgctgtgaatttctagtgggagatcttttccttgatattgacgacacaattttccatgtacttttaaagcagggagtggggaaaagtattttgaggggacattttcatcatcagttcagctttttttttttggttgttgctcttttttgggggggttgggtttgttggtttcactgaaacatttaactacctgtaaaatctaaacatggctgttagtgtcacaccaattcgggacacaaaatggctaacactggaagtatgtagagagttccagagggggacttgctcacggccagacacggaatgtaaatttgcacatccttcgaaaagctgccaagttgaaaatggacgagtaatcgcctgctttgattcattgaaaggccgttgctccagggagaactgcaaatatcttcatccacccccacatttaaaaacgcagttggagataaatggacgcaataacttgattcagcagaagaacatggccatgttggcccagcaaatgcaactagccaatgccatgatgcctggtgccccattacaacccgtgccaatgttttcagttgcaccaagcttagccaccaatgcatcagcagccgcctttaatccctatctgggacctgtttctccaagcctggtcccggcagagatcttgccgactgcaccaatgttggttacagggaatccgggtgtccctgtacctgcagctgctgcagctgctgcacagaaattaatgcgaacagacagacttgaggtatgtcgagagtaccaacgtggcaattgcaaccgaggagaaaatgattgtcggtttgctcatcctgctgacagcacaatgattgacaccaatgacaacacagtcactgtgtgtatggattacatcaaagggagatgctctcgggaaaagtgcaaatactttcatccccctgcacatttgcaagccaagatcaaggctgcccaataccaggtcaaccaggctgcagctgcacaggctgcagccaccgcagctgccatgggaattcctcaagctgtacttcccccattaccaaagaggcctgctcttgaaaaaaccaacggtgccaccgcagtctttaacactggtattttccaataccaacaggctctagccaacatgcagttacaacagcatacagcatttctcccaccaggctcaatattgtgcatgacacccgctacaagtgttgttcccatggtgcacggtgctacgccagccactgtgtccgcagcaacaacatctgccacaagtgttcccttcgctgcaacagccacagccaaccagatacccataatatctgccgaacatctgactagccacaagtatgttacccagatgtagaattttcatcactaaacaatcatgctaaagaggaaaggacagtgtgcttggttagagtaaaggacgaggtcattagccatattgtatatatcgtcaagcaacacacacaaaagttcctcagccacaagacatccacatattgcatgttaaccagaagaaaagacaacattttccggaaatccactgcacactgttgcctatacactttgtacatttaattgatatttgtgctgaggtgatattcctgtctaaaagaacaacattgtctttcttttctagcacagagttatgcattcaaagatgcatacctagttagtttcctatatattcatgccatcttgaaaagacagactatggtgtaaccatgattctattatgtattggtacgtctgtagaccaagatataattttttaaaaataagtttatttctttcaaggtttacaaataacaaaggtgcaccttgtatttaaaattgccattatagatgagagcgtgcatgcacagtcatttttgtttaagagtaatatttttaatgtaatagattgtaagacgtggtgagggagggatctgacagagatgaatgtgccaagcaaaaccacaactgtgtatattttaaagcacatcatggctttaagtaccatgttgttaaggattctcatgaagtgccatagactgtacatcaaattagagtattatttcttcagtgttattgttttcagagccacattttgttgcatatttgctagtactaatcagtcaaagggcaccattctttttttttttttttgaaaccaaagctgtctcagaaatggccaatttaactttacagtaacaatagacagcacaacacaaaccctactgtgatcgttgcctgctgtggctgtggcaacagaggcatgcaggtgactgggggatgggcaggctgtgacctctaggcttggctggggagggcaggcacagccaaccatcacaacagaggtctgatgtcgacg

SEQ ID NO: 354849 - DNA, 1173 bp, Homo sapiens
attcctgagtctgtgactggtgctggagttttgagtccacagataaaatgtgtctccttcgtctctactagagaggaaaaagaactggaattggaagaacagggagactgaagggtagcaagagaggctggagaagagagtgaaaagaccgcttacctgatttgaaattgtctgcagcccctctttcctggagtaaatgaactggaccaaatctcaaaaatccacgatgtcatcggcacacccgctcagaagatcctcaccaagttcaaacagtcgagagctatgaattttgattttccttttaaaaagggatcaggaatacctctactaacaaccaatttgtccccacaatgcctctccctcctgcacgcaatggtggcctatgatcccgatgagagaatcgccgcccaccaggccctgcagcacccctacttccaagaacagagaaacagtccctaaagcaagaggaggaccgtcccaagagacgaggaccggcctatgtcatggaactgcccaaactaaagctttcgggagtggtcagactgtcgtcttactccagccccacgctgcagtccgtgcttggatctggaacaaatggaagagtgccggtgctgagacccttgaagtgcatccctgcgagcaagaagacagatccgcagaaggaccttaagcctgccccgcagcagtgtcgcctgcccaccatagtgcggaaaggcggaagataactgagcagcaccgtcgtctcgacttcggaggcaacaccaagcccgaccgggccaggcctgggtgatctgctgctgagacgccacggagggctggggatgcgcctgcgtccgtttcgcgctggccggggctctgggtgctgccctgcgccctgccgcacccgcggcccgcgcagctgcctaggatgttctgggctaatatacttgtaaaaccaccgcattctagggttttctttcattttcgttaagaatttggggcaggaaatactttgtaactttgtatatgaatcaaaacaaacgagcaggcatttctgtgatgtgttgggcgtggttggaaggtgggttctgcgtgtcccttcccagcgctgctggtcagtcgtggagcgccatcatgtcttaccagtgacgctgctgacacccctgacttttattaaagaataagctgtcgtta

SEQ ID NO: 354850 - DNA, 1136 bp, Homo sapiens
attcctgagtctgtgactggtgctggagttttgagtccacagataaaatgtgtctccttcgtctctactagagaggaaaaagaactggaattggaagaacagggagactgaagggtagcaagagaggctggagaagagagtgaaaagaccgcttacctgatttgaaattgtctgcagcccctctttcctggagtaaatgaactggaccaaatctcaaaaatccacgatgtcatcggcacacccgctcagaagatcctcaccaagttcaaacaggatcaggaatacctctactaacaaccaatttgtccccacaatgcctctccctcctgcacgcaatggtggcctatgatcccgatgagagaatcgccgcccaccaggccctgcagcacccctacttccaagaacagagaaacagtccctaaagcaagaggaggaccgtcccaagagacgaggaccggcctatgtcatggaactgcccaaactaaagctttcgggagtggtcagactgtcgtcttactccagccccacgctgcagtccgtgcttggatctggaacaaatggaagagtgccggtgctgagacccttgaagtgcatccctgcgagcaagaagacagatccgcagaaggaccttaagcctgccccgcagcagtgtcgcctgcccaccatagtgcggaaaggcggaagataactgagcagcaccgtcgtctcgacttcggaggcaacaccaagcccgaccgggccaggcctgggtgatctgctgctgagacgccacggagggctggggatgcgcctgcgtccgtttcgcgctggccggggctctgggtgctgccctgcgccctgccgcacccgcggcccgcgcagctgcctaggatgttctgggctaatatacttgtaaaaccaccgcattctagggttttctttcattttcgttaagaatttggggcaggaaatactttgtaactttgtatatgaatcaaaacaaacgagcaggcatttctgtgatgtgttgggcgtggttggaaggtgggttctgcgtgtcccttcccagcgctgctggtcagtcgtggagcgccatcatgtcttaccagtgacgctgctgacacccctgacttttattaaagaataagctgtcgtta

SEQ ID NO: 354851 - DNA, 1839 bp, Homo sapiens
cgcatgcgcaggcgacagctcatggcgttcagggcctgacggttgctagggtgacagggacacaacatggcggcgggatctctaacgctctccttcgagggaccaccacggagatcctagtgcgggaccccgcctcagactataaagcaattggcaaaataggagagggaacgttttctgaagttatgaagatgcaaagcctgagagatggaaactactatgcatgtaaacaaatgaagcagcgctttgaaagtattgagcaagtcaacaacctacgagagatccaagcactgaggcgcctgaatccgcacccaaacattcttatgttgcatgaagtggtttttgacagaaaatctggttctcttgcactaatatgtgaacttatggacatgaatatttatgagctaatacgagggagaagatacccattatcagaaaaaaaaattatgcactatatgtaccagttatgtaagtccctggatcatattcacagaaatggaatatttcacagagatgtaaaaccagaaaatatactaataaagcaggatgtcctgaaattaggggactttggctcctgccggagtgtctattccaagcagccgtacacggaatacatctccacccgctggtaccgggccccggagtgtctcctcactgatgggttctacacgtacaagatggacctgtggagcgccggctgtgtgttctacgagatcgccagtctgcagcccctctttcctggagtaaatgaactggaccaaatctcaaaaatccacgatgtcatcggcacacccgctcagaagatcctcaccaagttcaaacagtcgagagctatgaattttgattttccttttaaaaagggatcaggaatacctctactaacaaccaatttgtccccacaatgcctctccctcctgcacgcaatggtggcctatgatcccgatgagagaatcgccgcccaccaggccctgcagcacccctacttccaagaacagaggaaaacagagaagcgggctctgggcagccacagaaaagctggctttccggagcaccctgtggcaccggaaccactcagtaacagctgccagatttccaaggagggcagaaagcagaaacagtccctaaagcaagaggaggaccgtcccaagagacgaggaccggcctatgtcatggaactgcccaaactaaagctttcgggagtggtcagactgtcgtcttactccagccccacgctgcagtccgtgcttggatctggaacaaatggaagagtgccggtgctgagacccttgaagtgcatccctgcgagcaagaagacagatccgcagaaggaccttaagcctgccccgcagcagtgtcgcctgcccaccatagtgcggaaaggcggaagataactgagcagcaccgtcgtctcgacttcggaggcaacaccaagcccgaccgggccaggcctgggtgatctgctgctgagacgccacggagggctggggatgcgcctgcgtccgtttcgcgctggccggggctctgggtgctgccctgcgccctgccgcacccgcggcccgcgcagctgcctaggatgttctgggctaatatacttgtaaaaccaccgcattctagggttttctttcattttcgttaagaatttggggcaggaaatactttgtaactttgtatatgaatcaaaacaaacgagcaggcatttctgtgatgtgttgggcgtggttggaaggtgggttctgcgtgtcccttcccagcgctgctggtcagtcgtggagcgccatcatgtcttaccagtgacgctgctgacacccctgacttttattaaagaataagctgtcgtta

SEQ ID NO: 354852 - DNA, 2264 bp, Homo sapiens
cgcatgcgcaggcgacagctcatggcgttcagggcctgacggttgctagggtgacagggacacaacatggcggcgggatctctaacgctctccttcgagggaccaccacggagatcctagtgcgggaccccgcctcagggaagtggaaagcagggggacaaccttcctgcttctttcttttccgtccagtgtcggcaaggggttgtcaccggcttccgcatccaagatgaagaactataaagcaattggcaaaataggagagggaacgttttctgaagttatgaagatgcaaagcctgagagatggaaactactatgcatgtaaacaaatgaagcagcgctttgaaagtattgagcaagtcaacaacctacgagagatccaagcactgaggcgcctgaatccgcacccaaacattcttatgttgcatgaagtggtttttgacagaaaatctggttctcttgcactaatatgtgaacttatggacatgaatatttatgagctaatacgagggagaagatacccattatcagaaaaaaaaattatgcactatatgtaccagttatgtaagtccctggatcatattcacagaaatggaatatttcacagagatgtaaaaccagaaaatatactaataaagcaggatgtcctgaaattaggggactttggctcctgccggagtgtctattccaagcagccgtacacggaatacatctccacccgctggtaccgggccccggagtgtctcctcactgatgggttctacacgtacaagatggacctgtggagcgccggctgtgtgttctacgagatcgccagtctgcagcccctctttcctggagtaaatgaactggaccaaatctcaaaaatccacgatgtcatcggcacacccgctcagaagatcctcaccaagttcaaacacgagagctatgaattttgattttcctttttaaaccaggcgatcaggaatacctctactaacaaccaatttgtccccacaatgcctctccctcctgcacgcaatggtgtgtttattatggtcgatgaaccgtggatatctcattactacacagagcccatcatttacatcaggggtccctcttggtggtgcacgttctgtgggctgggacaggtgtagactctgcagtcataaaccattccccaccacacagggcccttagttgtgacagtggaccaccggtgcgctcagtgacagcatgaccatttattatcattgggtttttaatacaggtcgagagctatgaattttgattttccttttaaaaagggatcaggaatacctctactaacaaccaatttgtccccacaatgcctctccctcctgcacgcaatggtggcctatgatcccgatgagagaatcgccgcccaccaggccctgcagcacccctacttccaagaacagaggaaaacagagaagcgggctctgggcagccacagaaaagctggctttccggagcaccctgtggcaccggaaccactcagtaacagctgccagatttccaaggagggcagaaagcagaaacagtccctaaagcaagaggaggaccgtcccaagagacgaggaccggcctatgtcatggaactgcccaaactaaagctttcgggagtggtcagactgtcgtcttactccagccccacgctgcagtccgtgcttggatctggaacaaatggaagagtgccggtgctgagacccttgaagtgcatccctgcgagcaagaagacagatccgcagaaggaccttaagcctgccccgcagcagtgtcgcctgcccaccatagtgcggaaaggcggaagataactgagcagcaccgtcgtctcgacttcggaggcaacaccaagcccgaccgggccaggcctgggtgatctgctgctgagacgccacggagggctggggatgcgcctgcgtccgtttcgcgctggccggggctctgggtgctgccctgcgccctgccgcacccgcggcccgcgcagctgcctaggatgttctgggctaatatacttgtaaaaccaccgcattctagggttttctttcattttcgttaagaatttggggcaggaaatactttgtaactttgtatatgaatcaaaacaaacgagcaggcatttctgtgatgtgttgggcgtggttggaaggtgggttctgcgtgtcccttcccagcgctgctggtcagtcgtggagcgccatcatgtcttaccagtgacgctgctgacacccctgacttttattaaagaataagctgtcgtta

SEQ ID NO: 354853 - DNA, 1819 bp, Homo sapiens
cgcatgcgcaggcgacagctcatggcgttcagggcctgacggttgctagggtgacagggacacaacatggcggcgggatctctaacgctctccttcgagggaccaccacggagatcctagtgcgggaccccgcctcagggaagtggaaagcagggggacaaccttcctgcttctttcttttccgtccagtgtcggcaaggggttgtcaccggcttccgcatccaagatgaagaactataaagcaattggcaaaataggagagggaacgttttctgaagttatgaagatgcaaagcctgagagatggaaactactatgcatgtaaacaaatgaagcagcgctttgaaagtgacagaaaatctggttctcttgcactaatatgtgaacttatggacatgaatatttatgagctaatacgagggagaagatacccattatcagaaaaaaaaattatgcactatatgtaccagttatgtaagtccctggatcatattcacagaaatggaatatttcacagagatgtaaaaccagaaaatatactaataaagcaggatgtcctgaaattaggggactttggctcctgccggagtgtctattccaagcagccgtacacggaatacatctccacccgctggtaccgggccccggagtgtctcctcactgatgggttctacacgtacaagatggacctgtggagcgccggctgtgtgttctacgagatcgccagtctgcagcccctctttcctggagtaaatgaactggaccaaatctcaaaaatccacgatgtcatcggcacacccgctcagaagatcctcaccaagttcaaacagtcgagagctatgaattttgattttccttttaaaaagggatcaggaatacctctactaacaaccaatttgtccccacaatgcctctccctcctgcacgcaatggtggcctatgatcccgatgagagaatcgccgcccaccaggccctgcagcacccctacttccaagaacagagaaacagtccctaaagcaagaggaggaccgtcccaagagacgaggaccggcctatgtcatggaactgcccaaactaaagctttcgggagtggtcagactgtcgtcttactccagccccacgctgcagtccgtgcttggatctggaacaaatggaagagtgccggtgctgagacccttgaagtgcatccctgcgagcaagaaggtagcgcggaaccagcttctctgacggcgctgctcttcgacccagcccaggccgccactgaattttgtgtctgtaatttttctttgacagacagatccgcagaaggaccttaagcctgccccgcagcagtgtcgcctgcccaccatagtgcggaaaggcggaagataactgagcagcaccgtcgtctcgacttcggaggcaacaccaagcccgaccgggccaggcctgggtgatctgctgctgagacgccacggagggctggggatgcgcctgcgtccgtttcgcgctggccggggctctgggtgctgccctgcgccctgccgcacccgcggcccgcgcagctgcctaggatgttctgggctaatatacttgtaaaaccaccgcattctagggttttctttcattttcgttaagaatttggggcaggaaatactttgtaactttgtatatgaatcaaaacaaacgagcaggcatttctgtgatgtgttgggcgtggttggaaggtgggttctgcgtgtcccttcccagcgctgctggtcagtcgtggagcgccatcatgtcttaccagtgacgctgctgacacccctgacttttattaaagaataagctgtcgtta

SEQ ID NO: 354854 - DNA, 1729 bp, Homo sapiens
cgcatgcgcaggcgacagctcatggcgttcagggcctgacggttgctagggtgacagggacacaacatggcggcgggatctctaacgctctccttcgagggaccaccacggagatcctagtgcgggaccccgcctcagggaagtggaaagcagggggacaaccttcctgcttctttcttttccgtccagtgtcggcaaggggttgtcaccggcttccgcatccaagatgaagaactataaagcaattggcaaaataggagagggaacgttttctgaagttatgaagatgcaaagcctgagagatggaaactactatgcatgtaaacaaatgaagcagcgctttgaaagtgacagaaaatctggttctcttgcactaatatgtgaacttatggacatgaatatttatgagctaatacgagggagaagatacccattatcagaaaaaaaaattatgcactatatgtaccagttatgtaagtccctggatcatattcacagaaatggaatatttcacagagatgtaaaaccagaaaatatactaataaagcaggatgtcctgaaattaggggactttggctcctgccggagtgtctattccaagcagccgtacacggaatacatctccacccgctggtaccgggccccggagtgtctcctcactgatgggttctacacgtacaagatggacctgtggagcgccggctgtgtgttctacgagatcgccagtctgcagcccctctttcctggagtaaatgaactggaccaaatctcaaaaatccacgatgtcatcggcacacccgctcagaagatcctcaccaagttcaaacagtcgagagctatgaattttgattttccttttaaaaagggatcaggaatacctctactaacaaccaatttgtccccacaatgcctctccctcctgcacgcaatggtggcctatgatcccgatgagagaatcgccgcccaccaggccctgcagcacccctacttccaagaacagagaaacagtccctaaagcaagaggaggaccgtcccaagagacgaggaccggcctatgtcatggaactgcccaaactaaagctttcgggagtggtcagactgtcgtcttactccagccccacgctgcagtccgtgcttggatctggaacaaatggaagagtgccggtgctgagacccttgaagtgcatccctgcgagcaagaagacagatccgcagaaggaccttaagcctgccccgcagcagtgtcgcctgcccaccatagtgcggaaaggcggaagataactgagcagcaccgtcgtctcgacttcggaggcaacaccaagcccgaccgggccaggcctgggtgatctgctgctgagacgccacggagggctggggatgcgcctgcgtccgtttcgcgctggccggggctctgggtgctgccctgcgccctgccgcacccgcggcccgcgcagctgcctaggatgttctgggctaatatacttgtaaaaccaccgcattctagggttttctttcattttcgttaagaatttggggcaggaaatactttgtaactttgtatatgaatcaaaacaaacgagcaggcatttctgtgatgtgttgggcgtggttggaaggtgggttctgcgtgtcccttcccagcgctgctggtcagtcgtggagcgccatcatgtcttaccagtgacgctgctgacacccctgacttttattaaagaataagctgtcgtta

SEQ ID NO: 354855 - DNA, 1879 bp, Homo sapiens
cgcatgcgcaggcgacagctcatggcgttcagggcctgacggttgctagggtgacagggacacaacatggcggcgggatctctaacgctctccttcgagggaccaccacggagatcctagtgcgggaccccgcctcagggaagtggaaagcagggggacaaccttcctgcttctttcttttccgtccagtgtcggcaaggggttgtcaccggcttccgcatccaagatgaagaactataaagcaattggcaaaataggagagggaacgttttctgaagttatgaagatgcaaagcctgagagatggaaactactatgcatgtaaacaaatgaagcagcgctttgaaaggcagttacctagaaacagaatcactgggtcaaaggtgacagaaaatctggttctcttgcactaatatgtgaacttatggacatgaatatttatgagctaatacgagggagaagatacccattatcagaaaaaaaaattatgcactatatgtaccagttatgtaagtccctggatcatattcacagaaatggaatatttcacagagatgtaaaaccagaaaatatactaataaagcaggatgtcctgaaattaggggactttggctcctgccggagtgtctattccaagcagccgtacacggaatacatctccacccgctggtaccgggccccggagtgtctcctcactgatgggttctacacgtacaagatggacctgtggagcgccggctgtgtgttctacgagatcgccagtctgcagcccctctttcctggagtaaatgaactggaccaaatctcaaaaatccacgatgtcatcggcacacccgctcagaagatcctcaccaagttcaaacagtcgagagctatgaattttgattttccttttaaaaagggatcaggaatacctctactaacaaccaatttgtccccacaatgcctctccctcctgcacgcaatggtggcctatgatcccgatgagagaatcgccgcccaccaggccctgcagcacccctacttccaagaacagaggaaaacagagaagcgggctctgggcagccacagaaaagctggctttccggagcaccctgtggcaccggaaccactcagtaacagctgccagatttccaaggagggcagaaagcagaaacagtccctaaagcaagaggaggaccgtcccaagagacgaggaccggcctatgtcatggaactgcccaaactaaagctttcgggagtggtcagactgtcgtcttactccagccccacgctgcagtccgtgcttggatctggaacaaatggaagagtgccggtgctgagacccttgaagtgcatccctgcgagcaagaagacagatccgcagaaggaccttaagcctgccccgcagcagtgtcgcctgcccaccatagtgcggaaaggcggaagataactgagcagcaccgtcgtctcgacttcggaggcaacaccaagcccgaccgggccaggcctgggtgatctgctgctgagacgccacggagggctggggatgcgcctgcgtccgtttcgcgctggccggggctctgggtgctgccctgcgccctgccgcacccgcggcccgcgcagctgcctaggatgttctgggctaatatacttgtaaaaccaccgcattctagggttttctttcattttcgttaagaatttggggcaggaaatactttgtaactttgtatatgaatcaaaacaaacgagcaggcatttctgtgatgtgttgggcgtggttggaaggtgggttctgcgtgtcccttcccagcgctgctggtcagtcgtggagcgccatcatgtcttaccagtgacgctgctgacacccctgacttttattaaagaataagctgtcgtta

SEQ ID NO: 354856 - DNA, 2101 bp, Homo sapiens
cgcatgcgcaggcgacagctcatggcgttcagggcctgacggttgctagggtgacagggacacaacatggcggcgggatctctaacgctctccttcgagggaccaccacggagatcctagtgcgggaccccgcctcagggaagtggaaagcagggggacaaccttcctgcttctttcttttccgtccagtgtcggcaaggggttgtcaccggcttccgcatccaagatgaagaactataaagcaattggcaaaataggagagggaacgttttctgaagttatgaagatgcaaagcctgagagatggaaactactatgcatgtaaacaaatgaagcagcgctttgaaagtattgagcaagtcaacaacctacgagagatccaagcactgaggcgcctgaatccgcacccaaacattcttatgttgcatgaagtggtttttgacagaaaatctggttctcttgcactaatatgtgaacttatggacatgaatatttatgagctaatacgagggagaagatacccattatcagaaaaaaaaattatgcactatatgtaccagttatgtaagtccctggatcatattcacagaaatggaatatttcacagagatgtaaaaccagaaaatatactaataaaggttgtaaaaaatggtttatttaataaatgccatcaacataactgactgcacctggaagaaaataattgaaagcaccattttcacaccgcagacaaaaatgaaccctattcagacggccgttcaaaccttctagagggaaatgtggcagaggcaggatttgagctcagcaggatgtcctgaaattaggggactttggctcctgccggagtgtctattccaagcagccgtacacggaatacatctccacccgctggtaccgggccccggagtgtctcctcactgatgggttctacacgtacaagatggacctgtggagcgccggctgtgtgttctacgagatcgccagtctgcagcccctctttcctggagtaaatgaactggaccaaatctcaaaaatccacgatgtcatcggcacacccgctcagaagatcctcaccaagttcaaacagtcgagagctatgaattttgattttccttttaaaaagggatcaggaatacctctactaacaaccaatttgtccccacaatgcctctccctcctgcacgcaatggtggcctatgatcccgatgagagaatcgccgcccaccaggccctgcagcacccctacttccaagaacagaggaaaacagagaagcgggctctgggcagccacagaaaagctggctttccggagcaccctgtggcaccggaaccactcagtaacagctgccagatttccaaggagggcagaaagcagaaacagtccctaaagcaagaggaggaccgtcccaagagacgaggaccggcctatgtcatggaactgcccaaactaaagctttcgggagtggtcagactgtcgtcttactccagccccacgctgcagtccgtgcttggatctggaacaaatggaagagtgccggtgctgagacccttgaagtgcatccctgcgagcaagaagacagatccgcagaaggaccttaagcctgccccgcagcagtgtcgcctgcccaccatagtgcggaaaggcggaagataactgagcagcaccgtcgtctcgacttcggaggcaacaccaagcccgaccgggccaggcctgggtgatctgctgctgagacgccacggagggctggggatgcgcctgcgtccgtttcgcgctggccggggctctgggtgctgccctgcgccctgccgcacccgcggcccgcgcagctgcctaggatgttctgggctaatatacttgtaaaaccaccgcattctagggttttctttcattttcgttaagaatttggggcaggaaatactttgtaactttgtatatgaatcaaaacaaacgagcaggcatttctgtgatgtgttgggcgtggttggaaggtgggttctgcgtgtcccttcccagcgctgctggtcagtcgtggagcgccatcatgtcttaccagtgacgctgctgacacccctgacttttattaaagaataagctgtcgtta

SEQ ID NO: 354857 - DNA, 1773 bp, Homo sapiens
cgcatgcgcaggcgacagctcatggcgttcagggcctgacggttgctagggtgacagggacacaacatggcggcgggatctctaacgctctccttcgagggaccaccacggagatcctagtgcgggaccccgcctcagggaagtggaaagcagggggacaaccttcctgcttctttcttttccgtccagtgtcggcaaggggttgtcaccggcttccgcatccaagatgaagaactataaagcaattggcaaaataggagagggaacgttttctgaagttatgaagatgcaaagcctgagagatggaaactactatgcatgtaaacaaatgaagcagcgctttgaaagggagaagatacccattatcagaaaaaaaaattatgcactatatgtaccagttatgtaagtccctggatcatattcacagaaatggaatatttcacagagatgtaaaaccagaaaatatactaataaagcaggatgtcctgaaattaggggactttggctcctgccggagtgtctattccaagcagccgtacacggaatacatctccacccgctggtaccgggccccggagtgtctcctcactgatgggttctacacgtacaagatggacctgtggagcgccggctgtgtgttctacgagatcgccagtctgcagcccctctttcctggagtaaatgaactggaccaaatctcaaaaatccacgatgtcatcggcacacccgctcagaagatcctcaccaagttcaaacagtcgagagctatgaattttgattttccttttaaaaagggatcaggaatacctctactaacaaccaatttgtccccacaatgcctctccctcctgcacgcaatggtggcctatgatcccgatgagagaatcgccgcccaccaggccctgcagcacccctacttccaagaacagaggaaaacagagaagcgggctctgggcagccacagaaaagctggctttccggagcaccctgtggcaccggaaccactcagtaacagctgccagatttccaaggagggcagaaagcagaaacagtccctaaagcaagaggaggaccgtcccaagagacgaggaccggcctatgtcatggaactgcccaaactaaagctttcgggagtggtcagactgtcgtcttactccagccccacgctgcagtccgtgcttggatctggaacaaatggaagagtgccggtgctgagacccttgaagtgcatccctgcgagcaagaagacagatccgcagaaggaccttaagcctgccccgcagcagtgtcgcctgcccaccatagtgcggaaaggcggaagataactgagcagcaccgtcgtctcgacttcggaggcaacaccaagcccgaccgggccaggcctgggtgatctgctgctgagacgccacggagggctggggatgcgcctgcgtccgtttcgcgctggccggggctctgggtgctgccctgcgccctgccgcacccgcggcccgcgcagctgcctaggatgttctgggctaatatacttgtaaaaccaccgcattctagggttttctttcattttcgttaagaatttggggcaggaaatactttgtaactttgtatatgaatcaaaacaaacgagcaggcatttctgtgatgtgttgggcgtggttggaaggtgggttctgcgtgtcccttcccagcgctgctggtcagtcgtggagcgccatcatgtcttaccagtgacgctgctgacacccctgacttttattaaagaataagctgtcgtta

SEQ ID NO: 354858 - DNA, 1111 bp, Homo sapiens
taaaatatatatatatatatctataatatcgtatataataaaataaaaaaattcatctgcagcccctctttcctggagtaaatgaactggaccaaatctcaaaaatccacgatgtcatcggcacacccgctcagaagatcctcaccaagttcaaacaggatcaggaatacctctactaacaaccaatttgtccccacaatgcctctccctcctgcacgcaatggtggcctatgatcccgatgagagaatcgccgcccaccaggccctgcagcacccctacttccaagaacagagaaacagtccctaaagcaagaggaggaccgtcccaagagacgaggaccggcctatgtcatggaactgcccaaactaaagctttcgggagtggtcagactgtcgtcttactccagccccacgctgcagtccgtgcttggatctggaacaaatggaagagtgccggtgctgagacccttgaagtgcatccctgcgagcaagaaggtagcgcggaaccagcttctctgacggcgctgctcttcgacccagcccaggccgccactgaattttgtgtctgtaatttttctttgacagacagatccgcagaaggaccttaagcctgccccgcagcagtgtcgcctgcccaccatagtgcggaaaggcggaagataactgagcagcaccgtcgtctcgacttcggaggcaacaccaagcccgaccgggccaggcctgggtgatctgctgctgagacgccacggagggctggggatgcgcctgcgtccgtttcgcgctggccggggctctgggtgctgccctgcgccctgccgcacccgcggcccgcgcagctgcctaggatgttctgggctaatatacttgtaaaaccaccgcattctagggttttctttcattttcgttaagaatttggggcaggaaatactttgtaactttgtatatgaatcaaaacaaacgagcaggcatttctgtgatgtgttgggcgtggttggaaggtgggttctgcgtgtcccttcccagcgctgctggtcagtcgtggagcgccatcatgtcttaccagtgacgctgctgacacccctgacttttattaaagaataagctgtcgtta

SEQ ID NO: 354859 - DNA, 1841 bp, Homo sapiens
cgcatgcgcaggcgacagctcatggcgttcagggcctgacggttgctagggtgacagggacacaacatggcggcgggatctctaacgctctccttcgagggaccaccacggagatcctagtgcgggaccccgcctcagggaagtggaaagcagggggacaaccttcctgcttctttcttttccgtccagtgtcggcaaggggttgtcaccggcttccgcatccaagatgaagaactataaagcaattggcaaaataggagagggaacgttttctgaagttatgaagatgcaaagcctgagagatggaaactactatgcatgtaaacaaatgaagcagcgctttgaaagtgacagaaaatctggttctcttgcactaatatgtgaacttatggacatgaatatttatgagctaatacgagggagaagatacccattatcagaaaaaaaaattatgcactatatgtaccagttatgtaagtccctggatcatattcacagaaatggaatatttcacagagatgtaaaaccagaaaatatactaataaagcaggatgtcctgaaattaggggactttggctcctgccggagtgtctattccaagcagccgtacacggaatacatctccacccgctggtaccgggccccggagtgtctcctcactgatgggttctacacgtacaagatggacctgtggagcgccggctgtgtgttctacgagatcgccagtctgcagcccctctttcctggagtaaatgaactggaccaaatctcaaaaatccacgatgtcatcggcacacccgctcagaagatcctcaccaagttcaaacagtcgagagctatgaattttgattttccttttaaaaagggatcaggaatacctctactaacaaccaatttgtccccacaatgcctctccctcctgcacgcaatggtggcctatgatcccgatgagagaatcgccgcccaccaggccctgcagcacccctacttccaagaacagagaaacagtccctaaagcaagaggaggaccgtcccaagagacgaggaccggcctatgtcatggaactgcccaaactaaagctttcgggagtggtcagactgtcgtcttactccagccccacgctgcagtccgtgcttggatctggaacaaatggaagagtgccggtgctgagacccttgaagtgcatccctgcgagcaagaaggtagcgcggaaccagcttctctgacggcgctgctcttcgacccagcccaggccgccactgaattttgtgtctgtaatttttctttgacagacagatccgcagaaggaccttaagcctgccccgcagcagtgtcgcctgcccaccatagtgcggaaaggcggaagataactgagcagcaccgtcgtctcgacttcggaggcaacaccaagcccgaccgggccaggcctgggtgatctgctgctgagacgccacggagggctggggatgcgcctgcgtccgtttcgcgctggccggggctctgggtgctgccctgcgccctgccgcacccgcggcccgcgcagctgcctaggatgttctgggctaatatacttgtaaaaccaccgcattctagggttttctttcattttcgttaagaatttggggcaggaaatactttgtaactttgtatatgaatcaaaacaaacgagcaggcatttctgtgatgtgttgggcgtggttggaaggtgggttctgcgtgtcccttcccagcgctgctggtcagtcgtggagcgccatcatgtcttaccagtgacgctgctgacacccctgacttttattaaagaataagctgtcgttatacagtattgcaaaaaaatgtt

SEQ ID NO: 354860 - DNA, 1908 bp, Homo sapiens
cgcatgcgcaggcgacagctcatggcgttcagggcctgacggttgctagggtgacagggacacaacatggcggcgggatctctaacgctctccttcgagggaccaccacggagatcctagtgcgggaccccgcctcagggaagtggaaagcagggggacaaccttcctgcttctttcttttccgtccagtgtcggcaaggggttgtcaccggcttccgcatccaagatgaagaactataaagcaattggcaaaataggagagggaacgttttctgaagttatgaagatgcaaagcctgagagatggaaactactatgcatgtaaacaaatgaagcagcgctttgaaagtgacagaaaatctggttctcttgcactaatatgtgaacttatggacatgaatatttatgagctaatacgagggagaagatacccattatcagaaaaaaaaattatgcactatatgtaccagttatgtaagtccctggatcatattcacagaaatggaatatttcacagagatgtaaaaccagaaaatatactaataaagcaggatgtcctgaaattaggggactttggctcctgccggagtgtctattccaagcagccgtacacggaatacatctccacccgctggtaccgggccccggagtgtctcctcactgatgggttctacacgtacaagatggacctgtggagcgccggctgtgtgttctacgagatcgccagtctgcagcccctctttcctggagtaaatgaactggaccaaatctcaaaaatccacgatgtcatcggcacacccgctcagaagatcctcaccaagttcaaacagtcgagagctatgaattttgattttccttttaaaaagggatcaggaatacctctactaacaaccaatttgtccccacaatgcctctccctcctgcacgcaatggtggcctatgatcccgatgagagaatcgccgcccaccaggccctgcagcacccctacttccaagaacagaggaaaacagagaagcgggctctgggcagccacagaaaagctggctttccggagcaccctgtggcaccggaaccactcagtaacagctgccagatttccaaggagggcagaaagcagaaacagtccctaaagcaagaggaggaccgtcccaagagacgaggaccggcctatgtcatggaactgcccaaactaaagctttcgggagtggtcagactgtcgtcttactccagccccacgctgcagtccgtgcttggatctggaacaaatggaagagtgccggtgctgagacccttgaagtgcatccctgcgagcaagaagacagatccgcagaaggaccttaagcctgccccgcagcagtgtcgcctgcccaccatagtgcggaaaggcggaagataactgagcagcaccgtcgtctcgacttcggaggcaacaccaagcccgaccgggccaggcctgggtgatctgctgctgagacgccacggagggctggggatgcgcctgcgtccgtttcgcgctggccggggctctgggtgctgccctgcgccctgccgcacccgcggcccgcgcagctgcctaggatgttctgggctaatatacttgtaaaaccaccgcattctagggttttctttcattttcgttaagaatttggggcaggaaatactttgtaactttgtatatgaatcaaaacaaacgagcaggcatttctgtgatgtgttgggcgtggttggaaggtgggttctgcgtgtcccttcccagcgctgctggtcagtcgtggagcgccatcatgtcttaccagtgacgctgctgacacccctgacttttattaaagaataagctgtcgttaaaaaaaacaacaaaaaaacaacaaaccaataccaaccacagaaaacacagagggacgcgtcaaa

SEQ ID NO: 354861 - DNA, 2672 bp, Homo sapiens
cgcatgcgcaggcgacagctcatggcgttcagggcctgacggttgctagggtgacagggacacaacatggcggcgggatctctaacgctctccttcgagggaccaccacggagatcctagtgcgggaccccgcctcagggaagtggaaagcagggggacaaccttcctgcttctttcttttccgtccagtgtcggcaaggggttgtcaccggcttccgcatccaagatgaagaactataaagcaattggcaaaataggagagggaacgttttctgaagttatgaagatgcaaagcctgagagatggaaactactatgcatgtaaacaaatgaagcagcgctttgaaagtgacagaaaatctggttctcttgcactaatatgtgaacttatggacatgaatatttatgagctaatacgagggagaagatacccattatcagaaaaaaaaattatgcactatatgtaccagttatgtaagtccctggatcatattcacagaaatggaatatttcacagagatgtaaaaccagaaaatatactaataaagcaggatgtcctgaaattaggggactttggctcctgccggagtgtctattccaagcagccgtacacggaatacatctccacccgctggtaccgggccccggagtgtctcctcactgatgggttctacacgtacaagatggacctgtggagcgccggctgtgtgttctacgagatcgccagtctgcagcccctctttcctggagtaaatgaactggaccaaatctcaaaaatccacgatgtcatcggcacacccgctcagaagatcctcaccaagttcaaacagtcgagagctatgaattttgattttccttttaaaaagggatcaggaatacctctactaacaaccaatttgtccccacaatgcctctccctcctgcacgcaatggtggcctatgatcccgatgagagaatcgccgcccaccaggccctgcagcacccctacttccaagaacagagaacccagaacggaagcgaggatgaggcctcagccgtcctcctccccattcaaacacgttcatccctcaaccctctgctgagcacctgcatgctgcccggccgcagtgtcacccttcttgtgtgagcctaccctcatccacccacctcaccctcctgaccttaaagaagacaccgggcagaagcacaggggagcccagtcacaccccacactggcgggggcaggccttgcagggagaagcagtaagcagccatctccatcagccatttccatctggcactcagacgtgcacgtcttcgtgtgacaggcggcagcagtgcgaccgtgacctcccatctgctctgctgtccccacacctgcggtgcagccagcctgccacaaggcagctagagtccagctagacccacccctggcacggccgacctcttcctggcttcttctgggcctaatccccgtgcattctccaacgccagaagtgtaagaaagtgcaaggcaacaagtgagaagagcaaacccaaatcgtaccagggaagctagtctttccagggcacctgagtgagggcatgaccagccttgacgctgcctcgctaccatctgcccagggcctgctgaatgcttgagtccatggtgacagtggtgggaacagttacgaggcagttagattttggaagtcatgttggcccacttggctacagagcagtcttaggaacagcaccataaaaataaagacttattcctgacacacatgcatctagagtaaactggggcgtatctgacagcgttagtacagtgatggccaaatgcaaactgcattccagaaccagcgaagggtgacagactgggctgaggcagagctaggactaaccatctcgagtgatgccatctcggggccaacaaaagttttggacacggctggatcatctgaccaaactgctcaaatctttacacaattattgtcctggtattaaactttcacctgccacttccaacaaacaggagacagaataaggagatgaccaggaagatggctggattaagaattctagacttggccgggtgcggtggctcacacctgtaatcctagcatcttgggaggctgaggcaggaggatcgcttgagcccaggagtttgagaccagcctaggcaacataaggagaccccatctctacaaaatatcaaaaaattacccaggtatggtggcacacacgtgtgattccagctactcgggaggctgagatgggaggatcacttgaacccaggaggttggggctacaatgagctatgatcgcaccacttcattccagcctggatgacagaagactcactccatagttcatggccccgtgatccagagtccctgctggcgccttcgagtggggcaggctgagaactcaagctgtaactaatgtctcctccgaagaaaactaaaccgagggctgagctgatgtgaagttttccgtggctgcattcatacaaatggtgaaaatgtagcatacctcccctcaaaagcctgaaagtaaagacatgcccccaatttaatgtgatgaattagagaaataggtttcagacacttcatggtttaaagtctcacaaaataaagctttcgaaggatccagttgtatatgattttttaaaaaaataaataaacattcttctgcttggtagctgcaca

SEQ ID NO: 354862 - DNA, 1358 bp, Homo sapiens
cgcatgcgcaggcgacagctcatggcgttcagggcctgacggttgctagggtgacagggacacaacatggcggcgggatctctaacgctctccttcgagggaccaccacggagatcctagtgcgggaccccgcctcagggaagtggaaagcagggggacaaccttcctgcttctttcttttccgtccagtgtcggcaaggggttgtcaccggcttccgcatccaagatgaagaactataaagcaattggcaaaataggagagggaacgttttctgaagttatgaagatgcaaagcctgagagatggaaactactatgcatgtaaacaaatgaagcagcgctttgaaagtgacagaaaatctggttctcttgcactaatatgtgaacttatggacatgaatatttatgagctaatacgagggagaagatacccattatcagaaaaaaaaattatgcactatatgtaccagttatgtaagtccctggatcatattcacagaaatggaatatttcacagagatgtaaaaccagaaaatatactaataaagcaggatgtcctgaaattaggggactttggctcctgccggagtgtctattccaagcagccgtacacggaatacatctccacccgctggtaccgggccccggagtgtctcctcactgatgggttctacacgtacaagatggacctgtggagcgccggctgtgtgttctacgagatcgccagtctgcagcccctctttcctggagtaaatgaactggaccaaatctcaaaaatccacgatgtcatcggcacacccgctcagaagatcctcaccaagttcaaacagtcgagagctatgaattttgattttccttttaaaaagggatcaggaatacctctactaacaaccaatttgtccccacaatgcctctccctcctgcacgcaatggtggcctatgatcccgatgagagaatcgccgcccaccaggccctgcagcacccctacttccaagaacagagaagactcactccatagttcatggccccgtgatccagagtccctgctggcgccttcgagtggggcaggctgagaactcaagctgtaactaatgtctcctccgaagaaaactaaaccgagggctgagctgatgtgaagttttccgtggctgcattcatacaaatggtgaaaatgtagcatacctcccctcaaaagcctgaaagtaaagacatgcccccaatttaatgtgatgaattagagaaataggtttcagacacttcatggtttaaagtctcacaaaataaagctttcgaaggatccagttgtatatgattttttaaaaaaataaataaacattcttctgcttggtagctgcaca

SEQ ID NO: 354863 - DNA, 350 bp, Homo sapiens
ggatcaggaatacctctactaacaaccaatttgtccccacaatgcctctccctcctgcacgcaatggtggcctatgatcccgatgagagaatcgccgcccaccaggccctgcagcacccctacttccaagaacagaggtaggcactctcgtgggttcggtggggcagatgcaggacctggcaaatgagacccatgggcacatggtggggcaaggtactgccccctggagggtccctggttcttgggaatcgcgctctctatcctgaagagtggtcagggcctcttggggcccacaccgtgctgccttctggtgtatcctccccaaaatgaggatgttagcagctccacgg

SEQ ID NO: 354864 - DNA, 1934 bp, Homo sapiens
cgcatgcgcaggcgacagctcatggcgttcagggcctgacggttgctagggtgacagggacacaacatggcggcgggatctctaacgctctccttcgagggaccaccacggagatcctagtgcgggaccccgcctcagggaagtggaaagcagggggacaaccttcctgcttctttcttttccgtccagtgtcggcaaggggttgtcaccggcttccgcatccaagatgaagaactataaagcaattggcaaaataggagagggaacgttttctgaagttatgaagatgcaaagcctgagagatggaaactactatgcatgtaaacaaatgaagcagcgctttgaaagtattgagcaagtcaacaacctacgagagatccaagcactgaggcgcctgaatccgcacccaaacattcttatgttgcatgaagtggtttttgacagaaaatctggttctcttgcactaatatgtgaacttatggacatgaatatttatgagctaatacgagggagaagatacccattatcagaaaaaaaaattatgcactatatgtaccagttatgtaagtccctggatcatattcacagaaatggaatatttcacagagatgtaaaaccagaaaatatactaataaagcaggatgtcctgaaattaggggactttggctcctgccggagtgtctattccaagcagccgtacacggaatacatctccacccgctggtaccgggccccggagtgtctcctcactgatgggttctacacgtacaagatggacctgtggagcgccggctgtgtgttctacgagatcgccagtctgcagcccctctttcctggagtaaatgaactggaccaaatctcaaaaatccacgatgtcatcggcacacccgctcagaagatcctcaccaagttcaaacagtcgagagctatgaattttgattttccttttaaaaagggatcaggaatacctctactaacaaccaatttgtccccacaatgcctctccctcctgcacgcaatggtggcctatgatcccgatgagagaatcgccgcccaccaggccctgcagcacccctacttccaagaacagaggaaaacagagaagcgggctctgggcagccacagaaaagctggctttccggagcaccctgtggcaccggaaccactcagtaacagctgccagatttccaaggagggcagaaagcagaaacagtccctaaagcaagaggaggaccgtcccaagagacgaggaccggcctatgtcatggaactgcccaaactaaagctttcgggagtggtcagactgtcgtcttactccagccccacgctgcagtccgtgcttggatctggaacaaatggaagagtgccggtgctgagacccttgaagtgcatccctgcgagcaagaagacagatccgcagaaggaccttaagcctgccccgcagcagtgtcgcctgcccaccatagtgcggaaaggcggaagataactgagcagcaccgtcgtctcgacttcggaggcaacaccaagcccgaccgggccaggcctgggtgatctgctgctgagacgccacggagggctggggatgcgcctgcgtccgtttcgcgctggccggggctctgggtgctgccctgcgccctgccgcacccgcggcccgcgcagctgcctaggatgttctgggctaatatacttgtaaaaccaccgcattctagggttttctttcattttcgttaagaatttggggcaggaaatactttgtaactttgtatatgaatcaaaacaaacgagcaggcatttctgtgatgtgttgggcgtggttggaaggtgggttctgcgtgtcccttcccagcgctgctggtcagtcgtggagcgccatcatgtcttaccagtgacgctgctgacacccctgacttttattaaagaataagctgtcgtta

SEQ ID NO: 354865 - DNA, 1844 bp, Homo sapiens
cgcatgcgcaggcgacagctcatggcgttcagggcctgacggttgctagggtgacagggacacaacatggcggcgggatctctaacgctctccttcgagggaccaccacggagatcctagtgcgggaccccgcctcagggaagtggaaagcagggggacaaccttcctgcttctttcttttccgtccagtgtcggcaaggggttgtcaccggcttccgcatccaagatgaagaactataaagcaattggcaaaataggagagggaacgttttctgaagttatgaagatgcaaagcctgagagatggaaactactatgcatgtaaacaaatgaagcagcgctttgaaagtgacagaaaatctggttctcttgcactaatatgtgaacttatggacatgaatatttatgagctaatacgagggagaagatacccattatcagaaaaaaaaattatgcactatatgtaccagttatgtaagtccctggatcatattcacagaaatggaatatttcacagagatgtaaaaccagaaaatatactaataaagcaggatgtcctgaaattaggggactttggctcctgccggagtgtctattccaagcagccgtacacggaatacatctccacccgctggtaccgggccccggagtgtctcctcactgatgggttctacacgtacaagatggacctgtggagcgccggctgtgtgttctacgagatcgccagtctgcagcccctctttcctggagtaaatgaactggaccaaatctcaaaaatccacgatgtcatcggcacacccgctcagaagatcctcaccaagttcaaacagtcgagagctatgaattttgattttccttttaaaaagggatcaggaatacctctactaacaaccaatttgtccccacaatgcctctccctcctgcacgcaatggtggcctatgatcccgatgagagaatcgccgcccaccaggccctgcagcacccctacttccaagaacagaggaaaacagagaagcgggctctgggcagccacagaaaagctggctttccggagcaccctgtggcaccggaaccactcagtaacagctgccagatttccaaggagggcagaaagcagaaacagtccctaaagcaagaggaggaccgtcccaagagacgaggaccggcctatgtcatggaactgcccaaactaaagctttcgggagtggtcagactgtcgtcttactccagccccacgctgcagtccgtgcttggatctggaacaaatggaagagtgccggtgctgagacccttgaagtgcatccctgcgagcaagaagacagatccgcagaaggaccttaagcctgccccgcagcagtgtcgcctgcccaccatagtgcggaaaggcggaagataactgagcagcaccgtcgtctcgacttcggaggcaacaccaagcccgaccgggccaggcctgggtgatctgctgctgagacgccacggagggctggggatgcgcctgcgtccgtttcgcgctggccggggctctgggtgctgccctgcgccctgccgcacccgcggcccgcgcagctgcctaggatgttctgggctaatatacttgtaaaaccaccgcattctagggttttctttcattttcgttaagaatttggggcaggaaatactttgtaactttgtatatgaatcaaaacaaacgagcaggcatttctgtgatgtgttgggcgtggttggaaggtgggttctgcgtgtcccttcccagcgctgctggtcagtcgtggagcgccatcatgtcttaccagtgacgctgctgacacccctgacttttattaaagaataagctgtcgtta

SEQ ID NO: 354866 - DNA, 2785 bp, Homo sapiens
cgcatgcgcaggcgacagctcatggcgttcagggcctgacggttgctagggtgacagggacacaacatggcggcgggatctctaacgctctccttcgagggaccaccacggagatcctagtgcgggaccccgcctcagggaagtggaaagcagggggacaaccttcctgcttctttcttttccgtccagtgtcggcaaggggttgtcaccggcttccgcatccaagatgaagaactataaagcaattggcaaaataggagagggaacgttttctgaagttatgaagatgcaaagcctgagagatggaaactactatgcatgtaaacaaatgaagcagcgctttgaaagtattgagcaagtcaacaacctacgagagatccaagcactgaggcgcctgaatccgcacccaaacattcttatgttgcatgaagtggtttttgacagaaaatctggttctcttgcactaatatgtgaacttatggacatgaatatttatgagctaatacgagggagaagatacccattatcagaaaaaaaaattatgcactatatgtaccagttatgtaagtccctggatcatattcacagaaatggaatatttcacagagatgtaaaaccagaaaatatactaataaagcaggatgtcctgaaattaggggactttggctcctgccggagtgtctattccaagcagccgtacacggaatacatctccacccgctggtaccgggccccggagtgtctcctcactgatgggttctacacgtacaagatggacctgtggagcgccggctgtgtgttctacgagatcgccagtctgcagcccctctttcctggagtaaatgaactggaccaaatctcaaaaatccacgatgtcatcggcacacccgctcagaagatcctcaccaagttcaaacagtaagtattgtgttctgagagtggatgtggacccactcccctgctaggacctgcagcagggcaagcccctccctgtgcctccctcaaacccctctcaggagctcctttggctgactacaggggttcaagttcacttgagggccagtgagtggctgctcagacagagcccatcactttaagtggtctcaaaggtgagctcttccttgagcatcacagaaagatttgtcacagccctgctggcgggaccgacgcctggaagaggtgttcccggactcttagggtcattctggtgaagctgaggctgggagttgggacttcccagggagggcctgtgggctgaggggcaagtagcacccagcggcccccacatcccagggagggagaaggtggcaaccattttggactcttctttttttgttaaattttatttcattcttctcatgtgggaaggtgatattaatcttttataggaaaggtagttttcttacatttttagcataacagatccccccctttataatagactatttttaaatagatttttttaagagcagttttaggtttccatagagccctgtccccatgtgcacacagcctcccctgtcgtcagcacctgcctcgagtggtgtgtttattatggtcgatgaaccgtggatatctcattactacacagagcccatcatttacatcaggggtccctcttggtggtgcacgttctgtgggctgggacaggtgtagactctgcagtcataaaccattccccaccacacagggcccttagttgtgacagtggaccaccggtgcgctcagtgacagcatgaccatttattatcattgggtttttaatacaggtcgagagctatgaattttgattttccttttaaaaagggatcaggaatacctctactaacaaccaatttgtccccacaatgcctctccctcctgcacgcaatggtggcctatgatcccgatgagagaatcgccgcccaccaggccctgcagcacccctacttccaagaacagaggaaaacagagaagcgggctctgggcagccacagaaaagctggctttccggagcaccctgtggcaccggaaccactcagtaacagctgccagatttccaaggagggcagaaagcagaaacagtccctaaagcaagaggaggaccgtcccaagagacgaggaccggcctatgtcatggaactgcccaaactaaagctttcgggagtggtcagactgtcgtcttactccagccccacgctgcagtccgtgcttggatctggaacaaatggaagagtgccggtgctgagacccttgaagtgcatccctgcgagcaagaagacagatccgcagaaggaccttaagcctgccccgcagcagtgtcgcctgcccaccatagtgcggaaaggcggaagataactgagcagcaccgtcgtctcgacttcggaggcaacaccaagcccgaccgggccaggcctgggtgatctgctgctgagacgccacggagggctggggatgcgcctgcgtccgtttcgcgctggccggggctctgggtgctgccctgcgccctgccgcacccgcggcccgcgcagctgcctaggatgttctgggctaatatacttgtaaaaccaccgcattctagggttttctttcattttcgttaagaatttggggcaggaaatactttgtaactttgtatatgaatcaaaacaaacgagcaggcatttctgtgatgtgttgggcgtggttggaaggtgggttctgcgtgtcccttcccagcgctgctggtcagtcgtggagcgccatcatgtcttaccagtgacgctgctgacacccctgacttttattaaagaataagctgtcgtta

SEQ ID NO: 354867 - DNA, 2875 bp, Homo sapiens
cgcatgcgcaggcgacagctcatggcgttcagggcctgacggttgctagggtgacagggacacaacatggcggcgggatctctaacgctctccttcgagggaccaccacggagatcctagtgcgggaccccgcctcagggaagtggaaagcagggggacaaccttcctgcttctttcttttccgtccagtgtcggcaaggggttgtcaccggcttccgcatccaagatgaagaactataaagcaattggcaaaataggagagggaacgttttctgaagttatgaagatgcaaagcctgagagatggaaactactatgcatgtaaacaaatgaagcagcgctttgaaagtattgagcaagtcaacaacctacgagagatccaagcactgaggcgcctgaatccgcacccaaacattcttatgttgcatgaagtggtttttgacagaaaatctggttctcttgcactaatatgtgaacttatggacatgaatatttatgagctaatacgagggagaagatacccattatcagaaaaaaaaattatgcactatatgtaccagttatgtaagtccctggatcatattcacagaaatggaatatttcacagagatgtaaaaccagaaaatatactaataaagcaggatgtcctgaaattaggggactttggctcctgccggagtgtctattccaagcagccgtacacggaatacatctccacccgctggtaccgggccccggagtgtctcctcactgatgggttctacacgtacaagatggacctgtggagcgccggctgtgtgttctacgagatcgccagtctgcagcccctctttcctggagtaaatgaactggaccaaatctcaaaaatccacgatgtcatcggcacacccgctcagaagatcctcaccaagttcaaacagtaagtattgtgttctgagagtggatgtggacccactcccctgctaggacctgcagcagggcaagcccctccctgtgcctccctcaaacccctctcaggagctcctttggctgactacaggggttcaagttcacttgagggccagtgagtggctgctcagacagagcccatcactttaagtggtctcaaaggtgagctcttccttgagcatcacagaaagatttgtcacagccctgctggcgggaccgacgcctggaagaggtgttcccggactcttagggtcattctggtgaagctgaggctgggagttgggacttcccagggagggcctgtgggctgaggggcaagtagcacccagcggcccccacatcccagggagggagaaggtggcaaccattttggactcttctttttttgttaaattttatttcattcttctcatgtgggaaggtgatattaatcttttataggaaaggtagttttcttacatttttagcataacagatccccccctttataatagactatttttaaatagatttttttaagagcagttttaggtttccatagagccctgtccccatgtgcacacagcctcccctgtcgtcagcacctgcctcgagtggtgtgtttattatggtcgatgaaccgtggatatctcattactacacagagcccatcatttacatcaggggtccctcttggtggtgcacgttctgtgggctgggacaggtgtagactctgcagtcataaaccattccccaccacacagggcccttagttgtgacagtggaccaccggtgcgctcagtgacagcatgaccatttattatcattgggtttttaatacaggtcgagagctatgaattttgattttccttttaaaaagggatcaggaatacctctactaacaaccaatttgtccccacaatgcctctccctcctgcacgcaatggtggcctatgatcccgatgagagaatcgccgcccaccaggccctgcagcacccctacttccaagaacagaggaaaacagagaagcgggctctgggcagccacagaaaagctggctttccggagcaccctgtggcaccggaaccactcagtaacagctgccagatttccaaggagggcagaaagcagaaacagtccctaaagcaagaggaggaccgtcccaagagacgaggaccggcctatgtcatggaactgcccaaactaaagctttcgggagtggtcagactgtcgtcttactccagccccacgctgcagtccgtgcttggatctggaacaaatggaagagtgccggtgctgagacccttgaagtgcatccctgcgagcaagaaggtagcgcggaaccagcttctctgacggcgctgctcttcgacccagcccaggccgccactgaattttgtgtctgtaatttttctttgacagacagatccgcagaaggaccttaagcctgccccgcagcagtgtcgcctgcccaccatagtgcggaaaggcggaagataactgagcagcaccgtcgtctcgacttcggaggcaacaccaagcccgaccgggccaggcctgggtgatctgctgctgagacgccacggagggctggggatgcgcctgcgtccgtttcgcgctggccggggctctgggtgctgccctgcgccctgccgcacccgcggcccgcgcagctgcctaggatgttctgggctaatatacttgtaaaaccaccgcattctagggttttctttcattttcgttaagaatttggggcaggaaatactttgtaactttgtatatgaatcaaaacaaacgagcaggcatttctgtgatgtgttgggcgtggttggaaggtgggttctgcgtgtcccttcccagcgctgctggtcagtcgtggagcgccatcatgtcttaccagtgacgctgctgacacccctgacttttattaaagaataagctgtcgtta

SEQ ID NO: 354868 - DNA, 1897 bp, Homo sapiens
cgcatgcgcaggcgacagctcatggcgttcagggcctgacggttgctagggtgacagggacacaacatggcggcgggatctctaacgctctccttcgagggaccaccacggagatcctagtgcgggaccccgcctcagggaagtggaaagcagggggacaaccttcctgcttctttcttttccgtccagtgtcggcaaggggttgtcaccggcttccgcatccaagatgaagaactataaagcaattggcaaaataggagagggaacgttttctgaagttatgaagatgcaaagcctgagagatggaaactactatgcatgtaaacaaatgaagcagcgctttgaaagtattgagcaagtcaacaacctacgagagatccaagcactgaggcgcctgaatccgcacccaaacattcttatgttgcatgaagtggtttttgacagaaaatctggttctcttgcactaatatgtgaacttatggacatgaatatttatgagctaatacgagggagaagatacccattatcagaaaaaaaaattatgcactatatgtaccagttatgtaagtccctggatcatattcacagaaatggaatatttcacagagatgtaaaaccagaaaatatactaataaagcaggatgtcctgaaattaggggactttggctcctgccggagtgtctattccaagcagccgtacacggaatacatctccacccgctggtaccgggccccggagtgtctcctcactgatgggttctacacgtacaagatggacctgtggagcgccggctgtgtgttctacgagatcgccagtctgcagcccctctttcctggagtaaatgaactggaccaaatctcaaaaatccacgatgtcatcggcacacccgctcagaagatcctcaccaagttcaaacaggatcaggaatacctctactaacaaccaatttgtccccacaatgcctctccctcctgcacgcaatggtggcctatgatcccgatgagagaatcgccgcccaccaggccctgcagcacccctacttccaagaacagaggaaaacagagaagcgggctctgggcagccacagaaaagctggctttccggagcaccctgtggcaccggaaccactcagtaacagctgccagatttccaaggagggcagaaagcagaaacagtccctaaagcaagaggaggaccgtcccaagagacgaggaccggcctatgtcatggaactgcccaaactaaagctttcgggagtggtcagactgtcgtcttactccagccccacgctgcagtccgtgcttggatctggaacaaatggaagagtgccggtgctgagacccttgaagtgcatccctgcgagcaagaagacagatccgcagaaggaccttaagcctgccccgcagcagtgtcgcctgcccaccatagtgcggaaaggcggaagataactgagcagcaccgtcgtctcgacttcggaggcaacaccaagcccgaccgggccaggcctgggtgatctgctgctgagacgccacggagggctggggatgcgcctgcgtccgtttcgcgctggccggggctctgggtgctgccctgcgccctgccgcacccgcggcccgcgcagctgcctaggatgttctgggctaatatacttgtaaaaccaccgcattctagggttttctttcattttcgttaagaatttggggcaggaaatactttgtaactttgtatatgaatcaaaacaaacgagcaggcatttctgtgatgtgttgggcgtggttggaaggtgggttctgcgtgtcccttcccagcgctgctggtcagtcgtggagcgccatcatgtcttaccagtgacgctgctgacacccctgacttttattaaagaataagctgtcgtta

SEQ ID NO: 354869 - DNA, 2046 bp, Homo sapiens
cgcatgcgcaggcgacagctcatggcgttcagggcctgacggttgctagggtgacagggacacaacatggcggcgggatctctaacgctctccttcgagggaccaccacggagatcctagtgcgggaccccgcctcagggaagtggaaagcagggggacaaccttcctgcttctttcttttccgtccagtgtcggcaaggggttgtcaccggcttccgcatccaagatgaagaactataaagcaattggcaaaataggagagggaacgttttctgaagttatgaagatgcaaagcctgagagatggaaactactatgcatgtaaacaaatgaagcagcgctttgaaagtattgagcaagtcaacaacctacgagagatccaagcactgaggcgcctgaatccgcacccaaacattcttatgttgcatgaagtggtttttgacagaaaatctggttctcttgcactaatatgtgaacttatggacatgaatatttatgagctaatacgagggagaagatacccattatcagaaaaaaaaattatgcactatatgtaccagttatgtaagtccctggatcatattcacaggtatgctctcggagatttgacagctctgaaattaataaaatgtgttaacattcagattcaagaatttgaataaatgaagtgtaattctatttttcctttatactgaatgcagaaatggaatatttcacagagatgtaaaaccagaaaatatactaataaagcaggatgtcctgaaattaggggactttggctcctgccggagtgtctattccaagcagccgtacacggaatacatctccacccgctggtaccgggccccggagtgtctcctcactgatgggttctacacgtacaagatggacctgtggagcgccggctgtgtgttctacgagatcgccagtctgcagcccctctttcctggagtaaatgaactggaccaaatctcaaaaatccacgatgtcatcggcacacccgctcagaagatcctcaccaagttcaaacagtcgagagctatgaattttgattttccttttaaaaagggatcaggaatacctctactaacaaccaatttgtccccacaatgcctctccctcctgcacgcaatggtggcctatgatcccgatgagagaatcgccgcccaccaggccctgcagcacccctacttccaagaacagaggaaaacagagaagcgggctctgggcagccacagaaaagctggctttccggagcaccctgtggcaccggaaccactcagtaacagctgccagatttccaaggagggcagaaagcagaaacagtccctaaagcaagaggaggaccgtcccaagagacgaggaccggcctatgtcatggaactgcccaaactaaagctttcgggagtggtcagactgtcgtcttactccagccccacgctgcagtccgtgcttggatctggaacaaatggaagagtgccggtgctgagacccttgaagtgcatccctgcgagcaagaagacagatccgcagaaggaccttaagcctgccccgcagcagtgtcgcctgcccaccatagtgcggaaaggcggaagataactgagcagcaccgtcgtctcgacttcggaggcaacaccaagcccgaccgggccaggcctgggtgatctgctgctgagacgccacggagggctggggatgcgcctgcgtccgtttcgcgctggccggggctctgggtgctgccctgcgccctgccgcacccgcggcccgcgcagctgcctaggatgttctgggctaatatacttgtaaaaccaccgcattctagggttttctttcattttcgttaagaatttggggcaggaaatactttgtaactttgtatatgaatcaaaacaaacgagcaggcatttctgtgatgtgttgggcgtggttggaaggtgggttctgcgtgtcccttcccagcgctgctggtcagtcgtggagcgccatcatgtcttaccagtgacgctgctgacacccctgacttttattaaagaataagctgtcgtta

SEQ ID NO: 354870 - DNA, 1687 bp, Homo sapiens
cgcatgcgcaggcgacagctcatggcgttcagggcctgacggttgctagggtgacagggacacaacatggcggcgggatctctaacgctctccttcgagggaccaccacggagatcctagtgcgggaccccgcctcagggaagtggaaagcagggggacaaccttcctgcttctttcttttccgtccagtgtcggcaaggggttgtcaccggcttccgcatccaagatgaagaactataaagcaattggcaaaataggagagggaacgttttctgaagttatgaagatgcaaagcctgagagatggaaactactatgcatgtaaacaaatgaagcagcgctttgaaagggagaagatacccattatcagaaaaaaaaattatgcactatatgtaccagttatgtaagtccctggatcatattcacagcaggatgtcctgaaattaggggactttggctcctgccggagtgtctattccaagcagccgtacacggaatacatctccacccgctggtaccgggccccggagtgtctcctcactgatgggttctacacgtacaagatggacctgtggagcgccggctgtgtgttctacgagatcgccagtctgcagcccctctttcctggagtaaatgaactggaccaaatctcaaaaatccacgatgtcatcggcacacccgctcagaagatcctcaccaagttcaaacaggatcaggaatacctctactaacaaccaatttgtccccacaatgcctctccctcctgcacgcaatggtggcctatgatcccgatgagagaatcgccgcccaccaggccctgcagcacccctacttccaagaacagaggaaaacagagaagcgggctctgggcagccacagaaaagctggctttccggagcaccctgtggcaccggaaccactcagtaacagctgccagatttccaaggagggcagaaagcagaaacagtccctaaagcaagaggaggaccgtcccaagagacgaggaccggcctatgtcatggaactgcccaaactaaagctttcgggagtggtcagactgtcgtcttactccagccccacgctgcagtccgtgcttggatctggaacaaatggaagagtgccggtgctgagacccttgaagtgcatccctgcgagcaagaagacagatccgcagaaggaccttaagcctgccccgcagcagtgtcgcctgcccaccatagtgcggaaaggcggaagataactgagcagcaccgtcgtctcgacttcggaggcaacaccaagcccgaccgggccaggcctgggtgatctgctgctgagacgccacggagggctggggatgcgcctgcgtccgtttcgcgctggccggggctctgggtgctgccctgcgccctgccgcacccgcggcccgcgcagctgcctaggatgttctgggctaatatacttgtaaaaccaccgcattctagggttttctttcattttcgttaagaatttggggcaggaaatactttgtaactttgtatatgaatcaaaacaaacgagcaggcatttctgtgatgtgttgggcgtggttggaaggtgggttctgcgtgtcccttcccagcgctgctggtcagtcgtggagcgccatcatgtcttaccagtgacgctgctgacacccctgacttttattaaagaataagctgtcgtta

SEQ ID NO: 354871 - DNA, 2344 bp, Homo sapiens
cgcatgcgcaggcgacagctcatggcgttcagggcctgacggttgctagggtgacagggacacaacatggcggcgggatctctaacgctctccttcgagggaccaccacggagatcctagtgcgggaccccgcctcagggaagtggaaagcagggggacaaccttcctgcttctttcttttccgtccagtgtcggcaaggggttgtcaccggcttccgcatccaagatgaagaactataaagcaattggcaaaataggagagggaacgttttctgaagttatgaagatgcaaagcctgagagatggaaactactatgcatgtaaacaaatgaagcagcgctttgaaagtgacagaaaatctggttctcttgcactaatatgtgaacttatggacatgaatatttatgagctaatacgagggagaagatacccattatcagaaaaaaaaattatgcactatatgtaccagttatgtaagtccctggatcatattcacagaaatggaatatttcacagagatgtaaaaccagaaaatatactaataaagcaggatgtcctgaaattaggggactttggctcctgccggagtgtctattccaagcagccgtacacggaatacatctccacccgctggtaccgggccccggagtgtctcctcactgatgggttctacacgtacaagatggacctgtggagcgccggctgtgtgttctacgagatcgccagtctgcagcccctctttcctggagtaaatgaactggaccaaatctcaaaaatccacgatgtcatcggcacacccgctcagaagatcctcaccaagttcaaacagtcgagagctatgaattttgattttccttttaaaaagggatcaggaatacctctactaacaaccaatttgtccccacaatgcctctccctcctgcacgcaatggtggcctatgatcccgatgagagaatcgccgcccaccaggccctgcagcacccctacttccaagaacagagaaacagtccctaaagcaagaggaggaccgtcccaagagacgaggaccggcctatgtcatggaactgcccaaactaaagctttcgggagtggtcagactgtcgtcttactccagccccacgctgcagtccgtgcttggatctggaacaaatggaagagtgccggtgctgagacccttgaagtgcatccctgcgagcaagaaggtagcgcggaaccagcttctctgacggcgctgctcttcgacccagcccaggccgccactgaattttgtgtctgtaatttttctttgacagacagatccgcagaaggaccttaagcctgccccgcagcagtgtcgcctgcccaccatagtgcggaaaggcggaagataactgagcagcaccgtcgtctcgacttcggaggcaacaccaagcccgaccgggccaggcctgggtgatctgctgctgagacgccacggagggctggggatgcgcctgcgtccgtttcgcgctggccggggctctgggtgctgccctgcgccctgccgcacccgcggcccgcgcagctgcctaggatgttctgggctaatatacttgtaaaaccaccgcattctagggttttctttcattttcgttaagaatttggggcaggaaatactttgtaactttgtatatgaatcaaaacaaacgagcaggcatttctgtgatgtgttgggcgtggttggaaggtgggttctgcgtgtcccttcccagcgctgctggtcagtcgtggagcgccatcatgtcttaccagtgacgctgctgacacccctgacttttattaaagaataagctgtcgttaacaaaaaaaaaaaaaaaaaaaaaaaaaaaaacaaacaaaaaaaagacaaaaaaacaaacaacaaaaaaaaacacaaaaacaagggggggggcccacaaaacaacacccgagagggacaaaaaaaccacacaccaacacttgagacaaaaagggccacaaaagaagaccacatataaaaacaacacgcgcacgagataaacaaggagacgaggaacaaccagacacacgaaacaactaggaaaacacacaaaaacggagggcaccaacaccgagaaaaacacaacgcagataaccccacaagaacacaaaacaacaagagcaaaagcgacaccacagcaaacacccgcagcaaagaagtgagcacacagactagatcacagaaaaattacaagcgaggacagaaaacacccaccgaccaactgcaccacacgcaaagaacacgccagcaacgcccgactagcacagaagaactaaaaaagaaccaatacaaaaacaaccggaactcacaagaagagcacagacaac

SEQ ID NO: 354872 - DNA, 1722 bp, Homo sapiens
cgcatgcgcaggcgacagctcatggcgttcagggcctgacggttgctagggtgacagggacacaacatggcggcgggatctctaacgctctccttcgagggaccaccacggagatcctagtgcgggaccccgcctcagggaagtggaaagcagggggacaaccttcctgcttctttcttttccgtccagtgtcggcaaggggttgtcaccggcttccgcatccaagatgaagaactataaagcaattggcaaaataggagagggaacgttttctgaagttatgaagatgcaaagcctgagagatggaaactactatgcatgtaaacaaatgaagcagcgctttgaaagtgacagaaaatctggttctcttgcactaatatgtgaacttatggacatgaatatttatgagctaatacgagggagaagatacccattatcagaaaaaaaaattatgcactatatgtaccagttatgtaagtccctggatcatattcacagaaatggaatatttcacagagatgtaaaaccagaaaatatactaataaagcaggatgtcctgaaattaggggactttggctcctgccggagtgtctattccaagcagccgtacacggaatacatctccacccgctggtaccgggccccggagtgtctcctcactgatgggttctacacgtacaagatggacctgtggagcgccggctgtgtgttctacgagatcgccagtctgcagcccctctttcctggagtaaatgaactggaccaaatctcaaaaatccacgatgtcatcggcacacccgctcagaagatcctcaccaagttcaaacagtcgagagctatgaattttgattttccttttaaaaagggatcaggaatacctctactaacaaccaatttgtccccacaatgcctctccctcctgcacgcaatggtggcctatgatcccgatgagagaatcgccgcccaccaggccctgcagcacccctacttccaagaacagagaaacagtccctaaagcaagaggaggaccgtcccaagagacgaggaccggcctatgtcatggaactgcccaaactaaagctttcgggagtggtcagactgtcgtcttactccagccccacgctgcagtccgtgcttggatctggaacaaatggaagagtgccggtgctgagacccttgaagtgcatccctgcgagcaagaaggtagcgcggaaccagcttctctgacggcgctgctcttcgacccagcccaggccgccactgaattttgtgtctgtaatttttctttgacagacagatccgcagaaggaccttaagcctgccccgcagcagtgtcgcctgcccaccatagtgcggaaaggcggaagataactgagcagcaccgtcgtctcgacttcggaggctctgggtgctgccctgcgccctgccgcacccgcggcccgcgcagctgcctaggatgttctgggctaatatacttgtaaaaccaccgcattctagggttttctttcattttcgttaagaatttggggcaggaaatactttgtaactttgtatatgaatcaaaacaaacgagcaggcatttctgtgatgtgttgggcgtggttggaaggtgggttctgcgtgtcccttcccagcgctgctggtcagtcgtggagcgccatcatgtcttaccagtgacgctgctgacacccctgacttttattaaagaataagctgtcgtta

SEQ ID NO: 354873 - DNA, 1744 bp, Homo sapiens
cgcatgcgcaggcgacagctcatggcgttcagggcctgacggttgctagggtgacagggacacaacatggcggcgggatctctaacgctctccttcgagggaccaccacggagatcctagtgcgggaccccgcctcagggaagtggaaagcagggggacaaccttcctgcttctttcttttccgtccagtgtcggcaaggggttgtcaccggcttccgcatccaagatgaagaactataaagcaattggcaaaataggagagggaacgttttctgaagttatgaagatgcaaagcctgagagatggaaactactatgcatgtaaacaaatgaagcagcgctttgaaagtgacagaaaatctggttctcttgcactaatatgtgaacttatggacatgaatatttatgagctaatacgagggagaagatacccattatcagaaaaaaaaattatgcactatatgtaccagttatgtaagtccctggatcatattcacagaaatggaatatttcacagagatgtaaaaccagaaaatatactaataaagcaggatgtcctgaaattaggggactttggctcctgccggagtgtctattccaagcagccgtacacggaatacatctccacccgctggtaccgggccccggagtgtctcctcactgatgggttctacacgtacaagatggacctgtggagcgccggctgtgtgttctacgagatcgccagtctgcagcccctctttcctggagtaaatgaactggaccaaatctcaaaaatccacgatgtcatcggcacacccgctcagaagatcctcaccaagttcaaacagtcgagagctatgaattttgattttccttttaaaaagggatcaggaatacctctactaacaaccaatttgtccccacaatgcctctccctcctgcacgcaatggtggcctatgatcccgatgagagaatcgccgcccaccaggccctgcagcacccctacttccaagaacagagaaacagtccctaaagcaagaggaggaccgtcccaagagacgaggaccggcctatgtcatggaactgcccaaactaaagctttcgggagtggtcagactgtcgtcttactccagccccacgctgcagtccgtgcttggatctggaacaaatggaagagtgccggtgctgagacccttgaagtgcatccctgcgagcaagaaggtagcgcggaaccagcttctctgacggcgctgctcttcgacccagcccaggccgccactgaattttgtgtctgtaatttttctttgacagacagatccgcagaaggaccttaagcctgccccgcagcagtgtcgcctgcccaccatagtgcggaaaggcggaagataactgagcagcaccgtcgtctcgacttcggaggctctgggtgctgccctgcgccctgccgcacccgcggcccgcgcagctgcctaggatgttctgggctaatatacttgtaaaaccaccgcattctagggttttctttcattttcgttaagaatttggggcaggaaatactttgtaactttgtatatgaatcaaaacaaacgagcaggcatttctgtgatgtgttgggcgtggttggaaggtgggttctgcgtgtcccttcccagcgctgctggtcagtcgtggagcgccatcatgtcttaccagtgacgctgctgacacccctgacttttattaaagaataagctgtcgttatacagtattgcaaaaaaatgtt

SEQ ID NO: 354874 - DNA, 349 bp, Homo sapiens
cgcatgcgcaggcgacagctcatggcgttcagggcctgacggttgctagggtgacagggacacaacatggcggcgggatctctaacgctctccttcgagggaccaccacggagatcctagtgcgggaccccgcctcagggaagtggaaagcagggggacaaccttcctgcttctttcttttccgtccagtgtcggcaaggggttgtcaccggcttccgcatccaagatgaagaactataaagcaattcatcaatttccactcctgcatttcccaaatcaattactgtcttcttcaaagagattgaaggtatattccatgccaccaccagcgaagtgtcatggatatcct

SEQ ID NO: 354875 - DNA, 2116 bp, Homo sapiens
attcctgagtctgtgactggtgctggagttttgagtccacagataaaatgtgtctccttcgtctctactagagaggaaaaagaactggaattggaagaacagggagactgaagggtagcaagagaggctggagaagagagtgaaaagaccgcttacctgatttgaaattgtctgcagcccctctttcctggagtaaatgaactggaccaaatctcaaaaatccacgatgtcatcggcacacccgctcagaagatcctcaccaagttcaaacagtcgagagctatgaattttgattttccttttaaaaagggatcaggaatacctctactaacaaccaatttgtccccacaatgcctctccctcctgcacgcaatggtggcctatgatcccgatgagagaatcgccgcccaccaggccctgcagcacccctacttccaagaacagagaacccagaacggaagcgaggatgaggcctcagccgtcctcctccccattcaaacacgttcatccctcaaccctctgctgagcacctgcatgctgcccggccgcagtgtcacccttcttgtgtgagcctaccctcatccacccacctcaccctcctgaccttaaagaagacaccgggcagaagcacaggggagcccagtcacaccccacactggcgggggcaggccttgcagggagaagcagtaagcagccatctccatcagccatttccatctggcactcagacgtgcacgtcttcgtgtgacaggcggcagcagtgcgaccgtgacctcccatctgctctgctgtccccacacctgcggtgcagccagcctgccacaaggcagctagagtccagctagacccacccctggcacggccgacctcttcctggcttcttctgggcctaatccccgtgcattctccaacgccagaagtgtaagaaagtgcaaggcaacaagtgagaagagcaaacccaaatcgtaccagggaagctagtctttccagggcacctgagtgagggcatgaccagccttgacgctgcctcgctaccatctgcccagggcctgctgaatgcttgagtccatggtgacagtggtgggaacagttacgaggcagttagattttggaagtcatgttggcccacttggctacagagcagtcttaggaacagcaccataaaaataaagacttattcctgacacacatgcatctagagtaaactggggcgtatctgacagcgttagtacagtgatggccaaatgcaaactgcattccagaaccagcgaagggtgacagactgggctgaggcagagctaggactaaccatctcgagtgatgccatctcggggccaacaaaagttttggacacggctggatcatctgaccaaactgctcaaatctttacacaattattgtcctggtattaaactttcacctgccacttccaacaaacaggagacagaataaggagatgaccaggaagatggctggattaagaattctagacttggccgggtgcggtggctcacacctgtaatcctagcatcttgggaggctgaggcaggaggatcgcttgagcccaggagtttgagaccagcctaggcaacataaggagaccccatctctacaaaatatcaaaaaattacccaggtatggtggcacacacgtgtgattccagctactcgggaggctgagatgggaggatcacttgaacccaggaggttggggctacaatgagctatgatcgcaccacttcattccagcctggatgacagaagactcactccatagttcatggccccgtgatccagagtccctgctggcgccttcgagtggggcaggctgagaactcaagctgtaactaatgtctcctccgaagaaaactaaaccgagggctgagctgatgtgaagttttccgtggctgcattcatacaaatggtgaaaatgtagcatacctcccctcaaaagcctgaaagtaaagacatgcccccaatttaatgtgatgaattagagaaataggtttcagacacttcatggtttaaagtctcacaaaataaagctttcgaaggatccagttgtatatgattttttaaaaaaataaataaacattcttctgcttggtagctgcaca

SEQ ID NO: 354876 - DNA, 1220 bp, Homo sapiens
attcctgagtctgtgactggtgctggagttttgagtccacagataaaatgtgtctccttcgtctctactagagaggaaaaagaactggaattggaagaacagggagactgaagggtagcaagagaggctggagaagagagtgaaaagaccgcttacctgatttgaaattgatggtggcgtgggaatgaagaatgtgatatacatctttggagtctgttctgcagcccctctttcctggagtaaatgaactggaccaaatctcaaaaatccacgatgtcatcggcacacccgctcagaagatcctcaccaagttcaaacagtcgagagctatgaattttgattttccttttaaaaagggatcaggaatacctctactaacaaccaatttgtccccacaatgcctctccctcctgcacgcaatggtggcctatgatcccgatgagagaatcgccgcccaccaggccctgcagcacccctacttccaagaacagagaaacagtccctaaagcaagaggaggaccgtcccaagagacgaggaccggcctatgtcatggaactgcccaaactaaagctttcgggagtggtcagactgtcgtcttactccagccccacgctgcagtccgtgcttggatctggaacaaatggaagagtgccggtgctgagacccttgaagtgcatccctgcgagcaagaagacagatccgcagaaggaccttaagcctgccccgcagcagtgtcgcctgcccaccatagtgcggaaaggcggaagataactgagcagcaccgtcgtctcgacttcggaggcaacaccaagcccgaccgggccaggcctgggtgatctgctgctgagacgccacggagggctggggatgcgcctgcgtccgtttcgcgctggccggggctctgggtgctgccctgcgccctgccgcacccgcggcccgcgcagctgcctaggatgttctgggctaatatacttgtaaaaccaccgcattctagggttttctttcattttcgttaagaatttggggcaggaaatactttgtaactttgtatatgaatcaaaacaaacgagcaggcatttctgtgatgtgttgggcgtggttggaaggtgggttctgcgtgtcccttcccagcgctgctggtcagtcgtggagcgccatcatgtcttaccagtgacgctgctgacacccctgacttttattaaagaataagctgtcgtta

SEQ ID NO: 354877 - DNA, 221 bp, Homo sapiens
ggaaagagaaaacagtggttaattgctgtcagaattgaattttgcaaaaccctgaataccatgaaatgtctgtgaatgtgtatatcctttttcacagtcacacacacatcatcataataacttttgagatggtaaataaaatgtatgtacccaaagcttaacaaattcaaatcatatgtgttaagctttgggtacatacattttatttaccatcttgtcga

SEQ ID NO: 354878 - DNA, 2229 bp, Homo sapiens
gagcagagccaacgtgtcagcggcgcccaagcggccccagcgggctcgcgtcgccccgctctcctcaccgagccgccaatcggctcaggatccgcccctgacgacgcgggccccgcccctggagacacgcgccgcgcagtcgtcacccgcccgggatcaggaggccgggggcgcccgccggtcgggcctgggcggccgccatgaagctgacgcggaagatggttctgacccgggccaaggcctcggagctgcacagcgtgcgcaagctcaactgctggggcagccgcctcacagatatctccatttgccaggagatgcccagcctggaggtgatcacgctcagtgtcaacagcatctccaccctggagcctgtgagccggtgccagcgcctgagtgagctgtacctgcggaggaaccgcatccccagcctggctgagctcttctacctgaaggggctgccgcgtctgcgggtgctgtggctggccgagaacccgtgctgcggcaccagcccccaccgctaccgcatgaccgtgctgcgcaccctgccgcgcctacagaagctggacaaccaggctgtgacggaggaggagctgtcccgtgcactgagtgagggagaggagatcactgcggccccagagagagagggcacaggccacggcggccccaagctatgctgcacactgagctccctcagctccgctgctgagactggccgggacccgctggacagcgaggaggaggcaaccagcggcgcccaggatgaacgtggcctgaagccgccttcccggggccagtttccttccctctcagccagggatgcctcgagcagccacaggggcaggaacgtcctgactgccatcctgctgctgctgcgggagctggatgcagaggggctggaggccgtgcagcagactgtgggcagccggctgcaggccctgcgtggggaagaggtgcaggagcacgccgagtgaccgcaggacctgaacgccgctccagcctccacggggaccccagcgtcttccccagcccccgggagctggagggtggctgccatggccgcagccccggccccacacaaaagcctccccggtttgccacatcggccgagggcaggagtgggtgttaggtactggctaaccggggcggtggagatgcctgtctacaccagtcctgtccccaggactccccttctgtggtctggaggttctaggctggcctgggctcttaaagggaggattttgcaggctgtcctccctaataaaagattttcccaaggttgatctggaggtgacgtttcccaaggcatggttgtgacagtcttcctgaaagcaagggccgtttctccacagaatgaggaggtcttcacggatggctttgccgattccagcccttggtccttggatagatttctgttgggcaagggagacttcgagaatgctggcacccatagcgacatctgccctgagctgctcagcaggcaggcagcagcctcccgcacccatgggagagagttttgttttcttggccgggctgggcaggtgcgccttcctttctctctcctgtgaagaactgcaggagggccctcagctgtgaggttgtggatgaacaggcctgttcgccctggggtccgggcctggcacaggaagcagctagactaggggagtccttggagcatctgagaggggttttctttcctctgggaagagtcgcaagtcttatgaggatgccacaatctgggcagtgacccgtggccctggggaccttcctagtgccccccaaaaccaaggaagcattcacgtgagatggggagtcagccttccagctggtgtgtaggaaagccaggtccctgggcccttgtcccatgtggggttgagatccagatctccatgagatattcccatcctccgccgagcggtgatgcgtgaccgtgtgtgcaggccgctgttctcccaagctcggggccatgccgtgccaccgtcaccagagccagctgcagcactggggcagccactgtcgccggacttggggaagcccagggtgaagacagtcactcatccgtgcaagctctccagaaggaagggatgcaagctctccagaaggggtgtgatctctgagcagtggggagtggagtcaccactcgggacatagagggtggacagttcaggcctgtgtctgcctccttgggactgtggagtgggtgccctcagtaaagcgctttgttggaatggt

SEQ ID NO: 354879 - DNA, 205 bp, Homo sapiens
  misc_feature (9)..(9): n is a, c, g, or t
gcgggccgncttactaactacctaattaccgggctggcgagaaagacgacagaagggatgcaagctctccagaaggggtgtgatctctgagcagtggggagtggagtcaccactcgggacatagagggtggacagttcaggcctgtgtctgcctccttgggactgtggagtgggtgccctcagtaaagcgctttgttggaatggt

SEQ ID NO: 354880 - DNA, 195 bp, Homo sapiens
gcggccgcctactactactatacggtttcgagaagacgacagaagggatgcaagctctccagaaggggtgtgatctctgagcagtggggagtggagtcaccactcgggacatagagggtggacagttcaggcctgtgtctgcctccttgggactgtggagtgggtgccctcagtaaagcgctttgttggaatggt

SEQ ID NO: 354881 - DNA, 890 bp, Homo sapiens
ttaatttgaactgtaccttttcttaaagacaaaaaaaagcctggatacgtggcatctgggtgtaatctgttttgtgctgtaactgaaatactgcatgtttagcagtgaatatacaaacgtaccatgtccatagacacgagtcacttatacatgggacgcatctgaccaggctgtgagctgctggtgccatgcctggcgtatggtgggctctcacatatgtgggagctttgcaggttgtgaggctttgtggaccaccccgggcacctcacccctgaattgacagtaccaatgtgatctgagatccagtctcaagcctgtcttccttttggcctagacctgttatcaagaagggatttccatcctttccttgctttctatccctgcgtaggggacattggggtccccttacctgatgtcctttgagggcatctaaagtaatgaatgctctgtctccactgctggcagcatctgacagcaacgatgctgtcgtaaaatttaataaagacagagtgcgtgcaaggaggagcctcacatttctccttcagtctgcggggcgtctgggctgcaaggtggtgtcagaggagaacctggcatactcgtgggcattcatcctgggcacactggctgagcagggccgctcccctcaggccctgggcattcaccctgggcacactggctgagcagggccgctcccctcaggccctgggcattcaccctgggcacactggctgagcagggccgctcccctcaggccctgggcattcaccctgggcacactggctgagtaaggccgtgcccctcaggccccggaagtgggttggccgtggcttcgacagttctctgtggctgatggcagtgcggccgcgatgccctgctgtgccatgcttgct

SEQ ID NO: 354882 - DNA, 776 bp, Homo sapiens
acatacagtttagttgaaaatcagctaaaacaattgtttacacctttgccagttatctgggcaaccttccttttttgccatgccattaaaatcctagaatcttaaggtttgtagggagtcatcggtgatttttggaatttttgtcttcagtgttttttattcaactttaacaaaattaaagtatgtatcttttctctccccaggggcagccgcctcacagatgtaagtattgcctcacagatgtaagtattgcactgatcatctccaaatagcctcaacccaaatgttgtagcttctttcccaagagaatttttaagttgacaaaactgcacctatcaattcagtcccacacttggtactttgttcacttagcggttttcattctgcagaaccactaatggaaaaacaattctctagtgccaggcttattttgcagttcccgtcaacatccctataaatgaaacaccctttgtcacttggtcgcagaggaggggagcaatagtttggaacttgctctcacctggaaaggaatcccaggagggcttgttttactttgttacggggaagttgaaggtctacaccccctcttcttggtcacatctagccttgtacccccttgccgctgccccaaaggcaggcagagaataagccctgctgggagaacttgagtgtgtgcgtctgtgaaagatttttttcttctctccctcattgtctttctcagtccaaaatgtccccaacttacacagggatcgcataccaattgtttctttcttttt

SEQ ID NO: 354883 - DNA, 691 bp, Homo sapiens
  misc_feature (27)..(27): n is a, c, g, or t
tatcaattcgggcaggaggaggacggncggacggacggacggggcgtctgggctgcaaggtggtgtcagaggggaacctggcatactcgtgggcatctaaagtaatgaatgctctgtctccactgctggcagcatctgacagcaacgatgctgtcgtaaaatttaataaagacagagtgcgtgcaaggaggagcctcacatttctccttcagtctgcggggcgtctgggctgcaaggtggtgtcagaggagaacctggcatactcgtgggcattcatcctgggcacactggctgagcagggccgctcccctcagggtggccacatctgccctgggacccccagagtcctggcctcttctgccccccagtgccaccactgcctaccagtttctctgcaccccatgacctgtgcccgtcttctggggtcactgccctcccagcagactaagggaagcttgaatgaacaaatgttactggactttcaggcagttggggtgtatttgggggctctggggaagagaagagctccctttatccctgaattccctcctgcctactgtgggacccacggagggagcagacgctcatggctcaccactgcccaccagacgctggatgggcgccttctgtgggtttccgcatttaaaagctcacaagggtttaaaccctgtggggaaggcccacccctctg

SEQ ID NO: 354884 - DNA, 2043 bp, Homo sapiens
gagcagagccaacgtgtcagcggcgcccaagcggccccagcgggctcgcgtcgccccgctctcctcaccgagccgccaatcggctcaggatccgcccctgacgacgcgggccccgcccctggagacacgcgccgcgcagtcgtcacccgcccgggatcaggaggccgggggcgcccgccggtcgggcctgggcggccgccatgaagctgacgcggaagatggttctgacccgggccaaggcctcggagctgcacagcgtgcgcaagctcaactgctggggcagccgcctcacagatatctccatttgccaggagatgcccagcctggaggtgatcacgctcagtgtcaacagcatctccaccctggagcctgtgagccggtgccagcgcctgagtgagctgtacctgcggaggaaccgcatccccagcctggctgagctcttctacctgaaggggctgccgcgtctgcgggtgctgtggctggccgagaacccgtgctgcggcaccagcccccaccgctaccgcatgaccgtgctgcgcaccctgccgcgcctacagaagctggacaaccaggctgtgacggaggaggagctgtcccgtgcactgagtgagggagaggagatcactgcggccccagagagagagggcacaggccacggcggccccaagctatgctgcacactgagctccctcagctccgctgctgagactggccgggacccgctggacagcgaggaggaggcaaccagcggcgcccaggatgaacgtggcctgaagccgccttcccggggccagtttccttccctctcagccagggatgcctcgagcagccacaggggcaggaacgtcctgactgccatcctgctgctgctgcgggagctggatgcagaggggctggaggccgtgcagcagactgtgggcagccggctgcaggccctgcgtggggaagaggtgcaggagcacgccgagtgaccgcaggacctgaacgccgctccagcctccacggggaccccagcgtcttccccagcccccgggagctggagggtggctgccatggccgcagccccggccccacacaaaagcctccccggtttgccacatcggccgagggcaggagtgggtgttaggtactggctaaccggggcggtggagatgcctgtctacaccagtcctgtccccaggactccccttctgtggtctggaggttctaggctggcctgggctcttaaagggaggattttgcaggctgtcctccctaataaaagattttcccaaggttgatctggaggtgacgtttcccaaggcatggttgtgacagtcttcctgaaagcaagggccgtttctccacagaatgaggaggtcttcacggatggctttgccgattccagcccttggtccttggatagatttctgttgggcaagggagacttcgagaatgctggcacccatagcgacatctgccctgagctgctcagcaggcaggcagcagcctcccgcacccatgggagagagttttgttttcttggccgggctgggcaggtgcgccttcctttctctctcctgtgaagaactgcaggagggccctcagctgtgaggttgtggatgaacaggcctgttcgccctggggtccgggcctggcacaggaagcagctagactaggggagtccttggagcatctgagaggggttttctttcctctgggaagagtcgcaagtcttatgaggatgccacaatctgggcagtgacccgtggccctggggaccttcctagtgccccccaaaaccaaggaagcattcacgtgagatggggagtcagccttccagctggtgtgtaggaaagccaggtccctgggcccttgtcccatgtggggttgagatccagatctccatgaaagggatgcaagctctccagaaggggtgtgatctctgagcagtggggagtggagtcaccactcgggacatagagggtggacagttcaggcctgtgtctgcctccttgggactgtggagtgggtgccctcagtaaagcgctttgttggaatggt

SEQ ID NO: 354885 - DNA, 1642 bp, Homo sapiens
gagcagagccaacgtgtcagcggcgcccaagcggccccagcgggctcgcgtcgccccgctctcctcaccgagccgccaatcggctcaggatccgcccctgacgacgcgggccccgcccctggagacacgcgccgcgcagtcgtcacccgcccgggatcaggaggccgggggcgcccgccggtcgggcctgggcggccgccatgaagctgacgcggaagatggttctgacccgggccaaggcctcggagctgcacagcgtgcgcaagctcaactgctggggcagccgcctcacagatatctccatttgccaggagatgcccagcctggaggtgatcacgctcagtgtcaacagcatctccaccctggagcctgtgagccggtgccagcgcctgagtgagctgtacctgcggaggaaccgcatccccagcctggctgagctcttctacctgaaggggctgccgcgtctgcgggtgctgtggctggccgagaacccgtgctgcggcaccagcccccaccgctaccgcatgaccgtgctgcgcaccctgccgcgcctacagaagctggacaaccaggctgtgacggaggaggagctgtcccgtgcactgagtgagggagaggagatcactgcggccccagagagagagggcacaggccacggcggccccaagctatgctgcacactgagctccctcagctccgctgctgagactggccgggacccgctggacagcgaggaggaggcaaccagcggcgcccaggatgaacgtggcctgaagccgccttcccggggccagtttccttccctctcagccagggatgcctcgagcagccacaggggcaggaacgtcctgactgccatcctgctgctgctgcgggagctggatgcagaggggctggaggccgtgcagcagactgtgggcagccggctgcaggccctgcgtggggaagaggtgcaggagcacgccgagtgaccgcaggacctgaacgccgctccagcctccacggggaccccagcgtcttccccagcccccgggagctggagggtggctgccatggccgcagccccggccccacacaaaagcctccccggtttgccacatcggccgagggcaggagtgggtgttaggtactggctaaccggggcggtggagatgcctgtctacaccagtcctgtccccaggactccccttctgtggtctggaggttctaggctggcctgggctcttaaagggaggattttgcaggctgtcctccctaataaaagattttcccaaggttgatctggaggtgacgtttcccaaggcatggttgtgacagtcttcctgaaagcaagggccgtttctccacagaatgaggaggtcttcacggatggctttgccgattccagcccttggtccttggatagatttctgttgggcaagggagacttcgagaatgctggcacccatagcgacatctgccctgagctgctcagcaggcaggcagcagcaagggatgcaagctctccagaaggggtgtgatctctgagcagtggggagtggagtcaccactcgggacatagagggtggacagttcaggcctgtgtctgcctccttgggactgtggagtgggtgccctcagtaaagcgctttgttggaatggt

SEQ ID NO: 354886 - DNA, 2152 bp, Homo sapiens
  misc_feature (66)..(67): n is a, c, g, or t
  misc_feature (107)..(107): n is a, c, g, or t
  misc_feature (112)..(112): n is a, c, g, or t
  misc_feature (114)..(114): n is a, c, g, or t
  misc_feature (117)..(117): n is a, c, g, or t
  misc_feature (119)..(119): n is a, c, g, or t
  misc_feature (121)..(121): n is a, c, g, or t
tcagcagagtgaccgcgccgtgtcaactggcctcaccgtgcaggcgggtgtgggggtcagcgagannagacgcttcctcccaggggtgtccgcagactgcccagagngagcncntcncngnttagagatggagtttcactgtgtcggccaggctggtctcaaaccccctgagttcaggtgatccacctgcctcagcctcgcaaagtattggaattacagatctccatttgccaggagatgcccagcctggaggtgatcacgctcagtgtcaacagcatctccaccctggagcctgtgagccggtgccagcgcctgagtgagctgtacctgcggaggaaccgcatccccagcctggctgagctcttctacctgaaggggctgccgcgtctgcgggtgctgtggctggccgagaacccgtgctgcggcaccagcccccaccgctaccgcatgaccgtgctgcgcaccctgccgcgcctacagaagctggacaaccaggctgtgacggaggaggagctgtcccgtgcactgagtgagggagaggagatcactgcggccccagagagagagggcacaggccacggcggccccaagctatgctgcacactgagctccctcagctccgctgctgagactggccgggacccgctggacagcgaggaggaggcaaccagcggcgcccaggatgaacgtggcctgaagccgccttcccggggccagtttccttccctctcagccagggatgcctcgagcagccacaggggcaggaacgtcctgactgccatcctgctgctgctgcgggagctggatgcagaggggctggaggccgtgcagcagactgtgggcagccggctgcaggccctgcgtggggaagaggtgcaggagcacgccgagtgaccgcaggacctgaacgccgctccagcctccacggggaccccagcgtcttccccagcccccgggagctggagggtggctgccatggccgcagccccggccccacacaaaagcctccccggtttgccacatcggccgagggcaggagtgggtgttaggtactggctaaccggggcggtggagatgcctgtctacaccagtcctgtccccaggactccccttctgtggtctggaggttctaggctggcctgggctcttaaagggaggattttgcaggctgtcctccctaataaaagattttcccaaggttgatctggaggtgacgtttcccaaggcatggttgtgacagtcttcctgaaagcaagggccgtttctccacagaatgaggaggtcttcacggatggctttgccgattccagcccttggtccttggatagatttctgttgggcaagggagacttcgagaatgctggcacccatagcgacatctgccctgagctgctcagcaggcaggcagcagcctcccgcacccatgggagagagttttgttttcttggccgggctgggcaggtgcgccttcctttctctctcctgtgaagaactgcaggagggccctcagctgtgaggttgtggatgaacaggcctgttcgccctggggtccgggcctggcacaggaagcagctagactaggggagtccttggagcatctgagaggggttttctttcctctgggaagagtcgcaagtcttatgaggatgccacaatctgggcagtgacccgtggccctggggaccttcctagtgccccccaaaaccaaggaagcattcacgtgagatggggagtcagccttccagctggtgtgtaggaaagccaggtccctgggcccttgtcccatgtggggttgagatccagatctccatgagatattcccatcctccgccgagcggtgatgcgtgaccgtgtgtgcaggccgctgttctcccaagctcggggccatgccgtgccaccgtcaccagagccagctgcagcactggggcagccactgtcgccggacttggggaagcccagggtgaagacagtcactcatccgtgcaagctctccagaaggaagggatgcaagctctccagaaggggtgtgatctctgagcagtggggagtggagtcaccactcgggacatagagggtggacagttcaggcctgtgtctgcctccttgggactgtggagtgggtgccctcagtaaagcgctttgttggaatggt

SEQ ID NO: 354887 - DNA, 2836 bp, Homo sapiens
gagcagagccaacgtgtcagcggcgcccaagcggccccagcgggctcgcgtcgccccgctctcctcaccgagccgccaatcggctcaggatccgcccctgacgacgcgggccccgcccctggagacacgcgccgcgcagtcgtcacccgcccgggatcaggaggccgggggcgcccgccggtcgggcctgggcggccgccatgaagctgacgcggaagatggttctgacccgggccaaggcctcggagctgcacagcgtgcgcaagctcaactgctggggcagccgcctcacagatatctccatttgccaggagatgcccagcctggaggtgatcacgctcagtgtcaacagcatctccaccctggagcctgtgagccggtgccagcgcctgagtgagctgtacctgcggaggaaccgcatccccagcctggctgagctcttctacctgaaggggctgccgcgtctgcgggtgctgtggctggccgagaacccgtgctgcggcaccagcccccaccgctaccgcatgaccgtgctgcgcaccctgccgcgcctacagaagctggacaaccaggatgtgtcctgtgaagtctcctccagaggctgttcccctggcttctgtgtctcctcttgatcccgccacccgaatgcagcagcgcagcgtagggtccctcctgggactgacacgccagcaccgacacagttttccaggctgtggtttcatgctgtttgttcatccttggcattctcagcacactagtgtctcatccttgtcaggtatacagacaccactattttctcccagacaattttattgatattaataatataaacttcagggaaattgatatatgagagaaatggaataaattcaatatggtctgttcctttttctattgtgtcgtagttgaggttttgaggagtatttgcttctggccaaggctggtgttgagattcctgagcagccctccaccatctgttgtgtgtcagcctgtgccaggctggggatgggacagtgaggaaccggctgctactctgggagttgtccctggaggtggatacacgtgcatgcatttcacaagcagactgtgcctgaagccacagtgaggacgggagctgcagtgcatgtggcctgcacgtgggtgaggccactcatgctgtcttctgtctttcatcccaaagctgtgacggaggaggagctgtcccgtgcactgagtgagggagaggagatcactgcggccccagagagagagggcacaggccacggcggccccaagctatgctgcacactgagctccctcagctccgctgctgagactggccgggacccgctggacagcgaggaggaggcaaccagcggcgcccaggatgaacgtggcctgaagccgccttcccggggccagtttccttccctctcagccagggatgcctcgagcagccacaggggcaggaacgtcctgactgccatcctgctgctgctgcgggagctggatgcagaggggctggaggccgtgcagcagactgtgggcagccggctgcaggccctgcgtggggaagaggtgcaggagcacgccgagtgaccgcaggacctgaacgccgctccagcctccacggggaccccagcgtcttccccagcccccgggagctggagggtggctgccatggccgcagccccggccccacacaaaagcctccccggtttgccacatcggccgagggcaggagtgggtgttaggtactggctaaccggggcggtggagatgcctgtctacaccagtcctgtccccaggactccccttctgtggtctggaggttctaggctggcctgggctcttaaagggaggattttgcaggctgtcctccctaataaaagattttcccaaggttgatctggaggtgacgtttcccaaggcatggttgtgacagtcttcctgaaagcaagggccgtttctccacagaatgaggaggtcttcacggatggctttgccgattccagcccttggtccttggatagatttctgttgggcaagggagacttcgagaatgctggcacccatagcgacatctgccctgagctgctcagcaggcaggcagcagcctcccgcacccatgggagagagttttgttttcttggccgggctgggcaggtgcgccttcctttctctctcctgtgaagaactgcaggagggccctcagctgtgaggttgtggatgaacaggcctgttcgccctggggtccgggcctggcacaggaagcagctagactaggggagtccttggagcatctgagaggggttttctttcctctgggaagagtcgcaagtcttatgaggatgccacaatctgggcagtgacccgtggccctggggaccttcctagtgccccccaaaaccaaggaagcattcacgtgagatggggagtcagccttccagctggtgtgtaggaaagccaggtccctgggcccttgtcccatgtggggttgagatccagatctccatgagatattcccatcctccgccgagcggtgatgcgtgaccgtgtgtgcaggccgctgttctcccaagctcggggccatgccgtgccaccgtcaccagagccagctgcagcactggggcagccactgtcgccggacttggggaagcccagggtgaagacagtcactcatccgtgcaagctctccagaaggaagggatgcaagctctccagaaggggtgtgatctctgagcagtggggagtggagtcaccactcgggacatagagggtggacagttcaggcctgtgtctgcctccttgggactgtggagtgggtgccctcagtaaagcgctttgttggaatggt

SEQ ID NO: 354888 - DNA, 2770 bp, Homo sapiens
gagcagagccaacgtgtcagcggcgcccaagcggccccagcgggctcgcgtcgccccgctctcctcaccgagccgccaatcggctcaggatccgcccctgacgacgcgggccccgcccctggagacacgcgccgcgcagtcgtcacccgcccgggatcaggaggccgggggcgcccgccggtcgggcctgggcggccgccatgaagctgacgcggaagatggttctgacccgggccaaggcctcggagctgcacagcgtgcgcaagctcaactgctgtgtcaacagcatctccaccctggagcctgtgagccggtgccagcgcctgagtgagctgtacctgcggaggaaccgcatccccagcctggctgagctcttctacctgaaggggctgccgcgtctgcgggtgctgtggctggccgagaacccgtgctgcggcaccagcccccaccgctaccgcatgaccgtgctgcgcaccctgccgcgcctacagaagctggacaaccaggatgtgtcctgtgaagtctcctccagaggctgttcccctggcttctgtgtctcctcttgatcccgccacccgaatgcagcagcgcagcgtagggtccctcctgggactgacacgccagcaccgacacagttttccaggctgtggtttcatgctgtttgttcatccttggcattctcagcacactagtgtctcatccttgtcaggtatacagacaccactattttctcccagacaattttattgatattaataatataaacttcagggaaattgatatatgagagaaatggaataaattcaatatggtctgttcctttttctattgtgtcgtagttgaggttttgaggagtatttgcttctggccaaggctggtgttgagattcctgagcagccctccaccatctgttgtgtgtcagcctgtgccaggctggggatgggacagtgaggaaccggctgctactctgggagttgtccctggaggtggatacacgtgcatgcatttcacaagcagactgtgcctgaagccacagtgaggacgggagctgcagtgcatgtggcctgcacgtgggtgaggccactcatgctgtcttctgtctttcatcccaaagctgtgacggaggaggagctgtcccgtgcactgagtgagggagaggagatcactgcggccccagagagagagggcacaggccacggcggccccaagctatgctgcacactgagctccctcagctccgctgctgagactggccgggacccgctggacagcgaggaggaggcaaccagcggcgcccaggatgaacgtggcctgaagccgccttcccggggccagtttccttccctctcagccagggatgcctcgagcagccacaggggcaggaacgtcctgactgccatcctgctgctgctgcgggagctggatgcagaggggctggaggccgtgcagcagactgtgggcagccggctgcaggccctgcgtggggaagaggtgcaggagcacgccgagtgaccgcaggacctgaacgccgctccagcctccacggggaccccagcgtcttccccagcccccgggagctggagggtggctgccatggccgcagccccggccccacacaaaagcctccccggtttgccacatcggccgagggcaggagtgggtgttaggtactggctaaccggggcggtggagatgcctgtctacaccagtcctgtccccaggactccccttctgtggtctggaggttctaggctggcctgggctcttaaagggaggattttgcaggctgtcctccctaataaaagattttcccaaggttgatctggaggtgacgtttcccaaggcatggttgtgacagtcttcctgaaagcaagggccgtttctccacagaatgaggaggtcttcacggatggctttgccgattccagcccttggtccttggatagatttctgttgggcaagggagacttcgagaatgctggcacccatagcgacatctgccctgagctgctcagcaggcaggcagcagcctcccgcacccatgggagagagttttgttttcttggccgggctgggcaggtgcgccttcctttctctctcctgtgaagaactgcaggagggccctcagctgtgaggttgtggatgaacaggcctgttcgccctggggtccgggcctggcacaggaagcagctagactaggggagtccttggagcatctgagaggggttttctttcctctgggaagagtcgcaagtcttatgaggatgccacaatctgggcagtgacccgtggccctggggaccttcctagtgccccccaaaaccaaggaagcattcacgtgagatggggagtcagccttccagctggtgtgtaggaaagccaggtccctgggcccttgtcccatgtggggttgagatccagatctccatgagatattcccatcctccgccgagcggtgatgcgtgaccgtgtgtgcaggccgctgttctcccaagctcggggccatgccgtgccaccgtcaccagagccagctgcagcactggggcagccactgtcgccggacttggggaagcccagggtgaagacagtcactcatccgtgcaagctctccagaaggaagggatgcaagctctccagaaggggtgtgatctctgagcagtggggagtggagtcaccactcgggacatagagggtggacagttcaggcctgtgtctgcctccttgggactgtggagtgggtgccctcagtaaagcgctttgttggaatggt

SEQ ID NO: 354889 - DNA, 2097 bp, Homo sapiens
tttgagttcagggcctggccttcctacagctctctcctcggcccaggtcctgctgcacgtgacttgtgacatccgatttaggcttctcaggagagggcagggacacaggtcccatgagtgccttttactgggggtggggattgagaggtggccctgggggccctggccacgtccctcgctgactgtgctggtctccgtgcagtgtcaacagtgtcaacagcatctccaccctggagcctgtgagccggtgccagcgcctgagtgagctgtacctgcggaggaaccgcatccccagcctggctgagctcttctacctgaaggggctgccgcgtctgcgggtgctgtggctggccgagaacccgtgctgcggcaccagcccccaccgctaccgcatgaccgtgctgcgcaccctgccgcgcctacagaagctggacaaccaggctgtgacggaggaggagctgtcccgtgcactgagtgagggagaggagatcactgcggccccagagagagagggcacaggccacggcggccccaagctatgctgcacactgagctccctcagctccgctgctgagactggccgggacccgctggacagcgaggaggaggcaaccagcggcgcccaggatgaacgtggcctgaagccgccttcccggggccagtttccttccctctcagccagggatgcctcgagcagccacaggggcaggaacgtcctgactgccatcctgctgctgctgcgggagctggatgcagaggggctggaggccgtgcagcagactgtgggcagccggctgcaggccctgcgtggggaagaggtgcaggagcacgccgagtgaccgcaggacctgaacgccgctccagcctccacggggaccccagcgtcttccccagcccccgggagctggagggtggctgccatggccgcagccccggccccacacaaaagcctccccggtttgccacatcggccgagggcaggagtgggtgttaggtactggctaaccggggcggtggagatgcctgtctacaccagtcctgtccccaggactccccttctgtggtctggaggttctaggctggcctgggctcttaaagggaggattttgcaggctgtcctccctaataaaagattttcccaaggttgatctggaggtgacgtttcccaaggcatggttgtgacagtcttcctgaaagcaagggccgtttctccacagaatgaggaggtcttcacggatggctttgccgattccagcccttggtccttggatagatttctgttgggcaagggagacttcgagaatgctggcacccatagcgacatctgccctgagctgctcagcaggcaggcagcagcctcccgcacccatgggagagagttttgttttcttggccgggctgggcaggtgcgccttcctttctctctcctgtgaagaactgcaggagggccctcagctgtgaggttgtggatgaacaggcctgttcgccctggggtccgggcctggcacaggaagcagctagactaggggagtccttggagcatctgagaggggttttctttcctctgggaagagtcgcaagtcttatgaggatgccacaatctgggcagtgacccgtggccctggggaccttcctagtgccccccaaaaccaaggaagcattcacgtgagatggggagtcagccttccagctggtgtgtaggaaagccaggtccctgggcccttgtcccatgtggggttgagatccagatctccatgagatattcccatcctccgccgagcggtgatgcgtgaccgtgtgtgcaggccgctgttctcccaagctcggggccatgccgtgccaccgtcaccagagccagctgcagcactggggcagccactgtcgccggacttggggaagcccagggtgaagacagtcactcatccgtgcaagctctccagaaggaagggatgcaagctctccagaaggggtgtgatctctgagcagtggggagtggagtcaccactcgggacatagagggtggacagttcaggcctgtgtctgcctccttgggactgtggagtgggtgccctcagtaaagcgctttgttggaatggt

SEQ ID NO: 354890 - DNA, 1366 bp, Homo sapiens
  misc_feature (1286)..(1286): n is a, c, g, or t
gagcagagccaacgtgtcagcggcgcccaagcggccccagcgggctcgcgtcgccccgctctcctcaccgagccgccaatcggctcaggatccgcccctgacgacgcgggccccgcccctggagacacgcgccgcgcagtcgtcacccgcccgggatcaggaggccgggggcgcccgccggtcgggcctgggcggccgccatgaagctgacgcggaagatggttctgacccgggccaaggcctcggagctgcacagcgtgcgcaagctcaactgctggggcagccgcctcacagatatctccatttgccaggagatgcccagcctggaggtgatcacgctcagtgtcaacagcatctccaccctggagcctgtgagccggtgccagcgcctgagtgagctgtacctgcggaggaaccgcatccccagcctggctgagctcttctacctgaaggggctgccgcgtctgcgggtgctgtggctggccgagaacccgtgctgcggcaccagcccccaccgctaccgcatgaccgtgctgcgcaccctgccgcgcctacagaagctggacaaccaggctgtgacggaggaggagctgtcccgtgcactgagtgagggagaggagatcactgcggccccagagagagagggcacaggccacggcggccccaagctatgctgcacactgagctccctcagctccgctgctgagactggccgggacccgctggacagcgaggaggaggcaaccagcggcgcccaggatgaacgtggcctgaagccgccttcccggggccagtttccttccctctcagccagggatgcctcgagcagccacaggggcaggaacgtcctgactgccatcctgctgctgctgcgggagctggatgcagaggggctggaggccgtgcagcagactgtgggcagccggctgcaggccctgcgtggggaagaggtgcaggagcacgccgagtgaccgcaggacctgaacgccgctccagcctccacggggaccccagcgtcttccccagcccccgggagctggagggtggctgccatggccgcagccccggccccacacaaaagcctccccggtttgccacatcggccgagggcaggagtgggtgttaggtactggctaaccggggcggtggagatgcctgtctacaccagtcctgtccccaggactccccttctgtggtctggaggttctaggctggcctgggctcttaaagggaggattttgcaggctgtcctccctaataaaagattttcccagcgtaaaaaccanaaaaaaactcgagcggggcccggaccaattcgcctaagtgagcggatacaatcactgcccgcgtttacacggtggactgg

SEQ ID NO: 354891 - DNA, 1037 bp, Homo sapiens
ccgggccctgctgggctgagggcaacaggagtcacgtggaagaggtgccacacacgcgtccacaggcggggctcctctgctcagattctccgagtgtgccggtcagtcacttggacggcccacacccccgggaccagtcgctccgtggtggggcaccgctggccaggccccagcccttgtggagggaagcagcctcgctgtgccgggtgggcttagtccgcacccctctgccctcagaacgtcctgactgccatcctgctgctgctgcgggagctggatgcagaggggctggaggccgtgcagcagactgtgggcagccggctgcaggccctgcgtggggaagaggtgcaggagcacgccgagtgaccgcaggacctgaacgccgctccagcctccacggggaccccagcgtcttccccagcccccgggagctggagggtggctgccatggccgcagccccggccccacacaaaagcctccccggtttgccacatcggccgagggcaggagtgggtgttaggtactggctaaccggggcggtggagatgcctgtctacaccagtcctgtccccaggactccccttctgtggtctggaggttctaggctggcctgggctcttaaagggaggattttgcaggctgtcctccctaataaaagattttcccaaggttgatctggaggtgacgtttcccaaggcatggttgtgacagtcttcctgaaagcaagggccgtttctccacagaatgaggaggtcttcacggatggctttgccgattccagcccttggtccttggatagatttctgttgggcaagggagacttcgagaatgctggcacccatagcgacatctgccctgagctgctcagcaggcaggcagcagcaagggatgcaagctctccagaaggggtgtgatctctgagcagtggggagtggagtcaccactcgggacatagagggtggacagttcaggcctgtgtctgcctccttgggactgtggagtgggtgccctcagtaaagcgctttgttggaatggt

SEQ ID NO: 354892 - DNA, 629 bp, Homo sapiens
cgcccttgggcgcacttctgagagaggttccacgggagatacaagatgagtggccatagggagtccttggagcatctgagaggggttttctttcctctgggaagagtcgcaagtcttatgaggatgccacaatctgggcagtgacccgtggccctggggaccttcctagtgccccccaaaaccaaggaagcattcacgtgagatggggagtcagccttccagctggtgtgtaggaaagccaggtccctgggcccttgtcccatgtggggttgagatccagatctccatgagatattcccatcctccgccgagcggtgatgcgtgaccgtgtgtgcaggccgctgttctcccaagctcggggccatgccgtgccaccgtcaccagagccagctgcagcactggggcagccactgtcgccggacttggggaagcccagggtgaagacagtcactcatccgtgcaagctctccagaaggaagggatgcaagctctccagaaggggtgtgatctctgagcagtggggagtggagtcaccactcgggacatagagggtggacagttcaggcctgtgtctgcctccttgggactgtggagtgggtgccctcagtaaagcgctttgttggaatggt

SEQ ID NO: 354893 - DNA, 947 bp, Homo sapiens
ttaatttgaactgtaccttttcttaaagacaaaaaaaagcctggatacgtggcatctgggtgtaatctgttttgtgctgtaactgaaatactgcatgtttagcagtgaatatacaaacgtaccatgtccatagacacgagtcacttatacatgggacgcatctgaccaggctgtgagctgctggtgccatgcctggcgtatggtgggctctcacatatgtgggagctttgcaggttgtgaggctttgtggaccaccccgggcacctcacccctgaattgacagtaccaatgtgatctgagatccagtctcaagcctgtcttccttttggcctagacctgttatcaagaagggatttccatcctttccttgctttctatccctgcgtaggggacattggggtccccttacctgatgtcctttgagggcatctaaagtaatgaatgctctgtctccactgctggcagcatctgacagcaacgatgctgtcgtaaaatttaataaagacagagtgcgtgcaaggaggagcctcacatttctccttcagtctgcggggcgtctgggctgcaaggtggtgtcagaggagaacctggcatactcgtgggcattcatcctgggcacactggctgagcagggccgctcccctcagctcaggccctgggcattcaccctgggcacactggctgagcagggccgctcccctcaggccctgggcattcaccctgggcacactggctgagcagggccgctcccctcaggccctgggcattcaccctgggcacactggctgagcagggccgctcccctcaggccctgggcattcaccctgggcacactggctgagtaaggccgtgcccctcaggccccggaagtgggttggccgtggcttcgacagttctctgtggctgatggcagtgcggccgcgatgccctgctgtgccatgcttgct

SEQ ID NO: 354894 - DNA, 850 bp, Homo sapiens
gagcagagccaacgtgtcagcggcgcccaagcggccccagcgggctcgcgtcgccccgctctcctcaccgagccgccaatcggctcaggatccgcccctgacgacgcgggccccgcccctggagacacgcgccgcgcagtcgtcacccgcccgggatcaggaggccgggggcgcccgccggtcgggcctgggcggccgccatgaagctgacgcggaagatggttctgacccgggccaaggcctcggagctgcacagcgtgcgcaagctcaactgctggggcagccgcctcacagatgtaagtattgcctcacagatgtaagtattgcactgatcatctccaaatagcctcaacccaaatgttgtagcttctttcccaagagaatttttaagttgacaaaactgcacctatcaattcagtcccacacttggtactttgttcacttagcggttttcattctgcagaaccactaatggaaaaacaattctctagtgccaggcttattttgcagttcccgtcaacatccctataaatgaaacaccctttgtcacttggtcgcagaggaggggagcaatagtttggaacttgctctcacctggaaaggaatcccaggagggcttgttttactttgttacggggaagttgaaggtctacaccccctcttcttggtcacatctagccttgtacccccttgccgctgccccaaaggcaggcagagaataagccctgctgggagaacttgagtgtgtgcgtctgtgaaagatttttttcttctctccctcattgtctttctcagtccaaaatgtccccaacttacacagggatcgcataccaattgtttctttcttttt

SEQ ID NO: 354895 - DNA, 1830 bp, Homo sapiens
gagcagagccaacgtgtcagcggcgcccaagcggccccagcgggctcgcgtcgccccgctctcctcaccgagccgccaatcggctcaggatccgcccctgacgacgcgggccccgcccctggagacacgcgccgcgcagtcgtcacccgcccgggatcaggaggccgggggcgcccgccggtcgggcctgggcggccgccatgaagctgacgcggaagatggttctgacccgggccaaggcctcggagctgcacagcgtgcgcaagctcaactgctggggcagccgcctcacagatatctccatttgccaggagatgcccagcctggaggtgatcacgctcagtgtcaacagcatctccaccctggagcctgtgagccggtgccagcgcctgagtgagctgtacctgcggaggaaccgcatccccagcctggctgagctcttctacctgaaggggctgccgcgtctgcgggtgctgtggctggccgagaacccgtgctgcggcaccagcccccaccgctaccgcatgaccgtgctgcgcaccctgccgcgcctacagaagctggacaaccaggctgtgacggaggaggagctgtcccgtgcactgagtgagggagaggagatcactgcggccccagagagagagggcacaggccacggcggccccaagctatgctgcacactgagctccctcagctccgctgctgagactggccgggacccgctggacagcgaggaggaggcaaccagcggcgcccaggatgaacgtggcctgaagccgccttcccggggccagtttccttccctctcagccagggatgcctcgagcagccacaggggcaggaacgtcctgactgccatcctgctgctgctgcgggagctggatgcagaggggctggaggccgtgcagcagactgtgggcagccggctgcaggccctgcgtggggaagaggtgcaggagcacgccgagtgaccgcaggacctgaacgccgctccagcctccacggggaccccagcgtcttccccagcccccgggagctggagggtggctgccatggccgcagccccggccccacacaaaagcctccccggtttgccacatcggccgagggcaggagtgggtgttaggtactggctaaccggggcggtggagatgcctgtctacaccagtcctgtccccaggactccccttctgtggtctggaggttctaggctggcctgggctcttaaagggaggattttgcaggctgtcctccctaataaaagattttcccaaggttgatctggaggtgacgtttcccaaggcatggttgtgacagtcttcctgaaagcaagggccgtttctccacagaatgaggaggtcttcacggatggctttgccgattccagcccttggtccttggatagatttctgttgggcaagggagacttcgagaatgctggcacccatagcgacatctgccctgagctgctcagcaggcaggcagcagcctcccgcacccatgggagagagttttgttttcttggccgggctgggcaggccgctgttctcccaagctcggggccatgccgtgccaccgtcaccagagccagctgcagcactggggcagccactgtcgccggacttggggaagcccagggtgaagacagtcactcatccgtgcaagctctccagaaggaagggatgcaagctctccagaaggggtgtgatctctgagcagtggggagtggagtcaccactcgggacatagagggtggacagttcaggcctgtgtctgcctccttgggactgtggagtgggtgccctcagtaaagcgctttgttggaatggt

SEQ ID NO: 354896 - DNA, 3152 bp, Homo sapiens
gagcagagccaacgtgtcagcggcgcccaagcggccccagcgggctcgcgtcgccccgctctcctcaccgagccgccaatcggctcaggatccgcccctgacgacgcgggccccgcccctggagacacgcgccgcgcagtcgtcacccgcccgggatcaggaggccgggggcgcccgccggtcgggcctgggcggccgccatgaagctgacgcggaagatggttctgacccgggccaaggcctcggagctgcacagcgtgcgcaagctcaactgctggggcagccgcctcacagatatctccatttgccaggagatgcccagcctggaggtgatcacgctcagtgtcaacagcatctccaccctggagcctgtgagccggtgccagcgcctgagtgagctgtacctgcggaggaaccgcatccccagcctggctgagctcttctacctgaaggggctgccgcgtctgcgggtgctgtggctggccgagaacccgtgctgcggcaccagcccccaccgctaccgcatgaccgtgctgcgcaccctgccgcgcctacagaagctggacaaccaggctgtgacggaggaggagctgtcccgtgcactgagtgagggagaggagatcactgcggccccagagagagagggcacaggccacggcggccccaagctatgctgcacactgagctccctcagctccgctgctgagactggccgggacccgctggacagcgaggaggaggcaacgtgaggctggagggcagcggggactccgcagcccatccctgtcccccagggtcctcccacggggagtgaatggggcttcccgtgagctgcgtctctgggaagtgagggacagggattatccggggggagtgtctgttctcatccatattctctgggagtgactcagtgcccaggtagtgatttcagtggcaggtccatgttttgcccaacagcggatgtgccagggagcaggagagggggtgagccaggccccgtgccctggcacagagaaggctcacagcaccagagctcgtgaggtgcagggagcccctggtggggggggtggcctagggccacagtgactggaatggtttgtgggcacggccatcagtgcccgtatggccttgggcctgggggccgtggaggggccacagggctgactctgcagtgagacgccggcgcctcccagggcagttggcagcgggtcacgaacgcatttgacagaagctgggcacttctctcctgcttggcagatcacacccgctgctggtgcctgtggtgggggcatcgggatgtgatctctgttaggcatctgccatccggcacagggcctgaccccatggtcaggagctctcccccggcatttgtgtgttcgggtgccccccaccctgcccctgaagccctgggtggaaggtgttacagctggggagccccagggtgccgggagggcgccccacaggtgaagtaagtgccgggctctccaggagctgccatctgtagcccctgacctcccaggagttgcctcccttctcttgcccccgtgtgccaggtgggatttgtatgagcccctcctttgcttggatgcgacccgcagacagggtttgcagaggcccccccggtgccacgagccccctgaccctcacacgcctttgtctccctctcagcagcggcgcccaggatgaacgtggcctgaagccgccttcccggggccagtttccttccctctcagccagggatgcctcgagcagccacaggggcaggaacgtcctgactgccatcctgctgctgctgcgggagctggatgcagaggggctggaggccgtgcagcagactgtgggcagccggctgcaggccctgcgtggggaagaggtgcaggagcacgccgagtgaccgcaggacctgaacgccgctccagcctccacggggaccccagcgtcttccccagcccccgggagctggagggtggctgccatggccgcagccccggccccacacaaaagcctccccggtttgccacatcggccgagggcaggagtgggtgttaggtactggctaaccggggcggtggagatgcctgtctacaccagtcctgtccccaggactccccttctgtggtctggaggttctaggctggcctgggctcttaaagggaggattttgcaggctgtcctccctaataaaagattttcccaaggttgatctggaggtgacgtttcccaaggcatggttgtgacagtcttcctgaaagcaagggccgtttctccacagaatgaggaggtcttcacggatggctttgccgattccagcccttggtccttggatagatttctgttgggcaagggagacttcgagaatgctggcacccatagcgacatctgccctgagctgctcagcaggcaggcagcagcctcccgcacccatgggagagagttttgttttcttggccgggctgggcaggtgcgccttcctttctctctcctgtgaagaactgcaggagggccctcagctgtgaggttgtggatgaacaggcctgttcgccctggggtccgggcctggcacaggaagcagctagactaggggagtccttggagcatctgagaggggttttctttcctctgggaagagtcgcaagtcttatgaggatgccacaatctgggcagtgacccgtggccctggggaccttcctagtgccccccaaaaccaaggaagcattcacgtgagatggggagtcagccttccagctggtgtgtaggaaagccaggtccctgggcccttgtcccatgtggggttgagatccagatctccatgagatattcccatcctccgccgagcggtgatgcgtgaccgtgtgtgcaggccgctgttctcccaagctcggggccatgccgtgccaccgtcaccagagccagctgcagcactggggcagccactgtcgccggacttggggaagcccagggtgaagacagtcactcatccgtgcaagctctccagaaggaagggatgcaagctctccagaaggggtgtgatctctgagcagtggggagtggagtcaccactcgggacatagagggtggacagttcaggcctgtgtctgcctccttgggactgtggagtgggtgccctcagtaaagcgctttgttggaatggt

SEQ ID NO: 354897 - DNA, 3759 bp, Homo sapiens
gagcagagccaacgtgtcagcggcgcccaagcggccccagcgggctcgcgtcgccccgctctcctcaccgagccgccaatcggctcaggatccgcccctgacgacgcgggccccgcccctggagacacgcgccgcgcagtcgtcacccgcccgggatcaggaggccgggggcgcccgccggtcgggcctgggcggccgccatgaagctgacgcggaagatggttctgacccgggccaaggcctcggagctgcacagcgtgcgcaagctcaactgctggggcagccgcctcacagatatctccatttgccaggagatgcccagcctggaggtgatcacgctcagtgtcaacagcatctccaccctggagcctgtgagccggtgccagcgcctgagtgagctgtacctgcggaggaaccgcatccccagcctggctgagctcttctacctgaaggggctgccgcgtctgcgggtgctgtggctggccgagaacccgtgctgcggcaccagcccccaccgctaccgcatgaccgtgctgcgcaccctgccgcgcctacagaagctggacaaccaggatgtgtcctgtgaagtctcctccagaggctgttcccctggcttctgtgtctcctcttgatcccgccacccgaatgcagcagcgcagcgtagggtccctcctgggactgacacgccagcaccgacacagttttccaggctgtggtttcatgctgtttgttcatccttggcattctcagcacactagtgtctcatccttgtcaggtatacagacaccactattttctcccagacaattttattgatattaataatataaacttcagggaaattgatatatgagagaaatggaataaattcaatatggtctgttcctttttctattgtgtcgtagttgaggttttgaggagtatttgcttctggccaaggctggtgttgagattcctgagcagccctccaccatctgttgtgtgtcagcctgtgccaggctggggatgggacagtgaggaaccggctgctactctgggagttgtccctggaggtggatacacgtgcatgcatttcacaagcagactgtgcctgaagccacagtgaggacgggagctgcagtgcatgtggcctgcacgtgggtgaggccactcatgctgtcttctgtctttcatcccaaagctgtgacggaggaggagctgtcccgtgcactgagtgagggagaggagatcactgcggccccagagagagagggcacaggccacggcggccccaagctatgctgcacactgagctccctcagctccgctgctgagactggccgggacccgctggacagcgaggaggaggcaacgtgaggctggagggcagcggggactccgcagcccatccctgtcccccagggtcctcccacggggagtgaatggggcttcccgtgagctgcgtctctgggaagtgagggacagggattatccggggggagtgtctgttctcatccatattctctgggagtgactcagtgcccaggtagtgatttcagtggcaggtccatgttttgcccaacagcggatgtgccagggagcaggagagggggtgagccaggccccgtgccctggcacagagaaggctcacagcaccagagctcgtgaggtgcagggagcccctggtggggggggtggcctagggccacagtgactggaatggtttgtgggcacggccatcagtgcccgtatggccttgggcctgggggccgtggaggggccacagggctgactctgcagtgagacgccggcgcctcccagggcagttggcagcgggtcacgaacgcatttgacagaagctgggcacttctctcctgcttggcagatcacacccgctgctggtgcctgtggtgggggcatcgggatgtgatctctgttaggcatctgccatccggcacagggcctgaccccatggtcaggagctctcccccggcatttgtgtgttcgggtgccccccaccctgcccctgaagccctgggtggaaggtgttacagctggggagccccagggtgccgggagggcgccccacaggtgaagtaagtgccgggctctccaggagctgccatctgtagcccctgacctcccaggagttgcctcccttctcttgcccccgtgtgccaggtgggatttgtatgagcccctcctttgcttggatgcgacccgcagacagggtttgcagaggcccccccggtgccacgagccccctgaccctcacacgcctttgtctccctctcagcagcggcgcccaggatgaacgtggcctgaagccgccttcccggggccagtttccttccctctcagccagggatgcctcgagcagccacaggggcaggaacgtcctgactgccatcctgctgctgctgcgggagctggatgcagaggggctggaggccgtgcagcagactgtgggcagccggctgcaggccctgcgtggggaagaggtgcaggagcacgccgagtgaccgcaggacctgaacgccgctccagcctccacggggaccccagcgtcttccccagcccccgggagctggagggtggctgccatggccgcagccccggccccacacaaaagcctccccggtttgccacatcggccgagggcaggagtgggtgttaggtactggctaaccggggcggtggagatgcctgtctacaccagtcctgtccccaggactccccttctgtggtctggaggttctaggctggcctgggctcttaaagggaggattttgcaggctgtcctccctaataaaagattttcccaaggttgatctggaggtgacgtttcccaaggcatggttgtgacagtcttcctgaaagcaagggccgtttctccacagaatgaggaggtcttcacggatggctttgccgattccagcccttggtccttggatagatttctgttgggcaagggagacttcgagaatgctggcacccatagcgacatctgccctgagctgctcagcaggcaggcagcagcctcccgcacccatgggagagagttttgttttcttggccgggctgggcaggtgcgccttcctttctctctcctgtgaagaactgcaggagggccctcagctgtgaggttgtggatgaacaggcctgttcgccctggggtccgggcctggcacaggaagcagctagactaggggagtccttggagcatctgagaggggttttctttcctctgggaagagtcgcaagtcttatgaggatgccacaatctgggcagtgacccgtggccctggggaccttcctagtgccccccaaaaccaaggaagcattcacgtgagatggggagtcagccttccagctggtgtgtaggaaagccaggtccctgggcccttgtcccatgtggggttgagatccagatctccatgagatattcccatcctccgccgagcggtgatgcgtgaccgtgtgtgcaggccgctgttctcccaagctcggggccatgccgtgccaccgtcaccagagccagctgcagcactggggcagccactgtcgccggacttggggaagcccagggtgaagacagtcactcatccgtgcaagctctccagaaggaagggatgcaagctctccagaaggggtgtgatctctgagcagtggggagtggagtcaccactcgggacatagagggtggacagttcaggcctgtgtctgcctccttgggactgtggagtgggtgccctcagtaaagcgctttgttggaatggt

SEQ ID NO: 354898 - DNA, 1624 bp, Homo sapiens
ccgggccctgctgggctgagggcaacaggagtcacgtggaagaggtgccacacacgcgtccacaggcggggctcctctgctcagattctccgagtgtgccggtcagtcacttggacggcccacacccccgggaccagtcgctccgtggtggggcaccgctggccaggccccagcccttgtggagggaagcagcctcgctgtgccgggtgggcttagtccgcacccctctgccctcagaacgtcctgactgccatcctgctgctgctgcgggagctggatgcagaggggctggaggccgtgcagcagactgtgggcagccggctgcaggccctgcgtggggaagaggtgcaggagcacgccgagtgaccgcaggacctgaacgccgctccagcctccacggggaccccagcgtcttccccagcccccgggagctggagggtggctgccatggccgcagccccggccccacacaaaagcctccccggtttgccacatcggccgagggcaggagtgggtgttaggtactggctaaccggggcggtggagatgcctgtctacaccagtcctgtccccaggactccccttctgtggtctggaggttctaggctggcctgggctcttaaagggaggattttgcaggctgtcctccctaataaaagattttcccaaggttgatctggaggtgacgtttcccaaggcatggttgtgacagtcttcctgaaagcaagggccgtttctccacagaatgaggaggtcttcacggatggctttgccgattccagcccttggtccttggatagatttctgttgggcaagggagacttcgagaatgctggcacccatagcgacatctgccctgagctgctcagcaggcaggcagcagcctcccgcacccatgggagagagttttgttttcttggccgggctgggcaggtgcgccttcctttctctctcctgtgaagaactgcaggagggccctcagctgtgaggttgtggatgaacaggcctgttcgccctggggtccgggcctggcacaggaagcagctagactaggggagtccttggagcatctgagaggggttttctttcctctgggaagagtcgcaagtcttatgaggatgccacaatctgggcagtgacccgtggccctggggaccttcctagtgccccccaaaaccaaggaagcattcacgtgagatggggagtcagccttccagctggtgtgtaggaaagccaggtccctgggcccttgtcccatgtggggttgagatccagatctccatgagatattcccatcctccgccgagcggtgatgcgtgaccgtgtgtgcaggccgctgttctcccaagctcggggccatgccgtgccaccgtcaccagagccagctgcagcactggggcagccactgtcgccggacttggggaagcccagggtgaagacagtcactcatccgtgcaagctctccagaaggaagggatgcaagctctccagaaggggtgtgatctctgagcagtggggagtggagtcaccactcgggacatagagggtggacagttcaggcctgtgtctgcctccttgggactgtggagtgggtgccctcagtaaagcgctttgttggaatggt

SEQ ID NO: 354899 - DNA, 1084 bp, Homo sapiens
gagcagagccaacgtgtcagcggcgcccaagcggccccagcgggctcgcgtcgccccgctctcctcaccgagccgccaatcggctcaggatccgcccctgacgacgcgggccccgcccctggagacacgcgccgcgcagtcgtcacccgcccgggatcaggaggccgggggcgcccgccggtcgggcctgggcggccgccatgaagctgacgcggaagatggttctgacccgggccaaggcctcggagctgcacagcgtgcgcaagctcaactgctggggcagccgcctcacagatatctccatttgccaggagatgcccagcctggaggtgatcacgctcaggtacctcgctcctgctgtcatgctcagcctggggcctggaagccggggcagagcctcacgtccctccagtgggacccagcactgtgacataacctggaaacctccaacacagactgagggcggcttccagaaggggaggggccgggacagcgagagctgggcctaccctgtggcccccatgttcagccctccttcctcagagcctcacctgggcctcctgatggctcctgtcccctgcctgccctgctgtacgcctgcccacccttggcctgtgtgctccgataagccattgctgtgttcactgggccagtcggtggtggagccctcctaaggattcacggtggcccgccctggccgcccccacggtggccacatctgccctgggacccccagagtcctggcctcttctgccccccagtgccaccactgcctaccagtttctctgcaccccatgacctgtgcccgtcttctggggtcactgccctcccagcagactaagggaagcttgaatgaacaaatgttactggactttcaggcagttggggtgtatttgggggctctggggaagagaagagctccctttatccctgaattccctcctgcctactgtgggacccacggagggagcagacgctcatggctcaccactgcccaccagacgctggatgggcgccttctgtgggtttccgcatttaaaagctcacaagggtttaaaccctgtggggaaggcccacccctctg

SEQ ID NO: 354900 - DNA, 397 bp, Homo sapiens
tatatcttattggttacccactgggtctactgccaagttctgcagttttctcatttgctgggccttcagggctgtctctaccatttggattaatttatgtaattctaggctagagctatttttacttagtcaacttgtcttttgcattgtgtcaggaaaagtcagctactaaatcatttttttgtttagaagtctataacgactcctaagtatctttatgtcactctctaaacctggaacaccttgactacacaagttgaattatatcaatcttcttccatatgcttgagaattacctctttcatgaagcctcagaaacttgcctattccaattattttaggactttctttagctttagcacttctattcaattttacgctttttgtttttgttttt

SEQ ID NO: 354901 - DNA, 1284 bp, Homo sapiens
aagatgacttccccatgaagtcttatcagggacctgggagagaccttggtgttttaccaccactgtgtgttgcccagaggcgcatttgtgagtagccagggcaggacttagaaaagtcggtgtgtctggtgaaaggtagctgatctgaagggtagcaagtaatgcaaaagcactaatttgctaagccctgtctgtgatccagtaagactggctatctggcttttggaaaattaatttcctcaacgctggttcacaaaatcaccaatttaccacatactgacaatagtttgttatatctggggttcaccttcagaggcagggagtgggaaaggaaataagaaaccacttaaggaaagcctacccattcaaaccaattagattgtgcattctaaaagggctcagcttctggatgtaaaatgtaagcaacactgacattagactgttgatctgacaagtctataatgacttaagtgatgccatgataaaaccaaaatattggggaaaatatttggcaaattattctaagaatatgccaatttggataaagtggtcatttggagaactggtttttaggaaagtggcctacttactccactgaggctgctaggggaaatagtcccagcccctcacaggtatggtgcccattccagccatgaaggctgacacaagaggaggttgccaggagctcacccatgaagctaccagaagaaggcagaaaacccactgtatggctatcccatgaagctagaggaagggcaagctggtggggggacagcctctgagaggcagcatggacagactctgtcctgccaaagtcctcacacagcccacacaggtgatttgaggtacaccccaagtgcctggcagctaaacacattgccattagtgccacatcatttagcttaaggctctactaagtcagtaattactttagtggcattatgagtaagtacagatgaactggcagtcgcttcaggaaagggacacatggtgagtcctgatgatgggcagggagggaaggaaggtggggtgtcgggccctgcagtggggtgtgggggagctgcagaaccttggagcaaacatacctcccttgtgactcccacatcaaccattaaagttatttaacagcagccttcacctggctcctgaggaaaaaaaacctctctctgcctggtctagacctgcctcacatcatccctggagcatagttcaccagctgtgaaacatgactgtgatactgagtaatcagacaaaggctgggtggagcgggtactttatgaatac

SEQ ID NO: 354902 - DNA, 984 bp, Homo sapiens
  misc_feature (881)..(881): n is a, c, g, or t
  misc_feature (885)..(885): n is a, c, g, or t
  misc_feature (897)..(897): n is a, c, g, or t
  misc_feature (899)..(899): n is a, c, g, or t
  misc_feature (902)..(902): n is a, c, g, or t
  misc_feature (905)..(905): n is a, c, g, or t
  misc_feature (907)..(907): n is a, c, g, or t
  misc_feature (916)..(916): n is a, c, g, or t
  misc_feature (927)..(927): n is a, c, g, or t
  misc_feature (929)..(929): n is a, c, g, or t
  misc_feature (934)..(935): n is a, c, g, or t
  misc_feature (953)..(953): n is a, c, g, or t
  misc_feature (958)..(958): n is a, c, g, or t
gggacagctcggaggagctggggcggagccgcagggcctggcggccgccgagtgaagtgtgactccgtgggcctggcgtggaggcgggggcgctaggctgcagctggctcggaatcggggctggtttcctgtctggaagggaaggggcctgcagaagggagcggggacagcagcagacaggcacacccctgccttcctctctccctctcctcccttctctggaaaagcgaggacacggagttgcagaggaagctagaccatgagatccggatgagggaaggggcctgtaagctgctggcagcctgctcccagcgagagcaggctctggaggccaccaagagcctgctagtgtgcaacagccgcatcctcagctacatgggcgagctgcagcggcgcaaggaggcgcaggtgctggggaagacaagccggcggccttctgacagtggcccgcccgctgagcgctccccctgccgcggccgggtctgcatctctgacctccggattccactcatgtggaaggacacagaatatttcaagaacaaaggtgacttgcaccgctgggctgtgttcctgctgctgcagctgggggaacacatccaggacacagagatgatcctagtggacaggaccctcacagacatctcctttcagagcaatgtgctcttcgctgaggcggggccagactttgaactgcggttagagctgtatggggcctgtgtggaagaagagggggccctgactggcggccccaagaggcttgccaccaaactcagcagctccctgggccgctcctcagggaggcgtgtccgggcatcgctggacagtgctgggggttcagggagcagtcccatcttgctccccaccccagttgttggtggtcncgtnacactcttggtncnacnaantnacctggcgngtgcagatggntncgganntgactcccttgcgtctgngaganctgcctgtgcctttggtcgttgtcgg

SEQ ID NO: 354903 - DNA, 1297 bp, Homo sapiens
aagatgacttccccatgaagtcttatcagggacctgggagagaccttggtgttttaccaccactgtgtgttgcccagaggcgcatttgtgagtagccagggcaggacttagaaaagtcggtgtgtctggtgaaaggtagctgatctgaagggtagcaagtaatgcaaaagcactaatttgctaagccctgtctgtgatccagtaagactggctatctggcttttggaaaattaatttcctcaacgctggttcacaaaatcaccaatttaccacatactgacaatagtttgttatatctggggttcaccttcagaggcagggagtgggaaaggaaataagaaaccacttaaggaaagcctacccattcaaaccaattagattgtgcattctaaaagggctcagcttctggatgtaaaatgtaagcaacactgacattagactgttgatctgacaagtctataatgacttaagtgatgccatgataaaaccaaaatattggggaaaatatttggcaaattattctaagaatatgccaatttggataaagtggtcatttggagaactggtttttaggaaagtggcctacttactccactgaggctgctaggggaaatagtcccagcccctcacaggtatggtgcccattccagccatgaaggctgacacaagaggaggttgccaggagctcacccatgaagctaccagaagaaggcagaaaacccactgtatggctatcccatgaagctagaggaagggcaagctggtggggggacagcctctgagaggcagcatggacagactctgtcctgccaaagtcctcacacagcccacacaggtgatttgaggtacaccccaagtgcctggcagctaaacacattgccattagtgccacatcatttagcttaaggctctactaagtcagtaattactttagtggcattatgagtaagtacagatgaactggcagtcgcttcaggaaagggacacatggtgagtcctgatgatgggcagggagggaaggaaggtggggtgtcgggccctgcagtggggtgtgggggagctgcagaacttggggcactagtagggtacaccatatcaggccaggaggaaaaaggagaaatcaaagttggggagtggtagggaaggaaaagggtctgtagtgaatggaacgtaactcttccctattggtgattttcctttgaacaaatgttggccaaattattttctgacccagtaccctcctatatcaaagaagtgatgggatggtgggaaataagcagctttcctattgttaaaa

SEQ ID NO: 354904 - DNA, 1108 bp, Homo sapiens
aagatgacttccccatgaagtcttatcagggacctgggagagaccttggtgttttaccaccactgtgtgttgcccagaggcgcatttgtgagtagccagggcaggacttagaaaagtcggtgtgtctggtgaaaggtagctgatctgaagggtagcaagtaatgcaaaagcactaatttgctaagccctgtctgtgatccagtaagactggctatctggcttttggaaaattaatttcctcaacgctggttcacaaaatcaccaatttaccacatactgacaatagtttgttatatctggggttcaccttcagaggcagggagtgggaaaggaaataagaaaccacttaaggaaagcctacccattcaaaccaattagattgtgcattctaaaagggctcagcttctggatgtaaaatgtaagcaacactgacattagactgttgatctgacaagtctataatgacttaagtgatgccatgataaaaccaaaatattggggaaaatatttggcaaattattctaagaatatgccaatttggataaagtggtcatttggagaactggtttttaggaaagtggcctacttactccactgaggctgctaggggaaatagtcccagcccctcacaggtatggtgcccattccagccatgaaggctgacacaagaggaggttgccaggagctcacccatgaagctaccagaagaaggcagaaaacccactgtatggctatcccatgaagctagaggaagggcaagctggtggggggacagcctctgagaggcagcatggacagactctgtcctgccaaagtcctcacacagcccacacaggtggggtgtcgggccctgcagtggggtgtgggggagctgcagaacttggggcactagtagggtacaccatatcaggccaggaggaaaaaggagaaatcaaagttggggagtggtagggaaggaaaagggtctgtagtgaatggaacgtaactcttccctattggtgattttcctttgaacaaatgttggccaaattattttctgacccagtaccctcctatatcaaagaagtgatgggatggtgggaaataagcagctttcctattgttaaaa

SEQ ID NO: 354905 - DNA, 661 bp, Homo sapiens
ggcccaggtgaggggctgctcctgcaggataacgcaatctccactgagatccaggctttgctttcctcctattacagtgacaggtgatagggctgggtaggcttggggcctgagctctgactagcccaaccctcccccaaccccttcctggtgccacagctattgagccgctggatgacatcgcagcggtgacagacatcctgacccagcgggagggcgcaaggctggagacacccccaccctggctggcaatgtttacagaccagcctgccctgcctaacccctgctcgcctgcaagcccctcttaaattgtggttgccatggtaccgagggactcattcctggggctcgctgggacctccctaaacccttcctggaagaaaactggaaccaactctgccctacctccctgcactaaccagctttgaggatggcactgaagaacccttggagcaaacatacctcccttgtgactcccacatcaaccattaaagttatttaacagcagccttcacctggctcctgaggaaaaaaaacctctctctgcctggtctagacctgcctcacatcatccctggagcatagttcaccagctgtgaaacatgactgtgatactgagtaatcagacaaaggctgggtggagcgggtactttatgaatac

SEQ ID NO: 354906 - DNA, 2326 bp, Homo sapiens
gggacagctcggaggagctggggcggagccgcagggcctggcggccgccgagtgaagtgtgactccgtgggcctggcgtggaggcgggggcgctaggctgcagctggctcggaatcggggctggtttcctgtctggaagggaaggggcctgcagaagggagcggggacagcagcagacaggcacacccctgccttcctctctccctctcctcccttctctggaaaagcgaggacacggagttgcagaggaagctagaccatgagatccggatgagggaaggggcctgtaagctgctggcagcctgctcccagcgagagcaggctctggaggccaccaagagcctgctagtgtgcaacagccgcatcctcagctacatgggcgagctgcagcggcgcaaggaggcgcaggtgctggggaagacaagccggcggccttctgacagtggcccgcccgctgagcgctccccctgccgcggccgggtctgcatctctgacctccggattccactcatgtggaaggacacagaatatttcaagaacaaaggtgacttgcaccgctgggctgtgttcctgctgctgcagctgggggaacacatccaggacacagagatgatcctagtggacaggaccctcacagacatctcctttcagagcaatgtgctcttcgctgaggcggggccagactttgaactgcggttagagctgtatggggcctgtgtggaagaagagggggccctgactggcggccccaagaggcttgccaccaaactcagcagctccctgggccgctcctcagggaggcgtgtccgggcatcgctggacagtgctgggggttcagggagcagtcccatcttgctccccaccccagttgttggtggtcctcgttaccacctcttggctcacaccacactcaccctggcagcagtgcaagatggattccgcacacatgacctcacccttgccagtcatgaggagaaccctgcctggctgcccctttatggtagcgtgtgttgccgtctggcagctcagcctctctgcatgactcagcccactgcaagtggtaccctcagggtgcagcaagctggggagatgcagaactgggcacaagtgcatggagttctgaaaggcacaaacctcttctgttaccggcaacctgaggatgcagacactggggaagagccgctgcttactattgctgtcaacaaggagactcgagtccgggcaggggagctggaccaggctctaggacggcccttcaccctaagcatcagtaaccagtatggggatgatgaggtgacacacacccttcagacagaaagtcgggaagcactgcagagctggatggaggctctgtggcagcttttctttgacatgagccaatggaagcagtgctgtgatgaaatcatgaaaattgaaactcctgctccccggaaaccaccccaagcactggcaaagcaggggtccttgtaccatgagatggctattgagccgctggatgacatcgcagcggtgacagacatcctgacccagcgggagggcgcaaggctggagacacccccaccctggctggcaatgtttacagaccagcctgccctgcctaacccctgctcgcctgcctcagtggccccagccccagactggacccaccccctgccctgggggagaccccgaaccttttccctggatgctgtccccccagaccactcccctagggctcgctcggttgcccccctcccacctcagcgatccccacggaccagaggcctctgcagcaaaggccaacctcgcacttggctccagtcaccagtgtgagagagaaaggtgctggcataggatctgcccagaagagaaaatgacccatgcgcagttgggctctggatacggcgctgtctatagcaagttggccagtctggcctcctgttcctctgctggacctggggtaggctgcaggggtgggcagaagcccctcttaaattgtggttgccatggtaccgagggactcattcctggggctcgctgggacctccctaaacccttcctggaagaaaactggaaccaactctgccctacctccctgcactaaccagctttgaggatggcactgaagaacccttggagcaaacatacctcccttgtgactcccacatcaaccattaaagttatttaacagcagccttcacctggctcctgaggaaaaaaaacctctctctgcctggtctagacctgcctcacatcatccctggagcatagttcaccagctgtgaaacatgactgtgatactgagtaatcagacaaaggctgggtggagcgggtactttatgaatac

SEQ ID NO: 354907 - DNA, 3662 bp, Homo sapiens
gggacagctcggaggagctggggcggagccgcagggcctggcggccgccgagtgaagtgtgactccgtgggcctggcgtggaggcgggggcgctaggctgcagctggctcggaatcggggctggtttcctgtctggaagggaaggggcctgcagaagggagcggggacagcagcagacaggcacacccctgccttcctctctccctctcctcccttctctggaaaagcgagctgggagaacagctgccaccaaagcgagactggacactctgtgcctagagccccctctgcagctggcctttcctcctgggaccccacttatcctcacttcgctttctttttcttccctgcctggctcccggcagggccccggagcagcagtgggcgaggaaaatttgtcacagcagccagaggggtttaacaggagtgcagagggataagggcagcttctgccctctgcccaagagctggccacctctttaaagactgagggaacagtgggaggaggaactgtgggacagtgtggtacctatctgtcccccctctggaggggttgacaagggaaagggcaccggggggcacagagatgcaggacagattgcacatcctggaggacctgaatatgctctacattcggcagatggcactcagcctggaggacacggagttgcagaggaagctagaccatgagatccggatgagggaaggggcctgtaagctgctggcagcctgctcccagcgagagcaggctctggaggccaccaagagcctgctagtgtgcaacagccgcatcctcagctacatgggcgagctgcagcggcgcaaggaggcgcaggtgctggggaagacaagccggcggccttctgacagtggcccgcccgctgagcgctccccctgccgcggccgggtctgcatctctgacctccggattccactcatgtggaaggacacagaatatttcaagaacaaaggtgacttgcaccgctgggctgtgttcctgctgctgcagctgggggaacacatccaggacacagagatgatcctagtggacaggaccctcacagacatctcctttcagagcaatgtgctcttcgctgaggcggggccagactttgaactgcggttagagctgtatggggcctgtgtggaagaagagggggccctgactggcggccccaagaggcttgccaccaaactcagcagctccctgggccgctcctcagggaggcgtgtccgggcatcgctggacagtgctgggggttcagggagcagtcccatcttgctccccaccccagttgttggtggtcctcgttaccacctcttggctcacaccacactcaccctggcagcagtgcaagatggattccgcacacatgacctcacccttgccagtcatgaggagaaccctgcctggctgcccctttatggtagcgtgtgttgccgtctggcagctcagcctctctgcatgactcagcccactgcaagtggtaccctcagggtgcaggtgagggggccctgaggagtggaagggagcagggagaaggcagaggagagctggataaccaggaatagaagagctaatgaaaaatcaagatttgggtggaagaaatggggtatggccagacgaggggaggaatggacagcagggtggacaaaacgaacaggttctcatggggggctgagaagagggatactgggggccgtgacttccccagaaaatgttgagtcatttgtgcagcaagctggggagatgcagaactgggcacaagtgcatggagttctgaaaggcacaaacctcttctgttaccggcaacctgaggatgcagacactggggaagagccgctgcttactattgctgtcaacaaggtgatgggtcccttggtagtaaggccaccaagggcacaggcccaggagcctctccttcaggccccaggagggtgggcacatacctcagagagatagaagcaggcctcctgctcctgacagtgccacatccagcttcaggggcccgtattttccccaactacagcatcactgtgagaggatcgtcccattcacttgccatcctcagtccctgccaaatctcagagagggttctctcgcctgcaggttcagggcttttcatcctctctccctcttctccctcagattccaatttatatctactttaccacttcccatttctctccaggtccaattgcccttctttgctccctatcccttttatgggctttcctgcctactttttgtcagttctgagggacctctggctggagcatccttgcctacctttgtgtcttccctgccttgctcaatccctttttccctgtctcaagctgctcctcctcccctgactcaggactggctgtctcatccccagcccttttttgccattccttcctactctggtcagtaggaggcaaatgagagggctcagcaaaagccccacaagctcattcttctaaggcaggcgtgatcaaggctgcctgattgtcactgccaacttctgtgaccaaggtagacctcttctttctcctgcaggagactcgagtccgggcaggggagctggaccaggctctaggacggcccttcaccctaagcatcagtaaccagtatggggatgatgaggtgacacacacccttcagacagaaagtcgggaagcactgcagagctggatggaggctctgtggcagcttttctttgacatgagccaatggaagcagtgctgtgatgaaatcatgaaaattgaaactcctgctccccggaaaccaccccaagcactggcaaagcaggggtccttgtaccatgagatggctattgagccgctggatgacatcgcagcggtgacagacatcctgacccagcgggagggcgcaaggctggagacacccccaccctggctggcaatgtttacagaccagcctgccctgcctaacccctgctcgcctgcctcagtggccccagccccagactggacccaccccctgccctgggggagaccccgaaccttttccctggatgctgtccccccagaccactcccctagggctcgctcggttgcccccctcccacctcagcgatccccacggaccagaggcctctgcagcaaaggccaacctcgcacttggctccagtcaccagtgtgagagagaaaggtgctggcataggatctgcccagaagagaaaatgacccatgcgcagttgggctctggatacggcgctgtctatagcaagttggccagtctggcctcctgttcctctgctggacctggggtaggctgcaggggtgggcagaagcccctcttaaattgtggttgccatggtaccgagggactcattcctggggctcgctgggacctccctaaacccttcctggaagaaaactggaaccaactctgccctacctccctgcactaaccagctttgaggatggcactgaagaacccttggagcaaacatacctcccttgtgactcccacatcaaccattaaagttatttaacagcagccttcacctggctcctgaggaaaaaaaacctctctctgcctggtctagacctgcctcacatcatccctggagcatagttcaccagctgtgaaacatgactgtgatactgagtaatcagacaaaggctgggtggagcgggtactttatgaatac

SEQ ID NO: 354908 - DNA, 3180 bp, Homo sapiens
gggacagctcggaggagctggggcggagccgcagggcctggcggccgccgagtgaagtgtgactccgtgggcctggcgtggaggcgggggcgctaggctgcagctggctcggaatcggggctggtttcctgtctggaagggaaggggcctgcagaagggagcggggacagcagcagacaggcacacccctgccttcctctctccctctcctcccttctctggaaaagcgagctgggagaacagctgccaccaaagcgagactggacactctgtgcctagagccccctctgcagctggcctttcctcctgggaccccacttatcctcacttcgctttctttttcttccctgcctggctcccggcagggccccggagcagcagtgggcgaggaaaatttgtcacagcagccagaggggtttaacaggagtgcagagggataagggcagcttctgccctctgcccaagagctggccacctctttaaagactgagggaacagtgggaggaggaactgtgggacagtgtggtacctatctgtcccccctctggaggggttgacaagggaaagggcaccggggggcacagagatgcaggacagattgcacatcctggaggacctgaatatgctctacattcggcagatggcactcagcctggaggacacggagttgcagaggaagctagaccatgagatccggatgagggaaggggcctgtaagctgctggcagcctgctcccagcgagagcaggctctggaggccaccaagagcctgctagtgtgcaacagccgcatcctcagctacatgggcgagctgcagcggcgcaaggaggcgcaggtgctggggaagacaagccggcggccttctgacagtggcccgcccgctgagcgctccccctgccgcggccgggtctgcatctctgacctccggattccactcatgtggaaggacacagaatatttcaagaacaaaggtgacttgcaccgctgggctgtgttcctgctgctgcagctgggggaacacatccaggacacagagatgatcctagtggacaggaccctcacagacatctcctttcagagcaatgtgctcttcgctgaggcggggccagactttgaactgcggttagagctgtatggggcctgtgtggaagaagagggggccctgactggcggccccaagaggcttgccaccaaactcagcagctccctgggccgctcctcagggaggcgtgtccgggcatcgctggacagtgctgggggttcagggagcagtcccatcttgctccccaccccagttgttggtggtcctcgttaccacctcttggctcacaccacactcaccctggcagcagtgcaagatggattccgcacacatgacctcacccttgccagtcatgaggagaaccctgcctggctgcccctttatggtagcgtgtgttgccgtctggcagctcagcctctctgcatgactcagcccactgcaagtggtaccctcagggtgcagcaagctggggagatgcagaactgggcacaagtgcatggagttctgaaaggcacaaacctcttctgttaccggcaacctgaggatgcagacactggggaagagccgctgcttactattgctgtcaacaaggagactcgagtccgggcaggggagctggaccaggctctaggacggcccttcaccctaagcatcagtaaccagtatggggatgatgaggtgacacacacccttcagacagaaagtcgggaagcactgcagagctggatggaggctctgtggcagcttttctttgacatgagccaatggaagcagtgctgtgatgaaatcatgaaaattgaaactcctgctccccggaaaccaccccaagcactggcaaagcaggggtccttgtaccatgagatggctattgagccgctggatgacatcgcagcggtgacagacatcctgacccagcgggagggcgcaaggctggagacacccccaccctggctggcaatgtttacagaccagcctgccctgcctaacccctgctcgcctgcctcagtggccccagccccagactggacccaccccctgccctgggggagaccccgaaccttttccctggatgctgtccccccagaccactcccctagggctcgctcggttgcccccctcccacctcagcgatccccacggaccagaggcctctgcagcaaaggccaacctcgcacttggctccagtcaccagtgtgagagagaaaggtgctggcataggatctgcccagaagagaaaatgacccatgcgcagttgggctctggatacggcgctgtctatagcaagttggccagtctggcctcctgttcctctgctggacctggggtaggctgcaggggtgggcagaagcccctcttaaattgtggttgccatggtaccgagggactcattcctggggctcgctgggacctccctaaacccttcctggaagaaaactggaaccaactctgccctacctccctgcactaaccagctttgaggatggcactgaagaacccttggagcaaacatacctcccttgtgactcccacatcaaccattaaagttatttaaaaaaaaaaaacaaaaaaaaaaaaaaaacacaggcggcggggcgcgcgccccggcgccccccccgcaaacacgcctcaaaccacacaacccgcgaggggagagcgcgcgcgggccccacgcggcggcacacaggagaacaagggcgccaaacgacggtgtaccccacaagagagagaaaccgcggggacaagagaagacaaaagggcgcgggagactcttcacaaccacaatacaacaaagcgcgcccgcggcggcaacaaccgagaaggccatcggagaaacacaaaccactacaaacgcagagagactcacacacgcgagcgcgcacacacacacgaggcgagcccaccacccccccaccgccacggagcgccacacaaacgagagcgacacagacaacaaacgcaagactatgagccgccaccgaaacaacaggagagaaccaacccaagaccaaccaacacagagaacccacaaccccaacataacacacaaaggaaagaacgtcaaccacaaccaccaggtaccaacaacacagcacaaacacacccaaccagaaacccacccaaacaaaaacgaacaacaa

SEQ ID NO: 354909 - DNA, 2650 bp, Homo sapiens
gggacagctcggaggagctggggcggagccgcagggcctggcggccgccgagtgaagtgtgactccgtgggcctggcgtggaggcgggggcgctaggctgcagctggctcggaatcggggctggtttcctgtctggaagggaaggggcctgcagaagggagcggggacagcagcagacaggcacacccctgccttcctctctccctctcctcccttctctggaaaagcgagctgggagaacagctgccaccaaagcgagactggacactctgtgcctagagccccctctgcagctggcctttcctcctgggaccccacttatcctcacttcgctttctttttcttccctgcctggctcccggcagggccccggagcagcagtgggcgaggaaaatttgtcacagcagccagaggggtttaacaggagtgcagagggataagggcagcttctgccctctgcccaagagctggccacctctttaaagactgagggaacagtgggaggaggaactgtgggacagtgtggtacctatctgtcccccctctggaggggttgacaagggaaagggcaccggggggcacagagatgcaggacagattgcacatcctggaggacctgaatatgctctacattcggcagatggcactcagcctggaggacacggagttgcagaggaagctagaccatgagatccggatgagggaaggggcctgtaagctgctggcagcctgctcccagcgagagcaggctctggaggccaccaagagcctgctagtgtgcaacagccgcatcctcagctacatgggcgagctgcagcggcgcaaggaggcgcaggtgctggggaagacaagccggcggccttctgacagtggcccgcccgctgagcgctccccctgccgcggccgggtctgcatctctgacctccggattccactcatgtggaaggacacagaatatttcaagaacaaaggtgacttgcaccgctgggctgtgttcctgctgctgcagctgggggaacacatccaggacacagagatgatcctagtggacaggaccctcacagacatctcctttcagagcaatgtgctcttcgctgaggcggggccagactttgaactgcggttagagctgtatggggcctgtgtggaagaagagggggccctgactggcggccccaagaggcttgccaccaaactcagcagctccctgggccgctcctcagggaggcgtgtccgggcatcgctggacagtgctgggggttcagggagcagtcccatcttgctccccaccccagttgttggtggtcctcgttaccacctcttggctcacaccacactcaccctggcagcagtgcaagatggattccgcacacatgacctcacccttgccagtcatgaggagaaccctgcctggctgcccctttatggtagcgtgtgttgccgtctggcagctcagcctctctgcatgactcagcccactgcaagtggtaccctcagggtgcagcaagctggggagatgcagaactgggcacaagtgcatggagttctgaaaggcacaaacctcttctgttaccggcaacctgaggatgcagacactggggaagagccgctgcttactattgctgtcaacaaggagactcgagtccgggcaggggagctggaccaggctctaggacggcccttcaccctaagcatcagtaaccagtatggggatgatgaggtgacacacacccttcagacagaaagtcgggaagcactgcagagctggatggaggctctgtggcagcttttctttgacatgagccaatggaagcagtgctgtgatgaaatcatgaaaattgaaactcctgctccccggaaaccaccccaagcactggcaaagcaggggtccttgtaccatgagatggctattgagccgctggatgacatcgcagcggtgacagacatcctgacccagcgggagggcgcaaggctggagacacccccaccctggctggcaatgtttacagaccagcctgccctgcctaacccctgctcgcctgctcggttgcccccctcccacctcagcgatccccacggaccagaggcctctgcagcaaaggccaacctcgcacttggctccagtcaccagtgtgagagagaaaggtgctggcataggatctgcccagaagagaaaatgacccatgcgcagttgggctctggatacggcgctgtctatagcaagttggccagtctggcctcctgttcctctgctggacctggggtaggctgcaggggtgggcagaagcccctcttaaattgtggttgccatggtaccgagggactcattcctggggctcgctgggacctccctaaacccttcctggaagaaaactggaaccaactctgccctacctccctgcactaaccagctttgaggatggcactgaagaacccttggagcaaacatacctcccttgtgactcccacatcaaccattaaagttatttaacagcagccttcacctggctcctgaggaaaaaaaacctctctctgcctggtctagacctgcctcacatcatccctggagcatagttcaccagctgtgaaacatgactgtgatactgagtaatcagacaaaggctgggtggagcgggtactttatgaatac

SEQ ID NO: 354910 - DNA, 2147 bp, Homo sapiens
gagagaggagccctgagcttgtgccttatgtgtgagttaatgtggcttgagtgtccctggtgtccccaagcctggcaaactgctgggttcaatgaacaactttcccttatagtccctcagccctgcctgtcggcctggctgggaacctggtggctgaggcgctgggatcagggggatcctagagtcgttgggaccagagcaagggggaatagtggctagaggccaggccaggacattgtgatttatccacaggccttctgacagtggcccgcccgctgagcgctccccctgccgcggccgggtctgcatctctgacctccggattccactcatgtggaaggacacagaatatttcaagaacaaaggtgacttgcaccgctgggctgtgttcctgctgctgcagctgggggaacacatccaggacacagagatgatcctagtggacaggaccctcacagacatctcctttcagagcaatgtgctcttcgctgaggcggggccagactttgaactgcggttagagctgtatggggcctgtgtggaagaagagggggccctgactggcggccccaagaggcttgccaccaaactcagcagctccctgggccgctcctcagggaggcgtgtccgggcatcgctggacagtgctgggggttcagggagcagtcccatcttgctccccaccccagttgttggtggtcctcgttaccacctcttggctcacaccacactcaccctggcagcagtgcaagatggattccgcacacatgacctcacccttgccagtcatgaggagaaccctgcctggctgcccctttatggtagcgtgtgttgccgtctggcagctcagcctctctgcatgactcagcccactgcaagtggtaccctcagggtgcagcaagctggggagatgcagaactgggcacaagtgcatggagttctgaaaggcacaaacctcttctgttaccggcaacctgaggatgcagacactggggaagagccgctgcttactattgctgtcaacaaggagactcgagtccgggcaggggagctggaccaggctctaggacggcccttcaccctaagcatcagtaaccagtatggggatgatgaggtgacacacacccttcagacagaaagtcgggaagcactgcagagctggatggaggctctgtggcagcttttctttgacatgagccaatggaagcagtgctgtgatgaaatcatgaaaattgaaactcctgctccccggaaaccaccccaagcactggcaaagcaggggtccttgtaccatgagatggctattgagccgctggatgacatcgcagcggtgacagacatcctgacccagcgggagggcgcaaggctggagacacccccaccctggctggcaatgtttacagaccagcctgccctgcctaacccctgctcgcctgcctcagtggccccagccccagactggacccaccccctgccctgggggagaccccgaaccttttccctggatgctgtccccccagaccactcccctagggctcgctcggttgcccccctcccacctcagcgatccccacggaccagaggcctctgcagcaaaggccaacctcgcacttggctccagtcaccagtgtgagagagaaaggtgctggcataggatctgcccagaagagaaaatgacccatgcgcagttgggctctggatacggcgctgtctatagcaagttggccagtctggcctcctgttcctctgctggacctggggtaggctgcaggggtgggcagaagcccctcttaaattgtggttgccatggtaccgagggactcattcctggggctcgctgggacctccctaaacccttcctggaagaaaactggaaccaactctgccctacctccctgcactaaccagctttgaggatggcactgaagaacccttggagcaaacatacctcccttgtgactcccacatcaaccattaaagttatttaacagcagccttcacctggctcctgaggaaaaaaaacctctctctgcctggtctagacctgcctcacatcatccctggagcatagttcaccagctgtgaaacatgactgtgatactgagtaatcagacaaaggctgggtggagcgggtactttatgaatac

SEQ ID NO: 354911 - DNA, 3210 bp, Homo sapiens
  misc_feature (3096)..(3096): n is a, c, g, or t
  misc_feature (3101)..(3101): n is a, c, g, or t
  misc_feature (3104)..(3104): n is a, c, g, or t
  misc_feature (3117)..(3117): n is a, c, g, or t
  misc_feature (3209)..(3209): n is a, c, g, or t
gggacagctcggaggagctggggcggagccgcagggcctggcggccgccgagtgaagtgtgactccgtgggcctggcgtggaggcgggggcgctaggctgcagctggctcggaatcggggctggtttcctgtctggaagggaaggggcctgcagaagggagcggggacagcagcagacaggcacacccctgccttcctctctccctctcctcccttctctggaaaagcgagctgggagaacagctgccaccaaagcgagactggacactctgtgcctagagccccctctgcagctggcctttcctcctgggaccccacttatcctcacttcgctttctttttcttccctgcctggctcccggcagggccccggagcagcagtgggcgaggaaaatttgtcacagcagccagaggggtttaacaggagtgcagagggataagggcagcttctgccctctgcccaagagctggccacctctttaaagactgagggaacagtgggaggaggaactgtgggacagtgtggtacctatctgtcccccctctggaggggttgacaagggaaagggcaccggggggcacagagatgcaggacagattgcacatcctggaggacctgaatatgctctacattcggcagatggcactcagcctggaggacacggagttgcagaggaagctagaccatgagatccggatgagggaaggggcctgtaagctgctggcagcctgctcccagcgagagcaggctctggaggccaccaagagcctgctagtgtgcaacagccgcatcctcagctacatgggcgagctgcagcggcgcaaggaggcgcaggtgctggggaagacaagccggcggccttctgacagtggcccgcccgctgagcgctccccctgccgcggccgggtctgcatctctgacctccggattccactcatgtggaaggacacagaatatttcaagaacaaaggtgacttgcaccgctgggctgtgttcctgctgctgcagctgggggaacacatccaggacacagagatgatcctagtggacaggaccctcacagacatctcctttcagagcaatgtgctcttcgctgaggcggggccagactttgaactgcggttagagctgtatggggcctgtgtggaagaagagggggccctgactggcggccccaagaggcttgccaccaaactcagcagctccctgggccgctcctcagggaggcgtgtccgggcatcgctggacagtgctgggggttcagggagcagtcccatcttgctccccaccccagttgttggtggtcctcgttaccacctcttggctcacaccacactcaccctggcagcagtgcaagatggattccgcacacatgacctcacccttgccagtcatgaggagaaccctgcctggctgcccctttatggtagcgtgtgttgccgtctggcagctcagcctctctgcatgactcagcccactgcaagtggtaccctcagggtgcagcaagctggggagatgcagaactgggcacaagtgcatggagttctgaaaggcacaaacctcttctgttaccggcaacctgaggatgcagacactggggaagagccgctgcttactattgctgtcaacaaggtgatgggtcccttggtagtaaggccaccaagggcacaggcccaggagcctctccttcaggccccaggagggtgggcacatacctcagagagatagaagcaggcctcctgctcctgacagtgccacatccagcttcaggggcccgtattttccccaactacagcatcactgtgagaggatcgtcccattcacttgccatcctcagtccctgccaaatctcagagagggttctctcgcctgcaggttcagggcttttcatcctctctccctcttctccctcagattccaatttatatctactttaccacttcccatttctctccaggtccaattgcccttctttgctccctatcccttttatgggctttcctgcctactttttgtcagttctgagggacctctggctggagcatccttgcctacctttgtgtcttccctgccttgctcaatccctttttccctgtctcaagctgctcctcctcccctgactcaggactggctgtctcatccccagcccttttttgccattccttcctactctggtcagtaggaggcaaatgagagggctcagcaaaagccccacaagctcattcttctaaggcaggcgtgatcaaggctgcctgattgtcactgccaacttctgtgaccaaggtagacctcttctttctcctgcaggagactcgagtccgggcaggggagctggaccaggctctaggacggcccttcaccctaagcatcagtaaccagtatggggatgatgaggtgacacacacccttcagacagaaagtcgggaagcactgcagagctggatggaggctctgtggcagcttttctttgacatgagccaatggaagcagtgctgtgatgaaatcatgaaaattgaaactcctgctccccggaaaccaccccaagcactggcaaagcaggggtccttgtaccatgagatggctattgagccgctggatgacatcgcagcggtgacagacatcctgacccagcgggagggcgcaaggctggagacacccccaccctggctggcaatgtttacagaccagcctgccctgcctaacccctgctcgcctgcctcagtggccccagccccagactggacccaccccctgccctgggggagaccccgaaccttttccctggatgctgtccccccagaccactcccctagggctcgctcggttgcccccctcccacctcagcgatccccacggaccagaggcctctgcagcaaaggccaacctcgcacttggctccagtcaccagtgtgagagagaaaggtgctggcataggatctgcccagaagagaaaatgacccatgcgcagttgggctctggatacggcgctgtctatagcaagttggccagtctggcctcctgttcctctgctggacctggggtaggctgcaggggtgggcagaagcccctcttaaattgtggttgccactgcgctncccgncgnaccccaccccccncgcgcctccgcctcgcccccccccccccccccccccgcgcccccacacccccccccccccccccccccccccccccacccaccccccccccnc

SEQ ID NO: 354912 - DNA, 2288 bp, Homo sapiens
gggacagctcggaggagctggggcggagccgcagggcctggcggccgccgagtgaagtgtgactccgtgggcctggcgtggaggcgggggcgctaggctgcagctggctcggaatcggggctggtttcctgtctggaagggaaggggcctgcagaagggagcggggacagcagcagacaggcacacccctgccttcctctctccctctcctcccttctctggaaaagcgagctgggagaacagctgccaccaaagcgagactggacactctgtgcctagagccccctctgcagctggcctttcctcctgggaccccacttatcctcacttcgctttctttttcttccctgcctggctcccggcagggccccggagcagcagtgggcgaggaaaatttgtcacagcagccagaggggtttaacaggagtgcagagggataagggcagcttctgccctctgcccaagagctggccacctctttaaagactgagggaacagtgggaggaggaactgtgggacagtgtggtacctatctgtcccccctctggaggggttgacaagggaaagggcaccggggggcacagagatgcaggacagattgcacatcctggaggacctgaatatgctctacattcggcagatggcactcagcctggaggacacggagttgcagaggaagctagaccatgagatccggatgagggaaggggcctgtaagctgctggcagcctgctcccagcgagagcaggctctggaggccaccaagagcctgctagtgtgcaacagccgcatcctcagctacatgggcgagctgcagcggcgcaaggaggcgcaggtgctggggaagacaagccggcggccttctgacagtggcccgcccgctgagcgctccccctgccgcggccgggtctgcatctctgacctccggattccactcatgtggaaggacacagaatatttcaagaacaaaggtgacttgcaccgctgggctgtgttcctgctgctgcagctgggggaacacatccaggacacagagatgatcctagtggacaggaccctcacagacatctcctttcagagcaatgtgctcttcgctgaggcggggccagactttgaactgcggttagagctgtatggggcctgtgtggaagaagagggggccctgactggcggccccaagaggcttgccaccaaactcagcagctccctgggccgctcctcagggaggcgtgtccgggcatcgctggacagtgctgggggttcagggagcagtcccatcttgctccccaccccagttgttggtggtcctcgttaccacctcttggctcacaccacactcaccctggcagcagtgcaagatggattccgcacacatgacctcacccttgccagtcatgaggagaaccctgcctggctgcccctttatggtagcgtgtgttgccgtctggcagctcagcctctctgcatgactcagcccactgcaagtggtaccctcagggtgcagcaagctggggagatgcagaactgggcacaagtgcatggagttctgaaaggcacaaacctcttctgttaccggcaacctgaggatgcagacactggggaagagccgctgcttactattgctgtcaacaaggagactcgagtccgggcaggggagctggaccaggctctaggacggcccttcaccctaagcatcagtaaccagtatggggatgatgaggtgacacacacccttcagacagaaagtcgggaagcactgcagagctggatggaggctctgtggcagcttttctttgacatgagccaatggaagcagtgctgtgatgaaatcatgaaaattgaaactcctgctccccggaaaccaccccaagcactggcaaagcaggggtccttgtaccatgagatggctattgagccgctggatgacatcgcagcggtgacagacatcctgacccagcgggagggcgcaaggctggagacacccccaccctggctggcaatgtttacagaccagcctgccctgcctaacccctgctcgcctgcctcagtggccccagccccagactggacccaccccctgccctgggggagaccccgaaccttttccctggatgctgtccccccagaccactcccctagggctcgctcggttgcccccctcccacctcagcgatccccacggaccagaggcctctgcagcaaaggcactctggttagtgcagggaggtagggcagagttggttccagttttcttccaggaagggtttagggaggtcccagcgagccac

SEQ ID NO: 354913 - DNA, 3040 bp, Homo sapiens
gggacagctcggaggagctggggcggagccgcagggcctggcggccgccgagtgaagtgtgactccgtgggcctggcgtggaggcgggggcgctaggctgcagctggctcggaatcggggctggtttcctgtctggaagggaaggggcctgcagaagggagcggggacagcagcagacaggcacacccctgccttcctctctccctctcctcccttctctggaaaagcgagctgggagaacagctgccaccaaagcgagactggacactctgtgcctagagccccctctgcagctggcctttcctcctgggaccccacttatcctcacttcgctttctttttcttccctgcctggctcccggcagggccccggagcagcagtgggcgaggaaaatttgtcacagcagccagaggggtttaacaggagtgcagagggataagggcagcttctgccctctgcccaagagctggccacctctttaaagactgagggaacagtgggaggaggaactgtgggacagtgtggtacctatctgtcccccctctggaggggttgacaagggaaagggcaccggggggcacagagatgcaggacagattgcacatcctggaggacctgaatatgctctacattcggcagatggcactcagcctggaggacacggagttgcagaggaagctagaccatgagatccggatgagggaaggggcctgtaagctgctggcagcctgctcccagcgagagcaggctctggaggccaccaagagcctgctagtgtgcaacagccgcatcctcagctacatgggcgagctgcagcggcgcaaggaggcgcaggtgctggggaagacaagccggcggccttctgacagtggcccgcccgctgagcgctccccctgccgcggccgggtctgcatctctgacctccggattccactcatgtggaaggacacagaatatttcaagaacaaaggtgacttgcaccgctgggctgtgttcctgctgctgcagctgggggaacacatccaggacacagagatgatcctagtggacaggaccctcacagacatctcctttcagagcaatgtgctcttcgctgaggcggggccagactttgaactgcggttagagctgtatggggcctgtgtggaagaagagggggccctgactggcggccccaagaggcttgccaccaaactcagcagctccctgggccgctcctcagggaggcgtgtccgggcatcgctggacagtgctgggggttcagggagcagtcccatcttgctccccaccccagttgttggtggtcctcgttaccacctcttggctcacaccacactcaccctggcagcagtgcaagatggattccgcacacatgacctcacccttgccagtcatgaggagaaccctgcctggctgcccctttatggtagcgtgtgttgccgtctggcagctcagcctctctgcatgactcagcccactgcaagtggtaccctcagggtgcagcaagctggggagatgcagaactgggcacaagtgcatggagttctgaaaggcacaaacctcttctgttaccggcaacctgaggatgcagacactggggaagagccgctgcttactattgctgtcaacaaggtgatgggtcccttggtagtaaggccaccaagggcacaggcccaggagcctctccttcaggccccaggagggtgggcacatacctcagagagatagaagcaggcctcctgctcctgacagtgccacatccagcttcaggggcccgtattttccccaactacagcatcactgtgagaggatcgtcccattcacttgccatcctcagtccctgccaaatctcagagagggttctctcgcctgcaggttcagggcttttcatcctctctccctcttctccctcagattccaatttatatctactttaccacttcccatttctctccaggtccaattgcccttctttgctccctatcccttttatgggctttcctgcctactttttgtcagttctgagggacctctggctggagcatccttgcctacctttgtgtcttccctgccttgctcaatccctttttccctgtctcaagctgctcctcctcccctgactcaggactggctgtctcatccccagcccttttttgccattccttcctactctggtcagtaggaggcaaatgagagggctcagcaaaagccccacaagctcattcttctaaggcaggcgtgatcaaggctgcctgattgtcactgccaacttctgtgaccaaggtagacctcttctttctcctgcaggagactcgagtccgggcaggggagctggaccaggctctaggacggcccttcaccctaagcatcagtaaccagtatggggatgatgaggtgacacacacccttcagacagaaagtcgggaagcactgcagagctggatggaggctctgtggcagcttttctttgacatgatcccttgggaagcatgaactgctttccttgaatttcttcatggagtcccatcccccaataacattaggagggggtgcataattgcctcactggatggatgataaaactgaggccacagtgtcgtgaccttctggaggtctcgtagtgaaccagtcacagtcatgactagaccctgggcccctgcacccccaacaccaggcagccaacacaacctatgggcctagccctatgccaggtacaatggagaatatgaataagaaaatatacaccctgttctcaagaggtttgcaaattacttggggagacaagagttgtcttttgagggcagtgccaattcaggtttcagctaagagacatcagtgggagctagaatatggggaaggcttcctggagaggatggatggcactggagctgggcctgaataggtgggacttgccctagagaaggaagctgcacatttcagagctggaaagtatcttagaaaccatttgttccaactcctcatttcacatcagtattataaagtcttaattaactataaaatactacataaatgtaaagt

SEQ ID NO: 354914 - DNA, 2409 bp, Homo sapiens
gggacagctcggaggagctggggcggagccgcagggcctggcggccgccgagtgaagtgtgactccgtgggcctggcgtggaggcgggggcgctaggctgcagctggctcggaatcggggctggtttcctgtctggaagggaaggggcctgcagaagggagcggggacagcagcagacaggcacacccctgccttcctctctccctctcctcccttctctggaaaagcgagctgggagaacagctgccaccaaagcgagactggacactctgtgcctagagccccctctgcagctggcctttcctcctgggaccccacttatcctcacttcgctttctttttcttccctgcctggctcccggcagggccccggagcagcagtgggcgaggaaaatttgtcacagcagccagaggggtttaacaggagtgcagagggataagggcagcttctgccctctgcccaagagctggccacctctttaaagactgagggaacagtgggaggaggaactgtgggacagtgtggtacctatctgtcccccctctggaggggttgacaagggaaagggcaccggggggcacagagatgcaggacagattgcacatcctggaggacctgaatatgctctacattcggcagatggcactcagcctggaggacacggagttgcagaggaagctagaccatgagatccggatgagggaaggggcctgtaagctgctggcagcctgctcccagcgagagcaggctctggaggccaccaagagcctgctagtgtgcaacagccgcatcctcagctacatgggcgagctgcagcggcgcaaggaggcgcaggtgctggggaagacaagccggcggccttctgacagtggcccgcccgctgagcgctccccctgccgcggccgggtctgcatctctgacctccggattccactcatgtggaaggacacagaatatttcaagaacaaaggtgacttgcaccgctgggctgtgttcctgctgctgcagctgggggaacacatccaggacacagagatgatcctagtggacaggaccctcacagacatctcctttcagagcaatgtgctcttcgctgaggcggggccagactttgaactgcggttagagctgtatggggcctgtgtggaagaagagggggccctgactggcggccccaagaggcttgccaccaaactcagcagctccctgggccgctcctcagggaggcgtgtccgggcatcgctggacagtgctgggggttcagggagcagtcccatcttgctccccaccccagttgttggtggtcctcgttaccacctcttggctcacaccacactcaccctggcagcagtgcaagatggattccgcacacatgacctcacccttgccagtcatgaggagaaccctgcctggctgcccctttatggtagcgtgtgttgccgtctggcagctcagcctctctgcatgactcagcccactgcaagtggtaccctcagggtgcagcaagctggggagatgcagaactgggcacaagtgcatggagttctgaaaggcacaaacctcttctgttaccggcaacctgaggatgcagacactggggaagagccgctgcttactattgctgtcaacaaggagactcgagtccgggcaggggagctggaccaggctctaggacggcccttcaccctaagcatcagtaaccagtatggggatgatgaggtgacacacacccttcagacagaaagtcgggaagcactgcagagctggatggaggctctgtggcagcttttctttgacatgagccaatggaagcagtgctgtgatgaaatcatgaaaattgaaactcctgctccccggaaaccaccccaagcactggcaaagcaggggtccttgtaccatgagatggctattgagccgctggatgacatcgcagcggtgacagacatcctgacccagcgggagggcgcaaggctggagacacccccaccctggctggcaatgtttacagaccagcctgccctgcctaacccctgctcgcctgcaagcccctcttaaattgtggttgccatggtaccgagggactcattcctggggctcgctgggacctccctaaacccttcctggaagaaaactggaaccaactctgccctacctccctgcactaaccagctttgaggatggcactgaagaacccttggagcaaacatacctcccttgtgactcccacatcaaccattaaagttatttaacagcagccttcacctggctcctgaggaaaaaaaacctctctctgcctggtctagacctgcctcacatcatccctggagcatagttcaccagctgtgaaacatgactgtgatactgagtaatcagacaaaggctgggtggagcgggtactttatgaatac

SEQ ID NO: 354915 - DNA, 1670 bp, Homo sapiens
gggacagctcggaggagctggggcggagccgcagggcctggcggccgccgagtgaagtgtgactccgtgggcctggcgtggaggcgggggcgctaggctgcagctggctcggaatcggggctggtttcctgtctggaagggaaggggcctgcagaagggagcggggacagcagcagacaggcacacccctgccttcctctctccctctcctcccttctctggaaaagcgagctgggagaacagctgccaccaaagcgagactggacactctgtgcctagagccccctctgcagctggcctttcctcctgggaccccacttatcctcacttcgctttctttttcttccctgcctggctcccggcagggccccggagcagcagtgggcgaggaaaatttgtcacagcagccagaggggtttaacaggagtgcagagggataagggcagcttctgccctctgcccaagagctggccacctctttaaagactgagggaacagtgggaggaggaactgtgggacagtgtggtacctatctgtcccccctctggaggggttgacaagggaaagggcaccggggggcacagagatgcaggacagattgcacatcctggaggacctgaatatgctctacattcggcagatggcactcagcctggaggacacggagttgcagaggaagctagaccatgagatccggatgagggaaggggcctgtaagctgctggcagcctgctcccagcgagagcaggctctggaggccaccaagagcctgctagtgtgcaacagccgcatcctcagctacatgggcgagctgcagcggcgcaaggaggcgcaggtgctggggaagacaagccggcggccttctgacagtggcccgcccgctgagcgctccccctgccgcggccgggtctgcatctctgacctccggattccactcatgtggaaggacacagaatatttcaagaacaaaggtgacttgcaccgctgggctgtgttcctgctgctgcagctgggggaacacatccaggacacagagatgatcctagtggacaggaccctcacagacatctcctttcagagcaatgtgctcttcgctgaggcggggccagactttgaactgcggttagagctgtatggggcctgtgtggaagaagagggggccctgactggcggccccaagaggcttgccaccaaactcagcagctccctgggccgctcctcagggaggcgtgtccgggcatcgctggacagtgctgggggttcagggagcagtcccatcttgctccccaccccagttgttgggtaaggccttgcacaccgacaccaccctcagctgcctgtattctgcccacaggtgacctttgaactgtgttgagtgtgcagaacccattttgcattgctgccaggatgtgcagacagatatgaatgagcagtggccacgtagctgggaggcattccagcccacgccccagagctgggctgaagccagtccagaagaccagtgggaaggcagggagacttaggccctggggtcttacctttttagcagcagcaaatacattttatttttagagacagggtctcactatgttgcccaggagttcgagacctgcctgggcaatatagcgagaccccgttctccagaaaaaggaaaaaaaaaaacaaaagac

SEQ ID NO: 354916 - DNA, 707 bp, Homo sapiens
aggaggaggtccccaacggagaagaccactctaaaactgtggatacccccgggagccaggaattcggcatgagtccccagaccactcccctagggctcgctcggttgcccccctcccacctcagcgatccccacggaccagaggcctctgcagcaaaggccaacctcgcacttggctccagtcaccagtgtgagagagaaaggtgctggcataggatctgcccagaagagaaaatgacccatgcgcagttgggctctggatacggcgctgtctatagcaagttggccagtctggcctcctgttcctctgctggacctggggtaggctgcaggggtgggcagaagcccctcttaaattgtggttgccatggtaccgagggactcattcctggggctcgctgggacctccctaaacccttcctggaagaaaactggaaccaactctgccctacctccctgcactaaccagctttgaggatggcactgaagaacccttggagcaaacatacctcccttgtgactcccacatcaaccattaaagttatttaacagcagccttcacctggctcctgaggaaaaaaaacctctctctgcctggtctagacctgcctcacatcatccctggagcatagttcaccagctgtgaaacatgactgtgatactgagtaatcagacaaaggctgggtggagcgggtactttatgaatac

SEQ ID NO: 354917 - DNA, 413 bp, Homo sapiens
gatccgcctgcctctgcctcccaaagtgctgggattacaggcgtgagccaccgtgcccggctgttatatatttttttagaggtggggtctcactatgttgcccaggctggccttgatctcctaggctcaagggatcctcccacctcagcctccctcacacaccactgcacctggctacaaagcttctctggttattcgtgggcagctgagattgagacccaatgcctgctcttgaactgcctaaaacattagtttcttgtcagttttactggccacagcccacctggggactggggagtgctttagcctgtccactgactgacatttccttctcacccttcccccaaccctggctaggacacggagttgcagaggaagctagaccatgagatccggatgagggaaggggcctg

SEQ ID NO: 354918 - DNA, 344 bp, Homo sapiens
gcggccgcttccgactcagcctcttcagcgacctgcccgaggtgagagactcgcgtccctgccttccccttccgcggctcccgggggcagccccagccacctcggcctccttccctcgcccgcgtgcacgccgaggggcggagacgcacggtctgggtacaaacccgacggagttgttgacttaaaaagtaaggtgtggacggtctgcattttcatcggatccatgctgcccattccgcggcctggttaggattatctgcctgagcctggaaaaagcccgggttggtctcaatttgtagggccccagctcgactcctaaaatgtgcctgaaccccaaaatgtct

SEQ ID NO: 354919 - DNA, 397 bp, Homo sapiens
gaggagccctgagcttgtgccttatgtgtgagttaatgtggcttgagtgtccctggtgtccccaagcctggcaaactgctgggttcaatgaacaactttcccttatagtccctcagccctgcctgtcggcctggctgggaacctggtggctgaggcgctgggatcagggggatcctagagtcgttgggaccagagcaagggggaatagtggctagaggccaggccaggacattgtgatttatccacaggccttctgacagtggcccgcccgctgagcgctccccctgccgcggccgggtctgcatctctggtaagaagcacagctaccccagctgctggtaccccttgcccaagcacacggcctcctgccccatctcaacatctattcttacccctc

SEQ ID NO: 354920 - DNA, 482 bp, Homo sapiens
gccaacatgcccctcccttggctgatgctctctcctatctccctcagtggtcctcgttaccacctcttggctcacaccacactcaccctggcagcagtgcaagatggattccgcacacatgacctcacccttgccagtcatggtaagtatgtgtgtgcatgggggacatacacatgtgatggtgagaagaggggctgtgggatggtccccttctcattcccctacctcaccctgcacttcctcctcccccagaggagaaccctgcctggctgcccctttatggtagcgtgtgttgccgtctggcagctcagcctctctgcatgactcagcccactgcaagtggtaccctcagggtgcaggtgagggggccctgaggagtggaagggagcagggagaaggcagaggagagctggataaccaggaatagaagagctaatgaaaaatcaagatttgggtggaagaaatggggtatggccagacga

SEQ ID NO: 354921 - DNA, 2815 bp, Homo sapiens
atcagttgtggccactaggcttaggcggatagcctcgcagaggagcctaggtggggagggggacgaagaaggaacatttgggactgtgggatgttgaaatggtctcttcggaggctgccgggattgaaactgggcaaggtcccagggcccgagtagagccagagcgtgctacgcggcgatccctgagccacggggttttcagcgcccgggaagccaggcttgccaggttggggcggctggcggggcagggcttctcggtccgtcccaagtccaggtaggcgctcgcgacccgcgcgggcagggagaacgcgctcccacagtgctcgcgaggtgcagtgcgcccctgggggctccggggccgtcgggccaggtcggcttggcgcccagggactggccggacgggctgggcctttggcgggggtggaagaggaggttgccgcgccctgcccggcccaggtgtcgtctccgggggcggggtttggagccccgcagcgggagattcccggccggactggcggacgagcgtcgagagacagaagccgaggagaggaggctaagccgggcggcgcggggagcgcactgagcaggcaaagtcgcagggccgccagcatgttctcccgaaaccaccggagccgggtcaccgtggccaggggctccgccctggagatggagttcaaacgcggccgcttccgactcagcctcttcagcgacctgcccgaggacacggagttgcagaggaagctagaccatgagatccggatgagggaaggggcctgtaagctgctggcagcctgctcccagcgagagcaggctctggaggccaccaagagcctgctagtgtgcaacagccgcatcctcagctacatgggcgagctgcagcggcgcaaggaggcgcaggtgctggggaagacaagccggcggccttctgacagtggcccgcccgctgagcgctccccctgccgcggccgggtctgcatctctgacctccggattccactcatgtggaaggacacagaatatttcaagaacaaaggtgacttgcaccgctgggctgtgttcctgctgctgcagctgggggaacacatccaggacacagagatgatcctagtggacaggaccctcacagacatctcctttcagagcaatgtgctcttcgctgaggcggggccagactttgaactgcggttagagctgtatggggcctgtgtggaagaagagggggccctgactggcggccccaagaggcttgccaccaaactcagcagctccctgggccgctcctcagggaggcgtgtccgggcatcgctggacagtgctgggggttcagggagcagtcccatcttgctccccaccccagttgttggtggtcctcgttaccacctcttggctcacaccacactcaccctggcagcagtgcaagatggattccgcacacatgacctcacccttgccagtcatgaggagaaccctgcctggctgcccctttatggtagcgtgtgttgccgtctggcagctcagcctctctgcatgactcagcccactgcaagtggtaccctcagggtgcagcaagctggggagatgcagaactgggcacaagtgcatggagttctgaaaggcacaaacctcttctgttaccggcaacctgaggatgcagacactggggaagagccgctgcttactattgctgtcaacaaggagactcgagtccgggcaggggagctggaccaggctctaggacggcccttcaccctaagcatcagtaaccagtatggggatgatgaggtgacacacacccttcagacagaaagtcgggaagcactgcagagctggatggaggctctgtggcagcttttctttgacatgagccaatggaagcagtgctgtgatgaaatcatgaaaattgaaactcctgctccccggaaaccaccccaagcactggcaaagcaggggtccttgtaccatgagatggctattgagccgctggatgacatcgcagcggtgacagacatcctgacccagcgggagggcgcaaggctggagacacccccaccctggctggcaatgtttacagaccagcctgccctgcctaacccctgctcgcctgcctcagtggccccagccccagactggacccaccccctgccctgggggagaccccgaaccttttccctggatgctgtccccccagaccactcccctagggctcgctcggttgcccccctcccacctcagcgatccccacggaccagaggcctctgcagcaaaggccaacctcgcacttggctccagtcaccagtgtgagagagaaaggtgctggcataggatctgcccagaagagaaaatgacccatgcgcagttgggctctggatacggcgctgtctatagcaagttggccagtctggcctcctgttcctctgctggacctggggtaggctgcaggggtgggcagaagcccctcttaaattgtggttgccatggtaccgagggactcattcctggggctcgctgggacctccctaaacccttcctggaagaaaactggaaccaactctgccctacctccctgcactaaccagctttgaggatggcactgaagaacccttggagcaaacatacctcccttgtgactcccacatcaaccattaaagttatttaacagcagccttcacctggctcctgaggaaaaaaaacctctctctgcctggtctagacctgcctcacatcatccctggagcatagttcaccagctgtgaaacatgactgtgatactgagtaatcagacaaaggctgggtggagcgggtactttatgaatac

SEQ ID NO: 354922 - DNA, 2753 bp, Homo sapiens
gggacagctcggaggagctggggcggagccgcagggcctggcggccgccgagtgaagtgtgactccgtgggcctggcgtggaggcgggggcgctaggctgcagctggctcggaatcggggctggtttcctgtctggaagggaaggggcctgcagaagggagcggggacagcagcagacaggcacacccctgccttcctctctccctctcctcccttctctggaaaagcgagctgggagaacagctgccaccaaagcgagactggacactctgtgcctagagccccctctgcagctggcctttcctcctgggaccccacttatcctcacttcgctttctttttcttccctgcctggctcccggcagggccccggagcagcagtgggcgaggaaaatttgtcacagcagccagaggggtttaacaggagtgcagagggataagggcagcttctgccctctgcccaagagctggccacctctttaaagactgagggaacagtgggaggaggaactgtgggacagtgtggtacctatctgtcccccctctggaggggttgacaagggaaagggcaccggggggcacagagatgcaggacagattgcacatcctggaggacctgaatatgctctacattcggcagatggcactcagcctggaggacacggagttgcagaggaagctagaccatgagatccggatgagggaaggggcctgtaagctgctggcagcctgctcccagcgagagcaggctctggaggccaccaagagcctgctagtgtgcaacagccgcatcctcagctacatgggcgagctgcagcggcgcaaggaggcgcaggtgctggggaagacaagccggcggccttctgacagtggcccgcccgctgagcgctccccctgccgcggccgggtctgcatctctgacctccggattccactcatgtggaaggacacagaatatttcaagaacaaaggtgacttgcaccgctgggctgtgttcctgctgctgcagctgggggaacacatccaggacacagagatgatcctagtggacaggaccctcacagacatctcctttcagagcaatgtgctcttcgctgaggcggggccagactttgaactgcggttagagctgtatggggcctgtgtggaagaagagggggccctgactggcggccccaagaggcttgccaccaaactcagcagctccctgggccgctcctcagggaggcgtgtccgggcatcgctggacagtgctgggggttcagggagcagtcccatcttgctccccaccccagttgttggtggtcctcgttaccacctcttggctcacaccacactcaccctggcagcagtgcaagatggattccgcacacatgacctcacccttgccagtcatgaggagaaccctgcctggctgcccctttatggtagcgtgtgttgccgtctggcagctcagcctctctgcatgactcagcccactgcaagtggtaccctcagggtgcagcaagctggggagatgcagaactgggcacaagtgcatggagttctgaaaggcacaaacctcttctgttaccggcaacctgaggatgcagacactggggaagagccgctgcttactattgctgtcaacaaggagactcgagtccgggcaggggagctggaccaggctctaggacggcccttcaccctaagcatcagtaaccagtatggggatgatgaggtgacacacacccttcagacagaaagtcgggaagcactgcagagctggatggaggctctgtggcagcttttctttgacatgagccaatggaagcagtgctgtgatgaaatcatgaaaattgaaactcctgctccccggaaaccaccccaagcactggcaaagcaggggtccttgtaccatgagatggctattgagccgctggatgacatcgcagcggtgacagacatcctgacccagcgggagggcgcaaggctggagacacccccaccctggctggcaatgtttacagaccagcctgccctgcctaacccctgctcgcctgcctcagtggccccagccccagactggacccaccccctgccctgggggagaccccgaaccttttccctggatgctgtccccccagaccactcccctagggctcgctcggttgcccccctcccacctcagcgatccccacggaccagaggcctctgcagcaaaggccaacctcgcacttggctccagtcaccagtgtgagagagaaaggtgctggcataggatctgcccagaagagaaaatgacccatgcgcagttgggctctggatacggcgctgtctatagcaagttggccagtctggcctcctgttcctctgctggacctggggtaggctgcaggggtgggcagaagcccctcttaaattgtggttgccatggtaccgagggactcattcctggggctcgctgggacctccctaaacccttcctggaagaaaactggaaccaactctgccctacctccctgcactaaccagctttgaggatggcactgaagaacccttggagcaaacatacctcccttgtgactcccacatcaaccattaaagttatttaacagcagccttcacctggctcctgaggaaaaaaaacctctctctgcctggtctagacctgcctcacatcatccctggagcatagttcaccagctgtgaaacatgactgtgatactgagtaatcagacaaaggctgggtggagcgggtactttatgaatac

SEQ ID NO: 354923 - DNA, 3428 bp, Homo sapiens
gggacagctcggaggagctggggcggagccgcagggcctggcggccgccgagtgaagtgtgactccgtgggcctggcgtggaggcgggggcgctaggctgcagctggctcggaatcggggctggtttcctgtctggaagggaaggggcctgcagaagggagcggggacagcagcagacaggcacacccctgccttcctctctccctctcctcccttctctggaaaagcgagctgggagaacagctgccaccaaagcgagactggacactctgtgcctagagccccctctgcagctggcctttcctcctgggaccccacttatcctcacttcgctttctttttcttccctgcctggctcccggcagggccccggagcagcagtgggcgaggaaaatttgtcacagcagccagaggggtttaacaggagtgcagagggataagggcagcttctgccctctgcccaagagctggccacctctttaaagactgagggaacagtgggaggaggaactgtgggacagtgtggtacctatctgtcccccctctggaggggttgacaagggaaagggcaccggggggcacagagatgcaggacagattgcacatcctggaggacctgaatatgctctacattcggcagatggcactcagcctggaggacacggagttgcagaggaagctagaccatgagatccggatgagggaaggggcctgtaagctgctggcagcctgctcccagcgagagcaggctctggaggccaccaagagcctgctagtgtgcaacagccgcatcctcagctacatgggcgagctgcagcggcgcaaggaggcgcaggtgctggggaagacaagccggcggccttctgacagtggcccgcccgctgagcgctccccctgccgcggccgggtctgcatctctgacctccggattccactcatgtggaaggacacagaatatttcaagaacaaaggtgacttgcaccgctgggctgtgttcctgctgctgcagctgggggaacacatccaggacacagagatgatcctagtggacaggaccctcacagacatctcctttcagagcaatgtgctcttcgctgaggcggggccagactttgaactgcggttagagctgtatggggcctgtgtggaagaagagggggccctgactggcggccccaagaggcttgccaccaaactcagcagctccctgggccgctcctcagggaggcgtgtccgggcatcgctggacagtgctgggggttcagggagcagtcccatcttgctccccaccccagttgttggtggtcctcgttaccacctcttggctcacaccacactcaccctggcagcagtgcaagatggattccgcacacatgacctcacccttgccagtcatgaggagaaccctgcctggctgcccctttatggtagcgtgtgttgccgtctggcagctcagcctctctgcatgactcagcccactgcaagtggtaccctcagggtgcagcaagctggggagatgcagaactgggcacaagtgcatggagttctgaaaggcacaaacctcttctgttaccggcaacctgaggatgcagacactggggaagagccgctgcttactattgctgtcaacaaggtgatgggtcccttggtagtaaggccaccaagggcacaggcccaggagcctctccttcaggccccaggagggtgggcacatacctcagagagatagaagcaggcctcctgctcctgacagtgccacatccagcttcaggggcccgtattttccccaactacagcatcactgtgagaggatcgtcccattcacttgccatcctcagtccctgccaaatctcagagagggttctctcgcctgcaggttcagggcttttcatcctctctccctcttctccctcagattccaatttatatctactttaccacttcccatttctctccaggtccaattgcccttctttgctccctatcccttttatgggctttcctgcctactttttgtcagttctgagggacctctggctggagcatccttgcctacctttgtgtcttccctgccttgctcaatccctttttccctgtctcaagctgctcctcctcccctgactcaggactggctgtctcatccccagcccttttttgccattccttcctactctggtcagtaggaggcaaatgagagggctcagcaaaagccccacaagctcattcttctaaggcaggcgtgatcaaggctgcctgattgtcactgccaacttctgtgaccaaggtagacctcttctttctcctgcaggagactcgagtccgggcaggggagctggaccaggctctaggacggcccttcaccctaagcatcagtaaccagtatggggatgatgaggtgacacacacccttcagacagaaagtcgggaagcactgcagagctggatggaggctctgtggcagcttttctttgacatgagccaatggaagcagtgctgtgatgaaatcatgaaaattgaaactcctgctccccggaaaccaccccaagcactggcaaagcaggggtccttgtaccatgagatggctattgagccgctggatgacatcgcagcggtgacagacatcctgacccagcgggagggcgcaaggctggagacacccccaccctggctggcaatgtttacagaccagcctgccctgcctaacccctgctcgcctgcctcagtggccccagccccagactggacccaccccctgccctgggggagaccccgaaccttttccctggatgctgtccccccagaccactcccctagggctcgctcggttgcccccctcccacctcagcgatccccacggaccagaggcctctgcagcaaaggccaacctcgcacttggctccagtcaccagtgtgagagagaaaggtgctggcataggatctgcccagaagagaaaatgacccatgcgcagttgggctctggatacggcgctgtctatagcaagttggccagtctggcctcctgttcctctgctggacctggggtaggctgcaggggtgggcagaagcccctcttaaattgtggttgccatggtaccgagggactcattcctggggctcgctgggacctccctaaacccttcctggaagaaaactggaaccaactctgccctacctccctgcactaaccagctttgaggatggcactgaagaacccttggagcaaacatacctcccttgtgactcccacatcaaccattaaagttatttaacagcagccttcacctggctcctgaggaaaaaaaacctctctctgcctggtctagacctgcctcacatcatccctggagcatagttcaccagctgtgaaacatgactgtgatactgagtaatcagacaaaggctgggtggagcgggtactttatgaatac

SEQ ID NO: 354924 - DNA, 2672 bp, Homo sapiens
gggacagctcggaggagctggggcggagccgcagggcctggcggccgccgagtgaagtgtgactccgtgggcctggcgtggaggcgggggcgctaggctgcagctggctcggaatcggggctggtttcctgtctggaagggaaggggcctgcagaagggagcggggacagcagcagacaggcacacccctgccttcctctctccctctcctcccttctctggaaaagcgagctgggagaacagctgccaccaaagcgagactggacactctgtgcctagagccccctctgcagctggcctttcctcctgggaccccacttatcctcacttcgctttctttttcttccctgcctggctcccggcagggccccggagcagcagtgggcgaggaaaatttgtcacagcagccagaggggtttaacaggagtgcagagggataagggcagcttctgccctctgcccaagagctggccacctctttaaagactgagggaacagtgggaggaggaactgtgggacagtgtggtacctatctgtcccccctctggaggggttgacaagggaaagggcaccggggggcacagagatgcaggacagattgcacatcctggaggacctgaatatgctctacattcggcagatggcactcagcctggaggacacggagttgcagaggaagctagaccatgagatccggatgagggaaggggcctgtaagctgctggcagcctgctcccagcgagagcaggctctggaggccaccaagagcctgctagtgtgcaacagccgcatcctcagctacatgggcgagctgcagcggcgcaaggaggcgcaggtgctggggaagacaagccggcggccttctgacagtggcccgcccgctgagcgctccccctgccgcggccgggtctgcatctctgacctccggattccactcatgtggaaggacacagaatatttcaagaacaaaggtgacttgcaccgctgggctgtgttcctgctgctgcagctgggggaacacatccaggacacagagatgatcctagtggacaggaccctcacagacatctcctttcagagcaatgtgctcttcgctgaggcggggccagactttgaactgcggttagagctgtatggggcctgtgtggaagaagagggggccctgactggcggccccaagaggcttgccaccaaactcagcagctccctgggccgctcctcagggaggcgtgtccgggcatcgctggacagtgctgggggttcagggagcagtcccatcttgctccccaccccagttgttggtggtcctcgttaccacctcttggctcacaccacactcaccctggcagcagtgcaagatggattccgcacacatgacctcacccttgccagtcatgaggagaaccctgcctggctgcccctttatggtagcgtgtgttgccgtctggcagctcagcctctctgcatgactcagcccactgcaagtggtaccctcagggtgcaggatgcagacactggggaagagccgctgcttactattgctgtcaacaaggagactcgagtccgggcaggggagctggaccaggctctaggacggcccttcaccctaagcatcagtaaccagtatggggatgatgaggtgacacacacccttcagacagaaagtcgggaagcactgcagagctggatggaggctctgtggcagcttttctttgacatgagccaatggaagcagtgctgtgatgaaatcatgaaaattgaaactcctgctccccggaaaccaccccaagcactggcaaagcaggggtccttgtaccatgagatggctattgagccgctggatgacatcgcagcggtgacagacatcctgacccagcgggagggcgcaaggctggagacacccccaccctggctggcaatgtttacagaccagcctgccctgcctaacccctgctcgcctgcctcagtggccccagccccagactggacccaccccctgccctgggggagaccccgaaccttttccctggatgctgtccccccagaccactcccctagggctcgctcggttgcccccctcccacctcagcgatccccacggaccagaggcctctgcagcaaaggccaacctcgcacttggctccagtcaccagtgtgagagagaaaggtgctggcataggatctgcccagaagagaaaatgacccatgcgcagttgggctctggatacggcgctgtctatagcaagttggccagtctggcctcctgttcctctgctggacctggggtaggctgcaggggtgggcagaagcccctcttaaattgtggttgccatggtaccgagggactcattcctggggctcgctgggacctccctaaacccttcctggaagaaaactggaaccaactctgccctacctccctgcactaaccagctttgaggatggcactgaagaacccttggagcaaacatacctcccttgtgactcccacatcaaccattaaagttatttaacagcagccttcacctggctcctgaggaaaaaaaacctctctctgcctggtctagacctgcctcacatcatccctggagcatagttcaccagctgtgaaacatgactgtgatactgagtaatcagacaaaggctgggtggagcgggtactttatgaatac

SEQ ID NO: 354925 - DNA, 2666 bp, Homo sapiens
gggacagctcggaggagctggggcggagccgcagggcctggcggccgccgagtgaagtgtgactccgtgggcctggcgtggaggcgggggcgctaggctgcagctggctcggaatcggggctggtttcctgtctggaagggaaggggcctgcagaagggagcggggacagcagcagacaggcacacccctgccttcctctctccctctcctcccttctctggaaaagcgagctgggagaacagctgccaccaaagcgagactggacactctgtgcctagagccccctctgcagctggcctttcctcctgggaccccacttatcctcacttcgctttctttttcttccctgcctggctcccggcagggccccggagcagcagtgggcgaggaaaatttgtcacagcagccagaggggtttaacaggagtgcagagggataagggcagcttctgccctctgcccaagagctggccacctctttaaagactgagggaacagtgggaggaggaactgtgggacagtgtggtacctatctgtcccccctctggaggggttgacaagggaaagggcaccggggggcacagagatgcaggacagattgcacatcctggaggacctgaatatgctctacattcggcagatggcactcagcctggaggacacggagttgcagaggaagctagaccatgagatccggatgagggaaggggcctgtaagctgctggcagcctgctcccagcgagagcaggctctggaggccaccaagagcctgctagtgtgcaacagccgcatcctcagctacatgggcgagctgcagcggcgcaaggaggcgcaggtgctggggaagacaagccggcggccttctgacagtggcccgcccgctgagcgctccccctgccgcggccgggtctgcatctctgacctccggattccactcatgtggaaggacacagaatatttcaagaacaaaggtgacttgcaccgctgggctgtgttcctgctgctgcagctgggggaacacatccaggacacagagatgatcctagtggacaggaccctcacagacatctcctttcagagcaatgtgctcttcgctgaggcggggccagactttgaactgcggttagagctgtatggggcctgtgtggaagaagagggggccctgactggcggccccaagaggcttgccaccaaactcagcagctccctgggccgctcctcagggaggcgtgtccgggcatcgctggacagtgctgggggttcagggagcagtcccatcttgctccccaccccagttgttggtggtcctcgttaccacctcttggctcacaccacactcaccctggcagcagtgcaagatggattccgcacacatgacctcacccttgccagtcatgaggagaaccctgcctggctgcccctttatggtagcgtgtgttgccgtctggcagctcagcctctctgcatgactcagcccactgcaagtggtaccctcagggtgcagcaagctggggagatgcagaactgggcacaagtgcatggagttctgaaaggcacaaacctcttctgttaccggcaacctgaggatgcagacactggggaagagccgctgcttactattgctgtcaacaaggagactcgagtccgggcaggggagctggaccaggctctaggacggcccttcaccctaagcatcagtaaccagtatggggatgatgaggtgacacacacccttcagacagaaagtcgggaagcactgcagagctggatggaggctctgtggcagcttttctttgacatgagccaatggaagcagtgctgtgatgaaatcatgaaaattgaaactcctgctccccggaaaccaccccaagcactggcaaagcaggggtccttgtaccatgagatggctattgagccgctggatgacatcgcagcggtgacagacatcctgacccagcgggagggcgcaaggctggagacacccccaccctggctggcaatgtttacagaccagcctgccctgcctaacccctgctcgcctgcctcagtggccccagccccagactggacccaccccctgccctgggggagaccccgaaccttttccctggatgctgtccccccagaccactcccctagggctcgctcggttgcccccctcccacctcagcgatccccacggaccagaggcctctgcagcaaaggccaacctcgcacttggctccagtcaccagtgtgagagagaaaggtgctggcataggatctgcccagaagagaaaatgacccatgcgcagttgggctctggatacggcgctgtctatagcaagttggccagtctggcctcctgttcctctgctggacctggggtaggctgcaggggtgggcagaagcccctcttaaattgtggttgccatggtaccgagggactcattcctggggctcgctgggacctccctaaacccttcctggaagaaaactggaaccaactctgccctacctccctgcactaaccagctttgaggatggcactgaagaacccttggagcaaacatacctcccttgtgactcccacatcaaccattaaagttatttaactttgtacagcccaacaatagacataaaaacaaaaacaccgagactagttctctctctccctcgtgccggaa

SEQ ID NO: 354926 - DNA, 2294 bp, Homo sapiens
acctcaccctgcacttcctcctcccccagaggagaaccctgcctggctgcccctttatggtagcgtgtgttgccgtctggcagctcagcctctctgcatgactcagcccactgcaagtggtaccctcagggtgcaggtgagggggccctgaggagtggaagggagcagggagaaggcagaggagagctggataaccaggaatagaagagctaatgaaaaatcaagatttgggtggaagaaatggggtatggccagacgaggggaggaatggacagcagggtggacaaaacgaacaggttctcatggggggctgagaagagggatactgggggccgtgacttccccagaaaatgttgagtcatttgtgcagcaagctggggagatgcagaactgggcacaagtgcatggagttctgaaaggcacaaacctcttctgttaccggcaacctgaggatgcagacactggggaagagccgctgcttactattgctgtcaacaaggtgatgggtcccttggtagtaaggccaccaagggcacaggcccaggagcctctccttcaggccccaggagggtgggcacatacctcagagagatagaagcaggcctcctgctcctgacagtgccacatccagcttcaggggcccgtattttccccaactacagcatcactgtgagaggatcgtcccattcacttgccatcctcagtccctgccaaatctcagagagggttctctcgcctgcaggttcagggcttttcatcctctctccctcttctccctcagattccaatttatatctactttaccacttcccatttctctccaggtccaattgcccttctttgctccctatcccttttatgggctttcctgcctactttttgtcagttctgagggacctctggctggagcatccttgcctacctttgtgtcttccctgccttgctcaatccctttttccctgtctcaagctgctcctcctcccctgactcaggactggctgtctcatccccagcccttttttgccattccttcctactctggtcagtaggaggcaaatgagagggctcagcaaaagccccacaagctcattcttctaaggcaggcgtgatcaaggctgcctgattgtcactgccaacttctgtgaccaaggtagacctcttctttctcctgcaggagactcgagtccgggcaggggagctggaccaggctctaggacggcccttcaccctaagcatcagtaaccagtatggggatgatgaggtgacacacacccttcagacagaaagtcgggaagcactgcagagctggatggaggctctgtggcagcttttctttgacatgagccaatggaagcagtgctgtgatgaaatcatgaaaattgaaactcctgctccccggaaaccaccccaagcactggcaaagcaggggtccttgtaccatgagatggctattgagccgctggatgacatcgcagcggtgacagacatcctgacccagcgggagggcgcaaggctggagacacccccaccctggctggcaatgtttacagaccagcctgccctgcctaacccctgctcgcctgcctcagtggccccagccccagactggacccaccccctgccctgggggagaccccgaaccttttccctggatgctgtccccccagaccactcccctagggctcgctcggttgcccccctcccacctcagcgatccccacggaccagaggcctctgcagcaaaggccaacctcgcacttggctccagtcaccagtgtgagagagaaaggtgctggcataggatctgcccagaagagaaaatgacccatgcgcagttgggctctggatacggcgctgtctatagcaagttggccagtctggcctcctgttcctctgctggacctggggtaggctgcaggggtgggcagaagcccctcttaaattgtggttgccatggtaccgagggactcattcctggggctcgctgggacctccctaaacccttcctggaagaaaactggaaccaactctgccctacctccctgcactaaccagctttgaggatggcactgaagaacccttggagcaaacatacctcccttgtgactcccacatcaaccattaaagttatttaacagcagccttcacctggctcctgaggaaaaaaaacctctctctgcctggtctagacctgcctcacatcatccctggagcatagttcaccagctgtgaaacatgactgtgatactgagtaatcagacaaaggctgggtggagcgggtactttatgaatac

SEQ ID NO: 354927 - DNA, 2804 bp, Homo sapiens
gggacagctcggaggagctggggcggagccgcagggcctggcggccgccgagtgaagtgtgactccgtgggcctggcgtggaggcgggggcgctaggctgcagctggctcggaatcggggctggtttcctgtctggaagggaaggggcctgcagaagggagcggggacagcagcagacaggcacacccctgccttcctctctccctctcctcccttctctggaaaagcgagctgggagaacagctgccaccaaagcgagactggacactctgtgcctagagccccctctgcagctggcctttcctcctgggaccccacttatcctcacttcgctttctttttcttccctgcctggctcccggcagggccccggagcagcagtgggcgaggaaaatttgtcacagcagccagaggggtttaacaggagtgcagagggataagggcagcttctgccctctgcccaagagctggccacctctttaaagactgagggaacagtgggaggaggaactgtgggacagtgtggtacctatctgtcccccctctggaggggttgacaagggaaagggcaccggggggcacagagatgcaggacagattgcacatcctggaggacctgaatatgctctacattcggcagatggcactcagcctggaggacacggagttgcagaggaagctagaccatgagatccggatgagggaaggggcctgtaagctgctggcagcctgctcccagcgagagcaggctctggaggccaccaagagcctgctagtgtgcaacagccgcatcctcagctacatgggcgagctgcagcggcgcaaggaggcgcaggtgctggggaagacaagccggcggccttctgacagtggcccgcccgctgagcgctccccctgccgcggccgggtctgcatctctgacctccggattccactcatgtggaaggacacagaatatttcaagaacaaaggtgacttgcaccgctgggctgtgttcctgctgctgcagctgggggaacacatccaggacacagagatgatcctagtggacaggaccctcacagacatctcctttcagagcaatgtgctcttcgctgaggcggggccagactttgaactgcggttagagctgtatggggcctgtgtggaagaagagggggccctgactggcggccccaagaggcttgccaccaaactcagcagctccctgggccgctcctcagggaggcgtgtccgggcatcgctggacagtgctgggggttcagggagcagtcccatcttgctccccaccccagttgttggtggtcctcgttaccacctcttggctcacaccacactcaccctggcagcagtgcaagatggattccgcacacatgacctcacccttgccagtcatgaggagaaccctgcctggctgcccctttatggtagcgtgtgttgccgtctggcagctcagcctctctgcatgactcagcccactgcaagtggtaccctcagggtgcagcaagctggggagatgcagaactgggcacaagtgcatggagttctgaaaggcacaaacctcttctgttaccggcaacctgaggatgcagacactggggaagagccgctgcttactattgctgtcaacaaggtgatgggtcccttggtagtaaggccaccaagggcacaggcccaggagcctctccttcaggccccaggagggtgggcacatacctcagagagatagaagcaggcctcctgctcctgacagtgccacatccagcttcaggggcccgtattttccccaactacagcatcactgtgagaggatcgtcccattcacttgccatcctcagtccctgccaaatctcagagagggttctctcgcctgcaggttcagggcttttcatcctctctccctcttctccctcagattccaatttatatctactttaccacttcccatttctctccaggtccaattgcccttctttgctccctatcccttttatgggctttcctgcctactttttgtcagttctgagggacctctggctggagcatccttgcctacctttgtgtcttccctgccttgctcaatccctttttccctgtctcaagctgctcctcctcccctgactcaggactggctgtctcatccccagcccttttttgccattccttcctactctggtcagtaggaggcaaatgagagggctcagcaaaagccccacaagctcattcttctaaggcaggcgtgatcaaggctgcctgattgtcactgccaacttctgtgaccaaggtagacctcttctttctcctgcaggagactcgagtccgggcaggggagctggaccaggctctaggacggcccttcaccctaagcatcagtaaccagtatggggatgatgaggtgacacacacccttcagacagaaagtcgggaagcactgcagagctggatggaggctctgtggcagcttttctttgacatgagccaatggaagcagtgctgtgatgaaatcatgaaaattgaaactcctgctccccggaaaccaccccaagcactggcaaagcaggggtccttgtaccatgagatgggtaagtgagaggaatgtgaactccaggaagctaatgggaagtagggttggggacttcaagagaaaccagataatggaaacagagagaaagcacactctgggctacaccagatctctggggacccaagtctcacccaatcttgtgtgttcttttctcctctccaactctttttagaaccacctccaccaaagttcaaaacaaaaccccagtgagccaggatca

SEQ ID NO: 354928 - DNA, 1005 bp, Homo sapiens
ggcccaggtgaggggctgctcctgcaggataacgcaatctccactgagatccaggctttgctttcctcctattacagtgacaggtgatagggctgggtaggcttggggcctgagctctgactagcccaaccctcccccaaccccttcctggtgccacagctattgagccgctggatgacatcgcagcggtgacagacatcctgacccagcgggagggcgcaaggctggagacacccccaccctggctggcaatgtttacagaccagcctgccctgcctaacccctgctcgcctgcctcagtggccccagccccagactggacccaccccctgccctgggggagaccccgaaccttttccctggatgctgtccccccagaccactcccctagggctcgctcggttgcccccctcccacctcagcgatccccacggaccagaggcctctgcagcaaaggccaacctcgcacttggctccagtcaccagtgtgagagagaaaggtgctggcataggatctgcccagaagagaaaatgacccatgcgcagttgggctctggatacggcgctgtctatagcaagttggccagtctggcctcctgttcctctgctggacctggggtaggctgcaggggtgggcagaagcccctcttaaattgtggttgccatggtaccgagggactcattcctggggctcgctgggacctccctaaacccttcctggaagaaaactggaaccaactctgccctacctccctgcactaaccagctttgaggatggcactgaagaacccttggagcaaacatacctcccttgtgactcccacatcaaccattaaagttatttaacagcagccttcacctggctcctgaggaaaaaaaacctctctctgcctggtctagacctgcctcacatcatccctggagcatagttcaccagctgtgaaacatgactgtgatactgagtaatcagacaaaggctgggtggagcgggtactttatgaatac

SEQ ID NO: 354929 - DNA, 757 bp, Homo sapiens
  misc_feature (732)..(732): n is a, c, g, or t
  misc_feature (751)..(751): n is a, c, g, or t
tcccaacatgctgggattatgggtgtgagccaccgcacctggccatgtagaccttcttaaaccaacttactcaaaagtagccactcttttggatgaagctacagggtttccatatgtttaaacaaagctcttagtttacatctgtgtccttagccacattttattgcagcatcaataaaactccttagtcccatgttttgattaacttggatgaaattcaaggagtaaagctagaaatagctcacacttatattttataaggtaagtggtttaggttttaaattagcctccactgatctctgttccagagaagttctcaagcattatgggtgaaataaatagggaaaataatgttcatgaaatactcagaacatagtccccttcgaaggaataaagtccccttcaaatttcgtcaccctagaagatcgtgtgtttagcagtgctgccatttgttcaaaacatttttaggattcctcttttgaatctgtatcccatttttgatcaccacagttgcaccaaatctttacattttaaggggtagatttgagcccaggcatgaaatattggaggtagcaggaggcaggagacctggtgcttggtcctgtttttctgcagactttgtggcctttggtgggccacccagcttttttggcccttcattttctcatatggggctcaatgagataatctgaaggtggcttttacaagtgcatatctagttcattgcactgnaatttcactgattagctantcatgt

SEQ ID NO: 354930 - DNA, 5634 bp, Homo sapiens
cccgcgcgtgcgtgctgtgccaaggctgcaaggcgctgaggggagaggcgccgccgtcagcgccgccgcagctgggacccgttagagcggaagcgccgccgccaccgccgcctttgctgtcccccggcctctagttccccgcaggtgggaggtgggagccatgtcgaaacggctccggagcagcgaggtgtgcgctgactgcagcgggccggatccttcctgggcatcagtaaataggggaacgtttttatgtgatgagtgctgcagtgtccatcggagtctagggcgccatatctcccaagtgaggcatctgaaacacacaccgtggcctccaacactgcttcagatggttgagaccttgtataataacggtgctaactctatatgggagcattctttgctggaccctgcgtctattatgagtggaagacgtaaagctaatccacaggataaagtacatcccaataaagcggaattcatcagagccaagtatcagatgttagcgttcgtccatcgcttgccctgccgggatgacgatagtgtgactgccaaagatcttagcaagcaactccattcgagcgtgagaacagggaatcttgaaacctgtttgagactgttatctttaggagcacaagccaacttctttcatcctgaaaaaggaaacaccccactccatgttgcctccaaagcagggcagattttacaggctgaattattggcagtatatggagcagacccaggcacacaggattctagtgggaaaactcccgttgattatgcaaggcaaggagggcaccatgagctggcagagcgcctcgtggaaatacagtatgagctaacggacagactagccttctatctctgtggcaggaaaccagatcacaaaaatggacagcactttataatacctcaaatggcagacagcagcctggatttgtctgaattggcaaaagctgctaagaagaaacttcaatctctaagtaatcatttgtttgaagaacttgccatggatgtgtacgatgaagttgacaggcgagagacggatgcagtctggcttgccacgcaaaaccacagcgccctggtaaccgagacaacggtcgtcccctttcttccggtcaatcctgagtactcatcaacacgaaatcagggcagacagaagttagctcggttcaacgcccatgagtttgccacgctggtcattgacattctcagtgacgccaagaggagacagcagggcagttctctctcgggttcaaaagacaatgtggagctcatactgaaaaccatcaataaccagcacagcgttgagagtcaagacaacgatcagcccgactatgacagcgtggcatcagacgaagacacagatttggaaaccactgcaagcaaaacaaaccggcagaagagcctagattcagatttatcagatggaccagtcactgtacaggaatttatggaggtcaaaaacgctctagtggcttctgaggccaagatacagcagctaatgaaggtgaataacaacttgagtgacgagctgagaattatgcagaaaaagcttcaaacactccagagtgaaaattcgaacctcaggaaacaggccacaaccaatgtatatcaggtgcaaactggttctgagtacacagacacttccaaccactcttccttaaagagacgtccgtctgcccggggcagtaggcccatgtccatgtacgagaccggatcaggtcagaaaccatatctcccaatgggagaagcgagccgccccgaagagagcaggatgagactccagcccttccccgcgcacatcgggaggagtgcacttgtgacctcctcttcatctctgccttccttcccctccacactttcctggtcgagggacgaaagcgcccgaagggcatccaggctggagaagcagaacagcacacctgagagtgactacgacaacactcccaacgacatggagccagatggcatggggtcaagccgaaagggacggcaaagaagtatggtgtggccaggggatggcttggtaccagacacagcagaaccccatgtggccccaagccccactctccctagcaccgaagatgtcatcaggaagactgaacagatcaccaaaaacatacaggagctcttaagagcagcccaagaaaataaacatgacagttatattccctgctcagagaggatacacgtagctgttacagaaatggcagcattattccccaaaaaacccaagtctgatatggtgaggacttcccttcgtttactgacgtccagtgcctaccgactgcagtcagagtgcaagaagaccctcccaggggaccccggctcacccacagacgttcagctggtcacgcagcaggtcatccagtgtgcgtacgacatcgccaaggctgccaagcagctggttaccatcaccaccaaagagaacaacaactgacaagggcagggcaccgcctcctctgttttctaggctttataaagtccaatttcaaattcagacgcagaactcttcagatttctacaaaaagaaacatttaatgacggtttaaaactttttaaaagaaaactcagtattatttttgcatgttttctaaccaattttcaactatttaacccacttgccttattttgtgcctatttgctggtttagtttctgatgttcggttgtgttgtcaacaactgttgagttgatcacatacatccaaaagtatagtttcattgtctaaagtttgtgaaaacttttccatcccttaaaactccctgcctatggctgaaactataaatgaaatttttcataaaacattttcttgagagagttcagttaaaaaagaaaaaatcagcgtcatttgttccctgccaagcatcgtgcaataagtgaatttcctggcctacttcataatctctaagtttggggtatctccaagcatgtatgtagagaaaggactttgccgctttttaaaactagtgtcacagtctctcttgggaggaaacaatgaattggttcatttcttctcagtgttttaccctgttacatgttctgttatttaatgttgttatctcaagctcctatctcttgatgttttcttgtcatcttgaaggctccatggaatgagataaagcattgacccaccacaggacatctcatgaagccatgttcagggtaggagctccacgcacatcaccacccattgtcaggtgctctccctcacccctgtaagccagacagtttgttcaaaacctgcagcaaagagaagcatcagtctaacaagccagaactcattttgtgccacccatttaggtatcactaccatgaactatagggaaaagaaatcacctactccctgacactgtgttgtacccttcatccaaaagtcagcttgcttctctgaccacttacagctttctcacatgagttgcttcacatttttcatcatctttaaggacttcttataaggaaagatgtatcgtatcgcagtcatctgagttagtttctcctccatcacctcatgagtacttaaaaattagacatcaactttcaagagttccttagagagtgtgctctagctggctgcctgctaccccaaagctctgaaagagtaaggttgaagtgctggaacatgctcagattgttttttagttactcaaaagccccttcttgttctgaatgtgaaagctcttcccgttcctgcttactgcagccattctgtgtgtgtggttcagaccctggcctagggccggtgatgtggatgagtgaagggagccaggtacacggcagcagggcagaggagactatggggagcccaccgcctacacagtaggggcagtagcccccagctccacgcctgttgccatgtggaaaagtgggcctagggtggccacagctttgatttttcaagagacaagaaacctagatgttttttggtgccatctctccatttataaatgttggcaaccaatttgaacactttcagagaccatgtgcaggtgagctgtgtcctctaggctgccagctcacagcccccaccccagggccctgtaagctgtgcagtgtgagggcctggcttccccggacacacctggagcagcctctgagtcttacccgtaatggagccggccaaccctgtgtgttatgttgctgtcgctcctgtttttaaccatatgttctgtcccatagcagtcattcacacatgtgaagaagacacaagaatcaaagtacaagttgcctcaatacatgctaataactaagcttctattttcacaggactgatcgatgcacacctttatagcttgaccatatgctgtcatgaaagtagcaccccgacggtgcttgctttactaagtcaccgtgtgtggatgcttttgtcgcattttgcttcactgtgagtagcatgggaaaagggtccacgtctccaaaagactcttccacttgtttgtcccacagccctaagtgccacattgctgttggatgctcccgggatgccttctagaagggggcctcccaccttaagttcaggcgccatctgatagccttttctgcaggcttcatgtccttagctgaccctcctttatcttgcaaacccctgcccctgctgtcccagggaggacgggcttctgtagaggcttctgggaaatgagctgtctgcaggaggtgaagcagtgttttccttggaatgtttgaggacctgcaatagaagatgttgcctttatggccctagagaaagtcaaggaacatggggaccaacaaagcatttccagttgtaagaatatgtcagaagagtgctcggttagcccacggtgccaaaactccaaacaagttccccggtggaatgacgtggccattggagggctgcaggtcgtcctctctgtatgtgccccgcgcatttccttggcctcatctgagatctggtgtcagagttctctgctcctgttggcaaatcgcaccttatctgaacatttgttccagccaccttttgcacatggattccgtaccttgcactagcaatgtctaccttcagtaacgtcgttctttttcaccctgtattctcaatgatcccttcctccccatatgccacccttcccccaaagctgatagggcagaggtgcactttatgaaactggcacttgactgaacagaaggaaacagctgtacctctaagctcctttcacagaaatcgtcatctgccttggaatgcaaatagttcttatttgccaaagaacagtgaattgggcccaaagatcaaacacagcatttcatgtaatcagaattctaaacgcacaactcgggagctgtgcacggcttctcaagtgattcagttgcagaaccaagagcaaaactcgcctgtttttgtcctcaatggcacccatgagctttccaatagtatagttttctttctttccttgtcctggttgaaggtaacgtgttcctagaaaagaaaatgctgcataggaaaactgagatgccttttattccaacgtgtttgatccctgtcactcattattctgtactttttattgtacattctattcctgtaattattgtgccctttaagtgttgtaaaatcgttttggaatttgtgcctgctagttatgcaataaacaggctctacaagtgtttttgtggtaaaaaaaaac

SEQ ID NO: 354931 - DNA, 4755 bp, Homo sapiens
cccgcgcgtgcgtgctgtgccaaggctgcaaggcgctgaggggagaggcgccgccgtcagcgccgccgcagctgggacccgttagagcggaagcgccgccgccaccgccgcctttgctgtcccccggcctctagttccccgcaggtgggaggtgggagccatgtcgaaacggctccggagcagcgaggtgtgcgctgactgcagcgggccggatccttcctgggcatcagtaaataggggaacgtttttatgtgatgagtgctgcagtgtccatcggagtctagggcgccatatctcccaagtgaggcatctgaaacacacaccgtggcctccaacactgcttcagatggttgagaccttgtataataacggtgctaactctatatgggagcattctttgctggaccctgcgtctattatgagtggaagacgtaaagctaatccacaggataaagtacatcccaataaagcggaattcatcagagccaagtatcagatgttagcgttcgtccatcgcttgccctgccgggatgacgatagtgtgactgccaaagatcttagcaagcaactccattcgagcgtgagaacagggaatcttgaaacctgtttgagactgttatctttaggagcacaagccaacttctttcatcctgaaaaaggaaacaccccactccatgttgcctccaaagcagggcagattttacaggctgaattattggcagtatatggagcagacccaggcacacaggattctagtgggaaaactcccgttgattatgcaaggcaaggagggcaccatgagctggcagagcgcctcgtggaaatacagtatgagctaacggacagactagccttctatctctgtggcaggaaaccagatcacaaaaatggacagcactttataatacctcaaatggcagacagcagcctggatttgtctgaattggcaaaagctgctaagaagaaacttcaatctctaagtaatcatttgtttgaagaacttgccatggatgtgtacgatgaagttgacaggcgagagacggatgcagtctggcttgccacgcaaaaccacagcgccctggtaaccgagacaacggtcgtcccctttcttccggtcaatcctgagtactcatcaacacgaaatcagggcagacagaagttagctcggttcaacgcccatgagtttgccacgctggtcattgacattctcagtgacgccaagaggagacagcagggcagttctctctcgggttcaaaagacaatgtggagctcatactgaaaaccatcaataaccagcacagcgttgagagtcaagacaacgatcagcccgactatgacagcgtggcatcagacgaagacacagatttggaaaccactgcaagcaaaacaaaccggcagaagagcctagattcagatttatcagatggaccagtcactgtacaggaatttatggaggtcaaaaacgctctagtggcttctgaggccaagatacagcagctaatgaaggtgaataacaacttgagtgacgagctgagaattatgcagaaaaagcttcaaacactccagagtgaaaattcgaacctcaggaaacaggccacaaccaatgtatatcaggtgcaaactggttctgagtacacagacacttccaaccactcttccttaaagagacgtccgtctgcccggggcagtaggcccatgtccatgtacgagaccggatcaggtcagaaaccatatctcccaatgggagaagcgagccgccccgaagagagcaggatgagactccagcccttccccgcgcacatcgggaggagtgcacttgtgacctcctcttcatctctgccttccttcccctccacactttcctggtcgagggacgaaagcgcccgaagggcatccaggctggagaagcagaacagcacacctgagagtgactacgacaacactcccaacgacatggagccagatggcatggggtcaagccgaaagggacggcaaagaagtatggtgtggccaggggatggcttggtaccagacacagcagaaccccatgtggccccaagccccactctccctagcaccgaagatgtcatcaggaagactgaacagatcaccaaaaacatacaggagctcttaagagcagcccaagaaaataaacatgacagttatattccctgctcagagaggatacacgtagctgttacagaaatggcagcattattccccaaaaaacccaagtctgatatggtgaggacttcccttcgtttactgacgtccagtgcctaccgactgcagtcagagtgcaagaagaccctcccaggggaccccggctcacccacagacgttcagctggtcacgcagcaggtcatccagtgtgcgtacgacatcgccaaggctgccaagcagctggttaccatcaccaccaaagagaacaacaactgacaagggcagggcaccgcctcctctgttttctaggctttataaagtccaatttcaaattcagacgcagaactcttcagatttagctttctcacatgagttgcttcacatttttcatcatctttaaggacttcttataaggaaagatgtatcgtatcgcagtcatctgagttagtttctcctccatcacctcatgagtacttaaaaattagacatcaactttcaagagttccttagagagtgtgctctagctggctgcctgctaccccaaagctctgaaagagtaaggttgaagtgctggaacatgctcagattgttttttagttactcaaaagccccttcttgttctgaatgtgaaagctcttcccgttcctgcttactgcagccattctgtgtgtgtggttcagaccctggcctagggccggtgatgtggatgagtgaagggagccaggtacacggcagcagggcagaggagactatggggagcccaccgcctacacagtaggggcagtagcccccagctccacgcctgttgccatgtggaaaagtgggcctagggtggccacagctttgatttttcaagagacaagaaacctagatgttttttggtgccatctctccatttataaatgttggcaaccaatttgaacactttcagagaccatgtgcaggtgagctgtgtcctctaggctgccagctcacagcccccaccccagggccctgtaagctgtgcagtgtgagggcctggcttccccggacacacctggagcagcctctgagtcttacccgtaatggagccggccaaccctgtgtgttatgttgctgtcgctcctgtttttaaccatatgttctgtcccatagcagtcattcacacatgtgaagaagacacaagaatcaaagtacaagttgcctcaatacatgctaataactaagcttctattttcacaggactgatcgatgcacacctttatagcttgaccatatgctgtcatgaaagtagcaccccgacggtgcttgctttactaagtcaccgtgtgtggatgcttttgtcgcattttgcttcactgtgagtagcatgggaaaagggtccacgtctccaaaagactcttccacttgtttgtcccacagccctaagtgccacattgctgttggatgctcccgggatgccttctagaagggggcctcccaccttaagttcaggcgccatctgatagccttttctgcaggcttcatgtccttagctgaccctcctttatcttgcaaacccctgcccctgctgtcccagggaggacgggcttctgtagaggcttctgggaaatgagctgtctgcaggaggtgaagcagtgttttccttggaatgtttgaggacctgcaatagaagatgttgcctttatggccctagagaaagtcaaggaacatggggaccaacaaagcatttccagttgtaagaatatgtcagaagagtgctcggttagcccacggtgccaaaactccaaacaagttccccggtggaatgacgtggccattggagggctgcaggtcgtcctctctgtatgtgccccgcgcatttccttggcctcatctgagatctggtgtcagagttctctgctcctgttggcaaatcgcaccttatctgaacatttgttccagccaccttttgcacatggattccgtaccttgcactagcaatgtctaccttcagtaacgtcgttctttttcaccctgtattctcaatgatcccttcctccccatatgccacccttcccccaaagctgatagggcagaggtgcactttatgaaactggcacttgactgaacagaaggaaacagctgtacctctaagctcctttcacagaaatcgtcatctgccttggaatgcaaatagttcttatttgccaaagaacagtgaattgggcccaaagatcaaacacagcatttcatgtaatcagaattctaaacgcacaactcgggagctgtgcacggcttctcaagtgattcagttgcagaaccaagagcaaaactcgcctgtttttgtcctcaatggcacccatgagctttccaatagtatagttttctttctttccttgtcctggttgaaggtaacgtgttcctagaaaagaaaatgctgcataggaaaactgagatgccttttattccaacgtgtttgatccctgtcactcattattctgtactttttattgtacattctattcctgtaattattgtgccctttaagtgttgtaaaatcgttttggaatttgtgcctgctagttatgcaataaacaggctctacaagtgtttttgtggtaaaaaaaaac

SEQ ID NO: 354932 - DNA, 5708 bp, Homo sapiens
cccgcgcgtgcgtgctgtgccaaggctgcaaggcgctgaggggagaggcgccgccgtcagcgccgccgcagctgggacccgttagagcggaagcgccgccgccaccgccgcctttgctgtcccccggcctctagttccccgcaggtgggaggtgggagccatgtcgaaacggctccggagcagcgaggtgtgcgctgactgcagcgggccgggtgagtcgcaccggccgggcccgctcccctctgctttcctggcccggacccctaccccggggccgccccctcagatccttcctgggcatcagtaaataggggaacgtttttatgtgatgagtgctgcagtgtccatcggagtctagggcgccatatctcccaagtgaggcatctgaaacacacaccgtggcctccaacactgcttcagatggttgagaccttgtataataacggtgctaactctatatgggagcattctttgctggaccctgcgtctattatgagtggaagacgtaaagctaatccacaggataaagtacatcccaataaagcggaattcatcagagccaagtatcagatgttagcgttcgtccatcgcttgccctgccgggatgacgatagtgtgactgccaaagatcttagcaagcaactccattcgagcgtgagaacagggaatcttgaaacctgtttgagactgttatctttaggagcacaagccaacttctttcatcctgaaaaaggaaacaccccactccatgttgcctccaaagcagggcagattttacaggctgaattattggcagtatatggagcagacccaggcacacaggattctagtgggaaaactcccgttgattatgcaaggcaaggagggcaccatgagctggcagagcgcctcgtggaaatacagtatgagctaacggacagactagccttctatctctgtggcaggaaaccagatcacaaaaatggacagcactttataatacctcaaatggcagacagcagcctggatttgtctgaattggcaaaagctgctaagaagaaacttcaatctctaagtaatcatttgtttgaagaacttgccatggatgtgtacgatgaagttgacaggcgagagacggatgcagtctggcttgccacgcaaaaccacagcgccctggtaaccgagacaacggtcgtcccctttcttccggtcaatcctgagtactcatcaacacgaaatcagggcagacagaagttagctcggttcaacgcccatgagtttgccacgctggtcattgacattctcagtgacgccaagaggagacagcagggcagttctctctcgggttcaaaagacaatgtggagctcatactgaaaaccatcaataaccagcacagcgttgagagtcaagacaacgatcagcccgactatgacagcgtggcatcagacgaagacacagatttggaaaccactgcaagcaaaacaaaccggcagaagagcctagattcagatttatcagatggaccagtcactgtacaggaatttatggaggtcaaaaacgctctagtggcttctgaggccaagatacagcagctaatgaaggtgaataacaacttgagtgacgagctgagaattatgcagaaaaagcttcaaacactccagagtgaaaattcgaacctcaggaaacaggccacaaccaatgtatatcaggtgcaaactggttctgagtacacagacacttccaaccactcttccttaaagagacgtccgtctgcccggggcagtaggcccatgtccatgtacgagaccggatcaggtcagaaaccatatctcccaatgggagaagcgagccgccccgaagagagcaggatgagactccagcccttccccgcgcacatcgggaggagtgcacttgtgacctcctcttcatctctgccttccttcccctccacactttcctggtcgagggacgaaagcgcccgaagggcatccaggctggagaagcagaacagcacacctgagagtgactacgacaacactcccaacgacatggagccagatggcatggggtcaagccgaaagggacggcaaagaagtatggtgtggccaggggatggcttggtaccagacacagcagaaccccatgtggccccaagccccactctccctagcaccgaagatgtcatcaggaagactgaacagatcaccaaaaacatacaggagctcttaagagcagcccaagaaaataaacatgacagttatattccctgctcagagaggatacacgtagctgttacagaaatggcagcattattccccaaaaaacccaagtctgatatggtgaggacttcccttcgtttactgacgtccagtgcctaccgactgcagtcagagtgcaagaagaccctcccaggggaccccggctcacccacagacgttcagctggtcacgcagcaggtcatccagtgtgcgtacgacatcgccaaggctgccaagcagctggttaccatcaccaccaaagagaacaacaactgacaagggcagggcaccgcctcctctgttttctaggctttataaagtccaatttcaaattcagacgcagaactcttcagatttctacaaaaagaaacatttaatgacggtttaaaactttttaaaagaaaactcagtattatttttgcatgttttctaaccaattttcaactatttaacccacttgccttattttgtgcctatttgctggtttagtttctgatgttcggttgtgttgtcaacaactgttgagttgatcacatacatccaaaagtatagtttcattgtctaaagtttgtgaaaacttttccatcccttaaaactccctgcctatggctgaaactataaatgaaatttttcataaaacattttcttgagagagttcagttaaaaaagaaaaaatcagcgtcatttgttccctgccaagcatcgtgcaataagtgaatttcctggcctacttcataatctctaagtttggggtatctccaagcatgtatgtagagaaaggactttgccgctttttaaaactagtgtcacagtctctcttgggaggaaacaatgaattggttcatttcttctcagtgttttaccctgttacatgttctgttatttaatgttgttatctcaagctcctatctcttgatgttttcttgtcatcttgaaggctccatggaatgagataaagcattgacccaccacaggacatctcatgaagccatgttcagggtaggagctccacgcacatcaccacccattgtcaggtgctctccctcacccctgtaagccagacagtttgttcaaaacctgcagcaaagagaagcatcagtctaacaagccagaactcattttgtgccacccatttaggtatcactaccatgaactatagggaaaagaaatcacctactccctgacactgtgttgtacccttcatccaaaagtcagcttgcttctctgaccacttacagctttctcacatgagttgcttcacatttttcatcatctttaaggacttcttataaggaaagatgtatcgtatcgcagtcatctgagttagtttctcctccatcacctcatgagtacttaaaaattagacatcaactttcaagagttccttagagagtgtgctctagctggctgcctgctaccccaaagctctgaaagagtaaggttgaagtgctggaacatgctcagattgttttttagttactcaaaagccccttcttgttctgaatgtgaaagctcttcccgttcctgcttactgcagccattctgtgtgtgtggttcagaccctggcctagggccggtgatgtggatgagtgaagggagccaggtacacggcagcagggcagaggagactatggggagcccaccgcctacacagtaggggcagtagcccccagctccacgcctgttgccatgtggaaaagtgggcctagggtggccacagctttgatttttcaagagacaagaaacctagatgttttttggtgccatctctccatttataaatgttggcaaccaatttgaacactttcagagaccatgtgcaggtgagctgtgtcctctaggctgccagctcacagcccccaccccagggccctgtaagctgtgcagtgtgagggcctggcttccccggacacacctggagcagcctctgagtcttacccgtaatggagccggccaaccctgtgtgttatgttgctgtcgctcctgtttttaaccatatgttctgtcccatagcagtcattcacacatgtgaagaagacacaagaatcaaagtacaagttgcctcaatacatgctaataactaagcttctattttcacaggactgatcgatgcacacctttatagcttgaccatatgctgtcatgaaagtagcaccccgacggtgcttgctttactaagtcaccgtgtgtggatgcttttgtcgcattttgcttcactgtgagtagcatgggaaaagggtccacgtctccaaaagactcttccacttgtttgtcccacagccctaagtgccacattgctgttggatgctcccgggatgccttctagaagggggcctcccaccttaagttcaggcgccatctgatagccttttctgcaggcttcatgtccttagctgaccctcctttatcttgcaaacccctgcccctgctgtcccagggaggacgggcttctgtagaggcttctgggaaatgagctgtctgcaggaggtgaagcagtgttttccttggaatgtttgaggacctgcaatagaagatgttgcctttatggccctagagaaagtcaaggaacatggggaccaacaaagcatttccagttgtaagaatatgtcagaagagtgctcggttagcccacggtgccaaaactccaaacaagttccccggtggaatgacgtggccattggagggctgcaggtcgtcctctctgtatgtgccccgcgcatttccttggcctcatctgagatctggtgtcagagttctctgctcctgttggcaaatcgcaccttatctgaacatttgttccagccaccttttgcacatggattccgtaccttgcactagcaatgtctaccttcagtaacgtcgttctttttcaccctgtattctcaatgatcccttcctccccatatgccacccttcccccaaagctgatagggcagaggtgcactttatgaaactggcacttgactgaacagaaggaaacagctgtacctctaagctcctttcacagaaatcgtcatctgccttggaatgcaaatagttcttatttgccaaagaacagtgaattgggcccaaagatcaaacacagcatttcatgtaatcagaattctaaacgcacaactcgggagctgtgcacggcttctcaagtgattcagttgcagaaccaagagcaaaactcgcctgtttttgtcctcaatggcacccatgagctttccaatagtatagttttctttctttccttgtcctggttgaaggtaacgtgttcctagaaaagaaaatgctgcataggaaaactgagatgccttttattccaacgtgtttgatccctgtcactcattattctgtactttttattgtacattctattcctgtaattattgtgccctttaagtgttgtaaaatcgttttggaatttgtgcctgctagttatgcaataaacaggctctacaagtgtttttgtggtaaaaaaaaac

SEQ ID NO: 354933 - DNA, 5032 bp, Homo sapiens
tttttaacctgtgacacattttatgtcagcaccacaagtgctgacaaaccaaggtttacaagtccctgcatcttgaatcagaattgtaacaccttgtggcattggagctatgcaagcagctgttaacctaaagctgttcacttgtacgggttggttaaacctcacctactggtgtataatttatggtctcaatagcagtgcatgattcaggtaagcctcttttagagtagtcaggcagtaagtattaagcacctcctccatacacagcgtttgggtaagtcaatgaaagggtcctaaggacttagctggcacagcccctgctcccaaaggcactgtcaattaaaaaatactttcatgcataaagagtggtacatgaccacaacctgggaaagccgtggaaagggcataggctttgaaatccacgtcccagttctggctccatctcttttttaatggaagggtaatgtaaggtaagaggaggaaggtggctgtgggtaagggaccacctttacaggcaaggtggggtttgcactgggcctttgccattccctccacacctaggaattatggagagcctttctttcctagttccagtggcatatggattaccaaggccctttcaggattcgtttttttattttttattttttagagacagagtctcatgttgcccagtctgtagtacaatagctatttacaggcatggtcatagcgtactgcagcctcaaactctcctgggctcaagcagtcctccctcagcctcctgaggagctgggactacaggttcatgctaccatgcctggctgatttatttatttatttatttatttatttatttatttatttatttattttatttattttttaaatgttgcccaggctggtctcaaactcctagccttaagcaatcgtcctgcctcagcctcccaaaatacagggattacaggtgtgagccaccacaccctgcctgtattttaactgcatctcattatgttataaatttgagaactaaatgaggatatgttgccttgcatgtctgttagtttgtactaaggatctgattaggaagtggccactgagctaagaagaaaatggtgcaaagaaggaaagaggccatttctggatccaatattcatcttttactaaattttcactagagagttgtcccctgtcccaaatgagatttgggatgtgaaggccagtagcctaacaggtaacaattcctggggaagactcctgagaagagtctcatgttacaaactcatgagggtccctcttctttcttgtaggcatccaggctggagaagcagaacagcacacctgagagtgactacgacaacactcccaacgacatggagccagatggcatggggtcaagccgaaagggacggcaaagaagtatggtgtggccaggggatggcttggtaccagacacagcagaaccccatgtggccccaagccccactctccctagcaccgaagatgtcatcaggaagactgaacagatcaccaaaaacatacaggagctcttaagagcagcccaagaaaataaacatgacagttatattccctgctcagagaggatacacgtagctgttacagaaatggcagcattattccccaaaaaacccaagtctgatatggtgaggacttcccttcgtttactgacgtccagtgcctaccgactgcagtcagagtgcaagaagaccctcccaggggaccccggctcacccacagacgttcagctggtcacgcagcaggtcatccagtgtgcgtacgacatcgccaaggctgccaagcagctggttaccatcaccaccaaagagaacaacaactgacaagggcagggcaccgcctcctctgttttctaggctttataaagtccaatttcaaattcagacgcagaactcttcagatttctacaaaaagaaacatttaatgacggtttaaaactttttaaaagaaaactcagtattatttttgcatgttttctaaccaattttcaactatttaacccacttgccttattttgtgcctatttgctggtttagtttctgatgttcggttgtgttgtcaacaactgttgagttgatcacatacatccaaaagtatagtttcattgtctaaagtttgtgaaaacttttccatcccttaaaactccctgcctatggctgaaactataaatgaaatttttcataaaacattttcttgagagagttcagttaaaaaagaaaaaatcagcgtcatttgttccctgccaagcatcgtgcaataagtgaatttcctggcctacttcataatctctaagtttggggtatctccaagcatgtatgtagagaaaggactttgccgctttttaaaactagtgtcacagtctctcttgggaggaaacaatgaattggttcatttcttctcagtgttttaccctgttacatgttctgttatttaatgttgttatctcaagctcctatctcttgatgttttcttgtcatcttgaaggctccatggaatgagataaagcattgacccaccacaggacatctcatgaagccatgttcagggtaggagctccacgcacatcaccacccattgtcaggtgctctccctcacccctgtaagccagacagtttgttcaaaacctgcagcaaagagaagcatcagtctaacaagccagaactcattttgtgccacccatttaggtatcactaccatgaactatagggaaaagaaatcacctactccctgacactgtgttgtacccttcatccaaaagtcagcttgcttctctgaccacttacagctttctcacatgagttgcttcacatttttcatcatctttaaggacttcttataaggaaagatgtatcgtatcgcagtcatctgagttagtttctcctccatcacctcatgagtacttaaaaattagacatcaactttcaagagttccttagagagtgtgctctagctggctgcctgctaccccaaagctctgaaagagtaaggttgaagtgctggaacatgctcagattgttttttagttactcaaaagccccttcttgttctgaatgtgaaagctcttcccgttcctgcttactgcagccattctgtgtgtgtggttcagaccctggcctagggccggtgatgtggatgagtgaagggagccaggtacacggcagcagggcagaggagactatggggagcccaccgcctacacagtaggggcagtagcccccagctccacgcctgttgccatgtggaaaagtgggcctagggtggccacagctttgatttttcaagagacaagaaacctagatgttttttggtgccatctctccatttataaatgttggcaaccaatttgaacactttcagagaccatgtgcaggtgagctgtgtcctctaggctgccagctcacagcccccaccccagggccctgtaagctgtgcagtgtgagggcctggcttccccggacacacctggagcagcctctgagtcttacccgtaatggagccggccaaccctgtgtgttatgttgctgtcgctcctgtttttaaccatatgttctgtcccatagcagtcattcacacatgtgaagaagacacaagaatcaaagtacaagttgcctcaatacatgctaataactaagcttctattttcacaggactgatcgatgcacacctttatagcttgaccatatgctgtcatgaaagtagcaccccgacggtgcttgctttactaagtcaccgtgtgtggatgcttttgtcgcattttgcttcactgtgagtagcatgggaaaagggtccacgtctccaaaagactcttccacttgtttgtcccacagccctaagtgccacattgctgttggatgctcccgggatgccttctagaagggggcctcccaccttaagttcaggcgccatctgatagccttttctgcaggcttcatgtccttagctgaccctcctttatcttgcaaacccctgcccctgctgtcccagggaggacgggcttctgtagaggcttctgggaaatgagctgtctgcaggaggtgaagcagtgttttccttggaatgtttgaggacctgcaatagaagatgttgcctttatggccctagagaaagtcaaggaacatggggaccaacaaagcatttccagttgtaagaatatgtcagaagagtgctcggttagcccacggtgccaaaactccaaacaagttccccggtggaatgacgtggccattggagggctgcaggtcgtcctctctgtatgtgccccgcgcatttccttggcctcatctgagatctggtgtcagagttctctgctcctgttggcaaatcgcaccttatctgaacatttgttccagccaccttttgcacatggattccgtaccttgcactagcaatgtctaccttcagtaacgtcgttctttttcaccctgtattctcaatgatcccttcctccccatatgccacccttcccccaaagctgatagggcagaggtgcactttatgaaactggcacttgactgaacagaaggaaacagctgtacctctaagctcctttcacagaaatcgtcatctgccttggaatgcaaatagttcttatttgccaaagaacagtgaattgggcccaaagatcaaacacagcatttcatgtaatcagaattctaaacgcacaactcgggagctgtgcacggcttctcaagtgattcagttgcagaaccaagagcaaaactcgcctgtttttgtcctcaatggcacccatgagctttccaatagtatagttttctttctttccttgtcctggttgaaggtaacgtgttcctagaaaagaaaatgctgcataggaaaactgagatgccttttattccaacgtgtttgatccctgtcactcattattctgtactttttattgtacattctattcctgtaattattgtgccctttaagtgttgtaaaatcgttttggaatttgtgcctgctagttatgcaataaacaggctctacaagtgtttttgtggtaaaaaaaaac

SEQ ID NO: 354934 - DNA, 4984 bp, Homo sapiens
  misc_feature (96)..(96): n is a, c, g, or t
gtagagctccctggacactgaacctctaaagggaaaaggtctaccctggagccaggagcatcagggttggcttgggagcatgagaggtgagcccanggctaggcctgggccaggccccggcagcactgctacttgggaggagccacttcacctttgtattagttattaaaaaatataatttcggcctcccgagcagctgggactacaggcgcactctaccacacccagatcacaaaaatggacagcactttataatacctcaaatggcagacagcagcctggatttgtctgaattggcaaaagctgctaagaagaaacttcaatctctaagtaatcatttgtttgaagaacttgccatggatgtgtacgatgaagttgacaggcgagagacggatgcagtctggcttgccacgcaaaaccacagcgccctggtaaccgagacaacggtcgtcccctttcttccggtcaatcctgagtactcatcaacacgaaatcagggcagacagaagttagctcggttcaacgcccatgagtttgccacgctggtcattgacattctcagtgacgccaagaggagacagcagggcagttctctctcgggttcaaaagacaatgtggagctcatactgaaaaccatcaataaccagcacagcgttgagagtcaagacaacgatcagcccgactatgacagcgtggcatcagacgaagacacagatttggaaaccactgcaagcaaaacaaaccggcagaagagcctagattcagatttatcagatggaccagtcactgtacaggaatttatggaggtcaaaaacgctctagtggcttctgaggccaagatacagcagctaatgaaggtgaataacaacttgagtgacgagctgagaattatgcagaaaaagcttcaaacactccagagtgaaaattcgaacctcaggaaacaggccacaaccaatgtatatcaggtgcaaactggttctgagtacacagacacttccaaccactcttccttaaagagacgtccgtctgcccggggcagtaggcccatgtccatgtacgagaccggatcaggtcagaaaccatatctcccaatgggagaagcgagccgccccgaagagagcaggatgagactccagcccttccccgcgcacatcgggaggagtgcacttgtgacctcctcttcatctctgccttccttcccctccacactttcctggtcgagggacgaaagcgcccgaagggcatccaggctggagaagcagaacagcacacctgagagtgactacgacaacactcccaacgacatggagccagatggcatggggtcaagccgaaagggacggcaaagaagtatggtgtggccaggggatggcttggtaccagacacagcagaaccccatgtggccccaagccccactctccctagcaccgaagatgtcatcaggaagactgaacagatcaccaaaaacatacaggagctcttaagagcagcccaagaaaataaacatgacagttatattccctgctcagagaggatacacgtagctgttacagaaatggcagcattattccccaaaaaacccaagtctgatatggtgaggacttcccttcgtttactgacgtccagtgcctaccgactgcagtcagagtgcaagaagaccctcccaggggaccccggctcacccacagacgttcagctggtcacgcagcaggtcatccagtgtgcgtacgacatcgccaaggctgccaagcagctggttaccatcaccaccaaagagaacaacaactgacaagggcagggcaccgcctcctctgttttctaggctttataaagtccaatttcaaattcagacgcagaactcttcagatttctacaaaaagaaacatttaatgacggtttaaaactttttaaaagaaaactcagtattatttttgcatgttttctaaccaattttcaactatttaacccacttgccttattttgtgcctatttgctggtttagtttctgatgttcggttgtgttgtcaacaactgttgagttgatcacatacatccaaaagtatagtttcattgtctaaagtttgtgaaaacttttccatcccttaaaactccctgcctatggctgaaactataaatgaaatttttcataaaacattttcttgagagagttcagttaaaaaagaaaaaatcagcgtcatttgttccctgccaagcatcgtgcaataagtgaatttcctggcctacttcataatctctaagtttggggtatctccaagcatgtatgtagagaaaggactttgccgctttttaaaactagtgtcacagtctctcttgggaggaaacaatgaattggttcatttcttctcagtgttttaccctgttacatgttctgttatttaatgttgttatctcaagctcctatctcttgatgttttcttgtcatcttgaaggctccatggaatgagataaagcattgacccaccacaggacatctcatgaagccatgttcagggtaggagctccacgcacatcaccacccattgtcaggtgctctccctcacccctgtaagccagacagtttgttcaaaacctgcagcaaagagaagcatcagtctaacaagccagaactcattttgtgccacccatttaggtatcactaccatgaactatagggaaaagaaatcacctactccctgacactgtgttgtacccttcatccaaaagtcagcttgcttctctgaccacttacagctttctcacatgagttgcttcacatttttcatcatctttaaggacttcttataaggaaagatgtatcgtatcgcagtcatctgagttagtttctcctccatcacctcatgagtacttaaaaattagacatcaactttcaagagttccttagagagtgtgctctagctggctgcctgctaccccaaagctctgaaagagtaaggttgaagtgctggaacatgctcagattgttttttagttactcaaaagccccttcttgttctgaatgtgaaagctcttcccgttcctgcttactgcagccattctgtgtgtgtggttcagaccctggcctagggccggtgatgtggatgagtgaagggagccaggtacacggcagcagggcagaggagactatggggagcccaccgcctacacagtaggggcagtagcccccagctccacgcctgttgccatgtggaaaagtgggcctagggtggccacagctttgatttttcaagagacaagaaacctagatgttttttggtgccatctctccatttataaatgttggcaaccaatttgaacactttcagagaccatgtgcaggtgagctgtgtcctctaggctgccagctcacagcccccaccccagggccctgtaagctgtgcagtgtgagggcctggcttccccggacacacctggagcagcctctgagtcttacccgtaatggagccggccaaccctgtgtgttatgttgctgtcgctcctgtttttaaccatatgttctgtcccatagcagtcattcacacatgtgaagaagacacaagaatcaaagtacaagttgcctcaatacatgctaataactaagcttctattttcacaggactgatcgatgcacacctttatagcttgaccatatgctgtcatgaaagtagcaccccgacggtgcttgctttactaagtcaccgtgtgtggatgcttttgtcgcattttgcttcactgtgagtagcatgggaaaagggtccacgtctccaaaagactcttccacttgtttgtcccacagccctaagtgccacattgctgttggatgctcccgggatgccttctagaagggggcctcccaccttaagttcaggcgccatctgatagccttttctgcaggcttcatgtccttagctgaccctcctttatcttgcaaacccctgcccctgctgtcccagggaggacgggcttctgtagaggcttctgggaaatgagctgtctgcaggaggtgaagcagtgttttccttggaatgtttgaggacctgcaatagaagatgttgcctttatggccctagagaaagtcaaggaacatggggaccaacaaagcatttccagttgtaagaatatgtcagaagagtgctcggttagcccacggtgccaaaactccaaacaagttccccggtggaatgacgtggccattggagggctgcaggtcgtcctctctgtatgtgccccgcgcatttccttggcctcatctgagatctggtgtcagagttctctgctcctgttggcaaatcgcaccttatctgaacatttgttccagccaccttttgcacatggattccgtaccttgcactagcaatgtctaccttcagtaacgtcgttctttttcaccctgtattctcaatgatcccttcctccccatatgccacccttcccccaaagctgatagggcagaggtgcactttatgaaactggcacttgactgaacagaaggaaacagctgtacctctaagctcctttcacagaaatcgtcatctgccttggaatgcaaatagttcttatttgccaaagaacagtgaattgggcccaaagatcaaacacagcatttcatgtaatcagaattctaaacgcacaactcgggagctgtgcacggcttctcaagtgattcagttgcagaaccaagagcaaaactcgcctgtttttgtcctcaatggcacccatgagctttccaatagtatagttttctttctttccttgtcctggttgaaggtaacgtgttcctagaaaagaaaatgctgcataggaaaactgagatgccttttattccaacgtgtttgatccctgtcactcattattctgtactttttattgtacattctattcctgtaattattgtgccctttaagtgttgtaaaatcgttttggaatttgtgcctgctagttatgcaataaacaggctctacaagtgtttttgtggtaaaaaaaaac

SEQ ID NO: 354935 - DNA, 5123 bp, Homo sapiens
agtgctggtcacgtttcagaggactgagctgagcaagtgctgggattataggcgggagccatcgagcccgacatattttcttatatcatgctttttttttaatacttcaaaaattgtgactcctcacataagggcctggaaggtaacctggcaatagcttttgtcgtttagttggtggacgatttttttttcctctttaacacttacatgattgtggtatttcagaaggagttactttcaccagattgttctgtttagagctcctcactgactctactgggctgtagaatgcttggttctaacatggtccatgaactgtaattaatatttttatctcttgggtgtcttaaactttacagagttcacaagtctggctttatttatttgcttattagctttgtatgttttcttagcagcctggatttgtctgaattggcaaaagctgctaagaagaaacttcaatctctaagtaatcatttgtttgaagaacttgccatggatgtgtacgatgaagttgacaggcgagagacggatgcagtctggcttgccacgcaaaaccacagcgccctggtaaccgagacaacggtcgtcccctttcttccggtcaatcctgagtactcatcaacacgaaatcagggcagacagaagttagctcggttcaacgcccatgagtttgccacgctggtcattgacattctcagtgacgccaagaggagacagcagggcagttctctctcgggttcaaaagacaatgtggagctcatactgaaaaccatcaataaccagcacagcgttgagagtcaagacaacgatcagcccgactatgacagcgtggcatcagacgaagacacagatttggaaaccactgcaagcaaaacaaaccggcagaagagcctagattcagatttatcagatggaccagtcactgtacaggaatttatggaggtcaaaaacgctctagtggcttctgaggccaagatacagcagctaatgaaggtgaataacaacttgagtgacgagctgagaattatgcagaaaaagcttcaaacactccagagtgaaaattcgaacctcaggaaacaggccacaaccaatgtatatcaggtgcaaactggttctgagtacacagacacttccaaccactcttccttaaagagacgtccgtctgcccggggcagtaggcccatgtccatgtacgagaccggatcaggtcagaaaccatatctcccaatgggagaagcgagccgccccgaagagagcaggatgagactccagcccttccccgcgcacatcgggaggagtgcacttgtgacctcctcttcatctctgccttccttcccctccacactttcctggtcgagggacgaaagcgcccgaagggcatccaggctggagaagcagaacagcacacctgagagtgactacgacaacactcccaacgacatggagccagatggcatggggtcaagccgaaagggacggcaaagaagtatggtgtggccaggggatggcttggtaccagacacagcagaaccccatgtggccccaagccccactctccctagcaccgaagatgtcatcaggaagactgaacagatcaccaaaaacatacaggagctcttaagagcagcccaagaaaataaacatgacagttatattccctgctcagagaggatacacgtagctgttacagaaatggcagcattattccccaaaaaacccaagtctgatatggtgaggacttcccttcgtttactgacgtccagtgcctaccgactgcagtcagagtgcaagaagaccctcccaggggaccccggctcacccacagacgttcagctggtcacgcagcaggtcatccagtgtgcgtacgacatcgccaaggctgccaagcagctggttaccatcaccaccaaagagaacaacaactgacaagggcagggcaccgcctcctctgttttctaggctttataaagtccaatttcaaattcagacgcagaactcttcagatttctacaaaaagaaacatttaatgacggtttaaaactttttaaaagaaaactcagtattatttttgcatgttttctaaccaattttcaactatttaacccacttgccttattttgtgcctatttgctggtttagtttctgatgttcggttgtgttgtcaacaactgttgagttgatcacatacatccaaaagtatagtttcattgtctaaagtttgtgaaaacttttccatcccttaaaactccctgcctatggctgaaactataaatgaaatttttcataaaacattttcttgagagagttcagttaaaaaagaaaaaatcagcgtcatttgttccctgccaagcatcgtgcaataagtgaatttcctggcctacttcataatctctaagtttggggtatctccaagcatgtatgtagagaaaggactttgccgctttttaaaactagtgtcacagtctctcttgggaggaaacaatgaattggttcatttcttctcagtgttttaccctgttacatgttctgttatttaatgttgttatctcaagctcctatctcttgatgttttcttgtcatcttgaaggctccatggaatgagataaagcattgacccaccacaggacatctcatgaagccatgttcagggtaggagctccacgcacatcaccacccattgtcaggtgctctccctcacccctgtaagccagacagtttgttcaaaacctgcagcaaagagaagcatcagtctaacaagccagaactcattttgtgccacccatttaggtatcactaccatgaactatagggaaaagaaatcacctactccctgacactgtgttgtacccttcatccaaaagtcagcttgcttctctgaccacttacagctttctcacatgagttgcttcacatttttcatcatctttaaggacttcttataaggaaagatgtatcgtatcgcagtcatctgagttagtttctcctccatcacctcatgagtacttaaaaattagacatcaactttcaagagttccttagagagtgtgctctagctggctgcctgctaccccaaagctctgaaagagtaaggttgaagtgctggaacatgctcagattgttttttagttactcaaaagccccttcttgttctgaatgtgaaagctcttcccgttcctgcttactgcagccattctgtgtgtgtggttcagaccctggcctagggccggtgatgtggatgagtgaagggagccaggtacacggcagcagggcagaggagactatggggagcccaccgcctacacagtaggggcagtagcccccagctccacgcctgttgccatgtggaaaagtgggcctagggtggccacagctttgatttttcaagagacaagaaacctagatgttttttggtgccatctctccatttataaatgttggcaaccaatttgaacactttcagagaccatgtgcaggtgagctgtgtcctctaggctgccagctcacagcccccaccccagggccctgtaagctgtgcagtgtgagggcctggcttccccggacacacctggagcagcctctgagtcttacccgtaatggagccggccaaccctgtgtgttatgttgctgtcgctcctgtttttaaccatatgttctgtcccatagcagtcattcacacatgtgaagaagacacaagaatcaaagtacaagttgcctcaatacatgctaataactaagcttctattttcacaggactgatcgatgcacacctttatagcttgaccatatgctgtcatgaaagtagcaccccgacggtgcttgctttactaagtcaccgtgtgtggatgcttttgtcgcattttgcttcactgtgagtagcatgggaaaagggtccacgtctccaaaagactcttccacttgtttgtcccacagccctaagtgccacattgctgttggatgctcccgggatgccttctagaagggggcctcccaccttaagttcaggcgccatctgatagccttttctgcaggcttcatgtccttagctgaccctcctttatcttgcaaacccctgcccctgctgtcccagggaggacgggcttctgtagaggcttctgggaaatgagctgtctgcaggaggtgaagcagtgttttccttggaatgtttgaggacctgcaatagaagatgttgcctttatggccctagagaaagtcaaggaacatggggaccaacaaagcatttccagttgtaagaatatgtcagaagagtgctcggttagcccacggtgccaaaactccaaacaagttccccggtggaatgacgtggccattggagggctgcaggtcgtcctctctgtatgtgccccgcgcatttccttggcctcatctgagatctggtgtcagagttctctgctcctgttggcaaatcgcaccttatctgaacatttgttccagccaccttttgcacatggattccgtaccttgcactagcaatgtctaccttcagtaacgtcgttctttttcaccctgtattctcaatgatcccttcctccccatatgccacccttcccccaaagctgatagggcagaggtgcactttatgaaactggcacttgactgaacagaaggaaacagctgtacctctaagctcctttcacagaaatcgtcatctgccttggaatgcaaatagttcttatttgccaaagaacagtgaattgggcccaaagatcaaacacagcatttcatgtaatcagaattctaaacgcacaactcgggagctgtgcacggcttctcaagtgattcagttgcagaaccaagagcaaaactcgcctgtttttgtcctcaatggcacccatgagctttccaatagtatagttttctttctttccttgtcctggttgaaggtaacgtgttcctagaaaagaaaatgctgcataggaaaactgagatgccttttattccaacgtgtttgatccctgtcactcattattctgtactttttattgtacattctattcctgtaattattgtgccctttaagtgttgtaaaatcgttttggaatttgtgcctgctagttatgcaataaacaggctctacaagtgtttttgtggtaaaaaaaaac

SEQ ID NO: 354936 - DNA, 4746 bp, Homo sapiens
cggccgccaacttttttttaattgacagcccctgctcccaaaggcactgtcaattaaaaaatactttcatgcataaagagtggtacatgaccacaacctgggaaagccgtggaaagggcataggctttgaaatccacgtcccagttctggctccatctcttttttaatggaagggtaatgtaaggtaagaggaggaaggtggctgtgggtaagggaccacctttacaggcaaggtggggtttgcactgggcctttgccattccctccacacctaggaattatggagagcctttctttcctagttccagtggcatatggattaccaaggccctttcaggattcgtttttttattttttattttttagagacagagtctcatgttgcccagtctgtagtacaatagctatttacaggcatggtcatagcgtactgcagcctcaaactctcctgggctcaagcagtcctccctcagcctcctgaggagctgggactacaggttcatgctaccatgcctggctgatttatttatttatttatttatttatttatttatttatttatttattttatttattttttaaatgttgcccaggctggtctcaaactcctagccttaagcaatcgtcctgcctcagcctcccaaaatacagggattacaggtgtgagccaccacaccctgcctgtattttaactgcatctcattatgttataaatttgagaactaaatgaggatatgttgccttgcatgtctgttagtttgtactaaggatctgattaggaagtggccactgagctaagaagaaaatggtgcaaagaaggaaagaggccatttctggatccaatattcatcttttactaaattttcactagagagttgtcccctgtcccaaatgagatttgggatgtgaaggccagtagcctaacaggtaacaattcctggggaagactcctgagaagagtctcatgttacaaactcatgagggtccctcttctttcttgtaggcatccaggctggagaagcagaacagcacacctgagagtgactacgacaacactcccaacgacatggagccagatggcatggggtcaagccgaaagggacggcaaagaagtatggtgtggccaggggatggcttggtaccagacacagcagaaccccatgtggccccaagccccactctccctagcaccgaagatgtcatcaggaagactgaacagatcaccaaaaacatacaggagctcttaagagcagcccaagaaaataaacatgacagttatattccctgctcagagaggatacacgtagctgttacagaaatggcagcattattccccaaaaaacccaagtctgatatggtgaggacttcccttcgtttactgacgtccagtgcctaccgactgcagtcagagtgcaagaagaccctcccaggggaccccggctcacccacagacgttcagctggtcacgcagcaggtcatccagtgtgcgtacgacatcgccaaggctgccaagcagctggttaccatcaccaccaaagagaacaacaactgacaagggcagggcaccgcctcctctgttttctaggctttataaagtccaatttcaaattcagacgcagaactcttcagatttctacaaaaagaaacatttaatgacggtttaaaactttttaaaagaaaactcagtattatttttgcatgttttctaaccaattttcaactatttaacccacttgccttattttgtgcctatttgctggtttagtttctgatgttcggttgtgttgtcaacaactgttgagttgatcacatacatccaaaagtatagtttcattgtctaaagtttgtgaaaacttttccatcccttaaaactccctgcctatggctgaaactataaatgaaatttttcataaaacattttcttgagagagttcagttaaaaaagaaaaaatcagcgtcatttgttccctgccaagcatcgtgcaataagtgaatttcctggcctacttcataatctctaagtttggggtatctccaagcatgtatgtagagaaaggactttgccgctttttaaaactagtgtcacagtctctcttgggaggaaacaatgaattggttcatttcttctcagtgttttaccctgttacatgttctgttatttaatgttgttatctcaagctcctatctcttgatgttttcttgtcatcttgaaggctccatggaatgagataaagcattgacccaccacaggacatctcatgaagccatgttcagggtaggagctccacgcacatcaccacccattgtcaggtgctctccctcacccctgtaagccagacagtttgttcaaaacctgcagcaaagagaagcatcagtctaacaagccagaactcattttgtgccacccatttaggtatcactaccatgaactatagggaaaagaaatcacctactccctgacactgtgttgtacccttcatccaaaagtcagcttgcttctctgaccacttacagctttctcacatgagttgcttcacatttttcatcatctttaaggacttcttataaggaaagatgtatcgtatcgcagtcatctgagttagtttctcctccatcacctcatgagtacttaaaaattagacatcaactttcaagagttccttagagagtgtgctctagctggctgcctgctaccccaaagctctgaaagagtaaggttgaagtgctggaacatgctcagattgttttttagttactcaaaagccccttcttgttctgaatgtgaaagctcttcccgttcctgcttactgcagccattctgtgtgtgtggttcagaccctggcctagggccggtgatgtggatgagtgaagggagccaggtacacggcagcagggcagaggagactatggggagcccaccgcctacacagtaggggcagtagcccccagctccacgcctgttgccatgtggaaaagtgggcctagggtggccacagctttgatttttcaagagacaagaaacctagatgttttttggtgccatctctccatttataaatgttggcaaccaatttgaacactttcagagaccatgtgcaggtgagctgtgtcctctaggctgccagctcacagcccccaccccagggccctgtaagctgtgcagtgtgagggcctggcttccccggacacacctggagcagcctctgagtcttacccgtaatggagccggccaaccctgtgtgttatgttgctgtcgctcctgtttttaaccatatgttctgtcccatagcagtcattcacacatgtgaagaagacacaagaatcaaagtacaagttgcctcaatacatgctaataactaagcttctattttcacaggactgatcgatgcacacctttatagcttgaccatatgctgtcatgaaagtagcaccccgacggtgcttgctttactaagtcaccgtgtgtggatgcttttgtcgcattttgcttcactgtgagtagcatgggaaaagggtccacgtctccaaaagactcttccacttgtttgtcccacagccctaagtgccacattgctgttggatgctcccgggatgccttctagaagggggcctcccaccttaagttcaggcgccatctgatagccttttctgcaggcttcatgtccttagctgaccctcctttatcttgcaaacccctgcccctgctgtcccagggaggacgggcttctgtagaggcttctgggaaatgagctgtctgcaggaggtgaagcagtgttttccttggaatgtttgaggacctgcaatagaagatgttgcctttatggccctagagaaagtcaaggaacatggggaccaacaaagcatttccagttgtaagaatatgtcagaagagtgctcggttagcccacggtgccaaaactccaaacaagttccccggtggaatgacgtggccattggagggctgcaggtcgtcctctctgtatgtgccccgcgcatttccttggcctcatctgagatctggtgtcagagttctctgctcctgttggcaaatcgcaccttatctgaacatttgttccagccaccttttgcacatggattccgtaccttgcactagcaatgtctaccttcagtaacgtcgttctttttcaccctgtattctcaatgatcccttcctccccatatgccacccttcccccaaagctgatagggcagaggtgcactttatgaaactggcacttgactgaacagaaggaaacagctgtacctctaagctcctttcacagaaatcgtcatctgccttggaatgcaaatagttcttatttgccaaagaacagtgaattgggcccaaagatcaaacacagcatttcatgtaatcagaattctaaacgcacaactcgggagctgtgcacggcttctcaagtgattcagttgcagaaccaagagcaaaactcgcctgtttttgtcctcaatggcacccatgagctttccaatagtatagttttctttctttccttgtcctggttgaaggtaacgtgttcctagaaaagaaaatgctgcataggaaaactgagatgccttttattccaacgtgtttgatccctgtcactcattattctgtactttttattgtacattctattcctgtaattattgtgccctttaagtgttgtaaaatcgttttggaatttgtgcctgctagttatgcaataaacaggctctacaagtgtttttgtggtaaaaaaaaac

SEQ ID NO: 354937 - DNA, 5137 bp, Homo sapiens
tcccaacatgctgggattatgggtgtgagccaccgcacctggccatgtagaccttcttaaaccaacttactcaaaagtagccactcttttggatgaagctacagggtttccatatgtttaaacaaagctcttagtttacatctgtgtccttagccacattttattgcagcatcaataaaactccttagtcccatgttttgattaacttggatgaaattcaaggagtaaagctagaaatagctcacacttatattttataaggtaagtggtttaggttttaaattagcctccactgatctctgttccagagaagttctcaagcattatgggtgaaataaatagggaaaataatgttcatgaaatactcagaacatagtccccttcgaaggaataaagtccccttcaaatttcgtcaccctagaagatcgtgtgtttagcagtgctgccatttgttcaaaacatttttaggattcctcttttgaatctgtatcccatttttgatcaccacagttgcaccaaatctttacattttaaggggtagatttgagcccaggcatgaaatattggaggtagcaggaggcaggagacctggtgcttggtcctgtttttctgcagactttgtggcctttggtgggccacccagcttttttggcccttcattttctcatatggggctcaatgagataatctgaaggtggcttccagtgctgaaggtctgtggtcatataagtgctggcatgtttttttgtttgtttgtttctgagacagggtcttatcttactctgtttcccaggctggagtacagtggtgcgaccatggctcaatgcaaccttgaactcctgggctcaagcagtcctccctcagcctcctgaggagctgggactacaggttcatgctaccatgcctggctgatttatttatttatttatttatttatttatttatttatttatttattttatttattttttaaatgttgcccaggctggtctcaaactcctagccttaagcaatcgtcctgcctcagcctcccaaaatacagggattacaggtgtgagccaccacaccctgcctgtattttaactgcatctcattatgttataaatttgagaactaaatgaggatatgttgccttgcatgtctgttagtttgtactaaggatctgattaggaagtggccactgagctaagaagaaaatggtgcaaagaaggaaagaggccatttctggatccaatattcatcttttactaaattttcactagagagttgtcccctgtcccaaatgagatttgggatgtgaaggccagtagcctaacaggtaacaattcctggggaagactcctgagaagagtctcatgttacaaactcatgagggtccctcttctttcttgtaggcatccaggctggagaagcagaacagcacacctgagagtgactacgacaacactcccaacgacatggagccagatggcatggggtcaagccgaaagggacggcaaagaagtatggtgtggccaggggatggcttggtaccagacacagcagaaccccatgtggccccaagccccactctccctagcaccgaagatgtcatcaggaagactgaacagatcaccaaaaacatacaggagctcttaagagcagcccaagaaaataaacatgacagttatattccctgctcagagaggatacacgtagctgttacagaaatggcagcattattccccaaaaaacccaagtctgatatggtgaggacttcccttcgtttactgacgtccagtgcctaccgactgcagtcagagtgcaagaagaccctcccaggggaccccggctcacccacagacgttcagctggtcacgcagcaggtcatccagtgtgcgtacgacatcgccaaggctgccaagcagctggttaccatcaccaccaaagagaacaacaactgacaagggcagggcaccgcctcctctgttttctaggctttataaagtccaatttcaaattcagacgcagaactcttcagatttctacaaaaagaaacatttaatgacggtttaaaactttttaaaagaaaactcagtattatttttgcatgttttctaaccaattttcaactatttaacccacttgccttattttgtgcctatttgctggtttagtttctgatgttcggttgtgttgtcaacaactgttgagttgatcacatacatccaaaagtatagtttcattgtctaaagtttgtgaaaacttttccatcccttaaaactccctgcctatggctgaaactataaatgaaatttttcataaaacattttcttgagagagttcagttaaaaaagaaaaaatcagcgtcatttgttccctgccaagcatcgtgcaataagtgaatttcctggcctacttcataatctctaagtttggggtatctccaagcatgtatgtagagaaaggactttgccgctttttaaaactagtgtcacagtctctcttgggaggaaacaatgaattggttcatttcttctcagtgttttaccctgttacatgttctgttatttaatgttgttatctcaagctcctatctcttgatgttttcttgtcatcttgaaggctccatggaatgagataaagcattgacccaccacaggacatctcatgaagccatgttcagggtaggagctccacgcacatcaccacccattgtcaggtgctctccctcacccctgtaagccagacagtttgttcaaaacctgcagcaaagagaagcatcagtctaacaagccagaactcattttgtgccacccatttaggtatcactaccatgaactatagggaaaagaaatcacctactccctgacactgtgttgtacccttcatccaaaagtcagcttgcttctctgaccacttacagctttctcacatgagttgcttcacatttttcatcatctttaaggacttcttataaggaaagatgtatcgtatcgcagtcatctgagttagtttctcctccatcacctcatgagtacttaaaaattagacatcaactttcaagagttccttagagagtgtgctctagctggctgcctgctaccccaaagctctgaaagagtaaggttgaagtgctggaacatgctcagattgttttttagttactcaaaagccccttcttgttctgaatgtgaaagctcttcccgttcctgcttactgcagccattctgtgtgtgtggttcagaccctggcctagggccggtgatgtggatgagtgaagggagccaggtacacggcagcagggcagaggagactatggggagcccaccgcctacacagtaggggcagtagcccccagctccacgcctgttgccatgtggaaaagtgggcctagggtggccacagctttgatttttcaagagacaagaaacctagatgttttttggtgccatctctccatttataaatgttggcaaccaatttgaacactttcagagaccatgtgcaggtgagctgtgtcctctaggctgccagctcacagcccccaccccagggccctgtaagctgtgcagtgtgagggcctggcttccccggacacacctggagcagcctctgagtcttacccgtaatggagccggccaaccctgtgtgttatgttgctgtcgctcctgtttttaaccatatgttctgtcccatagcagtcattcacacatgtgaagaagacacaagaatcaaagtacaagttgcctcaatacatgctaataactaagcttctattttcacaggactgatcgatgcacacctttatagcttgaccatatgctgtcatgaaagtagcaccccgacggtgcttgctttactaagtcaccgtgtgtggatgcttttgtcgcattttgcttcactgtgagtagcatgggaaaagggtccacgtctccaaaagactcttccacttgtttgtcccacagccctaagtgccacattgctgttggatgctcccgggatgccttctagaagggggcctcccaccttaagttcaggcgccatctgatagccttttctgcaggcttcatgtccttagctgaccctcctttatcttgcaaacccctgcccctgctgtcccagggaggacgggcttctgtagaggcttctgggaaatgagctgtctgcaggaggtgaagcagtgttttccttggaatgtttgaggacctgcaatagaagatgttgcctttatggccctagagaaagtcaaggaacatggggaccaacaaagcatttccagttgtaagaatatgtcagaagagtgctcggttagcccacggtgccaaaactccaaacaagttccccggtggaatgacgtggccattggagggctgcaggtcgtcctctctgtatgtgccccgcgcatttccttggcctcatctgagatctggtgtcagagttctctgctcctgttggcaaatcgcaccttatctgaacatttgttccagccaccttttgcacatggattccgtaccttgcactagcaatgtctaccttcagtaacgtcgttctttttcaccctgtattctcaatgatcccttcctccccatatgccacccttcccccaaagctgatagggcagaggtgcactttatgaaactggcacttgactgaacagaaggaaacagctgtacctctaagctcctttcacagaaatcgtcatctgccttggaatgcaaatagttcttatttgccaaagaacagtgaattgggcccaaagatcaaacacagcatttcatgtaatcagaattctaaacgcacaactcgggagctgtgcacggcttctcaagtgattcagttgcagaaccaagagcaaaactcgcctgtttttgtcctcaatggcacccatgagctttccaatagtatagttttctttctttccttgtcctggttgaaggtaacgtgttcctagaaaagaaaatgctgcataggaaaactgagatgccttttattccaacgtgtttgatccctgtcactcattattctgtactttttattgtacattctattcctgtaattattgtgccctttaagtgttgtaaaatcgttttggaatttgtgcctgctagttatgcaataaacaggctctacaagtgtttttgtggtaaaaaaaaac

SEQ ID NO: 354938 - DNA, 4379 bp, Homo sapiens
gccccaccatgacaaattttaaagtggttagacattttgttttgaggaagtccaaaccacaacttttccacattcagaaatgaagctatttaatttgcttacgtgatgaagggagttgattgtgtttcacccaatccagaagaaagggtccttgtttgtattggctttttactttcagcccggctagctgttactgtccttattgtttaaaactggtagttgtattcatttacttggtgtttgctttttctgcttgctgtaaaaaaacacagtcccactgccaaacatttctttcagcttcaaacactccagagtgaaaattcgaacctcaggaaacaggccacaaccaatgtatatcaggtgcaaactggttctgagtacacagacacttccaaccactcttccttaaagagacgtccgtctgcccggggcagtaggcccatgtccatgtacgagaccggatcaggtcagaaaccatatctcccaatgggagaagcgagccgccccgaagagagcaggatgagactccagcccttccccgcgcacatcgggaggagtgcacttgtgacctcctcttcatctctgccttccttcccctccacactttcctggtcgagggacgaaagcgcccgaagggcatccaggctggagaagcagaacagcacacctgagagtgactacgacaacactcccaacgacatggagccagatggcatggggtcaagccgaaagggacggcaaagaagtatggtgtggccaggggatggcttggtaccagacacagcagaaccccatgtggccccaagccccactctccctagcaccgaagatgtcatcaggaagactgaacagatcaccaaaaacatacaggagctcttaagagcagcccaagaaaataaacatgacagttatattccctgctcagagaggatacacgtagctgttacagaaatggcagcattattccccaaaaaacccaagtctgatatggtgaggacttcccttcgtttactgacgtccagtgcctaccgactgcagtcagagtgcaagaagaccctcccaggggaccccggctcacccacagacgttcagctggtcacgcagcaggtcatccagtgtgcgtacgacatcgccaaggctgccaagcagctggttaccatcaccaccaaagagaacaacaactgacaagggcagggcaccgcctcctctgttttctaggctttataaagtccaatttcaaattcagacgcagaactcttcagatttctacaaaaagaaacatttaatgacggtttaaaactttttaaaagaaaactcagtattatttttgcatgttttctaaccaattttcaactatttaacccacttgccttattttgtgcctatttgctggtttagtttctgatgttcggttgtgttgtcaacaactgttgagttgatcacatacatccaaaagtatagtttcattgtctaaagtttgtgaaaacttttccatcccttaaaactccctgcctatggctgaaactataaatgaaatttttcataaaacattttcttgagagagttcagttaaaaaagaaaaaatcagcgtcatttgttccctgccaagcatcgtgcaataagtgaatttcctggcctacttcataatctctaagtttggggtatctccaagcatgtatgtagagaaaggactttgccgctttttaaaactagtgtcacagtctctcttgggaggaaacaatgaattggttcatttcttctcagtgttttaccctgttacatgttctgttatttaatgttgttatctcaagctcctatctcttgatgttttcttgtcatcttgaaggctccatggaatgagataaagcattgacccaccacaggacatctcatgaagccatgttcagggtaggagctccacgcacatcaccacccattgtcaggtgctctccctcacccctgtaagccagacagtttgttcaaaacctgcagcaaagagaagcatcagtctaacaagccagaactcattttgtgccacccatttaggtatcactaccatgaactatagggaaaagaaatcacctactccctgacactgtgttgtacccttcatccaaaagtcagcttgcttctctgaccacttacagctttctcacatgagttgcttcacatttttcatcatctttaaggacttcttataaggaaagatgtatcgtatcgcagtcatctgagttagtttctcctccatcacctcatgagtacttaaaaattagacatcaactttcaagagttccttagagagtgtgctctagctggctgcctgctaccccaaagctctgaaagagtaaggttgaagtgctggaacatgctcagattgttttttagttactcaaaagccccttcttgttctgaatgtgaaagctcttcccgttcctgcttactgcagccattctgtgtgtgtggttcagaccctggcctagggccggtgatgtggatgagtgaagggagccaggtacacggcagcagggcagaggagactatggggagcccaccgcctacacagtaggggcagtagcccccagctccacgcctgttgccatgtggaaaagtgggcctagggtggccacagctttgatttttcaagagacaagaaacctagatgttttttggtgccatctctccatttataaatgttggcaaccaatttgaacactttcagagaccatgtgcaggtgagctgtgtcctctaggctgccagctcacagcccccaccccagggccctgtaagctgtgcagtgtgagggcctggcttccccggacacacctggagcagcctctgagtcttacccgtaatggagccggccaaccctgtgtgttatgttgctgtcgctcctgtttttaaccatatgttctgtcccatagcagtcattcacacatgtgaagaagacacaagaatcaaagtacaagttgcctcaatacatgctaataactaagcttctattttcacaggactgatcgatgcacacctttatagcttgaccatatgctgtcatgaaagtagcaccccgacggtgcttgctttactaagtcaccgtgtgtggatgcttttgtcgcattttgcttcactgtgagtagcatgggaaaagggtccacgtctccaaaagactcttccacttgtttgtcccacagccctaagtgccacattgctgttggatgctcccgggatgccttctagaagggggcctcccaccttaagttcaggcgccatctgatagccttttctgcaggcttcatgtccttagctgaccctcctttatcttgcaaacccctgcccctgctgtcccagggaggacgggcttctgtagaggcttctgggaaatgagctgtctgcaggaggtgaagcagtgttttccttggaatgtttgaggacctgcaatagaagatgttgcctttatggccctagagaaagtcaaggaacatggggaccaacaaagcatttccagttgtaagaatatgtcagaagagtgctcggttagcccacggtgccaaaactccaaacaagttccccggtggaatgacgtggccattggagggctgcaggtcgtcctctctgtatgtgccccgcgcatttccttggcctcatctgagatctggtgtcagagttctctgctcctgttggcaaatcgcaccttatctgaacatttgttccagccaccttttgcacatggattccgtaccttgcactagcaatgtctaccttcagtaacgtcgttctttttcaccctgtattctcaatgatcccttcctccccatatgccacccttcccccaaagctgatagggcagaggtgcactttatgaaactggcacttgactgaacagaaggaaacagctgtacctctaagctcctttcacagaaatcgtcatctgccttggaatgcaaatagttcttatttgccaaagaacagtgaattgggcccaaagatcaaacacagcatttcatgtaatcagaattctaaacgcacaactcgggagctgtgcacggcttctcaagtgattcagttgcagaaccaagagcaaaactcgcctgtttttgtcctcaatggcacccatgagctttccaatagtatagttttctttctttccttgtcctggttgaaggtaacgtgttcctagaaaagaaaatgctgcataggaaaactgagatgccttttattccaacgtgtttgatccctgtcactcattattctgtactttttattgtacattctattcctgtaattattgtgccctttaagtgttgtaaaatcgttttggaatttgtgcctgctagttatgcaataaacaggctctacaagtgtttttgtggtaaaaaaaaac

SEQ ID NO: 354939 - DNA, 3780 bp, Homo sapiens
ttgttctgcatgaatgttgatttaataagacaaggatatacaagtcgtgctaaaaggcacattttaaaatttataggattttctggaatattttacccacatggattaatatttttcaaaaactacttcaaaataccacatactactaaaattaccctgcatgcactttgacctttgaatcagaatatttcagcatctcttacgctgtgggctgcaaagcttggagtgtgtgaagcacccctttgagaaagggcaggaccaaaccgcctttcactctggggagcagcttggtttgctttagaagaatgtttgtcccctgcttttggatgtctgccctgcagttcagggtaaacggctgtctttttccttttagaaacccaagtctgatatggtgaggacttcccttcgtttactgacgtccagtgcctaccgactgcagtcagagtgcaagaagaccctcccaggggaccccggctcacccacagacgttcagctggtcacgcagcaggtcatccagtgtgcgtacgacatcgccaaggctgccaagcagctggttaccatcaccaccaaagagaacaacaactgacaagggcagggcaccgcctcctctgttttctaggctttataaagtccaatttcaaattcagacgcagaactcttcagatttctacaaaaagaaacatttaatgacggtttaaaactttttaaaagaaaactcagtattatttttgcatgttttctaaccaattttcaactatttaacccacttgccttattttgtgcctatttgctggtttagtttctgatgttcggttgtgttgtcaacaactgttgagttgatcacatacatccaaaagtatagtttcattgtctaaagtttgtgaaaacttttccatcccttaaaactccctgcctatggctgaaactataaatgaaatttttcataaaacattttcttgagagagttcagttaaaaaagaaaaaatcagcgtcatttgttccctgccaagcatcgtgcaataagtgaatttcctggcctacttcataatctctaagtttggggtatctccaagcatgtatgtagagaaaggactttgccgctttttaaaactagtgtcacagtctctcttgggaggaaacaatgaattggttcatttcttctcagtgttttaccctgttacatgttctgttatttaatgttgttatctcaagctcctatctcttgatgttttcttgtcatcttgaaggctccatggaatgagataaagcattgacccaccacaggacatctcatgaagccatgttcagggtaggagctccacgcacatcaccacccattgtcaggtgctctccctcacccctgtaagccagacagtttgttcaaaacctgcagcaaagagaagcatcagtctaacaagccagaactcattttgtgccacccatttaggtatcactaccatgaactatagggaaaagaaatcacctactccctgacactgtgttgtacccttcatccaaaagtcagcttgcttctctgaccacttacagctttctcacatgagttgcttcacatttttcatcatctttaaggacttcttataaggaaagatgtatcgtatcgcagtcatctgagttagtttctcctccatcacctcatgagtacttaaaaattagacatcaactttcaagagttccttagagagtgtgctctagctggctgcctgctaccccaaagctctgaaagagtaaggttgaagtgctggaacatgctcagattgttttttagttactcaaaagccccttcttgttctgaatgtgaaagctcttcccgttcctgcttactgcagccattctgtgtgtgtggttcagaccctggcctagggccggtgatgtggatgagtgaagggagccaggtacacggcagcagggcagaggagactatggggagcccaccgcctacacagtaggggcagtagcccccagctccacgcctgttgccatgtggaaaagtgggcctagggtggccacagctttgatttttcaagagacaagaaacctagatgttttttggtgccatctctccatttataaatgttggcaaccaatttgaacactttcagagaccatgtgcaggtgagctgtgtcctctaggctgccagctcacagcccccaccccagggccctgtaagctgtgcagtgtgagggcctggcttccccggacacacctggagcagcctctgagtcttacccgtaatggagccggccaaccctgtgtgttatgttgctgtcgctcctgtttttaaccatatgttctgtcccatagcagtcattcacacatgtgaagaagacacaagaatcaaagtacaagttgcctcaatacatgctaataactaagcttctattttcacaggactgatcgatgcacacctttatagcttgaccatatgctgtcatgaaagtagcaccccgacggtgcttgctttactaagtcaccgtgtgtggatgcttttgtcgcattttgcttcactgtgagtagcatgggaaaagggtccacgtctccaaaagactcttccacttgtttgtcccacagccctaagtgccacattgctgttggatgctcccgggatgccttctagaagggggcctcccaccttaagttcaggcgccatctgatagccttttctgcaggcttcatgtccttagctgaccctcctttatcttgcaaacccctgcccctgctgtcccagggaggacgggcttctgtagaggcttctgggaaatgagctgtctgcaggaggtgaagcagtgttttccttggaatgtttgaggacctgcaatagaagatgttgcctttatggccctagagaaagtcaaggaacatggggaccaacaaagcatttccagttgtaagaatatgtcagaagagtgctcggttagcccacggtgccaaaactccaaacaagttccccggtggaatgacgtggccattggagggctgcaggtcgtcctctctgtatgtgccccgcgcatttccttggcctcatctgagatctggtgtcagagttctctgctcctgttggcaaatcgcaccttatctgaacatttgttccagccaccttttgcacatggattccgtaccttgcactagcaatgtctaccttcagtaacgtcgttctttttcaccctgtattctcaatgatcccttcctccccatatgccacccttcccccaaagctgatagggcagaggtgcactttatgaaactggcacttgactgaacagaaggaaacagctgtacctctaagctcctttcacagaaatcgtcatctgccttggaatgcaaatagttcttatttgccaaagaacagtgaattgggcccaaagatcaaacacagcatttcatgtaatcagaattctaaacgcacaactcgggagctgtgcacggcttctcaagtgattcagttgcagaaccaagagcaaaactcgcctgtttttgtcctcaatggcacccatgagctttccaatagtatagttttctttctttccttgtcctggttgaaggtaacgtgttcctagaaaagaaaatgctgcataggaaaactgagatgccttttattccaacgtgtttgatccctgtcactcattattctgtactttttattgtacattctattcctgtaattattgtgccctttaagtgttgtaaaatcgttttggaatttgtgcctgctagttatgcaataaacaggctctacaagtgtttttgtggtaaaaaaaaac

SEQ ID NO: 354940 - DNA, 2800 bp, Homo sapiens
cccgcgcgtgcgtgctgtgccaaggctgcaaggcgctgaggggagaggcgccgccgtcagcgccgccgcagctgggacccgttagagcggaagcgccgccgccaccgccgcctttgctgtcccccggcctctagttccccgcaggtgggaggtgggagccatgtcgaaacggctccggagcagcgaggtgtgcgctgactgcagcgggccggatccttcctgggcatcagtaaataggggaacgtttttatgtgatgagtgctgcagtgtccatcggagtctagggcgccatatctcccaagtgaggcatctgaaacacacaccgtggcctccaacactgcttcagatggttgagaccttgtataataacggtgctaactctatatgggagcattctttgctggaccctgcgtctattatgagtggaagacgtaaagctaatccacaggataaagtacatcccaataaagcggaattcatcagagccaagtatcagatgttagcgttcgtccatcgcttgccctgccgggatgacgatagtgtgactgccaaagatcttagcaagcaactccattcgagcgtgagaacagggaatcttgaaacctgtttgagactgttatctttaggagcacaagccaacttctttcatcctgaaaaaggaaacaccccactccatgttgcctccaaagcagggcagattttacaggctgaattattggcagtatatggagcagacccaggcacacaggattctagtgggaaaactcccgttgattatgcaaggcaaggagggcaccatgagctggcagagcgcctcgtggaaatacagtatgagctaacggacagactagccttctatctctgtggcaggaaaccagatcacaaaaatggacagcactttataatacctcaaatggcagacagcagcctggatttgtctgaattggcaaaagctgctaagaagaaacttcaatctctaagtaatcatttgtttgaagaacttgccatggatgtgtacgatgaagttgacaggcgagagacggatgcagtctggcttgccacgcaaaaccacagcgccctggtaaccgagacaacggtcgtcccctttcttccggtcaatcctgagtactcatcaacacgaaatcagggcagacagaagttagctcggttcaacgcccatgagtttgccacgctggtcattgacattctcagtgacgccaagaggagacagcagggcagttctctctcgggttcaaaagacaatgtggagctcatactgaaaaccatcaataaccagcacagcgttgagagtcaagacaacgatcagcccgactatgacagcgtggcatcagacgaagacacagatttggaaaccactgcaagcaaaacaaaccggcagaagagcctagattcagatttatcagatggaccagtcactgtacaggaatttatggaggtcaaaaacgctctagtggcttctgaggccaagatacagcagctaatgaaggtgaataacaacttgagtgacgagctgagaattatgcagaaaaagcttcaaacactccagagtgaaaattcgaacctcaggaaacaggccacaaccaatgtatatcaggtgcaaactggttctgagtacacagacacttccaaccactcttccttaaagagacgtccgtctgcccggggcagtaggcccatgtccatgtacgagaccggatcaggtcagaaaccatatctcccaatgggagaagcgagccgccccgaagagagcaggatgagactccagcccttccccgcgcacatcgggaggagtgcacttgtgacctcctcttcatctctgccttccttcccctccacactttcctggtcgagggacgaaagcgcccgaagggcatccaggctggagaagcagaacagcacacctgagagtgactacgacaacactcccaacgacatggagccagatggcatggggtcaagccgaaagggacggcaaagaagtatggtgtggccaggggatggcttggtaccagacacagcagaaccccatgtggccccaagccccactctccctagcaccgaagatgtcatcaggaagactgaacagatcaccaaaaacatacaggagctcttaagagcagcccaagaaaataaacatgacagttatattccctgctcagagaggatacacgtagctgttacagaaatggcagcattattccccaaaaaacccaagtctgatatggtgaggacttcccttcgtttactgacgtccagtgcctaccgactgcagtcagagtgcaagaagaccctcccaggggaccccggctcacccacagacgttcagctggtcacgcagcaggtcatccagtgtgcgtacgacatcgccaaggctgccaagcagctggttaccatcaccaccaaagagaacaacaactgacaagggcagggcaccgcctcctctgttttctaggctttataaagtccaatttcaaattcagacgcagaactcttcagatttctacaaaaagaaacatttaatgacggtttaaaactttttaaaagaaaactcagtattatttttgcatgttttctaaccaattttcaactatttaacccacttgccttattttgtgcctatttgctggtttagtttctgatgttcggttgtgttgtcaacaactgttgagttgatcacatacatccaaaagtatagtttcattgtctaaagtttgtgaaaacttttccatcccttaaaactccctgcctatggctgaaactataaatgaaatttttcata

SEQ ID NO: 354941 - DNA, 1670 bp, Homo sapiens
ttgttctgcatgaatgttgatttaataagacaaggatatacaagtcgtgctaaaaggcacattttaaaatttataggattttctggaatattttacccacatggattaatatttttcaaaaactacttcaaaataccacatactactaaaattaccctgcatgcactttgacctttgaatcagaatatttcagcatctcttacgctgtgggctgcaaagcttggagtgtgtgaagcacccctttgagaaagggcaggaccaaaccgcctttcactctggggagcagcttggtttgctttagaagaatgtttgtcccctgcttttggatgtctgccctgcagttcagggtaaacggctgtctttttccttttagaaacccaagtctgatatggtgaggacttcccttcgtttactgacgtccagtgcctaccgactgcagtcagagtgcaagaagacctcttccacttgtttgtcccacagccctaagtgccacattgctgttggatgctcccgggatgccttctagaagggggcctcccaccttaagttcaggcgccatctgatagccttttctgcaggcttcatgtccttagctgaccctcctttatcttgcaaacccctgcccctgctgtcccagggaggacgggcttctgtagaggcttctgggaaatgagctgtctgcaggaggtgaagcagtgttttccttggaatgtttgaggacctgcaatagaagatgttgcctttatggccctagagaaagtcaaggaacatggggaccaacaaagcatttccagttgtaagaatatgtcagaagagtgctcggttagcccacggtgccaaaactccaaacaagttccccggtggaatgacgtggccattggagggctgcaggtcgtcctctctgtatgtgccccgcgcatttccttggcctcatctgagatctggtgtcagagttctctgctcctgttggcaaatcgcaccttatctgaacatttgttccagccaccttttgcacatggattccgtaccttgcactagcaatgtctaccttcagtaacgtcgttctttttcaccctgtattctcaatgatcccttcctccccatatgccacccttcccccaaagctgatagggcagaggtgcactttatgaaactggcacttgactgaacagaaggaaacagctgtacctctaagctcctttcacagaaatcgtcatctgccttggaatgcaaatagttcttatttgccaaagaacagtgaattgggcccaaagatcaaacacagcatttcatgtaatcagaattctaaacgcacaactcgggagctgtgcacggcttctcaagtgattcagttgcagaaccaagagcaaaactcgcctgtttttgtcctcaatggcacccatgagctttccaatagtatagttttctttctttccttgtcctggttgaaggtaacgtgttcctagaaaagaaaatgctgcataggaaaactgagatgccttttattccaacgtgtttgatccctgtcactcattattctgtactttttattgtacattctattcctgtaattattgtgccctttaagtgttgtaaaatcgttttggaatttgtgcctgctagttatgcaataaacaggctctacaagtgtttttgtggtaaaaaaaaac

SEQ ID NO: 354942 - DNA, 2109 bp, Homo sapiens
cccgcgcgtgcgtgctgtgccaaggctgcaaggcgctgaggggagaggcgccgccgtcagcgccgccgcagctgggacccgttagagcggaagcgccgccgccaccgccgcctttgctgtcccccggcctctagttccccgcaggtgggaggtgggagccatgtcgaaacggctccggagcagcgaggtgtgcgctgactgcagcgggccggatccttcctgggcatcagtaaataggggaacgtttttatgtgatgagtgctgcagtgtccatcggagtctagggcgccatatctcccaagtgaggcatctgaaacacacaccgtggcctccaacactgcttcagatggttgagaccttgtataataacggtgctaactctatatgggagcattctttgctggaccctgcgtctattatgagtggaagacgtaaagctaatccacaggataaagtacatcccaataaagcggaattcatcagagccaagtatcagatgttagcgttcgtccatcgcttgccctgccgggatgacgatagtgtgactgccaaagatcttagcaagcaactccattcgagcgtgagaacagggaatcttgaaacctgtttgagactgttatctttaggagcacaagccaacttctttcatcctgaaaaaggaaacaccccactccatgttgcctccaaagcagggcagattttacaggctgaattattggcagtatatggagcagacccaggcacacaggattctagtgggaaaactcccgttgattatgcaaggcaaggagggcaccatgagctggcagagcgcctcgtggaaatacagtatgagctaacggacagactagccttctatctctgtggcaggaaaccagatcacaaaaatggacagcactttataatacctcaaatggcagacagcagcctggatttgtctgaattggcaaaagctgctaagaagaaacttcaatctctaagtaatcatttgtttgaagaacttgccatggatgtgtacgatgaagttgacaggcgagagacggatgcagtctggcttgccacgcaaaaccacagcgccctggtaaccgagacaacggtcgtcccctttcttccggtcaatcctgagtactcatcaacacgaaatcagggcagacagaagttagctcggttcaacgcccatgagtttgccacgctggtcattgacattctcagtgacgccaagaggagacagcagggcagttctctctcgggttcaaaagacaatgtggagctcatactgaaaaccatcaataaccagcacagcgttgagagtcaagacaacgatcagcccgactatgacagcgtggcatcagacgaagacacagatttggaaaccactgcaagcaaaacaaaccggcagaagagcctagattcagatttatcagatggaccagtcactgtacaggaatttatggaggtcaaaaacgctctagtggcttctgaggccaagatacagcagctaatgaaggtgaataacaacttgagtgacgagctgagaattatgcagaaaaagcttcaaacactccagagtgaaaattcgaacctcaggaaacaggccacaaccaatgtatatcaggtgcaaactggttctgagtacacagacacttccaaccactcttccttaaagagacgtccgtctgcccggggcagtaggcccatgtccatgtacgagaccggatcaggtcagaaaccatatctcccaatgggagaagcgagccgccccgaagagagcaggatgagactccagcccttccccgcgcacatcgggaggagtgcacttgtgacctcctcttcatctctgccttccttcccctccacactttcctggtcgagggacgaaagcgcccgaagggcatccaggctggagaagcagaacagcacacctgagagtgactacgacaacactcccaacgacatggagccagatggcatggggtacatgcacaggacgagcgtgccaggggaggggctccccagggccagagacctggcaggcctgggccagcagaagcagttcaccacacacaccccttttctctattttcagactcataaagtcttaaagtattc

SEQ ID NO: 354943 - DNA, 1463 bp, Homo sapiens
cccgcgcgtgcgtgctgtgccaaggctgcaaggcgctgaggggagaggcgccgccgtcagcgccgccgcagctgggacccgttagagcggaagcgccgccgccaccgccgcctttgctgtcccccggcctctagttccccgcaggtgggaggtgggagccatgtcgaaacggctccggagcagcgaggtgtgcgctgactgcagcgggccggatccttcctgggcatcagtaaataggggaacgtttttatgtgatgagtgctgcagtgtccatcggagtctagggcgccatatctcccaagtgaggcatctgaaacacacaccgtggcctccaacactgcttcagatggttgagaccttgtataataacggtgctaactctatatgggagcattctttgctggaccctgcgtctattatgagtggaagacgtaaagctaatccacaggataaagtacatcccaataaagcggaattcatcagagccaagtatcagatgttagcgttcgtccatcgcttgccctgccgggatgacgatagtgtgactgccaaagatcttagcaagcaactccattcgagcgtgagaacagggaatcttgaaacctgtttgagactgttatctttaggagcacaagccaacttctttcatcctgaaaaaggaaacaccccactccatgttgcctccaaagcagggcagattttacaggctgaattattggcagtatatggagcagacccaggcacacaggattctagtgggaaaactcccgttgattatgcaaggcaaggagggcaccatgagctggcagagcgcctcgtggaaatacagtatgagctaacggacagactagccttctatctctgtggcaggaaaccagatcacaaaaatggacagcactttataatacctcaaatggcagacagcagcctggatttgtctgaattggcaaaagctgctaagaagaaacttcaatctctaagtaatcatttgtttgaagaacttgccatggatgtgtacgatgaagttgacaggcgagagacggatgcagtctggcttgccacgcaaaaccacagcgccctggtaaccgagacaacggtcgtcccctttcttccggtcaatcctgagtactcatcaacacgaaatcagggcatacagaatttgggtcggttaccaccacgccaagcatttcccacgcgggtcttttacattttcatgtacgcacagagaggaggacatgcaggacaagttctgcttctcggggttcatatagacattgtcgagcttatattgccaaccgtccattaccaccacagggttctcactctcgacaccgatcagcccgactatcgacagcctggcatgaaagcgctagacagctagatttggaaagcaatctgcacgctaaacaccaattcggtcagacagtgcctggtttatgatgatatatgataagtccagtctc

SEQ ID NO: 354944 - DNA, 1480 bp, Homo sapiens
tttttaacctgtgacacattttatgtcagcaccacaagtgctgacaaaccaaggtttacaagtccctgcatcttgaatcagaattgtaacaccttgtggcattggagctatgcaagcagctgttaacctaaagctgttcacttgtacgggttggttaaacctcacctactggtgtataatttatggtctcaatagcagtgcatgattcaggtaagcctcttttagagtagtcaggcagtaagtattaagcacctcctccatacacagcgtttgggtaagtcaatgaaagggtcctaaggacttagctggcacagcccctgctcccaaaggcactgtcaattaaaaaatactttcatgcataaagagtggtacatgaccacaacctgggaaagccgtggaaagggcataggctttgaaatccacgtcccagttctggctccatctcttttttaatggaagggtaatgtaaggtaagaggaggaaggtggctgtgggtaagggaccacctttacaggcaaggtggggtttgcactgggcctttgccattccctccacacctaggaattatggagagcctttctttcctagttccagtggcatatggattaccaaggccctttcaggattcgtttttttattttttattttttagagacagagtctcatgttgcccagtctgtagtacaatagctatttacaggcatggtcatagcgtactgcagcctcaaactcctgggctcaagcagtcctcccacttcaggcttctgagtagctgggcctacaggcatgcgccaccatgccctgacccttttggaattcttcacttcactttcagtctattaagaattctcagccgagtgcagtgactcacacactttgggaggcctaggcgggtggattgcttgagcccaggagttcaagaccagcctcagcaacatggcgaaatcccatctctataaaaaatataaaaaattatccgggtgtgttgatgtgcacctgtagtcccaggtgcttgggaggctgagatgggaggatcacttgagcccaccatgagagatcgaggctgcagtgagccatgattgtgccattgcactccagcctggacaacacagtgaggccctgtctcaaaaaaaaaaaaggaattactgtactaaaaaaaaaaaaaaagaattcttgatacattgtacttaaagtctcggctgggtgcagtggctcatgcctgtaatcccagcactttggaaggccaaggtgggtggatcacttgagcccaggaatttgagaccagcctggccaacatggcaaaacctgtctctactaaaaatacaaaaattagcggcgggtggtggcgcatgcctgtaatcccagatacttggaaggctgaggcacgagaatcaagaatcccttgaacctgggaagtggaggttgcagtaagccgagattgcaccactgcactccagcctgggcgacagagtgagattgt

SEQ ID NO: 354945 - DNA, 1507 bp, Homo sapiens
tttttaacctgtgacacattttatgtcagcaccacaagtgctgacaaaccaaggtttacaagtccctgcatcttgaatcagaattgtaacaccttgtggcattggagctatgcaagcagctgttaacctaaagctgttcacttgtacgggttggttaaacctcacctactggtgtataatttatggtctcaatagcagtgcatgattcaggtaagcctcttttagagtagtcaggcagtaagtattaagcacctcctccatacacagcgtttgggtaagtcaatgaaagggtcctaaggacttagctggcacagcccctgctcccaaaggcactgtcaattaaaaaatactttcatgcataaagagtggtacatgaccacaacctgggaaagccgtggaaagggcataggctttgaaatccacgtcccagttctggctccatctcttttttaatggaagggtaatgtaaggtaagaggaggaaggtggctgtgggtaagggaccacctttacaggcaaggtggggtttgcactgggcctttgccattccctccacacctaggaattatggagagcctttctttcctagttccagtggcatatggattaccaaggccctttcaggattcgtttttttattttttattttttagagacagagtctcatgttgcccagtctgtagtacaatagctatttacaggcatggtcatagcgtactgcagcctcaaactctcctgggctcaagcagtcctccctcagcctcctgaggagctgggactacaggttcatgctaccatgcctggctgatttatttatttatttatttatttatttatttatttatttatttattttatttattttttaaatgttgcccaggctggtctcaaactcctagccttaagcaatcgtcctgcctcagcctcccaaaatacagggattacaggtgtgagccaccacaccctgcctgtattttaactgcatctcattatgttataaatttgagaactaaatgaggatatgttgccttgcatgtctgttagtttgtactaaggatctgattaggaagtggccactgagctaagaagaaaatggtgcaaagaaggaaagaggccatttctggatccaatattcatcttttactaaattttcactagagagttgtcccctgtcccaaatgagatttgggatgtgaaggccagtagcctaacaggtaacaattcctggggaagactcctgagaagagtctcatgttacaaactcatgagggtccctcttctttcttgtaggcatccaggctggagaagcagaacagcacacctgagagtgactacgacaacactcccaacgacatggagccagatggcatggggtacatgcacaggacgagcgtgccaggggaggggctccccagggccagagacctggcaggcctgggccagcagaagcagttcaccacacacaccccttttctctattttcagactcataaagtcttaaagtattc

SEQ ID NO: 354946 - DNA, 982 bp, Homo sapiens
agtgctggtcacgtttcagaggactgagctgagcaagtgctgggattataggcgggagccatcgagcccgacatattttcttatatcatgctttttttttaatacttcaaaaattgtgactcctcacataagggcctggaaggtaacctggcaatagcttttgtcgtttagttggtggacgatttttttttcctctttaacacttacatgattgtggtatttcagaaggagttactttcaccagattgttctgtttagagctcctcactgactctactgggctgtagaatgcttggttctaacatggtccatgaactgtaattaatatttttatctcttgggtgtcttaaactttacagagttcacaagtctggctttatttatttgcttattagctttgtatgttttcttagcagcctggatttgtctgaattggcaaaagctgctaagaagaaacttcaatctgtgagtatttttttgtactggttttctctagtatgagaatcagtgcaccctgctgatacctactctgaatgcaggttacctattgcgtctgatgactttatttcatacttttatttgttaaactagaagcagactgttgagtatacagcagtgatgaccacaaggactattaagttcagtatattcagttcattggttctgcttcagataatctcatttttctctatcatgtaacaagtgcagatggcacctttggcattaggcagttgttctcctcaggagagttccctagttcctctcagtgtcatgagtaagtagggcacgcgttcttggggtgacttagccatgtagggttctagagctggtaaatgctgatgctgaaatggtggcgagtcccatagattcactggctgccatttggatccagccatattgtaaacctctttcccatcccatgccattcatcagtgctttttaaatttctgctgttaaaagctggtggtcttggcccatgtgc

SEQ ID NO: 354947 - DNA, 370 bp, Homo sapiens
ctcaatttgctttcttagcttgaatgaaaaagcatgcatctgaaatggtagatccacattagggctacaaactgtggccctgaaccagaaagaagataactgtttacccaaggctcccactggtgtttttagtctcaattaacattgtacctaatcagccaaggtaggtcataccatccaacaagatgaccagcctgatgcattgatgagcatactgaaacaaaaatgtctcctttttctgacaaaccaaacttcagtcatcttttgccatctggcggtatagcaacctgctggtatccctgccactgagatttcactctctttccagatccttcctgggcatcagtaaataggggaacgtttttatgtg

SEQ ID NO: 354948 - DNA, 203 bp, Homo sapiens
agtcactgtacaggaatttatggaggtcaaaaacgctctagtggcttctgaggccaagatacagcagctaatgaaggtgaataacaacttgagtgacgagctgagaattatgcagaaaaaggtaacatgttaataaatgccaggacggttgacgctttaatcccatagtacaaggaagaatctcaggcactgtgatgtggtcc

SEQ ID NO: 354949 - DNA, 2362 bp, Homo sapiens
cccgcgcgtgcgtgctgtgccaaggctgcaaggcgctgaggggagaggcgccgccgtcagcgccgccgcagctgggacccgttagagcggaagcgccgccgccaccgccgcctttgctgtcccccggcctctagttccccgcaggtgggaggtgggagccatgtcgaaacggctccggagcagcgaggtgtgcgctgactgcagcgggccggatccttcctgggcatcagtaaataggggaacgtttttatgtgatgagtgctgcagtgtccatcggagtctagggcgccatatctcccaagtgaggcatctgaaacacacaccgtggcctccaacactgcttcagatggttgagaccttgtataataacggtgctaactctatatgggagcattctttgctggaccctgcgtctattatgagtggaagacgtaaagctaatccacaggataaagtacatcccaataaagcggaattcatcagagccaagtatcagatgttagcgttcgtccatcgcttgccctgccgggatgacgatagtgtgactgccaaagatcttagcaagcaactccattcgagcgtgagaacagggaatcttgaaacctgtttgagactgttatctttaggagcacaagccaacttctttcatcctgaaaaaggaaacaccccactccatgttgcctccaaagcagggcagattttacaggctgaattattggcagtatatggagcagacccaggcacacaggattctagtgggaaaactcccgttgattatgcaaggcaaggagggcaccatgagctggcagagcgcctcgtggaaatacagtatgagctaacggacagactagccttctatctctgtggcaggaaaccagatcacaaaaatggacagcactttataatacctcaaatggcagacagcagcctggatttgtctgaattggcaaaagctgctaagaagaaacttcaatctctaagtaatcatttgtttgaagaacttgccatggatgtgtacgatgaagttgacaggcgagagacggatgcagtctggcttgccacgcaaaaccacagcgccctggtaaccgagacaacggtcgtcccctttcttccggtcaatcctgagtactcatcaacacgaaatcagggcagacagaagttagctcggttcaacgcccatgagtttgccacgctggtcattgacattctcagtgacgccaagaggagacagcagggcagttctctctcgggttcaaaagacaatgtggagctcatactgaaaaccatcaataaccagcacagcgttgagagtcaagacaacgatcagcccgactatgacagcgtggcatcagacgaagacacagatttggaaaccactgcaagcaaaacaaaccggcagaagagcctagattcagatttatcagatggaccagtcactgtacaggaatttatggaggtcaaaaacgctctagtggcttctgaggccaagatacagcagctaatgaaggtgaataacaacttgagtgacgagctgagaattatgcagaaaaagttgcttggaaaagatgctaattaatgaagaggagcaactactattggtgtatttttcacagattggtgctttctaaataaaaattgaaagtaactcctaacattgaatgggtttgctactgaaaaagtaatgatcttctggtgcaaacagttgcttgtggacttaaaccttggcactggtggggaatttggtcagattttacaatctctgtcaaagagtagacagctgaactcacaccacacccagcttatagaatgtccatggaagatgaaggcgcaccagaagggaaggaccctgcgcagaatggacgtggtgaatggtgtttaaaatgccagatgccaaagagtaacacgattccctgctgaccccttaactctaatccatccagcaccatggagcagcctgcatgtgaggaatggaaggagcattcagggcctccaagtgacagtctctaaaatggggtggtgccaggcagattagcatgttcaaagctgacaccactgaggtcgtgttttttgggtgacaaagccaaaggagagaaaggccaaatattccagccctggccgaaagatgatcactcaccagacggaagcaagcgtgctgcgtggagcatccatgcgaagatgtcaattccatagatcaataggtttccagttttcttcgtgatatgttaatatagcaaacttaccatgatccggttttctcttttttctttttttttttacaaagtgctgaattgtttggaatatcaagagtattatgtaataaaaacttgttgatcataatttttcttgttggctttttggaaag

SEQ ID NO: 354950 - DNA, 5525 bp, Homo sapiens
cccgcgcgtgcgtgctgtgccaaggctgcaaggcgctgaggggagaggcgccgccgtcagcgccgccgcagctgggacccgttagagcggaagcgccgccgccaccgccgcctttgctgtcccccggcctctagttccccgcaggtgggaggtgggagccatgtcgaaacggctccggagcagcgaggtgtgcgctgactgcagcgggccggatccttcctgggcatcagtaaataggggaacgtttttatgtgatgagtgctgcagtgtccatcggagtctagggcgccatatctcccaagtgaggcatctgaaacacacaccgtggcctccaacactgcttcagatggttgagaccttgtataataacggtgctaactctatatgggagcattctttgctggaccctgcgtctattatgagtggaagacgtaaagctaatccacaggataaagtacatcccaataaagcggaattcatcagagccaagtatcagatgttagcgttcgtccatcgcttgccctgccgggatgacgatagtgtgactgccaaagatcttagcaagcaactccattcgagcgtgagaacagggaatcttgaaacctgtttgagactgttatctttaggagcacaagccaacttctttcatcctgaaaaaggaaacaccccactccatgttgcctccaaagcagggcagattttacaggctgaattattggcagtatatggagcagacccaggcacacaggattctagtgggaaaactcccgttgattatgcaaggcaaggagggcaccatgagctggcagagcgcctcgtggaaatacagtatgagctaacggacagactagccttctatctctgtggcaggaaaccagatcacaaaaatggacagcactttataatacctcaaatggcagacagcagcctggatttgtctgaattggcaaaagctgctaagaagaaacttcaatctctaagtaatcatttgtttgaagaacttgccatggatgtgtacgatgaagttgacaggcgagagacggatgcagtctggcttgccacgcaaaaccacagcgccctggtaaccgagacaacggtcgtcccctttcttccggtcaatcctgagtactcatcaacacgaaatcagggcagacagaagttagctcggttcaacgcccatgagtttgccacgctggtcattgacattctcagtgacgccaagaggagacagcagggcagttctctctcgggttcaaaagacaatgtggagctcatactgaaaaccatcaataaccagcacagcgttgagagtcaagacaacgatcagcccgactatgacagcgtggcatcagacgaagacacagatttggaaaccactgcaagcaaaacaaaccggcagaagagcctagattcagatttatcagatggaccagtcactgtacaggaatttatggaggtcaaaaacgctctagtggcttctgaggccaagatacagcagctaatgaaggtgaataacaacttgagtgacgagctgagaattatgcagaaaaagcttcaaacactccagagtgaaaattcgaacctcaggaaacaggccacaaccaatgtatatcaggtgcaaactggttctgagtacacagacacttccaaccactcttccttaaagagacgtccgtctgcccggggcagtaggcccatgtccatgtacgagaccggatcaggtcagaaaccatatctcccaatgggagaagcgagccgccccgaagagagcaggatgagactccagcccttccccgcgcacatcgggaggagtgcacttgtgacctcctcttcatctctgccttccttcccctccacactttcctggtcgagggacgaaagcgcccgaagggcatccaggctggagaagcagaacagcacacctgagagtgactacgacaacactcccaacgacatggagccagatggcatggggtcaagccgaaagggacggcaaagaagtatggtgtggccaggggatggcttggtaccagacacagcagaaccccatgtggccccaagccccactctccctagcaccgaagatgtcatcaggaagactgaacagatcaccaaaaacatacaggagctcttaagagcagcccaagaaaataaacatgacagttatattccctgctcagagaggatacacgtagctgttacagaaatggcagcattattccccaaaaaacccaagtctgatatggtgaggacttcccttcgtttactgacgtccagtgcctaccgactgcagtcagagtgcaagaagaccctcccaggggaccccggctcacccacagacgttcagctggtcacgcagcaggtcatccagtgtgcgtacgacatcgccaaggctgccaagcagctggttaccatcaccaccaaagagaacaacaactgacaagggcagggcaccgcctcctctgttttctaggctttataaagtccaatttcaaattcagacgcagaactcttcagatttctacaaaaagaaacatttaatgacggtttaaaactttttaaaagaaaactcagtattatttttgcatgttttctaaccaattttcaactatttaacccacttgccttattttgtgcctatttgctggtttagtttctgatgttcggttgtgttgtcaacaactgttgagttgatcacatacatccaaaagtatagtttcattgtctaaagtttgtgaaaacttttccatcccttaaaactccctgcctatggctgaaactataaatgaaatttttcataaaacattttcttgagagagttcagttaaaaaagaaaaaatcagcgtcatttgttccctgccaagcatcgtgcaataagtgaatttcctggcctacttcataatctctaagtttggggtatctccaagcatgtatgtagagaaaggactttgccgctttttaaaactagtgtcacagtctctcttgggaggaaacaatgaattggttcatttcttctcagtgttttaccctgttacatgttctgttatttaatgttgttatctcaagctcctatctcttgatgttttcttgtcatcttgaaggctccatggaatgagataaagcattgacccaccacaggacatctcatgaagccatgttcagggtaggagctccacgcacatcaccacccattgtcaggtgctctccctcacccctgtaagccagacagtttgttcaaaacctgcagcaaagagaagcatcagtctaacaagccagaactcattttgtgccacccatttaggtatcactaccatgaactatagggaaaagaaatcacctactccctgacactgtgttgtacccttcatccaaaagtcagcttgcttctctgaccacttacagctttctcacatgagttgcttcacatttttcatcatctttaaggacttcttataaggaaagatgtatcgtatcgcagtcatctgagttagtttctcctccatcacctcatgagtacttaaaaattagacatcaactttcaagagttccttagagagtgtgctctagctggctgcctgctaccccaaagctctgaaagagtaaggttgaagtgctggaacatgctcagattgttttttagttactcaaaagccccttcttgttctgaatgtgaaagctcttcccgttcctgcttactgcagccattctgtgtgtgtggttcagaccctggcctagggccggtgatgtggatgagtgaagggagccaggtacacggcagcagggcagaggagactatggggagcccaccgcctacacagtaggggcagtagcccccagctccacgcctgttgccatgtggaaaagtgggcctagggtggccacagctttgatttttcaagagacaagaaacctagatgttttttggtgccatctctccatttataaatgttggcaaccaatttgaacactttcagagaccatgtgcaggtgagctgtgtcctctaggctgccagctcacagcccccaccccagggccctgtaagctgtgcagtgtgagggcctggcttccccggacacacctggagcagcctctgagtcttacccgtaatggagccggccaaccctgtgtgttatgttgctgtcgctcctgtttttaaccatatgttctgtcccatagcagtcattcacacatgtgaagaagacacaagaatcaaagtacaagttgcctcaatacatgctaataactaagcttctattttcacaggactgatcgatgcacacctttatagcttgaccatatgctgtcatgaaagtagcaccccgacggtgcttgctttactaagtcaccgtgtgtggatgcttttgtcgcattttgcttcactgtgagtagcatgggaaaagggtccacgtctccaaaagactcttccacttgtttgtcccacagccctaagtgccacattgctgttggatgctcccgggatgccttctagaagggggcctcccaccttaagttcaggcgccatctgatagccttttctgcaggcttcatgtccttagctgaccctcctttatcttgcaaacccctgcccctgctgtcccagggaggacgggcttctgtagaggcttctgggaaatgagctgtctgcaggaggtgaagcagtgttttccttggaatgtttgaggacctgcaatagaagatgttgcctttatggccctagagaaagtcaaggaacatggggaccaacaaagcatttccagttgtaagaatatgtcagaagagtgctcggttagcccacggtgccaaaactccaaacaagttccccggtggaatgacgtggccattggagggctgcaggtcgtcctctctgtatgtgccccgcgcatttccttggcctcatctgagatctggtgtcagagttctctgctcctgttggcaaatcgcaccttatctgaacatttgttccagccaccttttgcacatggattccgtaccttgcactagcaatgtctaccttcagtaacgtcgttctttttcaccctgtattctcaatgatcccttcctccccatatgccacccttcccccaaagctgatagggcagaggtgcactttatgaaactggcacttgactgaacagaaggaaacagctgtaatcagaattctaaacgcacaactcgggagctgtgcacggcttctcaagtgattcagttgcagaaccaagagcaaaactcgcctgtttttgtcctcaatggcacccatgagctttccaatagtatagttttctttctttccttgtcctggttgaaggtaacgtgttcctagaaaagaaaatgctgcataggaaaactgagatgccttttattccaacgtgtttgatccctgtcactcattattctgtactttttattgtacattctattcctgtaattattgtgccctttaagtgttgtaaaatcgttttggaatttgtgcctgctagttatgcaataaacaggctctacaagtgtttttgtggtaaaaaaaaac

SEQ ID NO: 354951 - DNA, 5246 bp, Homo sapiens
gcggccgctcccaacatcagaatggtaattatgagtggaagacgtaaagctaatccacaggataaagtacatcccaataaagcggaattcatcagagccaagtatcagatgttagcgttcgtccatcgcttgccctgccgggatgacgatagtgtgactgccaaagatcttagcaagcaactccattcgagcgtgagaacagggaatcttgaaacctgtttgagactgttatctttaggagcacaagccaacttctttcatcctgaaaaaggaaacaccccactccatgttgcctccaaagcagggcagattttacaggctgaattattggcagtatatggagcagacccaggcacacaggattctagtgggaaaactcccgttgattatgcaaggcaaggagggcaccatgagctggcagagcgcctcgtggaaatacagtatgagctaacggacagactagccttctatctctgtggcaggaaaccagatcacaaaaatggacagcactttataatacctcaaatggcagacagcagcctggatttgtctgaattggcaaaagctgctaagaagaaacttcaatctctaagtaatcatttgtttgaagaacttgccatggatgtgtacgatgaagttgacaggcgagagacggatgcagtctggcttgccacgcaaaaccacagcgccctggtaaccgagacaacggtcgtcccctttcttccggtcaatcctgagtactcatcaacacgaaatcagggcagacagaagttagctcggttcaacgcccatgagtttgccacgctggtcattgacattctcagtgacgccaagaggagacagcagggcagttctctctcgggttcaaaagacaatgtggagctcatactgaaaaccatcaataaccagcacagcgttgagagtcaagacaacgatcagcccgactatgacagcgtggcatcagacgaagacacagatttggaaaccactgcaagcaaaacaaaccggcagaagagcctagattcagatttatcagatggaccagtcactgtacaggaatttatggaggtcaaaaacgctctagtggcttctgaggccaagatacagcagctaatgaaggtgaataacaacttgagtgacgagctgagaattatgcagaaaaagcttcaaacactccagagtgaaaattcgaacctcaggaaacaggccacaaccaatgtatatcaggtgcaaactggttctgagtacacagacacttccaaccactcttccttaaagagacgtccgtctgcccggggcagtaggcccatgtccatgtacgagaccggatcaggtcagaaaccatatctcccaatgggagaagcgagccgccccgaagagagcaggatgagactccagcccttccccgcgcacatcgggaggagtgcacttgtgacctcctcttcatctctgccttccttcccctccacactttcctggtcgagggacgaaagcgcccgaagggcatccaggctggagaagcagaacagcacacctgagagtgactacgacaacactcccaacgacatggagccagatggcatggggtcaagccgaaagggacggcaaagaagtatggtgtggccaggggatggcttggtaccagacacagcagaaccccatgtggccccaagccccactctccctagcaccgaagatgtcatcaggaagactgaacagatcaccaaaaacatacaggagctcttaagagcagcccaagaaaataaacatgacagttatattccctgctcagagaggatacacgtagctgttacagaaatggcagcattattccccaaaaaacccaagtctgatatggtgaggacttcccttcgtttactgacgtccagtgcctaccgactgcagtcagagtgcaagaagaccctcccaggggaccccggctcacccacagacgttcagctggtcacgcagcaggtcatccagtgtgcgtacgacatcgccaaggctgccaagcagctggttaccatcaccaccaaagagaacaacaactgacaagggcagggcaccgcctcctctgttttctaggctttataaagtccaatttcaaattcagacgcagaactcttcagatttctacaaaaagaaacatttaatgacggtttaaaactttttaaaagaaaactcagtattatttttgcatgttttctaaccaattttcaactatttaacccacttgccttattttgtgcctatttgctggtttagtttctgatgttcggttgtgttgtcaacaactgttgagttgatcacatacatccaaaagtatagtttcattgtctaaagtttgtgaaaacttttccatcccttaaaactccctgcctatggctgaaactataaatgaaatttttcataaaacattttcttgagagagttcagttaaaaaagaaaaaatcagcgtcatttgttccctgccaagcatcgtgcaataagtgaatttcctggcctacttcataatctctaagtttggggtatctccaagcatgtatgtagagaaaggactttgccgctttttaaaactagtgtcacagtctctcttgggaggaaacaatgaattggttcatttcttctcagtgttttaccctgttacatgttctgttatttaatgttgttatctcaagctcctatctcttgatgttttcttgtcatcttgaaggctccatggaatgagataaagcattgacccaccacaggacatctcatgaagccatgttcagggtaggagctccacgcacatcaccacccattgtcaggtgctctccctcacccctgtaagccagacagtttgttcaaaacctgcagcaaagagaagcatcagtctaacaagccagaactcattttgtgccacccatttaggtatcactaccatgaactatagggaaaagaaatcacctactccctgacactgtgttgtacccttcatccaaaagtcagcttgcttctctgaccacttacagctttctcacatgagttgcttcacatttttcatcatctttaaggacttcttataaggaaagatgtatcgtatcgcagtcatctgagttagtttctcctccatcacctcatgagtacttaaaaattagacatcaactttcaagagttccttagagagtgtgctctagctggctgcctgctaccccaaagctctgaaagagtaaggttgaagtgctggaacatgctcagattgttttttagttactcaaaagccccttcttgttctgaatgtgaaagctcttcccgttcctgcttactgcagccattctgtgtgtgtggttcagaccctggcctagggccggtgatgtggatgagtgaagggagccaggtacacggcagcagggcagaggagactatggggagcccaccgcctacacagtaggggcagtagcccccagctccacgcctgttgccatgtggaaaagtgggcctagggtggccacagctttgatttttcaagagacaagaaacctagatgttttttggtgccatctctccatttataaatgttggcaaccaatttgaacactttcagagaccatgtgcaggtgagctgtgtcctctaggctgccagctcacagcccccaccccagggccctgtaagctgtgcagtgtgagggcctggcttccccggacacacctggagcagcctctgagtcttacccgtaatggagccggccaaccctgtgtgttatgttgctgtcgctcctgtttttaaccatatgttctgtcccatagcagtcattcacacatgtgaagaagacacaagaatcaaagtacaagttgcctcaatacatgctaataactaagcttctattttcacaggactgatcgatgcacacctttatagcttgaccatatgctgtcatgaaagtagcaccccgacggtgcttgctttactaagtcaccgtgtgtggatgcttttgtcgcattttgcttcactgtgagtagcatgggaaaagggtccacgtctccaaaagactcttccacttgtttgtcccacagccctaagtgccacattgctgttggatgctcccgggatgccttctagaagggggcctcccaccttaagttcaggcgccatctgatagccttttctgcaggcttcatgtccttagctgaccctcctttatcttgcaaacccctgcccctgctgtcccagggaggacgggcttctgtagaggcttctgggaaatgagctgtctgcaggaggtgaagcagtgttttccttggaatgtttgaggacctgcaatagaagatgttgcctttatggccctagagaaagtcaaggaacatggggaccaacaaagcatttccagttgtaagaatatgtcagaagagtgctcggttagcccacggtgccaaaactccaaacaagttccccggtggaatgacgtggccattggagggctgcaggtcgtcctctctgtatgtgccccgcgcatttccttggcctcatctgagatctggtgtcagagttctctgctcctgttggcaaatcgcaccttatctgaacatttgttccagccaccttttgcacatggattccgtaccttgcactagcaatgtctaccttcagtaacgtcgttctttttcaccctgtattctcaatgatcccttcctccccatatgccacccttcccccaaagctgatagggcagaggtgcactttatgaaactggcacttgactgaacagaaggaaacagctgtacctctaagctcctttcacagaaatcgtcatctgccttggaatgcaaatagttcttatttgccaaagaacagtgaattgggcccaaagatcaaacacagcatttcatgtaatcagaattctaaacgcacaactcgggagctgtgcacggcttctcaagtgattcagttgcagaaccaagagcaaaactcgcctgtttttgtcctcaatggcacccatgagctttccaatagtatagttttctttctttccttgtcctggttgaaggtaacgtgttcctagaaaagaaaatgctgcataggaaaactgagatgccttttattccaacgtgtttgatccctgtcactcattattctgtactttttattgtacattctattcctgtaattattgtgccctttaagtgttgtaaaatcgttttggaatttgtgcctgctagttatgcaataaacaggctctacaagtgtttttgtggtaaaaaaaaac

SEQ ID NO: 354952 - DNA, 5176 bp, Homo sapiens
atgcgttactgatgtaacatatattaaaatggtctatcagctgccctaggacatcattctttacacctctaaccacgattccttttttgtttctgcgtttttcagcaactccattcgagcgtgagaacagggaatcttgaaacctgtttgagactgttatctttaggagcacaagccaacttctttcatcctcacaagaaggttgatgattctcaaaagtcttgtgtgataaactgctcaggtgtctcaggagacgtctttgtactccattttaaagtcagtgaatagtgagcaatataaatggtactttgttttctcttggtaggcaaggagggcaccatgagctggcagagcgcctcgtggaaatacagtatgagctaacggacagactagccttctatctctgtggcaggaaaccagatcacaaaaatggacagcactttataatacctcaaatggcagacagcagcctggatttgtctgaattggcaaaagctgctaagaagaaacttcaatctctaagtaatcatttgtttgaagaacttgccatggatgtgtacgatgaagttgacaggcgagagacggatgcagtctggcttgccacgcaaaaccacagcgccctggtaaccgagacaacggtcgtcccctttcttccggtcaatcctgagtactcatcaacacgaaatcagggcagacagaagttagctcggttcaacgcccatgagtttgccacgctggtcattgacattctcagtgacgccaagaggagacagcagggcagttctctctcgggttcaaaagacaatgtggagctcatactgaaaaccatcaataaccagcacagcgttgagagtcaagacaacgatcagcccgactatgacagcgtggcatcagacgaagacacagatttggaaaccactgcaagcaaaacaaaccggcagaagagcctagattcagatttatcagatggaccagtcactgtacaggaatttatggaggtcaaaaacgctctagtggcttctgaggccaagatacagcagctaatgaaggtgaataacaacttgagtgacgagctgagaattatgcagaaaaagcttcaaacactccagagtgaaaattcgaacctcaggaaacaggccacaaccaatgtatatcaggtgcaaactggttctgagtacacagacacttccaaccactcttccttaaagagacgtccgtctgcccggggcagtaggcccatgtccatgtacgagaccggatcaggtcagaaaccatatctcccaatgggagaagcgagccgccccgaagagagcaggatgagactccagcccttccccgcgcacatcgggaggagtgcacttgtgacctcctcttcatctctgccttccttcccctccacactttcctggtcgagggacgaaagcgcccgaagggcatccaggctggagaagcagaacagcacacctgagagtgactacgacaacactcccaacgacatggagccagatggcatggggtcaagccgaaagggacggcaaagaagtatggtgtggccaggggatggcttggtaccagacacagcagaaccccatgtggccccaagccccactctccctagcaccgaagatgtcatcaggaagactgaacagatcaccaaaaacatacaggagctcttaagagcagcccaagaaaataaacatgacagttatattccctgctcagagaggatacacgtagctgttacagaaatggcagcattattccccaaaaaacccaagtctgatatggtgaggacttcccttcgtttactgacgtccagtgcctaccgactgcagtcagagtgcaagaagaccctcccaggggaccccggctcacccacagacgttcagctggtcacgcagcaggtcatccagtgtgcgtacgacatcgccaaggctgccaagcagctggttaccatcaccaccaaagagaacaacaactgacaagggcagggcaccgcctcctctgttttctaggctttataaagtccaatttcaaattcagacgcagaactcttcagatttctacaaaaagaaacatttaatgacggtttaaaactttttaaaagaaaactcagtattatttttgcatgttttctaaccaattttcaactatttaacccacttgccttattttgtgcctatttgctggtttagtttctgatgttcggttgtgttgtcaacaactgttgagttgatcacatacatccaaaagtatagtttcattgtctaaagtttgtgaaaacttttccatcccttaaaactccctgcctatggctgaaactataaatgaaatttttcataaaacattttcttgagagagttcagttaaaaaagaaaaaatcagcgtcatttgttccctgccaagcatcgtgcaataagtgaatttcctggcctacttcataatctctaagtttggggtatctccaagcatgtatgtagagaaaggactttgccgctttttaaaactagtgtcacagtctctcttgggaggaaacaatgaattggttcatttcttctcagtgttttaccctgttacatgttctgttatttaatgttgttatctcaagctcctatctcttgatgttttcttgtcatcttgaaggctccatggaatgagataaagcattgacccaccacaggacatctcatgaagccatgttcagggtaggagctccacgcacatcaccacccattgtcaggtgctctccctcacccctgtaagccagacagtttgttcaaaacctgcagcaaagagaagcatcagtctaacaagccagaactcattttgtgccacccatttaggtatcactaccatgaactatagggaaaagaaatcacctactccctgacactgtgttgtacccttcatccaaaagtcagcttgcttctctgaccacttacagctttctcacatgagttgcttcacatttttcatcatctttaaggacttcttataaggaaagatgtatcgtatcgcagtcatctgagttagtttctcctccatcacctcatgagtacttaaaaattagacatcaactttcaagagttccttagagagtgtgctctagctggctgcctgctaccccaaagctctgaaagagtaaggttgaagtgctggaacatgctcagattgttttttagttactcaaaagccccttcttgttctgaatgtgaaagctcttcccgttcctgcttactgcagccattctgtgtgtgtggttcagaccctggcctagggccggtgatgtggatgagtgaagggagccaggtacacggcagcagggcagaggagactatggggagcccaccgcctacacagtaggggcagtagcccccagctccacgcctgttgccatgtggaaaagtgggcctagggtggccacagctttgatttttcaagagacaagaaacctagatgttttttggtgccatctctccatttataaatgttggcaaccaatttgaacactttcagagaccatgtgcaggtgagctgtgtcctctaggctgccagctcacagcccccaccccagggccctgtaagctgtgcagtgtgagggcctggcttccccggacacacctggagcagcctctgagtcttacccgtaatggagccggccaaccctgtgtgttatgttgctgtcgctcctgtttttaaccatatgttctgtcccatagcagtcattcacacatgtgaagaagacacaagaatcaaagtacaagttgcctcaatacatgctaataactaagcttctattttcacaggactgatcgatgcacacctttatagcttgaccatatgctgtcatgaaagtagcaccccgacggtgcttgctttactaagtcaccgtgtgtggatgcttttgtcgcattttgcttcactgtgagtagcatgggaaaagggtccacgtctccaaaagactcttccacttgtttgtcccacagccctaagtgccacattgctgttggatgctcccgggatgccttctagaagggggcctcccaccttaagttcaggcgccatctgatagccttttctgcaggcttcatgtccttagctgaccctcctttatcttgcaaacccctgcccctgctgtcccagggaggacgggcttctgtagaggcttctgggaaatgagctgtctgcaggaggtgaagcagtgttttccttggaatgtttgaggacctgcaatagaagatgttgcctttatggccctagagaaagtcaaggaacatggggaccaacaaagcatttccagttgtaagaatatgtcagaagagtgctcggttagcccacggtgccaaaactccaaacaagttccccggtggaatgacgtggccattggagggctgcaggtcgtcctctctgtatgtgccccgcgcatttccttggcctcatctgagatctggtgtcagagttctctgctcctgttggcaaatcgcaccttatctgaacatttgttccagccaccttttgcacatggattccgtaccttgcactagcaatgtctaccttcagtaacgtcgttctttttcaccctgtattctcaatgatcccttcctccccatatgccacccttcccccaaagctgatagggcagaggtgcactttatgaaactggcacttgactgaacagaaggaaacagctgtacctctaagctcctttcacagaaatcgtcatctgccttggaatgcaaatagttcttatttgccaaagaacagtgaattgggcccaaagatcaaacacagcatttcatgtaatcagaattctaaacgcacaactcgggagctgtgcacggcttctcaagtgattcagttgcagaaccaagagcaaaactcgcctgtttttgtcctcaatggcacccatgagctttccaatagtatagttttctttctttccttgtcctggttgaaggtaacgtgttcctagaaaagaaaatgctgcataggaaaactgagatgccttttattccaacgtgtttgatccctgtcactcattattctgtactttttattgtacattctattcctgtaattattgtgccctttaagtgttgtaaaatcgttttggaatttgtgcctgctagttatgcaataaacaggctctacaagtgtttttgtggtaaaaaaaaac

SEQ ID NO: 354953 - DNA, 3899 bp, Homo sapiens
cccgcgcgtgcgtgctgtgccaaggctgcaaggcgctgaggggagaggcgccgccgtcagcgccgccgcagctgggacccgttagagcggaagcgccgccgccaccgccgcctttgctgtcccccggcctctagttccccgcaggtgggaggtgggagccatgtcgaaacggctccggagcagcgaggtgtgcgctgactgcagcgggccggatccttcctgggcatcagtaaataggggaacgtttttatgtgatgagtgctgcagtgtccatcggagtctagggcgccatatctcccaagtgaggcatctgaaacacacaccgtggcctccaacactgcttcagatggttgagaccttgtataataacggtgctaactctatatgggagcattctttgctggaccctgcgtctattatgagtggaagacgtaaagctaatccacaggataaagtacatcccaataaagcggaattcatcagagccaagtatcagatgttagcgttcgtccatcgcttgccctgccgggatgacgatagtgtgactgccaaagatcttagcaagcaactccattcgagcgtgagaacagggaatcttgaaacctgtttgagactgttatctttaggagcacaagccaacttctttcatcctgaaaaaggaaacaccccactccatgttgcctccaaagcagggcagattttacaggctgaattattggcagtatatggagcagacccaggcacacaggattctagtgggaaaactcccgttgattatgcaaggcaaggagggcaccatgagctggcagagcgcctcgtggaaatacagtatgagctaacggacagactagccttctatctctgtggcaggaaaccagatcacaaaaatggacagcactttataatacctcaaatggcagacagcagcctggatttgtctgaattggcaaaagctgctaagaagaaacttcaatcttatagtttcattgtctaaagtttgtgaaaacttttccatcccttaaaactccctgcctatggctgaaactataaatgaaatttttcataaaacattttcttgagagagttcagttaaaaaagaaaaaatcagcgtcatttgttccctgccaagcatcgtgcaataagtgaatttcctggcctacttcataatctctaagtttggggtatctccaagcatgtatgtagagaaaggactttgccgctttttaaaactagtgtcacagtctctcttgggaggaaacaatgaattggttcatttcttctcagtgttttaccctgttacatgttctgttatttaatgttgttatctcaagctcctatctcttgatgttttcttgtcatcttgaaggctccatggaatgagataaagcattgacccaccacaggacatctcatgaagccatgttcagggtaggagctccacgcacatcaccacccattgtcaggtgctctccctcacccctgtaagccagacagtttgttcaaaacctgcagcaaagagaagcatcagtctaacaagccagaactcattttgtgccacccatttaggtatcactaccatgaactatagggaaaagaaatcacctactccctgacactgtgttgtacccttcatccaaaagtcagcttgcttctctgaccacttacagctttctcacatgagttgcttcacatttttcatcatctttaaggacttcttataaggaaagatgtatcgtatcgcagtcatctgagttagtttctcctccatcacctcatgagtacttaaaaattagacatcaactttcaagagttccttagagagtgtgctctagctggctgcctgctaccccaaagctctgaaagagtaaggttgaagtgctggaacatgctcagattgttttttagttactcaaaagccccttcttgttctgaatgtgaaagctcttcccgttcctgcttactgcagccattctgtgtgtgtggttcagaccctggcctagggccggtgatgtggatgagtgaagggagccaggtacacggcagcagggcagaggagactatggggagcccaccgcctacacagtaggggcagtagcccccagctccacgcctgttgccatgtggaaaagtgggcctagggtggccacagctttgatttttcaagagacaagaaacctagatgttttttggtgccatctctccatttataaatgttggcaaccaatttgaacactttcagagaccatgtgcaggtgagctgtgtcctctaggctgccagctcacagcccccaccccagggccctgtaagctgtgcagtgtgagggcctggcttccccggacacacctggagcagcctctgagtcttacccgtaatggagccggccaaccctgtgtgttatgttgctgtcgctcctgtttttaaccatatgttctgtcccatagcagtcattcacacatgtgaagaagacacaagaatcaaagtacaagttgcctcaatacatgctaataactaagcttctattttcacaggactgatcgatgcacacctttatagcttgaccatatgctgtcatgaaagtagcaccccgacggtgcttgctttactaagtcaccgtgtgtggatgcttttgtcgcattttgcttcactgtgagtagcatgggaaaagggtccacgtctccaaaagactcttccacttgtttgtcccacagccctaagtgccacattgctgttggatgctcccgggatgccttctagaagggggcctcccaccttaagttcaggcgccatctgatagccttttctgcaggcttcatgtccttagctgaccctcctttatcttgcaaacccctgcccctgctgtcccagggaggacgggcttctgtagaggcttctgggaaatgagctgtctgcaggaggtgaagcagtgttttccttggaatgtttgaggacctgcaatagaagatgttgcctttatggccctagagaaagtcaaggaacatggggaccaacaaagcatttccagttgtaagaatatgtcagaagagtgctcggttagcccacggtgccaaaactccaaacaagttccccggtggaatgacgtggccattggagggctgcaggtcgtcctctctgtatgtgccccgcgcatttccttggcctcatctgagatctggtgtcagagttctctgctcctgttggcaaatcgcaccttatctgaacatttgttccagccaccttttgcacatggattccgtaccttgcactagcaatgtctaccttcagtaacgtcgttctttttcaccctgtattctcaatgatcccttcctccccatatgccacccttcccccaaagctgatagggcagaggtgcactttatgaaactggcacttgactgaacagaaggaaacagctgtacctctaagctcctttcacagaaatcgtcatctgccttggaatgcaaatagttcttatttgccaaagaacagtgaattgggcccaaagatcaaacacagcatttcatgtaatcagaattctaaacgcacaactcgggagctgtgcacggcttctcaagtgattcagttgcagaaccaagagcaaaactcgcctgtttttgtcctcaatggcacccatgagctttccaatagtatagttttctttctttccttgtcctggttgaaggtaacgtgttcctagaaaagaaaatgctgcataggaaaactgagatgccttttattccaacgtgtttgatccctgtcactcattattctgtactttttattgtacattctattcctgtaattattgtgccctttaagtgttgtaaaatcgttttggaatttgtgcctgctagttatgcaataaacaggctctacaagtgtttttgtggtaaaaaaaaac

SEQ ID NO: 354954 - DNA, 2416 bp, Homo sapiens
cccgcgcgtgcgtgctgtgccaaggctgcaaggcgctgaggggagaggcgccgccgtcagcgccgccgcagctgggacccgttagagcggaagcgccgccgccaccgccgcctttgctgtcccccggcctctagttccccgcaggtgggaggtgggagccatgtcgaaacggctccggagcagcgaggtgtgcgctgactgcagcgggccggatccttcctgggcatcagtaaataggggaacgtttttatgtgatgagtgctgcagtgtccatcggagtctagggcgccatatctcccaagtgaggcatctgaaacacacaccgtggcctccaacactgcttcagatggttgagaccttgtataataacggtgctaactctatatgggagcattctttgctggaccctgcgtctattatgagtggaagacgtaaagctaatccacaggataaagtacatcccaataaagcggaattcatcagagccaagtatcagatgttagcgttcgtccatcgcttgccctgccgggatgacgatagtgtgactgccaaagatcttagcaagcaactccattcgagcgtgagaacagggaatcttgaaacctgtttgagactgttatctttaggagcacaagccaacttctttcatcctgaaaaaggaaacaccccactccatgttgcctccaaagcagggcagattttacaggctgaattattggcagtatatggagcagacccaggcacacaggattctagtgggaaaactcccgttgattatgcaaggcaaggagggcaccatgagctggcagagcgcctcgtggaaatacagtatgagctaacggacagactagccttctatctctgtggcaggaaaccagatcacaaaaatggacagcactttataatacctcaaatggcagacagcagcctggatttgtctgaattggcaaaagctgctaagaagaaacttcaatctctaagtaatcatttgtttgaagaacttgccatggatgtgtacgatgaagttgacaggcgagagacggatgcagtctggcttgccacgcaaaaccacagcgccctggtaaccgagacaacggtcgtcccctttcttccggtcaatcctgagtactcatcaacacgaaatcagggcagacagaagttagctcggttcaacgcccatgagtttgccacgctggtcattgacattctcagtgacgccaagaggagacagcagggcagttctctctcgggttcaaaagacaatgtggagctcatactgaaaaccatcaataaccagcacagcgttgagagtcaagacaacgatcagcccgactatgacagcgtggcatcagacgaagacacagatttggaaaccactgcaagcaaaacaaaccggcagaagagcctagattcagatttatcagatggaccagtcactgtacaggaatttatggaggtcaaaaacgctctagtggcttctgaggccaagatacagcagctaatgaaggcatccaggctggagaagcagaacagcacacctgagagtgactacgacaacactcccaacgacatggagccagatggcatggggtcaagccgaaagggacggcaaagaagtatggtgtggccaggggatggcttggtaccagacacagcagaaccccatgtggccccaagccccactctccctagcaccgaagatgtcatcaggaagactgaacagatcaccaaaaacatacaggagctcttaagagcagcccaagaaaataaacatgacagttatattccctgctcagagaggatacacgtagctgttacagaaatggcagcattattccccaaaaaacccaagtctgatatggtgaggacttcccttcgtttactgacgtccagtgcctaccgactgcagtcagagtgcaagaagaccctcccaggggaccccggctcacccacagacgttcagctggtcacgcagcaggtcatccagtgtgcgtacgacatcgccaaggctgccaagcagctggttaccatcaccaccaaagagaacaacaactgacaagggcagggcaccgcctcctctgttttctaggctttataaagtccaatttcaaattcagacgcagaactcttcagatttctacaaaaagaaacatttaatgacggtttaaaactttttaaaagaaaactcagtattatttttgcatgttttctaaccaattttcaactatttaacccacttgccttattttgtgcctatttgctggtttagtttctgatgttcggttgtgttgtcaacaactgttgagttgatcacatacatccaaaagtatagtttcattgtctaaagtttgtgaaaacttttccatcccttaaaactccctgcctatggctgaaactataaatgaaatttttcata

SEQ ID NO: 354955 - DNA, 1814 bp, Homo sapiens
cccgcgcgtgcgtgctgtgccaaggctgcaaggcgctgaggggagaggcgccgccgtcagcgccgccgcagctgggacccgttagagcggaagcgccgccgccaccgccgcctttgctgtcccccggcctctagttccccgcaggtgggaggtgggagccatgtcgaaacggctccggagcagcgaggtgtgcgctgactgcagcgggccggatccttcctgggcatcagtaaataggggaacgtttttatgtgatgagtgctgcagtgtccatcggagtctagggcgccatatctcccaagtgaggcatctgaaacacacaccgtggcctccaacactgcttcagatggttgagaccttgtataataacggtgctaactctatatgggagcattctttgctggaccctgcgtctattatgagtggaagacgtaaagctaatccacaggataaagtacatcccaataaagcggaattcatcagagccaagtatcagatgttagcgttcgtccatcgcttgccctgccgggatgacgatagtgtgactgccaaagatcttagcaagcaactccattcgagcgtgagaacagggaatcttgaaacctgtttgagactgttatctttaggagcacaagccaacttctttcatcctgaaaaaggaaacaccccactccatgttgcctccaaagcagggcagattttacaggctgaattattggcagtatatggagcagacccaggcacacaggattctagtgggaaaactcccgttgattatgcaaggcaaggagggcaccatgagctggcagagcgcctcgtggaaatacagtatgagctaacggacagactagccttctatctctgtggcaggaaaccagatcacaaaaatggacagcactttataatacctcaaatggcagacagcagcctggatttgtctgaattggcaaaagctgctaagaagaaacttcaatctctaagtaatcatttgtttgaagaacttgccatggatgtgtacgatgaagttgacaggcgagagacggatgcagtctggcttgccacgcaaaaccacagcgccctggtaaccgagacaacggtcgtcccctttcttccggtcaatcctgagtactcatcaacacgaaatcagggcagacagaagttagctcggttcaacgcccatgagtttgccacgctggtcattgacattctcagtgacgccaagaggagacagcagggcagttctctctcgggttcaaaagacaatgtggagctcatactgaaaaccatcaataaccagcacagcgttgagagtcaagacaacgatcagcccgactatgacagcgtggcatcagacgaagacacagatttggaaaccactgcaagcaaaacaaaccggcagaaggtgagaggccatgcgtcccatggaagggcaagcacgcatcagctgagggctagccctgccaaagctgctgtgcagtgaggttgggtttgttactagctcaggccaagcaaaggtgaaacaaggttaaatggttttaaaatagggatccttgtccctgcatcacagccctgctgcagttgagactttataaaacttgtgaggagtgattggtgtgttttattcattcaacaagtgtttactgagtgacttctctggatattactctcctgaatgaggcctcgtccctttcctgtgaggctctcattgcctaggagagagagaactgcggagaaggcacaaagtgatgtgtgtcatacgaagcacacacaggctgagggagtgagcagagagagaatctatggctgggagcatc

SEQ ID NO: 354956 - DNA, 1493 bp, Homo sapiens
cccgcgcgtgcgtgctgtgccaaggctgcaaggcgctgaggggagaggcgccgccgtcagcgccgccgcagctgggacccgttagagcggaagcgccgccgccaccgccgcctttgctgtcccccggcctctagttccccgcaggtgggaggtgggagccatgtcgaaacggctccggagcagcgaggtgtgcgctgactgcagcgggccggatccttcctgggcatcagtaaataggggaacgtttttatgtgatgagtgctgcagtgtccatcggagtctagggcgccatatctcccaagtgaggcatctgaaacacacaccgtggcctccaacactgcttcagatggttgagaccttgtataataacggtgctaactctatatgggagcattctttgctggaccctgcgtctattatgagtggaagacgtaaagctaatccacaggataaagtacatcccaataaagcggaattcatcagagccaagtatcagatgttagcgttcgtccatcgcttgccctgccgggatgacgatagtgtgactgccaaagatcttagcaagcaactccattcgagcgtgagaacagggaatcttgaaacctgtttgagactgttatctttaggagcacaagccaacttctttcatcctgaaaaaggaaacaccccactccatgttgcctccaaagcagggcagattttacaggctgaattattggcagtatatggagcagacccaggcacacaggattctagtgggaaaactcccgttgattatgcaaggcaaggagggcaccatgagctggcagagcgcctcgtggaaatacagtatgagctaacggacagactagccttctatctctgtggcaggaaaccagatcacaaaaatggacagcactttataatacctcaaatggcagacagcagcctggatttgtctgaattggcaaaagctgctaagaagaaacttcaatctgtgagtatttttttgtactggttttctctagtatgagaatcagtgcaccctgctgatacctactctgaatgcaggttacctattgcgtctgatgactttatttcatacttttatttgttaaactagaagcagactgttgagtatacagcagtgatgaccacaaggactattaagttcagtatattcagttcattggttctgcttcagataatctcatttttctctatcatgtaacaagtgcagatggcacctttggcattaggcagttgttctcctcaggagagttccctagttcctctcagtgtcatgagtaagtagggcacgcgttcttggggtgacttagccatgtagggttctagagctggtaaatgctgatgctgaaatggtggcgagtcccatagattcactggctgccatttggatccagccatattgtaaacctctttcccatcccatgccattcatcagtgctttttaaatttctgctgttaaaagctggtggtcttggcccatgtgc

SEQ ID NO: 354957 - DNA, 1772 bp, Homo sapiens
cctttgtttacaaccctgccatgatctccctcttgcaaaagcgagggctacagaacaggcattcaggagtcctgtgctccagtcacagccttttctgttcttcagctaggagacaccaaaccctcaggaagatttactatagctaagagaaaactgcagcagaaagggcgcggctacctacttcttaaattccgtttgtggaccctcagactcttagtcccctactcccagatacagcggccctaccgtggctcctggcaagaagcatggatctcggaatccctgacctgctggacgcgtggctggagcccccagaggatatcttctcgacaggatccgtcctggagctgggactccactgcccccctccagaggttccggtaactaggctacaggaacagggactgcaaggctggaagtccggtggggaccgtggctgtggccttcaagagagtgagcctgaagatttcttgaagcttttcattgatcccaatgaggtgtactgctcagaagcatctcctggcagtgacagtggcatctctgaggacccctgccatccagacagtccccctgcccccagggcaaccagttctcctatgctctatgaggttgtctatgaggcaggggccctggagaggatgcagggggaaactgggccaaatgtaggccttatctccatccagctagatcagtggagcccagcatttatggtgcctgattcctgcatggtcagtgagctgccctttgatgctcatgcccacatcctgcccagagcaggcaccgtagccccagtgccctgtacaaccctgctgccctgtcaaaccctgttcctgaccgatgaggagaagcgtctgctggggcaggaaggggtttccctgccctctcacctgcccctcaccaaggcagaggagagggtcctcaagaaggtcaggaggaaaatccgtaacaagcagtcagctcaggacagtcggcggcggaagaaggagtacattgatgggctggagagcagggtggcagcctgttctgcacagaaccaagaattacagaaaaaagtccaggagctggagaggcacaacatctccttggtagctcagctccgccagctgcagacgctaattgctcaaacttccaacaaagctgcccagaccagcacttgtgttttgattcttcttttttccctggctctcatcatcctgcccagcttcagtccattccagagtcgaccagaagctgggtctgaggattaccagcctcacggagtgacttccagaaatatcctgacccacaaggacgtaacagaaaatctggagacccaagtggtagagtccagactgagggagccacctggagccaaggatgcaaatggctcaacaaggacactgcttgagaagatgggagggaagccaagacccagtgggcgcatccggtccgtgctgcatgcagatgagatgtgagctggaacagaccttcctggcccacttcctgatcacaaggaatcctgggcttccttatggctttgcttcccactgggattcctacttaggtgtctgccctcaggggtccaaatcacttcaggacaccccaagagatgtcctttagtctctgcctgaggcctagtctgcatttgtttgcatatatgagagggtacctcaaatacttctgttatgtatctgtgattttatttcttctttgggtatagggttgaggggaaataagttttgagtgagaaataaacgttttagctgaaattgtatcccagaagtttgaaataa

SEQ ID NO: 354958 - DNA, 1592 bp, Homo sapiens
atcctggaagaaagaaaaggtgtagtgtttggggaggtcaacgggctatgctggcttgacagggctgggctcttcagaacagaagcatggatctcggaatccctgacctgctggacgcgtggctggagcccccagaggatatcttctcgacaggatccgtcctggagctgggactccactgcccccctccagaggttccggtaactaggctacaggaacagggactgcaaggctggaagtccggtggggaccgtggctgtggccttcaagagagtgagcctgaagatttcttgaagcttttcattgatcccaatgaggtgtactgctcagaagcatctcctggcagtgacagtggcatctctgaggacccctgccatccagacagtccccctgcccccagggcaaccagttctcctatgctctatgaggttgtctatgaggcaggggccctggagaggatgcagggggaaactgggccaaatgtaggccttatctccatccagctagatcagtggagcccagcatttatggtgcctgattcctgcatggtcagtgagctgccctttgatgctcatgcccacatcctgcccagagcaggcaccgtagccccagtgccctgtacaaccctgctgccctgtcaaaccctgttcctgaccgatgaggagaagcgtctgctggggcaggaaggggtttccctgccctctcacctgcccctcaccaaggcagaggagagggtcctcaagaaggtcaggaggaaaatccgtaacaagcagtcagctcaggacagtcggcggcggaagaaggagtacattgatgggctggagagcagggtggcagcctgttctgcacagaaccaagaattacagaaaaaagtccaggagctggagaggcacaacatctccttggtagctcagctccgccagctgcagacgctaattgctcaaacttccaacaaagctgcccagaccagcacttgtgttttgattcttcttttttccctggctctcatcatcctgcccagcttcagtccattccagagtcgaccagaagctgggtctgaggattaccagcctcacggagtgacttccagaaatatcctgacccacaaggacgtaacagaaaatctggagacccaagtggtagagtccagactgagggagccacctggagccaaggatgcaaatggctcaacaaggacactgcttgagaagatgggagggaagccaagacccagtgggcgcatccggtccgtgctgcatgcagatgagatgtgagctggaacagaccttcctggcccacttcctgatcacaaggaatcctgggcttccttatggctttgcttcccactgggattcctacttaggtgtctgccctcaggggtccaaatcacttcaggacaccccaagagatgtcctttagtctctgcctgaggcctagtctgcatttgtttgcatatatgagagggtacctcaaatacttctgttatgtatctgtgattttatttcttctttgggtatagggttgaggggaaataagttttgagtgagaaataaacgttttagctgaaattgtatcccagaagtttgaaataa

SEQ ID NO: 354959 - DNA, 1745 bp, Homo sapiens
cctttgtttacaaccctgccatgatctccctcttgcaaaagcgagggctacagaacaggcattcaggagtcctgtgctccagtcacagccttttctgttcttcagctaggagacaccaaaccctcaggaagatttactatagctaagagaaaactgcagcagaaagggcgcggctacctacttcttaaattccgtttgtggaccctcagactcttagtcccctactcccagatacagcggccctaccgtggctcctggcaagaagcatggatctcggaatccctgacctgctggacgcgtggctggagcccccagaggatatcttctcgacaggatccgtcctggagctgggactccactgcccccctccagaggttccggtaactaggctacaggaacagggactgcaaggctggaagtccggtggggaccgtggctgtggccttcaagagagtgagcctgaagatttcttgaagcttttcattgatcccaatgaggtgtactgctcagaagcatctcctggcagtgacagtggcatctctgaggacccctgccatccagacagtccccctgcccccagggcaaccagttctcctatgctctatgaggttgtctatgaggcaggggccctggagaggatgcagggggaaactgggccaaatgtaggccttatctccatccagctagatcagtggagcccagcatttatggtgcctgattcctgcatggtcagtgagctgccctttgatgctcatgcccacatcctgcccagagcaggcaccgtagccccagtgccctgtacaaccctgctgccctgtcaaaccctgttcctgaccgatgaggagaagcgtctgctggggcaggaaggggtttccctgccctctcacctgcccctcaccaaggcagaggagagggtcctcaagaaggtcaggaggaaaatccgtaacaagcagtcagctcaggacagtcggcggcggaagaaggagtacattgatgggctggagagcagggtggcagcctgttctgcacagaaccaagaattacagaaaaaagtccaggagctggagaggcacaacatctccttggtagctcagctccgccagctgcagacgctaattgctcaaacttccaacaaagctgcccagaccagcacttgtgttttgattcttcttttttccctggctctcatcatcctgcccagcttcagtccattccagagtcgaccagaagctgggtctgaggattaccagcctcacggagtgacttccagaaatatcctgacccacaaggacgtaacagaaaatctggagacccaagtggtagagtccagactgagggagccacctggagccaaggatgcaaatggctcaacaaggacactgcttgagaagatgggagggaagccaagacccagtgggcgcatccggtccgtgctgcatgcagatgagatgtgagctggaacagaccttcctggcccacttcctgatcacaaggaatcctgggcttccttatggctttgcttcccactgggattcctacttaggtgtctgccctcaggggtccaaatcacttcaggacaccccaagagatgtcctttagtctctgcctgaggcctagtctgcatttgtttgcatatatgagagggtacctcaaatacttctgttatgtatctgtgattttatttctttacgttcagttagaagcggtaattaactcctcgcggacgaatattactccaacaatac

SEQ ID NO: 354960 - DNA, 1643 bp, Homo sapiens
atcctggaagaaagaaaaggtgtagtgtttggggaggtcaacgggctatgctggcttgacagggctgggctcttcagaacaggtaatgcttggggggggcctctttgtctaaacctgagggatagggctgaagaagcatggatctcggaatccctgacctgctggacgcgtggctggagcccccagaggatatcttctcgacaggatccgtcctggagctgggactccactgcccccctccagaggttccggtaactaggctacaggaacagggactgcaaggctggaagtccggtggggaccgtggctgtggccttcaagagagtgagcctgaagatttcttgaagcttttcattgatcccaatgaggtgtactgctcagaagcatctcctggcagtgacagtggcatctctgaggacccctgccatccagacagtccccctgcccccagggcaaccagttctcctatgctctatgaggttgtctatgaggcaggggccctggagaggatgcagggggaaactgggccaaatgtaggccttatctccatccagctagatcagtggagcccagcatttatggtgcctgattcctgcatggtcagtgagctgccctttgatgctcatgcccacatcctgcccagagcaggcaccgtagccccagtgccctgtacaaccctgctgccctgtcaaaccctgttcctgaccgatgaggagaagcgtctgctggggcaggaaggggtttccctgccctctcacctgcccctcaccaaggcagaggagagggtcctcaagaaggtcaggaggaaaatccgtaacaagcagtcagctcaggacagtcggcggcggaagaaggagtacattgatgggctggagagcagggtggcagcctgttctgcacagaaccaagaattacagaaaaaagtccaggagctggagaggcacaacatctccttggtagctcagctccgccagctgcagacgctaattgctcaaacttccaacaaagctgcccagaccagcacttgtgttttgattcttcttttttccctggctctcatcatcctgcccagcttcagtccattccagagtcgaccagaagctgggtctgaggattaccagcctcacggagtgacttccagaaatatcctgacccacaaggacgtaacagaaaatctggagacccaagtggtagagtccagactgagggagccacctggagccaaggatgcaaatggctcaacaaggacactgcttgagaagatgggagggaagccaagacccagtgggcgcatccggtccgtgctgcatgcagatgagatgtgagctggaacagaccttcctggcccacttcctgatcacaaggaatcctgggcttccttatggctttgcttcccactgggattcctacttaggtgtctgccctcaggggtccaaatcacttcaggacaccccaagagatgtcctttagtctctgcctgaggcctagtctgcatttgtttgcatatatgagagggtacctcaaatacttctgttatgtatctgtgattttatttcttctttgggtatagggttgaggggaaataagttttgagtgagaaataaacgttttagctgaaattgtatcccagaagtttgaaataa

SEQ ID NO: 354961 - DNA, 1890 bp, Homo sapiens
cctttgtttacaaccctgccatgatctccctcttgcaaaagcgagggctacagaacaggcattcaggagtcctgtgctccagtcacagccttttctgttcttcagctaggagacaccaaaccctcaggaagatttactatagctaagagaaaactgcagcagaaagggcgcggctacctacttcttaaattccgtttgtggaccctcagactcttagtcccctactcccagatacagcggccctaccgtggctcctggcaagaagcatggatctcggaatccctgacctgctggacgcgtggctggagcccccagaggatatcttctcgacaggatccgtcctggagctgggactccactgcccccctccagaggttccggtaactaggctacaggaacagggactgcaaggctggaagtccggtggggaccgtggctgtggccttcaagagagtgagcctgaagatttcttgaagcttttcattgatcccaatgaggtgtactgctcagaagcatctcctggcagtgacagtggcatctctgaggacccctgccatccagacagtccccctgcccccagggcaaccagttctcctatgctctatgaggttgtctatgaggcaggggccctggagaggatgcagggggaaactgggccaaatgtaggccttatctccatccagctagatcagtggagcccagcatttatggtgcctgattcctgcatggtcagtgagctgccctttgatgctcatgcccacatcctgcccagagcaggcaccgtagccccagtgccctgtacaaccctgggtcttactctgtcatccaggctggagtgcagtggtgcaatcacggctcactgcatcctcaacatcttgggctcaagcaatcctcctgcctcagcctcctgagtagctgggactacagctgccctgtcaaaccctgttcctgaccgatgaggagaagcgtctgctggggcaggaaggggtttccctgccctctcacctgcccctcaccaaggcagaggagagggtcctcaagaaggtcaggaggaaaatccgtaacaagcagtcagctcaggacagtcggcggcggaagaaggagtacattgatgggctggagagcagggtggcagcctgttctgcacagaaccaagaattacagaaaaaagtccaggagctggagaggcacaacatctccttggtagctcagctccgccagctgcagacgctaattgctcaaacttccaacaaagctgcccagaccagcacttgtgttttgattcttcttttttccctggctctcatcatcctgcccagcttcagtccattccagagtcgaccagaagctgggtctgaggattaccagcctcacggagtgacttccagaaatatcctgacccacaaggacgtaacagaaaatctggagacccaagtggtagagtccagactgagggagccacctggagccaaggatgcaaatggctcaacaaggacactgcttgagaagatgggagggaagccaagacccagtgggcgcatccggtccgtgctgcatgcagatgagatgtgagctggaacagaccttcctggcccacttcctgatcacaaggaatcctgggcttccttatggctttgcttcccactgggattcctacttaggtgtctgccctcaggggtccaaatcacttcaggacaccccaagagatgtcctttagtctctgcctgaggcctagtctgcatttgtttgcatatatgagagggtacctcaaatacttctgttatgtatctgtgattttatttcttctttgggtatagggttgaggggaaataagttttgagtgagaaataaacgttttagctgaaattgtatcccagaagtttgaaataa

SEQ ID NO: 354962 - DNA, 1830 bp, Homo sapiens
cctttgtttacaaccctgccatgatctccctcttgcaaaagcgagggctacagaacaggcattcaggagtcctgtgctccagtcacagccttttctgttcttcagctaggagacaccaaaccctcaggaagatttactatagctaagagaaaactgcagcagaaagggcgcggctacctacttcttaaattccgtttgtggaccctcagactcttagtcccctactcccagatacagcggccctaccgtggctcctggcaagaagcatggatctcggaatccctgacctgctggacgcgtggctggagcccccagaggatatcttctcgacaggatccgtcctggagctgggactccactgcccccctccagaggttccgggccttcaagagagtgagcctgaagatttcttgaagcttttcattgatcccaatgaggtgtactgctcagaagcatctcctggcagtgacagtggcatctctgaggacccctgccatccagacagtccccctgcccccagggcaaccagttctcctatgctctatgaggttgtctatgaggcaggggccctggagaggatgcagggggaaactgggccaaatgtaggccttatctccatccagctagatcagtggagcccagcatttatggtgcctgattcctgcatggtcagtgagctgccctttgatgctcatgcccacatcctgcccagagcaggcaccgtagccccagtgccctgtacaaccctgggtcttactctgtcatccaggctggagtgcagtggtgcaatcacggctcactgcatcctcaacatcttgggctcaagcaatcctcctgcctcagcctcctgagtagctgggactacagctgccctgtcaaaccctgttcctgaccgatgaggagaagcgtctgctggggcaggaaggggtttccctgccctctcacctgcccctcaccaaggcagaggagagggtcctcaagaaggtcaggaggaaaatccgtaacaagcagtcagctcaggacagtcggcggcggaagaaggagtacattgatgggctggagagcagggtggcagcctgttctgcacagaaccaagaattacagaaaaaagtccaggagctggagaggcacaacatctccttggtagctcagctccgccagctgcagacgctaattgctcaaacttccaacaaagctgcccagaccagcacttgtgttttgattcttcttttttccctggctctcatcatcctgcccagcttcagtccattccagagtcgaccagaagctgggtctgaggattaccagcctcacggagtgacttccagaaatatcctgacccacaaggacgtaacagaaaatctggagacccaagtggtagagtccagactgagggagccacctggagccaaggatgcaaatggctcaacaaggacactgcttgagaagatgggagggaagccaagacccagtgggcgcatccggtccgtgctgcatgcagatgagatgtgagctggaacagaccttcctggcccacttcctgatcacaaggaatcctgggcttccttatggctttgcttcccactgggattcctacttaggtgtctgccctcaggggtccaaatcacttcaggacaccccaagagatgtcctttagtctctgcctgaggcctagtctgcatttgtttgcatatatgagagggtacctcaaatacttctgttatgtatctgtgattttatttcttctttgggtatagggttgaggggaaataagttttgagtgagaaataaacgttttagctgaaattgtatcccagaagtttgaaataa

SEQ ID NO: 354963 - DNA, 1792 bp, Homo sapiens
cctttgtttacaaccctgccatgatctccctcttgcaaaagcgagggctacagaacaggcattcaggagtcctgtgctccagtcacagccttttctgttcttcagctaggagacaccaaaccctcaggaagatttactatagctaagagaaaactgcagcagaaagggcgcggctacctacttcttaaattccgtttgtggaccctcagactcttagtcccctactcccagatacagcggccctaccgtggctcctggcaaggtggcatccacttttgtagtaagcatggatctcggaatccctgacctgctggacgcgtggctggagcccccagaggatatcttctcgacaggatccgtcctggagctgggactccactgcccccctccagaggttccggtaactaggctacaggaacagggactgcaaggctggaagtccggtggggaccgtggctgtggccttcaagagagtgagcctgaagatttcttgaagcttttcattgatcccaatgaggtgtactgctcagaagcatctcctggcagtgacagtggcatctctgaggacccctgccatccagacagtccccctgcccccagggcaaccagttctcctatgctctatgaggttgtctatgaggcaggggccctggagaggatgcagggggaaactgggccaaatgtaggccttatctccatccagctagatcagtggagcccagcatttatggtgcctgattcctgcatggtcagtgagctgccctttgatgctcatgcccacatcctgcccagagcaggcaccgtagccccagtgccctgtacaaccctgctgccctgtcaaaccctgttcctgaccgatgaggagaagcgtctgctggggcaggaaggggtttccctgccctctcacctgcccctcaccaaggcagaggagagggtcctcaagaaggtcaggaggaaaatccgtaacaagcagtcagctcaggacagtcggcggcggaagaaggagtacattgatgggctggagagcagggtggcagcctgttctgcacagaaccaagaattacagaaaaaagtccaggagctggagaggcacaacatctccttggtagctcagctccgccagctgcagacgctaattgctcaaacttccaacaaagctgcccagaccagcacttgtgttttgattcttcttttttccctggctctcatcatcctgcccagcttcagtccattccagagtcgaccagaagctgggtctgaggattaccagcctcacggagtgacttccagaaatatcctgacccacaaggacgtaacagaaaatctggagacccaagtggtagagtccagactgagggagccacctggagccaaggatgcaaatggctcaacaaggacactgcttgagaagatgggagggaagccaagacccagtgggcgcatccggtccgtgctgcatgcagatgagatgtgagctggaacagaccttcctggcccacttcctgatcacaaggaatcctgggcttccttatggctttgcttcccactgggattcctacttaggtgtctgccctcaggggtccaaatcacttcaggacaccccaagagatgtcctttagtctctgcctgaggcctagtctgcatttgtttgcatatatgagagggtacctcaaatacttctgttatgtatctgtgattttatttcttctttgggtatagggttgaggggaaataagttttgagtgagaaataaacgttttagctgaaattgtatcccagaagtttgaaataa

SEQ ID NO: 354964 - DNA, 1712 bp, Homo sapiens
cctttgtttacaaccctgccatgatctccctcttgcaaaagcgagggctacagaacaggcattcaggagtcctgtgctccagtcacagccttttctgttcttcagctaggagacaccaaaccctcaggaagatttactatagctaagagaaaactgcagcagaaagggcgcggctacctacttcttaaattccgtttgtggaccctcagactcttagtcccctactcccagatacagcggccctaccgtggctcctggcaagaagcatggatctcggaatccctgacctgctggacgcgtggctggagcccccagaggatatcttctcgacaggatccgtcctggagctgggactccactgcccccctccagaggttccgggccttcaagagagtgagcctgaagatttcttgaagcttttcattgatcccaatgaggtgtactgctcagaagcatctcctggcagtgacagtggcatctctgaggacccctgccatccagacagtccccctgcccccagggcaaccagttctcctatgctctatgaggttgtctatgaggcaggggccctggagaggatgcagggggaaactgggccaaatgtaggccttatctccatccagctagatcagtggagcccagcatttatggtgcctgattcctgcatggtcagtgagctgccctttgatgctcatgcccacatcctgcccagagcaggcaccgtagccccagtgccctgtacaaccctgctgccctgtcaaaccctgttcctgaccgatgaggagaagcgtctgctggggcaggaaggggtttccctgccctctcacctgcccctcaccaaggcagaggagagggtcctcaagaaggtcaggaggaaaatccgtaacaagcagtcagctcaggacagtcggcggcggaagaaggagtacattgatgggctggagagcagggtggcagcctgttctgcacagaaccaagaattacagaaaaaagtccaggagctggagaggcacaacatctccttggtagctcagctccgccagctgcagacgctaattgctcaaacttccaacaaagctgcccagaccagcacttgtgttttgattcttcttttttccctggctctcatcatcctgcccagcttcagtccattccagagtcgaccagaagctgggtctgaggattaccagcctcacggagtgacttccagaaatatcctgacccacaaggacgtaacagaaaatctggagacccaagtggtagagtccagactgagggagccacctggagccaaggatgcaaatggctcaacaaggacactgcttgagaagatgggagggaagccaagacccagtgggcgcatccggtccgtgctgcatgcagatgagatgtgagctggaacagaccttcctggcccacttcctgatcacaaggaatcctgggcttccttatggctttgcttcccactgggattcctacttaggtgtctgccctcaggggtccaaatcacttcaggacaccccaagagatgtcctttagtctctgcctgaggcctagtctgcatttgtttgcatatatgagagggtacctcaaatacttctgttatgtatctgtgattttatttcttctttgggtatagggttgaggggaaataagttttgagtgagaaataaacgttttagctgaaattgtatcccagaagtttgaaataa

SEQ ID NO: 354965 - DNA, 1732 bp, Homo sapiens
cctttgtttacaaccctgccatgatctccctcttgcaaaagcgagggctacagaacaggcattcaggagtcctgtgctccagtcacagccttttctgttcttcagctaggagacaccaaaccctcaggaagatttactatagctaagagaaaactgcagcagaaagggcgcggctacctacttcttaaattccgtttgtggaccctcagactcttagtcccctactcccagatacagcggccctaccgtggctcctggcaaggtggcatccacttttgtagtaagcatggatctcggaatccctgacctgctggacgcgtggctggagcccccagaggatatcttctcgacaggatccgtcctggagctgggactccactgcccccctccagaggttccgggccttcaagagagtgagcctgaagatttcttgaagcttttcattgatcccaatgaggtgtactgctcagaagcatctcctggcagtgacagtggcatctctgaggacccctgccatccagacagtccccctgcccccagggcaaccagttctcctatgctctatgaggttgtctatgaggcaggggccctggagaggatgcagggggaaactgggccaaatgtaggccttatctccatccagctagatcagtggagcccagcatttatggtgcctgattcctgcatggtcagtgagctgccctttgatgctcatgcccacatcctgcccagagcaggcaccgtagccccagtgccctgtacaaccctgctgccctgtcaaaccctgttcctgaccgatgaggagaagcgtctgctggggcaggaaggggtttccctgccctctcacctgcccctcaccaaggcagaggagagggtcctcaagaaggtcaggaggaaaatccgtaacaagcagtcagctcaggacagtcggcggcggaagaaggagtacattgatgggctggagagcagggtggcagcctgttctgcacagaaccaagaattacagaaaaaagtccaggagctggagaggcacaacatctccttggtagctcagctccgccagctgcagacgctaattgctcaaacttccaacaaagctgcccagaccagcacttgtgttttgattcttcttttttccctggctctcatcatcctgcccagcttcagtccattccagagtcgaccagaagctgggtctgaggattaccagcctcacggagtgacttccagaaatatcctgacccacaaggacgtaacagaaaatctggagacccaagtggtagagtccagactgagggagccacctggagccaaggatgcaaatggctcaacaaggacactgcttgagaagatgggagggaagccaagacccagtgggcgcatccggtccgtgctgcatgcagatgagatgtgagctggaacagaccttcctggcccacttcctgatcacaaggaatcctgggcttccttatggctttgcttcccactgggattcctacttaggtgtctgccctcaggggtccaaatcacttcaggacaccccaagagatgtcctttagtctctgcctgaggcctagtctgcatttgtttgcatatatgagagggtacctcaaatacttctgttatgtatctgtgattttatttcttctttgggtatagggttgaggggaaataagttttgagtgagaaataaacgttttagctgaaattgtatcccagaagtttgaaataa

SEQ ID NO: 354966 - DNA, 1689 bp, Homo sapiens
atcctggaagaaagaaaaggtgtagtgtttggggaggtcaacgggctatgctggcttgacagggctgggctcttcagaacagaagcatggatctcggaatccctgacctgctggacgcgtggctggagcccccagaggatatcttctcgacaggatccgtcctggagctgggactccactgcccccctccagaggttccgggccttcaagagagtgagcctgaagatttcttgaagcttttcattgatcccaatgaggtgtactgctcagaagcatctcctggcagtgacagtggcatctctgaggacccctgccatccagacagtccccctgcccccagggcaaccagttctcctatgctctatgaggttgtctatgaggcaggggccctggagaggatgcagggggaaactgggccaaatgtaggccttatctccatccagctaggtcagtgttctttgtgggaagggggaaatggcccttcgggactggccctaaccatggggttaagggggtttacccaacctgtgccactacccaggccctgcggctgtcagggtgttcctaagtctcctttctcccagctacctgttttctactccagatcagtggagcccagcatttatggtgcctgattcctgcatggtcagtgagctgccctttgatgctcatgcccacatcctgcccagagcaggcaccgtagccccagtgccctgtacaaccctgctgccctgtcaaaccctgttcctgaccgatgaggagaagcgtctgctggggcaggaaggggtttccctgccctctcacctgcccctcaccaaggcagaggagagggtcctcaagaaggtcaggaggaaaatccgtaacaagcagtcagctcaggacagtcggcggcggaagaaggagtacattgatgggctggagagcagggtggcagcctgttctgcacagaaccaagaattacagaaaaaagtccaggagctggagaggcacaacatctccttggtagctcagctccgccagctgcagacgctaattgctcaaacttccaacaaagctgcccagaccagcacttgtgttttgattcttcttttttccctggctctcatcatcctgcccagcttcagtccattccagagtcgaccagaagctgggtctgaggattaccagcctcacggagtgacttccagaaatatcctgacccacaaggacgtaacagaaaatctggagacccaagtggtagagtccagactgagggagccacctggagccaaggatgcaaatggctcaacaaggacactgcttgagaagatgggagggaagccaagacccagtgggcgcatccggtccgtgctgcatgcagatgagatgtgagctggaacagaccttcctggcccacttcctgatcacaaggaatcctgggcttccttatggctttgcttcccactgggattcctacttaggtgtctgccctcaggggtccaaatcacttcaggacaccccaagagatgtcctttagtctctgcctgaggcctagtctgcatttgtttgcatatatgagagggtacctcaaatacttctgttatgtatctgtgattttatttcttctttgggtatagggttgaggggaaataagttttgagtgagaaataaacgttttagctgaaattgtatcccagaagtttgaaataa

SEQ ID NO: 354967 - DNA, 968 bp, Homo sapiens
cctttgtttacaaccctgccatgatctccctcttgcaaaagcgagggctacagaacaggcattcaggagtcctgtgctccagtcacagccttttctgttcttcagctaggagacaccaaaccctcaggaagatttactatagctaagagaaaactgcagcagaaagggcgcggctacctacttcttaaattccgtttgtggaccctcagactcttagtcccctactcccagatacagcggccctaccgtggctcctggcaagaagcatggatctcggaatccctgacctgctggacgcgtggctggagcccccagaggatatcttctcgacaggatccgtcctggagctgggactccactgcccccctccagaggttccggtaactaggctacaggaacagggactgcaaggctggaagtccggtggggaccgtggctgtggccttcaagagagtgagcctgaagatttcttgaagcttttcattgatcccaatgaggtgtactgctcagaagcatctcctggcagtgacagtggcatctctgaggacccctgccatccagacagtccccctgcccccagggcaaccagttctcctatgctctatgaggttgtctatgaggcaggggccctggagaggatgcagggggaaactgggccaaatgtaggccttatctccatccagctagatcagtggagcccagcatttatggtgcctgattcctgcatggtcagtgagctgccctttgatgctcatgcccacatcctgcccagagcaggcaccgtagccccagtgccctgtacaaccctgctagtctgcatttgtttgcatatatgagagggtacctcaaatacttctgttatgtatctgtgattttatttcttctttgggtatagggttgaggggaaataagttttgagtgagaaataaacgttttagctgaaattgtatcccagaagtttgaaataa

SEQ ID NO: 354968 - DNA, 572 bp, Homo sapiens
  misc_feature (31)..(31): n is a, c, g, or t
  misc_feature (33)..(33): n is a, c, g, or t
tcggctctacatgttgtctacggctctaccntnctgctggttcttttgggaaacctctaaaagttcacttaaatacctcccttctccccccaaaaagaccagcagacaagaaaagattacatttattttaagcccattgctgataatttctagcactgggcatgctctaatctgcatggttgctatagctattagttttcagctataatatgagctactcgtcttcagaaatctaattttgatcttgaatattgccgcaggaagatgatcaccttgccaaggaagcatcatgtaatatatcagctcatcagcagggagtgaagaggaagtctgatacaccactggggtccccactagaacctggtcaaatactggagaagaatgaggatagcagtaaagtcaaactcaaaatcagagtaagaaatacaggttaaacctgtattaacagtgtaggatattcaccttcttgtaaatctttttgaatacttgcagtggtttttccttagcaggaacacacgcaacagactgcattataaaactcaaaggtccttctgagacaaggtagagccgag

SEQ ID NO: 354969 - DNA, 5021 bp, Homo sapiens
acagacaagatgtcggcggatggtagcttcgagcccttgcggagaggagcatctctgtgacagaagcttgtcgacggcggcttctaggagctagtcgaaggagcgaggttgaggcgggcagcgacccgtcaggtcgctcacctgggcaccggccagctgcgagacgtgacttggggaccgcaggggagtggagagtgtgaggtgccaaagactagtaatgccccgtatccccctaggaagccgggaagccaagctccgcgggaccgcttcatgccgctgactggtgtagagcccgccagaatgaacaggaagaaaggagacaagggctttgaaagcccaaggccatataaattaacccatcaggtcgtctgcatcaacaacataaatttccagagaaaatctgttgtgggatttgtggaactgactatatttcccacagttgcaaacttgaatagaatcaagttgaacagcaaacagtgtagaatataccgagtaaggatcaatgatttagaggctgcttttatttataatgacccaaccttggaagtttgtcacagtgaatcaaaacagagaaacctcaattatttttccaatgcttatgcagctgcagttagtgctgtggaccctgatgcaggaaatggagaactttgcattaaggttccatcagagctatggaaacacgttgatgagttaaaggtcctgaagatacacatcaatttttctttggatcagcccaaaggaggtcttcattttgtggtacccagtgtagagggaagtatggcagagagaggtgctcatgttttctcttgtgggtatcaaaattctacaagattttggttcccttgtgttgattcatactctgaattgtgtacatggaaattagaatttacagtagatgctgcaatggttgctgtttctaatggcgatttggtggagacagtgtatactcatgatatgaggaagaaaactttccattatatgcttaccattcctacagcagcgtcaaatatctccttggccattggaccatttgaaatactggtagatccatacatgcatgaggttactcatttttgtttgccccaacttcttccattgctgaaacataccacatcataccttcatgaagtctttgaattttatgaagaaattcttacatgtcgttacccatactcctgttttaagactgtcttcattgatgaggcttatgttgaagtggctgcttatgcttccatgagcatttttagcacaaatcttttacacagtgccatgattatagatgagacacctttgactagaaggtgtttagcccaatccttggcccagcagttttttggttgtttcatatctagaatgtcttggtctgatgaatgggtgctgaagggaatttcaggctatatctatggactttggatgaaaaaaacttttggtgttaatgagtaccgccattggattaaagaggagctagacaaaatagtggcatatgaactaaaaactggtggggttttactacatcccatatttggtggaggaaaagagaaggataatccggcttcccatctacacttttcaataaagcatccacatacactgtcctgggaatactacactatgtttcagtgtaaagcccaccttgtgatgagattgattgaaaataggatcagtatggaatttatgctacaagttttcaataaactgctaagtctggctagtactgcttcatctcagaagttccagtcacatatgtggagtcagatgttggtttccacatctgggtttttgaaatccatttcaaatgtctctggcaaagatattcagccgttaataaagcagtgggtagatcagagtggagtggtaaaattttatggaagttttgcatttaatagaaaacgaaatgtcttggaactggaaataaaacaggactatacatctcctggaactcagaaatacgtgggaccacttaaagtgacagtgcaggagttagatggatccttcaatcatacactgcaaattgaagaaaacagccttaaacatgatataccctgccattccaaaagtagaaggaataaaaagaaaaaaatcccactgatgaatggagaagaagttgatatggatctttctgcaatggatgctgattcccctttgctgtggataaggatagacccagatatgtcagtattgaggaaggtagaatttgagcaagctgattttatgtggcagtatcagctccgctatgagagagatgttgttgcacagcaggaatccattttggctttggaaaaattccctactccagcatctcggcttgcactcactgatatattagaacaagagcagtgtttctacagagtaagaatgtcagcttgcttctgtcttgcaaagattgcaaattcaatggtgagcacatggacaggaccaccagccatgaagtcactcttcactaggatgttttgttgtaaaagttgtccaaacattgtgaaaacaaacaactttatgagctttcaaagctattttctacagaagactatgccagttgcaatggctttattaagagatgttcataatctttgtcctaaagaagtcttaacgtttattttagacttaatcaagtacaatgacaacaggaaaaataagttttcagataactattatcgtgcagaaatgattgatgccctggccaactctgttacacctgcagtcagtgtgaataatgaagttagaactttggataacttaaatcctgatgtgcgactcattcttgaagaaatcaccagatttttgaatatggaaaaacttcttccgagttacaggcataccatcactgtcagttgtttgagagccatacgggtacttcagaagaacggacatgtgccaagtgatccagctctttttaaatcttatgctgaatatggccactttgtggacattaggatagcagctttggaagcagttgttgattatactaaagtggacagaagttatgaagaactgcaatggctacttaatatgattcagaatgaccctgtaccctatgtaaggcataagattctcaacatgttgactaagaacccaccatttactaagaacatggagtctcccttatgcaatgaagccctggtagatcaactttggaaacttatgaattctggtacttcacatgactggaggttacggtgtggtgctgtggacttgtacttcacactttttggcctcagtagaccttcctgtttacccttgccagagcttgggttggttcttaatctaaaggagaaaaaagctgtcttgaatcctaccataattccagagtcagtagcaggcaaccaagaagctgcaaataatccaagcagtcacccacagctagttggatttcagaaccctttttccagttctcaagatgaggaggagattgatatggatactgttcatgatagccaggccttcatttcccatcatttaaacatgcttgaaaggccgtcaactccagggctctcgaaatatcggccagctagctcccgatctgctttaataccccagcactcagcaggctgtgacagcacacccaccacaaaaccccagtggagtttggaacttgcacggaagggaacaggtaaagaacaagcacctttggagatgagtatgcatccagcggcaagcgctccactctcagtctttactaaggaatctacagcctccaaacacagtgaccaccatcaccaccatcaccatgagcacaagaaaaagaagaagaagcataaacataagcacaaacacaagcataagcatgacagtaaagaaaaggacaaggagcctttcactttctccagccctgccagtggcaggtctattcgttctccttccctttcagactgagaaggggacaaaaagacctttcctttcatgtccagaagaatgtatgtaactaaagctttgtcctctgtgaagaattataaaagggaggggggaaaggattcgcctctcctacagaaattctgaattcatttaagttctaagcatttgatttatgttatttatacagttgggatctaattaggaaaatgtgttttgtagttctggataaactatttcatccgctgtttcctccccaaaacacacacacagagcaaactccctttcataaaagccctcatatccactggcagtccccgttcgcatcatggtctccatgtgtaccgccaaagtcaattatgtttgaaagcctttggtggatgttatggggcaaagttatgatttacacagaagcaactgccaaatctgtggtgcaaccactatctccagtgaaatattgtataacaccatttggaactactgaaaagacagtggcttttctacagtactcttccttattgcaccatttttgtattaacgtagaaactaagcatcagaatttatgaacaaagaatatgttatttttccttttgctctaaaatactgagatttggggaagcaattctttttttaaaaaaattttgaataactatcttttgataacacattcggcggttacgatgttggaatttagcagaactatcaaatccaaaattattttcaaatcaagatgtttaaattataagtttttttgttttgttttccagtaagtataaatgaaaatattcatatgtaaaatatgttttgcttaatgtggacaatttacacacccaacacatactgtttccaaaattatttctatatgacacaaagtatgatacctttaaaaaggtgagcttatatattgtttattaacctggaaatagacaatttggctctcataccataagcatttaaaaacatatgaaatattttgatttctttatatggtggtgtgtttttatttctgaattttccatgtgctttaatatttgtttaagaatattttttatatctgttcaatttttatcattccccttatcattagaaagtttgacaaaaatacttgaatcttggacctctaaatatacttttagttgtgtttaacttgtttaataaataactttttaagttga

SEQ ID NO: 354970 - DNA, 3926 bp, Homo sapiens
gattcctgactcatttcagttcctttttactcgcctaaattttttgaggcaaaatacagagaaggaaaaataaacttggagacagctcagagagattgagaacagccataagaaaaagttgccaggctgctgtccagccctgaagtcataaagtagagaagtctttggcttttgtcattctgccagctgtgtaggctgctttatttataagaacataaactactctttaaatacatttcacttattttaagaaatttacattctgattttaggaaatgagaattcacagtttaattctaaaatttggtatgtaaaaaaatgttactttacaaattttactgactcctatttttatatattttttaggagctagacaaaatagtggcatatgaactaaaaactggtggggttttactacatcccatatttggtggaggaaaagagaaggataatccggcttcccatctacacttttcaataaagcatccacatacactgtcctgggaatactacactatgtttcagtgtaaagcccaccttgtgatgagattgattgaaaataggatcagtatggaatttatgctacaagttttcaataaactgctaagtctggctagtactgcttcatctcagaagttccagtcacatatgtggagtcagatgttggtttccacatctgggtttttgaaatccatttcaaatgtctctggcaaagatattcagccgttaataaagcagtgggtagatcagagtggagtggtaaaattttatggaagttttgcatttaatagaaaacgaaatgtcttggaactggaaataaaacaggactatacatctcctggaactcagaaatacgtgggaccacttaaagtgacagtgcaggagttagatggatccttcaatcatacactgcaaattgaagaaaacagccttaaacatgatataccctgccattccaaaagtagaaggaataaaaagaaaaaaatcccactgatgaatggagaagaagttgatatggatctttctgcaatggatgctgattcccctttgctgtggataaggatagacccagatatgtcagtattgaggaaggtagaatttgagcaagctgattttatgtggcagtatcagctccgctatgagagagatgttgttgcacagcaggaatccattttggctttggaaaaattccctactccagcatctcggcttgcactcactgatatattagaacaagagcagtgtttctacagagtaagaatgtcagcttgcttctgtcttgcaaagattgcaaattcaatggtgagcacatggacaggaccaccagccatgaagtcactcttcactaggatgttttgttgtaaaagttgtccaaacattgtgaaaacaaacaactttatgagctttcaaagctattttctacagaagactatgccagttgcaatggctttattaagagatgttcataatctttgtcctaaagaagtcttaacgtttattttagacttaatcaagtacaatgacaacaggaaaaataagttttcagataactattatcgtgcagaaatgattgatgccctggccaactctgttacacctgcagtcagtgtgaataatgaagttagaactttggataacttaaatcctgatgtgcgactcattcttgaagaaatcaccagatttttgaatatggaaaaacttcttccgagttacaggcataccatcactgtcagttgtttgagagccatacgggtacttcagaagaacggacatgtgccaagtgatccagctctttttaaatcttatgctgaatatggccactttgtggacattaggatagcagctttggaagcagttgttgattatactaaagtggacagaagttatgaagaactgcaatggctacttaatatgattcagaatgaccctgtaccctatgtaaggcataagattctcaacatgttgactaagaacccaccatttactaagaacatggagtctcccttatgcaatgaagccctggtagatcaactttggaaacttatgaattctggtacttcacatgactggaggttacggtgtggtgctgtggacttgtacttcacactttttggcctcagtagaccttcctgtttacccttgccagagcttgggttggttcttaatctaaaggagaaaaaagctgtcttgaatcctaccataattccagagtcagtagcaggcaaccaagaagctgcaaataatccaagcagtcacccacagctagttggatttcagaaccctttttccagttctcaagatgaggaggagattgatatggatactgttcatgatagccaggccttcatttcccatcatttaaacatgcttgaaaggccgtcaactccagggctctcgaaatatcggccagctagctcccgatctgctttaataccccagcactcagcaggctgtgacagcacacccaccacaaaaccccagtggagtttggaacttgcacggaagggaacaggtaaagaacaagcacctttggagatgagtatgcatccagcggcaagcgctccactctcagtctttactaaggaatctacagcctccaaacacagtgaccaccatcaccaccatcaccatgagcacaagaaaaagaagaagaagcataaacataagcacaaacacaagcataagcatgacagtaaagaaaaggacaaggagcctttcactttctccagccctgccagtggcaggtctattcgttctccttccctttcagactgagaaggggacaaaaagacctttcctttcatgtccagaagaatgtatgtaactaaagctttgtcctctgtgaagaattataaaagggaggggggaaaggattcgcctctcctacagaaattctgaattcatttaagttctaagcatttgatttatgttatttatacagttgggatctaattaggaaaatgtgttttgtagttctggataaactatttcatccgctgtttcctccccaaaacacacacacagagcaaactccctttcataaaagccctcatatccactggcagtccccgttcgcatcatggtctccatgtgtaccgccaaagtcaattatgtttgaaagcctttggtggatgttatggggcaaagttatgatttacacagaagcaactgccaaatctgtggtgcaaccactatctccagtgaaatattgtataacaccatttggaactactgaaaagacagtggcttttctacagtactcttccttattgcaccatttttgtattaacgtagaaactaagcatcagaatttatgaacaaagaatatgttatttttccttttgctctaaaatactgagatttggggaagcaattctttttttaaaaaaattttgaataactatcttttgataacacattcggcggttacgatgttggaatttagcagaactatcaaatccaaaattattttcaaatcaagatgtttaaattataagtttttttgttttgttttccagtaagtataaatgaaaatattcatatgtaaaatatgttttgcttaatgtggacaatttacacacccaacacatactgtttccaaaattatttctatatgacacaaagtatgatacctttaaaaaggtgagcttatatattgtttattaacctggaaatagacaatttggctctcataccataagcatttaaaaacatatgaaatattttgatttctttatatggtggtgtgtttttatttctgaattttccatgtgctttaatatttgtttaagaatattttttatatctgttcaatttttatcattccccttatcattagaaagtttgacaaaaatacttgaatcttggacctctaaatatacttttagttgtgtttaacttgtttaataaataactttttaagttga

SEQ ID NO: 354971 - DNA, 1836 bp, Homo sapiens
gcttcttttagaggctggaccacataatcttttctttctcttaatatctttgaagaaagaaactactttttattttaagattatatgggggtatatcctatggcctctctgctacttttcctaagagctaatatccaaacataacatgatgtaatggttcttttatcctctgttttatgtgtgtgtgttttagttttccagttctcaagatgaggaggagattgatatggatactgttcatgatagccaggccttcatttcccatcatttaaacatgcttgaaaggccgtcaactccagggctctcgaaatatcggccagctagctcccgatctgctttaataccccagcactcagcaggctgtgacagcacacccaccacaaaaccccagtggagtttggaacttgcacggaagggaacaggtaaagaacaagcacctttggagatgagtatgcatccagcggcaagcgctccactctcagtctttactaaggaatctacagcctccaaacacagtgaccaccatcaccaccatcaccatgagcacaagaaaaagaagaagaagcataaacataagcacaaacacaagcataagcatgacagtaaagaaaaggacaaggagcctttcactttctccagccctgccagtggcaggtctattcgttctccttccctttcagactgagaaggggacaaaaagacctttcctttcatgtccagaagaatgtatgtaactaaagctttgtcctctgtgaagaattataaaagggaggggggaaaggattcgcctctcctacagaaattctgaattcatttaagttctaagcatttgatttatgttatttatacagttgggatctaattaggaaaatgtgttttgtagttctggataaactatttcatccgctgtttcctccccaaaacacacacacagagcaaactccctttcataaaagccctcatatccactggcagtccccgttcgcatcatggtctccatgtgtaccgccaaagtcaattatgtttgaaagcctttggtggatgttatggggcaaagttatgatttacacagaagcaactgccaaatctgtggtgcaaccactatctccagtgaaatattgtataacaccatttggaactactgaaaagacagtggcttttctacagtactcttccttattgcaccatttttgtattaacgtagaaactaagcatcagaatttatgaacaaagaatatgttatttttccttttgctctaaaatactgagatttggggaagcaattctttttttaaaaaaattttgaataactatcttttgataacacattcggcggttacgatgttggaatttagcagaactatcaaatccaaaattattttcaaatcaagatgtttaaattataagtttttttgttttgttttccagtaagtataaatgaaaatattcatatgtaaaatatgttttgcttaatgtggacaatttacacacccaacacatactgtttccaaaattatttctatatgacacaaagtatgatacctttaaaaaggtgagcttatatattgtttattaacctggaaatagacaatttggctctcataccataagcatttaaaaacatatgaaatattttgatttctttatatggtggtgtgtttttatttctgaattttccatgtgctttaatatttgtttaagaatattttttatatctgttcaatttttatcattccccttatcattagaaagtttgacaaaaatacttgaatcttggacctctaaatatacttttagttgtgtttaacttgtttaataaataactttttaagttga

SEQ ID NO: 354972 - DNA, 1579 bp, Homo sapiens
gtgtgtaactaattacatgtcttatttagatacttctcccattcctgatagaagtgataaaaacttaggaatccctctttacatactgtcatcagcttcctctttctttagtctggctttccgtatcatcagcaggaattcatttgggtatttttaatcttgaaggtaaagaacaagcacctttggagatgagtatgcatccagcggcaagcgctccactctcagtctttactaaggaatctacagcctccaaacacagtgaccaccatcaccaccatcaccatgagcacaagaaaaagaagaagaagcataaacataagcacaaacacaagcataagcatgacagtaaagaaaaggacaaggagcctttcactttctccagccctgccagtggcaggtctattcgttctccttccctttcagactgagaaggggacaaaaagacctttcctttcatgtccagaagaatgtatgtaactaaagctttgtcctctgtgaagaattataaaagggaggggggaaaggattcgcctctcctacagaaattctgaattcatttaagttctaagcatttgatttatgttatttatacagttgggatctaattaggaaaatgtgttttgtagttctggataaactatttcatccgctgtttcctccccaaaacacacacacagagcaaactccctttcataaaagccctcatatccactggcagtccccgttcgcatcatggtctccatgtgtaccgccaaagtcaattatgtttgaaagcctttggtggatgttatggggcaaagttatgatttacacagaagcaactgccaaatctgtggtgcaaccactatctccagtgaaatattgtataacaccatttggaactactgaaaagacagtggcttttctacagtactcttccttattgcaccatttttgtattaacgtagaaactaagcatcagaatttatgaacaaagaatatgttatttttccttttgctctaaaatactgagatttggggaagcaattctttttttaaaaaaattttgaataactatcttttgataacacattcggcggttacgatgttggaatttagcagaactatcaaatccaaaattattttcaaatcaagatgtttaaattataagtttttttgttttgttttccagtaagtataaatgaaaatattcatatgtaaaatatgttttgcttaatgtggacaatttacacacccaacacatactgtttccaaaattatttctatatgacacaaagtatgatacctttaaaaaggtgagcttatatattgtttattaacctggaaatagacaatttggctctcataccataagcatttaaaaacatatgaaatattttgatttctttatatggtggtgtgtttttatttctgaattttccatgtgctttaatatttgtttaagaatattttttatatctgttcaatttttatcattccccttatcattagaaagtttgacaaaaatacttgaatcttggacctctaaatatacttttagttgtgtttaacttgtttaataaataactttttaagttga

SEQ ID NO: 354973 - DNA, 1349 bp, Homo sapiens
  misc_feature (35)..(36): n is a, c, g, or t
agaggatccgtatggacactgcgctacgcgtatgnncatcaccaccatcaccatgagcacaagaaaaagaagaagaagcataaacataagcacaaacacaagcataagcatgacagtaaagaaaaggacaaggagcctttcactttctccagccctgccagtggcaggtctattcgttctccttccctttcagactgagaaggggacaaaaagacctttcctttcatgtccagaagaatgtatgtaactaaagctttgtcctctgtgaagaattataaaagggaggggggaaaggattcgcctctcctacagaaattctgaattcatttaagttctaagcatttgatttatgttatttatacagttgggatctaattaggaaaatgtgttttgtagttctggataaactatttcatccgctgtttcctccccaaaacacacacacagagcaaactccctttcataaaagccctcatatccactggcagtccccgttcgcatcatggtctccatgtgtaccgccaaagtcaattatgtttgaaagcctttggtggatgttatggggcaaagttatgatttacacagaagcaactgccaaatctgtggtgcaaccactatctccagtgaaatattgtataacaccatttggaactactgaaaagacagtggcttttctacagtactcttccttattgcaccatttttgtattaacgtagaaactaagcatcagaatttatgaacaaagaatatgttatttttccttttgctctaaaatactgagatttggggaagcaattctttttttaaaaaaattttgaataactatcttttgataacacattcggcggttacgatgttggaatttagcagaactatcaaatccaaaattattttcaaatcaagatgtttaaattataagtttttttgttttgttttccagtaagtataaatgaaaatattcatatgtaaaatatgttttgcttaatgtggacaatttacacacccaacacatactgtttccaaaattatttctatatgacacaaagtatgatacctttaaaaaggtgagcttatatattgtttattaacctggaaatagacaatttggctctcataccataagcatttaaaaacatatgaaatattttgatttctttatatggtggtgtgtttttatttctgaattttccatgtgctttaatatttgtttaagaatattttttatatctgttcaatttttatcattccccttatcattagaaagtttgacaaaaatacttgaatcttggacctctaaatatacttttagttgtgtttaacttgtttaataaataactttttaagttga

SEQ ID NO: 354974 - DNA, 1423 bp, Homo sapiens
  misc_feature (1384)..(1384): n is a, c, g, or t
  misc_feature (1410)..(1410): n is a, c, g, or t
  misc_feature (1423)..(1423): n is a, c, g, or t
acagacaagatgtcggcggatggtagcttcgagcccttgcggagaggagcatctctgtgacagaagcttgtcgacggcggcttctaggagctagtcgaaggagcgaggttgaggcgggcagcgacccgtcaggtcgctcacctgggcaccggccagctgcgagacgtgacttggggaccgcaggggagtggagagtgtgaggtgccaaagactagtaatgccccgtatccccctaggaagccgggaagccaagctccgcgggaccgcttcatgccgctgactggtgtagagcccgccagaatgaacaggaagaaaggagacaagggctttgaaagcccaaggccatataaattaacccatcaggtcgtctgcatcaacaacataaatttccagagaaaatctgttgtgggatttgtggaactgactatatttcccacagttgcaaacttgaatagaatcaagttgaacagcaaacagtgtagaatataccgagtaaggatcaatgatttagaggctgcttttatttataatgacccaaccttggaagtttgtcacagtgaatcaaaacagagaaacctcaattatttttccaatgcttatgcagctgcagttagtgctgtggaccctgatgcaggaaatggagaactttgcattaaggttccatcagagctatggaaacacgttgatgagttaaaggtcctgaagatacacatcaatttttctttggatcagcccaaaggaggtcttcattttgtggtacccagtgtagagggaagtatggcagagagaggtgctcatgttttctcttgtgggtatcaaaattctacaagattttggttcccttgtgttgattcatactctgaattgtgtacatggaaattagaatttacagtagatgctgcaatggttgctgtttctaatggcgatttggtggagacagtgtatactcatgatatgaggaagaaaactttccattatatgcttaccattcctacagcagcgtcaaatatctccttggccattggaccatttgaaatactggtagatccatacatgcatgaggttactcatttttgtttgccccaacttcttccattgctgaaacataccacatcataccttcatgaagtctttgaattttatgaagaaattcttacatgtcgttacccatactcctgttttaagactgtcttcattgatgaggcttatgttgaagtggctgcttatgcttccatgagcatttttagcacaaatcttttacacagtgccatgattatagatgagacacctttgactagaaggtgtttagcccaatccttggcccagcagttttttggttgtttcatatctagaatgtcttggtctgatgaatgggcgctgctgnaaatgctgacgggatcctctaccaanagaggcatcccan

SEQ ID NO: 354975 - DNA, 467 bp, Homo sapiens
tgttaataattttcattttctttatgaaggcagggaaatacacactacacttattccgttatcctctttgacattatctgaggagtttttatgattaaaagtaatttatgctttgactttttgcttaggtctgatgaatgggtgctgaagggaatttcaggctatatctatggactttggatgaaaaaaacttttggtgttaatgagtaccgccattggattaaagaggtaataacagctagatcccttatccacttacaagtcttatgtcctccatttttaatgactgtaaaatacttttaaaatactgcttgaaaatccctaatttttcccagcaaaatgggaattgatttactgagaaagactaatggtctattttatctaatctccattgtcaacattggcccctaaaaacctttttttcccctaaggaagagaatatttaagtttcttaaacatcagattgg

SEQ ID NO: 354976 - DNA, 476 bp, Homo sapiens
  misc_feature (437)..(437): n is a, c, g, or t
  misc_feature (463)..(463): n is a, c, g, or t
  misc_feature (476)..(476): n is a, c, g, or t
cagaacagctatgccatgttgcgattcgagccggtccggtaggattccagcagcgtcaaatatctccttggccattggaccatttgaaatactggtagatccatacatgcatgaggttactcatttttgtttgccccaacttcttccattgctgaaacataccacatcataccttcatgaagtctttgaattttatgaagaaattcttacatgtcgttacccatactcctgttttaagactgtcttcattgatgaggcttatgttgaagtggctgcttatgcttccatgagcatttttagcacaaatcttttacacagtgccatgattatagatgagacacctttgactagaaggtgtttagcccaatccttggcccagcagttttttggttgtttcatatctagaatgtcttggtctgatgaatgggcgctgctgnaaatgctgacgggatcctctaccaanagaggcatcccan

SEQ ID NO: 354977 - DNA, 5177 bp, Homo sapiens
acagacaagatgtcggcggatggtagcttcgagcccttgcggagaggagcatctctgtgacagaagcttgtcgacggcggcttctaggagctagtcgaaggagcgaggttgaggcgggcagcgacccgtcaggtcgctcacctgggcaccggccagctgcgagacgtgacttggggaccgcaggggagtggagagtgtgaggtgccaaagactagtaatgccccgtatccccctaggaagccgggaagccaagctccgcgggaccgcttcatgccgctgactggtgtagagcccgccagaatgaacaggaagaaaggagacaagggctttgaaagcccaaggccatataaattaacccatcaggtcgtctgcatcaacaacataaatttccagagaaaatctgttgtgggatttgtggaactgactatatttcccacagttgcaaacttgaatagaatcaagttgaacagcaaacagtgtagaatataccgagtaaggatcaatgatttagaggctgcttttatttataatgacccaaccttggaagtttgtcacagtgaatcaaaacagagaaacctcaattatttttccaatgcttatgcagctgcagttagtgctgtggaccctgatgcaggaaatggagaactttgcattaaggttccatcagagctatggaaacacgttgatgagttaaaggtcctgaagatacacatcaatttttctttggatcagcccaaaggaggtcttcattttgtggtacccagtgtagagggaagtatggcagagagaggtgctcatgttttctcttgtgggtatcaaaattctacaagattttggttcccttgtgttgattcatactctgaattgtgtacatggaaattagaatttacagtagatgctgcaatggttgctgtttctaatggcgatttggtggagacagtgtatactcatgatatgaggaagaaaactttccattatatgcttaccattcctacagcagcgtcaaatatctccttggccattggaccatttgaaatactggtagatccatacatgcatgaggttactcatttttgtttgccccaacttcttccattgctgaaacataccacatcataccttcatgaagtctttgaattttatgaagaaattcttacatgtcgttacccatactcctgttttaagactgtcttcattgatgaggcttatgttgaagtggctgcttatgcttccatgagcatttttagcacaaatcttttacacagtgccatgattatagatgagacacctttgactagaaggtgtttagcccaatccttggcccagcagttttttggttgtttcatatctagaatgtcttggtctgatgaatgggtgctgaagggaatttcaggctatatctatggactttggatgaaaaaaacttttggtgttaatgagtaccgccattggattaaagaggagctagacaaaatagtggcatatgaactaaaaactggtggggttttactacatcccatatttggtggaggaaaagagaaggataatccggcttcccatctacacttttcaataaagcatccacatacactgtcctgggaatactacactatgtttcagtgtaaagcccaccttgtgatgagattgattgaaaataggatcagtatggaatttatgctacaagttttcaataaactgctaagtctggctagtactgcttcatctcagaagttccagtcacatatgtggagtcagatgttggtttccacatctgggtttttgaaatccatttcaaatgtctctggcaaagatattcagccgttaataaagcagtgggtagatcagagtggagtggtaaaattttatggaagttttgcatttaatagaaaacgaaatgtcttggaactggaaataaaacaggactatacatctcctggaactcagaaatacgtgggaccacttaaagtgacagtgcaggagttagatggatccttcaatcatacactgcaaattgaagaaaacagccttaaacatgatataccctgccattccaaaagtagaaggaataaaaagaaaaaaatcccactgatgaatggagaagaagttgatatggatctttctgcaatggatgctgattcccctttgctgtggataaggatagacccagatatgtcagtattgaggaaggtagaatttgagcaagctgattttatgtggcagtatcagctccgctatgagagagatgttgttgcacagcaggaatccattttggctttggaaaaattccctactccagcatctcggcttgcactcactgatatattagaacaagagcagtgtttctacagagtaagaatgtcagcttgcttctgtcttgcaaagattgcaaattcaatggtgagcacatggacaggaccaccagccatgaagtcactcttcactaggatgttttgttgtaaaagttgtccaaacattgtgaaaacaaacaactttatgagctttcaaagctattttctacagaagactatgccagttgcaatggctttattaagagatgttcataatctttgtcctaaagaagtcttaacgtttattttagacttaatcaagtacaatgacaacaggaaaaataagttttcagataactattatcgtgcagaaatgattgatgccctggccaactctgttacacctgcagtcagtgtgaataatgaagttagaactttggataacttaaatcctgatgtgcgactcattcttgaagaaatcaccagatttttgaatatggaaaaacttcttccgagttacaggcataccatcactgtcagttgtttgagagccatacgggtacttcagaagaacggacatgtgccaagtgatccagctctttttaaatcttatgctgaatatggccactttgtggacattaggatagcagctttggaagcagttgttgattatactaaagtggacagaagttatgaagaactgcaatggctacttaatatgattcagaatgaccctgtaccctatgtaaggcataagattctcaacatgttgactaagaacccaccatttactaagaacatggagtctcccttatgcaatgaagccctggtagatcaactttggaaacttatgaattctggtacttcacatgactggaggttacggtgtggtgctgtggacttgtacttcacactttttggcctcagtagaccttcctgtttacccttgccagagcttgggttggttcttaatctaaaggagaaaaaagctgtcttgaatcctaccataattccagagtcagtagcaggcaaccaagaagctgcaaataatccaagcagtcacccacagctagttggatttcagaaccctgaagatgatcaccttgccaaggaagcatcatgtaatatatcagctcatcagcagggagtgaagaggaagtctgatacaccactggggtccccactagaacctggtcaaatactggagaagaatgaggatagcagtaaagtcaaactcaaaatcagattttccagttctcaagatgaggaggagattgatatggatactgttcatgatagccaggccttcatttcccatcatttaaacatgcttgaaaggccgtcaactccagggctctcgaaatatcggccagctagctcccgatctgctttaataccccagcactcagcaggctgtgacagcacacccaccacaaaaccccagtggagtttggaacttgcacggaagggaacaggtaaagaacaagcacctttggagatgagtatgcatccagcggcaagcgctccactctcagtctttactaaggaatctacagcctccaaacacagtgaccaccatcaccaccatcaccatgagcacaagaaaaagaagaagaagcataaacataagcacaaacacaagcataagcatgacagtaaagaaaaggacaaggagcctttcactttctccagccctgccagtggcaggtctattcgttctccttccctttcagactgagaaggggacaaaaagacctttcctttcatgtccagaagaatgtatgtaactaaagctttgtcctctgtgaagaattataaaagggaggggggaaaggattcgcctctcctacagaaattctgaattcatttaagttctaagcatttgatttatgttatttatacagttgggatctaattaggaaaatgtgttttgtagttctggataaactatttcatccgctgtttcctccccaaaacacacacacagagcaaactccctttcataaaagccctcatatccactggcagtccccgttcgcatcatggtctccatgtgtaccgccaaagtcaattatgtttgaaagcctttggtggatgttatggggcaaagttatgatttacacagaagcaactgccaaatctgtggtgcaaccactatctccagtgaaatattgtataacaccatttggaactactgaaaagacagtggcttttctacagtactcttccttattgcaccatttttgtattaacgtagaaactaagcatcagaatttatgaacaaagaatatgttatttttccttttgctctaaaatactgagatttggggaagcaattctttttttaaaaaaattttgaataactatcttttgataacacattcggcggttacgatgttggaatttagcagaactatcaaatccaaaattattttcaaatcaagatgtttaaattataagtttttttgttttgttttccagtaagtataaatgaaaatattcatatgtaaaatatgttttgcttaatgtggacaatttacacacccaacacatactgtttccaaaattatttctatatgacacaaagtatgatacctttaaaaaggtgagcttatatattgtttattaacctggaaatagacaatttggctctcataccataagcatttaaaaacatatgaaatattttgatttctttatatggtggtgtgtttttatttctgaattttccatgtgctttaatatttgtttaagaatattttttatatctgttcaatttttatcattccccttatcattagaaagtttgacaaaaatacttgaatcttggacctctaaatatacttttagttgtgtttaacttgtttaataaataactttttaagttga

SEQ ID NO: 354978 - DNA, 838 bp, Homo sapiens
ggcggcgccgcggaggacggagcggaagtgctcgctgcagcttcccggagccggagcgcagcgcctgcggccgcccgtgccccgccgtcctccttcccgcggccgtgagggagaccgcggctcggccgtagcggagctgcgagttacagaatgtctgaaggggacagtgtgggagaatccgtccatgggaaaccttcggtggtgtacagatttttcacaagacttggacagatttatcagtcctggctagacaagtccacaccctacacggctgtgcgatgggtcgtgacactgggcctgagctttgtctacatgattcgagtttacctgctgcagggttggtacattgtgacctatgccttggggatctaccatctaaatcttttcatagcttttctttctcccaaagtggatccttccttaatggaagactcagatgacggtccttcgctacccaccaaacagaacgaggaattccgccccttcattcgaaggctcccagagtttaaattttggcatgcggctaccaagggcatccttgtggctatggtctgtactttcttcgacgctttcaacgtcccggtgttctggccgattctggtgatgtacttcatcatgctcttctgtatcacgatgaagaggcaaatcaagcacatgattaagtaccggtacatcccgttcacacatgggaagagaaggtacagaggcaaggaggatgccggcaaggccttcgccagctagaagcgggactgaggctgcctcacgtgttgcaagaacagttttgagccattgttaacaatgccttttttcttcacataaagtagttgattacgaggga

SEQ ID NO: 354979 - DNA, 2361 bp, Homo sapiens
ggcggcgccgcggaggacggagcggaagtgctcgctgcagcttcccggagccggagcgcagcgcctgcggccgcccgtgccccgccgtcctccttcccgcggccgtgagggagaccgcggctcggccgtagcggagctgcgagttacagaatgtctgaaggggacagtgtgggagaatccgtccatgggaaaccttcggtggtgtacagatttttcacaagacttggacagatttatcagtcctggctagacaagtccacaccctacacggctgtgcgatgggtcgtgacactgggcctgagctttgtctacatgattcgagtttacctgctgcagggttggtacattgtgacctatgccttggggatctaccatctaaatcttttcatagcttttctttctcccaaagtggatccttccttaatggaagactcagatgacggtccttcgctacccaccaaacagaacgaggaattccgccccttcattcgaaggctcccagagtttaaattttggcatgcggctaccaagggcatccttgtggctatggtctgtactttcttcgacgctttcaacgtcccggtgttctggccgattctggtgatgtacttcatcatgctcttctgtatcacgatgaagaggcaaatcaagcacatgattaagtaccggtacatcccgttcacacatgggaagagaaggtacagaggcaaggaggatgccggcaaggccttcgccagctagaagcgggactgaggctgcctcacgtgttgcaagaacagttttgagccattgttaacaatgccttttttcttcacataaagtagttgattacgagggagtcaaattttctttttaaaaaggagcttcaatgatttgtaactgaaatatcaggttctagaagaaactggcgcttaaaccaaatcgcatggatttctttttcagtgacgttcaagtgtttctcacggatggaattctagtcagctgcaggcgggaagccaggcgggtggagcccatgggagcaagggcgagtggccggtccccgctgtgccaggtgggcaggcaggagcaaggcctgcgagggaggaacgggccgctccccgccagccgccttccccagcagccgcaggtggtgccagccactccacagagcccgagggatgatctagcctgattcctgcgtgtccgaaagaacttaacgttttaaaggtgattgtcaagtaactgtgtggggttctaatgccagtttcctaattccatctcactggagatgtttaaagttggcctctatcctaatgactcaaaacttggttcttaactaccatgattgcttttgagggcccggaattataaatatatattatattttaattgtttgagattattttgacacatttctttgatacgtagagtgttttgtttttaatttaaatctgtcctcatgcaaccctccatgaggggcagcgaagtggcaggggagcagactggctttgtaggttcagcactcggccccccactgcgggagaggcggaacccacttgcatgtcagcgtttttgattcgagaaaagaaatactctcaacgttttaccaagtgattttacctccacctttactaaagtctttacctaaaacatggcagtcgctggacacaggaaagcccaccttttgtttggccttttcgaaaggtgacccatattgcacagcagaacatcacagctgtggtcccagatgagacactgacatgcgagtgaaggcctctcctcctgggccccgggctgcgcaggctcctcactctgggcggtgtttcctgtctcagaattgacacggtgaatgcttagtgtctggattttcttgtgccagtgtttacatatctgacatcgagctcctctaagaggccacgttcaagcttgtgtgtccctgacccaagatagccagtgctgctcccaggtggtacttctggtaccgtgttgagacacttgggattctcagactgtggacaggagtgtttgtcatttttcatactgttttcttaataagcgctcaggcctaaggtgtgacaggaagtcgcacgcgcttggccagagcacagtgaagcaaaggactgggtgctgatggatggagccacggcggcatctgcccacccggccggagcccccagtgcctctcctggtggtcctcccagtctagagggtcacggcccccccgccctcctccgtctctggcaagctgaccttgactaacccaggaatacagggtcatcctcattcctaagtaagtcaaacagcaagacatggtttgcgcgggtctttgccggaagccggtcctgctggccaggtgttttacgtcagcagggaaatgtggca

SEQ ID NO: 354980 - DNA, 2009 bp, Homo sapiens
ggcggcgccgcggaggacggagcggaagtgctcgctgcagcttcccggagccggagcgcagcgcctgcggccgcccgtgccccgccgtcctccttcccgcggccgtgagggagaccgcggctcggccgtagcggagctgcgagttacagaatgtctgaaggggacagtgtgggagaatccgtccatgggaaaccttcggtggtgtacagatttttcacaagacttggacagatttatcagtcctggctagacaagtccacaccctacacggctgtgcgatgggtcgtgacactgggcctgagctttgtctacatgattcgagtttacctgctgcagggttggtacattgtgacctatgccttggggatctaccatctaaatcttttcatagcttttctttctcccaaagtggatccttccttaatggaagactcagatgacggtccttcgctacccaccaaacagaacgaggaattccgccccttcattcgaaggctcccagagtttaaattttggcatgcggctaccaagggcatccttgtggctatggtctgtactttcttcgacgctttcaacgtcccggtgttctggccgattctggtgatgtacttcatcatgctcttctgtatcacgatgaagaggcaaatcaagcacatgattaagtaccggtacatcccgttcacacatgggaagagaaggtacagaggcaaggaggatgccggcaaggccttcgccagctagaagcgggactgaggctgcctcacgtgttgcaagaacagttttgagccattgttaacaatgccttttttcttcacataaagtagttgattacgagggagtcaaattttctttttaaaaaggagcttcaatgatttgtaactgaaatatcagtttcctaattccatctcactggagatgtttaaagttggcctctatcctaatgactcaaaacttggttcttaactaccatgattgcttttgagggcccggaattataaatatatattatattttaattgtttgagattattttgacacatttctttgatacgtagagtgttttgtttttaatttaaatctgtcctcatgcaaccctccatgaggggcagcgaagtggcaggggagcagactggctttgtaggttcagcactcggccccccactgcgggagaggcggaacccacttgcatgtcagcgtttttgattcgagaaaagaaatactctcaacgttttaccaagtgattttacctccacctttactaaagtctttacctaaaacatggcagtcgctggacacaggaaagcccaccttttgtttggccttttcgaaaggtgacccatattgcacagcagaacatcacagctgtggtcccagatgagacactgacatgcgagtgaaggcctctcctcctgggccccgggctgcgcaggctcctcactctgggcggtgtttcctgtctcagaattgacacggtgaatgcttagtgtctggattttcttgtgccagtgtttacatatctgacatcgagctcctctaagaggccacgttcaagcttgtgtgtccctgacccaagatagccagtgctgctcccaggtggtacttctggtaccgtgttgagacacttgggattctcagactgtggacaggagtgtttgtcatttttcatactgttttcttaataagcgctcaggcctaaggtgtgacaggaagtcgcacgcgcttggccagagcacagtgaagcaaaggactgggtgctgatggatggagccacggcggcatctgcccacccggccggagcccccagtgcctctcctggtggtcctcccagtctagagggtcacggcccccccgccctcctccgtctctggcaagctgaccttgactaacccaggaatacagggtcatcctcattcctaagtaagtcaaacagcaagacatggtttgcgcgggtctttgccggaagccggtcctgctggccaggtgttttacgtcagcagggaaatgtggca

SEQ ID NO: 354981 - DNA, 1389 bp, Homo sapiens
ggcggcgccgcggaggacggagcggaagtgctcgctgcagcttcccggagccggagcgcagcgcctgcggccgcccgtgccccgccgtcctccttcccgcggccgtgagggagaccgcggctcggccgtagcggagctgcgagttacagaatgtctgaaggggacagtgtgggagaatccgtccatgggaaaccttcggtggtgtacagatttttcacaagacttggacagatttatcagtcctggctagacaagtccacaccctacacggctgtgcgatgggtcgtgacactgggcctgagctttgtctacatgattcgagtttacctgctgcagggttggtacattgtgacctatgccttggggatctaccatctaaatcttttcatagcttttctttctcccaaagtggatccttccttaatggaagactcagatgacggtccttcgctacccaccaaacagaacgaggaattccgccccttcattcgaaggctcccagagtttaaattttggcatgcggctaccaagggcatccttgtggctatggtctgtactttcttcgacgctttcaacgtcccggtgttctggccgattctggtgatgtacttcatcatgctcttctgtatcacgatgaagaggcaaatcaagcacatgattaagtaccggtacatcccgttcacacatgggaagagaaggtacagaggcaaggaggatgccggcaaggccttcgccagctagaagcgggactgaggctgcctcacgtgttgcaagaacagttttgagccattgttaacaatgccttttttcttcacataaagtagttgattacgagggaaaaaaaaaaaaaaaaacaaaaaaaaaaaaaaaaaaaaaaaaaaaaacacacccaaaaacaacacaccccacaaacgcaaacaacaaaaaaagaggaggccgacgccgacgccccacgcacaaccactacagaggaagaccgacgaccagacgagaagagacaagagacacccgcagagaacacgaacgccagcacacagaaccaagcgacacgcccgcgcacgcgagaggcgacacgaccggcgacgacagagcgggcgcgaggagaggccgaaagccaccgcacaagcgcgaaccgcggagaggaacgacgaccgagcgcacacgagacaaaaaaacagcaacgaacaagagaaagaaaaacagacagcaacggacacagaacacgccgcatggcacgaagcacgtaagaaagcagaccgcaagcaaagacgacgccccacaagctagaggacacgaacaacgagcagacagcggggccgaagaacaggagccgaaggatgcgggagaacaggcagcgaggcccgcgcccgcgacgacgcaaagagcagg

SEQ ID NO: 354982 - DNA, 1449 bp, Homo sapiens
caaaattacggctaggtacgaggctggggttacggagccggagcgcagcgcctgcggccgcccgtgccccgccgtcctccttcccgcggccgtgagggagaccgcggctcggccgtagcggagctgcgaggtggcagggcccagccccgaaccagacaagggacccctcaaggagcttcattctagcaggagaaaattgagaagtaaaccagaaagttacagaatgtctgaaggggacagtgtgggagaatccgtccatgggaaaccttcggtggtgtacagatttttcacaagacttggacagatttatcagtcctggctagacaagtccacaccctacacggctgtgcgatgggtcgtgacactgggcctgagctttgtctacatgattcgagtttacctgctgcagggttggtacattgtgacctatgccttggggatctaccatctaaatcttttcatagcttttctttctcccaaagtggatccttccttaatggaagactcagatgacggtccttcgctacccaccaaacagaacgaggaattccgccccttcattcgaaggctcccagagtttaaattttggcatgcggctaccaagggcatccttgtggctatggtctgtactttcttcgacgctttcaacgtcccggtgttctggccgattctggtgatgtacttcatcatgctcttctgtatcacgatgaagaggcaaatcaagcacatgattaagtaccggtacatcccgttcacacatgggaagagaaggtacagaggcaaggaggatgccggcaaggccttcgccagctagaagcgggactgaggctgcctcacgtgttgcaagaacagttttgagccattgttaacaatgccttttttcttcacataaagtagttgattacgagggagtcaaattttctttttaaaaaggagcttcaatgatttgtaactgaaatatcaggttctagaagaaactggcgcttaaaccaaatcgcatggatttctttttcagtgacgttcaagtgtttctcacggatggaattctagtcagctgcaggcgggaagccaggcgggtggagcccatgggagcaagggcgagtggccggtccccgctgtgccaggtgggcaggcaggagcaaggcctgcgagggaggaacgggccgctccccgccagccgccttccccagcagccgcaggtggtgccagccactccacagagcccgagggatgatctagcctgattcctgcgtgtccgaaagaacttaacgttttaaaggtgattgtcaagtaactgtgtggggttctaatgccagtttcctaattccatctcactggagatgtttaaagttggcctctatcctaatgactcaaaacttggttcttaactaccatgattgcttttgagggcccggaattataaatatatattatattttaattgtttga

SEQ ID NO: 354983 - DNA, 1486 bp, Homo sapiens
ggcggcgccgcggaggacggagcggaagtgctcgctgcagcttcccggagccggagcgcagcgcctgcggccgcccgtgccccgccgtcctccttcccgcggccgtgagggagaccgcggctcggccgtagcggagctgcgagttacagaatgtctgaaggggacagtgtgggagaatccgtccatgggaaaccttcggtggtgtacagatttttcacaagacttggacagatttatcagtcctggctagacaagtccacaccctacacggctgtgcgatgggtcgtgacactgggcctgagctttgtctacatgattcgagtttacctgctgcagggttggtacattgtgacctatgccttggggatctaccatctaaatcttttcatagcttttctttctcccaaagtggatccttccttaatggaagactcagatgacggtccttcgctacccaccaaacagaacgaggaattccgccccttcattcgaaggctcccagagtttaaattttgggatgcttctgtttgcggggacggtcggtgcagctgcaaggctggaggcggccggcaggtgcccggtgctggctgcagatgcggcgctaaccttctctccccacttgaaggcatgcggctaccaagggcatccttgtggctatggtctgtactttcttcgacgctttcaacgtcccggtgttctggccgattctggtgatgtacttcatcatgctcttctgtatcacgatgaagaggcaaatcaagcacatgattaagtaccggtacatcccgttcacacatgggaagagaaggtacagaggcaaggaggatgccggcaaggccttcgccagctagaagcgggactgaggctgcctcacgtgttgcaagaacagttttgagccattgttaacaatgccttttttcttcacataaagtagttgattacgagggagtcaaattttctttttaaaaaggagcttcaatgatttgtaactgaaatatcaggttctagaagaaactggcgcttaaaccaaatcgcatggatttctttttcagtgacgttcaagtgtttctcacggatggaattctagtcagctgcaggcgggaagccaggcgggtggagcccatgggagcaagggcgagtggccggtccccgctgtgccaggtgggcaggcaggagcaaggcctgcgagggaggaacgggccgctccccgccagccgccttccccagcagccgcaggtggtgccagccactccacagagcccgagggatgatctagcctgattcctgcgtgtccgaaagaacttaacgttttaaaggtgattgtcaagtaactgtgtggggttctaatgccagtttcctaattccatctcactggagatgtttaaagttggcctctatcctaatgactcaaaacttggttcttaactaccatgattgcttttgagggcccggaattataaatatatattatattttaattgtttga

SEQ ID NO: 354984 - DNA, 1445 bp, Homo sapiens
caaaattacggctaggtacgaggctggggttacggagccggagcgcagcgcctgcggccgcccgtgccccgccgtcctccttcccgcggccgtgagggagaccgcggctcggccgtagcggagctgcgagagcctcattttacagatgaggaaactgaggctggctgcgtgctcagagggtttgctgaaggcctcacagccgcttagcacagttacagaatgtctgaaggggacagtgtgggagaatccgtccatgggaaaccttcggtggtgtacagatttttcacaagacttggacagatttatcagtcctggctagacaagtccacaccctacacggctgtgcgatgggtcgtgacactgggcctgagctttgtctacatgattcgagtttacctgctgcagggttggtacattgtgacctatgccttggggatctaccatctaaatcttttcatagcttttctttctcccaaagtggatccttccttaatggaagactcagatgacggtccttcgctacccaccaaacagaacgaggaattccgccccttcattcgaaggctcccagagtttaaattttggcatgcggctaccaagggcatccttgtggctatggtctgtactttcttcgacgctttcaacgtcccggtgttctggccgattctggtgatgtacttcatcatgctcttctgtatcacgatgaagaggcaaatcaagcacatgattaagtaccggtacatcccgttcacacatgggaagagaaggtacagaggcaaggaggatgccggcaaggccttcgccagctagaagcgggactgaggctgcctcacgtgttgcaagaacagttttgagccattgttaacaatgccttttttcttcacataaagtagttgattacgagggagtcaaattttctttttaaaaaggagcttcaatgatttgtaactgaaatatcaggttctagaagaaactggcgcttaaaccaaatcgcatggatttctttttcagtgacgttcaagtgtttctcacggatggaattctagtcagctgcaggcgggaagccaggcgggtggagcccatgggagcaagggcgagtggccggtccccgctgtgccaggtgggcaggcaggagcaaggcctgcgagggaggaacgggccgctccccgccagccgccttccccagcagccgcaggtggtgccagccactccacagagcccgagggatgatctagcctgattcctgcgtgtccgaaagaacttaacgttttaaaggtgattgtcaagtaactgtgtggggttctaatgccagtttcctaattccatctcactggagatgtttaaagttggcctctatcctaatgactcaaaacttggttcttaactaccatgattgcttttgagggcccggaattataaatatatattatattttaattgtttga

SEQ ID NO: 354985 - DNA, 1495 bp, Homo sapiens
gggaggtccctgttttggaggagctaggagcgttgccggcccctgaagtggagcgagagggaggtgcttctgccgtttctcctgccaggggaggtcccggcttccctgtgcaggctccggaccaagccccttcagcttctccctccggatcgatgtgctgctgttaacccgtgaggagcgcggcggcggcggcggcagcggaagcactggtgttgctgacagtgcttaattctgctcctctcctgggcggcgggcatgggagttacagaatgtctgaaggggacagtgtgggagaatccgtccatgggaaaccttcggtggtgtacagatttttcacaagacttggacagatttatcagtcctggctagacaagtccacaccctacacggctgtgcgatgggtcgtgacactgggcctgagctttgtctacatgattcgagtttacctgctgcagggttggtacattgtgacctatgccttggggatctaccatctaaatcttttcatagcttttctttctcccaaagtggatccttccttaatggaagactcagatgacggtccttcgctacccaccaaacagaacgaggaattccgccccttcattcgaaggctcccagagtttaaattttggcatgcggctaccaagggcatccttgtggctatggtctgtactttcttcgacgctttcaacgtcccggtgttctggccgattctggtgatgtacttcatcatgctcttctgtatcacgatgaagaggcaaatcaagcacatgattaagtaccggtacatcccgttcacacatgggaagagaaggtacagaggcaaggaggatgccggcaaggccttcgccagctagaagcgggactgaggctgcctcacgtgttgcaagaacagttttgagccattgttaacaatgccttttttcttcacataaagtagttgattacgagggagtcaaattttctttttaaaaaggagcttcaatgatttgtaactgaaatatcaggttctagaagaaactggcgcttaaaccaaatcgcatggatttctttttcagtgacgttcaagtgtttctcacggatggaattctagtcagctgcaggcgggaagccaggcgggtggagcccatgggagcaagggcgagtggccggtccccgctgtgccaggtgggcaggcaggagcaaggcctgcgagggaggaacgggccgctccccgccagccgccttccccagcagccgcaggtggtgccagccactccacagagcccgagggatgatctagcctgattcctgcgtgtccgaaagaacttaacgttttaaaggtgattgtcaagtaactgtgtggggttctaatgccagtttcctaattccatctcactggagatgtttaaagttggcctctatcctaatgactcaaaacttggttcttaactaccatgattgcttttgagggcccggaattataaatatatattatattttaattgtttga

SEQ ID NO: 354986 - DNA, 2066 bp, Homo sapiens
gctgttctagaggtccctgcacgtgtgtcatacgtgcactgtgtcatactgcactggttgttcataccccccctgacattactctcatcacctccagtccagtaaaagtgctttaatgggaaacagtctgagtaaaacggggaaacttacaaggagctataggacgaacaatgtgacgggtggctttcagatggcctggctttggcctaaatagggtggccattccaggtgacacattttagtgtagcctctatttaaatatggagttctttcagtggagagtaaaggtgctcctcctctgtgtctggtttacacggctccgcgagaccaaagggcccctcggtctccttgagcagcctggcactctgcacagaggatccaggaacggtgtcatggagccacattctgcacagacttgatgatgtggagggagctgcctggatcacttcagcgcatcagttgtgatgggagagccaaggcacttgagggcgggattgcgtctggccacctgttgccttccacctgaagggaagatttccccagtgctcacagtgaggatgggactggaaaagcgttggtttcaggaaggtgcaggttctggctcctgcccactgcgaacatgctgatgggccagggcaactctttagtctttgtgagcttcagttttcttatctgtaaatgagaacaataagactgaccccaactgttgctgaggaatgatgtctttgctttcatgtctggtatttcttagagcctcattttacagatgaggaaactgaggctggctgcgtgctcagagggtttgctgaaggcctcacagccgcttagcacagttacagaatgtctgaaggggacagtgtgggagaatccgtccatgggaaaccttcggtggtgtacagatttttcacaagacttggacagatttatcagtcctggctagacaagtccacaccctacacggctgtgcgatgggtcgtgacactgggcctgagctttgtctacatgattcgagtttacctgctgcagggttggtacattgtgacctatgccttggggatctaccatctaaatcttttcatagcttttctttctcccaaagtggatccttccttaatggaagactcagatgacggtccttcgctacccaccaaacagaacgaggaattccgccccttcattcgaaggctcccagagtttaaattttggcatgcggctaccaagggcatccttgtggctatggtctgtactttcttcgacgctttcaacgtcccggtgttctggccgattctggtgatgtacttcatcatgctcttctgtatcacgatgaagaggcaaatcaagcacatgattaagtaccggtacatcccgttcacacatgggaagagaaggtacagaggcaaggaggatgccggcaaggccttcgccagctagaagcgggactgaggctgcctcacgtgttgcaagaacagttttgagccattgttaacaatgccttttttcttcacataaagtagttgattacgagggagtcaaattttctttttaaaaaggagcttcaatgatttgtaactgaaatatcaggttctagaagaaactggcgcttaaaccaaatcgcatggatttctttttcagtgacgttcaagtgtttctcacggatggaattctagtcagctgcaggcgggaagccaggcgggtggagcccatgggagcaagggcgagtggccggtccccgctgtgccaggtgggcaggcaggagcaaggcctgcgagggaggaacgggccgctccccgccagccgccttccccagcagccgcaggtggtgccagccactccacagagcccgagggatgatctagcctgattcctgcgtgtccgaaagaacttaacgttttaaaggtgattgtcaagtaactgtgtggggttctaatgccagtttcctaattccatctcactggagatgtttaaagttggcctctatcctaatgactcaaaacttggttcttaactaccatgattgcttttgagggcccggaattataaatatatattatattttaattgtttga

SEQ ID NO: 354987 - DNA, 1531 bp, Homo sapiens
caaaattacggctaggtacgaggctggggttacggagccggagcgcagcgcctgcggccgcccgtgccccgccgtcctccttcccgcggccgtgagggagaccgcggctcggccgtagcggagctgcgaggtgccaggaagggctgcgtggcgcgggaacggccgggcagcgccgcctccgcttcttccgggctgtcaaggccgcgggcgggcggggccgcgctgagggccgggcggggagggccgtcggggcccgggtggccgcggggaccgtgttcccgacccgcggccctgagggttacagaatgtctgaaggggacagtgtgggagaatccgtccatgggaaaccttcggtggtgtacagatttttcacaagacttggacagatttatcagtcctggctagacaagtccacaccctacacggctgtgcgatgggtcgtgacactgggcctgagctttgtctacatgattcgagtttacctgctgcagggttggtacattgtgacctatgccttggggatctaccatctaaatcttttcatagcttttctttctcccaaagtggatccttccttaatggaagactcagatgacggtccttcgctacccaccaaacagaacgaggaattccgccccttcattcgaaggctcccagagtttaaattttggcatgcggctaccaagggcatccttgtggctatggtctgtactttcttcgacgctttcaacgtcccggtgttctggccgattctggtgatgtacttcatcatgctcttctgtatcacgatgaagaggcaaatcaagcacatgattaagtaccggtacatcccgttcacacatgggaagagaaggtacagaggcaaggaggatgccggcaaggccttcgccagctagaagcgggactgaggctgcctcacgtgttgcaagaacagttttgagccattgttaacaatgccttttttcttcacataaagtagttgattacgagggagtcaaattttctttttaaaaaggagcttcaatgatttgtaactgaaatatcaggttctagaagaaactggcgcttaaaccaaatcgcatggatttctttttcagtgacgttcaagtgtttctcacggatggaattctagtcagctgcaggcgggaagccaggcgggtggagcccatgggagcaagggcgagtggccggtccccgctgtgccaggtgggcaggcaggagcaaggcctgcgagggaggaacgggccgctccccgccagccgccttccccagcagccgcaggtggtgccagccactccacagagcccgagggatgatctagcctgattcctgcgtgtccgaaagaacttaacgttttaaaggtgattgtcaagtaactgtgtggggttctaatgccagtttcctaattccatctcactggagatgtttaaagttggcctctatcctaatgactcaaaacttggttcttaactaccatgattgcttttgagggcccggaattataaatatatattatattttaattgtttga

SEQ ID NO: 354988 - DNA, 1276 bp, Homo sapiens
ggcggcgccgcggaggacggagcggaagtgctcgctgcagcttcccggagccggagcgcagcgcctgcggccgcccgtgccccgccgtcctccttcccgcggccgtgagggagaccgcggctcggccgtagcggagctgcgagttacagaatgtctgaaggggacagtgtgggagaatccgtccatgggaaaccttcggtggtgtacagatttttcacaagacttggacagatttatcagtcctggctagacaagtccacaccctacacggctgtgcgatgggtcgtgacactgggcctgagctttgtctacatgattcgagtttacctgctgcagatgacggtccttcgctacccaccaaacagaacgaggaattccgccccttcattcgaaggctcccagagtttaaattttggcatgcggctaccaagggcatccttgtggctatggtctgtactttcttcgacgctttcaacgtcccggtgttctggccgattctggtgatgtacttcatcatgctcttctgtatcacgatgaagaggcaaatcaagcacatgattaagtaccggtacatcccgttcacacatgggaagagaaggtacagaggcaaggaggatgccggcaaggccttcgccagctagaagcgggactgaggctgcctcacgtgttgcaagaacagttttgagccattgttaacaatgccttttttcttcacataaagtagttgattacgagggagtcaaattttctttttaaaaaggagcttcaatgatttgtaactgaaatatcaggttctagaagaaactggcgcttaaaccaaatcgcatggatttctttttcagtgacgttcaagtgtttctcacggatggaattctagtcagctgcaggcgggaagccaggcgggtggagcccatgggagcaagggcgagtggccggtccccgctgtgccaggtgggcaggcaggagcaaggcctgcgagggaggaacgggccgctccccgccagccgccttccccagcagccgcaggtggtgccagccactccacagagcccgagggatgatctagcctgattcctgcgtgtccgaaagaacttaacgttttaaaggtgattgtcaagtaactgtgtggggttctaatgccagtttcctaattccatctcactggagatgtttaaagttggcctctatcctaatgactcaaaacttggttcttaactaccatgattgcttttgagggcccggaattataaatatatattatattttaattgtttga

SEQ ID NO: 354989 - DNA, 1180 bp, Homo sapiens
tttctctccagatcgcaggcccagccagcaggcatggggcccccagcctcagtactgatgctttatactttgtgtagttttaagaagaattgtgtctttcaagggagtaagagaaggatgtttctgtggttagggcagtacatgtctgtgagctacatgcaaagggtcctgctgctgctgtgcccagggtagacccctcctttccacagggatgcttctgtttgcggggacggtcggtgcagctgcaaggctggaggcggccggcaggtgcccggtgctggctgcagatgcggcgctaaccttctctccccacttgaaggcatgcggctaccaagggcatccttgtggctatggtctgtactttcttcgacgctttcaacgtcccggtgttctggccgattctggtgatgtacttcatcatgctcttctgtatcacgatgaagaggcaaatcaagcacatgattaagtaccggtacatcccgttcacacatgggaagagaaggtacagaggcaaggaggatgccggcaaggccttcgccagctagaagcgggactgaggctgcctcacgtgttgcaagaacagttttgagccattgttaacaatgccttttttcttcacataaagtagttgattacgagggagtcaaattttctttttaaaaaggagcttcaatgatttgtaactgaaatatcaggttctagaagaaactggcgcttaaaccaaatcgcatggatttctttttcagtgacgttcaagtgtttctcacggatggaattctagtcagctgcaggcgggaagccaggcgggtggagcccatgggagcaagggcgagtggccggtccccgctgtgccaggtgggcaggcaggagcaaggcctgcgagggaggaacgggccgctccccgccagccgccttccccagcagccgcaggtggtgccagccactccacagagcccgagggatgatctagcctgattcctgcgtgtccgaaagaacttaacgttttaaaggtgattgtcaagtaactgtgtggggttctaatgccagtttcctaattccatctcactggagatgtttaaagttggcctctatcctaatgactcaaaacttggttcttaactaccatgattgcttttgagggcccggaattataaatatatattatattttaattgtttga

SEQ ID NO: 354990 - DNA, 470 bp, Homo sapiens
ggcggcgccgcggaggacggagcggaagtgctcgctgcagcttcccggagccggagcgcagcgcctgcggccgcccgtgccccgccgtcctccttcccgcggccgtgagggagaccgcggctcggccgtagcggagctgcgagttacagaatgtctgaaggggacagtgtgggagaatccgtccatgggaaaccttcggtggtgtacagatttttcacaagacttggacagatttatcagtcctggctagacaagtccacaccctacacggctgtgcgatgggtcgtgacactgggcctgagctttgtctacatgattcgagtttacctgctgcagggttggtacattgtgacctatgccttggggatctaccatctaaatcttttcatagcttttctttctcccaaagtggatccttccttaatggaagactcagatgacggtccttccgggatcctctagaccaccaa

SEQ ID NO: 354991 - DNA, 1624 bp, Homo sapiens
ctggccctgatccaggaacagggctggcactgccttgcccggctccaagggtgctccacgggctgcccactgattcctcacgagagccttgtggagaaggcatgagaggtgctgttgtcccatttcacagactggaacctgaggcatcctggaatagcctgtcctagtcacactggcagagagtggtagagccaggatctgaaagcaggctgttggagtccaaagttcacgttcttgctcctgccgccctgcctcaggctattcctggcaatgcgttcagtcagggtgcaagctgtgtttggtatacgtgtgtgtttggtatacgtgttgtgtgtgtcagacaagcaggattggctgatggcgttttgagtaggttttctacatgttcagttggagagtgagaagttctgagctttgcctagagaacaccctttggcgggagagctgggtattttctccctgacattactctcatcacctccagtccagtaaaagtgctttaatgggaaacagtctgagtaaaacggggaaacttacaaggagctataggacgaacaatgtgacgggtggctttcagatggcctggctttggcctaaatagggtggccattccaggtgacacattttagtgtagcctctatttaaatatggagttctttcagtggagagtaaaggtgctcctcctctgtgtctggtttacacggctccgcgagaccaaagggcccctcggtctccttgagcagcctggcactctgcacagaggatccaggaacggtgtcatggagccacattctgcacagacttgatgatgtggagggagctgcctggatcacttcagcgcatcagttgtgatgggagagccaaggcacttgagggcgggattgcgtctggccacctgttgccttccacctgaagggaagatttccccagtgctcacagtgaggatgggactggaaaagcgttggtttcaggaaggtgcaggttctggctcctgcccactgcgaacatgctgatgggccagggcaactctttagtctttgtgagcttcagttttcttatctgtaaatgagaacaataagactgaccccaactgttgctgaggaatgatgtctttgctttcatgtctggtatttcttagagcctcattttacagatgaggaaactgaggctggctgcgtgctcagagggtttgctgaaggcctcacagccgcttagcacaggtgggactttaagccaaacttgagaccagagtctgtttctcctcactgccctgccgagggagcagatggggggtggtgggggaggtgaacgtcacccctggcgtcttctctagctcaggggccaggaggcctctcatctttaaagtaggaatgacaaccggcaggccctgggtactgagctgtgctttaccgaagagcggcaggtcctgacgccgtctcctctcaggagtggggtggcggcgtgctcagctgaggagccaggtggcagtcaggcttggcttggcctgcccagaagcagggctgtggcaggaccttggacacgtggcttccactgtttgagacttggtgaaatgggggtcatgatgcccttcacttgagcatctgggaattaagtgggtgaacaa

SEQ ID NO: 354992 - DNA, 729 bp, Homo sapiens
ggcggcgccgcggaggacggagcggaagtgctcgctgcagcttcccggagccggagcgcagcgcctgcggccgcccgtgccccgccgtcctccttcccgcggccgtgagggagaccgcggctcggccgtagcggagctgcgagttacagaatgtctgaaggggacagtgtgggagaatccgtccatgggaaaccttcggtggtgtacagatttttcacaagacttggacaggttggtgggttttttagtagatgagtataaatatttgaaaaagaaacgggactcccagcattttcgggaaggatctgtttgctggtgttcctgatggagaagttacttcgcctcaggctcaaacttcctgaagacagcgttctcttcactgtgaagggccagctgtggagagatcgggctctggggccacacgtggtctatcaaacatatgcgttttctgtttctgttttccttttaccaagctttaaaaatataaaacccagtctcagctcccaggcaggacagatgcggccgtggctgccgttctgctcttgctgtccctctcccagccacccacgtccccggtgctggtagccccacctgccccgtgtcagctcggcggttctgtccttgagggtgagaggctcttgtgtgggctgcgtgtgcattgcttggtgagtgagggacctagagctgcctttgaacgctggagtccgaacctctgtcaggaaaagcttg

SEQ ID NO: 354993 - DNA, 668 bp, Homo sapiens
caaaattacggctaggtacgaggctggggttacggagccggagcgcagcgcctgcggccgcccgtgccccgccgtcctccttcccgcggccgtgagggagaccgcggctcggccgtagcggagctgcgaggtgccaggaagggctgcgtggcgcgggaacggccgggcagcgccgcctccgcttcttccgggctgtcaaggccgcgggcgggcggggccgcgctgagggccgggcggggagggccgtcggggcccgggtggccgcggggaccgtgttcccgacccgcggccctgagggttacagaatgtctgaaggggacagtgtgggagaatccgtccatgggaaaccttcggtggtgtacagatttttcacaagacttggacagatttatcagtcctggctagacaagtccacaccctacacggctgtgcgatgggtcgtgacactgggcctgagctttgtctacatgattcgagtttacctgctgcagggttggtacattgtgacctatgccttggggatctaccatcgcacagccgtgtagggtgtggatttatcagtcctggctagacaagtccacaccctacacggctgtgcgatgggtcgtgacactgggcctgagctttgtctacatgattcgagtgtaccaaccctgcagcaggtaaac

SEQ ID NO: 354994 - DNA, 226 bp, Homo sapiens
agcggttgtgcagtaactgagtctgtgtttctctccccagcacatgattaagtaccggtacatcccgttcacacatgggaagagaaggtacagaggcaaggaggatgccggcaaggccttcgccagctagaagcgggactgaggctgcctcacgtgttgcaagaacagttttgagccattgttaacaatgccttttttcttcacataaagtagttgattacgaggg

SEQ ID NO: 354995 - DNA, 1376 bp, Homo sapiens
ggcggcgccgcggaggacggagcggaagtgctcgctgcagcttcccggagccggagcgcagcgcctgcggccgcccgtgccccgccgtcctccttcccgcggccgtgagggagaccgcggctcggccgtagcggagctgcgagttacagaatgtctgaaggggacagtgtgggagaatccgtccatgggaaaccttcggtggtgtacagatttttcacaagacttggacagatttatcagtcctggctagacaagtccacaccctacacggctgtgcgatgggtcgtgacactgggcctgagctttgtctacatgattcgagtttacctgctgcagggttggtacattgtgacctatgccttggggatctaccatctaaatcttttcatagcttttctttctcccaaagtggatccttccttaatggaagactcagatgacggtccttcgctacccaccaaacagaacgaggaattccgccccttcattcgaaggctcccagagtttaaattttggcatgcggctaccaagggcatccttgtggctatggtctgtactttcttcgacgctttcaacgtcccggtgttctggccgattctggtgatgtacttcatcatgctcttctgtatcacgatgaagaggcaaatcaagcacatgattaagtaccggtacatcccgttcacacatgggaagagaaggtacagaggcaaggaggatgccggcaaggccttcgccagctagaagcgggactgaggctgcctcacgtgttgcaagaacagttttgagccattgttaacaatgccttttttcttcacataaagtagttgattacgagggagtcaaattttctttttaaaaaggagcttcaatgatttgtaactgaaatatcaggttctagaagaaactggcgcttaaaccaaatcgcatggatttctttttcagtgacgttcaagtgtttctcacggatggaattctagtcagctgcaggcgggaagccaggcgggtggagcccatgggagcaagggcgagtggccggtccccgctgtgccaggtgggcaggcaggagcaaggcctgcgagggaggaacgggccgctccccgccagccgccttccccagcagccgcaggtggtgccagccactccacagagcccgagggatgatctagcctgattcctgcgtgtccgaaagaacttaacgttttaaaggtgattgtcaagtaactgtgtggggttctaatgccagtttcctaattccatctcactggagatgtttaaagttggcctctatcctaatgactcaaaacttggttcttaactaccatgattgcttttgagggcccggaattataaatatatattatattttaattgtttga

SEQ ID NO: 354996 - DNA, 825 bp, Homo sapiens
caaaattacggctaggtacgaggctggggttacggagccggagcgcagcgcctgcggccgcccgtgccccgccgtcctccttcccgcggccgtgagggagaccgcggctcggccgtagcggagctgcgagttacagaatgtctgaaggggacagtgtgggagaatccgtccatgggaaaccttcggtggtgtacagatttttcacaagacttggacagatttatcagtcctggctagacaagtccacaccctacacggctgtgcgatgggtcgtgacactgggcctgagctttgtctacatgattcgagtttacctgctgcagggttggtacattgtgacctatgccttggggatctaccatctaaatcttttcatagcttttctttctcccaaagtggatccttccttaatggaagactcagatgacggtccttcgctacccaccaaacagaacgaggaattccgccccttcattcgaaggctcccagagtttaaattttggcatgcggctaccaagggcatccttgtggctatggtctgtactttcttcgacgctttcaacgtcccggtgttctggccgattctggtgatgtacttcatcatgctcttctgtatcacgatgaagaggcaaatcaagcacatgattaagtaccggtacatcccgttcacacatgggaagagaaggtacagaggcaaggaggatgccggcaaggccttcgccagctagaagcgggactgaggctgcctcacgtgttgcaagaacagttttgagccattgttaacaatgccttttttcttcacataaagtagttgattacgaggga

SEQ ID NO: 354997 - DNA, 1852 bp, Homo sapiens
ggcggcgccgcggaggacggagcggaagtgctcgctgcagcttcccggagccggagcgcagcgcctgcggccgcccgtgccccgccgtcctccttcccgcggccgtgagggagaccgcggctcggccgtagcggagctgcgagttacagaatgtctgaaggggacagtgtgggagaatccgtccatgggaaaccttcggtggtgtacagatttttcacaagacttggacagatttatcagtcctggctagacaagtccacaccctacacggctgtgcgatgggtcgtgacactgggcctgagctttgtctacatgattcgagtttacctgctgcagggttggtacattgtgacctatgccttggggatctaccatctaaatcttttcatagcttttctttctcccaaagtggatccttccttaatggaagactcagatgacggtccttcgctacccaccaaacagaacgaggaattccgccccttcattcgaaggctcccagagtttaaattttggcatgcggctaccaagggcatccttgtggctatggtctgtactttcttcgacgctttcaacgtcccggtgttctggccgattctggtgatgtacttcatcatgctcttctgtatcacgatgaagaggcaaatcaagcacatgattaagtaccggtacatcccgttcacacatgggaagagaaggtacagaggcaaggaggatgccggcaaggccttcgccagctagaagcgggactgaggctgcctcacgtgttgcaagaacagttttgagccattgttaacaatgccttttttcttcacataaagtagttgattacgagggagtcaaattttctttttaaaaaggagcttcaatgatttgtaactgaaatatcaggttctagaagaaactggcgcttaaaccaaatcgcatggatttctttttcagtgacgttcaagtgtttctcacggatggaattctagtcagctgcaggcgggaagccaggcgggtggagcccatgggagcaagggcgagtggccggtccccgctgtgccaggtgggcaggcaggagcaaggcctgcgagggaggaacgggccgctccccgccagccgccttccccagcagccgcaggtggtgccagccactccacagagcccgagggatgatctagcctgattcctgcgtgtccgaaagaacttaacgttttaaaggtgattgtcaagtaactgtgtggggttctaatgccagtttcctaattccatctcactggagatgtttaaagttggcctctatcctaatgactcaaaacttggttcttaactaccatgattgcttttgagggcccggaattataaatatatattatattttaattgtttgagattattttgacacatttctttgatacgtagagtgttttgtttttaatttaaatctgtcctcatgcaaccctccatgaggggcagcgaagtggcaggggagcagactggctttgtaggttcagcactcggccccccactgcgggagaggcggaacccacttgcatgtcagcgtttttgattcgagaaaagaaatactctcaacgttttaccaagtgattttacctccacctttactaaagtctttacctaaaacatggcagtcgctggacacaggaaagcccaccttttgtttggccttttcgaaaggtgacccatattgcacagcagaacatcacagctgtggtcccagatgagacactgacatgcgagtgaaggcctctcctcctgggccccgggctgcgcaggctcctcactctgggcggtgtttcccacattttgctggagttagtttattaaagatgcctacggtgaactc

SEQ ID NO: 354998 - DNA, 1076 bp, Homo sapiens
ggcggcgccgcggaggacggagcggaagtgctcgctgcagcttcccggagccggagcgcagcgcctgcggccgcccgtgccccgccgtcctccttcccgcggccgtgagggagaccgcggctcggccgtagcggagctgcgagttacagaatgtctgaaggggacagtgtgggagaatccgtccatgggaaaccttcggtggtgtacagatttttcacaagacttggacagatttatcagtcctggctagacaagtccacaccctacacggctgtgcgatgggtcgtgacactgggcctgagctttgtctacatgattcgagtttacctgctgcagggttggtacattgtgacctatgccttggggatctaccatctaaatcttttcatagcttttctttctcccaaagtggatccttccttaatggaagactcagatgacggtccttcgctacccaccaaacagaacgaggaattccgccccttcattcgaaggctcccagagtttaaattttggcatgcggctaccaagggcatccttgtggctatggtctgtactttcttcgacgctttcaacgtcccggtgttctggccgattctggtgatgtacttcatcatgctcttctgtatcacgatgaagaggcaaatcaagcacatgattaagtaccggtacatcccgttcacacatgggaagagaaggtacagaggcaaggaggatgccggcaaggccttcgccagctagaagcgggactgaggctgcctcacgtgttgcaagaacagttttgagccattgttaacaatgccttttttcttcacataaagtagttgattacgagggagtcaaattttctttttaaaaaggagcttcaatgatttgtaactgaaatatcagatatagcaggatctggatagggcaaatcctgaggagagctgtagtaggcctcaagagtgaaaggttcctttctataaaatgtaagaactttagagaaaggagcagcatgatttttggcaaagacttcacagtcacttgacccttcttcagctggagaattccatctcagagatattggatatggt

SEQ ID NO: 354999 - DNA, 1132 bp, Homo sapiens
ggcggcgccgcggaggacggagcggaagtgctcgctgcagcttcccggagccggagcgcagcgcctgcggccgcccgtgccccgccgtcctccttcccgcggccgtgagggagaccgcggctcggccgtagcggagctgcgagttacagaatgtctgaaggggacagtgtgggagaatccgtccatgggaaaccttcggtggtgtacagatttttcacaagacttggacagatttatcagtcctggctagacaagtccacaccctacacggctgtgcgatgggtcgtgacactgggcctgagctttgtctacatgattcgagtttacctgctgcagggttggtacattgtgacctatgccttggggatctaccatctaaatcttttcatagcttttctttctcccaaagtggatccttccttaatggaagactcagatgacggtccttcgctacccaccaaacagaacgaggaattccgccccttcattcgaaggctcccagagtttaaattttggcatgcggctaccaagggcatccttgtggctatggtctgtactttcttcgacgctttcaacgtcccggtgttctggccgattctggtgatgtacttcatcatgctcttctgtatcacgatgaagaggcaaatcaagcacatgattaagtaccggtacatcccgttcacacatgggaagagaagtgacgttcaagtgtttctcacggatggaattctagtcagctgcaggcgggaagccaggcgggtggagcccatgggagcaagggcgagtggccggtccccgctgtgccaggtgggcaggcaggagcaaggcctgcgagggaggaacgggccgctccccgccagccgccttccccagcagccgcaggtggtgccagccactccacagagcccgagggatgatctagcctgattcctgcgtgtccgaaagaacttaacgttttaaaggtgattgtcaagtaactgtgtggggttctaatgccagtttcctaattccatctcactggagatgtttaaagttggcctctatcctaatgactcaaaacttggttcttaactaccatgattgcttttgagggcccggaattataaatatatattatattttaattgtttga

SEQ ID NO: 355000 - DNA, 1511 bp, Homo sapiens
caaaattacggctaggtacgaggctggggttacggagccggagcgcagcgcctgcggccgcccgtgccccgccgtcctccttcccgcggccgtgagggagaccgcggctcggccgtagcggagctgcgaggcataaagcagtcaccttcaacaggtaattgatgggctgtctactatgtaatggacttccaggtggcagggcccagccccgaaccagacaagggacccctcaaggagcttcattctagcaggagaaaattgagaagtaaaccagaaagttacagaatgtctgaaggggacagtgtgggagaatccgtccatgggaaaccttcggtggtgtacagatttttcacaagacttggacagatttatcagtcctggctagacaagtccacaccctacacggctgtgcgatgggtcgtgacactgggcctgagctttgtctacatgattcgagtttacctgctgcagggttggtacattgtgacctatgccttggggatctaccatctaaatcttttcatagcttttctttctcccaaagtggatccttccttaatggaagactcagatgacggtccttcgctacccaccaaacagaacgaggaattccgccccttcattcgaaggctcccagagtttaaattttggcatgcggctaccaagggcatccttgtggctatggtctgtactttcttcgacgctttcaacgtcccggtgttctggccgattctggtgatgtacttcatcatgctcttctgtatcacgatgaagaggcaaatcaagcacatgattaagtaccggtacatcccgttcacacatgggaagagaaggtacagaggcaaggaggatgccggcaaggccttcgccagctagaagcgggactgaggctgcctcacgtgttgcaagaacagttttgagccattgttaacaatgccttttttcttcacataaagtagttgattacgagggagtcaaattttctttttaaaaaggagcttcaatgatttgtaactgaaatatcaggttctagaagaaactggcgcttaaaccaaatcgcatggatttctttttcagtgacgttcaagtgtttctcacggatggaattctagtcagctgcaggcgggaagccaggcgggtggagcccatgggagcaagggcgagtggccggtccccgctgtgccaggtgggcaggcaggagcaaggcctgcgagggaggaacgggccgctccccgccagccgccttccccagcagccgcaggtggtgccagccactccacagagcccgagggatgatctagcctgattcctgcgtgtccgaaagaacttaacgttttaaaggtgattgtcaagtaactgtgtggggttctaatgccagtttcctaattccatctcactggagatgtttaaagttggcctctatcctaatgactcaaaacttggttcttaactaccatgattgcttttgagggcccggaattataaatatatattatattttaattgtttga

SEQ ID NO: 355001 - DNA, 2453 bp, Homo sapiens
ctggccctgatccaggaacagggctggcactgccttgcccggctccaagggtgctccacgggctgcccactgattcctcacgagagccttgtggagaaggcatgagaggtgctgttgtcccatttcacagactggaacctgaggcatcctggaatagcctgtcctagtcacactggcagagagtggtagagccaggatctgaaagcaggctgttggagtccaaagttcacgttcttgctcctgccgccctgcctcaggctattcctggcaatgcgttcagtcagggtgcaagctgtgtttggtatacgtgtgtgtttggtatacgtgttgtgtgtgtcagacaagcaggattggctgatggcgttttgagtaggttttctacatgttcagttggagagtgagaagttctgagctttgcctagagaacaccctttggcgggagagctgggtattttctccctgacattactctcatcacctccagtccagtaaaagtgctttaatgggaaacagtctgagtaaaacggggaaacttacaaggagctataggacgaacaatgtgacgggtggctttcagatggcctggctttggcctaaatagggtggccattccaggtgacacattttagtgtagcctctatttaaatatggagttctttcagtggagagtaaaggtgctcctcctctgtgtctggtttacacggctccgcgagaccaaagggcccctcggtctccttgagcagcctggcactctgcacagaggatccaggaacggtgtcatggagccacattctgcacagacttgatgatgtggagggagctgcctggatcacttcagcgcatcagttgtgatgggagagccaaggcacttgagggcgggattgcgtctggccacctgttgccttccacctgaagggaagatttccccagtgctcacagtgaggatgggactggaaaagcgttggtttcaggaaggtgcaggttctggctcctgcccactgcgaacatgctgatgggccagggcaactctttagtctttgtgagcttcagttttcttatctgtaaatgagaacaataagactgaccccaactgttgctgaggaatgatgtctttgctttcatgtctggtatttcttagagcctcattttacagatgaggaaactgaggctggctgcgtgctcagagggtttgctgaaggcctcacagccgcttagcacagttacagaatgtctgaaggggacagtgtgggagaatccgtccatgggaaaccttcggtggtgtacagatttttcacaagacttggacagatttatcagtcctggctagacaagtccacaccctacacggctgtgcgatgggtcgtgacactgggcctgagctttgtctacatgattcgagtttacctgctgcagggttggtacattgtgacctatgccttggggatctaccatctaaatcttttcatagcttttctttctcccaaagtggatccttccttaatggaagactcagatgacggtccttcgctacccaccaaacagaacgaggaattccgccccttcattcgaaggctcccagagtttaaattttggcatgcggctaccaagggcatccttgtggctatggtctgtactttcttcgacgctttcaacgtcccggtgttctggccgattctggtgatgtacttcatcatgctcttctgtatcacgatgaagaggcaaatcaagcacatgattaagtaccggtacatcccgttcacacatgggaagagaaggtacagaggcaaggaggatgccggcaaggccttcgccagctagaagcgggactgaggctgcctcacgtgttgcaagaacagttttgagccattgttaacaatgccttttttcttcacataaagtagttgattacgagggagtcaaattttctttttaaaaaggagcttcaatgatttgtaactgaaatatcaggttctagaagaaactggcgcttaaaccaaatcgcatggatttctttttcagtgacgttcaagtgtttctcacggatggaattctagtcagctgcaggcgggaagccaggcgggtggagcccatgggagcaagggcgagtggccggtccccgctgtgccaggtgggcaggcaggagcaaggcctgcgagggaggaacgggccgctccccgccagccgccttccccagcagccgcaggtggtgccagccactccacagagcccgagggatgatctagcctgattcctgcgtgtccgaaagaacttaacgttttaaaggtgattgtcaagtaactgtgtggggttctaatgccagtttcctaattccatctcactggagatgtttaaagttggcctctatcctaatgactcaaaacttggttcttaactaccatgattgcttttgagggcccggaattataaatatatattatattttaattgtttga

SEQ ID NO: 355002 - DNA, 1593 bp, Homo sapiens
caaaattacggctaggtacgaggctggggttacggagccggagcgcagcgcctgcggccgcccgtgccccgccgtcctccttcccgcggccgtgagggagaccgcggctcggccgtagcggagctgcgaggcataaagcagtcaccttcaacaggtaattgatgggctgtctactatgtaatggacttccaggtggcagggcccagccccgaaccagacaagggacccctcaaggagcttcattctagcaggagaaaattgagaagtaaaccagaaagagcctcattttacagatgaggaaactgaggctggctgcgtgctcagagggtttgctgaaggcctcacagccgcttagcacagttacagaatgtctgaaggggacagtgtgggagaatccgtccatgggaaaccttcggtggtgtacagatttttcacaagacttggacagatttatcagtcctggctagacaagtccacaccctacacggctgtgcgatgggtcgtgacactgggcctgagctttgtctacatgattcgagtttacctgctgcagggttggtacattgtgacctatgccttggggatctaccatctaaatcttttcatagcttttctttctcccaaagtggatccttccttaatggaagactcagatgacggtccttcgctacccaccaaacagaacgaggaattccgccccttcattcgaaggctcccagagtttaaattttggcatgcggctaccaagggcatccttgtggctatggtctgtactttcttcgacgctttcaacgtcccggtgttctggccgattctggtgatgtacttcatcatgctcttctgtatcacgatgaagaggcaaatcaagcacatgattaagtaccggtacatcccgttcacacatgggaagagaaggtacagaggcaaggaggatgccggcaaggccttcgccagctagaagcgggactgaggctgcctcacgtgttgcaagaacagttttgagccattgttaacaatgccttttttcttcacataaagtagttgattacgagggagtcaaattttctttttaaaaaggagcttcaatgatttgtaactgaaatatcaggttctagaagaaactggcgcttaaaccaaatcgcatggatttctttttcagtgacgttcaagtgtttctcacggatggaattctagtcagctgcaggcgggaagccaggcgggtggagcccatgggagcaagggcgagtggccggtccccgctgtgccaggtgggcaggcaggagcaaggcctgcgagggaggaacgggccgctccccgccagccgccttccccagcagccgcaggtggtgccagccactccacagagcccgagggatgatctagcctgattcctgcgtgtccgaaagaacttaacgttttaaaggtgattgtcaagtaactgtgtggggttctaatgccagtttcctaattccatctcactggagatgtttaaagttggcctctatcctaatgactcaaaacttggttcttaactaccatgattgcttttgagggcccggaattataaatatatattatattttaattgtttga

SEQ ID NO: 355003 - DNA, 1215 bp, Homo sapiens
gaatttcgagcgtcggtatcccgggagtgaggaatcgtcactacagagtttgtcacaagacgttggacagatttatcagtcctggctagacaagtccacaccctacacggctgtgcgatgggtcgtgacactgggcctgagctttgtctacatgattcgagtttacctgctgcagggttggtacattgtgacctatgccttggggatctaccatctaaatcttttcatagcttttctttctcccaaagtggatccttccttaatggaagactcagatgacggtccttcgctacccaccaaacagaacgaggaattccgccccttcattcgaaggctcccagagtttaaattttggcatgcggctaccaagggcatccttgtggctatggtctgtactttcttcgacgctttcaacgtcccggtgttctggccgattctggtgatgtacttcatcatgctcttctgtatcacgatgaagaggcaaatcaagcacatgattaagtaccggtacatcccgttcacacatgggaagagaaggtacagaggcaaggaggatgccggcaaggccttcgccagctagaagcgggactgaggctgcctcacgtgttgcaagaacagttttgagccattgttaacaatgccttttttcttcacataaagtagttgattacgagggagtcaaattttctttttaaaaaggagcttcaatgatttgtaactgaaatatcaggttctagaagaaactggcgcttaaaccaaatcgcatggatttctttttcagtgacgttcaagtgtttctcacggatggaattctagtcagctgcaggcgggaagccaggcgggtggagcccatgggagcaagggcgagtggccggtccccgctgtgccaggtgggcaggcaggagcaaggcctgcgagggaggaacgggccgctccccgccagccgccttccccagcagccgcaggtggtgccagccactccacagagcccgagggatgatctagcctgattcctgcgtgtccgaaagaacttaacgttttaaaggtgattgtcaagtaactgtgtggggttctaatgccagtttcctaattccatctcactggagatgtttaaagttggcctctatcctaatgactcaaaacttggttcttaactaccatgattgcttttgagggcccggaattataaatatatattatattttaattgtttga

SEQ ID NO: 355004 - DNA, 948 bp, Homo sapiens
ggcggcgccgcggaggacggagcggaagtgctcgctgcagcttcccggagccggagcgcagcgcctgcggccgcccgtgccccgccgtcctccttcccgcggccgtgagggagaccgcggctcggccgtagcggagctgcgagttacagaatgtctgaaggggacagtgtgggagaatccgtccatgggaaaccttcggtggtgtacagatttttcacaagacttggacagatttatcagtcctggctagacaagtccacaccctacacggctgtgcgatgggtcgtgacactgggcctgagctttgtctacatgattcgagtttacctgctgcagggttggtacattgtgacctatgccttggggatctaccatctaaatcttttcatagcttttctttctcccaaagtggatccttccttaatggaagactcagatgacggtccttcgctacccaccaaacagaacgaggaattccgccccttcattcgaaggctcccagagtttaaattttgggatgcttctgtttgcggggacggtcggtgcagctgcaaggctggaggcggccggcaggtgcccggtgctggctgcagatgcggcgctaaccttctctccccacttgaaggcatgcggctaccaagggcatccttgtggctatggtctgtactttcttcgacgctttcaacgtcccggtgttctggccgattctggtgatgtacttcatcatgctcttctgtatcacgatgaagaggcaaatcaagcacatgattaagtaccggtacatcccgttcacacatgggaagagaaggtacagaggcaaggaggatgccggcaaggccttcgccagctagaagcgggactgaggctgcctcacgtgttgcaagaacagttttgagccattgttaacaatgccttttttcttcacataaagtagttgattacgaggga

SEQ ID NO: 355005 - DNA, 539 bp, Homo sapiens
caaaattacggctaggtacgaggctggggttacggagccggagcgcagcgcctgcggccgcccgtgccccgccgtcctccttcccgcggccgtgagggagaccgcggctcggccgtagcggagctgcgagagcctcattttacagatgaggaaactgaggctggctgcgtgctcagagggtttgctgaaggcctcacagccgcttagcacagttacagaatgtctgaaggggacagtgtgggagaatccgtccatgggaaaccttcggtggtgtacagatttttcacaagacttggacagatttatcagtcctggctagacaagtccacaccctacacggctgtgcgatgggtcgtgacactgggcctgagctttgtctacatgattcgagtttacctgctgcagggttggtacattgtgacctatgccttggggatctaccatctaaatcttttcatagcttttctttctcccaaagtggatccttccttaatggaagactcagatgacggtccttccgggatcctctagaccaccaa

SEQ ID NO: 355006 - DNA, 552 bp, Homo sapiens
caaaattacggctaggtacgaggctggggttacggagccggagcgcagcgcctgcggccgcccgtgccccgccgtcctccttcccgcggccgtgagggagaccgcggctcggccgtagcggagctgcgaggtgccaggaagggctgcgtggcgcgggaacggccgggcagcgccgcctccgcttcttccgggctgtcaaggccgcgggcgggcggggccgcgctgagggccgggcggggagggccgtcggggcccgggtggccgcggggaccgtgttcccgacccgcggccctgaggggtacgggtcgcgcctcggggtcgggcccgggacggggtgctggggggtgcggcggagccctggggcctgcgagggtcgggggagcgggagaggggccgggcgggggctgcagccctcgagccacccgggccgcatctcgtccgcatcccctgcttggcatctgggggaagcgggcagtcgcggcccccacagcgctgcgagttgggctgtattccagagtaatgtgccctgtccccatcctgcgtccaggtcag

SEQ ID NO: 355007 - DNA, 2764 bp, Homo sapiens
ggccccactgccccgcctcctccttttcctagtcagcgtgttgtcacttccggagaaaacagttcccctccgggccggacagtggtagcggcccgacccgttctagagacggagcgggtgaaaccatttttcagaagggggttattccactggaacctcgagggtggatcggagtcacgtggcgcagacgctgtaggtggatccggctacggagagtgcgcaggcgcagtgttcgccctctcgccacgaagtaaacaagtgggagggtctgagagctgcaccacctggggcaagcacgccttgaaacgcccacttccttctccatattgtatactggaattgaagccaaggaggtaccattttgctcgagggcatggcctaagccggtcagctaaggccatgttaatacggggctgtcccatctctctgcggggcgcgacagctggaagagccgaacggataagagaagaggaggtgagaggagctgtacaccacaagaggcactgagggactcaggataacgggatgaagccgtcagtgcccccagaaacgaagcggccccggacgaatttctgagtcaccgtcgcgagaaagcgggctgagccgccattttgaagcctggcaaaccgaagcaagaaatgctgccgtgttggatctttgccagccttcgtgccgaatgggagcaggttggagggagggagagccaatatacactatgggctgattaagcccggttggctgccatgttgttaacgagcaccgatttcctctacttttgtcgaagaagtttattgtgggtcagggacgtcaggtcgcttgccttcgtttactgtggtcatgattgagcatatgaggacggccattattgttgggggcaaatggaaatgctctaggcggggccatttttcttaggggcaagctgtcgtcacccttgtcaactggttcggatgaagcccctgtggccgccatcttgatctcgggcggccccgataagggaggcggagtgtgcggagaggaggcggggcaactgcgcggacgtgacgcaaggcgccgccatgtcttttgagggcggtgacggcgccgggccggccatgctggctacgggcacggcgcggatggcgtcggggcgccccgaggagctgtgggaggccgtggtgggggccgctgagcgcttccgggcccggactggcacggagctggtgctgctgaccgcggccccgccgccaccaccccgcccgggcccctgtgcctatgctgcccatggtcgaggagccctggcggaggcagcgcgccgttgcctccacgacatcgcactggcccacagggctgccactgctgctcggcctcctgcgcccccaccagcaccacagccacccagtcccacacccagcccaccccggcctaccctggccagagaggacaacgaggaggacgaggatgagcccacagagacagagacctccggggagcagctgggcattagtgataatggagggctctttgtgatggatgaggacgccaccctccaggaccttccccccttctgtgagtcagaccccgagagtacagatgatggcagcctgagcgaggagacccccgccggcccccccacctgctcagtgcccccagcctcagccctacccacacagcagtacgccaagtccctgcctgtgtctgtgcccgtctggggcttcaaggagaagaggacagaggcgcggtcatcagatgaggagaatgggccgccctcttcgcccgacctggaccgcatcgcggcgagcatgcgcgcgctggtgctgcgagaggccgaggacacccaggtcttcggggacctgccacggccgcggcttaacaccagcgacttccagaagctgaagcggaaatattgaagtccagggagggagcgccccgggccgcgtccgccccgtcccacactacgcccccgccccactcccggggcctgctaatctgaggccgatccgggaccggcctccttgcgtctcccattcccaagattgtcccgcctctgccaatccccgccgtccttccagcccacgacctgccgcgccgaggagcggcatctgtcccgtttcccgattgggtctgtcgtctctctccgcctagcgacagattccttctattaagggattggctcgctgagttctaagctctaaatgggtcaactcctttgttttccgcctagcgacaagggatttgctcgcacggcattggctccatcccctagtcgctggacagctctttttttgattggctcaaatcctgtaaagggcttgaccagtctctacatagtcaccgtccgcttttcctgagttctccctcccaattggctccagcttcctgggggcgtggccaagccctcctcttcccagaattggcccggggccttcaatttacgttctttacactacggggactggggtcgtctttgcccacgtcccgacaacttgttccctgaccccctcagggatggccccaaactgtccctgcctctggcaccccctttcattggttccatccatccccacaacagcctgccaatcgaagcccgtccctgcatccaggatggtaccagctcccgcccctcgccccccacctccacaggtgccttaaagggccctcgtccacccaaggtggggggcaggggccctcactctccggccctggtgtgggggagagagtgaggggttgggggatcggcagttgggaggggcgctctgagattaaagagttttacctctgagataaa

SEQ ID NO: 355008 - DNA, 2858 bp, Homo sapiens
ggccccactgccccgcctcctccttttcctagtcagcgtgttgtcacttccggagaaaacagttcccctccgggccggacagtggtagcggcccgacccgttctagagacggagcgggtgaaaccatttttcagaagggggttattccactggaacctcgagggtggatcggagtcacgtggcgcagacgctgtaggtggatccggctacggagagtgcgcaggcgcagtgttcgccctctcgccacgaagtaaacaagtgggagggtctgagagctgcaccacctggggcaagcacgccttgaaacgcccacttccttctccatattgtatactggaattgaagccaaggaggtaccattttgctcgagggcatggcctaagccggtcagctaaggccatgttaatacggggctgtcccatctctctgcggggcgcgacagctggaagagccgaacggataagagaagaggaggtgagaggagctgtacaccacaagaggcactgagggactcaggataacgggatgaagccgtcagtgcccccagaaacgaagcggccccggacgaatttctgagtcaccgtcgcgagaaagcgggctgagccgccattttgaagcctggcaaaccgaagcaagaaatgctgccgtgttggatctttgccagccttcgtgccgaatgggagcaggttggagggagggagagccaatatacactatgggctgattaagcccggttggctgccatgttgttaacgagcaccgatttcctctacttttgtcgaagaagtttattgtgggtcagggacgtcaggtcgcttgccttcgtttactgtggtcatgattgagcatatgaggacggccattattgttgggggcaaatggaaatgctctaggcggggccatttttcttaggggcaagctgtcgtcacccttgtcaactggttcggatgaagcccctgtggccgccatcttgatctcgggcggccccgataagggaggcggagtgtgcggagaggaggcggggcaactgcgcggacgtgacgcaaggcgccgccatgtcttttgagggcggtgacggcgccgggccggccatgctggctacgggcacgtgagtggaggcggcgttgttaaccgcggtgtggggaggatttggccgtcctgaggcagcggggcgctgggagggcgagcggctcacgggagggggcgcggatggcgtcggggcgccccgaggagctgtgggaggccgtggtgggggccgctgagcgcttccgggcccggactggcacggagctggtgctgctgaccgcggccccgccgccaccaccccgcccgggcccctgtgcctatgctgcccatggtcgaggagccctggcggaggcagcgcgccgttgcctccacgacatcgcactggcccacagggctgccactgctgctcggcctcctgcgcccccaccagcaccacagccacccagtcccacacccagcccaccccggcctaccctggccagagaggacaacgaggaggacgaggatgagcccacagagacagagacctccggggagcagctgggcattagtgataatggagggctctttgtgatggatgaggacgccaccctccaggaccttccccccttctgtgagtcagaccccgagagtacagatgatggcagcctgagcgaggagacccccgccggcccccccacctgctcagtgcccccagcctcagccctacccacacagcagtacgccaagtccctgcctgtgtctgtgcccgtctggggcttcaaggagaagaggacagaggcgcggtcatcagatgaggagaatgggccgccctcttcgcccgacctggaccgcatcgcggcgagcatgcgcgcgctggtgctgcgagaggccgaggacacccaggtcttcggggacctgccacggccgcggcttaacaccagcgacttccagaagctgaagcggaaatattgaagtccagggagggagcgccccgggccgcgtccgccccgtcccacactacgcccccgccccactcccggggcctgctaatctgaggccgatccgggaccggcctccttgcgtctcccattcccaagattgtcccgcctctgccaatccccgccgtccttccagcccacgacctgccgcgccgaggagcggcatctgtcccgtttcccgattgggtctgtcgtctctctccgcctagcgacagattccttctattaagggattggctcgctgagttctaagctctaaatgggtcaactcctttgttttccgcctagcgacaagggatttgctcgcacggcattggctccatcccctagtcgctggacagctctttttttgattggctcaaatcctgtaaagggcttgaccagtctctacatagtcaccgtccgcttttcctgagttctccctcccaattggctccagcttcctgggggcgtggccaagccctcctcttcccagaattggcccggggccttcaatttacgttctttacactacggggactggggtcgtctttgcccacgtcccgacaacttgttccctgaccccctcagggatggccccaaactgtccctgcctctggcaccccctttcattggttccatccatccccacaacagcctgccaatcgaagcccgtccctgcatccaggatggtaccagctcccgcccctcgccccccacctccacaggtgccttaaagggccctcgtccacccaaggtggggggcaggggccctcactctccggccctggtgtgggggagagagtgaggggttgggggatcggcagttgggaggggcgctctgagattaaagagttttacctctgagataaa

SEQ ID NO: 355009 - DNA, 2360 bp, Homo sapiens
ggccccactgccccgcctcctccttttcctagtcagcgtgttgtcacttccggagaaaacagttcccctccgggccggacagtggtagcggcccgacccgttctagagacggagcgggtgaaaccatttttcagaagggggttattccactggaacctcgagggtggatcggagtcacgtggcgcagacgctgtaggtggatccggctacggagagtgcgcaggcgcagtgttcgccctctcgccacgaagtaaacaagtgggagggtctgagagctgcaccacctggggcaagcacgccttgaaacgcccacttccttctccatattgtatactggaattgaagccaaggaggtaccattttgctcgagggcatggcctaagccggtcagctaaggccatgttaatacggggctgtcccatctctctgcggggcgcgacagctggaagagccgaacggataagagaagaggaggtgagaggagctgtacaccacaagaggcactgagggactcaggataacgggatgaagccgtcagtgcccccagaaacgaagcggccccggacgaatttctgagtcaccgtcgcgagaaagcgggctgagccgccattttgaagcctggcaaaccgaagcaagaaatgctgccgtgttggatctttgccagccttcgtgccgaatgggagcaggttggagggagggagagcggcgcggatggcgtcggggcgccccgaggagctgtgggaggccgtggtgggggccgctgagcgcttccgggcccggactggcacggagctggtgctgctgaccgcggccccgccgccaccaccccgcccgggcccctgtgcctatgctgcccatggtcgaggagccctggcggaggcagcgcgccgttgcctccacgacatcgcactggcccacagggctgccactgctgctcggcctcctgcgcccccaccagcaccacagccacccagtcccacacccagcccaccccggcctaccctggccagagaggacaacgaggaggacgaggatgagcccacagagacagagacctccggggagcagctgggcattagtgataatggagggctctttgtgatggatgaggacgccaccctccaggaccttccccccttctgtgagtcagaccccgagagtacagatgatggcagcctgagcgaggagacccccgccggcccccccacctgctcagtgcccccagcctcagccctacccacacagcagtacgccaagtccctgcctgtgtctgtgcccgtctggggcttcaaggagaagaggacagaggcgcggtcatcagatgaggagaatgggccgccctcttcgcccgacctggaccgcatcgcggcgagcatgcgcgcgctggtgctgcgagaggccgaggacacccaggtcttcggggacctgccacggccgcggcttaacaccagcgacttccagaagctgaagcggaaatattgaagtccagggagggagcgccccgggccgcgtccgccccgtcccacactacgcccccgccccactcccggggcctgctaatctgaggccgatccgggaccggcctccttgcgtctcccattcccaagattgtcccgcctctgccaatccccgccgtccttccagcccacgacctgccgcgccgaggagcggcatctgtcccgtttcccgattgggtctgtcgtctctctccgcctagcgacagattccttctattaagggattggctcgctgagttctaagctctaaatgggtcaactcctttgttttccgcctagcgacaagggatttgctcgcacggcattggctccatcccctagtcgctggacagctctttttttgattggctcaaatcctgtaaagggcttgaccagtctctacatagtcaccgtccgcttttcctgagttctccctcccaattggctccagcttcctgggggcgtggccaagccctcctcttcccagaattggcccggggccttcaatttacgttctttacactacggggactggggtcgtctttgcccacgtcccgacaacttgttccctgaccccctcagggatggccccaaactgtccctgcctctggcaccccctttcattggttccatccatccccacaacagcctgccaatcgaagcccgtccctgcatccaggatggtaccagctcccgcccctcgccccccacctccacaggtgccttaaagggccctcgtccacccaaggtggggggcaggggccctcactctccggccctggtgtgggggagagagtgaggggttgggggatcggcagttgggaggggcgctctgagattaaagagttttacctctgagataaa

SEQ ID NO: 355010 - DNA, 1989 bp, Homo sapiens
ctgcaccataagccgcggctctcacgcgccggcgcttggagaagggcaaagcgggtggagcctaccttcttggagaagaggatttgggtggaatctccagcctcctctacaggagcccagtgcaggaggacgtcattgtcctaggccttcttcaggtcccactgctgaccgccagaccaaactcctacagctgccgcctgcatcccagaccgcctgcatcccgctcggagcgggtccgagccctgctccctcccagcgcaccttttccacgacacggatgacaccagcgatgagagagtctcggtcctgatacttcttagcgctggtgtgcagggcgcggatggcgtcggggcgccccgaggagctgtgggaggccgtggtgggggccgctgagcgcttccgggcccggactggcacggagctggtgctgctgaccgcggccccgccgccaccaccccgcccgggcccctgtgcctatgctgcccatggtcgaggagccctggcggaggcagcgcgccgttgcctccacgacatcgcactggcccacagggctgccactgctgctcggcctcctgcgcccccaccagcaccacagccacccagtcccacacccagcccaccccggcctaccctggccagagaggacaacgaggaggacgaggatgagcccacagagacagagacctccggggagcagctgggcattagtgataatggagggctctttgtgatggatgaggacgccaccctccaggaccttccccccttctgtgagtcagaccccgagagtacagatgatggcagcctgagcgaggagacccccgccggcccccccacctgctcagtgcccccagcctcagccctacccacacagcagtacgccaagtccctgcctgtgtctgtgcccgtctggggcttcaaggagaagaggacagaggcgcggtcatcagatgaggagaatgggccgccctcttcgcccgacctggaccgcatcgcggcgagcatgcgcgcgctggtgctgcgagaggccgaggacacccaggtcttcggggacctgccacggccgcggcttaacaccagcgacttccagaagctgaagcggaaatattgaagtccagggagggagcgccccgggccgcgtccgccccgtcccacactacgcccccgccccactcccggggcctgctaatctgaggccgatccgggaccggcctccttgcgtctcccattcccaagattgtcccgcctctgccaatccccgccgtccttccagcccacgacctgccgcgccgaggagcggcatctgtcccgtttcccgattgggtctgtcgtctctctccgcctagcgacagattccttctattaagggattggctcgctgagttctaagctctaaatgggtcaactcctttgttttccgcctagcgacaagggatttgctcgcacggcattggctccatcccctagtcgctggacagctctttttttgattggctcaaatcctgtaaagggcttgaccagtctctacatagtcaccgtccgcttttcctgagttctccctcccaattggctccagcttcctgggggcgtggccaagccctcctcttcccagaattggcccggggccttcaatttacgttctttacactacggggactggggtcgtctttgcccacgtcccgacaacttgttccctgaccccctcagggatggccccaaactgtccctgcctctggcaccccctttcattggttccatccatccccacaacagcctgccaatcgaagcccgtccctgcatccaggatggtaccagctcccgcccctcgccccccacctccacaggtgccttaaagggccctcgtccacccaaggtggggggcaggggccctcactctccggccctggtgtgggggagagagtgaggggttgggggatcggcagttgggaggggcgctctgagattaaagagttttacctctgagataaa

SEQ ID NO: 355011 - DNA, 1653 bp, Homo sapiens
acaggaaaagacaatagttcaggtagcgaggctgcgtgtttatccatctctctgcggggcgcgatagctggaagagccgaacggataagagaagaggagggcgcggatggcgtctggggcgccccgtaggacctgtgcctatgctgcccatggtcgaggagccctggcggaggcagcgcgccgttgcctccacgacatcgcactggcccacagggctgccactgctgctcggcctcctgcgcccccaccagcaccacagccacccagtcccacacccagcccaccccggcctaccctggccagagaggacaacgaggaggacgaggatgagcccacagagacagagacctccggggagcagctgggcattagtgataatggagggctctttgtgatggatgaggacgccaccctccaggaccttccccccttctgtgagtcagaccccgagagtacagatgatggcagcctgagcgaggagacccccgccggcccccccacctgctcagtgcccccagcctcagccctacccacacagcagtacgccaagtccctgcctgtgtctgtgcccgtctggggcttcaaggagaagaggacagaggcgcggtcatcagatgaggagaatgggccgccctcttcgcccgacctggaccgcatcgcggcgagcatgcgcgcgctggtgctgcgagaggccgaggacacccaggtcttcggggacctgccacggccgcggcttaacaccagcgacttccagaagctgaagcggaaatattgaagtccagggagggagcgccccgggccgcgtccgccccgtcccacactacgcccccgccccactcccggggcctgctaatctgaggccgatccgggaccggcctccttgcgtctcccattcccaagattgtcccgcctctgccaatccccgccgtccttccagcccacgacctgccgcgccgaggagcggcatctgtcccgtttcccgattgggtctgtcgtctctctccgcctagcgacagattccttctattaagggattggctcgctgagttctaagctctaaatgggtcaactcctttgttttccgcctagcgacaagggatttgctcgcacggcattggctccatcccctagtcgctggacagctctttttttgattggctcaaatcctgtaaagggcttgaccagtctctacatagtcaccgtccgcttttcctgagttctccctcccaattggctccagcttcctgggggcgtggccaagccctcctcttcccagaattggcccggggccttcaatttacgttctttacactacggggactggggtcgtctttgcccacgtcccgacaacttgttccctgaccccctcagggatggccccaaactgtccctgcctctggcaccccctttcattggttccatccatccccacaacagcctgccaatcgaagcccgtccctgcatccaggatggtaccagctcccgcccctcgccccccacctccacaggtgccttaaagggccctcgtccacccaaggtggggggcaggggccctcactctccggccctggtgtgggggagagagtgaggggttgggggatcggcagttgggaggggcgctctgagattaaagagttttacctctgagataaa

SEQ ID NO: 355012 - DNA, 2692 bp, Homo sapiens
  misc_feature (2655)..(2655): n is a, c, g, or t
  misc_feature (2687)..(2687): n is a, c, g, or t
ggccccactgccccgcctcctccttttcctagtcagcgtgttgtcacttccggagaaaacagttcccctccgggccggacagtggtagcggcccgacccgttctagagacggagcgggtgaaaccatttttcagaagggggttattccactggaacctcgagggtggatcggagtcacgtggcgcagacgctgtaggtggatccggctacggagagtgcgcaggcgcagtgttcgccctctcgccacgaagtaaacaagtgggagggtctgagagctgcaccacctggggcaagcacgccttgaaacgcccacttccttctccatattgtatactggaattgaagccaaggaggtaccattttgctcgagggcatggcctaagccggtcagctaaggccatgttaatacggggctgtcccatctctctgcggggcgcgacagctggaagagccgaacggataagagaagaggaggtgagaggagctgtacaccacaagaggcactgagggactcaggataacgggatgaagccgtcagtgcccccagaaacgaagcggccccggacgaatttctgagtcaccgtcgcgagaaagcgggctgagccgccattttgaagcctggcaaaccgaagcaagaaatgctgccgtgttggatctttgccagccttcgtgccgaatgggagcaggttggagggagggagagccaatatacactatgggctgattaagcccggttggctgccatgttgttaacgagcaccgatttcctctacttttgtcgaagaagtttattgtgggtcagggacgtcaggtcgcttgccttcgtttactgtggtcatgattgagcatatgaggacggccattattgttgggggcaaatggaaatgctctaggcggggccatttttcttaggggcaagctgtcgtcacccttgtcaactggttcggatgaagcccctgtggccgccatcttgatctcgggcggccccgataagggaggcggagtgtgcggagaggaggcggggcaactgcgcggacgtgacgcaaggcgccgccatgtcttttgagggcggtgacggcgccgggccggccatgctggctacgggcacggcgcggatggcgtcggggcgccccgaggagctgtgggaggccgtggtgggggccgctgagcgcttccgggcccggactggcacggagctggtgctgctgaccgcggccccgccgccaccaccccgcccgggcccctgtgcctatgctgcccatggtcgaggagccctggcggaggcagcgcgccgttgcctccacgacatcgcactggcccacagggctgccactgctgctcggcctcctgcgcccccaccagcaccacagccacccagtcccacacccagcccaccccggcctaccctggccagagaggacaacgaggaggacgaggatgagcccacagagacagagacctccggggagcagctgggcattagtgataatggagggctctttgtgatggatgaggacgccaccctccaggaccttccccccttctgtgagtcagaccccgagagtacagatgatggcagcctgagcgaggagacccccgccggcccccccacctgctcagtgcccccagcctcagccctacccacacagcagtacgccaagtccctgcctgtgtctgtgcccgtctggggcttcaaggagaagaggacagaggcgcggtcatcagatgaggagaatgggccgccctcttcgcccgacctggaccgcatcgcggcgagcatgcgcgcgctggtgctgcgagaggccgaggacacccaggtcttcggggacctgccacggccgcggcttaacaccagcgacttccagaagctgaagcggaaatattgaagtccagggagggagcgccccgggccgcgtccgccccgtcccacactacgcccccgccccactcccggggcctgctaatctgaggccgatccgggaccggcctccttgcgtctcccattcccaagattgtcccgcctctgccaatccccgccgtccttccagcccacgacctgccgcgccgaggagcggcatctgtcccgtttcccgattgggtctgtcgtctctctccgcctagcgacagattccttctattaagggattggctcgctgagttctaagctctaaatgggtcaactcctttgttttccgcctagcgacaagggatttgctcgcacggcattggctccatcccctagtcgctggacagctctttttttgattggctcaaatcctgtaaagggcttgaccagtctctacatagtcaccgtccgcttttcctgagttctccctcccaattggctccagcttcctgggggcgtggccaagccctcctcttcccagaattggcccggggccttcaatttacgttctttacactacggggactggggtcgtctttgcccacgtcccgacaacttgttccctgaccccctcagggatggccccaaactgtccctgcctctggcaccccctttcattggttccatccatccccacaacagcctgccaatcgaagcccgtccctgcatccaggatggtaccagctcccgcccctcgccccactcaaagtgcttaaaggccttgtcaccaagtgggggaaggcctaatntcggcctgttggggaaaattaggttgggatgnattga

SEQ ID NO: 355013 - DNA, 2016 bp, Homo sapiens
ggccccactgccccgcctcctccttttcctagtcagcgtgttgtcacttccggagaaaacagttcccctccgggccggacagtggtagcggcccgacccgttctagagacggagcgggtgaaaccatttttcagaagggggttattccactggaacctcgagggtggatcggagtcacgtggcgcagacgctgtaggtggatccggctacggagagtgcgcaggcgcagtgttcgccctctcgccacgaagtaaacaagtgggagggtctgagagctgcaccacctggggcaagcacgccttgaaacgcccacttccttctccatattgtatactggaattgaagccaaggaggtaccattttgctcgagggcatggcctaagccggtcagctaaggccatgttaatacggggctgtcccatctctctgcggggcgcgacagctggaagagccgaacggataagagaagaggaggtgagaggagctgtacaccacaagaggcactgagggactcaggataacgggatgaagccgtcagtgcccccagaaacgaagcggccccggacgaatttctgagtcaccgtcgcgagaaagcgggctgagccgccattttgaagcctggcaaaccgaagcaagaaatgctgccgtgttggatctttgccagccttcgtgccgaatgggagcaggttggagggagggagagccaatatacactatgggctgattaagcccggttggctgccatgttgttaacgagcaccgatttcctctacttttgtcgaagaagtttattgtgggtcagggacgtcaggtcgcttgccttcgtttactgtggtcatgattgagcatatgaggacggccattattgttgggggcaaatggaaatgctctaggcggggccatttttcttaggggcaagctgtcgtcacccttgtcaactggttcggatgaagcccctgtggccgccatcttgatctcgggcggccccgataagggaggcggagtgtgcggagaggaggcggggcaactgcgcggacgtgacgcaaggcgccgccatgtcttttgagggcggtgacggcgccgggccggccatgctggctacgggcacggcgcggatggcgtcggggcgccccgaggagctgtgggaggccgtggtgggggccgctgagcgcttccgggcccggactggcacggagctggtgctgctgaccgcggccccgccgccaccaccccgcccgggcccctgtgcctatgctgcccatggtcgaggagccctggcggaggcagcgcgccgttgcctccacgacatcgcactggcccacagggctgccactgctgctcggcctcctgcgcccccaccagcaccacagccacccagtcccacacccagcccaccccggcctaccctggccagagaggacaacgaggaggacgaggatgagcccacagagacagagacctccggggagcagctgggcattagtgataatggagggctctttgtgatggatgaggacgccaccctccaggaccttccccccttctgtgagtcagaccccgagagtacagatgatggcagcctgagcgaggagacccccgccggcccccccacctgctcagtgcccccagcctcagccctacccacacagcagtacgccaagtccctgcctgtgtctgtgcccgtctggggcttcaaggagaagaggacagaggcgcggtcatcagatgaggagaatgggccggtgaggggcaaatgtggggaggtagggagggcagctggaagggctctgagccgcctcctccaggaagccctccagcatggatgctgctttccacccataagctaactgaatcctcccctcaacctcaagaggcgagttcttggacacgagccttgcagttttaacaattgcagccttaccatgtgtcctagtgccttatagagaaggcctctcctttccaggagcgtctctatttatagaacacctgctctgggcaaggcacaggtgttttggc

SEQ ID NO: 355014 - DNA, 1660 bp, Homo sapiens
  misc_feature (30)..(30): n is a, c, g, or t
  misc_feature (37)..(37): n is a, c, g, or t
  misc_feature (41)..(41): n is a, c, g, or t
aacaccatcacacagccccaacacctacgnctaggtngagnctgggtttgtcccatctctctgcggggcgcgacagctggaagagccgaacggataagagaagaggagggcgcggatggcgtcggggcgccccgaggacctgtgcctatgctgcccatggtcgaggagccctggcggaggcagcgcgccgttgcctccacgacatcgcactggcccacagggctgccactgctgctcggcctcctgcgcccccaccagcaccacagccacccagtcccacacccagcccaccccggcctaccctggccagagaggacaacgaggaggacgaggatgagcccacagagacagagacctccggggagcagctgggcattagtgataatggagggctctttgtgatggatgaggacgccaccctccaggaccttccccccttctgtgagtcagaccccgagagtacagatgatggcagcctgagcgaggagacccccgccggcccccccacctgctcagtgcccccagcctcagccctacccacacagcagtacgccaagtccctgcctgtgtctgtgcccgtctggggcttcaaggagaagaggacagaggcgcggtcatcagatgaggagaatgggccgccctcttcgcccgacctggaccgcatcgcggcgagcatgcgcgcgctggtgctgcgagaggccgaggacacccaggtcttcggggacctgccacggccgcggcttaacaccagcgacttccagaagctgaagcggaaatattgaagtccagggagggagcgccccgggccgcgtccgccccgtcccacactacgcccccgccccactcccggggcctgctaatctgaggccgatccgggaccggcctccttgcgtctcccattcccaagattgtcccgcctctgccaatccccgccgtccttccagcccacgacctgccgcgccgaggagcggcatctgtcccgtttcccgattgggtctgtcgtctctctccgcctagcgacagattccttctattaagggattggctcgctgagttctaagctctaaatgggtcaactcctttgttttccgcctagcgacaagggatttgctcgcacggcattggctccatcccctagtcgctggacagctctttttttgattggctcaaatcctgtaaagggcttgaccagtctctacatagtcaccgtccgcttttcctgagttctccctcccaattggctccagcttcctgggggcgtggccaagccctcctcttcccagaattggcccggggccttcaatttacgttctttacactacggggactggggtcgtctttgcccacgtcccgacaacttgttccctgaccccctcagggatggccccaaactgtccctgcctctggcaccccctttcattggttccatccatccccacaacagcctgccaatcgaagcccgtccctgcatccaggatggtaccagctcccgcccctcgccccccacctccacaggtgccttaaagggccctcgtccacccaaggtggggggcaggggccctcactctccggccctggtgtgggggagagagtgaggggttgggggatcggcagttgggaggggcgctctgagattaaagagttttacctctgagataaa

SEQ ID NO: 355015 - DNA, 2130 bp, Homo sapiens
ggccccactgccccgcctcctccttttcctagtcagcgtgttgtcacttccggagaaaacagttcccctccgggccggacagtggtagcggcccgacccgttctagagacggagcgggtgaaaccatttttcagaagggggttattccactggaacctcgagggtggatcggagtcacgtggcgcagacgctgtaggtggatccggctacggagagtgcgcaggcgcagtgttcgccctctcgccacgaagtaaacaagtgggagggtctgagagctgcaccacctggggcaagcacgccttgaaacgcccacttccttctccatattgtatactggaattgaagccaaggaggtaccattttgctcgagggcatggcctaagccggtcagctaaggccatgttaatacggggctgtcccatctctctgcggggcgcgacagctggaagagccgaacggataagagaagaggagggcgcggatggcgtcggggcgccccgaggagctgtgggaggccgtggtgggggccgctgagcgcttccgggcccggactggcacggagctggtgctgctgaccgcggccccgccgccaccaccccgcccgggcccctgtgcctatgctgcccatggtcgaggagccctggcggaggcagcgcgccgttgcctccacgacatcgcactggcccacagggctgccactgctgctcggcctcctgcgcccccaccagcaccacagccacccagtcccacacccagcccaccccggcctaccctggccagagaggacaacgaggaggacgaggatgagcccacagagacagagacctccggggagcagctgggcattagtgataatggagggctctttgtgatggatgaggacgccaccctccaggaccttccccccttctgtgagtcagaccccgagagtacagatgatggcagcctgagcgaggagacccccgccggcccccccacctgctcagtgcccccagcctcagccctacccacacagcagtacgccaagtccctgcctgtgtctgtgcccgtctggggcttcaaggagaagaggacagaggcgcggtcatcagatgaggagaatgggccgccctcttcgcccgacctggaccgcatcgcggcgagcatgcgcgcgctggtgctgcgagaggccgaggacacccaggtcttcggggacctgccacggccgcggcttaacaccagcgacttccagaagctgaagcggaaatattgaagtccagggagggagcgccccgggccgcgtccgccccgtcccacactacgcccccgccccactcccggggcctgctaatctgaggccgatccgggaccggcctccttgcgtctcccattcccaagattgtcccgcctctgccaatccccgccgtccttccagcccacgacctgccgcgccgaggagcggcatctgtcccgtttcccgattgggtctgtcgtctctctccgcctagcgacagattccttctattaagggattggctcgctgagttctaagctctaaatgggtcaactcctttgttttccgcctagcgacaagggatttgctcgcacggcattggctccatcccctagtcgctggacagctctttttttgattggctcaaatcctgtaaagggcttgaccagtctctacatagtcaccgtccgcttttcctgagttctccctcccaattggctccagcttcctgggggcgtggccaagccctcctcttcccagaattggcccggggccttcaatttacgttctttacactacggggactggggtcgtctttgcccacgtcccgacaacttgttccctgaccccctcagggatggccccaaactgtccctgcctctggcaccccctttcattggttccatccatccccacaacagcctgccaatcgaagcccgtccctgcatccaggatggtaccagctcccgcccctcgccccccacctccacaggtgccttaaagggccctcgtccacccaaggtggggggcaggggccctcactctccggccctggtgtgggggagagagtgaggggttgggggatcggcagttgggaggggcgctctgagattaaagagttttacctctgagataaa

SEQ ID NO: 355016 - DNA, 3273 bp, Homo sapiens
ggccccactgccccgcctcctccttttcctagtcagcgtgttgtcacttccggagaaaacagttcccctccgggccggacagtggtagcggcccgacccgttctagagacggagcgggtgaaaccatttttcagaagggggttattccactggaacctcgagggtggatcggagtcacgtggcgcagacgctgtaggtggatccggctacggagagtgcgcaggcgcagtgttcgccctctcgccacgaagtaaacaagtgggagggtctgagagctgcaccacctggggcaagcacgccttgaaacgcccacttccttctccatattgtatactggaattgaagccaaggaggtaccattttgctcgagggcatggcctaagccggtcagctaaggccatgttaatacggggctgtcccatctctctgcggggcgcgacagctggaagagccgaacggataagagaagaggaggtgagaggagctgtacaccacaagaggcactgagggactcaggataacgggatgaagccgtcagtgcccccagaaacgaagcggccccggacgaatttctgagtcaccgtcgcgagaaagcgggctgagccgccattttgaagcctggcaaaccgaagcaagaaatgctgccgtgttggatctttgccagccttcgtgccgaatgggagcaggttggagggagggagagccaatatacactatgggctgattaagcccggttggctgccatgttgttaacgagcaccgatttcctctacttttgtcgaagaagtttattgtgggtcagggacgtcaggtcgcttgccttcgtttactgtggtcatgattgagcatatgaggacggccattattgttgggggcaaatggaaatgctctaggcggggccatttttcttaggggcaagctgtcgtcacccttgtcaactggttcggatgaagcccctgtggccgccatcttgatctcgggcggccccgataagggaggcggagtgtgcggagaggaggcggggcaactgcgcggacgtgacgcaaggcgccgccatgtcttttgagggcggtgacggcgccgggccggccatgctggctacgggcacggcgcggatggcgtcggggcgccccgaggagctgtgggaggccgtggtgggggccgctgagcgcttccgggcccggactggcacggagctggtgctgctgaccgcggccccgccgccaccaccccgcccgggcccctgtgcctatgctgcccatggtcgaggagccctggcggaggcagcgcgccgttgcctccacgacatcgcactggcccacagggctgccactgctgctcggcctcctgcgcccccaccagcaccacagccacccagtcccacacccagcccaccccggcctaccctggccagagaggacaacgaggaggacgaggatgagcccacagagacagagacctccggggagcagctgggcattagtgataatggagggctctttgtgatggatgaggacgccaccctccaggaccttccccccttctgtgagtcagaccccgagagtacagatgatggcagcctgagcgaggagacccccgccggcccccccacctgctcagtgcccccagcctcagccctacccacacagcagtacgccaagtccctgcctgtgtctgtgcccgtctggggcttcaaggagaagaggacagaggcgcggtcatcagatgaggagaatgggccgccctcttcgcccgacctggaccgcatcgcggcgagcatgcgcgcgctggtgctgcgagaggccgaggacacccaggtcttcggggacctgccacggccgcggcttaacaccagcgacttccagaagctgaagcggaaatattgaagtccagggagggagcgccccgggccgcgtccgccccgtcccacactacgcccccgccccactcccggggcctgctaatctgaggccgatccgggaccggcctccttgcgtctcccattcccaagattgtcccgcctctgccaatccccgccgtccttccagcccacgacctgccgcgccgaggagcggcatctgtcccgtttcccgattgggtctgtcgtctctctccgcctagcgacagattccttctattaagggattggctcgctgagttctaagctctaaatgggtcaactcctttgttttccgcctagcgacaagggatttgctcgcacggcattggctccatcccctagtcgctggacagctctttttttgattggctcaaatcctgtaaagggcttgaccagtctctacatagtcaccgtccgcttttcctgagttctccctcccaattggctccagcttcctgggggcgtggccaagccctcctcttcccagaattggcccggggccttcaatttacgttctttacactacggggactggggtcgtctttgcccacgtcccgacaacttgttccctgaccccctcagggatggccccaaactgtccctgcctctggcaccccctttcattggttccatccatccccacaacagcctgccaatcgaagcccgtccctgcatccaggatggtaccagctcccgcccctcgccccccacctccacaggtgccttaaagggccctcgtccacccaaggtggggggcaggggccctcactctccggccctggtgtgggggagagagtgaggggttgggggatcggcagttgggaggggcgctctgagattaaagagttttacctctgagataaaaaaaaaaaaaaaaaaaaaaaaaaaaaaaaaaaaaacaaaaaaaaaaggggggggcccccaaaaaatctcccccgggggggcccaaataagcccccccccggtgtttttgtgtgaaaagagggggcccccctatagatggagcgtgcattttattatacgcagaaagcaggaggagcccgggattttaaacaacgtttggagagtggtggaaaaccacgccgccatacagtggaaaaaatttgtggtaaaaggagaaacctaattgctggcggggggggggagcacaaatattggggtgggacaaaatatcctccacaacgagaagataatttaaaagccgctctctgaaagggggcaaaaatatataagaaattgttaaggcggttactaaaagtggggtgaaaaacaaacctggggtcgatttatgtttgtggtggggtgaagaaaaaatgtgtgttaataacgggtattggtgcattgatgaaaaaacaatttttttacccgggggg

SEQ ID NO: 355017 - DNA, 2765 bp, Homo sapiens
ggccccactgccccgcctcctccttttcctagtcagcgtgttgtcacttccggagaaaacagttcccctccgggccggacagtggtagcggcccgacccgttctagagacggagcgggtgaaaccatttttcagaagggggttattccactggaacctcgagggtggatcggagtcacgtggcgcagacgctgtaggtggatccggctacggagagtgcgcaggcgcagtgttcgccctctcgccacgaagtaaacaagtgggagggtctgagagctgcaccacctggggcaagcacgccttgaaacgcccacttccttctccatattgtatactggaattgaagccaaggaggtaccattttgctcgagggcatggcctaagccggtcagctaaggccatgttaatacggggctgtcccatctctctgcggggcgcgacagctggaagagccgaacggataagagaagaggaggtgagaggagctgtacaccacaagaggcactgagggactcaggataacgggatgaagccgtcagtgcccccagaaacgaagcggccccggacgaatttctgagtcaccgtcgcgagaaagcgggctgagccgccattttgaagcctggcaaaccgaagcaagaaatgctgccgtgttggatctttgccagccttcgtgccgaatgggagcaggttggagggagggagagccaatatacactatgggctgattaagcccggttggctgccatgttgttaacgagcaccgatttcctctacttttgtcgaagaagtttattgtgggtcagggacgtcaggtcgcttgccttcgtttactgtggtcatgattgagcatatgaggacggccattattgttgggggcaaatggaaatgctctaggcggggccatttttcttaggggcaagctgtcgtcacccttgtcaactggttcggatgaagcccctgtggccgccatcttgatctcgggcggccccgataagggaggcggagtgtgcggagaggaggcggggcaactgcgcggacgtgacgcaaggcgccgccatgtcttttgagggcggtgacggcgccgggccggccatgctggctacgggcacggcgcggatggcgtcggggcgccccgaggagctgtgggaggccgtggtgggggccgctgagcgcttccgggcccggactggcacggagctggtgctgctgaccgcggccccgccgccaccaccccgcccgggcccctgtgcctatgctgcccatggtcgaggagccctggcggaggcagcgcgccgttgcctccacgacatcgcactggcccacagggctgccactgctgctcggcctcctgcgcccccaccagcaccacagccacccagtcccacacccagcccaccccggcctaccctggccagagaggacaacgaggaggacgaggatgagcccacagagacagagacctccggggagcagctgggcattagtgataatggagggctctttgtgatggatgaggacgccaccctccaggaccttccccccttctgtgagtcagaccccgagagtacagatgatggcagcctgagcgaggagacccccgccggcccccccacctgctcagtgcccccagcctcagccctacccacacagcagtacgccaagtccctgcctgtgtctgtgcccgtctggggcttcaaggagaagaggacagaggcgcggtcatcagatgaggagaatgggccgccctcttcgcccgacctggaccgcatcgcggcgagcatgcgcgcgctggtgctgcgagaggccgaggacacccaggtcttcggggacctgccacggccgcggcttaacaccagcgacttccagaagctgaagcggaaatattgaagtccagggagggagcgccccgggccgcgtccgccccgtcccacactacgcccccgccccactcccggggcctgctaatctgaggccgatccgggaccggcctccttgcgtctcccattcccaagattgtcccgcctctgccaatccccgccgtccttccagcccacgacctgccgcgccgaggagcggcatctgtcccgtttcccgattgggtctgtcgtctctctccgcctagcgacagattccttctattaagggattggctcgctgagttctaagctctaaatgggtcaactcctttgttttccgcctagcgacaagggatttgctcgcacggcattggctccatcccctagtcgctggacagctctttttttgattggctcaaatcctgtaaagggcttgaccagtctctacatagtcaccgtccgcttttcctgagttctccctcccaattggctccagcttcctgggggcgtggccaagccctcctcttcccagaattggcccggggccttcaatttacgttctttacactacggggactggggtcgtctttgcccacgtcccgacaacttgttccctgaccccctcagggatggccccaaactgtccctgcctctggcaccccctttcattggttccatccatccccacaacagccaaccgtggaactagtatgccaaccgtggactagtagccaaccgtggactagtagccaaccgtggacatagtagccagaccgtggactagtagccaaccgtggactagtagccaaccgtggactagtactagccaaccgtggactagtactagccaaccgtggactagtactagccaaccgtggactagactagccaaccgtgagtagtacacaca

SEQ ID NO: 355018 - DNA, 379 bp, Homo sapiens
ggctctttgtgatggatgaggacgccaccctccaggaccttccccccttctgtgagtcagaccccgagagtacagatggtgagtgtcccaggctgttcccctcccgacctgggggcaggcacacggccgacacaaaggcagggacagaagctgaagtccaccctctctttcagatggcagcctgagcgaggagacccccgccggcccccccacctgctcagtgcccccagcctcagccctacccacacagcagtacgccaagtccctgcctgtgtctgtgcccgtctggggcttcaaggagaagaggacagaggcgcggtcatcagatgaggagaatgggccggtgaggggcaaatgtggggaggtagggagggcagct

SEQ ID NO: 355019 - DNA, 725 bp, Homo sapiens
aacatgtgagaagtacttagaatactgcttggcacatgtgcaccaagtcccctccaaggagagaccctgggtaatgatgatctttggtgtcaactaagattcttaagaactggatcctcgtgattcctatgtgacctgaaggacggatgaaattcaccaaagtctctaccacagacattctcagatggtcctaataaaaagaagaaacccaaaccagaactggtggtccacattgtgagagttgctgaatatcatcacaaagcaataattatccaacagcatgcttggtggctcaacattctgaaaggcaaatgtcaagggcacatagtctcaaccatgttgctgatgggagctcatgttttttgtgttgggtggtcttgtgttctgcctggtggtctttcttctgcctgctatgacagcactaatgatttcatgtacacagtattcacttgtctccctttagtagtgcatgacaagtcataaaagacagactgcccagaaatgacactgcagtattccagacattttctctcttggtggtgacagttccaaatcaagctggctcagtgcttttaagtcaaagcatttgtcgaagtggcagtttgaaacacagccttagatctggagaatcaaactaggctcttctcacctctcccatcattgctggtaataaatattcaactgctggaccacagctagcagattatgatagatgacacagaata

SEQ ID NO: 355020 - DNA, 618 bp, Homo sapiens
aacatgtgagaagtacttagaatactgcttggcacatgtgcaccaagtcccctccaaggagagaccctgggtaatgatgatctttggtgtcaactaagattcttaagaactggatcctcgtgattcctatgtgacctgaagatgtggccagtccaccaccaaagcaaggaaggagatatgagaaggaagtttcgtctcctacccagtgcatcattactggcaacagtgagaagcagagctgggaatttgagaagcaaaccaatgccttctgcttctcatcattattcctgacaacagacagaaaagaggcaaaccttcaccttctgtggtcgcttctgatactcaaccgggaacctcattctcagtagctacagatttccctaatcactcatcttaacttgacactgcgttctagtgcctttcgtgagaagggtcttgggaggccataaacctatgttgctgggaaaagaatgtactgcaataaagagagcaggagaggagctgcagatttccagctctcacagcttgttcacttgtggagactaggctgcaatgtgctcttgaaatcattggggtgggccttgtttctgaggaaataaagaggccccagaacctccc

SEQ ID NO: 355021 - DNA, 5426 bp, Homo sapiens
aaggaatcaagcccccaagatggcggcagcggcggaggagcggatggcagaggaaggaggcggcggccaaggcgacggcggttcctctttggcctccggctctacccagcgacagcctccaccgcccgcgccacagcacccgcagccggggtcccaggcgctcccagcccccgcgctggctccggaccagctgcctcaaaacaacacgcttgtggcgctgcccatcgtagccatcgagaacatcctcagctttatgtcctacgacgaaattagccagctccgcctggtttgtaaaagaatggacttggtctgccagagaatgttgaatcagggatttctgaaagtggagaggtaccataatctatgtcagaaacaagttaaagcacaactcccaaggagagagtcagaaaggagaaaccattcattagctcgtcatgcagacattcttgctgctgttgaaacaaggctgtcactattaaatatgactttcatgaaatatgtggattccaatctctgttgcttcatcccaggaaaggtgattgatgagatttatcgtgtgttgagatatgtcaattctaccagagcccctcaacgagctcatgaagtacttcaagaattaagggatatatcctctatggcaatggagtactttgatgaaaagattgttccaattttaaagaggaaattaccaggatcagatgtttctggaagactcatgggctctcctccagttccaggaccgtctgcagccctaacaacaatgcagctcttctccaagcaaaatccttcaagacaagaggttaccaaactccagcagcaggttaaaacaaatggtgctggcgtgactgttctcaggcgtgaaatttctgagcttcgcaccaaagtgcaagaacagcaaaaacagcttcaagaccaggaccagaaactgctagagcagacccagatcataggtgaacaaaatgcacggttggcagagctagaacgcaaactacgagaagtaatggaaagtgctgtaggaaattcctcagggtccgggcagaatgaggagtctcctcggaaacgaaaaaaggccacggaagccatagactctcttaggaaatctaaacgtcttcggaatagaaagtaaattggaatgtggttctagttccagaggaagacacagcttagtagcttaagcagttatgcatatcaggatactgtgagcaacatggtgtcccttaagcttctaggctttcagaacacaacttaaacttgaactcttatggttgggacattcttttcctgcttctcctgattgaactgatgcacagaatctttttactttgcaatagatttgtactaaccagacctgttctatcatgttttgaggagttaacttttttctgtgcagataatgttgaaagtaagttaatttgtttctgcatatatgcacatacatacgtaaggatcttaaacccagtcttgacagactagaagttaagtttaatacagaaaatgtcctgttcacttgaaagaaaagacctactttttaaatggacactatcttggttcttttttttttaagtcatctttttgttataagtgacctttgtctggaatgtctgaaaagtagttaatgctttttggtattgaagtaatgggtaactaaaatggacttccatagtattgactgtagaaggagcctctacaatattgactatatatttttataaactactggcaaggaacttacccagctgttatacatgttttcagttctctttgggggccatgtcctacatttgcatggatggatgcatgcattgcctagtcaactcacttaaaaagctcttgcactggtattgatcttgaacctctatacttctccactttttagagcggcgtcttagtttatttaaacgcttaacatcttccaccgcaacagcttgcctctagagggggaattgttcatccatttgtcctccagttttataggaacaagagactattaaagcccattgctttatctgctctctgtagggttcaggtacactggctaaggcagaaccccaaatttcaaggctctttctatcaatattggacctctgggagctaatactcctctttgctcaccaccatgtgatcattgatcagatgtggtgagtgagtaggggactcgacttgcgggatgcagttttgccattgcagcaaagttcattgaggaaaattgtaccatgaaaaagcattttgattatttcatttctggaggatgaccttgagggaagctttttaatattagtttcaagctttccttaccctacaactttaaacaaaagctttaattttgtttgcactcctattttgagcttgtaactggaaaagcatgtcttgcactgttcaacctcctgagtggtcgctttaacaacctccaaattgtgtacagtggttattttccccagttgtatagttttgagacattcaattatcactgtcttagttgtattttaatttactaaattatgtagctatttgactgttaagttcttttaaacaactgtttccttgggcttcagttatttaaagtaaatttaggtgtaatatagaaaactgtccctttccaggtgggagcttaacacctgtataaaacctaaggttttagtaagtaccttagttgaataaaagcacaaggttatcaccttttttatccgtccaccgtgacatggttatgcatcctttagattaacctcaccaaatgaagctttttctatccatttttaatattgtccttacataatattgtccttagattttgatcaattctatgtctgactttgaaattccatttacaatgtagtatgttttcaatgaaaaaccataaagtaacatccaagtgtttcatggtttgttgggaaggtaattttaaaataaaacaatttccaaaaaacatttgtcagccaaggtcatccataaaagtccccgtctggaactcattttctcagcacttctcatttttataatcatagtatttagccatattagcatatctttagaggaggcctggtggaatacccggggcctctactagtctgtttttccggtcataggaagacttttttttttacgtatcaaagtatgtgtttacagatttacagagtgtgatccgtatgcatcaaagggatacagccccagactgtttctttaatggtcattcatgaactattaaaaatttcctgaatttctttttaaactacatctagatagcctaaacatctatgtagtcttccattagttaacatgtgtatagggctttcataataagtagtcacactgttacaaggtaaattttctattacaaaatccaaatttctattgcatacacttataatcatctattcataaagctaattcattgtacttgttaatgcatgaatgttccatgcagtaggagaataaagcactacagttcggttgttcaaatcttaaatcttaggctatttagctaaaacatgttaggatattgccttcaccacttgttaggacagttatttgatagccattatgcttacctatggatagcataatggtatttaaggttcaacaaaccgcagattattatcatcagctagaactgacatatgttacaagaaaactgtaaattaacctcctgagagaaccattctgccctgcattttaagtcaggtatttaaatactgcgtgttgttaatattgcgttgtcttagtgcaacatttcttaaagtattcccgttatcttccttggctgtttttcagaggagacgtctccatgttaatgggtccttcccacatagaaatgtattctggtacagcgctgcacacatggatagcaatgtgaaaaggcatgcctaagagacagaaacggctgaccttaccccaccccagccggatcctctgcttatctcccacatgcacttggcttaactggttttcacagattctgaggttatagaacctgttgtttttcaaactcctgtacagagcctggaaataatggagcaaacgcaaatgtattgagagtcattatactttaaaatagttttaaagactattggggtaccatcaggtcaaaagccactgatttgggaagcaatttttttgcaaaacactttttttggagtactgaactttacaggggcttgccttaatctctatttagtagtttcaagatgtatgcgcaattattctacgtgttaaaaatgttaaaatattctatgtagccccaaaggtgggtaaaacagtataagtaatgcctaaattaataagctaaaaggtgtcactacagctggatttttgagagaaaatggacataaaactaggctatgtgtaataaaaataatggcaccttaagattgcactattttacgcattattttatatgccatttcatagcctgcactttaatctccaaagaaacgatgtatgatgtcccacttgttccttattcttaataaactttttcctgagacagggcacttaattctattttactgtactgaattagtttcttggaggtagattcatttcttgagttctctgtttccttagccataatattttctaggatccgggaactccctgtattgtctatttccaacattatataattttaatttaatgtaatgtaaatctcatacttggtgatcagcacattcttatatcctgctctagcaatgagtacccatttgttacacttaccaaactctctaaaaacatatactgtgagtaagatttgaagccaggaataaaaggcagtctgaaagaaaacgtcctatacgatgcagttgtttggaaatggctgatttctgatatgaaacccaacttgatacactgtttggttctttgacttgggatctatctgaattgctttcactagtacacaaaaggttaagttaaaactactttaaacttgtatagcctgccatctgaggtgaattattttcaaaaaatactaaatctatgaactgagactagcaattagttggctgctccctaccatgattttacttttaatagcaatacagttatattggtgataaatatgacaggcttaagtactgctgtccttttgcatcttcctaagcatcttggttaaatttctgaagtttaaaaattagatccagatttcttctgttgtgtctgaagagaaccatgacatttagaagtatattggtaatctattaggtccattggcaaagtatattggtccatattcaaacctattccaaaaggttagaagtgtttaagattcctttattgtggtaccatgtctgtttacctatgcttatgagcaacaataaattactagtttaccttctggaattttaattgttataaccgaatcaattattggaaagtgaaaaacacctcccggtcacacaacagggtacgtaaataaatgtgttgttaccagt

SEQ ID NO: 355022 - DNA, 572 bp, Homo sapiens
ccccccggtagatttactgagcataaccttggggagcaggtcaggaggaccctttggcatggtgggtaaaactgcccgcaccttagccccaagctctaccagtaggcattattctttcatcttttgtgtaaaacaccatttttattatttagttaattaattttctgggcgacagagtgagacttcgtctccaaaaaaaaagatatatacagcaaactgaggaataatagtgggatacagagagctttaagccatcagttatgagtctcagttgtctcttattaatttggttattgatttttgttgttctttttttctccttgaaggtttgtaaaagaatggacttggtctgccagagaatgttgaatcagggatttctgaaagtggagaggtaccataatctatgtcagaaacaagttaaagcacaactcccaaggtatgttgtgggtggcaatgacaatgatgtacagttggttttgtttgttgcttgacttctttttttcagtctcatggtttacatattgcttcccagtttttatagcaaggcaatctacctgggcggatccttagag

SEQ ID NO: 355023 - DNA, 5338 bp, Homo sapiens
aaggaatcaagcccccaagatggcggcagcggcggaggagcggatggcagaggaaggaggcggcggccaaggcgacggcggttcctctttggcctccggctctacccagcgacagcctccaccgcccgcgccacagcacccgcagccggggtcccaggcgctcccagcccccgcgctggctccggaccagctgcctcaaaacaacacgcttgtggcgctgcccatcgtagccatcgagaacatcctcagctttatgtcctacgacgaaattagccagctccgcctggtttgtaaaagaatggacttggtctgccagagaatgttgaatcagggatttctgaaagtggagaggtaccataatctatgtcagaaacaagttaaagcacaactcccaaggagagagtcagaaaggagaaaccattcattagctcgtcatgcagacattcttgctgctgttgaaacaaggctgtcactattaaatatgactttcatgaaatatgtggattccaatctctgttgcttcatcccaggaaaggtgattgatgagatttatcgtgtgttgagatatgtcaattctaccagagcccctcaacgagctcatgaagtacttcaagaattaagggatatatcctctatggcaatggagtactttgatgaaaagattgttccaattttaaagaggaaattaccaggatcagatgtttctggaagactcatgggctctcctccagttccaggaccgtctgcagccctaacaacaatgcagctcttctccaagcaaaatccttcaagacaagaggttaccaaactccagcagcaggttaaaacaaatggtgctggcgtgactgttctcaggcgtgaaatttctgagcttcgcaccaaagtgcaagaacagcaaaaacagcttcaagaccaggaccagaaactgctagagcagacccagatcataggtgaacaaaatgcacggttggcagagctagaacgcaaactacgagaagtaatggaaagtgctgtaggaaattcctcagggtccgggcagaatgaggagtctcctcggaaacgaaaaaaggccacggaagccatagactctcttaggaaatctaaacgtcttcggaatagaaagtaaattggaatgtggttctagttccagaggaagacacagcttagtagcttaagcagttatgcatatcaggatactgtgagcaacatggtgtcccttaagcttctaggctttcagaacacaacttaaacttgaactcttatggttgggacattcttttcctgcttctcctgattgaactgatgcacagaatctttttactttgcaatagatttgtactaaccagacctgttctatcatgttttgaggagttaacttttttctgtgcagataatgttgaaagtaagttaatttgtttctgcatatatgcacatacatacgtaaggatcttaaacccagtcttgacagactagaagttaagtttaatacagaaaatgtcctgttcacttgaaagaaaagacctactttttaaatggacactatcttggttcttttttttttaagtcatctttttgttataagtgacctttgtctggaatgtctgaaaagtagttaatgctttttggtattgaagtaatgggtaactaaaatggacttccatagtattgactgtagaaggagcctctacaatattgactatatatttttataaactactggcaaggaacttacccagctgttatacatgttttcagttctctttgggggccatgtcctacatttgcatggatggatgcatgcattgcctagtcaactcacttaaaaagctcttgcactggtattgatcttgaacctctatacttctccactttttagagcggcgtcttagtttatttaaacgcttaacatcttccaccgcaacagcttgcctctagagggggaattgttcatccatttgtcctccagttttataggaacaagagactattaaagcccattgctttatctgctctctgtagggttcaggtacactggctaaggcagaaccccaaatttcaaggctctttctatcaatattggacctctgggagctaatactcctctttgctcaccaccatgtgatcattgatcagatgtggtgagtgagtaggggactcgacttgcgggatgcagttttgccattgcagcaaagttcattgaggaaaattgtaccatgaaaaagcattttgattatttcatttctggaggatgaccttgagggaagctttttaatattagtttcaagctttccttaccctacaactttaaacaaaagctttaattttgtttgcactcctattttgagcttgtaactggaaaagcatgtcttgcactgttcaacctcctgagtggtcgctttaacaacctccaaattgtgtacagtggttattttccccagttgtatagttttgagacattcaattatcactgtcttagttgtattttaatttactaaattatgtagctatttgactgttaagttcttttaaacaactgtttccttgggcttcagttatttaaagtaaatttaggtgtaatatagaaaactgtccctttccaggtgggagcttaacacctgtataaaacctaaggttttagtaagtaccttagttgaataaaagcacaaggttatcaccttttttatccgtccaccgtgacatggttatgcatcctttagattaacctcaccaaatgaagctttttctatccatttttaatattgtccttacataatattgtccttagattttgatcaattctatgtctgactttgaaattccatttacaatgtagtatgttttcaatgaaaaaccataaagtaacatccaagtgtttcatggtttgttgggaaggtaattttaaaataaaacaatttccaaaaaacatttgtcagccaaggtcatccataaaagtccccgtctggaactcattttctcagcacttctcatttttataatcatagtatttagccatattagcatatctttagaggaggcctggtggaatacccggggcctctactagtctgtttttccggtcataggaagacttttttttttacgtatcaaagtatgtgtttacagatttacagagtgtgatccgtatgcatcaaagggatacagccccagactgtttctttaatggtcattcatgaactattaaaaatttcctgaatttctttttaaactacatctagatagcctaaacatctatgtagtcttccattagttaacatgtgtatagggctttcataataagtagtcacactgttacaaggtaaattttctattacaaaatccaaatttctattgcatacacttataatcatctattcataaagctaattcattgtacttgttaatgcatgaatgttccatgcagtaggagaataaagcactacagttcggttgttcaaatcttaaatcttaggctatttagctaaaacatgttaggatattgccttcaccacttgttaggacagttatttgatagccattatgcttacctatggatagcataatggtatttaaggttcaacaaaccgcagattattatcatcagctagaactgacatatgttacaagaaaactgtaaattaacctcctgagagaaccattctgccctgcattttaagtcaggtatttaaatactgcgtgttgttaatattgcgttgtcttagtgcaacatttcttaaagtattcccgttatcttccttggctgtttttcagaggagacgtctccatgttaatgggtccttcccacatagaaatgtattctggtacagcgctgcacacatggatagcaatgtgaaaaggcatgcctaagagacagaaacggctgaccttaccccaccccagccggatcctctgcttatctcccacatgcacttggcttaactggttttcacagattctgaggttatagaacctgttgtttttcaaactcctgtacagagcctggaaataatggagcaaacgcaaatgtattgagagtcattatactttaaaatagttttaaagactattggggtaccatcaggtcaaaagccactgatttgggaagcaatttttttgcaaaacactttttttggagtactgaactttacaggggcttgccttaatctctatttagtagtttcaagatgtatgcgcaattattctacgtgttaaaaatgttaaaatattctatgtagccccaaaggtgggtaaaacagtataagtaatgcctaaattaataagctaaaaggtgtcactacagctggatttttgagagaaaatggacataaaactaggctatgtgtaataaaaataatggcaccttaagattgcactattttacgcattattttatatgccatttcatagcctgcactttaatctccaaagaaacgatgtatgatgtcccacttgttccttattcttaataaactttttcctgagacagggcacttaattctattttactgtactgaattagtttcttggaggtagattcatttcttgagttctctgtttccttagccataatattttctaggatccgggaactccctgtattgtctatttccaacattatataattttaatttaatgtaatgtaaatctcatacttggtgatcagcacattcttatatcctgctctagcaatgagtacccatttgttacacttaccaaactctctaaaaacatatactgtgagtaagatttgaagccaggaataaaaggcagtctgaaagaaaacgtcctatacgatgcagttgtttggaaatggctgatttctgatatgaaacccaacttgatacactgtttggttctttgacttgggatctatctgaattgctttcactagtacacaaaaggttaagttaaaactactttaaacttgtatagcctgccatctgaggtgaattattttcaaaaaatactaaatctatgaactgagactagcaattagttggctgctccctaccatgattttacttttaatagcaatacagttatattggtgataaatatgacaggcttaagtactgctgtccttttgcatcttcctaagcatcttggttaaatttctgaagtttaaaaattagatccagatttcttctgttgtgtctgaagagaaccatgacatttagaagtatattggtaatctattaggtccattggcaaagtatattggtccatattcaaacctattccaaaaggttagaagtgtttaagattcctttattgtggtaccatgtctgtttacctatgcttatgagcaacaataaattactagtttaccttctggaatttt

SEQ ID NO: 355024 - DNA, 2520 bp, Homo sapiens
ctagagttcccttcggatacttgagaagcaatgtcatccataaaagtccccgtctggaactcattttctcagcacttctcatttttataatcatagtatttagccatattagcatatctttagaggaggcctggtggaatacccggggcctctactagtctgtttttccggtcataggaagacttttttttttacgtatcaaagtatgtgtttacagatttacagagtgtgatccgtatgcatcaaagggatacagccccagactgtttctttaatggtcattcatgaactattaaaaatttcctgaatttctttttaaactacatctagatagcctaaacatctatgtagtcttccattagttaacatgtgtatagggctttcataataagtagtcacactgttacaaggtaaattttctattacaaaatccaaatttctattgcatacacttataatcatctattcataaagctaattcattgtacttgttaatgcatgaatgttccatgcagtaggagaataaagcactacagttcggttgttcaaatcttaaatcttaggctatttagctaaaacatgttaggatattgccttcaccacttgttaggacagttatttgatagccattatgcttacctatggatagcataatggtatttaaggttcaacaaaccgcagattattatcatcagctagaactgacatatgttacaagaaaactgtaaattaacctcctgagagaaccattctgccctgcattttaagtcaggtatttaaatactgcgtgttgttaatattgcgttgtcttagtgcaacatttcttaaagtattcccgttatcttccttggctgtttttcagaggagacgtctccatgttaatgggtccttcccacatagaaatgtattctggtacagcgctgcacacatggatagcaatgtgaaaaggcatgcctaagagacagaaacggctgaccttaccccaccccagccggatcctctgcttatctcccacatgcacttggcttaactggttttcacagattctgaggttatagaacctgttgtttttcaaactcctgtacagagcctggaaataatggagcaaacgcaaatgtattgagagtcattatactttaaaatagttttaaagactattggggtaccatcaggtcaaaagccactgatttgggaagcaatttttttgcaaaacactttttttggagtactgaactttacaggggcttgccttaatctctatttagtagtttcaagatgtatgcgcaattattctacgtgttaaaaatgttaaaatattctatgtagccccaaaggtgggtaaaacagtataagtaatgcctaaattaataagctaaaaggtgtcactacagctggatttttgagagaaaatggacataaaactaggctatgtgtaataaaaataatggcaccttaagattgcactattttacgcattattttatatgccatttcatagcctgcactttaatctccaaagaaacgatgtatgatgtcccacttgttccttattcttaataaactttttcctgagacagggcacttaattctattttactgtactgaattagtttcttggaggtagattcatttcttgagttctctgtttccttagccataatattttctaggatccgggaactccctgtattgtctatttccaacattatataattttaatttaatgtaatgtaaatctcatacttggtgatcagcacattcttatatcctgctctagcaatgagtacccatttgttacacttaccaaactctctaaaaacatatactgtgagtaagatttgaagccaggaataaaaggcagtctgaaagaaaacgtcctatacgatgcagttgtttggaaatggctgatttctgatatgaaacccaacttgatacactgtttggttctttgacttgggatctatctgaattgctttcactagtacacaaaaggttaagttaaaactactttaaacttgtatagcctgccatctgaggtgaattattttcaaaaaatactaaatctatgaactgagactagcaattagttggctgctccctaccatgattttacttttaatagcaatacagttatattggtgataaatatgacaggcttaagtactgctgtccttttgcatcttcctaagcatcttggttaaatttctgaagtttaaaaattagatccagatttcttctgttgtgtctgaagagaaccatgacatttagaagtatattggtaatctattaggtccattggcaaagtatattggtccatattcaaacctattccaaaaggttagaagtgtttaagattcctttattgtggtaccatgtctgtttacctatgcttatgagcaacaataaattactagtttaccttctggaattttaattgttataaccgaatcaattattggaaagtgaaaaacacctcccggtcacacaacagggtacgtaaataaatgtgttgttaccagt

SEQ ID NO: 355025 - DNA, 1347 bp, Homo sapiens
aaggaatcaagcccccaagatggcggcagcggcggaggagcggatggcagaggaaggaggcggcggccaaggcgacggcggttcctctttggcctccggctctacccagcgacagcctccaccgcccgcgccacagcacccgcagccggggtcccaggcgctcccagcccccgcgctggctccggaccagctgcctcaaaacaacacgcttgtggcgctgcccatcgtagccatcgagaacatcctcagctttatgtcctacgacgaaattagccagctccgcctggtttgtaaaagaatggacttggtctgccagagaatgttgaatcagggatttctgaaagtggagaggtaccataatctatgtcagaaacaagttaaagcacaactcccaaggagagagtcagaaaggagaaaccattcattagctcgtcatgcagacattcttgctgctgttgaaacaaggctgtcactattaaatatgactttcatgaaatatgtggattccaatctctgttgcttcatcccaggaaaggtgattgatgagatttatcgtgtgttgagatatgtcaattctaccagagcccctcaacgagctcatgaagtacttcaagaattaagggatatatcctctatggcaatggagtactttgatgaaaagattgttccaattttaaagaggaaattaccaggatcagatgtttctggaagactcatgggctctcctccagttccaggaccgtctgcagccctaacaacaatgcagctcttctccaagcaaaatccttcaagacaagaggttaccaaactccagcagcaggttaaaacaaatggtgctggcgtgactgttctcaggcgtgaaatttctgagcttcgcaccaaagtgcaagaacagcaaaaacagcttcaagaccaggaccagaaactgctagagcagacccagatcataggtgaacaaaatgcacggttggcagagctagaacgcaaactacgagaagtaatggaaagtgctgtaggaaattcctcagggtccgggcagaatgaggagtctcctcggaaacgaaaaaaggccacggaagccatagactctcttaggaaatctaaacgtcttcggaatagaaagtaaattggaatgtggttctagttccagaggaagacacagcttagtagcttaagcagttatgcatatcaggatactgtgagcaacatggtgtcccttaagcttctaggctttcagaacacaacttaaacttgaactcttatggttgggacattcttttcctgcttctcctgattgaactgatgcacagaatctttttactttgcaatagatttgtactaaccaga

SEQ ID NO: 355026 - DNA, 1939 bp, Homo sapiens
aaggaatcaagcccccaagatggcggcagcggcggaggagcggatggcagaggaaggaggcggcggccaaggcgacggcggttcctctttggcctccggctctacccagcgacagcctccaccgcccgcgccacagcacccgcagccggggtcccaggcgctcccagcccccgcgctggctccggaccagctgcctcaaaacaacacgcttgtggcgctgcccatcgtagccatcgagaacatcctcagctttatgtcctacgacgaaattagccagctccgcctggtttgtaaaagaatggacttggtctgccagagaatgttgaatcagggatttctgaaagtggagaggtaccataatctatgtcagaaacaagttaaagcacaactcccaaggagagagtcagaaaggagaaaccattcattagctcgtcatgcagacattcttgctgctgttgaaacaaggctgtcactattaaatatgactttcatgaaatatgtggattccaatctctgttgcttcatcccaggaaaggtaaaatagaattgcttgcctagaacagctggactgccctacataaacttattatacagttatgaatttctgattttagaaatgttagaattgtttctacttctctgagtttctactaatgaatttgtttgctttctgtacagttataaatatgtatcatttgtatgatctttatatttaaaattctaattatgaaatagtcgaaaccctaatattctttagagaagttttttaagagttcatactcaagaataaaatttgaggttttactggtggttatgatgccagagatacagcaatgaacaacatacatattgtccctgccttcaagactattataattttggggaggtagaaaaggagggacaagctggtttttgttttgtttgagaaatgtttcataacgacaactttataaactttcagatttgacaagaataaacaattgctatttaccaatattcccagaactaaataacagtcctttttaacacagaaataactatattgtggcatatttaccattactaagttaataaaaactccaacattcaacatactacttataccttcagtagtaccctactccttgaattaagtgtaaattgacatatgtctgtatctttttatatggaagtggtagagatataattaaaggtcattttgctacttggttgatgctggcaaaagtttcccttaacatggttggaaataattaatatctagtaaaatttgaatgttcgctttttgttatttccaaagataatttacattggcaatatttaatacgtactttgtccatttttagttttctttgacatttatttttggggggaatcccatttcttatgattgtatttgaaatattttggtatatctcactttctttgcattatatacattttctttaaaagatcttgttgcataccaacacattacctgctaatgctttttgtagggtgctataagaggatgaccagttagaaacttcagagtgattcttatgccagatttttctgaatctgacttaaaggccttaacttttaagtgttcctgagttctttgaacttagcttgtttcatatagcatcatagtttttattgaatatctcattgttagaaacatgaatatctaagaaacatctcacagttatcataacttcaaagagattcagtcagttgttaagtaacagagttgaatagtttgtgacagagttcatgtggcctacaaagattaaaatatttatgatccaggccggctgtagtggctcgcacctctaatcccagatacttgcaaggctgaggcagaagaatcgcttgaacccgggaggcggaggttgcactgagccaagatcacaccactgcactccagcctgggcaacagagcaagactctgtctcaaaaa

SEQ ID NO: 355027 - DNA, 2938 bp, Homo sapiens
aaggaatcaagcccccaagatggcggcagcggcggaggagcggatggcagaggaaggaggcggcggccaaggcgacggcggttcctctttggcctccggctctacccagcgacagcctccaccgcccgcgccacagcacccgcagccggggtcccaggcgctcccagcccccgcgctggctccggaccagctgcctcaaaacaacacgcttgtggcgctgcccatcgtagccatcgagaacatcctcagctttatgtcctacgacgaaattagccagctccgcctggtttgtaaaagaatggacttggtctgccagagaatgttgaatcagggatttctgaaagtggagaggtaccataatctatgtcagaaacaagttaaagcacaactcccaaggagagagtcagaaaggagaaaccattcattagctcgtcatgcagacattcttgctgctgttgaaacaaggctgtcactattaaatatgactttcatgaaatatgtggattccaatctctgttgcttcatcccaggaaaggtgattgatgagatttatcgtgtgttgagatatgtcaattctaccagagcccctcaacgagctcatgaagtacttcaagaattaagggatatatcctctatggcaatggagtactttgatgaaaagattgttccaattttaaagaggaaattaccaggatcagatgtttctggaagactcatgggctctcctccagttccaggaccgtctgcagccctaacaacaatgcagctcttctccaagcaaaatccttcaagacaagaggttaccaaactccagcagcaggttaaaacaaatggtgctggcgtgactgttctcaggcgtgaaatttctgagcttcgcaccaaagtgcaagaacagcaaaaacagcttcaagaccaggaccagaaactgctagagcagacccagatcataggtgaacaaaatgcacggttggcagagctagaacgcaaactacgagaagtaatggaaagtgctgtaggaaattcctcagggtccgggcagaatgaggagtctcctcggaaacgaaaaaaggccacggaagccatagactctcttaggaaatctaaacgtcttcggaatagaaagtaaattggaatgtggttctagttccagaggaagacacagcttagtagcttaagcagttatgcatatcaggatactgtgagcaacatggtgtcccttaagcttctaggctttcagaacacaacttaaacttgaactcttatggttgggacattcttttcctgcttctcctgattgaactgatgcacagaatctttttactttgcaatagatttgtactaaccagacctgttctatcatgttttgaggagttaacttttttctgtgcagataatgttgaaagtaagttaatttgtttctgcatatatgcacatacatacgtaaggatcttaaacccagtcttgacagactagaagttaagtttaatacagaaaatgtcctgttcacttgaaagaaaagacctactttttaaatggacactatcttggttcttttttttttaagtcatctttttgttataagtgacctttgtctggaatgtctgaaaagtagttaatgctttttggtattgaagtaatgggtaactaaaatggacttccatagtattgactgtagaaggagcctctacaatattgactatatatttttataaactactggcaaggaacttacccagctgttatacatgttttcagttctctttgggggccatgtcctacatttgcatggatggatgcatgcattgcctagtcaactcacttaaaaagctcttgcactggtattgatcttgaacctctatacttctccactttttagagcggcgtcttagtttatttaaacgcttaacatcttccaccgcaacagcttgcctctagagggggaattgttcatccatttgtcctccagttttataggaacaagagactattaaagcccattgctttatctgctctctgtagggttcaggtacactggctaaggcagaaccccaaatttcaaggctctttctatcaatattggacctctgggagctaatactcctctttgctcaccaccatgtgatcattgatcagatgtggtgagtgagtaggggactcgacttgcgggatgcagttttgccattgcagcaaagttcattgaggaaaattgtaccatgaaaaagcattttgattatttcatttctggaggatgaccttgagggaagctttttaatattagtttcaagctttccttaccctacaactttaaacaaaagctttaattttgtttgcactcctattttgagcttgtaactggaaaagcatgtcttgcactgttcaacctcctgagtggtcgctttaacaacctccaaattgtgtacagtggttattttccccagttgtatagttttgagacattcaattatcactgtcttagttgtattttaatttactaaattatgtagctatttgactgttaagttcttttaaacaactgtttccttgggcttcagttatttaaagtaaatttaggtgtaatatagaaaactgtccctttccaggtgggagcttaacacctgtataaaacctaaggttttagtaagtaccttagttgaataaaagcacaaggttatcaccttttttatccgtccaccgtgacatggttatgcatcctttagattaacctcaccaaatgaagctttttctatccatttttaatattgtccttacataatattgtccttagattttgatcaattctatgtctgactttgaaattccatttacaatgtagtatgttttcaatgaaaaaccataaagtaacatccaagtgtttcatggtttgttgggaaggtaattttaaaataaaacaatttccaaaaaacatttgtcagccaag

SEQ ID NO: 355028 - DNA, 5371 bp, Homo sapiens
aaggaatcaagcccccaagatggcggcagcggcggaggagcggatggcagaggaaggaggcggcggccaaggcgacggcggttcctctttggcctccggctctacccagcgacagcctccaccgcccgcgccacagcacccgcagccggggtcccaggcgctcccagcccccgcgctggctccggaccagctgcctcaaaacaacacgcttgtggcgctgcccatcgtagccatcgagaacatcctcagctttatgtcctacgacgaaattagccagctccgcctggtttgtaaaagaatggacttggtctgccagagaatgttgaatcagggatttctgaaagtggagaggtaccataatctatgtcagaaacaagttaaagcacaactcccaaggagagagtcagaaaggagaaaccattcattagctcgtcatgcagacattcttgctgctgttgaaacaaggctgtcactattaaatatgactttcatgaaatatgtggattccaatctctgttgcttcatcccaggaaaggtgattgatgagatttatcgtgtgttgagatatgtcaattctaccagagcccctcaacgagctcatgaagtacttcaagaattaagggatatatcctctatggcaatggagtactttgatgaaaagattgttccaattttaaagaggaaattaccaggatcagatgtttctggaagactcatgggctctcctccagttccaggaccgtctgcagccctaacaacaatgcagctcttctccaagcaaaatccttcaagacaagaggttaccaaactccagcagcaggttaaaacaaatggtgctggcgtgactgttctcaggcgtgaaatttctgagcttcgcaccaaagtgcaagaacagcaaaaacagcttcaagaccaggaccagaaactgctagagcagacccagatcataggtgaacaaaatgcacggttggcagagctagaacgcaaactacgagaagtaatggaaagtgctgtaggaaattcctcagggtccgggcagaatgaggagtctcctcggaaacgaaaaaaggccacggaagccatagactctcttaggaaatctaaacgtcttcggaatagaaagtaaattggaatgtggttctagttccagaggaagacacagcttagtagcttaagcagttatgcatatcaggatactgtgagcaacatggtgtcccttaagcttctaggctttcagaacacaacttaaacttgaactcttatggttgggacattcttttcctgcttctcctgattgaactgatgcacagaatctttttactttgcaatagatttgtactaaccagacctgttctatcatgttttgaggagttaacttttttctgtgcagataatgttgaaagtaagttaatttgtttctgcatatatgcacatacatacgtaaggatcttaaacccagtcttgacagactagaagttaagtttaatacagaaaatgtcctgttcacttgaaagaaaagacctactttttaaatggacactatcttggttcttttttttttaagtcatctttttgttataagtgacctttgtctggaatgtctgaaaagtagttaatgctttttggtattgaagtaatgggtaactaaaatggacttccatagtattgactgtagaaggagcctctacaatattgactatatatttttataaactactggcaaggaacttacccagctgttatacatgttttcagttctctttgggggccatgtcctacatttgcatggatggatgcatgcattgcctagtcaactcacttaaaaagctcttgcactggtattgatcttgaacctctatacttctccactttttagagcggcgtcttagtttatttaaacgcttaacatcttccaccgcaacagcttgcctctagagggggaattgttcatccatttgtcctccagttttataggaacaagagactattaaagcccattgctttatctgctctctgtagggttcaggtacactggctaaggcagaaccccaaatttcaaggctctttctatcaatattggacctctgggagctaatactcctctttgctcaccaccatgtgatcattgatcagatgtggtgagtgagtaggggactcgacttgcgggatgcagttttgccattgcagcaaagttcattgaggaaaattgtaccatgaaaaaagtttcaagctttccttaccctacaactttaaacaaaagctttaattttgtttgcactcctattttgagcttgtaactggaaaagcatgtcttgcactgttcaacctcctgagtggtcgctttaacaacctccaaattgtgtacagtggttattttccccagttgtatagttttgagacattcaattatcactgtcttagttgtattttaatttactaaattatgtagctatttgactgttaagttcttttaaacaactgtttccttgggcttcagttatttaaagtaaatttaggtgtaatatagaaaactgtccctttccaggtgggagcttaacacctgtataaaacctaaggttttagtaagtaccttagttgaataaaagcacaaggttatcaccttttttatccgtccaccgtgacatggttatgcatcctttagattaacctcaccaaatgaagctttttctatccatttttaatattgtccttacataatattgtccttagattttgatcaattctatgtctgactttgaaattccatttacaatgtagtatgttttcaatgaaaaaccataaagtaacatccaagtgtttcatggtttgttgggaaggtaattttaaaataaaacaatttccaaaaaacatttgtcagccaaggtcatccataaaagtccccgtctggaactcattttctcagcacttctcatttttataatcatagtatttagccatattagcatatctttagaggaggcctggtggaatacccggggcctctactagtctgtttttccggtcataggaagacttttttttttacgtatcaaagtatgtgtttacagatttacagagtgtgatccgtatgcatcaaagggatacagccccagactgtttctttaatggtcattcatgaactattaaaaatttcctgaatttctttttaaactacatctagatagcctaaacatctatgtagtcttccattagttaacatgtgtatagggctttcataataagtagtcacactgttacaaggtaaattttctattacaaaatccaaatttctattgcatacacttataatcatctattcataaagctaattcattgtacttgttaatgcatgaatgttccatgcagtaggagaataaagcactacagttcggttgttcaaatcttaaatcttaggctatttagctaaaacatgttaggatattgccttcaccacttgttaggacagttatttgatagccattatgcttacctatggatagcataatggtatttaaggttcaacaaaccgcagattattatcatcagctagaactgacatatgttacaagaaaactgtaaattaacctcctgagagaaccattctgccctgcattttaagtcaggtatttaaatactgcgtgttgttaatattgcgttgtcttagtgcaacatttcttaaagtattcccgttatcttccttggctgtttttcagaggagacgtctccatgttaatgggtccttcccacatagaaatgtattctggtacagcgctgcacacatggatagcaatgtgaaaaggcatgcctaagagacagaaacggctgaccttaccccaccccagccggatcctctgcttatctcccacatgcacttggcttaactggttttcacagattctgaggttatagaacctgttgtttttcaaactcctgtacagagcctggaaataatggagcaaacgcaaatgtattgagagtcattatactttaaaatagttttaaagactattggggtaccatcaggtcaaaagccactgatttgggaagcaatttttttgcaaaacactttttttggagtactgaactttacaggggcttgccttaatctctatttagtagtttcaagatgtatgcgcaattattctacgtgttaaaaatgttaaaatattctatgtagccccaaaggtgggtaaaacagtataagtaatgcctaaattaataagctaaaaggtgtcactacagctggatttttgagagaaaatggacataaaactaggctatgtgtaataaaaataatggcaccttaagattgcactattttacgcattattttatatgccatttcatagcctgcactttaatctccaaagaaacgatgtatgatgtcccacttgttccttattcttaataaactttttcctgagacagggcacttaattctattttactgtactgaattagtttcttggaggtagattcatttcttgagttctctgtttccttagccataatattttctaggatccgggaactccctgtattgtctatttccaacattatataattttaatttaatgtaatgtaaatctcatacttggtgatcagcacattcttatatcctgctctagcaatgagtacccatttgttacacttaccaaactctctaaaaacatatactgtgagtaagatttgaagccaggaataaaaggcagtctgaaagaaaacgtcctatacgatgcagttgtttggaaatggctgatttctgatatgaaacccaacttgatacactgtttggttctttgacttgggatctatctgaattgctttcactagtacacaaaaggttaagttaaaactactttaaacttgtatagcctgccatctgaggtgaattattttcaaaaaatactaaatctatgaactgagactagcaattagttggctgctccctaccatgattttacttttaatagcaatacagttatattggtgataaatatgacaggcttaagtactgctgtccttttgcatcttcctaagcatcttggttaaatttctgaagtttaaaaattagatccagatttcttctgttgtgtctgaagagaaccatgacatttagaagtatattggtaatctattaggtccattggcaaagtatattggtccatattcaaacctattccaaaaggttagaagtgtttaagattcctttattgtggtaccatgtctgtttacctatgcttatgagcaacaataaattactagtttaccttctggaattttaattgttataaccgaatcaattattggaaagtgaaaaacacctcccggtcacacaacagggtacgtaaataaatgtgttgttaccagt

SEQ ID NO: 355029 - DNA, 721 bp, Homo sapiens
  misc_feature (343)..(343): n is a, c, g, or t
  misc_feature (346)..(346): n is a, c, g, or t
ccgatgtgggcgcgtttgctgtgtggtgtgttgtcgtgtggggtgttttgcccttcggtcctcttggtcctggtcggtcgccgtcctctcccgcctctttgtatttgttctcctctcctgttttttgttggtccccttccgttgggttctggatgtctctgtgtggtgggcgcgtggtgctcttctctcccccgctggggggtgtctagccgccgcgcccctccggctatgagttgttttttttttgttttgtttgtgtttatttgtttttgtttttggtttgttttttttttttgttgtttttttttttgtttttttttttttttttttttttttttttttnttntcacaaaaaaaagtctatatttttatattggggggagggagtagaaaagcaagcccctatactgggccctattcagtggcagcttcttgttccataggattaaggaagactctgaggaaataaaagttgtttggaaaaatccaggtgtagttgctttgtatgttgtgatgggtagaagggatgaagtgaagtgtgaaggcccctcataccctccatcttgcctcagactatgtcctggaaccctggggcggagaaagcgccactttcattcctgcttcttgggattgttgacggccacgtagtgatagagaacgacaagcaagaagagcgacacgcccagcatgttggcgaagatggcgagctgcacgtccgtga

SEQ ID NO: 355030 - DNA, 2435 bp, Homo sapiens
acggccaataggcgagagacttcttgtttcctggcagagcggggtcccggcaccgcggcgctcgggtgtttttgggggcccgggtggagggcccgggtgccggggcccaaggtgcggcctcgctagcgggagagggagcgggatcaccggcccggagagagctctcagggccagagcggggcaggaggatgctttcccagccccaccatggagctgcgctgtgggggattgctgttcagttctcgctttgattcagggaatctagcccacgtggagaaggtggaatctttgtccagtgatggggaaggggtaggaggtggggcgtcagccctgaccagtggcattgcctcttcccctgactatgaattcaacgtgtggacccgaccagactgtgctgaaacggaatttgagaatgggaacaggtcatggttctacttcagcgtccggggaggaatgccaggaaaactcatcaagatcaacattatgaacatgaacaagcagagcaagctgtattcccagggcatggccccctttgtgcgcacactgcccacccggccacgctgggaacgcattcgagaccggcccacctttgagatgacagagacgcagtttgtgttatcctttgttcatcgtttcgtggagggccgtggggccaccaccttcttcgccttctgctaccccttctcctacagtgactgccaggaactgctaaaccagctagaccagcgctttccggagaaccaccctacccatagcagccccctggataccatctattaccatcgggagctcctttgctattctctggatggacttcgtgtagatctgctgacgatcacttcctgccatgggcttcgagaagatcgagagccccgtctagagcagctatttcctgataccagcacccctcgaccattccgtttcgcaggcaagaggatattcttcttaagcagtagagtacacccaggggagactccatctagctttgtcttcaatggctttctggacttcatcctccgacctgatgatccccgggcccaaaccctccgtcgcctcttcgtctttaagctgattcccatgttgaaccccgatggtgtggtccggggacactaccgcacagactcacgtggagtgaatctgaaccgtcagtacctgaagcctgatgccgtcctgcacccggccatctatggggccaaagctgtgcttctctaccaccatgtgcactctcgtctgaactcccagagttcctctgagcaccagcccagttcctgtctccctcctgatgctcctgtttctgacctggagaaagccaacaatctccaaaatgaagctcagtgtgggcactcagctgacaggcataacgctgaagcctggaaacaaacagagccagcagaacagaagctcaacagtgtgtggattatgccacaacagtctgcggggcttgaagagtcagcccctgataccatcccccccaaagagagtggcgttgcttactatgtggacctgcatggacatgcttccaaaaggggctgcttcatgtacggaaacagctttagtgatgagagcacccaggtggaaaacatgctatatccaaagctcatctccttgaattcagcccacttcgacttccagggctgcaatttctcagagaagaatatgtatgcccgagaccgtagagatggccagtctaaagagggaagcggccgtgttgcaatctacaaagcctcagggataatccacagctacacacttgaatgcaactacaacactggacgctcagtaaacagcatccctgctgcctgccatgacaatgggcgtgccagcccccctcccccgccggctttcccctccagatacactgtggaactatttgagcaggtgggacgagctatggccattgcagccctggacatggcggaatgtaatccgtggccccgaattgtactgtcagagcacagcagccttactaatctacgggcctggatgctgaaacatgtacgcaacagccgaggcctaagcagcactctgaatgtgggtgtcaacaagaagaggggccttcgaactccacccaaaagtcacaatgggttgcctgtctcctgctccgaaaacaccttgagtcgggcacgaagttttagcaccggcacaagtgccggtggtagcagcagcagccaacaaaattctccacagatgaagaattcccccagctttccttttcatggcagtcggcctgcagggctgccaggcctgggctctagtacccaaaaggtcacccaccgggtgctgggccccgtcagaggtaagccagtctgggagcccctgcaacatgtgttcggttgtctggggcattgctgggggaagtaagagcttgaagatatactgttggcccaggaccaaggggtgaatcaataaaattagtttgtagcagaaaaaaaaac

SEQ ID NO: 355031 - DNA, 3506 bp, Homo sapiens
acggccaataggcgagagacttcttgtttcctggcagagcggggtcccggcaccgcggcgctcgggtgtttttgggggcccgggtggagggcccgggtgccggggcccaaggtgcggcctcgctagcgggagagggagcgggatcaccggcccggagagagctctcagggccagagcggggcaggaggatgctttcccagccccaccatggagctgcgctgtgggggattgctgttcagttctcgctttgattcagggaatctagcccacgtggagaaggtggaatctttgtccagtgatggggaaggggtaggaggtggggcgtcagccctgaccagtggcattgcctcttcccctgactatgaattcaacgtgtggacccgaccagactgtgctgaaacggaatttgagaatgggaacaggtcatggttctacttcagcgtccggggaggaatgccaggaaaactcatcaagatcaacattatgaacatgaacaagcagagcaagctgtattcccagggcatggccccctttgtgcgcacactgcccacccggccacgctgggaacgcattcgagaccggcccacctttgagatgacagagacgcagtttgtgttatcctttgttcatcgtttcgtggagggccgtggggccaccaccttcttcgccttctgctaccccttctcctacagtgactgccaggaactgctaaaccagctagaccagcgctttccggagaaccaccctacccatagcagccccctggataccatctattaccatcgggagctcctttgctattctctggatggacttcgtgtagatctgctgacgatcacttcctgccatgggcttcgagaagatcgagagccccgtctagagcagctatttcctgataccagcacccctcgaccattccgtttcgcaggcaagaggatattcttcttaagcagtagagtacacccaggggagactccatctagctttgtcttcaatggctttctggacttcatcctccgacctgatgatccccgggcccaaaccctccgtcgcctcttcgtctttaagctgattcccatgttgaaccccgatggtgtggtccggggacactaccgcacagactcacgtggagtgaatctgaaccgtcagtacctgaagcctgatgccgtcctgcacccggccatctatggggccaaagctgtgcttctctaccaccatgtgcactctcgtctgaactcccagagttcctctgagcaccagcccagttcctgtctccctcctgatgctcctgtttctgacctggagaaagccaacaatctccaaaatgaagctcagtgtgggcactcagctgacaggcataacgctgaagcctggaaacaaacagagccagcagaacagaagctcaacagtgtgtggattatgccacaacagtctgcggggcttgaagagtcagcccctgataccatcccccccaaagagagtggcgttgcttactatgtggacctgcatggacatgcttccaaaaggggctgcttcatgtacggaaacagctttagtgatgagagcacccaggtggaaaacatgctatatccaaagctcatctccttgaattcagcccacttcgacttccagggctgcaatttctcagagaagaatatgtatgcccgagaccgtagagatggccagtctaaagagggaagcggccgtgttgcaatctacaaagcctcagggataatccacagctacacacttgaatgcaactacaacactggacgctcagtaaacagcatccctgctgcctgccatgacaatgggcgtgccagcccccctcccccgccggctttcccctccagatacactgtggaactatttgagcaggtgggacgagctatggccattgcagccctggacatggcggaatgtaatccgtggccccgaattgtactgtcagagcacagcagccttactaatctacgggcctggatgctgaaacatgtacgcaacagccgaggcctaagcagcactctgaatgtgggtgtcaacaagaagaggggccttcgaactccacccaaaagtcacaatgggttgcctgtctcctgctccgaaaacaccttgagtcgggcacgaagttttagcaccggcacaagtgccggtggtagcagcagcagccaacaaaattctccacagatgaagaattcccccagctttccttttcatggcagtcggcctgcagggctgccaggcctgggctctagtacccaaaaggtcacccaccgggtgctgggccccgtcagagagccccgaagccaggacaggagacggcagcagcagcccctgaaccatcgtcctgcaggcagcctcgctccatccccagctcctactagttctggcccagcctcctcacacaagctgggctcctgtctactgcctgattcattcaacataccagggagcagttgctcactcttgtcctctggagacaaaccagaggctgtcatggtaatcgggaaaggtctgctagggactggagctcggatgccctgcatcaagactcgattgcagacctgtccgaggagagtttccgccaggaggggtcccggattccccaggctaggcccaggttgggccggggctcaccgccgactcgcagagggatgaaaggctcttcaggccccacatcccctaccccccggaccagggagagcagtgagctggagctgggatcctgctctgctacaccagggctgcctcaggccaggcccccacggccccgctctgcccctgccttttctcctatatcctgtagtctatctgactccccatcctggaattgttacagcaggggtcccttgggccaacctgaggtttgttttgtccctaaatctcccccactgactgtttctccccgggtctgataatgcctttatgttcaatcccaggatatagccccaagatggggtaacagtgggaaatatgctagttcccctccaggccgctgattccatgtgacagccgttaagtccttggaatgccagccacgctgtccaaggcattacagagtatcaccttgagacagaacaaaacagggacctgccaccccttccctccctccgcagcacaagattttgggaccacaaaaaaaagtctatatttttatattggggggagggagtagaaaagcaagcccctatactgggccctattcagtggcagcttcttgttccataggattaaggaagactctgaggaaataaaagttgtttggaaaaatccaggtgtagttgctttgtatgttgtgatgggtagaagggatgaagtgaagtgtgaaggcccctcataccctccatcttgcctcagactatgtcctggaaccctggggcggagaaagcgccactttcattcctgcttcttgggattgttgacggccacgtagtgatagagaacgacaagcaagaagagcgacacgcccagcatgttggcgaagatggcgagctgcacgtccgtga

SEQ ID NO: 355032 - DNA, 3281 bp, Homo sapiens
acggccaataggcgagagacttcttgtttcctggcagagcggggtcccggcaccgcggcgctcgggtgtttttgggggcccgggtggagggcccgggtgccggggcccaaggtgcggcctcgctagcgggagagggagcgggatcaccggcccggagagagctctcagggccagagcggggcaggaggatgctttcccagccccaccatggagctgcgctgtgggggattgctgttcagttctcgctttgattcagggaatctagcccacgtggagaaggtggaatctttgtccagtgatggggaaggggtaggaggtggggcgtcagccctgaccagtggcattgcctcttcccctgactatgaattcaacgtgtggacccgaccagactgtgctgaaacggaatttgagaatgggaacaggtcatggttctacttcagcgtccggggaggaatgccaggaaaactcatcaagatcaacattatgaacatgaacaagcagagcaagctgtattcccagggcatggccccctttgtgcgcacactgcccacccggccacgctgggaacgcattcgagaccggcccacctttgagatgacagagacgcagtttgtgttatcctttgttcatcgtttcgtggagggccgtggggccaccaccttcttcgccttctgctaccccttctcctacagtgactgccaggaactgctaaaccagctagaccagcgctttccggagaaccaccctacccatagcagccccctggataccatctattaccatcgggagctcctttgctattctctggatggacttcgtgtagatctgctgacgatcacttcctgccatgggcttcgagaagatcgagagccccgtctagagcagctatttcctgataccagcacccctcgaccattccgtttcgcaggcaagaggatattcttcttaagcagtagagtacacccaggggagactccatctagctttgtcttcaatggctttctggacttcatcctccgacctgatgatccccgggcccaaaccctccgtcgcctcttcgtctttaagctgattcccatgttgaaccccgatggtgtggtccggggacactaccgcacagactcacgtggagtgaatctgaaccgtcagtacctgaagcctgatgccgtcctgcacccggccatctatggggccaaagctgtgcttctctaccaccatgtgcactctcgtctgaactcccagagttcctctgagcaccagcccagttcctgtctccctcctgatgctcctgtttctgacctggagaaagccaacaatctccaaaatgaagctcagtgtgggcactcagctgacaggcataacgctgaagcctggaaacaaacagagccagcagaacagaagctcaacagtgtgtggattatgccacaacagtctgcggggcttgaagagtcagcccctgataccatcccccccaaagagagtggcgttgcttactatgtggacctgcatggacatgcttccaaaaggggctgcttcatgtacggaaacagctttagtgatgagagcacccaggtggaaaacatgctatatccaaagctcatctccttgaattcagcccacttcgacttccagggctgcaatttctcagagaagaatatgtatgcccgagaccgtagagatggccagtctaaagagggaagcggccgtgttgcaatctacaaagcctcagggataatccacagctacacacttgaatgcaactacaacactggacgctcagtaaacagcatccctgctgcctgccatgacaatgggcgtgccagcccccctcccccgccggctttcccctccagatacactgtggaactatttgagcaggtgggacgagctatggccattgcagccctggacatggcggaatgtaatccgtggccccgaattgtactgtcagagcacagcagccttactaatctacgggcctggatgctgaaacatgtacgcaacagccgaggcctaagcagcactctgaatgtgggtgtcaacaagaagaggggccttcgaactccacccaaaagtcacaatgggttgcctgtctcctgctccgaaaacaccttgagtcgggcacgaagttttagcaccggcacaagtgccggtggtagcagcagcagccaacaaaattctccacagatgaagaattcccccagctttccttttcatggcagtcggcctgcagggctgccaggcctgggctctagtacccaaaaggtcacccaccgggtgctgggccccgtcagagagccccgaagccaggacaggagacggcagcagcagcccctgaaccatcgtcctgcaggcagcctcgctccatccccagctcctactagttctggcccagcctcctcacacaagctgggctcctgtctactgcctgattcattcaacataccagggagcagttgctcactcttgtcctctggagacaaaccagaggctgtcatggtaatcgggaaaggtctgctagggactggagctcggatgccctgcatcaagactcgattgcaggctaggcccaggttgggccggggctcaccgccgactcgcagagggatgaaaggctcttcaggccccacatcccctaccccccggaccagggagagcagtgagctggagctgggatcctgctctgctacaccagggctgcctcaggccaggcccccacggccccgctctgcccctgccttttctcctatatcctgtagtctatctgactccccatcctggaattgttacagcaggggtcccttgggccaacctgaggtttgttttgtccctaaatctcccccactgactgtttctccccgggtctgataatgcctttatgttcaatcccaggatatagccccaagatggggtaacagtgggaaatatgctagttcccctccaggccgctgattccatgtgacagccgttaagtccttggaatgccagccacgctgtccaaggcattacagagtatcaccttgagacagaacaaaacagggacctgccaccccttccctccctccgcagcacaagattttgggaccacaaaaaaaagtctatatttttatattggggggagggagtagaaaagcaagcccctatactgggccctattcagtggcagcttcttgttccataggattaaggaagactctgaggaactgcaagggaaactgccagagctgcagggcgtcgagactgaactgtgctacaacgtgaactggacagctgaggccctc

SEQ ID NO: 355033 - DNA, 3393 bp, Homo sapiens
acggccaataggcgagagacttcttgtttcctggcagagcggggtcccggcaccgcggcgctcgggtgtttttgggggcccgggtggagggcccgggtgccggggcccaaggtgcggcctcgctagcgggagagggagcgggatcaccggcccggagagagctctcagggccagagcggggcaggaggatgctttcccagccccaccatggagctgcgctgtgggggattgctgttcagttctcgctttgattcagggaatctagcccacgtggagaaggtggaatctttgtccagtgatggggaaggggtaggaggtggggcgtcagccctgaccagtggcattgcctcttcccctgactatgaattcaacgtgtggacccgaccagactgtgctgaaacggaatttgagaatgggaacaggtcatggttctacttcagcgtccggggaggaatgccaggaaaactcatcaagatcaacattatgaacatgaacaagcagagcaagctgtattcccagggcatggccccctttgtgcgcacactgcccacccggccacgctgggaacgcattcgagaccggcccacctttgagatgacagagacgcagtttgtgttatcctttgttcatcgtttcgtggagggccgtggggccaccaccttcttcgccttctgctaccccttctcctacagtgactgccaggaactgctaaaccagctagaccagcgctttccggagaaccaccctacccatagcagccccctggataccatctattaccatcgggagctcctttgctattctctggatggacttcgtgtagatctgctgacgatcacttcctgccatgggcttcgagaagatcgagagccccgtctagagcagctatttcctgataccagcacccctcgaccattccgtttcgcaggcaagaggatattcttcttaagcagtagagtacacccaggggagactccatctagctttgtcttcaatggctttctggacttcatcctccgacctgatgatccccgggcccaaaccctccgtcgcctcttcgtctttaagctgattcccatgttgaaccccgatggtgtggtccggggacactaccgcacagactcacgtggagtgaatctgaaccgtcagtacctgaagcctgatgccgtcctgcacccggccatctatggggccaaagctgtgcttctctaccaccatgtgcactctcgtctgaactcccagagttcctctgagcaccagcccagttcctgtctccctcctgatgctcctgtttctgacctggagaaagccaacaatctccaaaatgaagctcagtgtgggcactcagctgacaggcataacgctgaagcctggaaacaaacagagccagcagaacagaagctcaacagtgtgtggattatgccacaacagtctgcggggcttgaagagtcagcccctgataccatcccccccaaagagagtggcgttgcttactatgtggacctgcatggacatgcttccaaaaggggctgcttcatgtacggaaacagctttagtgatgagagcacccaggtggaaaacatgctatatccaaagctcatctccttgaattcagcccacttcgacttccagggctgcaatttctcagagaagaatatgtatgcccgagaccgtagagatggccagtctaaagagggaagcggccgtgttgcaatctacaaagcctcagggataatccacagctacacacttgaatgcaactacaacactggacgctcagtaaacagcatccctgctgcctgccatgacaatgggcgtgccagcccccctcccccgccggctttcccctccagatacactgtggaactatttgagcaggtgggacgagctatggccattgcagccctggacatggcggaatgtaatccgtggccccgaattgtactgtcagagcacagcagccttactaatctacgggcctggatgctgaaacatgtacgcaacagccgaggcctaagcagcactctgaatgtgggtgtcaacaagaagaggggccttcgaactccacccaaaagtcacaatgggttgcctgtctcctgctccgaaaacaccttgagtcgggcacgaagttttagcaccggcacaagtgccggtggtagcagcagcagccaacaaaattctccacagatgaagaattcccccagctttccttttcatggcagtcggcctgcagggctgccaggcctgggctctagtacccaaaaggtcacccaccgggtgctgggccccgtcagagagccccgaagccaggacaggagacggcagcagcagcccctgaaccatcgtcctgcaggcagcctcgctccatccccagctcctactagttctggcccagcctcctcacacaagctgggctcctgtctactgcctgattcattcaacataccagggagcagttgctcactcttgtcctctggagacaaaccagaggctgtcatggtaatcgggaaaggtctgctagggactggagctcggatgccctgcatcaagactcgattgcaggctaggcccaggttgggccggggctcaccgccgactcgcagagggatgaaaggctcttcaggccccacatcccctaccccccggaccagggagagcagtgagctggagctgggatcctgctctgctacaccagggctgcctcaggccaggcccccacggccccgctctgcccctgccttttctcctatatcctgtagtctatctgactccccatcctggaattgttacagcaggggtcccttgggccaacctgaggtttgttttgtccctaaatctcccccactgactgtttctccccgggtctgataatgcctttatgttcaatcccaggatatagccccaagatggggtaacagtgggaaatatgctagttcccctccaggccgctgattccatgtgacagccgttaagtccttggaatgccagccacgctgtccaaggcattacagagtatcaccttgagacagaacaaaacagggacctgccaccccttccctccctccgcagcacaagattttgggaccacaaaaaaaagtctatatttttatattggggggagggagtagaaaagcaagcccctatactgggccctattcagtggcagcttcttgttccttaatcctatggaacaagaagctgccactgaatgaagtcgccggtcaccgttggggagaagtcagggaagaggaagaggtggcgttccccagcctcacccgtggagaccccagcgaagcgggggcaggcaggcactgctggaggagcgaaggccaggtggacacgaggacagattccagaggcttggttttatgtgcagttttctttgtcctcacc

SEQ ID NO: 355034 - DNA, 2892 bp, Homo sapiens
acggccaataggcgagagacttcttgtttcctggcagagcggggtcccggcaccgcggcgctcgggtgtttttgggggcccgggtggagggcccgggtgccggggcccaaggtgcggcctcgctagcgggagagggagcgggatcaccggcccggagagagctctcagggccagagcggggcaggaggatgctttcccagccccaccatggagctgcgctgtgggggattgctgttcagttctcgctttgattcagggaatctagcccacgtggagaaggtggaatctttgtccagtgatggggaaggggtaggaggtggggcgtcagccctgaccagtggcattgcctcttcccctgactatgaattcaacgtgtggacccgaccagactgtgctgaaacggaatttgagaatgggaacaggtcatggttctacttcagcgtccggggaggaatgccaggaaaactcatcaagatcaacattatgaacatgaacaagcagagcaagctgtattcccagggcatggccccctttgtgcgcacactgcccacccggccacgctgggaacgcattcgagaccggcccacctttgagatgacagagacgcagtttgtgttatcctttgttcatcgtttcgtggagggccgtggggccaccaccttcttcgccttctgctaccccttctcctacagtgactgccaggaactgctaaaccagctagaccagcgctttccggagaaccaccctacccatagcagccccctggataccatctattaccatcgggagctcctttgctattctctggatggacttcgtgtagatctgctgacgatcacttcctgccatgggcttcgagaagatcgagagccccgtctagagcagctatttcctgataccagcacccctcgaccattccgtttcgcaggcaagaggatattcttcttaagcagtagagtacacccaggggagactccatctagctttgtcttcaatggctttctggacttcatcctccgacctgatgatccccgggcccaaaccctccgtcgcctcttcgtctttaagctgattcccatgttgaaccccgatggtgtggtccggggacactaccgcacagactcacgtggagtgaatctgaaccgtcagtacctgaagcctgatgccgtcctgcacccggccatctatggggccaaagctgtgcttctctaccaccatgtgcactctcgtctgaactcccagagttcctctgagcaccagcccagttcctgtctccctcctgatgctcctgtttctgacctggagaaagccaacaatctccaaaatgaagctcagtgtgggcactcagctgacaggcataacgctgaagcctggaaacaaacagagccagcagaacagaagctcaacagtgtgtggattatgccacaacagtctgcggggcttgaagagtcagcccctgataccatcccccccaaagagagtggcgttgcttactatgtggacctgcatggacatgcttccaaaaggggctgcttcatgtacggaaacagctttagtgatgagagcacccaggtggaaaacatgctatatccaaagctcatctccttgaattcagcccacttcgacttccagggctgcaatttctcagagaagaatatgtatgcccgagaccgtagagatggccagtctaaagagggaagcggccgtgttgcaatctacaaagcctcagggataatccacagctacacacttgaatgcaactacaacactggacgctcagtaaacagcatccctgctgcctgccatgacaatgggcgtgccagcccccctcccccgccggctttcccctccagatacactgtggaactatttgagcaggtgggacgagctatggccattgcagccctggacatggcggaatgtaatccgtggccccgaattgtactgtcagagcacagcagccttactaatctacgggcctggatgctgaaacatgtacgcaacagccgaggcctaagcagcactctgaatgtgggtgtcaacaagaagaggggccttcgaactccacccaaaagtcacaatgggttgcctgtctcctgctccgaaaacaccttgagtcgggcacgaagttttagcaccggcacaagtgccggtggtagcagcagcagccaacaaaattctccacagatgaagaattcccccagctttccttttcatggcagtcggcctgcagggctgccaggcctgggctctagtacccaaaaggtcacccaccgggtgctgggccccgtcagagagccccgaagccaggacaggagacggcagcagcagcccctgaaccatcgtcctgcaggcagcctcgctccatccccagctcctactagttctggcccagcctcctcacacaagctgggctcctgtctactgcctgattcattcaacataccaggtctgtacccactgccactgaaatctgggtttgccagcctcctccatggccaggccaggttctttaagcctagttgggagaccaggggcatcacttatcctcttggtatcctaaacctctaacactggtgcctttgtataggaagctggaatttattaatgtgtctgtgtaataaaacaatagttaacatttactgaacatttactatgtgccaggcactgctctacacacttaatctcattttatcagttgaggaacctgaagacttttgtctacctgcaaaatgctacttatgcaaattccctgactccaggagctgggcaacactagacaaaacaggagaatgaaaaaagcatgacggtactttctcctgtcaacactgctaaatgctgtgtgtagccgtatcattcacacaaagccatctcttctcctttaaattatag

SEQ ID NO: 355035 - DNA, 2270 bp, Homo sapiens
acggccaataggcgagagacttcttgtttcctggcagagcggggtcccggcaccgcggcgctcgggtgtttttgggggcccgggtggagggcccgggtgccggggcccaaggtgcggcctcgctagcgggagagggagcgggatcaccggcccggagagagctctcagggccagagcggggcaggaggatgctttcccagccccaccatggagctgcgctgtgggggattgctgttcagttctcgctttgattcagggaatctagcccacgtggagaaggtggaatctttgtccagtgatggggaaggggtaggaggtggggcgtcagccctgaccagtggcattgcctcttcccctgactatgaattcaacgtgtggacccgaccagactgtgctgaaacggaatttgagaatgggaacaggtcatggttctacttcagcgtccggggaggaatgccaggaaaactcatcaagatcaacattatgaacatgaacaagcagagcaagctgtattcccagggcatggccccctttgtgcgcacactgcccacccggccacgctgggaacgcattcgagaccggcccacctttgagatgacagagacgcagtttgtgttatcctttgttcatcgtttcgtggagggccgtggggccaccaccttcttcgccttctgctaccccttctcctacagtgactgccaggaactgctaaaccagctagaccagcgctttccggagaaccaccctacccatagcagccccctggataccatctattaccatcgggagctcctttgctattctctggatggacttcgtgtagatctgctgacgatcacttcctgccatgggcttcgagaagatcgagagccccgtctagagcagctatttcctgataccagcacccctcgaccattccgtttcgcaggcaagaggatattcttcttaagcagtagagtacacccaggggagactccatctagctttgtcttcaatggctttctggacttcatcctccgacctgatgatccccgggcccaaaccctccgtcgcctcttcgtctttaagctgattcccatgttgaaccccgatggtgtggtccggggacactaccgcacagactcacgtggagtgaatctgaaccgtcagtacctgaagcctgatgccgtcctgcacccggccatctatggggccaaagctgtgcttctctaccaccatgtgcactctcgtctgaactcccagagttcctctgagcaccagcccagttcctgtctccctcctgatgctcctgtttctgacctggagaaagccaacaatctccaaaatgaagctcagtgtgggcactcagctgacaggcataacgctgaagcctggaaacaaacagagccagcagaacagaagctcaacagtgtgtggattatgccacaacagtctgcggggcttgaagagtcagcccctgataccatcccccccaaagagagtggcgttgcttactatgtggacctgcatggacatgcttccaaaaggggctgcttcatgtacggaaacagctttagtgatgagagcacccaggtggaaaacatgctatatccaaagctcatctccttgaattcagcccacttcgacttccagggctgcaatttctcagagaagaatatgtatgcccgagaccgtagagatggccagtctaaagagggaagcggccgtgttgcaatctacaaagcctcagggataatccacagctacacacttgaatgcaactacaacactggacgctcagtaaacagcatccctgctgcctgccatgacaatgggcgtgccagcccccctcccccgccggctttcccctccagatacactgtggaactatttgagcaggtgggacgagctatggccattgcagccctggacatggcggaatgtaatccgtggccccgaattgtactgtcagagcacagcagccttactaatctacgggcctggatgctgaaacatgtacgcaacagccgaggcctaagcagcactctgaatgtgggtgtcaacaagaagaggggccttcgaactccacccaaaagtcacaatgggttgcctgtctcctgctccgaaaacaccttgagtcgggcacgaagttttagcaccggcacaagtgccggtggtagcagcagcagccaacaaaattctccacagatgaagtaagagcttgaagatatactgttggcccaggaccaaggggtgaatcaataaaattagtttgtagcagaaaaaaaaac

SEQ ID NO: 355036 - DNA, 2436 bp, Homo sapiens
aacgctctttctgcgttcaatgtacatgtgttgagtcccagtttctgccgctttatctttcccgcctcccggcaggcaggccgttaaccgtcttccggaagacgctgctagaaccctccggccgctcctgcccgccatcgtccccgaacgacactcgctcagctctcagggccagagcggggcaggaggatgctttcccagccccaccatggagctgcgctgtgggggattgctgttcagttctcgctttgattcagggaatctagcccacgtggagaaggtggaatctttgtccagtgatggggaaggggtaggaggtggggcgtcagccctgaccagtggcattgcctcttcccctgactatgaattcaacgtgtggacccgaccagactgtgctgaaacggaatttgagaatgggaacaggtcatggttctacttcagcgtccggggaggaatgccaggaaaactcatcaagatcaacattatgaacatgaacaagcagagcaagctgtattcccagggcatggccccctttgtgcgcacactgcccacccggccacgctgggaacgcattcgagaccggcccacctttgagatgacagagacgcagtttgtgttatcctttgttcatcgtttcgtggagggccgtggggccaccaccttcttcgccttctgctaccccttctcctacagtgactgccaggaactgctaaaccagctagaccagcgctttccggagaaccaccctacccatagcagccccctggataccatctattaccatcgggagctcctttgctattctctggatggacttcgtgtagatctgctgacgatcacttcctgccatgggcttcgagaagatcgagagccccgtctagagcagctatttcctgataccagcacccctcgaccattccgtttcgcaggcaagaggatattcttcttaagcagtagagtacacccaggggagactccatctagctttgtcttcaatggctttctggacttcatcctccgacctgatgatccccgggcccaaaccctccgtcgcctcttcgtctttaagctgattcccatgttgaaccccgatggtgtggtccggggacactaccgcacagactcacgtggagtgaatctgaaccgtcagtacctgaagcctgatgccgtcctgcacccggccatctatggggccaaagctgtgcttctctaccaccatgtgcactctcgtctgaactcccagagttcctctgagcaccagcccagttcctgtctccctcctgatgctcctgtttctgacctggagaaagccaacaatctccaaaatgaagctcagtgtgggcactcagctgacaggcataacgctgaagcctggaaacaaacagagccagcagaacagaagctcaacagtgtgtggattatgccacaacagtctgcggggcttgaagagtcagcccctgataccatcccccccaaagagagtggcgttgcttactatgtggacctgcatggacatgcttccaaaaggggctgcttcatgtacggaaacagctttagtgatgagagcacccaggtggaaaacatgctatatccaaagctcatctccttgaattcagcccacttcgacttccagggctgcaatttctcagagaagaatatgtatgcccgagaccgtagagatggccagtctaaagagggaagcggccgtgttgcaatctacaaagcctcagggataatccacagctacacacttgaatgcaactacaacactggacgctcagtaaacagcatccctgctgcctgccatgacaatgggcgtgccagcccccctcccccgccggctttcccctccagatacactgtggaactatttgagcaggtgggacgagctatggccattgcagccctggacatggcggaatgtaatccgtggccccgaattgtactgtcagagcacagcagccttactaatctacgggcctggatgctgaaacatgtacgcaacagccgaggcctaagcagcactctgaatgtgggtgtcaacaagaagaggggccttcgaactccacccaaaagtcacaatgggttgcctgtctcctgctccgaaaacaccttgagtcgggcacgaagttttagcaccggcacaagtgccggtggtagcagcagcagccaacaaaattctccacagatgaagaattcccccagctttccttttcatggcagtcggcctgcagggctgccaggcctgggctctagtacccaaaaggtcacccaccgggtgctgggccccgtcagaggtaagccagtctgggagcccctgcaacatgtgttcggttgtctggggcattgctgggggaagtaagagcttgaagatatactgttggcccaggaccaaggggtgaatcaataaaattagtttgtagcagaaaaaaaaac

SEQ ID NO: 355037 - DNA, 1893 bp, Homo sapiens
cggtacccgtctgagcaagctggtacgcattcgagaccggcccacctgtgagatgacagagacgcagtttgtgttatcctttgttcatcgtttcgtggagggccgtggggccaccaccttcttcgccttctgctaccccttctcctacagtgactgccaggaactgctaaaccagctagaccagcgctttccggagaaccaccctacccatagcagccccctggataccatctattaccatcgggagctcctttgctattctctggatggacttcgtgtagatctgctgacgatcacttcctgccatgggcttcgagaagatcgagagccccgtctagagcagctatttcctgataccagcacccctcgaccattccgtttcgcaggcaagaggatattcttcttaagcagtagagtacacccaggggagactccatctagctttgtcttcaatggctttctggacttcatcctccgacctgatgatccccgggcccaaaccctccgtcgcctcttcgtctttaagctgattcccatgttgaaccccgatggtgtggtccggggacactaccgcacagactcacgtggagtgaatctgaaccgtcagtacctgaagcctgatgccgtcctgcacccggccatctatggggccaaagctgtgcttctctaccaccatgtgcactctcgtctgaactcccagagttcctctgagcaccagcccagttcctgtctccctcctgatgctcctgtttctgacctggagaaagccaacaatctccaaaatgaagctcagtgtgggcactcagctgacaggcataacgctgaagcctggaaacaaacagagccagcagaacagaagctcaacagtgtgtggattatgccacaacagtctgcggggcttgaagagtcagcccctgataccatcccccccaaagagagtggcgttgcttactatgtggacctgcatggacatgcttccaaaaggggctgcttcatgtacggaaacagctttagtgatgagagcacccaggtggaaaacatgctatatccaaagctcatctccttgaattcagcccacttcgacttccagggctgcaatttctcagagaagaatatgtatgcccgagaccgtagagatggccagtctaaagagggaagcggccgtgttgcaatctacaaagcctcagggataatccacagctacacacttgaatgcaactacaacactggacgctcagtaaacagcatccctgctgcctgccatgacaatgggcgtgccagcccccctcccccgccggctttcccctccagatacactgtggaactatttgagcaggtgggacgagctatggccattgcagccctggacatggcggaatgtaatccgtggccccgaattgtactgtcagagcacagcagccttactaatctacgggcctggatgctgaaacatgtacgcaacagccgaggcctaagcagcactctgaatgtgggtgtcaacaagaagaggggccttcgaactccacccaaaagtcacaatgggttgcctgtctcctgctccgaaaacaccttgagtcgggcacgaagttttagcaccggcacaagtgccggtggtagcagcagcagccaacaaaattctccacagatgaagaattcccccagctttccttttcatggcagtcggcctgcagggctgccaggcctgggctctagtacccaaaaggtcacccaccgggtgctgggccccgtcagaggtaagccagtctgggagcccctgcaacatgtgttcggttgtctggggcattgctgggggaagtaagagcttgaagatatactgttggcccaggaccaaggggtgaatcaataaaattagtttgtagcagaaaaaaaaac

SEQ ID NO: 355038 - DNA, 1393 bp, Homo sapiens
tgagacagtctcactctgtcgcccaggctggtggagaatggataactgtaataaatagtaggtctttctacccatcttatattaatagttacttcaggagagggatgtgggtctgatgacaagcttgaaaactggcatcttttgaccacggaagccagcaggtcagtgaaggctgcctcatagtgccccacttatttgcccttttatctgcttgtatctcttccactcagagccccgaagccaggacaggagacggcagcagcagcccctgaaccatcgtcctgcaggcagcctcgctccatccccagctcctactagttctggcccagcctcctcacacaagctgggctcctgtctactgcctgattcattcaacataccagggagcagttgctcactcttgtcctctggagacaaaccagaggctgtcatggtaatcgggaaaggtctgctagggactggagctcggatgccctgcatcaagactcgattgcaggctaggcccaggttgggccggggctcaccgccgactcgcagagggatgaaaggctcttcaggccccacatcccctaccccccggaccagggagagcagtgagctggagctgggatcctgctctgctacaccagggctgcctcaggccaggcccccacggccccgctctgcccctgccttttctcctatatcctgtagtctatctgactccccatcctggaattgttacagcaggggtcccttgggccaacctgaggtttgttttgtccctaaatctcccccactgactgtttctccccgggtctgataatgcctttatgttcaatcccaggatatagccccaagatggggtaacagtgggaaatatgctagttcccctccaggccgctgattccatgtgacagccgttaagtccttggaatgccagccacgctgtccaaggcattacagagtatcaccttgagacagaacaaaacagggacctgccaccccttccctccctccgcagcacaagattttgggaccacaaaaaaaagtctatatttttatattggggggagggagtagaaaagcaagcccctatactgggccctattcagtggcagcttcttgttccataggattaaggaagactctgaggaaataaaagttgtttggaaaaatccaggtgtagttgctttgtatgttgtgatgggtagaagggatgaagtgaagtgtgaaggcccctcataccctccatcttgcctcagactatgtcctggaaccctggggcggagaaagcgccactttcattcctgcttcttgggattgttgacggccacgtagtgatagagaacgacaagcaagaagagcgacacgcccagcatgttggcgaagatggcgagctgcacgtccgtga

SEQ ID NO: 355039 - DNA, 1142 bp, Homo sapiens
aagtgtacactgctctggcaggggctaaagcatagagggctctgagagaggtctaccaaccctccactatctttctacacagtgtttctctactcacccagaccttagtcatggtgtagccatggcggttaaatgctggatccgtttgccacccctagttatagacttggaaactctagaagcaaactaaaagcaaaaaactcatggaagaatccagcctcttagcgcaaaccctgtccacacaggctaggcccaggttgggccggggctcaccgccgactcgcagagggatgaaaggctcttcaggccccacatcccctaccccccggaccagggagagcagtgagctggagctgggatcctgctctgctacaccagggctgcctcaggccaggcccccacggccccgctctgcccctgccttttctcctatatcctgtagtctatctgactccccatcctggaattgttacagcaggggtcccttgggccaacctgaggtttgttttgtccctaaatctcccccactgactgtttctccccgggtctgataatgcctttatgttcaatcccaggatatagccccaagatggggtaacagtgggaaatatgctagttcccctccaggccgctgattccatgtgacagccgttaagtccttggaatgccagccacgctgtccaaggcattacagagtatcaccttgagacagaacaaaacagggacctgccaccccttccctccctccgcagcacaagattttgggaccacaaaaaaaagtctatatttttatattggggggagggagtagaaaagcaagcccctatactgggccctattcagtggcagcttcttgttccataggattaaggaagactctgaggaaataaaagttgtttggaaaaatccaggtgtagttgctttgtatgttgtgatgggtagaagggatgaagtgaagtgtgaaggcccctcataccctccatcttgcctcagactatgtcctggaaccctggggcggagaaagcgccactttcattcctgcttcttgggattgttgacggccacgtagtgatagagaacgacaagcaagaagagcgacacgcccagcatgttggcgaagatggcgagctgcacgtccgtga

SEQ ID NO: 355040 - DNA, 471 bp, Homo sapiens
cttctctctctctctcccccccccccccccccctaaaaaaaaaaaaaaaaaaaaaaaaaaaaaaaaaaaaaaaaaaaaaaaaaaaaaaaaaaaaaaacacaaaaaaaagtctatatttttatattggggggagggagtagaaaagcaagcccctatactgggccctattcagtggcagcttcttgttccataggattaaggaagactctgaggaaataaaagttgtttggaaaaatccaggtgtagttgctttgtatgttgtgatgggtagaagggatgaagtgaagtgtgaaggcccctcataccctccatcttgcctcagactatgtcctggaaccctggggcggagaaagcgccactttcattcctgcttcttgggattgttgacggccacgtagtgatagagaacgacaagcaagaagagcgacacgcccagcatgttggcgaagatggcgagctgcacgtccgtga

SEQ ID NO: 355041 - DNA, 459 bp, Homo sapiens
tttttctccccccacaaatataaaaaaaaaataaaaaaaaaaaaaaaaaaaacaaaaaaaaaaaaaaaaaaaaaaaaaaaaaaaacacaaaaaaaagtctatatttttatattggggggagggagtagaaaagcaagcccctatactgggccctattcagtggcagcttcttgttccataggattaaggaagactctgaggaaataaaagttgtttggaaaaatccaggtgtagttgctttgtatgttgtgatgggtagaagggatgaagtgaagtgtgaaggcccctcataccctccatcttgcctcagactatgtcctggaaccctggggcggagaaagcgccactttcattcctgcttcttgggattgttgacggccacgtagtgatagagaacgacaagcaagaagagcgacacgcccagcatgttggcgaagatggcgagctgcacgtccgtga

SEQ ID NO: 355042 - DNA, 439 bp, Homo sapiens
cttctctctctctctcccccccccccccccccctaaaaaaaaaaaaaaaaaaaaaaaaaaaaaaacacaaaaaaaagtctatatttttatattggggggagggagtagaaaagcaagcccctatactgggccctattcagtggcagcttcttgttccataggattaaggaagactctgaggaaataaaagttgtttggaaaaatccaggtgtagttgctttgtatgttgtgatgggtagaagggatgaagtgaagtgtgaaggcccctcataccctccatcttgcctcagactatgtcctggaaccctggggcggagaaagcgccactttcattcctgcttcttgggattgttgacggccacgtagtgatagagaacgacaagcaagaagagcgacacgcccagcatgttggcgaagatggcgagctgcacgtccgtga

SEQ ID NO: 355043 - DNA, 826 bp, Homo sapiens
tgagacagtctcactctgtcgcccaggctggtggagaatggataactgtaataaatagtaggtctttctacccatcttatattaatagttacttcaggagagggatgtgggtctgatgacaagcttgaaaactggcatcttttgaccacggaagccagcaggtcagtgaaggctgcctcatagtgccccacttatttgcccttttatctgcttgtatctcttccactcagagccccgaagccaggacaggagacggcagcagcagcccctgaaccatcgtcctgcaggcagcctcgctccatccccagctcctactagttctggcccagcctcctcacacaagctgggctcctgtctactgcctgattcattcaacataccaggtctgtacccactgccactgaaatctgggtttgccagcctcctccatggccaggccaggttctttaagcctagttgggagaccaggggcatcacttatcctcttggtatcctaaacctctaacactggtgcctttgtataggaagctggaatttattaatgtgtctgtgtaataaaacaatagttaacatttactgaacatttactatgtgccaggcactgctctacacacttaatctcattttatcagttgaggaacctgaagacttttgtctacctgcaaaatgctacttatgcaaattccctgactccaggagctgggcaacactagacaaaacaggagaatgaaaaaagcatgacggtactttctcctgtcaacactgctaaatgctgtgtgtagccgtatcattcacacaaagccatctcttctcctttaaattatag

SEQ ID NO: 355044 - DNA, 702 bp, Homo sapiens
cctctctcttttctgttgcaggctgcctcaggccaggcccccacggccccgctctgcccctgccttttctcctatatcctgtagtctatctgactccccatcctggaattgttacagcaggggtcccttgggccaacctgaggtttgttttgtccctaaatctcccccactgactgtttctccccgggtctgataatgcctttatgttcaatcccaggatatagccccaagatggggtaacagtgggaaatatgctagttcccctccaggccgctgattccatgtgacagccgttaagtccttggaatgccagccacgctgtccaaggcattacagagtatcaccttgagacagaacaaaacagggactagaaaagcaagcccctatactgggccctattcagtggcagcttcttgttccataggattaaggaagactctgaggaaataaaagttgtttggaaaaatccaggtgtagttgctttgtatgttgtgatgggtagaagggatgaagtgaagtgtgaaggcccctcataccctccatcttgcctcagactatgtcctggaaccctggggcggagaaagcgccactttcattcctgcttcttgggattgttgacggccacgtagtgatagagaacgacaagcaagaagagcgacacgcccagcatgttggcgaagatggcgagctgcacgtccgtga

SEQ ID NO: 355045 - DNA, 124 bp, Homo sapiens
gtgtttttgggggcccgggtggagggcccgggtgccggggcccaaggtgcggcctcgctagcgggagagggagcgggatcaccggcccggagagaggtgaggggctctgcgcggactacgggcc

SEQ ID NO: 355046 - DNA, 453 bp, Homo sapiens
aaaagtctatatttttatattggggggagggagtagaaaagcaagcccctatactgggccctattcagtggcagcttcttgttccataggattaaggaagactctgaggaaataaaagttgtttggaaaaatccaggtgtagttgctttgtatgttgtgatgggtagaagggatgaagtgaagtgtgaaggcccctcataccctccatcttgcctcagactatgtcctggaaccctagaaaagagggggaaagacctgaggtaaggaaaatgctgcagctttcctctggggaatccttcaggaagtaacgcccatccatgttccctttatacttgtgacccacacttaaggctggctccaaagcccccccttccttctctatagtttgggtcagcagccaacccctggcctcagaacatggaaacagaattctacatctgtcacccccctcac

SEQ ID NO: 355047 - DNA, 626 bp, Homo sapiens
  misc_feature (7)..(7): n is a, c, g, or t
  misc_feature (93)..(94): n is a, c, g, or t
cacaccntgggtgacaggccctgggaggccctcaaagggacaccccctttctactactatgcattctatgagcttgtagccaaaggcagtgcnntgtgccttgggcacacctaataagtgcagttctgcacctggaaccccaagccaatgtggtgaggacaatgggaggggcattctgttgctggtgggtggggcaagctgggactccagagcaggcctgccttgccctcctccctatcaggtacatgggctttgcatctgtccccaccagtcggtgcacactgtgagtgctgccaagacctgcaccaggatcatccatgacatgcagcagagcctgggcacccccatgcctgctgggatgaatgccatgctctactctgcctggccatacctgccacaggtccgcccaccccatatctacctttctggttctgcctcagaatgtgagtgccatgggcatgtctacagttgtcactttgacacagctgtaagccagtctgggagcccctgcaacatgtgttcggttgtctggggcattgctgggggaagtaagagcttgaagatatactgttggcccaggaccaaggggtgaatcaataaaattagtttgtagcagaaaaaaaaac

SEQ ID NO: 355048 - DNA, 3459 bp, Homo sapiens
acggccaataggcgagagacttcttgtttcctggcagagcggggtcccggcaccgcggcgctcgggtgtttttgggggcccgggtggagggcccgggtgccggggcccaaggtgcggcctcgctagcgggagagggagcgggatcaccggcccggagagagctctcagggccagagcggggcaggaggatgctttcccagccccaccatggagctgcgctgtgggggattgctgttcagttctcgctttgattcagggaatctagcccacgtggagaaggtggaatctttgtccagtgatggggaaggggtaggaggtggggcgtcagccctgaccagtggcattgcctcttcccctgactatgaattcaacgtgtggacccgaccagactgtgctgaaacggaatttgagaatgggaacaggtcatggttctacttcagcgtccggggaggaatgccaggaaaactcatcaagatcaacattatgaacatgaacaagcagagcaagctgtattcccagggcatggccccctttgtgcgcacactgcccacccggccacgctgggaacgcattcgagaccggcccacctttgagatgacagagacgcagtttgtgttatcctttgttcatcgtttcgtggagggccgtggggccaccaccttcttcgccttctgctaccccttctcctacagtgactgccaggaactgctaaaccagctagaccagcgctttccggagaaccaccctacccatagcagccccctggataccatctattaccatcgggagctcctttgctattctctggatggacttcgtgtagatctgctgacgatcacttcctgccatgggcttcgagaagatcgagagccccgtctagagcagctatttcctgataccagcacccctcgaccattccgtttcgcaggcaagaggatattcttcttaagcagtagagtacacccaggggagactccatctagctttgtcttcaatggctttctggacttcatcctccgacctgatgatccccgggcccaaaccctccgtcgcctcttcgtctttaagctgattcccatgttgaaccccgatggtgtggtccggggacactaccgcacagactcacgtggagtgaatctgaaccgtcagtacctgaagcctgatgccgtcctgcacccggccatctatggggccaaagctgtgcttctctaccaccatgtgcactctcgtctgaactcccagagttcctctgagcaccagcccagttcctgtctccctcctgatgctcctgtttctgacctggagaaagccaacaatctccaaaatgaagctcagtgtgggcactcagctgacaggcataacgctgaagcctggaaacaaacagagccagcagaacagaagctcaacagtgtgtggattatgccacaacagtctgcggggcttgaagagtcagcccctgataccatcccccccaaagagagtggcgttgcttactatgtggacctgcatggacatgcttccaaaaggggctgcttcatgtacggaaacagctttagtgatgagagcacccaggtggaaaacatgctatatccaaagctcatctccttgaattcagcccacttcgacttccagggctgcaatttctcagagaagaatatgtatgcccgagaccgtagagatggccagtctaaagagggaagcggccgtgttgcaatctacaaagcctcagggataatccacagctacacacttgaatgcaactacaacactggacgctcagtaaacagcatccctgctgcctgccatgacaatgggcgtgccagcccccctcccccgccggctttcccctccagatacactgtggaactatttgagcaggtgggacgagctatggccattgcagccctggacatggcggaatgtaatccgtggccccgaattgtactgtcagagcacagcagccttactaatctacgggcctggatgctgaaacatgtacgcaacagccgaggcctaagcagcactctgaatgtgggtgtcaacaagaagaggggccttcgaactccacccaaaagtcacaatgggttgcctgtctcctgctccgaaaacaccttgagtcgggcacgaagttttagcaccggcacaagtgccggtggtagcagcagcagccaacaaaattctccacagatgaagaattcccccagctttccttttcatggcagtcggcctgcagggctgccaggcctgggctctagtacccaaaaggtcacccaccgggtgctgggccccgtcagagagccccgaagccaggacaggagacggcagcagcagcccctgaaccatcgtcctgcaggcagcctcgctccatccccagctcctactagttctggcccagcctcctcacacaagctgggctcctgtctactgcctgattcattcaacataccagggagcagttgctcactcttgtcctctggagacaaaccagaggctgtcatggtaatcgggaaaggtctgctagggactggagctcggatgccctgcatcaagactcgattgcaggctaggcccaggttgggccggggctcaccgccgactcgcagagggatgaaaggctcttcaggccccacatcccctaccccccggaccagggagagcagtgagctggagctgggatcctgctctgctacaccagggctgcctcaggccaggcccccacggccccgctctgcccctgccttttctcctatatcctgtagtctatctgactccccatcctggaattgttacagcaggggtcccttgggccaacctgaggtttgttttgtccctaaatctcccccactgactgtttctccccgggtctgataatgcctttatgttcaatcccaggatatagccccaagatggggtaacagtgggaaatatgctagttcccctccaggccgctgattccatgtgacagccgttaagtccttggaatgccagccacgctgtccaaggcattacagagtatcaccttgagacagaacaaaacagggacctgccaccccttccctccctccgcagcacaagattttgggaccacaaaaaaaagtctatatttttatattggggggagggagtagaaaagcaagcccctatactgggccctattcagtggcagcttcttgttccataggattaaggaagactctgaggaaataaaagttgtttggaaaaatccaggtgtagttgctttgtatgttgtgatgggtagaagggatgaagtgaagtgtgaaggcccctcataccctccatcttgcctcagactatgtcctggaaccctggggcggagaaagcgccactttcattcctgcttcttgggattgttgacggccacgtagtgatagagaacgacaagcaagaagagcgacacgcccagcatgttggcgaagatggcgagctgcacgtccgtga

SEQ ID NO: 355049 - DNA, 2919 bp, Homo sapiens
acggccaataggcgagagacttcttgtttcctggcagagcggggtcccggcaccgcggcgctcgggtgtttttgggggcccgggtggagggcccgggtgccggggcccaaggtgcggcctcgctagcgggagagggagcgggatcaccggcccggagagagctctcagggccagagcggggcaggaggatgctttcccagccccaccatggagctgcgctgtgggggattgctgttcagttctcgctttgattcagggaatctagcccacgtggagaaggtggaatctttgtccagtgatggggaaggggtaggaggtggggcgtcagccctgaccagtggcattgcctcttcccctgactatgaattcaacgtgtggacccgaccagactgtgctgaaacggaatttgagaatgggaacaggtcatggttctacttcagcgtccggggaggaatgccaggaaaactcatcaagatcaacattatgaacatgaacaagcagagcaagctgtattcccagggcatggccccctttgtgcgcacactgcccacccggccacgctgggaacgcattcgagaccggcccacctttgagatgacagagacgcagtttgtgttatcctttgttcatcgtttcgtggagggccgtggggccaccaccttcttcgccttctgctaccccttctcctacagtgactgccaggaactgctaaaccagctagaccagcgctttccggagaaccaccctacccatagcagccccctggataccatctattaccatcgggagctcctttgctattctctggatggacttcgtgtagatctgctgacgatcacttcctgccatgggcttcgagaagatcgagagccccgtctagagcagctatttcctgataccagcacccctcgaccattccgtttcgcaggcaagaggatattcttcttaagcagtagagtacacccaggggagactccatctagctttgtcttcaatggctttctggacttcatcctccgacctgatgatccccgggcccaaaccctccgtcgcctcttcgtctttaagctgattcccatgttgaaccccgatggtgtggtccggggacactaccgcacagactcacgtggagtgaatctgaaccgtcagtacctgaagcctgatgccgtcctgcacccggccatctatggggccaaagctgtgcttctctaccaccatgtgcactctcgtctgaactcccagagttcctctgagcaccagcccagttcctgtctccctcctgatgctcctgtttctgacctggagaaagccaacaatctccaaaatgaagctcagtgtgggcactcagctgacaggcataacgctgaagcctggaaacaaacagagccagcagaacagaagctcaacagtgtgtggattatgccacaacagtctgcggggcttgaagagtcagcccctgataccatcccccccaaagagagtggcgttgcttactatgtggacctgcatggacatgcttccaaaaggggctgcttcatgtacggaaacagctttagtgatgagagcacccaggtgggaatcctaagaatgtcatgtgagtgtgagaagtgttacaggttaggagatggggttaggccatgaacagaaggaagatagccttaggtagctttctggaaggaaggcctgtgtagactacctctgaaaaagctttgaagggccaagaagagatggcacagggggataatgtctcaattgttacatcatgaccttttattaaggaaagctaactgcattatagtctgctagagtctgggaatccagagaaggaaaattttgcattgttggagggaggaagctaaaagcttaaaaaaaaaagaattgcttcccaacacctagaagtaatgtcaaactgagaattcaggcagcactgattactgttaatggttgtgatggtatctgctgtgtattaagtcacatggtcgcatacttgctatctcttccttgcaccttgtcccttctgtctctccttctgagttgacttttcttccccaaacaggtggaaaacatgctatatccaaagctcatctccttgaattcagcccacttcgacttccagggctgcaatttctcagagaagaatatgtatgcccgagaccgtagagatggccagtctaaagagggaagcggccgtgttgcaatctacaaagcctcagggataatccacagctacacacttgaatgcaactacaacactggacgctcagtaaacagcatccctgctgcctgccatgacaatgggcgtgccagcccccctcccccgccggctttcccctccagatacactgtggaactatttgagcaggtgggacgagctatggccattgcagccctggacatggcggaatgtaatccgtggccccgaattgtactgtcagagcacagcagccttactaatctacgggcctggatgctgaaacatgtacgcaacagccgaggcctaagcagcactctgaatgtgggtgtcaacaagaagaggggccttcgaactccacccaaaagtcacaatgggttgcctgtctcctgctccgaaaacaccttgagtcgggcacgaagttttagcaccggcacaagtgccggtggtagcagcagcagccaacaaaattctccacagatgaagaattcccccagctttccttttcatggcagtcggcctgcagggctgccaggcctgggctctagtacccaaaaggtcacccaccgggtgctgggccccgtcagaggtaagccagtctgggagcccctgcaacatgtgttcggttgtctggggcattgctgggggaagtaagagcttgaagatatactgttggcccaggaccaaggggtgaatcaataaaattagtttgtagcagaaaaaaaaac

SEQ ID NO: 355050 - DNA, 2945 bp, Homo sapiens
acggccaataggcgagagacttcttgtttcctggcagagcggggtcccggcaccgcggcgctcgggtgtttttgggggcccgggtggagggcccgggtgccggggcccaaggtgcggcctcgctagcgggagagggagcgggatcaccggcccggagagagctctcagggccagagcggggcaggaggatgctttcccagccccaccatggagctgcgctgtgggggattgctgttcagttctcgctttgattcagggaatctagcccacgtggagaaggtggaatctttgtccagtgatggggaaggggtaggaggtggggcgtcagccctgaccagtggcattgcctcttcccctgactatgaattcaacgtgtggacccgaccagactgtgctgaaacggaatttgagaatgggaacaggtcatggttctacttcagcgtccggggaggaatgccaggaaaactcatcaagatcaacattatgaacatgaacaagcagagcaagctgtattcccagggcatggccccctttgtgcgcacactgcccacccggccacgctgggaacgcattcgagaccggcccacctttgagatgacagagacgcagtttgtgttatcctttgttcatcgtttcgtggagggccgtggggccaccaccttcttcgccttctgctaccccttctcctacagtgactgccaggaactgctaaaccagctagaccagcgctttccggagaaccaccctacccatagcagccccctggataccatctattaccatcgggagctcctttgctattctctggatggacttcgtgtagatctgctgacgatcacttcctgccatgggcttcgagaagatcgagagccccgtctagagcagctatttcctgataccagcacccctcgaccattccgtttcgcaggcaagaggatattcttcttaagcagtagagtacacccaggggagactccatctagctttgtcttcaatggctttctggacttcatcctccgacctgatgatccccgggcccaaaccctccgtcgcctcttcgtctttaagctgattcccatgttgaaccccgatggtgtggtccggggacactaccgcacagactcacgtggagtgaatctgaaccgtcagtacctgaagcctgatgccgtcctgcacccggccatctatggggccaaagctgtgcttctctaccaccatgtgcactctcgtctgaactcccagagttcctctgagcaccagcccagttcctgtctccctcctgatgctcctgtttctgacctggagaaagccaacaatctccaaaatgaagctcagtgtgggcactcagctgacaggcataacgctgaagcctggaaacaaacagagccagcagaacagaagctcaacagtgtgtggattatgccacaacagtctgcggggcttgaagagtcagcccctgataccatcccccccaaagagagtggcgttgcttactatgtggacctgcatggacatgcttccaaaaggggctgcttcatgtacggaaacagctttagtgatgagagcacccaggtggaaaacatgctatatccaaagctcatctccttgaattcagcccacttcgacttccagggctgcaatttctcagagaagaatatgtatgcccgagaccgtagagatggccagtctaaagagggaagcggccgtgttgcaatctacaaagcctcagggataatccacaggttgggtggaagctgagatatagttgatgaaatagcttccctaaagaaaacaccgtagctgggtgtggtggtgcatgcttgtaatcccagctactgaggaggctgaggcaggagaatcgcttgaacctgggaggcagaggttgtggcgagccgagatcgcgccattgcactccagcctgggcaacaagagcgaaactccgtctcaaaaaaaaaacaaaaaacaacacccagttcagggtgtttgagagggagggaaccaccttagtcttcttaaaagagaacctcacaattagcattattgtctttagtctaggactctaccttggggggactctctgggtatatggtacagtaccaaggtcagctgctagttgctatggattattagcactttcatttgtgttcacttttttccaagtgattgcctcctttgaccacctaagttgtcctctatggttctgtcctggtatctgttcaggcgggacactgataaaggtctttatgtcttagctacacacttgaatgcaactacaacactggacgctcagtaaacagcatccctgctgcctgccatgacaatgggcgtgccagcccccctcccccgccggctttcccctccagatacactgtggaactatttgagcaggtgggacgagctatggccattgcagccctggacatggcggaatgtaatccgtggccccgaattgtactgtcagagcacagcagccttactaatctacgggcctggatgctgaaacatgtacgcaacagccgaggcctaagcagcactctgaatgtgggtgtcaacaagaagaggggccttcgaactccacccaaaagtcacaatgggttgcctgtctcctgctccgaaaacaccttgagtcgggcacgaagttttagcaccggcacaagtgccggtggtagcagcagcagccaacaaaattctccacagatgaagaattcccccagctttccttttcatggcagtcggcctgcagggctgccaggcctgggctctagtacccaaaaggtcacccaccgggtgctgggccccgtcagaggtaagccagtctgggagcccctgcaacatgtgttcggttgtctggggcattgctgggggaagtaagagcttgaagatatactgttggcccaggaccaaggggtgaatcaataaaattagtttgtagcagaaaaaaaaac

SEQ ID NO: 355051 - DNA, 3199 bp, Homo sapiens
acggccaataggcgagagacttcttgtttcctggcagagcggggtcccggcaccgcggcgctcgggtgtttttgggggcccgggtggagggcccgggtgccggggcccaaggtgcggcctcgctagcgggagagggagcgggatcaccggcccggagagagctctcagggccagagcggggcaggaggatgctttcccagccccaccatggagctgcgctgtgggggattgctgttcagttctcgctttgattcagggaatctagcccacgtggagaaggtggaatctttgtccagtgatggggaaggggtaggaggtggggcgtcagccctgaccagtggcattgcctcttcccctgactatgaattcaacgtgtggacccgaccagactgtgctgaaacggaatttgagaatgggaacaggtcatggttctacttcagcgtccggggaggaatgccaggaaaactcatcaagatcaacattatgaacatgaacaagcagagcaagctgtattcccagggcatggccccctttgtgcgcacactgcccacccggccacgctgggaacgcattcgagaccggcccacctttgagatgacagagacgcagtttgtgttatcctttgttcatcgtttcgtggagggccgtggggccaccaccttcttcgccttctgctaccccttctcctacagtgactgccaggaactgctaaaccagctagaccagcgctttccggagaaccaccctacccatagcagccccctggataccatctattaccatcgggagctcctttgctattctctggatggacttcgtgtagatctgctgacgatcacttcctgccatgggcttcgagaagatcgagagccccgtctagagcagctatttcctgataccagcacccctcgaccattccgtttcgcaggcaagaggatattcttcttaagcagtagagtacacccaggggagactccatctagctttgtcttcaatggctttctggacttcatcctccgacctgatgatccccgggcccaaaccctccgtcgcctcttcgtctttaagctgattcccatgttgaaccccgatggtgtggtccggggacactaccggtaagtggcttccccagcctgtctggactgttcccatttcccctcatgccctgcatctcagtgaaattctgtcagccttctggcttctgtgttcccagtcctcttgcaccctaataaaggcaagcccatctcatcttcctgagaaagcatgagatcatatctagtggcactcccagaaaggaaccaaactaggatgactgcaggcccatctgggtggaggcagctaccctgaggaagctccttagggttctatgcacagactcacgtggagtgaatctgaaccgtcagtacctgaagcctgatgccgtcctgcacccggccatctatggggccaaagctgtgcttctctaccaccatgtgcactctcgtctgaactcccagagttcctctgagcaccagcccagttcctgtctccctcctgatgctcctgtttctgacctggagaaagccaacaatctccaaaatgaagctcagtgtgggcactcagctgacaggcataacgctgaagcctggaaacaaacagagccagcagaacagaagctcaacagtgtgtggattatgccacaacagtctgcggggcttgaagagtcagcccctgataccatcccccccaaagagagtggcgttgcttactatgtggacctgcatggacatgcttccaaaaggggctgcttcatgtacggaaacagctttagtgatgagagcacccaggtggaaaacatgctatatccaaagctcatctccttgaattcagcccacttcgacttccagggctgcaatttctcagagaagaatatgtatgcccgagaccgtagagatggccagtctaaagagggaagcggccgtgttgcaatctacaaagcctcagggataatccacaggttgggtggaagctgagatatagttgatgaaatagcttccctaaagaaaacaccgtagctgggtgtggtggtgcatgcttgtaatcccagctactgaggaggctgaggcaggagaatcgcttgaacctgggaggcagaggttgtggcgagccgagatcgcgccattgcactccagcctgggcaacaagagcgaaactccgtctcaaaaaaaaaacaaaaaacaacacccagttcagggtgtttgagagggagggaaccaccttagtcttcttaaaagagaacctcacaattagcattattgtctttagtctaggactctaccttggggggactctctgggtatatggtacagtaccaaggtcagctgctagttgctatggattattagcactttcatttgtgttcacttttttccaagtgattgcctcctttgaccacctaagttgtcctctatggttctgtcctggtatctgttcaggcgggacactgataaaggtctttatgtcttagctacacacttgaatgcaactacaacactggacgctcagtaaacagcatccctgctgcctgccatgacaatgggcgtgccagcccccctcccccgccggctttcccctccagatacactgtggaactatttgagcaggtgggacgagctatggccattgcagccctggacatggcggaatgtaatccgtggccccgaattgtactgtcagagcacagcagccttactaatctacgggcctggatgctgaaacatgtacgcaacagccgaggcctaagcagcactctgaatgtgggtgtcaacaagaagaggggccttcgaactccacccaaaagtcacaatgggttgcctgtctcctgctccgaaaacaccttgagtcgggcacgaagttttagcaccggcacaagtgccggtggtagcagcagcagccaacaaaattctccacagatgaagaattcccccagctttccttttcatggcagtcggcctgcagggctgccaggcctgggctctagtacccaaaaggtcacccaccgggtgctgggccccgtcagaggtaagccagtctgggagcccctgcaacatgtgttcggttgtctggggcattgctgggggaagtaagagcttgaagatatactgttggcccaggaccaaggggtgaatcaataaaattagtttgtagcagaaaaaaaaac

SEQ ID NO: 355052 - DNA, 1602 bp, Homo sapiens
acggccaataggcgagagacttcttgtttcctggcagagcggggtcccggcaccgcggcgctcgggtgtttttgggggcccgggtggagggcccgggtgccggggcccaaggtgcggcctcgctagcgggagagggagcgggatcaccggcccggagagagctctcagggccagagcggggcaggaggatgctttcccagccccaccatggagctgcgctgtgggggattgctgttcagttctcgctttgattcagggaatctagcccacgtggagaaggtggaatctttgtccagtgatggggaaggggtaggaggtggggcgtcagccctgaccagtggcattgcctcttcccctgactatgaattcaacgtgtggacccgaccagactgtgctgaaacggaatttgagaatgggaacaggtcatggttctacttcagcgtccggggaggaatgccaggaaaactcatcaagatcaacattatgaacatgaacaagcagagcaagctgtattcccagggcatggccccctttgtgcgcacactgcccacccggccacgctgggaacgcattcgagaccggcccacctttgagatgacagagacgcagtttgtgttatcctttgttcatcgtttcgtggagggccgtggggccaccaccttcttcgccttctgctaccccttctcctacagtgactgccaggaactgctaaaccagctagaccagcgctttccggagaaccaccctacccatagcagccccctggataccatctattaccatcgggagctcctttgctattctctggatggacttcgtgtagatctgctgacgatcacttcctgccatgggcttcgagaagatcgagagccccgtctagagcagctatttcctgataccagcacccctcgaccattccgtttcgcaggcaagaggatattcttcttaagcagtagagtacacccaggggagactccatctagctttgtcttcaatggctttctggacttcatcctccgacctgatgatccccgggcccaaaccctccgtcgcctcttcgtctttaagctgattcccatgttgaaccccgatggtgtggtccggggacactaccgcacagactcacgtggagtgaatctgaaccgtcagtacctgaagcctgatgccgtcctgcacccggccatctatggggccaaagctgtgcttctctaccaccatgtgcactctcgtctgaactcccagagttcctctgagcaccagcccagttcctgtctccctcctgatgctcctgtttctgacctggagaaagccaacaatctccaaaatgaagctcagtgtgggcactcagctgacaggcataacgctgaagcctggaaacaaacagagccagcagaacagaagctcaacagtgtgtggattatgccacaacagtctgcggggcttgaagagtcagcccctgataccatcccccccaaagagagtggcgttgcttactatgtggacctgcatggacatgcttccaaaaggggctgcttcatgtacggaacatatgggggaaaagaatcacacagggggaaaacatacgatataccataactgaat

SEQ ID NO: 355053 - DNA, 1888 bp, Homo sapiens
acatatgtactaggtctgtgcccgggtgttacgtcagtcgcggggggctagagccaggtttatagtatcctcgtccgtcgtctgtcacttgcaacggccgtggggccaccaccttcttcgccttctgctaccccttctcctacagtgactgccaggaactgctaaaccagctagaccagcgctttccggagaaccaccctacccatagcagccccctggataccatctattaccatcgggagctcctttgctattctctggatggacttcgtgtagatctgctgacgatcacttcctgccatgggcttcgagaagatcgagagccccgtctagagcagctatttcctgataccagcacccctcgaccattccgtttcgcaggcaagaggatattcttcttaagcagtagagtacacccaggggagactccatctagctttgtcttcaatggctttctggacttcatcctccgacctgatgatccccgggcccaaaccctccgtcgcctcttcgtctttaagctgattcccatgttgaaccccgatggtgtggtccggggacactaccgcacagactcacgtggagtgaatctgaaccgtcagtacctgaagcctgatgccgtcctgcacccggccatctatggggccaaagctgtgcttctctaccaccatgtgcactctcgtctgaactcccagagttcctctgagcaccagcccagttcctgtctccctcctgatgctcctgtttctgacctggagaaagccaacaatctccaaaatgaagctcagtgtgggcactcagctgacaggcataacgctgaagcctggaaacaaacagagccagcagaacagaagctcaacagtgtgtggattatgccacaacagtctgcggggcttgaagagtcagcccctgataccatcccccccaaagagagtggcgttgcttactatgtggacctgcatggacatgcttccaaaaggggctgcttcatgtacggaaacagctttagtgatgagagcacccaggtggaaaacatgctatatccaaagctcatctccttgaattcagcccacttcgacttccagggctgcaatttctcagagaagaatatgtatgcccgagaccgtagagatggccagtctaaagagggaagcggccgtgttgcaatctacaaagcctcagggataatccacagctacacacttgaatgcaactacaacactggacgctcagtaaacagcatccctgctgcctgccatgacaatgggcgtgccagcccccctcccccgccggctttcccctccagatacactgtggaactatttgagcaggtgggacgagctatggccattgcagccctggacatggcggaatgtaatccgtggccccgaattgtactgtcagagcacagcagccttactaatctacgggcctggatgctgaaacatgtacgcaacagccgaggcctaagcagcactctgaatgtgggtgtcaacaagaagaggggccttcgaactccacccaaaagtcacaatgggttgcctgtctcctgctccgaaaacaccttgagtcgggcacgaagttttagcaccggcacaagtgccggtggtagcagcagcagccaacaaaattctccacagatgaagaattcccccagctttccttttcatggcagtcggcctgcagggctgccaggcctgggctctagtacccaaaaggtcacccaccgggtgctgggccccgtcagaggtaagccagtctgggagcccctgcaacatgtgttcggttgtctggggcattgctgggggaagtaagagcttgaagatatactgttggcccaggaccaaggggtgaatcaataaaattagtttgtagcagaaaaaaaaac

SEQ ID NO: 355054 - DNA, 379 bp, Homo sapiens
cccgggttaactggcatctgcttctttgcagtgggttgcctgtctcctgctccgaaaacaccttgagtcgggcacgaagttttagcaccggcacaagtgccggtggtagcagcagcagccaacaaaattctccacagatgaagaattcccccagctttccttttcatggcagtcggcctgcagggctgccaggcctgggctctagtacccaaaaggtcacccaccgggtgctgggccccgtcagaggtaagccagtctgggagcccctgcaacatgtgttcggttgtctggggcattgctgggggaagtaagagcttgaagatatactgttggcccaggaccaaggggtgaatcaataaaattagtttgtagcagaaaa

SEQ ID NO: 355055 - DNA, 2332 bp, Homo sapiens
ttgtggcaagattctgaggggaagtgtagctcccaggttggttccaagtcttcttccaattaggatcttatccaggacgcttcattgcatttggtcttcatttctccttagtctcctccaggctgacatttcctcaatctttattggtcttccacagccctgacacttttggagataccagtcagcatttccaagttcgttctgtgagactgtagtgtcaggacaaagcaacaacaaaatgtgctctactctaaagaagtgtgggacatacagaactgaagttgcagaatgccatgaccatggtagcacttttcaaggaagaaagaaaggtgggagttctttccgggataattttgacaagaggagctgtcattatgaacatggtgggtatgagcgcccgccttcacactgccaggagaatgatggaagcgtggagatgagggatgtccacaaggaccaacaactaagacacactccttatagcatccgatgcgaaagaagaatgaaatggcatagtgaagacgaaatccgtattaccacgtggagaaatagaaaacctccggagagaaaaatgagtcagaacacacaggatggatacacaaggaactggtttaaggtcacaattccttacgggataaagtatgacaaggcatggctaatgaattcaatccagagccattgcagtgaccgcttcactccggttgatttccactacgtccgaaatcgggcatgcttctttgtccaggatgctagcgctgcctccgcattgaaggatgtcagttataagatttatgatgatgagaaccaaaagatatgtatatttgtcaatcattctactgcgccctactctgtgaagaataagttgaagccaggccaaatggagatgctaaagctgaccatgaacaaacggtacaatgtctcccagcaagctcttgatctccagaatctccgctttgacccagacttgatgggccgtgacattgatataatcctgaatcgaagaaactgcatggctgccaccctgaagatcattgaaagaaatttccctgagctgttgtctttgaacttgtgcaacaacaagctgtaccagctggatggcctttctgacattacagagaaggctcccaaagtcaagaccctgaatctctccaaaaataagctggagtcggcgtgggagttgggcaaggtgaaagggctgaagctcgaagagctatggctagaagggaacccgttgtgcagcaccttctcggaccagtccgcctatgtaagtgccatccgggattgtttccccaagttgttacgcctggacggccgagagttatccgcaccagtgattgttgacattgacagctctgagacaatgaaaccctgcaaggaaaactttactggatctgagaccctaaagcatttagtcctgcaattcctgcagcagtattactcgatctatgactctggagatcgacagggtctcctcggtgcttaccacgatgaggcctgcttctccttggctattcccttcgaccccaaggactcagccccgagcagcttgtgcaagtactttgaggatagcaggaatatgaaaacactcaaggacccctacctgaagggggaactgctgaggcgcacaaaacgtgacattgtggactccctcagtgcgttgcccaaaactcagcatgacctcagctccatcctggtggacgtgtggtgccagacggaaaggatgctctgcttttctgtcaatggggttttcaaggaagtggaaggacagtctcagggttctgttctcgccttcacccggaccttcattgctacccctggcagcagttccagtctgtgcatcgtgaatgacgagctgtttgtgagggatgccagcccccaagagactcagagtgccttctccatcccagtgtccacactctcctccagctctgagccctccctctcccaggagcagcaggaaatggtgcaggctttctctgcccagtctgggatgaaactggagtggtctcagaagtgccttcaggacaatgagtggaactacactagagctggccaggccttcactatgctccagaccgagggcaagatccccgcagaggccttcaagcaaatctcctaaaaggagccctccgatgtcttctttgtcttcgttcacatcctctttgtttcctcttttcaccagcctaaggcctggctgaccaggaagccaacgttaacttgcaggccacgtgacataaccacccaaagagccagttgctctgtgtattcgccccactcatgatcaccattttattttcataataaagagtgacgttacacgttgaaaaatgtg

SEQ ID NO: 355056 - DNA, 3199 bp, Homo sapiens
  misc_feature (30)..(30): n is a, c, g, or t
cctgactcacctagctcctcctgcagcatngcgtgttcacttccaagcggggcagactctgctgatggacagaatccggctccaggaactggcattccagttgcaccagttaactgtcctggcctcagtcttgctagtggccagaagcttctctggtgaagttttattcagatcacctgaatttgtggatagactgaaatgcaccaccaaggccctaactgaggaatttatctccaggcctgaagagactatgctgagtgtgagtgaacaggtgtctcaggaagtccatcaaggccttaaggacatgggcctcactactctgagcagtgaaaacacagcatctcttctaggccaactccagaacatcaccaagaaagagaactgcattcgtagcattgttgatcagtggatccgtttttttctcaaatgctgtttgcttcatggcatgcaggagtctctgctacactttcctggaggcctcattctcattgaaaaggagttggcagaactgggctggaagtttctcaatctgatgcatcataatcagcagagtcatttttcacaaaacgaaatctttccagaagatcacgaataagagagatcaaagctaggcagcttgagttgaagtagagctggaagaaggagttttgaggactgtttcaaaaccactggactagatgatctctaaagtggtgacatggacataggataatggttatagacagtccccctcccaacgggaaaaaatgaaagcaagcaaaaagttaccagctccaagccaacttgaaatccaatcaggatcttatccaggacgcttcattgcatttggtcttcatttctccttagtctcctccaggctgacatttcctcaatctttattggtcttccacagccctgacacttttggagataccagtcagcatttccaagttcgttctgtgagactgtagtgtcaggacaaagcaacaacaaaatgtgctctactctaaagaagtgtgggacatacagaactgaagggatgatgcttcctgtctgtcacaaggctgagtgaacacaacatgcctgtaggtccagaacattcttcctacagagaccagatgtccagaaagccctatctgctggattcagggaacgcctctcctcatttctgtcacactatttgcaaaagcctccttctctgagatcttcaaagctgcagttctagccacagtctgcagggagttgcagaatgccatgaccatggtagcacttttcaaggaagaaagaaaggtgggagttctttccgggataattttgacaagaggagctgtcattatgaacatggtgggtatgagcgcccgccttcacactgccaggagaatgatggaagcgtggagatgagggatgtccacaaggaccaacaactaagacagtaagtgaccaggcagcctggtttgcacgtagcagcccccgggactgtgcaaccctttcattctctgtggtcttccttttcttctctcattagagaactgacgaatgctggaagtggaatagtggctgagcaatcctaattgtagccctggcgtcagtgagtggagcatgtataggagactttcttagatttaatggatacccgccttctctcctcttccccacagcactccttatagcatccgatgcgaaagaagaatgaaatggcatagtgaagacgaaatccgtattaccacgtggagaaatagaaaacctccggagagaaaaatgagtcagaacacacaggatggatacacaaggaactggtttaaggtcacaattccttacgggataaagtatgacaaggcatggctaatgaattcaatccagagccattgcagtgaccgcttcactccggttgatttccactacgtccgaaatcgggcatgcttctttgtccaggatgctagcgctgcctccgcattgaaggatgtcagttataagatttatgatgatgagaaccaaaagatatgtatatttgtcaatcattctactgcgccctactctgtgaagaataagttgaagccaggccaaatggagatgctaaagctgaccatgaacaaacggtacaatgtctcccagcaagctcttgatctccagaatctccgctttgacccagacttgatgggccgtgacattgatataatcctgaatcgaagaaactgcatggctgccaccctgaagatcattgaaagaaatttccctgagctgttgtctttgaacttgtgcaacaacaagctgtaccagctggatggcctttctgacattacagagaaggctcccaaagtcaagaccctgaatctctccaaaaataagctggagtcggcgtgggagttgggcaaggtgaaagggctgaagctcgaagagctatggctagaagggaacccgttgtgcagcaccttctcggaccagtccgcctatgtaagtgccatccgggattgtttccccaagttgttacgcctggacggccgagagttatccgcaccagtgattgttgacattgacagctctgagacaatgaaaccctgcaaggaaaactttactggatctgagaccctaaagcatttagtcctgcaattcctgcagcagtattactcgatctatgactctggagatcgacagggtctcctcggtgcttaccacgatgaggcctgcttctccttggctattcccttcgaccccaaggactcagccccgagcagcttgtgcaagtactttgaggatagcaggaatatgaaaacactcaaggacccctacctgaagggggaactgctgaggcgcacaaaacgtgacattgtggactccctcagtgcgttgcccaaaactcagcatgacctcagctccatcctggtggacgtgtggtgccagacggtgccttcaggacaatgagtggaactacactagagctggccaggccttcactatgctccagaccgagggcaagatccccgcagaggccttcaagcaaatctcctaaaaggagccctccgatgtcttctttgtcttcgttcacatcctctttgtttcctcttttcaccagcctaaggcctggctgaccaggaagccaacgttaacttgcaggccacgtgacataaccacccaaagagccagttgctctgtgtattcgccccactcatgatcaccattttattttcataataaagagtgacgttacacgttgaaaaatgtg

SEQ ID NO: 355057 - DNA, 2894 bp, Homo sapiens
cctcctcctctgggatcttgaaaacgtagaattcccagagactctgctgatggacagaatccggctccaggaactggcattccagttgcaccagttaactgtcctggcctcagtcttgctagtggccagaagcttctctggtgaagttttattcagatcacctgaatttgtggatagactgaaatgcaccaccaaggccctaactgaggaatttatctccaggcctgaagagactatgctgagtgtgagtgaacaggtgtctcaggaagtccatcaaggccttaaggacatgggcctcactactctgagcagtgaaaacacagcatctcttctaggccaactccagaacatcaccaagaaagagaactgcattcgtagcattgttggagtctctgctacactttcctggaggcctcattctcattgaaaaggagttggcagaactgggctggaagtttctcaatctgatgcatcataatcagcagagtcatttttcacaaaacgaaatctttccagaagatcacgaataagagagatcaaagctaggcagcttgagttgaagtagagctggaagaaggagttttgaggactgtttcaaaaccactggactagatgatctctaaaggatcttatccaggacgcttcattgcatttggtcttcatttctccttagtctcctccaggctgacatttcctcaatctttattggtcttccacagccctgacacttttggagataccagtcagcatttccaagttcgttctgtgagactgtagtgtcaggacaaagcaacaacaaaatgtgctctactctaaagaagtgtgggacatacagaactgaagttgcagaatgccatgaccatggtagcacttttcaaggaagaaagaaaggtgggagttctttccgggataattttgacaagaggagctgtcattatgaacatggtgggtatgagcgcccgccttcacactgccaggagaatgatggaagcgtggagatgagggatgtccacaaggaccaacaactaagacacactccttatagcatccgatgcgaaagaagaatgaaatggcatagtgaagacgaaatccgtattaccacgtggagaaatagaaaacctccggagagaaaaatgagtcagaacacacaggatggatacacaaggaactggtttaaggtcacaattccttacgggataaagtatgacaaggcatggctaatgaattcaatccagagccattgcagtgaccgcttcactccggttgatttccactacgtccgaaatcgggcatgcttctttgtccaggatgctagcgctgcctccgcattgaaggatgtcagttataagatttatgatgatgagaaccaaaagatatgtatatttgtcaatcattctactgcgccctactctgtgaagaataagttgaagccaggccaaatggagatgctaaagctgaccatgaacaaacggtacaatgtctcccagcaagctcttgatctccagaatctccgctttgacccagacttgatgggccgtgacattgatataatcctgaatcgaagaaactgcatggctgccaccctgaagatcattgaaagaaatttccctgagctgttgtctttgaacttgtgcaacaacaagctgtaccagctggatggcctttctgacattacagagaaggctcccaaagtcaagaccctgaatctctccaaaaataagctggagtcggcgtgggagttgggcaaggtgaaagggctgaagctcgaagagctatggctagaagggaacccgttgtgcagcaccttctcggaccagtccgcctatgtaagtgccatccgggattgtttccccaagttgttacgcctggacggccgagagttatccgcaccagtgattgttgacattgacagctctgagacaatgaaaccctgcaaggaaaactttactggatctgagaccctaaagcatttagtcctgcaattcctgcagcagtattactcgatctatgactctggagatcgacagggtctcctcggtgcttaccacgatgaggcctgcttctccttggctattcccttcgaccccaaggactcagccccgagcagcttgtgcaagtactttgaggatagcaggaatatgaaaacactcaaggacccctacctgaagggggaactgctgaggcgcacaaaacgtgacattgtggactccctcagtgcgttgcccaaaactcagcatgacctcagctccatcctggtggacgtgtggtgccagacggaaaggatgctctgcttttctgtcaatggggttttcaaggaagtggaaggacagtctcagggttctgttctcgccttcacccggaccttcattgctacccctggcagcagttccagtctgtgcatcgtgaatgacgagctgtttgtgagggatgccagcccccaagagactcagagtgccttctccatcccagtgtccacactctcctccagctctgagccctccctctcccaggagcagcaggaaatggtgcaggctttctctgcccagtctgggatgaaactggagtggtctcagaagtgccttcaggacaatgagtggaactacactagagctggccaggccttcactatgctccagaccgagggcaagatccccgcagaggccttcaagcaaatctcctaaaaggagccctccgatgtcttctttgtcttcgttcacatcctctttgtttcctcttttcaccagcctaaggcctggctgaccaggaagccaacgttaacttgcaggccacgtgacataaccacccaaagagccagttgctctgtgtattcgccccactcatgatcaccattttattttcataataaagagtgacgttacacgttgaaaaatgtg

SEQ ID NO: 355058 - DNA, 2433 bp, Homo sapiens
  misc_feature (30)..(30): n is a, c, g, or t
cctgactcacctagctcctcctgcagcatngcgtgttcacttccaagcggggcagactctgctgatggacagaatccggctccaggaactggcattccagttgcaccagttaactgtcctggcctcagtcttgctagtggccagaagcttctctggtgaagttttattcagatcacctgaatttgtggatagactgaaatgcaccaccaaggccctaactgaggaatttatctccaggcctgaagagactatgctgagtgtgagtgaacaggtgtctcaggaagtccatcaaggccttaaggacatgggcctcactactctgagcagtgaaaacacagcatctcttctaggccaactccagaacatcaccaagaaagagaactgcattcgtagcattgttggagtctctgctacactttcctggaggcctcattctcattgaaaaggagttggcagaactgggctggaagtttctcaatctgatgcatcataatcagcagagtcatttttcacaaaacgaaatctttccagaagatcacgaataagagagatcaaagctaggcagcttgagttgaagtagagctggaagaaggagttttgaggactgtttcaaaaccactggactagatgatctctaaaggatcttatccaggacgcttcattgcatttggtcttcatttctccttagtctcctccaggctgacatttcctcaatctttattggtcttccacagccctgacacttttggagataccagtcagcatttccaagttcgttctgtgagactgtagtgtcaggacaaagcaacaacaaaatgtgctctactctaaagaagtgtgggacatacagaactgaagttgcagaatgccatgaccatggtagcacttttcaaggaagaaagaaaggtgggagttctttccgggataattttgacaagaggagctgtcattatgaacatggtgggtatgagcgcccgccttcacactgccaggagaatgatggaagcgtggagatgagggatgtccacaaggaccaacaactaagacacactccttatagcatccgatgcgaaagaagaatgaaatggcatagtgaagacgaaatccgtattaccacgtggagaaatagaaaacctccggagagaaaaatgagtcagaacacacaggatggatacacaaggaactggtttaaggtcacaattccttacgggataaagtatgacaaggcatggctaatgaattcaatccagagccattgcagtgaccgcttcactccggttgatttccactacgtccgaaatcgggcatgcttctttgtccaggatgctagcgctgcctccgcattgaaggatgtcagttataagatttatgatgatgagaaccaaaagatatgtatatttgtcaatcattctactgcgccctactctgtgaagaataagttgaagccaggccaaatggagatgctaaagctgaccatgaacaaacggtacaatgtctcccagcaagctcttgatctccagaatctccgctttgacccagacttgatgggccgtgacattgatataatcctgaatcgaagaaactgcatggctgccaccctgaagatcattgaaagaaatttccctgagctgttgtctttgaacttgtgcaacaacaagctgtaccagctggatggcctttctgacattacagagaaggctcccaaagtcaagaccctgaatctctccaaaaataagctggagtcggcgtgggagttgggcaaggtgaaagggctgaagctcgaagagctatggctagaagggaacccgttgtgcagcaccttctcggaccagtccgcctatgtaagtgccatccgggattgtttccccaagttgttacgcctggacggccgagagttatccgcaccagtgattgttgacattgacagctctgagacaatgaaaccctgcaaggaaaactttactggatctgagaccctaaagcatttagtcctgcaattcctgcagcagtattactcgatctatgactctggagatcgacagggtctcctcggtgcttaccacgatgaggcctgcttctccttggctattcccttcgaccccaaggactcagccccgagcagcttgtgcaagtactttgaggatagcaggaatatgaaaacactcaaggacccctaccgagggcaagatccccgcagaggccttcaagcaaatctcctaaaaggagccctccgatgtcttctttgtcttcgttcacatcctctttgtttcctcttttcaccagcctaaggcctggctgaccaggaagccaacgttaacttgcaggccacgtgacataaccacccaaagagccagttgctctgtgtattcgccccactcatgatcaccattttattttcataataaagagtgacgttacacgttgaaaaatgtg

SEQ ID NO: 355059 - DNA, 1036 bp, Homo sapiens
aaagaattcggcacgagcacaatggaggactccggaaagactttcagctccgaggaggaagaagctaactattggaaagatctggcgatgacctacaaacagagggcagaaaatacgcaagaggaactccgagaattccaggagggaagccgagaatatgaagctgaattggagacgcagctgcaacaaattgaaaccaggaacagagacctcctgtccgaaaataaccgccttcgcatggagctggaaaccatcaaggagaagtttgaagtgcagcactctgaaggctaccggcagatctcagccttggaggatgacctcgcgcagaccaaagccattaaagaccaattgcagaaatacatcagagagctggagcaagcaaatgacgacctggaaagagccaagcgcgccacgatcatgtctctcgaagactttgagcagcgcttgaatcaggccatcgaaagaaatgccttcctggaaagtgaacttgatgaaaaagagaatctcctggaatctgttcagagactgaaggatgaagccagagatttgcggcaggaactggccgtgcagcagaagcaggagaaacccaggacccccatgcccagctcagtggaagctgagaggacagacacagctgtgcaggccacgggctccgtgccgtccacgcccattgctcaccgaggacccagctcaagtttaaacacacctgggagcttcagacgtggcctggacgactccaccggggggacccccctcacacctgcggcccggatatcagccctcaacattgtgggagacctactgcggaaagtcggggcactggagtccaaactcgcttcctgccggaacctcgtgtacgatcagtccccaaaccgaacaggtggcccagcctctgggcggagcagcaagaacagagatggcggggagagacggccaagcagcaccagcgtgcctttgggtgataaggggtcagtaccttctaataaacctctcgctggcggggagaacccgcctgccccaggcaagagacactcac

SEQ ID NO: 355060 - DNA, 3264 bp, Homo sapiens
gtggggcagaagccgggacccttacgagaagctgctgttctgagcgcccgaccggcgtggcttgcgggctctagcgttaccattgcatccaggaccaggcaatggcacaccagaggagtagtcgatcgtcctgtccccctggttctatcaataatggaggactccggaaagactttcagctccgaggaggaagaagctaactattggaaagatctggcgatgacctacaaacagagggcagaaaatacgcaagaggaactccgagaattccaggagggaagccgagaatatgaagctgaattggagacgcagctgcaacaaattgaaaccaggaacagagacctcctgtccgaaaataaccgccttcgcatggagctggaaaccatcaaggagaagtttgaagtgcagcactctgaaggctaccggcagatctcagccttggaggatgacctcgcgcagaccaaagccattaaagaccaattgcagaaatacatcagagagctggagcaagcaaatgacgacctggaaagagccaagcgcgccacgatcatgtctctcgaagactttgagcagcgcttgaatcaggccatcgaaagaaatgccttcctggaaagtgaacttgatgaaaaagagaatctcctggaatctgttcagagactgaaggatgaagccagagatttgcggcaggaactggccgtgcagcagaagcaggagaaacccaggacccccatgcccagctcagtggaagctgagaggacagacacagctgtgcaggccacgggctccgtgccgtccacgcccattgctcaccgaggacccagctcaagtttaaacacacctgggagcttcagacgtggcctggacgactccaccggggggacccccctcacacctgcggcccggatatcagccctcaacattgtgggagacctactgcggaaagtcggggcactggagtccaaactcgcttcctgccggaacctcgtgtacgatcagtccccaaaccgaacaggtggcccagcctctgggcggagcagcaagaacagagatggcggggagagacggccaagcagcaccagcgtgcctttgggtgataaggggttggacacgagttgccgctggttgtccaaatcaacaaccaggtcgtccagctcctgctgaagcctgttcttggtcttttccagtttatcatacgcggccgccttctcctcgtactgctgggtgaggttctcgatctccttctggaacctcttcttcccctcttccagagcttccacggtgctggcaaagtcctgcagcttcttcttcgagtcggagagctacaaggacagcgtccagggtagggtgagagggggaccatgaatggcccctgtccctggccccacagactctgagaagcgaagaccatgtctcctcgttggagaaacccaatagcaggggaagctggggggtcaagcaccatcgcaccaacactccaccgcgatctgcctgcgggggatctcagcgcagagaagttgagaggacccatgaaggaagcaaggacacggggcaggcacctggatgttgagagtggagatgtggcgctccaggttctgcttggcctccatctcctcgtccagctggtcttgcaggctgttccgctcctcctccagctggcgcagcttcgtagacacgttgagcttctgccgggtttcttcttgaagcagctcctgcaaaagggatgcaaagaggtcccagggacctgccccgaggaaggccaccccccaggtcccctggatgatgtggcaggacactcacctgggtgtcctggagctgggaactgagggacgccacgtccttggccagcttaatggccttcccctcggcctcgttaagcatccctgtgacgctctcaacttcattctaagggtgccaagagactggttagtcaaagcctctagaaggggatcctcgttgaaaggagccctttttactcaaaacacatgggctagtacttgaggtgttcactgattgagaaaatacccgtgaggtatgggactctgataaaaaaaaaaacacacacacacacaaaaaaaacagaatctgtggcttgaagggaactccgtcacctatgagttgggaccctggccctagactctgtggttctaagaacttatttgagccccaatggtattgactgggacctgatcccactaaatggatcctagatccctgccaaggttggtagagacaaagcagcaggtctgagagtccagacgaggtgctctggctggtccactctctaaggctggagaagggagaccaggatggtacttgaacgtcccagggatgctgtcccatcccttccttcctcactcctactctttgaccctgatggccaaagccagagacgcaggccctaaaggtaaaaacgtcctctctgtattctctggcttttactccctagtgtctctgcataagtccctttgaggctgttagcctacccctccatctcttccattgacaaggaggatatgaatgatcttgacactgcttatatgagggcggcaaaagccctgctctcaactgcatgtgagaaaaaaacatctcacttaattcttccctcgccccttggtccctggctgtggacatgttaaacatttgtgaaaactttggccacgtccccatgagtggcaaggcagggtaaatggctatgccaagtgaaagaagaccaaagacaaaaagaccatgtcattcagcagcttaaaacccctcaacagcttcacattgcccagagtaaggatcaacatacatgtaataggttctcaaaagccctacatcatctgggtacaagctccccctccaaccccactctgtactatctccccctacccccaaccccagctgggcactccagctctactggctgtatgtctctctcctaatttttctacttaccacagggcctttgcacacgctgttccctctgcctggtagacttatccatgctccttagggaagcctttcgtggctcctcctcccccaggttaggccccctggttatttacacttgggcatcatgtgccttccctttgctgcatcatttgacattcatttgtgtgattattcatgtctttcccttcccttcccttccccttactcggctggagtcctactggggcagcgacagtgtctcttcttccttgctgttggatctcaggattaagcacagtgcctggcatacagcaggtgctcaataaatacttatcaaattgaaaaaagaag

SEQ ID NO: 355061 - DNA, 3352 bp, Homo sapiens
ggccggggccgcaccgcccttcgcagccgcctctgccgccgccgccgcgttggcctcgccgcccctgctcggacaccatgccacaaggagagtgatctcttcccctgttttcacaatggaggactccggaaagactttcagctccgaggaggaagaagctaactattggaaagatctggcgatgacctacaaacagagggcagaaaatacgcaagaggaactccgagaattccaggagggaagccgagaatatgaagctgaattggagacgcagctgcaacaaattgaaaccaggaacagagacctcctgtccgaaaataaccgccttcgcatggagctggaaaccatcaaggagaagtttgaagtgcagcactctgaaggctaccggcagatctcagccttggaggatgacctcgcgcagaccaaagccattaaagaccaattgcagaaatacatcagagagctggagcaagcaaatgacgacctggaaagagccaagcgcgccacgatcatgtctctcgaagactttgagcagcgcttgaatcaggccatcgaaagaaatgccttcctggaaagtgaacttgatgaaaaagagaatctcctggaatctgttcagagactgaaggatgaagccagagatttgcggcaggaactggccgtgcagcagaagcaggagaaacccaggacccccatgcccagctcagtggaagctgagaggacagacacagctgtgcaggccacgggctccgtgccgtccacgcccattgctcaccgaggacccagctcaagtttaaacacacctgggagcttcagacgtggcctggacgactccaccggggggacccccctcacacctgcggcccggatatcagccctcaacattgtgggagacctactgcggaaagtcggggcactggagtccaaactcgcttcctgccggaacctcgtgtacgatcagtccccaaaccgaacaggtggcccagcctctgggcggagcagcaagaacagagatggcggggagagacggccaagcagcaccagcgtgcctttgggtgataaggggttggggaagcgcctggaatttgggaagccgccttcacacatgtcttcatcgccgctgccgtcagcccagggggtagtcaagatgttgctttaggaaaaccacggaagctgaaggtcttggtgttggttggacacgagttgccgctggttgtccaaatcaacaaccaggtcgtccagctcctgctgaagcctgttcttggtcttttccagtttatcatacgcggccgccttctcctcgtactgctgggtgaggttctcgatctccttctggaacctcttcttcccctcttccagagcttccacggtgctggcaaagtcctgcagcttcttcttcgagtcggagagctacaaggacagcgtccagggtagggtgagagggggaccatgaatggcccctgtccctggccccacagactctgagaagcgaagaccatgtctcctcgttggagaaacccaatagcaggggaagctggggggtcaagcaccatcgcaccaacactccaccgcgatctgcctgcgggggatctcagcgcagagaagttgagaggacccatgaaggaagcaaggacacggggcaggcacctggatgttgagagtggagatgtggcgctccaggttctgcttggcctccatctcctcgtccagctggtcttgcaggctgttccgctcctcctccagctggcgcagcttcgtagacacgttgagcttctgccgggtttcttcttgaagcagctcctgcaaaagggatgcaaagaggtcccagggacctgccccgaggaaggccaccccccaggtcccctggatgatgtggcaggacactcacctgggtgtcctggagctgggaactgagggacgccacgtccttggccagcttaatggccttcccctcggcctcgttaagcatccctgtgacgctctcaacttcattctaagggtgccaagagactggttagtcaaagcctctagaaggggatcctcgttgaaaggagccctttttactcaaaacacatgggctagtacttgaggtgttcactgattgagaaaatacccgtgaggtatgggactctgataaaaaaaaaaacacacacacacacaaaaaaaacagaatctgtggcttgaagggaactccgtcacctatgagttgggaccctggccctagactctgtggttctaagaacttatttgagccccaatggtattgactgggacctgatcccactaaatggatcctagatccctgccaaggttggtagagacaaagcagcaggtctgagagtccagacgaggtgctctggctggtccactctctaaggctggagaagggagaccaggatggtacttgaacgtcccagggatgctgtcccatcccttccttcctcactcctactctttgaccctgatggccaaagccagagacgcaggccctaaaggtaaaaacgtcctctctgtattctctggcttttactccctagtgtctctgcataagtccctttgaggctgttagcctacccctccatctcttccattgacaaggaggatatgaatgatcttgacactgcttatatgagggcggcaaaagccctgctctcaactgcatgtgagaaaaaaacatctcacttaattcttccctcgccccttggtccctggctgtggacatgttaaacatttgtgaaaactttggccacgtccccatgagtggcaaggcagggtaaatggctatgccaagtgaaagaagaccaaagacaaaaagaccatgtcattcagcagcttaaaacccctcaacagcttcacattgcccagagtaaggatcaacatacatgtaataggttctcaaaagccctacatcatctgggtacaagctccccctccaaccccactctgtactatctccccctacccccaaccccagctgggcactccagctctactggctgtatgtctctctcctaatttttctacttaccacagggcctttgcacacgctgttccctctgcctggtagacttatccatgctccttagggaagcctttcgtggctcctcctcccccaggttaggccccctggttatttacacttgggcatcatgtgccttccctttgctgcatcatttgacattcatttgtgtgattattcatgtctttcccttcccttcccttccccttactcggctggagtcctactggggcagcgacagtgtctcttcttccttgctgttggatctcaggattaagcacagtgcctggcatacagcaggtgctcaataaatacttatcaaattgaaaaaagaag

SEQ ID NO: 355062 - DNA, 3484 bp, Homo sapiens
ggccggggccgcaccgcccttcgcagccgcctctgccgccgccgccgcgttggcctcgccgcccctgctcggacaccatgccacaaggagagtgatctcttcccctgttttcacaatggaggactccggaaagactttcagctccgaggaggaagaagctaactattggaaagatctggcgatgacctacaaacagagggcagaaaatacgcaagaggaactccgagaattccaggagggaagccgagaatatgaagctgaattggagacgcagctgcaacaaattgaaaccaggaacagagacctcctgtccgaaaataaccgccttcgcatggagctggaaaccatcaaggagaagtttgaagtgcagcactctgaaggctaccggcagatctcagccttggaggatgacctcgcgcagaccaaagccattaaagaccaattgcagaaatacatcagagagctggagcaagcaaatgacgacctggaaagagccaagcgcgccacgatcatgtctctcgaagactttgagcagcgcttgaatcaggccatcgaaagaaatgccttcctggaaagtgaacttgatgaaaaagagaatctcctggaatctgttcagagactgaaggatgaagccagagatttgcggcaggaactggccgtgcagcagaagcaggagaaacccaggacccccatgcccagctcagtggaagctgagaggacagacacagctgtgcaggccacgggctccgtgccgtccacgcccattgctcaccgaggacccagctcaagtttaaacacacctgggagcttcagacgtggcctggacgactccaccggggggacccccctcacacctgcggcccggatatcagccctcaacattgtgggagacctactgcggaaagtcggggcactggagtccaaactcgcttcctgccggaacctcgtgtacgatcagtccccaaaccgaacaggtggcccagcctctgggcggagcagcaagaacagagatggcggggagagacggccaagcagcaccagcgtgcctttgggtgataaggggagagaaaattgagaccctgtgagaccctgctcctgactcttgatgttcacccttataactctctgggccccggtgctagccagtttgtcacagctgttatgtcagcttaatttggtttgctctgtctgaaggttggggaagcgcctggaatttgggaagccgccttcacacatgtcttcatcgccgctgccgtcagcccagggggtagtcaagatgttgctttaggaaaaccacggaagctgaaggtcttggtgttggttggacacgagttgccgctggttgtccaaatcaacaaccaggtcgtccagctcctgctgaagcctgttcttggtcttttccagtttatcatacgcggccgccttctcctcgtactgctgggtgaggttctcgatctccttctggaacctcttcttcccctcttccagagcttccacggtgctggcaaagtcctgcagcttcttcttcgagtcggagagctacaaggacagcgtccagggtagggtgagagggggaccatgaatggcccctgtccctggccccacagactctgagaagcgaagaccatgtctcctcgttggagaaacccaatagcaggggaagctggggggtcaagcaccatcgcaccaacactccaccgcgatctgcctgcgggggatctcagcgcagagaagttgagaggacccatgaaggaagcaaggacacggggcaggcacctggatgttgagagtggagatgtggcgctccaggttctgcttggcctccatctcctcgtccagctggtcttgcaggctgttccgctcctcctccagctggcgcagcttcgtagacacgttgagcttctgccgggtttcttcttgaagcagctcctgcaaaagggatgcaaagaggtcccagggacctgccccgaggaaggccaccccccaggtcccctggatgatgtggcaggacactcacctgggtgtcctggagctgggaactgagggacgccacgtccttggccagcttaatggccttcccctcggcctcgttaagcatccctgtgacgctctcaacttcattctaagggtgccaagagactggttagtcaaagcctctagaaggggatcctcgttgaaaggagccctttttactcaaaacacatgggctagtacttgaggtgttcactgattgagaaaatacccgtgaggtatgggactctgataaaaaaaaaaacacacacacacacaaaaaaaacagaatctgtggcttgaagggaactccgtcacctatgagttgggaccctggccctagactctgtggttctaagaacttatttgagccccaatggtattgactgggacctgatcccactaaatggatcctagatccctgccaaggttggtagagacaaagcagcaggtctgagagtccagacgaggtgctctggctggtccactctctaaggctggagaagggagaccaggatggtacttgaacgtcccagggatgctgtcccatcccttccttcctcactcctactctttgaccctgatggccaaagccagagacgcaggccctaaaggtaaaaacgtcctctctgtattctctggcttttactccctagtgtctctgcataagtccctttgaggctgttagcctacccctccatctcttccattgacaaggaggatatgaatgatcttgacactgcttatatgagggcggcaaaagccctgctctcaactgcatgtgagaaaaaaacatctcacttaattcttccctcgccccttggtccctggctgtggacatgttaaacatttgtgaaaactttggccacgtccccatgagtggcaaggcagggtaaatggctatgccaagtgaaagaagaccaaagacaaaaagaccatgtcattcagcagcttaaaacccctcaacagcttcacattgcccagagtaaggatcaacatacatgtaataggttctcaaaagccctacatcatctgggtacaagctccccctccaaccccactctgtactatctccccctacccccaaccccagctgggcactccagctctactggctgtatgtctctctcctaatttttctacttaccacagggcctttgcacacgctgttccctctgcctggtagacttatccatgctccttagggaagcctttcgtggctcctcctcccccaggttaggccccctggttatttacacttgggcatcatgtgccttccctttgctgcatcatttgacattcatttgtgtgattattcatgtctttcccttcccttcccttccccttactcggctggagtcctactggggcagcgacagtgtctcttcttccttgctgttggatctcaggattaagcacagtgcctggcatacagcaggtgctcaataaatacttatcaaattgaaaaaagaag

SEQ ID NO: 355063 - DNA, 3308 bp, Homo sapiens
ggccggggccgcaccgcccttcgcagccgcctctgccgccgccgccgcgttggcctcgccgcccctgctcggacaccatgccacaaggagagtgatctcttcccctgttttcacaatggaggactccggaaagactttcagctccgaggaggaagaagctaactattggaaagatctggcgatgacctacaaacagagggcagaaaatacgcaagaggaactccgagaattccaggagggaagccgagaatatgaagctgaattggagacgcagctgcaacaaattgaaaccaggaacagagacctcctgtccgaaaataaccgccttcgcatggagctggaaaccatcaaggttccgaggagatctctcaatcgccagtgcagtcggtggagcccactcgctgcgtcctcctggagcctgcgtttgaatttaggagaagtttgaagtgcagcactctgaaggctaccggcagatctcagccttggaggatgacctcgcgcagaccaaagccattaaagaccaattgcagaaatacatcagagagctggagcaagcaaatgacgacctggaaagagccaagcgcgccacgatcatgtctctcgaagactttgagcagcgcttgaatcaggccatcgaaagaaatgccttcctggaaagtgaacttgatgaaaaagagaatctcctggaatctgttcagagactgaaggatgaagccagagatttgcggcaggaactggccgtgcagcagaagcaggagaaacccaggacccccatgcccagctcagtggaagctgagaggacagacacagctgtgcaggccacgggctccgtgccgtccacgcccattgctcaccgaggacccagctcaagtttaaacacacctgggagcttcagacgtggcctggacgactccaccggggggacccccctcacacctgcggcccggatatcagccctcaacattgtgggagacctactgcggaaagtcggggcactggagtccaaactcgcttcctgccggaacctcgtgtacgatcagtccccaaaccgaacaggtggcccagcctctgggcggagcagcaagaacagagatggcggggagagacggccaagcagcaccagcgtgcctttgggtgataaggggttggacacgagttgccgctggttgtccaaatcaacaaccaggtcgtccagctcctgctgaagcctgttcttggtcttttccagtttatcatacgcggccgccttctcctcgtactgctgggtgaggttctcgatctccttctggaacctcttcttcccctcttccagagcttccacggtgctggcaaagtcctgcagcttcttcttcgagtcggagagctacaaggacagcgtccagggtagggtgagagggggaccatgaatggcccctgtccctggccccacagactctgagaagcgaagaccatgtctcctcgttggagaaacccaatagcaggggaagctggggggtcaagcaccatcgcaccaacactccaccgcgatctgcctgcgggggatctcagcgcagagaagttgagaggacccatgaaggaagcaaggacacggggcaggcacctggatgttgagagtggagatgtggcgctccaggttctgcttggcctccatctcctcgtccagctggtcttgcaggctgttccgctcctcctccagctggcgcagcttcgtagacacgttgagcttctgccgggtttcttcttgaagcagctcctgcaaaagggatgcaaagaggtcccagggacctgccccgaggaaggccaccccccaggtcccctggatgatgtggcaggacactcacctgggtgtcctggagctgggaactgagggacgccacgtccttggccagcttaatggccttcccctcggcctcgttaagcatccctgtgacgctctcaacttcattctaagggtgccaagagactggttagtcaaagcctctagaaggggatcctcgttgaaaggagccctttttactcaaaacacatgggctagtacttgaggtgttcactgattgagaaaatacccgtgaggtatgggactctgataaaaaaaaaaacacacacacacacaaaaaaaacagaatctgtggcttgaagggaactccgtcacctatgagttgggaccctggccctagactctgtggttctaagaacttatttgagccccaatggtattgactgggacctgatcccactaaatggatcctagatccctgccaaggttggtagagacaaagcagcaggtctgagagtccagacgaggtgctctggctggtccactctctaaggctggagaagggagaccaggatggtacttgaacgtcccagggatgctgtcccatcccttccttcctcactcctactctttgaccctgatggccaaagccagagacgcaggccctaaaggtaaaaacgtcctctctgtattctctggcttttactccctagtgtctctgcataagtccctttgaggctgttagcctacccctccatctcttccattgacaaggaggatatgaatgatcttgacactgcttatatgagggcggcaaaagccctgctctcaactgcatgtgagaaaaaaacatctcacttaattcttccctcgccccttggtccctggctgtggacatgttaaacatttgtgaaaactttggccacgtccccatgagtggcaaggcagggtaaatggctatgccaagtgaaagaagaccaaagacaaaaagaccatgtcattcagcagcttaaaacccctcaacagcttcacattgcccagagtaaggatcaacatacatgtaataggttctcaaaagccctacatcatctgggtacaagctccccctccaaccccactctgtactatctccccctacccccaaccccagctgggcactccagctctactggctgtatgtctctctcctaatttttctacttaccacagggcctttgcacacgctgttccctctgcctggtagacttatccatgctccttagggaagcctttcgtggctcctcctcccccaggttaggccccctggttatttacacttgggcatcatgtgccttccctttgctgcatcatttgacattcatttgtgtgattattcatgtctttcccttcccttcccttccccttactcggctggagtcctactggggcagcgacagtgtctcttcttccttgctgttggatctcaggattaagcacagtgcctggcatacagcaggtgctcaataaatacttatcaaattgaaaaaagaag

SEQ ID NO: 355064 - DNA, 3200 bp, Homo sapiens
ggccggggccgcaccgcccttcgcagccgcctctgccgccgccgccgcgttggcctcgccgcccctgctcggacaccatgccacaaggagagtgatctcttcccctgttttcacaatggaggactccggaaagactttcagctccgaggaggaagaagctaactattggaaagatctggcgatgacctacaaacagagggcagaaaatacgcaagaggaactccgagaattccaggagggaagccgagaatatgaagctgaattggagacgcagctgcaacaaattgaaaccaggaacagagacctcctgtccgaaaataaccgccttcgcatggagctggaaaccatcaaggagaagtttgaagtgcagcactctgaaggctaccggcagatctcagccttggaggatgacctcgcgcagaccaaagccattaaagaccaattgcagaaatacatcagagagctggagcaagcaaatgacgacctggaaagagccaagcgcgccacgatcatgtctctcgaagactttgagcagcgcttgaatcaggccatcgaaagaaatgccttcctggaaagtgaacttgatgaaaaagagaatctcctggaatctgttcagagactgaaggatgaagccagagatttgcggcaggaactggccgtgcagcagaagcaggagaaacccaggacccccatgcccagctcagtggaagctgagaggacagacacagctgtgcaggccacgggctccgtgccgtccacgcccattgctcaccgaggacccagctcaagtttaaacacacctgggagcttcagacgtggcctggacgactccaccggggggacccccctcacacctgcggcccggatatcagccctcaacattgtgggagacctactgcggaaagtcggggttggggaagcgcctggaatttgggaagccgccttcacacatgtcttcatcgccgctgccgtcagcccagggggtagtcaagatgttgctttaggaaaaccacggaagctgaaggtcttggtgttggttggacacgagttgccgctggttgtccaaatcaacaaccaggtcgtccagctcctgctgaagcctgttcttggtcttttccagtttatcatacgcggccgccttctcctcgtactgctgggtgaggttctcgatctccttctggaacctcttcttcccctcttccagagcttccacggtgctggcaaagtcctgcagcttcttcttcgagtcggagagctacaaggacagcgtccagggtagggtgagagggggaccatgaatggcccctgtccctggccccacagactctgagaagcgaagaccatgtctcctcgttggagaaacccaatagcaggggaagctggggggtcaagcaccatcgcaccaacactccaccgcgatctgcctgcgggggatctcagcgcagagaagttgagaggacccatgaaggaagcaaggacacggggcaggcacctggatgttgagagtggagatgtggcgctccaggttctgcttggcctccatctcctcgtccagctggtcttgcaggctgttccgctcctcctccagctggcgcagcttcgtagacacgttgagcttctgccgggtttcttcttgaagcagctcctgcaaaagggatgcaaagaggtcccagggacctgccccgaggaaggccaccccccaggtcccctggatgatgtggcaggacactcacctgggtgtcctggagctgggaactgagggacgccacgtccttggccagcttaatggccttcccctcggcctcgttaagcatccctgtgacgctctcaacttcattctaagggtgccaagagactggttagtcaaagcctctagaaggggatcctcgttgaaaggagccctttttactcaaaacacatgggctagtacttgaggtgttcactgattgagaaaatacccgtgaggtatgggactctgataaaaaaaaaaacacacacacacacaaaaaaaacagaatctgtggcttgaagggaactccgtcacctatgagttgggaccctggccctagactctgtggttctaagaacttatttgagccccaatggtattgactgggacctgatcccactaaatggatcctagatccctgccaaggttggtagagacaaagcagcaggtctgagagtccagacgaggtgctctggctggtccactctctaaggctggagaagggagaccaggatggtacttgaacgtcccagggatgctgtcccatcccttccttcctcactcctactctttgaccctgatggccaaagccagagacgcaggccctaaaggtaaaaacgtcctctctgtattctctggcttttactccctagtgtctctgcataagtccctttgaggctgttagcctacccctccatctcttccattgacaaggaggatatgaatgatcttgacactgcttatatgagggcggcaaaagccctgctctcaactgcatgtgagaaaaaaacatctcacttaattcttccctcgccccttggtccctggctgtggacatgttaaacatttgtgaaaactttggccacgtccccatgagtggcaaggcagggtaaatggctatgccaagtgaaagaagaccaaagacaaaaagaccatgtcattcagcagcttaaaacccctcaacagcttcacattgcccagagtaaggatcaacatacatgtaataggttctcaaaagccctacatcatctgggtacaagctccccctccaaccccactctgtactatctccccctacccccaaccccagctgggcactccagctctactggctgtatgtctctctcctaatttttctacttaccacagggcctttgcacacgctgttccctctgcctggtagacttatccatgctccttagggaagcctttcgtggctcctcctcccccaggttaggccccctggttatttacacttgggcatcatgtgccttccctttgctgcatcatttgacattcatttgtgtgattattcatgtctttcccttcccttcccttccccttactcggctggagtcctactggggcagcgacagtgtctcttcttccttgctgttggatctcaggattaagcacagtgcctggcatacagcaggtgctcaataaatacttatcaaattgaaaaaagaag

SEQ ID NO: 355065 - DNA, 2844 bp, Homo sapiens
ggccggggccgcaccgcccttcgcagccgcctctgccgccgccgccgcgttggcctcgccgcccctgctcggacaccatgccacaaggagagtgatctcttcccctgttttcacaatggaggactccggaaagactttcagctccgaggaggaagaagctaactattggaaagatctggcgatgacctacaaacagagggcagaaaatacgcaagaggaactccgagaattccaggagggaagccgagaatatgaagctgaattggagacgcagctgcaacaaattgaaaccaggaacagagacctcctgtccgaaaataaccgccttcgcatggagctggaaaccatcaaggagaagtttgaagtgcagcactctgaaggctaccggcagatctcagccttggaggatgacctcgcgcagaccaaagccattaaagaccaattgcagaaatacatcagagagctggagcaagcaaatgacgacctggaaagagccaagcgcgccacgatcatgtctctcgaagactttgagcagcgcttgaatcaggccatcgaaagaaatgccttcctggaaagtgaacttgatgaaaaagagaatctcctggaatctgttcagagactgaaggatgaagccagagatttgcggcaggaactggccgtgcagcagaagcaggagaaacccaggacccccatgcccagctcagtggaagctgagaggacagacacagctgtgcaggccacgggctccgtgccgtccacgcccattgctcaccgaggacccagctcaagtttaaacacacctgggagcttcagacgtggcctggacgactccaccggggggacccccctcacacctgcggcccggatatcagccctcaacattgtgggagacctactgcggaaagtcggggcactggagtccaaactcgcttcctgccggaacctcgtgtacgatcagtccccaaaccgaacaggtggcccagcctctgggcggagcagcaagaacagagatggcggggagagacggccaagcagcaccagcgtgcctttgggtgataaggggttggggaagcgcctggaatttgggaagccgccttcacacatgtcttcatcgccgctgccgtcagcccagggggtagtcaagatgttgctttaggaaaaccacggaagctgaaggtcttggtgttggtgcggaagtcgttaccttttgtcgtctttttacactaggtttttgttttaagttagtttgagaaataagagcagtcaccatagttagttagctttgcggcccaagccaatgaccgaggccatcacctgtgctctggggtttgtccctgggaaatgtcttttcatccttacctgccaccgtgtgcattgcaaagagggacaaaaggggctctctgggaagggctctaagttgtcggtgatgaggctaccgtgttgtttttgagatagagtcttgctctgtcacccaggctggagtgtggtggcgtgatctcagctcactgcaacctccgcctcctgggttcaaacggttcttgttcctgagtcttccaggtagctgggattacaggcacccaccaccacacctggctgaattttttgtatttttaatagagacggggttttgccatgttgcccagtgtggtcttgaactcctggcctcaagtgatcctcccatctcggcctcccagaatgctgggatttcaagcatgagccatcgttcccatgccccattgtgttgcactaacccaagcggaggtcctgattggtcttttttttttttttcttttttggagacagagtcttggctcttgccctgtcttgtccagggctggagtgtagtgggtggcaatttcgggctcaccgcagcctccgcctcctaggttcaagcgattctcttatctcagcttcccaagtagctgggactacgggagtgtgccactacacccactaattttggtatttttagtgagaaaccccatctctactaaaaatacaaaaaattagctgggtgcagtggtgcgtgcctataattccagctactccagatgttgaggcaggagagttgcttggacccgggaggtggagggtgcagtgagccgggatcgcgctactgtactccagcctgggcaacagagtgagactccgtctccaaaaaaaaaaaaaagggtgtcataaacctctgagactgtagcctgcttcttagcttctcattgagattcctagaggtgcgttcgagttttcagagtaattttccagaccaaccagcgtcagtgggaaatctgacctcttttggcaaactgcgatcattcattttcctgagtcccctggtggggtggggggaattctgcctcaggaccctgaggggtctttggggcaagatggccttggtaatgcagccactaagaacaggacttcattcaaaggcataatgaagtaaccagggtgaccatcaagtaaaattaaagcacaagatcattgtaggaggcttccttgtcaaagacgtgaacgtgggatttccaacgcaccacggtgtgtccactcatcactgcatgttaggaactgctgtctctttgggacacgagttaaaagaacacactaatttctggagtgtgcctgcagcttcacggccttcattttgttactaagttattttctggaagaacagcaaaaatttcaggttgaaaacagaactttccaagtgctactgaaattccgcagagaattacgctgcgatggtgggtttcttaccctagaaacatcctaacctgtatccacagaagatgtccttttatttttttaaaagatcaataaaatcaagagaaacgaaaaaaaaaaaag

SEQ ID NO: 355066 - DNA, 3266 bp, Homo sapiens
ggccggggccgcaccgcccttcgcagccgcctctgccgccgccgccgcgttggcctcgccgcccctgctcggacaccatgccacaaggagagtgatctcttcccctgttttcacaatggaggactccggaaagactttcagctccgaggaggaagaagctaactattggaaagatctggcgatgacctacaaacagagggcagaaaatacgcaagaggaactccgagaattccaggagggaagccgagaatatgaagctgaattggagacgcagctgcaacaaattgaaaccaggaacagagacctcctgtccgaaaataaccgccttcgcatggagctggaaaccatcaaggagaagtttgaagtgcagcactctgaaggctaccggcagatctcagccttggaggatgacctcgcgcagaccaaagccattaaagaccaattgcagaaatacatcagagagctggagcaagcaaatgacgacctggaaagagccaagcgcgccacgatcatgtctctcgaagactttgagcagcgcttgaatcaggccatcgaaagaaatgccttcctggaaagtgaacttgatgaaaaagagaatctcctggaatctgttcagagactgaaggatgaagccagagatttgcggcaggaactggccgtgcagcagaagcaggagaaacccaggacccccatgcccagctcagtggaagctgagaggacagacacagctgtgcaggccacgggctccgtgccgtccacgcccattgctcaccgaggacccagctcaagtttaaacacacctgggagcttcagacgtggcctggacgactccaccggggggacccccctcacacctgcggcccggatatcagccctcaacattgtgggagacctactgcggaaagtcggggcactggagtccaaactcgcttcctgccggaacctcgtgtacgatcagtccccaaaccgaacaggtggcccagcctctgggcggagcagcaagaacagagatggcggggagagacggccaagcagcaccagcgtgcctttgggtgataaggggttggggaagcgcctggaatttgggaagccgccttcacacatgtcttcatcgccgctgccgtcagcccagggggtagtcaagatgttgctttaggaaaaccacggaagctgaaggtcttggtgttggtgcggaagtcgttaccttttgtcgtctttttacactaggtttttgttttaagttagtttgagaaataagagcagtcaccatagttagttagctttgcggcccaagccaatgaccgaggccatcacctgtgctctggggtttgtccctgggaaatgtcttttcatccttacctgccaccgtgtgcattgcaaagagggacaaaaggggctctctgggaagggctctaagttgtcggtgatgaggctaccgtgttgtttttgagatagagtcttgctctgtcacccaggctggagtgtggtggcgtgatctcagctcactgcaacctccgcctcctgggttcaaacggttcttgttcctgagtcttccaggtagctgggattacaggcacccaccaccacacctggctgaattttttgtatttttaatagagacggggttttgccatgttgcccagtgtggtcttgaactcctggcctcaagtgatcctcccatctcggcctcccagaatgctgggatttcaagcatgagccatcgttcccatgccccattgtgttgcactaacccaagcggaggtcctgattggtcttttttttttttttcttttttggagacagagtcttggctcttgccctgtcttgtccagggctggagtgtagtgggtggcaatttcgggctcaccgcagcctccgcctcctaggttcaagcgattctcttatctcagcttcccaagtagctgggactacgggagtgtgccactacacccactaattttggtatttttagtgagaaacggggtttcaccatgttggccatgctggtcttgaactcccggcctcgagtgatcctcccgcctcagcctcccagagtgctggaattacaggcctgagccaccgtgcctggcccctgattggtcttgacaggtgtttttaatgtcccaagtctccgtaaatgtgggatggagcttctctcagaggctcttccccccaactcccaaccaggtggaatcgtcttccagaacaaaatctcccagtgctttgtggtgtactgaaatcatgtctaagaacagagaacttaacagtcacatgcctttttaaaaactggaataggctgggcgcggtggctcaggccggtaatcctaagactttggaaggccgaggcgggtggattacctgaggtcaggagttcaagaccagcctggccaacatggtgaaaccccatctctactaaaaatacaaaaaattagctgggtgcagtggtgcgtgcctataattccagctactccagatgttgaggcaggagagttgcttggacccgggaggtggagggtgcagtgagccgggatcgcgctactgtactccagcctgggcaacagagtgagactccgtctccaaaaaaaaaaaaaagggtgtcataaacctctgagactgtagcctgcttcttagcttctcattgagattcctagaggtgcgttcgagttttcagagtaattttccagaccaaccagcgtcagtgggaaatctgacctcttttggcaaactgcgatcattcattttcctgagtcccctggtggggtggggggaattctgcctcaggaccctgaggggtctttggggcaagatggccttggtaatgcagccactaagaacaggacttcattcaaaggcataatgaagtaaccagggtgaccatcaagtaaaattaaagcacaagatcattgtaggaggcttccttgtcaaagacgtgaacgtgggatttccaacgcaccacggtgtgtccactcatcactgcatgttaggaactgctgtctctttgggacacgagttaaaagaacacactaatttctggagtgtgcctgcagcttcacggccttcattttgttactaagttattttctggaagaacagcaaaaatttcaggttgaaaacagaactttccaagtgctactgaaattccgcagagaattacgctgcgatggtgggtttcttaccctagaaacatcctaacctgtatccacagaagatgtccttttatttttttaaaagatcaataaaatcaagagaaacgaaaaaaaaaaaag

SEQ ID NO: 355067 - DNA, 2596 bp, Homo sapiens
tgcatccatacggaaagtcggggcactggagtccaaactcgcttcctgccggaacctcgtgtacgatcagtccccaaaccgaacaggtggcccagcctctgggcggagcagcaagaacagagatggcggggagagacggccaagcagcaccagcgtgcctttgggtgataaggggagagaaaattgagaccctgtgagaccctgctcctgactcttgatgttcacccttataactctctgggccccggtgctagccagtttgtcacagctgttatgtcagcttaatttggtttgctctgtctgaaggttggggaagcgcctggaatttgggaagccgccttcacacatgtcttcatcgccgctgccgtcagcccagggggtagtcaagatgttgctttaggaaaaccacggaagctgaaggtcttggtgttggttggacacgagttgccgctggttgtccaaatcaacaaccaggtcgtccagctcctgctgaagcctgttcttggtcttttccagtttatcatacgcggccgccttctcctcgtactgctgggtgaggttctcgatctccttctggaacctcttcttcccctcttccagagcttccacggtgctggcaaagtcctgcagcttcttcttcgagtcggagagctacaaggacagcgtccagggtagggtgagagggggaccatgaatggcccctgtccctggccccacagactctgagaagcgaagaccatgtctcctcgttggagaaacccaatagcaggggaagctggggggtcaagcaccatcgcaccaacactccaccgcgatctgcctgcgggggatctcagcgcagagaagttgagaggacccatgaaggaagcaaggacacggggcaggcacctggatgttgagagtggagatgtggcgctccaggttctgcttggcctccatctcctcgtccagctggtcttgcaggctgttccgctcctcctccagctggcgcagcttcgtagacacgttgagcttctgccgggtttcttcttgaagcagctcctgcaaaagggatgcaaagaggtcccagggacctgccccgaggaaggccaccccccaggtcccctggatgatgtggcaggacactcacctgggtgtcctggagctgggaactgagggacgccacgtccttggccagcttaatggccttcccctcggcctcgttaagcatccctgtgacgctctcaacttcattctaagggtgccaagagactggttagtcaaagcctctagaaggggatcctcgttgaaaggagccctttttactcaaaacacatgggctagtacttgaggtgttcactgattgagaaaatacccgtgaggtatgggactctgataaaaaaaaaaacacacacacacacaaaaaaaacagaatctgtggcttgaagggaactccgtcacctatgagttgggaccctggccctagactctgtggttctaagaacttatttgagccccaatggtattgactgggacctgatcccactaaatggatcctagatccctgccaaggttggtagagacaaagcagcaggtctgagagtccagacgaggtgctctggctggtccactctctaaggctggagaagggagaccaggatggtacttgaacgtcccagggatgctgtcccatcccttccttcctcactcctactctttgaccctgatggccaaagccagagacgcaggccctaaaggtaaaaacgtcctctctgtattctctggcttttactccctagtgtctctgcataagtccctttgaggctgttagcctacccctccatctcttccattgacaaggaggatatgaatgatcttgacactgcttatatgagggcggcaaaagccctgctctcaactgcatgtgagaaaaaaacatctcacttaattcttccctcgccccttggtccctggctgtggacatgttaaacatttgtgaaaactttggccacgtccccatgagtggcaaggcagggtaaatggctatgccaagtgaaagaagaccaaagacaaaaagaccatgtcattcagcagcttaaaacccctcaacagcttcacattgcccagagtaaggatcaacatacatgtaataggttctcaaaagccctacatcatctgggtacaagctccccctccaaccccactctgtactatctccccctacccccaaccccagctgggcactccagctctactggctgtatgtctctctcctaatttttctacttaccacagggcctttgcacacgctgttccctctgcctggtagacttatccatgctccttagggaagcctttcgtggctcctcctcccccaggttaggccccctggttatttacacttgggcatcatgtgccttccctttgctgcatcatttgacattcatttgtgtgattattcatgtctttcccttcccttcccttccccttactcggctggagtcctactggggcagcgacagtgtctcttcttccttgctgttggatctcaggattaagcacagtgcctggcatacagcaggtgctcaataaatacttatcaaattgaaaaaagaag

SEQ ID NO: 355068 - DNA, 2230 bp, Homo sapiens
  misc_feature (4)..(4): n is a, c, g, or t
  misc_feature (24)..(24): n is a, c, g, or t
  misc_feature (33)..(33): n is a, c, g, or t
aagntaggctaggtagaggctggngtgaatcgnccgaggggtaaagtgaacttgtatgaataagagaatctcctggtagatcggttcagagaactgaagggatgaaatgccatgagatttgcggcaggaactggccgtgcagcagaagcaggagaaacccaggacccccatgcccagctcagtggaagctgagaggacagacacagctgtgcaggccacgggctccgtgccgtccacgcccattgctcaccgaggacccagctcaagtttaaacacacctgggagcttcagacgtggcactggagtccaaactcgcttcctgccggaacctcgtgtacgatcagtccccaaaccgaacaggtggcccagcctctgggcggagcagcaagaacagagatggcggggagagacggccaagcagcaccagcgtgcctttgggtgataaggggttggggaagcgcctggaatttgggaagccgccttcacacatgtcttcatcgccgctgccgtcagcccagggggtagtcaagatgttgctttaggaaaaccacggaagctgaaggtcttggtgttggtgcggaagtcgttaccttttgtcgtctttttacactaggtttttgttttaagttagtttgagaaataagagcagtcaccatagttagttagctttgcggcccaagccaatgaccgaggccatcacctgtgctctggggtttgtccctgggaaatgtcttttcatccttacctgccaccgtgtgcattgcaaagagggacaaaaggggctctctgggaagggctctaagttgtcggtgatgaggctaccgtgttgtttttgagatagagtcttgctctgtcacccaggctggagtgtggtggcgtgatctcagctcactgcaacctccgcctcctgggttcaaacggttcttgttcctgagtcttccaggtagctgggattacaggcacccaccaccacacctggctgaattttttgtatttttaatagagacggggttttgccatgttgcccagtgtggtcttgaactcctggcctcaagtgatcctcccatctcggcctcccagaatgctgggatttcaagcatgagccatcgttcccatgccccattgtgttgcactaacccaagcggaggtcctgattggtcttttttttttttttcttttttggagacagagtcttggctcttgccctgtcttgtccagggctggagtgtagtgggtggcaatttcgggctcaccgcagcctccgcctcctaggttcaagcgattctcttatctcagcttcccaagtagctgggactacgggagtgtgccactacacccactaattttggtatttttagtgagaaaccccatctctactaaaaatacaaaaaattagctgggtgcagtggtgcgtgcctataattccagctactccagatgttgaggcaggagagttgcttggacccgggaggtggagggtgcagtgagccgggatcgcgctactgtactccagcctgggcaacagagtgagactccgtctccaaaaaaaaaaaaaagggtgtcataaacctctgagactgtagcctgcttcttagcttctcattgagattcctagaggtgcgttcgagttttcagagtaattttccagaccaaccagcgtcagtgggaaatctgacctcttttggcaaactgcgatcattcattttcctgagtcccctggtggggtggggggaattctgcctcaggaccctgaggggtctttggggcaagatggccttggtaatgcagccactaagaacaggacttcattcaaaggcataatgaagtaaccagggtgaccatcaagtaaaattaaagcacaagatcattgtaggaggcttccttgtcaaagacgtgaacgtgggatttccaacgcaccacggtgtgtccactcatcactgcatgttaggaactgctgtctctttgggacacgagttaaaagaacacactaatttctggagtgtgcctgcagcttcacggccttcattttgttactaagttattttctggaagaacagcaaaaatttcaggttgaaaacagaactttccaagtgctactgaaattccgcagagaattacgctgcgatggtgggtttcttaccctagaaacatcctaacctgtatccacagaagatgtccttttatttttttaaaagatcaataaaatcaagagaaacgaaaaaaaaaaaag

SEQ ID NO: 355069 - DNA, 1542 bp, Homo sapiens
  misc_feature (4)..(4): n is a, c, g, or t
  misc_feature (24)..(24): n is a, c, g, or t
  misc_feature (33)..(33): n is a, c, g, or t
aagntaggctaggtagaggctggngtgaatcgnccgaggatgtcttttcatccttacctgccaccgtgtgcattgcaaagagggacaaaaggggctctctgggaagggctctaagttgtcggtgatgaggctaccgtgttgtttttgagatagagtcttgctctgtcacccaggctggagtgtggtggcgtgatctcagctcactgcaacctccgcctcctgggttcaaacggttcttgttcctgagtcttccaggtagctgggattacaggcacccaccaccacacctggctgaattttttgtatttttaatagagacggggttttgccatgttgcccagtgtggtcttgaactcctggcctcaagtgatcctcccatctcggcctcccagaatgctgggatttcaagcatgagccatcgttcccatgccccattgtgttgcactaacccaagcggaggtcctgattggtcttttttttttttttcttttttggagacagagtcttggctcttgccctgtcttgtccagggctggagtgtagtgggtggcaatttcgggctcaccgcagcctccgcctcctaggttcaagcgattctcttatctcagcttcccaagtagctgggactacgggagtgtgccactacacccactaattttggtatttttagtgagaaaccccatctctactaaaaatacaaaaaattagctgggtgcagtggtgcgtgcctataattccagctactccagatgttgaggcaggagagttgcttggacccgggaggtggagggtgcagtgagccgggatcgcgctactgtactccagcctgggcaacagagtgagactccgtctccaaaaaaaaaaaaaagggtgtcataaacctctgagactgtagcctgcttcttagcttctcattgagattcctagaggtgcgttcgagttttcagagtaattttccagaccaaccagcgtcagtgggaaatctgacctcttttggcaaactgcgatcattcattttcctgagtcccctggtggggtggggggaattctgcctcaggaccctgaggggtctttggggcaagatggccttggtaatgcagccactaagaacaggacttcattcaaaggcataatgaagtaaccagggtgaccatcaagtaaaattaaagcacaagatcattgtaggaggcttccttgtcaaagacgtgaacgtgggatttccaacgcaccacggtgtgtccactcatcactgcatgttaggaactgctgtctctttgggacacgagttaaaagaacacactaatttctggagtgtgcctgcagcttcacggccttcattttgttactaagttattttctggaagaacagcaaaaatttcaggttgaaaacagaactttccaagtgctactgaaattccgcagagaattacgctgcgatggtgggtttcttaccctagaaacatcctaacctgtatccacagaagatgtccttttatttttttaaaagatcaataaaatcaagagaaacgaaaaaaaaaaaag

SEQ ID NO: 355070 - DNA, 1545 bp, Homo sapiens
gtggggcagaagccgggacccttacgagaagctgctgttctgagcgcccgaccggcgtggcttgcgggctctagcgttaccattgcatccaggaccaggcaatggcacaccagaggagtagtcgatcgtcctgtccccctggttctatcaataatggaggactccggaaagactttcagctccgaggaggaagaagctaactattggaaagatctggcgatgacctacaaacagagggcagaaaatacgcaagaggaactccgagaattccaggagggaagccgagaatatgaagtgaattttttgtatttttaatagagacggggttttgccatgttgcccagtgtggtcttgaactcctggcctcaagtgatcctcccatctcggcctcccagaatgctgggatttcaagcatgagccatcgttcccatgccccattgtgttgcactaacccaagcggaggtcctgattggtcttttttttttttttcttttttggagacagagtcttggctcttgccctgtcttgtccagggctggagtgtagtgggtggcaatttcgggctcaccgcagcctccgcctcctaggttcaagcgattctcttatctcagcttcccaagtagctgggactacgggagtgtgccactacacccactaattttggtatttttagtgagaaaccccatctctactaaaaatacaaaaaattagctgggtgcagtggtgcgtgcctataattccagctactccagatgttgaggcaggagagttgcttggacccgggaggtggagggtgcagtgagccgggatcgcgctactgtactccagcctgggcaacagagtgagactccgtctccaaaaaaaaaaaaaagggtgtcataaacctctgagactgtagcctgcttcttagcttctcattgagattcctagaggtgcgttcgagttttcagagtaattttccagaccaaccagcgtcagtgggaaatctgacctcttttggcaaactgcgatcattcattttcctgagtcccctggtggggtggggggaattctgcctcaggaccctgaggggtctttggggcaagatggccttggtaatgcagccactaagaacaggacttcattcaaaggcataatgaagtaaccagggtgaccatcaagtaaaattaaagcacaagatcattgtaggaggcttccttgtcaaagacgtgaacgtgggatttccaacgcaccacggtgtgtccactcatcactgcatgttaggaactgctgtctctttgggacacgagttaaaagaacacactaatttctggagtgtgcctgcagcttcacggccttcattttgttactaagttattttctggaagaacagcaaaaatttcaggttgaaaacagaactttccaagtgctactgaaattccgcagagaattacgctgcgatggtgggtttcttaccctagaaacatcctaacctgtatccacagaagatgtccttttatttttttaaaagatcaataaaatcaagagaaacgaaaaaaaaaaaag

SEQ ID NO: 355071 - DNA, 1631 bp, Homo sapiens
agaggtagaccccaggcatcctactatgcttcctgaggcgttctttcttggagctgaccatggtatgacatctgagatttaaacgttttttaatagagtcataaaatccgtgcctagcattgttaaattattagacaatattagtatattaatggtagtttgtattttttttttgagacggagtctcactctgttgcccaggctggagtacagtagcgcgatcttggctcactgcaccctccacctcccgggtccaagcaactctcctgcctcaacatctggagtagctggaattataggcacgcaccactacacccactaattttggtatttttagtgagaaacggggtttcaccatgttggccatgctggtcttgaactcccggcctcgagtgatcctcccgcctcagcctcccagagtgctggaattacaggcctgagccaccgtgcctggcccctgattggtcttgacaggtgtttttaatgtcccaagtctccgtaaatgtgggatggagcttctctcagaggctcttccccccaactcccaaccaggtggaatcgtcttccagaacaaaatctcccagtgctttgtggtgtactgaaatcatgtctaagaacagagaacttaacagtcacatgcctttttaaaaactggaataggctgggcgcggtggctcaggccggtaatcctaagactttggaaggccgaggcgggtggattacctgaggtcaggagttcaagaccagcctggccaacatggtgaaaccccatctctactaaaaatacaaaaaattagctgggtgcagtggtgcgtgcctataattccagctactccagatgttgaggcaggagagttgcttggacccgggaggtggagggtgcagtgagccgggatcgcgctactgtactccagcctgggcaacagagtgagactccgtctccaaaaaaaaaaaaaagggtgtcataaacctctgagactgtagcctgcttcttagcttctcattgagattcctagaggtgcgttcgagttttcagagtaattttccagaccaaccagcgtcagtgggaaatctgacctcttttggcaaactgcgatcattcattttcctgagtcccctggtggggtggggggaattctgcctcaggaccctgaggggtctttggggcaagatggccttggtaatgcagccactaagaacaggacttcattcaaaggcataatgaagtaaccagggtgaccatcaagtaaaattaaagcacaagatcattgtaggaggcttccttgtcaaagacgtgaacgtgggatttccaacgcaccacggtgtgtccactcatcactgcatgttaggaactgctgtctctttgggacacgagttaaaagaacacactaatttctggagtgtgcctgcagcttcacggccttcattttgttactaagttattttctggaagaacagcaaaaatttcaggttgaaaacagaactttccaagtgctactgaaattccgcagagaattacgctgcgatggtgggtttcttaccctagaaacatcctaacctgtatccacagaagatgtccttttatttttttaaaagatcaataaaatcaagagaaacgaaaaaaaaaaaag

SEQ ID NO: 355072 - DNA, 315 bp, Homo sapiens
gctgtgactccaggtggatgtgtgctactgtgtctagccttctcagaagtcttaagtcattcactcagtgtctgtgttgtccttcaggagaagtttgaagtgcagcactctgaaggctaccggcagatctcagccttggaggatgacctcgcgcagaccaaagccattaaagaccaattgcagaaatacatcagagagctggagcaagcaaatgacgacctggaaagagccaagcggtatgggtggaagggaaaagcacgagtgggagactctcctctctgctttttgtccccagcagctgggtactgggccctg

SEQ ID NO: 355073 - DNA, 3226 bp, Homo sapiens
ggccggggccgcaccgcccttcgcagccgcctctgccgccgccgccgcgttggcctcgccgcccctgctcggacaccatgccacaaggagagtgatctcttcccctgttttcacaatggaggactccggaaagactttcagctccgaggaggaagaagctaactattggaaagatctggcgatgacctacaaacagagggcagaaaatacgcaagaggaactccgagaattccaggagggaagccgagaatatgaagctgaattggagacgcagctgcaacaaattgaaaccaggaacagagacctcctgtccgaaaataaccgccttcgcatggagctggaaaccatcaaggagaagtttgaagtgcagcactctgaaggctaccggcagatctcagccttggaggatgacctcgcgcagaccaaagccattaaagaccaattgcagaaatacatcagagagctggagcaagcaaatgacgacctggaaagagccaagcgcgccacgatcatgtctctcgaagactttgagcagcgcttgaatcaggccatcgaaagaaatgccttcctggaaagtgaacttgatgaaaaagagaatctcctggaatctgttcagagactgaaggatgaagccagagatttgcggcaggaactggccgtgcagcagaagcaggagaaacccaggacccccatgcccagctcagtggaagctgagaggacagacacagctgtgcaggccacgggctccgtgccgtccacgcccattgctcaccgaggacccagctcaagtttaaacacacctgggagcttcagacgtggcctggacgactccaccggggggacccccctcacacctgcggcccggatatcagccctcaacattgtgggagacctactgcggaaagtcggggcactggagtccaaactcgcttcctgccggaacctcgtgtacgatcagtccccaaaccgaacaggtggcccagcctctgggcggagcagcaagaacagagatggcggggagagacggccaagcagcaccagcgtgcctttgggtgataaggggttggacacgagttgccgctggttgtccaaatcaacaaccaggtcgtccagctcctgctgaagcctgttcttggtcttttccagtttatcatacgcggccgccttctcctcgtactgctgggtgaggttctcgatctccttctggaacctcttcttcccctcttccagagcttccacggtgctggcaaagtcctgcagcttcttcttcgagtcggagagctacaaggacagcgtccagggtagggtgagagggggaccatgaatggcccctgtccctggccccacagactctgagaagcgaagaccatgtctcctcgttggagaaacccaatagcaggggaagctggggggtcaagcaccatcgcaccaacactccaccgcgatctgcctgcgggggatctcagcgcagagaagttgagaggacccatgaaggaagcaaggacacggggcaggcacctggatgttgagagtggagatgtggcgctccaggttctgcttggcctccatctcctcgtccagctggtcttgcaggctgttccgctcctcctccagctggcgcagcttcgtagacacgttgagcttctgccgggtttcttcttgaagcagctcctgcaaaagggatgcaaagaggtcccagggacctgccccgaggaaggccaccccccaggtcccctggatgatgtggcaggacactcacctgggtgtcctggagctgggaactgagggacgccacgtccttggccagcttaatggccttcccctcggcctcgttaagcatccctgtgacgctctcaacttcattctaagggtgccaagagactggttagtcaaagcctctagaaggggatcctcgttgaaaggagccctttttactcaaaacacatgggctagtacttgaggtgttcactgattgagaaaatacccgtgaggtatgggactctgataaaaaaaaaaacacacacacacacaaaaaaaacagaatctgtggcttgaagggaactccgtcacctatgagttgggaccctggccctagactctgtggttctaagaacttatttgagccccaatggtattgactgggacctgatcccactaaatggatcctagatccctgccaaggttggtagagacaaagcagcaggtctgagagtccagacgaggtgctctggctggtccactctctaaggctggagaagggagaccaggatggtacttgaacgtcccagggatgctgtcccatcccttccttcctcactcctactctttgaccctgatggccaaagccagagacgcaggccctaaaggtaaaaacgtcctctctgtattctctggcttttactccctagtgtctctgcataagtccctttgaggctgttagcctacccctccatctcttccattgacaaggaggatatgaatgatcttgacactgcttatatgagggcggcaaaagccctgctctcaactgcatgtgagaaaaaaacatctcacttaattcttccctcgccccttggtccctggctgtggacatgttaaacatttgtgaaaactttggccacgtccccatgagtggcaaggcagggtaaatggctatgccaagtgaaagaagaccaaagacaaaaagaccatgtcattcagcagcttaaaacccctcaacagcttcacattgcccagagtaaggatcaacatacatgtaataggttctcaaaagccctacatcatctgggtacaagctccccctccaaccccactctgtactatctccccctacccccaaccccagctgggcactccagctctactggctgtatgtctctctcctaatttttctacttaccacagggcctttgcacacgctgttccctctgcctggtagacttatccatgctccttagggaagcctttcgtggctcctcctcccccaggttaggccccctggttatttacacttgggcatcatgtgccttccctttgctgcatcatttgacattcatttgtgtgattattcatgtctttcccttcccttcccttccccttactcggctggagtcctactggggcagcgacagtgtctcttcttccttgctgttggatctcaggattaagcacagtgcctggcatacagcaggtgctcaataaatacttatcaaattgaaaaaagaag

SEQ ID NO: 355074 - DNA, 3285 bp, Homo sapiens
tttattttgagacggagtcttgttcttgtccaggctggagtgcagtggcatgatctcgactcactgcaacctcagtcctccgggttcaagtgattcttctgcctcaccctcctgagtagctgggattacagacaccatgccacaaggagagtgatctcttcccctgttttcacaatggaggactccggaaagactttcagctccgaggaggaagaagctaactattggaaagatctggcgatgacctacaaacagagggcagaaaatacgcaagaggaactccgagaattccaggagggaagccgagaatatgaagctgaattggagacgcagctgcaacaaattgaaaccaggaacagagacctcctgtccgaaaataaccgccttcgcatggagctggaaaccatcaaggagaagtttgaagtgcagcactctgaaggctaccggcagatctcagccttggaggatgacctcgcgcagaccaaagccattaaagaccaattgcagaaatacatcagagagctggagcaagcaaatgacgacctggaaagagccaagcgcgccacgatcatgtctctcgaagactttgagcagcgcttgaatcaggccatcgaaagaaatgccttcctggaaagtgaacttgatgaaaaagagaatctcctggaatctgttcagagactgaaggatgaagccagagatttgcggcaggaactggccgtgcagcagaagcaggagaaacccaggacccccatgcccagctcagtggaagctgagaggacagacacagctgtgcaggccacgggctccgtgccgtccacgcccattgctcaccgaggacccagctcaagtttaaacacacctgggagcttcagacgtggcctggacgactccaccggggggacccccctcacacctgcggcccggatatcagccctcaacattgtgggagacctactgcggaaagtcggggcactggagtccaaactcgcttcctgccggaacctcgtgtacgatcagtccccaaaccgaacaggtggcccagcctctgggcggagcagcaagaacagagatggcggggagagacggccaagcagcaccagcgtgcctttgggtgataaggggttggacacgagttgccgctggttgtccaaatcaacaaccaggtcgtccagctcctgctgaagcctgttcttggtcttttccagtttatcatacgcggccgccttctcctcgtactgctgggtgaggttctcgatctccttctggaacctcttcttcccctcttccagagcttccacggtgctggcaaagtcctgcagcttcttcttcgagtcggagagctacaaggacagcgtccagggtagggtgagagggggaccatgaatggcccctgtccctggccccacagactctgagaagcgaagaccatgtctcctcgttggagaaacccaatagcaggggaagctggggggtcaagcaccatcgcaccaacactccaccgcgatctgcctgcgggggatctcagcgcagagaagttgagaggacccatgaaggaagcaaggacacggggcaggcacctggatgttgagagtggagatgtggcgctccaggttctgcttggcctccatctcctcgtccagctggtcttgcaggctgttccgctcctcctccagctggcgcagcttcgtagacacgttgagcttctgccgggtttcttcttgaagcagctcctgcaaaagggatgcaaagaggtcccagggacctgccccgaggaaggccaccccccaggtcccctggatgatgtggcaggacactcacctgggtgtcctggagctgggaactgagggacgccacgtccttggccagcttaatggccttcccctcggcctcgttaagcatccctgtgacgctctcaacttcattctaagggtgccaagagactggttagtcaaagcctctagaaggggatcctcgttgaaaggagccctttttactcaaaacacatgggctagtacttgaggtgttcactgattgagaaaatacccgtgaggtatgggactctgataaaaaaaaaaacacacacacacacaaaaaaaacagaatctgtggcttgaagggaactccgtcacctatgagttgggaccctggccctagactctgtggttctaagaacttatttgagccccaatggtattgactgggacctgatcccactaaatggatcctagatccctgccaaggttggtagagacaaagcagcaggtctgagagtccagacgaggtgctctggctggtccactctctaaggctggagaagggagaccaggatggtacttgaacgtcccagggatgctgtcccatcccttccttcctcactcctactctttgaccctgatggccaaagccagagacgcaggccctaaaggtaaaaacgtcctctctgtattctctggcttttactccctagtgtctctgcataagtccctttgaggctgttagcctacccctccatctcttccattgacaaggaggatatgaatgatcttgacactgcttatatgagggcggcaaaagccctgctctcaactgcatgtgagaaaaaaacatctcacttaattcttccctcgccccttggtccctggctgtggacatgttaaacatttgtgaaaactttggccacgtccccatgagtggcaaggcagggtaaatggctatgccaagtgaaagaagaccaaagacaaaaagaccatgtcattcagcagcttaaaacccctcaacagcttcacattgcccagagtaaggatcaacatacatgtaataggttctcaaaagccctacatcatctgggtacaagctccccctccaaccccactctgtactatctccccctacccccaaccccagctgggcactccagctctactggctgtatgtctctctcctaatttttctacttaccacagggcctttgcacacgctgttccctctgcctggtagacttatccatgctccttagggaagcctttcgtggctcctcctcccccaggttaggccccctggttatttacacttgggcatcatgtgccttccctttgctgcatcatttgacattcatttgtgtgattattcatgtctttcccttcccttcccttccccttactcggctggagtcctactggggcagcgacagtgtctcttcttccttgctgttggatctcaggattaagcacagtgcctggcatacagcaggtgctcaataaatacttatcaaattgaaaaaagaag

SEQ ID NO: 355075 - DNA, 3074 bp, Homo sapiens
ggccggggccgcaccgcccttcgcagccgcctctgccgccgccgccgcgttggcctcgccgcccctgctcggacaccatgccacaaggagagtgatctcttcccctgttttcacaatggaggactccggaaagactttcagctccgaggaggaagaagctaactattggaaagatctggcgatgacctacaaacagagggcagaaaatacgcaagaggaactccgagaattccaggagggaagccgagaatatgaagctgaattggagacgcagctgcaacaaattgaaaccaggaacagagacctcctgtccgaaaataaccgccttcgcatggagctggaaaccatcaaggagaagtttgaagtgcagcactctgaaggctaccggcagatctcagccttggaggatgacctcgcgcagaccaaagccattaaagaccaattgcagaaatacatcagagagctggagcaagcaaatgacgacctggaaagagccaagcgcgccacgatcatgtctctcgaagactttgagcagcgcttgaatcaggccatcgaaagaaatgccttcctggaaagtgaacttgatgaaaaagagaatctcctggaatctgttcagagactgaaggatgaagccagagatttgcggcaggaactggccgtgcagcagaagcaggagaaacccaggacccccatgcccagctcagtggaagctgagaggacagacacagctgtgcaggccacgggctccgtgccgtccacgcccattgctcaccgaggacccagctcaagtttaaacacacctgggagcttcagacgtggcctggacgactccaccggggggacccccctcacacctgcggcccggatatcagccctcaacattgtgggagacctactgcggaaagtcggggttggacacgagttgccgctggttgtccaaatcaacaaccaggtcgtccagctcctgctgaagcctgttcttggtcttttccagtttatcatacgcggccgccttctcctcgtactgctgggtgaggttctcgatctccttctggaacctcttcttcccctcttccagagcttccacggtgctggcaaagtcctgcagcttcttcttcgagtcggagagctacaaggacagcgtccagggtagggtgagagggggaccatgaatggcccctgtccctggccccacagactctgagaagcgaagaccatgtctcctcgttggagaaacccaatagcaggggaagctggggggtcaagcaccatcgcaccaacactccaccgcgatctgcctgcgggggatctcagcgcagagaagttgagaggacccatgaaggaagcaaggacacggggcaggcacctggatgttgagagtggagatgtggcgctccaggttctgcttggcctccatctcctcgtccagctggtcttgcaggctgttccgctcctcctccagctggcgcagcttcgtagacacgttgagcttctgccgggtttcttcttgaagcagctcctgcaaaagggatgcaaagaggtcccagggacctgccccgaggaaggccaccccccaggtcccctggatgatgtggcaggacactcacctgggtgtcctggagctgggaactgagggacgccacgtccttggccagcttaatggccttcccctcggcctcgttaagcatccctgtgacgctctcaacttcattctaagggtgccaagagactggttagtcaaagcctctagaaggggatcctcgttgaaaggagccctttttactcaaaacacatgggctagtacttgaggtgttcactgattgagaaaatacccgtgaggtatgggactctgataaaaaaaaaaacacacacacacacaaaaaaaacagaatctgtggcttgaagggaactccgtcacctatgagttgggaccctggccctagactctgtggttctaagaacttatttgagccccaatggtattgactgggacctgatcccactaaatggatcctagatccctgccaaggttggtagagacaaagcagcaggtctgagagtccagacgaggtgctctggctggtccactctctaaggctggagaagggagaccaggatggtacttgaacgtcccagggatgctgtcccatcccttccttcctcactcctactctttgaccctgatggccaaagccagagacgcaggccctaaaggtaaaaacgtcctctctgtattctctggcttttactccctagtgtctctgcataagtccctttgaggctgttagcctacccctccatctcttccattgacaaggaggatatgaatgatcttgacactgcttatatgagggcggcaaaagccctgctctcaactgcatgtgagaaaaaaacatctcacttaattcttccctcgccccttggtccctggctgtggacatgttaaacatttgtgaaaactttggccacgtccccatgagtggcaaggcagggtaaatggctatgccaagtgaaagaagaccaaagacaaaaagaccatgtcattcagcagcttaaaacccctcaacagcttcacattgcccagagtaaggatcaacatacatgtaataggttctcaaaagccctacatcatctgggtacaagctccccctccaaccccactctgtactatctccccctacccccaaccccagctgggcactccagctctactggctgtatgtctctctcctaatttttctacttaccacagggcctttgcacacgctgttccctctgcctggtagacttatccatgctccttagggaagcctttcgtggctcctcctcccccaggttaggccccctggttatttacacttgggcatcatgtgccttccctttgctgcatcatttgacattcatttgtgtgattattcatgtctttcccttcccttcccttccccttactcggctggagtcctactggggcagcgacagtgtctcttcttccttgctgttggatctcaggattaagcacagtgcctggcatacagcaggtgctcaataaatacttatcaaattgaaaaaagaag

SEQ ID NO: 355076 - DNA, 2984 bp, Homo sapiens
tttcagcaacaggttttcatgtccacaggttccgaggagatctctcaatcgccagtgcagtcggtggagcccactcgctgcgtcctcctggagcctgcgtttgaatttaggagaagtttgaagtgcagcactctgaaggctaccggcagatctcagccttggaggatgacctcgcgcagaccaaagccattaaagaccaattgcagaaatacatcagagagctggagcaagcaaatgacgacctggaaagagccaagcgcgccacgatcatgtctctcgaagactttgagcagcgcttgaatcaggccatcgaaagaaatgccttcctggaaagtgaacttgatgaaaaagagaatctcctggaatctgttcagagactgaaggatgaagccagagatttgcggcaggaactggccgtgcagcagaagcaggagaaacccaggacccccatgcccagctcagtggaagctgagaggacagacacagctgtgcaggccacgggctccgtgccgtccacgcccattgctcaccgaggacccagctcaagtttaaacacacctgggagcttcagacgtggcctggacgactccaccggggggacccccctcacacctgcggcccggatatcagccctcaacattgtgggagacctactgcggaaagtcggggcactggagtccaaactcgcttcctgccggaacctcgtgtacgatcagtccccaaaccgaacaggtggcccagcctctgggcggagcagcaagaacagagatggcggggagagacggccaagcagcaccagcgtgcctttgggtgataaggggttggacacgagttgccgctggttgtccaaatcaacaaccaggtcgtccagctcctgctgaagcctgttcttggtcttttccagtttatcatacgcggccgccttctcctcgtactgctgggtgaggttctcgatctccttctggaacctcttcttcccctcttccagagcttccacggtgctggcaaagtcctgcagcttcttcttcgagtcggagagctacaaggacagcgtccagggtagggtgagagggggaccatgaatggcccctgtccctggccccacagactctgagaagcgaagaccatgtctcctcgttggagaaacccaatagcaggggaagctggggggtcaagcaccatcgcaccaacactccaccgcgatctgcctgcgggggatctcagcgcagagaagttgagaggacccatgaaggaagcaaggacacggggcaggcacctggatgttgagagtggagatgtggcgctccaggttctgcttggcctccatctcctcgtccagctggtcttgcaggctgttccgctcctcctccagctggcgcagcttcgtagacacgttgagcttctgccgggtttcttcttgaagcagctcctgcaaaagggatgcaaagaggtcccagggacctgccccgaggaaggccaccccccaggtcccctggatgatgtggcaggacactcacctgggtgtcctggagctgggaactgagggacgccacgtccttggccagcttaatggccttcccctcggcctcgttaagcatccctgtgacgctctcaacttcattctaagggtgccaagagactggttagtcaaagcctctagaaggggatcctcgttgaaaggagccctttttactcaaaacacatgggctagtacttgaggtgttcactgattgagaaaatacccgtgaggtatgggactctgataaaaaaaaaaacacacacacacacaaaaaaaacagaatctgtggcttgaagggaactccgtcacctatgagttgggaccctggccctagactctgtggttctaagaacttatttgagccccaatggtattgactgggacctgatcccactaaatggatcctagatccctgccaaggttggtagagacaaagcagcaggtctgagagtccagacgaggtgctctggctggtccactctctaaggctggagaagggagaccaggatggtacttgaacgtcccagggatgctgtcccatcccttccttcctcactcctactctttgaccctgatggccaaagccagagacgcaggccctaaaggtaaaaacgtcctctctgtattctctggcttttactccctagtgtctctgcataagtccctttgaggctgttagcctacccctccatctcttccattgacaaggaggatatgaatgatcttgacactgcttatatgagggcggcaaaagccctgctctcaactgcatgtgagaaaaaaacatctcacttaattcttccctcgccccttggtccctggctgtggacatgttaaacatttgtgaaaactttggccacgtccccatgagtggcaaggcagggtaaatggctatgccaagtgaaagaagaccaaagacaaaaagaccatgtcattcagcagcttaaaacccctcaacagcttcacattgcccagagtaaggatcaacatacatgtaataggttctcaaaagccctacatcatctgggtacaagctccccctccaaccccactctgtactatctccccctacccccaaccccagctgggcactccagctctactggctgtatgtctctctcctaatttttctacttaccacagggcctttgcacacgctgttccctctgcctggtagacttatccatgctccttagggaagcctttcgtggctcctcctcccccaggttaggccccctggttatttacacttgggcatcatgtgccttccctttgctgcatcatttgacattcatttgtgtgattattcatgtctttcccttcccttcccttccccttactcggctggagtcctactggggcagcgacagtgtctcttcttccttgctgttggatctcaggattaagcacagtgcctggcatacagcaggtgctcaataaatacttatcaaattgaaaaaagaag

SEQ ID NO: 355077 - DNA, 2976 bp, Homo sapiens
ggccggggccgcaccgcccttcgcagccgcctctgccgccgccgccgcgttggcctcgccgcccctgctcggacaccatgccacaaggagagtgatctcttcccctgttttcacaatggaggactccggaaagactttcagctccgaggaggaagaagctaactattggaaagatctggcgatgacctacaaacagagggcagaaaatacgcaagaggaactccgagaattccaggagggaagccgagaatatgaagctgaattggagacgcagctgcaacaaattgaaaccaggaacagagacctcctgtccgaaaataaccgccttcgcatggagctggaaaccatcaaggagaagtttgaagtgcagcactctgaaggctaccggcagatctcagccttggaggatgacctcgcgcagaccaaagccattaaagaccaattgcagaaatacatcagagagctggagcaagcaaatgacgacctggaaagagccaagcgcgccacgatcatgtctctcgaagactttgagcagcgcttgaatcaggccatcgaaagaaatgccttcctggaaagtgaacttgatgaaaaagagaatctcctggaatctgttcagagactgaaggatgaagccagagatttgcggcaggaactggccgtgcagcagaagcaggagaaacccaggacccccatgcccagctcagtggaagctgagaggacagacacagctgtgcaggccacgggctccgtgccgtccacgcccattgctcaccgaggacccagctcaagtttaaacacacctgggagcttcagacgtggcctggacgactccaccggggggacccccctcacacctgcggcccggatatcagccctcaacattgtgggagacctactgcggaaagtcggggcactggagtccaaactcgcttcctgccggaacctcgtgtacgatcagtccccaaaccgaacaggtggcccagcctctgggcggagcagcaagaacagagatggcggggagagacggccaagcagcaccagcgtgcctttgggtgataaggggagagaaaattgagaccctgtgagaccctgctcctgactcttgatgttcacccttataactctctgggccccggtgctagccagtttgtcacagctgttatgtcagcttaatttggtttgctctgtctgaaggttggggaagcgcctggaatttgggaagccgccttcacacatgtcttcatcgccgctgccgtcagcccagggggtagtcaagatgttgctttaggaaaaccacggaagctgaaggtcttggtgttggtgcggaagtcgttaccttttgtcgtctttttacactaggtttttgttttaagttagtttgagaaataagagcagtcaccatagttagttagctttgcggcccaagccaatgaccgaggccatcacctgtgctctggggtttgtccctgggaaatgtcttttcatccttacctgccaccgtgtgcattgcaaagagggacaaaaggggctctctgggaagggctctaagttgtcggtgatgaggctaccgtgttgtttttgagatagagtcttgctctgtcacccaggctggagtgtggtggcgtgatctcagctcactgcaacctccgcctcctgggttcaaacggttcttgttcctgagtcttccaggtagctgggattacaggcacccaccaccacacctggctgaattttttgtatttttaatagagacggggttttgccatgttgcccagtgtggtcttgaactcctggcctcaagtgatcctcccatctcggcctcccagaatgctgggatttcaagcatgagccatcgttcccatgccccattgtgttgcactaacccaagcggaggtcctgattggtcttttttttttttttcttttttggagacagagtcttggctcttgccctgtcttgtccagggctggagtgtagtgggtggcaatttcgggctcaccgcagcctccgcctcctaggttcaagcgattctcttatctcagcttcccaagtagctgggactacgggagtgtgccactacacccactaattttggtatttttagtgagaaaccccatctctactaaaaatacaaaaaattagctgggtgcagtggtgcgtgcctataattccagctactccagatgttgaggcaggagagttgcttggacccgggaggtggagggtgcagtgagccgggatcgcgctactgtactccagcctgggcaacagagtgagactccgtctccaaaaaaaaaaaaaagggtgtcataaacctctgagactgtagcctgcttcttagcttctcattgagattcctagaggtgcgttcgagttttcagagtaattttccagaccaaccagcgtcagtgggaaatctgacctcttttggcaaactgcgatcattcattttcctgagtcccctggtggggtggggggaattctgcctcaggaccctgaggggtctttggggcaagatggccttggtaatgcagccactaagaacaggacttcattcaaaggcataatgaagtaaccagggtgaccatcaagtaaaattaaagcacaagatcattgtaggaggcttccttgtcaaagacgtgaacgtgggatttccaacgcaccacggtgtgtccactcatcactgcatgttaggaactgctgtctctttgggacacgagttaaaagaacacactaatttctggagtgtgcctgcagcttcacggccttcattttgttactaagttattttctggaagaacagcaaaaatttcaggttgaaaacagaactttccaagtgctactgaaattccgcagagaattacgctgcgatggtgggtttcttaccctagaaacatcctaacctgtatccacagaagatgtccttttatttttttaaaagatcaataaaatcaagagaaacgaaaaaaaaaaaag

SEQ ID NO: 355078 - DNA, 2490 bp, Homo sapiens
ggccggggccgcaccgcccttcgcagccgcctctgccgccgccgccgcgttggcctcgccgcccctgctcggacaccatgccacaaggagagtgatctcttcccctgttttcacaatggaggactccggaaagactttcagctccgaggaggaagaagctaactattggaaagatctggcgatgacctacaaacagagggcagaaaatacgcaagaggaactccgagaattccaggagggaagccgagaatatgaagctgaattggagacgcagctgcaacaaattgaaaccaggaacagagacctcctgtccgaaaataaccgccttcgcatggagctggaaaccatcaaggagaagtttgaagtgcagcactctgaaggctaccggcagatctcagccttggaggatgacctcgcgcagaccaaagccattaaagaccaattgcagaaatacatcagagagctggagcaagcaaatgacgacctggaaagagccaagcgcgccacgatcatgtctctcgaagactttgagcagcgcttgaatcaggccatcgaaagaaatgccttcctggaaagtgaacttgatgaaaaagagaatctcctggaatctgttcagagactgaaggatgaagccagagatttgcggcaggaactggccgtgcagcagaagcaggagaaacccaggacccccatgcccagctcagtggaagctgagaggacagacacagctgtgcaggccacgggctccgtgccgtccacgcccattgctcaccgaggacccagctcaagtttaaacacacctgggagcttcagacgtggcctggacgactccaccggggggacccccctcacacctgcggcccggatatcagccctcaacattgtgggagacctactgcggaaagtcggggcactggagtccaaactcgcttcctgccggaacctcgtgtacgatcagtccccaaaccgaacaggtggcccagcctctgggcggagcagcaagaacagagatggcggggagagacggccaagcagcaccagcgtgcctttgggtgataaggggagagaaaattgagaccctgtgagaccctgctcctgactcttgatgttcacccttataactctctgggccccggtgctagccagtttgtcacagctgttatgtcagcttaatttggtttgctctgtctgaaggttggggaagcgcctggaatttgggaagccgccttcacacatgtcttcatcgccgctgccgtcagcccagggggtagtcaagatgttgctttaggaaaaccacggaagctgaaggtcttggtgttggtgcggaagtcgttaccttttgtcgtctttttacactaggtttttgttttaagttagtttgagaaataagagcagtcaccatagttagttagctttgcggcccaagccaatgaccgaggccatcacctgtgctctggggtttgtccctgggaaatgtcttttcatccttacctgccaccgtgtgcattgcaaagagggacaaaaggggctctctgggaagggctctaagttgtcggtgatgaggctaccgtgttgtttttgagatagagtcttgctctgtcacccaggctggagtgtggtggcgtgatctcagctcactgcaacctccgcctcctgggttcaaacggttcttgttcctataattccagctactccagatgttgaggcaggagagttgcttggacccgggaggtggagggtgcagtgagccgggatcgcgctactgtactccagcctgggcaacagagtgagactccgtctccaaaaaaaaaaaaaagggtgtcataaacctctgagactgtagcctgcttcttagcttctcattgagattcctagaggtgcgttcgagttttcagagtaattttccagaccaaccagcgtcagtgggaaatctgacctcttttggcaaactgcgatcattcattttcctgagtcccctggtggggtggggggaattctgcctcaggaccctgaggggtctttggggcaagatggccttggtaatgcagccactaagaacaggacttcattcaaaggcataatgaagtaaccagggtgaccatcaagtaaaattaaagcacaagatcattgtaggaggcttccttgtcaaagacgtgaacgtgggatttccaacgcaccacggtgtgtccactcatcactgcatgttaggaactgctgtctctttgggacacgagttaaaagaacacactaatttctggagtgtgcctgcagcttcacggccttcattttgttactaagttattttctggaagaacagcaaaaatttcaggttgaaaacagaactttccaagtgctactgaaattccgcagagaattacgctgcgatggtgggtttcttaccctagaaacatcctaacctgtatccacagaagatgtccttttatttttttaaaagatcaataaaatcaagagaaacgaaaaaaaaaaaag

SEQ ID NO: 355079 - DNA, 2198 bp, Homo sapiens
tttattttgagacggagtcttgttcttgtccaggctggagtgcagtggcatgatctcgactcactgcaacctcagtcctccgggttcaagtgattcttctgcctcaccctcctgagtagctgggattacagacaccatgccacaaggagagtgatctcttcccctgttttcacaatggaggactccggaaagactttcagctccgaggaggaagaagctaactattggaaagatctggcgatgacctacaaacagagggcagaaaatacgcaagaggaactccgagaattccaggagggaagccgagaatatgaagctgaattggagacgcagctgcaacaaattgaaaccaggaacagagacctcctgtccgaaaataaccgccttcgcatggagctggaaaccatcaaggagaagtttgaagtgcagcactctgaaggctaccggcagatctcagccttggaggatgacctcgcgcagaccaaagccattaaagaccaattgctttaggaaaaccacggaagctgaaggtcttggtgttggtgcggaagtcgttaccttttgtcgtctttttacactaggtttttgttttaagttagtttgagaaataagagcagtcaccatagttagttagctttgcggcccaagccaatgaccgaggccatcacctgtgctctggggtttgtccctgggaaatgtcttttcatccttacctgccaccgtgtgcattgcaaagagggacaaaaggggctctctgggaagggctctaagttgtcggtgatgaggctaccgtgttgtttttgagatagagtcttgctctgtcacccaggctggagtgtggtggcgtgatctcagctcactgcaacctccgcctcctgggttcaaacggttcttgttcctgagtcttccaggtagctgggattacaggcacccaccaccacacctggctgaattttttgtatttttaatagagacggggttttgccatgttgcccagtgtggtcttgaactcctggcctcaagtgatcctcccatctcggcctcccagaatgctgggatttcaagcatgagccatcgttcccatgccccattgtgttgcactaacccaagcggaggtcctgattggtcttttttttttttttcttttttggagacagagtcttggctcttgccctgtcttgtccagggctggagtgtagtgggtggcaatttcgggctcaccgcagcctccgcctcctaggttcaagcgattctcttatctcagcttcccaagtagctgggactacgggagtgtgccactacacccactaattttggtatttttagtgagaaaccccatctctactaaaaatacaaaaaattagctgggtgcagtggtgcgtgcctataattccagctactccagatgttgaggcaggagagttgcttggacccgggaggtggagggtgcagtgagccgggatcgcgctactgtactccagcctgggcaacagagtgagactccgtctccaaaaaaaaaaaaaagggtgtcataaacctctgagactgtagcctgcttcttagcttctcattgagattcctagaggtgcgttcgagttttcagagtaattttccagaccaaccagcgtcagtgggaaatctgacctcttttggcaaactgcgatcattcattttcctgagtcccctggtggggtggggggaattctgcctcaggaccctgaggggtctttggggcaagatggccttggtaatgcagccactaagaacaggacttcattcaaaggcataatgaagtaaccagggtgaccatcaagtaaaattaaagcacaagatcattgtaggaggcttccttgtcaaagacgtgaacgtgggatttccaacgcaccacggtgtgtccactcatcactgcatgttaggaactgctgtctctttgggacacgagttaaaagaacacactaatttctggagtgtgcctgcagcttcacggccttcattttgttactaagttattttctggaagaacagcaaaaatttcaggttgaaaacagaactttccaagtgctactgaaattccgcagagaattacgctgcgatggtgggtttcttaccctagaaacatcctaacctgtatccacagaagatgtccttttatttttttaaaagatcaataaaatcaagagaaacgaaaaaaaaaaaag

SEQ ID NO: 355080 - DNA, 900 bp, Homo sapiens
gtggggcagaagccgggacccttacgagaagctgctgttctgagcgcccgaccggcgtggcttgcgggctctagcgttaccattgcatccaggaccaggcaatggcacaccagaggagtagtcgatcgtcctgtccccctggttctatcaataatggaggactccggaaagactttcagctccgaggaggaagaagctaactattggaaagatctggcgatgacctacaaacagagggcagaaaatacgcaagaggaactccgagaattccaggagggaagccgagaatatgaagtgaattttttgtatttttaatagagacggggttttgccatgttgcccagtgtggtcttgaactcctggcctcaagtgatcctcccatctcggcctcccagaatgctgggatttcaagcatgagccatcgttcccatgccccattgtgttgcactaacccaagcggaggtcctgattggtcttttttttttttttcttttttggagacagagtcttggctcttgccctgtcttgtccagggctggagtgtagtgggtggcaatttcgggctcaccgcagcctccgcctcctaggttcaagcgattctcttatctcagcttcccaagtagctgggactacgggagtgtgccactacacccactaattttggtatttttagtgagaaccggggtttctctttgtgccagcgtcagagaagcacccgggacacaaagatgaaccacagagacctaaacacccagagatgcaggaaaatcagagcgtgaacaacagagcacggccaccgaatgggcataagaaggggtaaaagggcacaaagacacgaaatgtggaaggacacacagaggaacaccaacccaaaaagaaatacacaaaaaaaatcagaaa

SEQ ID NO: 355081 - DNA, 316 bp, Homo sapiens
ccccatgcccagctcagtggaagctgagaggacagacacagctgtgcaggccacgggctccgtgccgtccacgcccattgctcaccgaggacccagctcaagtttaaacacacctgggagcttcagacgtggtaaggggagtgggaattgcaggattttctcggttcacaaagtgtttctgggtaagaatctggggtgggtcctgggggtgtgatgatttgcatcaggctcagagcctgatttgctctcaggctttgagcagagagtagactgggatgttcttggggatgggcattgagatcagtgaggactgggt

SEQ ID NO: 355082 - DNA, 2538 bp, Homo sapiens
gtctgtaggttaagggagaagatggcggcgctaggggaacccgtgcggctggagagagatatttgtagagcaattgaattattggaaaaactacaaaggagtggagaagtaccaccacagaaacttcaggctttgcaaagagtccttcaaagtgaattctgcaatgctgtgagagaggtatatgaacatgtctatgagactgtggacatcagtagcagtcctgaagtgagagcgaacgctactgcaaaggctactgttgctgcatttgctgccagtgaaggacattctcatcctcgagttgttgagctaccaaaaacagaagagggccttggattcaatattatgggaggcaaagaacaaaactctccaatctatatatcccgaataattccaggtggaattgctgatagacatgggggcctcaaacgtggagatcaactcctctctgttaatggagtgagtgttgaaggagaacatcatgaaaaagctgtagaactgctgaaagccgcacaaggaaaggttaaattagtggtacgatacacacccaaagtcttagaagaaatggagtcgcgctttgaaaaaatgagatcagcaaaacgcaggcaacagacctaatacatttcaaaacttgatatttcattttgcgttttagctagagaagttttccttgtgacttactaatggctgcaatgccaatgattgtaagaaaacaaacaaatttatcatgaaattctccttgtcattttataaatgcctattttaacatcatttatggttccagagatgcatacacttttttctgacaagaaaaagtaaaaggtgatgagggcaattctgtcctactgtttttacaggcctttttcaaatgcagattttgtcataaagttgttatagattttttaaaatgcttttttaatattaaaatgtacttttacattcttaatctttttttagaaaggaaaagttttcttcatttagctgctgatttaaaagtaaagttctccaattctttttttttgcttactctattttttttaacctgtgaaatttctttacagttttccaagaaattaagcataacagtctcatctacggcagttcattacactgtcaatgttaacatcattgctgcattttgtactttgaacacacacataatatatataaccagtggtaaatcatgactcagtacagtgcaagttttttcacttttacttaaacataatatataatggatattcatttatactgatttatgaaagtaagtttttaaacactgaaacaatcattgctaaaatacatattcttaatatttgagcattgaggcaagaggatgtaattgatagcattacttattacatccctatttatgttcaaccgtacatcaaattataaatgcaaaacaggttcagatttcatcttttgtgatttcttttaaatactattcatttttatttaaatgcacagtatttcccctatattttagtccttccattcctagagacaaaccagttatttggtggtgggaagtagctgaagcaaagaaggaaaagtaatacctttaacctcactagcttcaagagtagacattcttactagctcaatttaaataattgattttaaataggaagaaaagaggatatatttaagatacatagaaattatgatgtgaagtattcatgagaatctgtagattccatcaaaataagtaggaactcatactaaaattgttggatttaaagaggcaacttttgtttatgattcaaatatgggaatttgagaaatatttcatttgtccactggatgtcactattttactaaaaggcagctattagtgtgggactgtgactgaggtcttaaagactgaaagagttggggttcattttctgttacaacttacaggaacatttgtactttaagaaaaatttaagtgacaaatgttagaagatgatggattgaaaaatataagtaatttggcatattgaccctatataaaaaagtgggcattttgtaacattccttcaggaagaatagaattgtatgcttttttctgcatgtttgtgatcactgtgagtctcagatgattattccagttttcaatgatttttcaaaataaaagtcaatcagcattgttatttatcattaaggtattgaacactggattgcatggttgaatgtgtctttaatccactacaaaatgtgcttgttattgataggatcatgttgttaaattgtaaattttcaaaattaattgatgttttaaaaatgttgagaccaaagtagtatagaagtatggacttaatttaattgtaaaattattagaggtatttgttgtagagctttatatattaaagagaggtattggtgcatataaaaacagtaatattattgttatgcttgtattcttgcatttcagggtaagtaaaccctgaagaaatcttattttagtatagctacagctgcagtagcttttaagtatgtatcaacatttcattataaattatagcttcctggttctgtgtctcagtgtttcagaac

SEQ ID NO: 355083 - DNA, 844 bp, Homo sapiens
  misc_feature (771)..(771): n is a, c, g, or t
  misc_feature (791)..(791): n is a, c, g, or t
  misc_feature (818)..(818): n is a, c, g, or t
gtctgtaggttaagggagaagatggcggcgctaggggaacccgtgcggctggagagagatatttgtagagcaattgaattattggaaaaactacaaaggagtggagaagtaccaccacagaaacttcaggctttgcaaagagtccttcaaagtgaattctgcaatgctgtgagagaggtatatgaacatgtctatgagactgtggacatcagtagcagtcctgaagtgagagcgaacgctactgcaaaggctactgttgctgcatttgctgccagtgaaggacattctcatcctcgagttgttgagctaccaaaaacagaagagggccttggattcaatattatgggaggcaaagaacaaaactctccaatctatatatcccgaataattccaggtggaattgctgatagacatgggggcctcaaacgtggagatcaactcctctctgttaatggagtgagtgttgaaggagaacatcatgaaaaagctgtagaactgctgaaagccgcacaaggaaaggttaaattagtggtacgatacacacccaaagtcttagaagaaatggagtcgcgctttgaaaaaatgagatcagcaaaacgcaggcaacagacctaatacatttcaaaacttgatatttcattttgcgttttagctagagaagttttccttgtgacttactaatggctgcaatgccaatgattgtaagaaaacaaacaaatttatcatgaaattctccttgtcattttataaatgcctattttaacaatccanttttaaggggttcccaagangaatgccattacaccttttttttcccngaacaaaggaaaaaaaagttaaaaaa

SEQ ID NO: 355084 - DNA, 6140 bp, Homo sapiens
aattggaagcaaatgacatcacagcaggtcagagaaaaagggttgagcggcaggcacccagagtagtaggtctttggcattaggagcttgagcccagacggccctagcagggaccccagcgcccgagagaccatgcagaggtcgcctctggaaaaggccagcgttgtctccaaactttttttcagctggaccagaccaattttgaggaaaggatacagacagcgcctggaattgtcagacatataccaaatcccttctgttgattctgctgacaatctatctgaaaaattggaaagagaatgggatagagagctggcttcaaagaaaaatcctaaactcattaatgcccttcggcgatgttttttctggagatttatgttctatggaatctttttatatttaggggaagtcaccaaagcagtacagcctctcttactgggaagaatcatagcttcctatgacccggataacaaggaggaacgctctatcgcgatttatctaggcataggcttatgccttctctttattgtgaggacactgctcctacacccagccatttttggccttcatcacattggaatgcagatgagaatagctatgtttagtttgatttataagaagactttaaagctgtcaagccgtgttctagataaaataagtattggacaacttgttagtctcctttccaacaacctgaacaaatttgatgaaggacttgcattggcacatttcgtgtggatcgctcctttgcaagtggcactcctcatggggctaatctgggagttgttacaggcgtctgccttctgtggacttggtttcctgatagtccttgccctttttcaggctgggctagggagaatgatgatgaagtacagagatcagagagctgggaagatcagtgaaagacttgtgattacctcagaaatgattgaaaatatccaatctgttaaggcatactgctgggaagaagcaatggaaaaaatgattgaaaacttaagacaaacagaactgaaactgactcggaaggcagcctatgtgagatacttcaatagctcagccttcttcttctcagggttctttgtggtgtttttatctgtgcttccctatgcactaatcaaaggaatcatcctccggaaaatattcaccaccatctcattctgcattgttctgcgcatggcggtcactcggcaatttccctgggctgtacaaacatggtatgactctcttggagcaataaacaaaatacaggatttcttacaaaagcaagaatataagacattggaatataacttaacgactacagaagtagtgatggagaatgtaacagccttctgggaggagggatttggggaattatttgagaaagcaaaacaaaacaataacaatagaaaaacttctaatggtgatgacagcctcttcttcagtaatttctcacttcttggtactcctgtcctgaaagatattaatttcaagatagaaagaggacagttgttggcggttgctggatccactggagcaggcaagacttcacttctaatgatgattatgggagaactggagccttcagagggtaaaattaagcacagtggaagaatttcattctgttctcagttttcctggattatgcctggcaccattaaagaaaatatcatctttggtgtttcctatgatgaatatagatacagaagcgtcatcaaagcatgccaactagaagaggacatctccaagtttgcagagaaagacaatatagttcttggagaaggtggaatcacactgagtggaggtcaacgagcaagaatttctttagcaagagcagtatacaaagatgctgatttgtatttattagactctccttttggatacctagatgttttaacagaaaaagaaatatttgaaagctgtgtctgtaaactgatggctaacaaaactaggattttggtcacttctaaaatggaacatttaaagaaagctgacaaaatattaattttgaatgaaggtagcagctatttttatgggacattttcagaactccaaaatctacagccagactttagctcaaaactcatgggatgtgattctttcgaccaatttagtgcagaaagaagaaattcaatcctaactgagaccttacaccgtttctcattagaaggagatgctcctgtctcctggacagaaacaaaaaaacaatcttttaaacagactggagagtttggggaaaaaaggaagaattctattctcaatccaatcaactctatacgaaaattttccattgtgcaaaagactcccttacaaatgaatggcatcgaagaggattctgatgagcctttagagagaaggctgtccttagtaccagattctgagcagggagaggcgatactgcctcgcatcagcgtgatcagcactggccccacgcttcaggcacgaaggaggcagtctgtcctgaacctgatgacacactcagttaaccaaggtcagaacattcaccgaaagacaacagcatccacacgaaaagtgtcactggcccctcaggcaaacttgactgaactggatatatattcaagaaggttatctcaagaaactggcttggaaataagtgaagaaattaacgaagaagacttaaaggagtgcctttttgatgatatggagagcataccagcagtgactacatggaacacataccttcgatatattactgtccacaagagcttaatttttgtgctaatttggtgcttagtaatttttctggcagaggtggctgcttctttggttgtgctgtggctccttggaaacactcctcttcaagacaaagggaatagtactcatagtagaaataacagctatgcagtgattatcaccagcaccagttcgtattatgtgttttacatttacgtgggagtagccgacactttgcttgctatgggattcttcagaggtctaccactggtgcatactctaatcacagtgtcgaaaattttacaccacaaaatgttacattctgttcttcaagcacctatgtcaaccctcaacacgttgaaagcaggtgggattcttaatagattctccaaagatatagcaattttggatgaccttctgcctcttaccatatttgacttcatccagttgttattaattgtgattggagctatagcagttgtcgcagttttacaaccctacatctttgttgcaacagtgccagtgatagtggcttttattatgttgagagcatatttcctccaaacctcacagcaactcaaacaactggaatctgaaggcaggagtccaattttcactcatcttgttacaagcttaaaaggactatggacacttcgtgccttcggacggcagccttactttgaaactctgttccacaaagctctgaatttacatactgccaactggttcttgtacctgtcaacactgcgctggttccaaatgagaatagaaatgatttttgtcatcttcttcattgctgttaccttcatttccattttaacaacaggagaaggagaaggaagagttggtattatcctgactttagccatgaatatcatgagtacattgcagtgggctgtaaactccagcatagatgtggatagcttgatgcgatctgtgagccgagtctttaagttcattgacatgccaacagaaggtaaacctaccaagtcaaccaaaccatacaagaatggccaactctcgaaagttatgattattgagaattcacacgtgaagaaagatgacatctggccctcagggggccaaatgactgtcaaagatctcacagcaaaatacacagaaggtggaaatgccatattagagaacatttccttctcaataagtcctggccagagggtgggcctcttgggaagaactggatcagggaagagtactttgttatcagcttttttgagactactgaacactgaaggagaaatccagatcgatggtgtgtcttgggattcaataactttgcaacagtggaggaaagcctttggagtgataccacagaaagtatttattttttctggaacatttagaaaaaacttggatccctatgaacagtggagtgatcaagaaatatggaaagttgcagatgaggttgggctcagatctgtgatagaacagtttcctgggaagcttgactttgtccttgtggatgggggctgtgtcctaagccatggccacaagcagttgatgtgcttggctagatctgttctcagtaaggcgaagatcttgctgcttgatgaacccagtgctcatttggatccagtaacataccaaataattagaagaactctaaaacaagcatttgctgattgcacagtaattctctgtgaacacaggatagaagcaatgctggaatgccaacaatttttggtcatagaagagaacaaagtgcggcagtacgattccatccagaaactgctgaacgagaggagcctcttccggcaagccatcagcccctccgacagggtgaagctctttccccaccggaactcaagcaagtgcaagtctaagccccagattgctgctctgaaagaggagacagaagaagaggtgcaagatacaaggctttagagagcagcataaatgttgacatgggacatttgctcatggaattggagctcgtgggacagtcacctcatggaattggagctcgtggaacagttacctctgcctcagaaaacaaggatgaattaagtttttttttaaaaaagaaacatttggtaaggggaattgaggacactgatatgggtcttgataaatggcttcctggcaatagtcaaattgtgtgaaaggtacttcaaatccttgaagatttaccacttgtgttttgcaagccagattttcctgaaaacccttgccatgtgctagtaattggaaaggcagctctaaatgtcaatcagcctagttgatcagcttattgtctagtgaaactcgttaatttgtagtgttggagaagaactgaaatcatacttcttagggttatgattaagtaatgataactggaaacttcagcggtttatataagcttgtattcctttttctctcctctccccatgatgtttagaaacacaactatattgtttgctaagcattccaactatctcatttccaagcaagtattagaataccacaggaaccacaagactgcacatcaaaatatgccccattcaacatctagtgagcagtcaggaaagagaacttccagatcctggaaatcagggttagtattgtccaggtctaccaaaaatctcaatatttcagataatcacaatacatcccttacctgggaaagggctgttataatctttcacaggggacaggatggttcccttgatgaagaagttgatatgccttttcccaactccagaaagtgacaagctcacagacctttgaactagagtttagctggaaaagtatgttagtgcaaattgtcacaggacagcccttctttccacagaagctccaggtagagggtgtgtaagtagataggccatgggcactgtgggtagacacacatgaagtccaagcatttagatgtataggttgatggtggtatgttttcaggctagatgtatgtacttcatgctgtctacactaagagagaatgagagacacactgaagaagcaccaatcatgaattagttttatatgcttctgttttataattttgtgaagcaaaattttttctctaggaaatatttattttaataatgtttcaaacatatataacaatgctgtattttaaaagaatgattatgaattacatttgtataaaataatttttatatttgaaatattgactttttatggcactagtatttctatgaaatattatgttaaaactgggacaggggagaacctagggtgatattaaccaggggccatgaatcaccttttggtctggagggaagccttggggctgatgcagttgttgcccacagctgtatgattcccagccagcacagcctcttagatgcagttctgaagaagatggtaccaccagtctgactgtttccatcaagggtacactgccttctcaactccaaactgactcttaagaagactgcattatatttattactgtaagaaaatatcacttgtcaataaaatccatacatttgtgtgaaaaaaaaaag

SEQ ID NO: 355085 - DNA, 5995 bp, Homo sapiens
aattggaagcaaatgacatcacagcaggtcagagaaaaagggttgagcggcaggcacccagagtagtaggtctttggcattaggagcttgagcccagacggccctagcagggaccccagcgcccgagagaccatgcagaggtcgcctctggaaaaggccagcgttgtctccaaactttttttcagctggaccagaccaattttgaggaaaggatacagacagcgcctggaattgtcagacatataccaaatcccttctgttgattctgctgacaatctatctgaaaaattggaaagagaatgggatagagagctggcttcaaagaaaaatcctaaactcattaatgcccttcggcgatgttttttctggagatttatgttctatggaatctttttatatttaggggaagtcaccaaagcagtacagcctctcttactgggaagaatcatagcttcctatgacccggataacaaggaggaacgctctatcgcgatttatctaggcataggcttatgccttctctttattgtgaggacactgctcctacacccagccatttttggccttcatcacattggaatgcagatgagaatagctatgtttagtttgatttataagaagactttaaagctgtcaagccgtgttctagataaaataagtattggacaacttgttagtctcctttccaacaacctgaacaaatttgatgaaggacttgcattggcacatttcgtgtggatcgctcctttgcaagtggcactcctcatggggctaatctgggagttgttacaggcgtctgccttctgtggacttggtttcctgatagtccttgccctttttcaggctgggctagggagaatgatgatgaagtacagagatcagagagctgggaagatcagtgaaagacttgtgattacctcagaaatgattgaaaatatccaatctgttaaggcatactgctgggaagaagcaatggaaaaaatgattgaaaacttaagacaaacagaactgaaactgactcggaaggcagcctatgtgagatacttcaatagctcagccttcttcttctcagggttctttgtggtgtttttatctgtgcttccctatgcactaatcaaaggaatcatcctccggaaaatattcaccaccatctcattctgcattgttctgcgcatggcggtcactcggcaatttccctgggctgtacaaacatggtatgactctcttggagcaataaacaaaatacaggatttcttacaaaagcaagaatataagacattggaatataacttaacgactacagaagtagtgatggagaatgtaacagccttctgggaggagggatttggggaattatttgagaaagcaaaacaaaacaataacaatagaaaaacttctaatggtgatgacagcctcttcttcagtaatttctcacttcttggtactcctgtcctgaaagatattaatttcaagatagaaagaggacagttgttggcggttgctggatccactggagcaggcaagacttcacttctaatgatgattatgggagaactggagccttcagagggtaaaattaagcacagtggaagaatttcattctgttctcagttttcctggattatgcctggcaccattaaagaaaatatcatctttggtgtttcctatgatgaatatagatacagaagcgtcatcaaagcatgccaactagaagaggacatctccaagtttgcagagaaagacaatatagttcttggagaaggtggaatcacactgagtggaggtcaacgagcaagaatttctttagcaagagcagtatacaaagatgctgatttgtatttattagactctccttttggatacctagatgttttaacagaaaaagaaatatttgaaagctgtgtctgtaaactgatggctaacaaaactaggattttggtcacttctaaaatggaacatttaaagaaagctgacaaaatattaattttgaatgaaggtagcagctatttttatgggacattttcagaactccaaaatctacagccagactttagctcaaaactcatgggatgtgattctttcgaccaatttagtgcagaaagaagaaattcaatcctaactgagaccttacaccgtttctcattagaaggagatgctcctgtctcctggacagaaacaaaaaaacaatcttttaaacagactggagagtttggggaaaaaaggaagaattctattctcaatccaatcaactctatacgaaaattttccattgtgcaaaagactcccttacaaatgaatggcatcgaagaggattctgatgagcctttagagagaaggctgtccttagtaccagattctgagcagggagaggcgatactgcctcgcatcagcgtgatcagcactggccccacgcttcaggcacgaaggaggcagtctgtcctgaacctgatgacacactcagttaaccaaggtcagaacattcaccgaaagacaacagcatccacacgaaaagtgtcactggcccctcaggcaaacttcgatatattactgtccacaagagcttaatttttgtgctaatttggtgcttagtaatttttctggcagaggtggctgcttctttggttgtgctgtggctccttggaaacactcctcttcaagacaaagggaatagtactcatagtagaaataacagctatgcagtgattatcaccagcaccagttcgtattatgtgttttacatttacgtgggagtagccgacactttgcttgctatgggattcttcagaggtctaccactggtgcatactctaatcacagtgtcgaaaattttacaccacaaaatgttacattctgttcttcaagcacctatgtcaaccctcaacacgttgaaagcaggtgggattcttaatagattctccaaagatatagcaattttggatgaccttctgcctcttaccatatttgacttcatccagttgttattaattgtgattggagctatagcagttgtcgcagttttacaaccctacatctttgttgcaacagtgccagtgatagtggcttttattatgttgagagcatatttcctccaaacctcacagcaactcaaacaactggaatctgaaggcaggagtccaattttcactcatcttgttacaagcttaaaaggactatggacacttcgtgccttcggacggcagccttactttgaaactctgttccacaaagctctgaatttacatactgccaactggttcttgtacctgtcaacactgcgctggttccaaatgagaatagaaatgatttttgtcatcttcttcattgctgttaccttcatttccattttaacaacaggagaaggagaaggaagagttggtattatcctgactttagccatgaatatcatgagtacattgcagtgggctgtaaactccagcatagatgtggatagcttgatgcgatctgtgagccgagtctttaagttcattgacatgccaacagaaggtaaacctaccaagtcaaccaaaccatacaagaatggccaactctcgaaagttatgattattgagaattcacacgtgaagaaagatgacatctggccctcagggggccaaatgactgtcaaagatctcacagcaaaatacacagaaggtggaaatgccatattagagaacatttccttctcaataagtcctggccagagggtgggcctcttgggaagaactggatcagggaagagtactttgttatcagcttttttgagactactgaacactgaaggagaaatccagatcgatggtgtgtcttgggattcaataactttgcaacagtggaggaaagcctttggagtgataccacagaaagtatttattttttctggaacatttagaaaaaacttggatccctatgaacagtggagtgatcaagaaatatggaaagttgcagatgaggttgggctcagatctgtgatagaacagtttcctgggaagcttgactttgtccttgtggatgggggctgtgtcctaagccatggccacaagcagttgatgtgcttggctagatctgttctcagtaaggcgaagatcttgctgcttgatgaacccagtgctcatttggatccagtaacataccaaataattagaagaactctaaaacaagcatttgctgattgcacagtaattctctgtgaacacaggatagaagcaatgctggaatgccaacaatttttggtcatagaagagaacaaagtgcggcagtacgattccatccagaaactgctgaacgagaggagcctcttccggcaagccatcagcccctccgacagggtgaagctctttccccaccggaactcaagcaagtgcaagtctaagccccagattgctgctctgaaagaggagacagaagaagaggtgcaagatacaaggctttagagagcagcataaatgttgacatgggacatttgctcatggaattggagctcgtgggacagtcacctcatggaattggagctcgtggaacagttacctctgcctcagaaaacaaggatgaattaagtttttttttaaaaaagaaacatttggtaaggggaattgaggacactgatatgggtcttgataaatggcttcctggcaatagtcaaattgtgtgaaaggtacttcaaatccttgaagatttaccacttgtgttttgcaagccagattttcctgaaaacccttgccatgtgctagtaattggaaaggcagctctaaatgtcaatcagcctagttgatcagcttattgtctagtgaaactcgttaatttgtagtgttggagaagaactgaaatcatacttcttagggttatgattaagtaatgataactggaaacttcagcggtttatataagcttgtattcctttttctctcctctccccatgatgtttagaaacacaactatattgtttgctaagcattccaactatctcatttccaagcaagtattagaataccacaggaaccacaagactgcacatcaaaatatgccccattcaacatctagtgagcagtcaggaaagagaacttccagatcctggaaatcagggttagtattgtccaggtctaccaaaaatctcaatatttcagataatcacaatacatcccttacctgggaaagggctgttataatctttcacaggggacaggatggttcccttgatgaagaagttgatatgccttttcccaactccagaaagtgacaagctcacagacctttgaactagagtttagctggaaaagtatgttagtgcaaattgtcacaggacagcccttctttccacagaagctccaggtagagggtgtgtaagtagataggccatgggcactgtgggtagacacacatgaagtccaagcatttagatgtataggttgatggtggtatgttttcaggctagatgtatgtacttcatgctgtctacactaagagagaatgagagacacactgaagaagcaccaatcatgaattagttttatatgcttctgttttataattttgtgaagcaaaattttttctctaggaaatatttattttaataatgtttcaaacatatataacaatgctgtattttaaaagaatgattatgaattacatttgtataaaataatttttatatttgaaatattgactttttatggcactagtatttctatgaaatattatgttaaaactgggacaggggagaacctagggtgatattaaccaggggccatgaatcaccttttggtctggagggaagccttggggctgatgcagttgttgcccacagctgtatgattcccagccagcacagcctcttagatgcagttctgaagaagatggtaccaccagtctgactgtttccatcaagggtacactgccttctcaactccaaactgactcttaagaagactgcattatatttattactgtaagaaaatatcacttgtcaataaaatccatacatttgtgtgaaaaaaaaaag

SEQ ID NO: 355086 - DNA, 419 bp, Homo sapiens
aaaatgttgttatttttatttcagatgcgatctgtgagccgagtctttaagttcattgacatgccaacagaaggtaaacctaccaagtcaaccaaaccatacaagaatggccaactctcgaaagttatgattattgagaattcacacgtgaagaaagatgacatctggccctcagggggccaaatgactgtcaaagatctcacagcaaaatacacagaaggtggaaatgccatattagagaacatttccttctcaataagtcctggccagagggtgagatttgaacactgcttgctttgttagactgtgttcagtaagtgaatcccagtagcctgaagcaatgtgttagcagaatctatttgtaacattattattgtacagtagaatcaatattaaacacacatgttttattatatgga

SEQ ID NO: 355087 - DNA, 467 bp, Homo sapiens
caccatctcattctgcattgttctgcgcatggcggtcactcggcaatttccctgggctgtacaaacatggtatgactctcttggagcaataaacaaaatacaggtaatgtaccataatgctgcattatatactatgatttaaataatcagtcaatagatcagttctaatgaactttgcaaaaatgtgcgaaaagatagaaaaagaaatttccttcactaggaagttataaaagttgccagctaatactaggaatgttcaccttaaacttttcctagcatttctctggacagtatgatggatgagagtggcattttatgccaaattaccttaaaatcccaataatactgatgtagctagcagctttgagaaattctaaagttttcaagtgataagactcaatttatacaaagctaattggataaacttgtatatgattaagaagcaaataaatacttattatgctttt

SEQ ID NO: 355088 - DNA, 5941 bp, Homo sapiens
aattggaagcaaatgacatcacagcaggtcagagaaaaagggttgagcggcaggcacccagagtagtaggtctttggcattaggagcttgagcccagacggccctagcagggaccccagcgcccgagagaccatgcagaggtcgcctctggaaaaggccagcgttgtctccaaactttttttcagctggaccagaccaattttgaggaaaggatacagacagcgcctggaattgtcagacatataccaaatcccttctgttgattctgctgacaatctatctgaaaaattggaaagagaatgggatagagagctggcttcaaagaaaaatcctaaactcattaatgcccttcggcgatgttttttctggagatttatgttctatggaatctttttatatttaggggaagtcaccaaagcagtacagcctctcttactgggaagaatcatagcttcctatgacccggataacaaggaggaacgctctatcgcgatttatctaggcataggcttatgccttctctttattgtgaggacactgctcctacacccagccatttttggccttcatcacattggaatgcagatgagaatagctatgtttagtttgatttataagaagactttaaagctgtcaagccgtgttctagataaaataagtattggacaacttgttagtctcctttccaacaacctgaacaaatttgatgaaggacttgcattggcacatttcgtgtggatcgctcctttgcaagtggcactcctcatggggctaatctgggagttgttacaggcgtctgccttctgtggacttggtttcctgatagtccttgccctttttcaggctgggctagggagaatgatgatgaagtacagagatcagagagctgggaagatcagtgaaagacttgtgattacctcagaaatgattgaaaatatccaatctgttaaggcatactgctgggaagaagcaatggaaaaaatgattgaaaacttaagacaaacagaactgaaactgactcggaaggcagcctatgtgagatacttcaatagctcagccttcttcttctcagggttctttgtggtgtttttatctgtgcttccctatgcactaatcaaaggaatcatcctccggaaaatattcaccaccatctcattctgcattgttctgcgcatggcggtcactcggcaatttccctgggctgtacaaacatggtatgactctcttggagcaataaacaaaatacaggatttcttacaaaagcaagaatataagacattggaatataacttaacgactacagaagtagtgatggagaatgtaacagccttctgggaggagggatttggggaattatttgagaaagcaaaacaaaacaataacaatagaaaaacttctaatggtgatgacagcctcttcttcagtaatttctcacttcttggtactcctgtcctgaaagatattaatttcaagatagaaagaggacagttgttggcggttgctggatccactggagcaggcaagacttcacttctaatgatgattatgggagaactggagccttcagagggtaaaattaagcacagtggaagaatttcattctgttctcagttttcctggattatgcctggcaccattaaagaaaatatcatctttggtgtttcctatgatgaatatagatacagaagcgtcatcaaagcatgccaactagaagaggacatctccaagtttgcagagaaagacaatatagttcttggagaaggtggaatcacactgagtggaggtcaacgagcaagaatttctttagcaagagcagtatacaaagatgctgatttgtatttattagactctccttttggatacctagatgttttaacagaaaaagaaatatttgaaagctgtgtctgtaaactgatggctaacaaaactaggattttggtcacttctaaaatggaacatttaaagaaagctgacaaaatattaattttgaatgaaggtagcagctatttttatgggacattttcagaactccaaaatctacagccagactttagctcaaaactcatgggatgtgattctttcgaccaatttagtgcagaaagaagaaattcaatcctaactgagaccttacaccgtttctcattagaaggagatgctcctgtctcctggacagaaacaaaaaaacaatcttttaaacagactggagagtttggggaaaaaaggaagaattctattctcaatccaatcaactctatacgaaaattttccattgtgcaaaagactcccttacaaatgaatggcatcgaagaggattctgatgagcctttagagagaaggctgtccttagtaccagattctgagcagggagaggcgatactgcctcgcatcagcgtgatcagcactggccccacgcttcaggcacgaaggaggcagtctgtcctgaacctgatgacacactcagttaaccaaggtcagaacattcaccgaaagacaacagcatccacacgaaaagtgtcactggcccctcaggcaaacttcgatatattactgtccacaagagcttaatttttgtgctaatttggtgcttagtaatttttctggcagaggtggctgcttctttggttgtgctgtggctccttggaaacactcctcttcaagacaaagggaatagtactcatagtagaaataacagctatgcagtgattatcaccagcaccagttcgtattatgtgttttacatttacgtgggagtagccgacactttgcttgctatgggattcttcagaggtctaccactggtgcatactctaatcacagtgtcgaaaattttacaccacaaaatgttacattctgttcttcaagcacctatgtcaaccctcaacacgttgaaagcaggtgggattcttaatagattctccaaagatatagcaattttggatgaccttctgcctcttaccatatttgacttcatccagttgttattaattgtgattggagctatagcagttgtcgcagttttacaaccctacatctttgttgcaacagtgccagtgatagtggcttttattatgttgagagcatatttcctccaaacctcacagcaactcaaacaactggaatctgaaggcaggagtccaattttcactcatcttgttacaagcttaaaaggactatggacacttcgtgccttcggacggcagccttactttgaaactctgttccacaaagctctgaatttacatactgccaactggttcttgtacctgtcaacactgcgctggttccaaatgagaatagaaatgatttttgtcatcttcttcattgctgttaccttcatttccattttaacaacaggagaaggagaaggaagagttggtattatcctgactttagccatgaatatcatgagtacattgcagtgggctgtaaactccagcatagatgtggatagcttgatgcgatctgtgagccgagtctttaagttcattgacatgccaacagaaggtaaacctaccaagtcaaccaaaccatacaagaatggccaactctcgaaagttatgattattgagaattcacacgtgaagaaagatgacatctggccctcagggggccaaatgactgtcaaagatctcacagcaaaatacacagaaggtggaaatgccatattagagaacatttccttctcaataagtcctggccagagggtgggcctcttgggaagaactggatcagggaagagtactttgttatcagcttttttgagactactgaacactgaaggagaaatccagatcgatggtgtgtcttgggattcaataactttgcaacagtggaggaaagcctttggagtgataccacagaaagtatttattttttctggaacatttagaaaaaacttggatccctatgaacagtggagtgatcaagaaatatggaaagttgcagatgaggttgggctcagatctgtgatagaacagtttcctgggaagcttgactttgtccttgtggatgggggctgtgtcctaagccatggccacaagcagttgatgtgcttggctagatctgttctcagtaaggcgaagatcttgctgcttgatgaacccagtgctcatttggatccagtaacataccaaataattagaagaactctaaaacaagcatttgctgattgcacagtaattctctgtgaacacaggatagaagcaatgctggaatgccaacaatttttggtcatagaagagaacaaagtgcggcagtacgattccatccagaaactgctgaacgagaggagcctcttccggcaagccatcagcccctccgacagggtgaagctctttccccaccggaactcaagcaagtgcaagtctaagccccagattgctgctctgaaagaggagacagaagaagaggtgcaagatacaaggctttagagagcagcataaatgttgacatgggacatttgctcatggaattggagctcgtgggacagtcacctcatggaattggagctcgtggaacagttacctctgcctcagaaaacaaggatgaattaagtttttttttaaaaaagaaacatttggtaaggggaattgaggacactgatatgggtcttgataaatggcttcctggcaatagtcaaattgtgtgaaaggtacttcaaatccttgaagatttaccacttgtgttttgcaagccagattttcctgaaaacccttgccatgtgctagtaattggaaaggcagctctaaatgtcaatcagcctagttgatcagcttattgtctagtgaaactcgttaatttgtagtgttggagaagaactgaaatcatacttcttagggttatgattaagtaatgataactggaaacttcagcggtttatataagcttgtattcctttttctctcctctccccatgatgtttagaaacacaactatattgtttgctaagcattccaactatctcatttccaagcaagtattagaataccacaggaaccacaagactgcacatcaaaatatgccccattcaacatctagtgagcagtcaggaaagagaacttccagatcctggaaatcagggttagtattgtccaggtctaccaaaaatctcaatatttcagataatcacaatacatcccttacctgggaaagggctgttataatctttcacaggggacaggatggttcccttgatgaagaagttgatatgccttttcccaactccagaaagtgacaagctcacagacctttgaactagagtttagctggaaaagtatgttagtgcaaattgtcacaggacagcccttctttccacagaagctccaggtagagggtgtgtaagtagataggccatgggcactgtgggtagacacacatgaagtccaagcatttagatgtataggttgatggtggtatgttttcaggctagatgtatgtacttcatgctgtctacactaagagagaatgagagacacactgaagaagcaccaatcatgaattagttttatatgcttctgttttataattttgtgaagcaaaattttttctctaggaaatatttattttaataatgtttcaaacatatataacaatgctgtattttaaaagaatgattatgaattacatttgtataaaataatttttatatttgaaatattgactttttatggcactagtatttctatgaaatattatgttcttttggtctggagggaagccttggggctgatgcagttgttgcccacagctgtatgattcccagccagcacagcctcttagatgcagttctgaagaagatggtaccaccagtctgactgtttccatcaagggtacactgccttctcaactccaaactgactcttaagaagactgcattatatttattactgtaagaaaatatcacttgtcaataaaatccatacatttgtgtgaaaaaaaaaag

SEQ ID NO: 355089 - DNA, 4006 bp, Homo sapiens
aattggaagcaaatgacatcacagcaggtcagagaaaaagggttgagcggcaggcacccagagtagtaggtctttggcattaggagcttgagcccagacggccctagcagggaccccagcgcccgagagaccatgcagaggtcgcctctggaaaaggccagcgttgtctccaaactttttttcagctggaccagaccaattttgaggaaaggatacagacagcgcctggaattgtcagacatataccaaatcccttctgttgattctgctgacaatctatctgaaaaattggaaagagaatgggatagagagctggcttcaaagaaaaatcctaaactcattaatgcccttcggcgatgttttttctggagatttatgttctatggaatctttttatatttaggggaagtcaccaaagcagtacagcctctcttactgggaagaatcatagcttcctatgacccggataacaaggaggaacgctctatcgcgatttatctaggcataggcttatgccttctctttattgtgaggacactgctcctacacccagccatttttggccttcatcacattggaatgcagatgagaatagctatgtttagtttgatttataagaagactttaaagctgtcaagccgtgttctagataaaataagtattggacaacttgttagtctcctttccaacaacctgaacaaatttgatgaaggacttgcattggcacatttcgtgtggatcgctcctttgcaagtggcactcctcatggggctaatctgggagttgttacaggcgtctgccttctgtggacttggtttcctgatagtccttgccctttttcaggctgggctagggagaatgatgatgaagtacagagatcagagagctgggaagatcagtgaaagacttgtgattacctcagaaatgattgaaaatatccaatctgttaaggcatactgctgggaagaagcaatggaaaaaatgattgaaaacttaagacaaacagaactgaaactgactcggaaggcagcctatgtgagatacttcaatagctcagccttcttcttctcagggttctttgtggtgtttttatctgtgcttccctatgcactaatcaaaggaatcatcctccggaaaatattcaccaccatctcattctgcattgttctgcgcatggcggtcactcggcaatttccctgggctgtacaaacatggtatgactctcttggagcaataaacaaaatacaggatttcttacaaaagcaagaatataagacattggaatataacttaacgactacagaagtagtgatggagaatgtaacagccttctgggaggagggatttggggaattatttgagaaagcaaaacaaaacaataacaatagaaaaacttctaatggtgatgacagcctcttcttcagtaatttctcacttcttggtactcctgtcctgaaagatattaatttcaagatagaaagaggacagttgttggcggttgctggatccactggagcaggcaagacttcacttctaatgatgattatgggagaactggagccttcagagggtaaaattaagcacagtggaagaatttcattctgttctcagttttcctggattatgcctggcaccattaaagaaaatatcatctttggtgtttcctatgatgaatatagatacagaagcgtcatcaaagcatgccaactagaagaggacatctccaagtttgcagagaaagacaatatagttcttggagaaggtggaatcacactgagtggaggtcaacgagcaagaatttctttagcaagagcagtatacaaagatgctgatttgtatttattagactctccttttggatacctagatgttttaacagaaaaagaaatatttgaaagctgtgtctgtaaactgatggctaacaaaactaggattttggtcacttctaaaatggaacatttaaagaaagctgacaaaatattaattttgaatgaaggtagcagctatttttatgggacattttcagaactccaaaatctacagccagactttagctcaaaactcatgggatgtgattctttcgaccaatttagtgcagaaagaagaaattcaatcctaactgagaccttacaccgtttctcattagaaggagatgctcctgtctcctggacagaaacaaaaaaacaatcttttaaacagactggagagtttggggaaaaaaggaagaattctattctcaatccaatcaactctatacgaaaattttccattgtgcaaaagactcccttacaaatgaatggcatcgaagaggattctgatgagcctttagagagaaggctgtccttagtaccagattctgagcagggagaggcgatactgcctcgcatcagcgtgatcagcactggccccacgcttcaggcacgaaggaggcagtctgtcctgaacctgatgacacactcagttaaccaaggtcagaacattcaccgaaagacaacagcatccacacgaaaagtgtcactggcccctcaggcaaacttcgatatattactgtccacaagagcttaatttttgtgctaatttggtgcttagtaatttttctggcagaggtggctgcttctttggttgtgctgtggctccttggaaacactcctcttcaagacaaagggaatagtactcatagtagaaataacagctatgcagtgattatcaccagcaccagttcgtattatgtgttttacatttacgtgggagtagccgacactttgcttgctatgggattcttcagaggtctaccactggtgcatactctaatcacagtgtcgaaaattttacaccacaaaatgttacattctgttcttcaagcacctatgtcaaccctcaacacgttgaaagcaggtgggattcttaatagattctccaaagatatagcaattttggatgaccttctgcctcttaccatatttgacttcatccagttgttattaattgtgattggagctatagcagttgtcgcagttttacaaccctacatctttgttgcaacagtgccagtgatagtggcttttattatgttgagagcatatttcctccaaacctcacagcaactcaaacaactggaatctgaaggcaggagtccaattttcactcatcttgttacaagcttaaaaggactatggacacttcgtgccttcggacggcagccttactttgaaactctgttccacaaagctctgaatttacatactgccaactggttcttgtacctgtcaacactgcgctggttccaaatgagaatagaaatgatttttgtcatcttcttcattgctgttaccttcatttccattttaacaacaggagaaggagaaggaagagttggtattatcctgactttagccatgaatatcatgagtacattgcagtgggctgtaaactccagcatagatgtggatagcttgatgcgatctgtgagccgagtctttaagttcattgacatgccaacagaaggtaaacctaccaagtcaaccaaaccatacaagaatggccaactctcgaaagttatgattattgagaattcacacgtgaagaaagatgacatctggccctcagggggccaaatgactgtcaaagatctcacagcaaaatacacagaaggtggaaatgccatattagagaacatttccttctcaataagtcctggccagagggtgagatttgaacactgcttgctttgttagactgtgttcagtaagtgaatcccagtagcctgaagcaatgtgttagcagaatctatttgtaacattattattgtacagtagaatcaatattaaacacacatgttttattatatggagtcattatttttaatatgaaatttaatttgcagagtcctgaacctatataatgggtttattttaaatgtgattgtacttgcagaatatctaattaattgctaggttaataactaaagaagccattaaataaatcaaaattgtaacatgttttagat

SEQ ID NO: 355090 - DNA, 1399 bp, Homo sapiens
ttacgggcatatgtcgaccacggcgtcgagaatggctgagcaggacagtgggagaccagaccctaccccgcaactccagtaagcagggcactgcccagggagactgccttcagaaacctgagcttcagcggccaacaccccccatcccctgcgcatccttgtctcatttggggactggtggagctggctgagaggttggggtagtttcctggttacaggggtccacaagaccctctctcatcccggtataggggcctctctcctctcatcgggcctgataagggattggccaaggctgtgtgcatcctgcagagggaaggaagtcagctgggccacccgccatccaccttggcaagagctgggcccactctggcaggccagggtatcatctgcgtgctgctgccgggccaggaagggtgggtgggtggccagcaggctggcagctccagaccccagagggccagaagaactcaccccagtgccctctggatgcaggtgttggggaacactgaggacaatcccccatctcccctcacccttgagcaggccctccctgcactctctgccacatgtccctcctggtctgatcacggctgtgctcactgatgtggctgctttctgtctctgcccctgtgcccttggaggcaggcagtgaggtgctcctttcccaggcccccaccccttctcccccttcagccacttcccagcgagttggaaatgtgccttgcacccccagccgagtgaagcccagaacgcatctatatgcatcgatgtaacaagctcggatcagggacctaattggtttcccagtagtgggtaatttctcgttgcaaatattaatccgttgtttttctggcgcccagcccggcccgccgcagtactgtactcgaggtacgttcctatgcaaccgagagccccggcaaatacttcatgagcttagcagcctgggctcgagcagctatgcaaacgcgcttttcatttggagcacggggctgatgtgaagataagaattgtttctcctggagaaagatccatcatttctccagcttccaagcccccggcacctctgctcagctcccagatgtgacgagcacctcccgccagggggagtcaggggttgatcaaaccagctcttgtgacccaaaccagtgccgctgcattaaagggaggcccagctactccttcccagctgagatgtgggtacaggtcagatttgtcagggagatggcactaacacgacacaagctcactcccagaaccgcagctgatgtttataataatcgtatgtactgtgcaatttaggaggggaaaaaaaggctgtacaagctttaactctaaaataaatttctatttttttcctcttgcaaaattaataaaagatgttattaagaataaaaac

SEQ ID NO: 355091 - DNA, 465 bp, Homo sapiens
taacctcgtacctgggttgacgtgagcttccggttcgagctcccggaaccgccgcctctagggatggacggtcagactctgcgaaaggccgagagaagctggtcctgctcacgagagaaaaaggaggtaaatgtgtccctggcgagggctgatgggaggcaactctatttgaaaggacctgagggagcagggtggcgaataagtgtccctaaatatactcttttctcttggggtcccaagcttgaatcctggagcaaatgatagtgagcaactagacttaccaacccagtgtcacttgtaataatcacttgtaataatcacttgtaataatcatctctgagtgtatcagttaactttgtctgtgtaacaaatcatcccagattttagtggcttaaaacaacaaccatatatttagttctggatttggtgggttagcagtttgggcttatctgggcagttctgctg

SEQ ID NO: 355092 - DNA, 6794 bp, Homo sapiens
taacctcgtacctgggttgacgtgagcttccggttcgagctcccggaaccgccgcctctagggatggacggtcagactctgcgaaaggccgagagaagctggtcctgctcacgagagaaaaaggagggttacgctaaggacatggtgacagactttgatgagaaacatgatgagtatttaatattgcttcagcagaggaaccggatattaaagcatttgaaaagcaaggaccccgtgcaattgaggctggagcacttggagcaaggtttctctgtctatgtcaacggtgccaattcggagctgaaatcatcaccgcggaaagctattcactctgacttctccagaagtgcctcccacacggaggggacacacgattatggacgaagaactctgtttcgagaagctgaagaagccttaagacgcagttcacggacagcccccagtaaagtccagcgccgaggatggcaccagaaatctgtgcagatcagaacagaagctggcccacggctccacatcgaacctcctgtggactattctgatgattttgagctgtgtggggatgtgactctccaggcaaacaacacttctgaggatcgtccgcaggataccaaatctcccaccagtaccaagccctgtggttttaacttctcccttctgaatgcatgtggacattctgacccttcaagcagcgtggacaaagaaaggatcctcttaactattcaggatgtgatggagctgagaagaagcctggaacttagtgtaaatctacaaaggaaacaaaaggattgttccagcgatgagtatgactctattgaggaagacatactctctgagcctgagccagaggacccggcactggtgggccatcccagacatgaccgccctccttccagtggcgactggactcagaaagatgttcacggggaacaggagacagaaggacgctcttctccaggcccagacaccctcgtggtgctggaatttaacccagcttccaaaagtcataaaagggaaaggaatttgtctgcaaagcggaaggacaatgctgaggttttcgttcccaccaaacctgagccaaacctgactccccaagctcctgctgtattcccagaccaggagaggatgtgctccagacctggaagccggcgagagagacccctgtctgcaacccgcaaaactctttgcgaggctgagtacccagaggaagatgcctctgctgtgctccaagccatccaggtggagaacgcagccctgcagagggcgctcctcagcagaaaggccgagcagccagccagcccactgcaggatgcagaaggaccaccagcaaaaccatggaccagtctgctggaggagaaggaagagacccttgagctgcttcccatcaccacggcgactactactcaggagccggccggggcagcaggaggagccagggccatcaaccaggccatggacagaattgggcttctgggaagcagacaacagcagaagcttctgaaagtcctccaggccgtcgaaagtgactctgcccatctcggcagggtggtttcaccaaccaaggagcaagtatcagacacagaggacaaacagagaatgagggcagacgagatcaaagatgccatctacgtgaccatggagatcctgtccaactggggcaactcgtggtgggtgggtctcacagaagtcgagttctttgacttgaatgacacaaagctttatgtgtcgccccacgatgtggatatccggaacacagccacgcctggggagctgggccgcctcgtcaacaggaacttagctggcaagaaagactcctccccgtggacctgccccttccacccaccactccagctgttttttgttattcgaaacacaagacagctgggggacttccatctggccaagatcaaggttcggaattactggacagctgatggcgatcttgacattggtgccaagaacgtgaagctttacgtcaacagaaacctcatcttcaatggcaagttagacaaaggagatagggaggccccagctgaccacagcatcctggttgaccagaagaacgagaagagcgagcaactagaggaggccatgaacgctcactcggaagaaagcaaaggcacccatgagatggctggtgccagcggggacaaggagcttggtctcggttgctcaccgccagctgaaacattagcggatgcaaagctttcttcacaaggaaatgtgtctggcaaaagaaagaattctactaattgcaggaaagacagtttgtcccagttagaggaatatttgagactgtcggcagtccccacttcgatgggtgacatgcccagtgctcctgccacttccccacctgtgaagtgccctcctgtccatgaggagccctctctcatccaacaactggaaaacctcatgggcagaaaaatctgtgagccacccgggaaaaccccatcctggttacaaccttctcccaccggcaaggacaggaagcagggaggcaggaagccaaaacccctctggcttagtcccgagaagcccctggcctggaagggcaggctcccatcagacgatgtcatcggtgagggtcctggagagaccgaggccagggataaaggcctacggcatgagccagggtgggggaccagccggagtgtcaacaccaaggagagaccccagagggcaaccaccaaagtccacagtgatgactcagacatctttaaccagccccccaacagagagcgccctgctagtgggaggaggggctcaaggaaggatgctggcagcagtagtcatggggacgaccagccagccagcagagaagacacctggtcttccaggacgccgtcacggtcaaggtggcgcagtgagcaggagcacacacttcacgagtcatggagctccctcagtgccttcgaccgctcccaccggggacgcatctccaacacggagctcccgggggacatcctggatgagctcctgcagcaaaagagcagccggcacagcgacttgcccccctccaagaagggggagcagccagggctgtcgagagggcaggatggctactctggagagacagacgctgggggtgactttaaaatccccgtcttgccttatggacagcgcttggtcattgacatcaagtctacctggggggacagacactatgtcggcctcaacggaatagaaatattcagttccaagggtgaaccggtgcagatttcaaacataaaagcagaccctcccgatatcaatattttaccagcctatgggaaagacccccgcgtggtcaccaacctcatcgacggggtgaacaggacccaggatgacatgcatgtctggctggcccccttcacgcggggcagatcccactccatcaccattgacttcacgcacccttgccacgttgccctgatcagaatttggaactacaataaatctcggatacattccttccgaggcgtgaaggacatcacaatgctgttagacacccagtgcatctttgaaggagaaatcgccaaggcctctggaaccctggcgggagccccagagcactttggagacacgatcttattcacaaccgatgatgacattctcgaggccatattctattctgatgagatgtttgacctggatgtggggagcctggacagcctgcaggatgaagaggcaatgaggaggcccagcacggccgacggcgagggggatgagcggcccttcacccaggctggcttgggggctgatgaacggatcccggagctagagctcccatccagttcccctgtcccccaagtcaccacgccagagccaggcatctaccacggaatctgccttcagctgaatttcactgcctcctggggagacttgcactacctggggctcactggcctggaagtggtgggcaaggagggccaggcgctgcccatccacctgcaccagatctctgcttcccccagagacttaaatgagctccccgagtactctgacgactcccggaccctggacaagttaattgatggcaccaacatcaccatggaggatgagcatatgtggctgatccccttctcgccggggctggaccatgtggtcacgatccgcctggacagggccgaaagcatcgcaggcctgcgcttctggaactacaataaatctcccgaggacacctatcgcggggccaagattgtccacgtctccctggatggcctgtgcgtctccccgccagagggctttctcatccggaaggggccaggcaactgccactttgattttgctcaagaaatcctcttcgtggactacctacgggctcagctgctgccccagccggccaggaggctggacatgagaagcctggagtgtgcaagcatggactacgaggcaccgctgatgccctgtggcttcattttccagtttcagcttctcaccagctggggcgacccctactacatcggcctcaccggcctggagctgtatgacgagcgaggagaaaaaatccccttgtcggaaaacaatattgcggccttccccgacagcgtgaactccctggagggtgtgggcggggacgtccgcaccccagacaagctcatcgaccaagtgaacgacaccagtgatggccggcacatgtggctggctcccatcctgccgggcctggtgaaccgggtttatgtgattttcgatctgcctaccaccgtgtcaatgatcaaactgtggaattatgcgaaaacaccccatcgaggggtgaaggagtttggcctcctggtggacgacctgcttgtgtacaatgggatcctggccatggtgagccacctggtggggggcatcctgcccacatgtgagcccaccgtgccctaccacaccatcctcttcaccgaggacagggacatccgccaccaggagaaacacaccaccatcagtaatcaggccgaggatcaagatgtccagatgatgaatgaaaaccaaatcattaccaacgcgaaacggaagcagagcgttgttgacccagccttacgtcccaaaacctgcatcagcgagaaggagacgagacgacggcgctgctgactggtgaaggagggagagctggtcctcccactatggtgggctccgtcagcagccccactcagtgcctgcgtccctcaccctcagtcccaggagctggaagcgaaccacagtgttgaggggagcccgctgggaagaggggactcgggaggacagccctggatactaccagagtgacagatggctgtggctgcagggcaaagagatcccctgcagttctgggttggccacagggagcccaggacacccgccttcatgcctctgctgtgagacccagcaaagcagggcccatgaccactagggcctgggctgaccctgactcagaacaggacaatgacggggtggggaggcatcccatccagcctcagagggcccagagaatggctgagcaggacagtgggagaccagaccctaccccgcaactccagtaagcagggcactgcccagggagactgccttcagaaacctgagcttcagcggccaacaccccccatcccctgcgcatccttgtctcatttggggactggtggagctggctgagaggttggggtagtttcctggttacaggggtccacaagaccctctctcatcccggtataggggcctctctcctctcatcgggcctgataagggattggccaaggctgtgtgcatcctgcagagggaaggaagtcagctgggccacccgccatccaccttggcaagagctgggcccactctggcaggccagggtatcatctgcgtgctgctgccgggccaggaagggtgggtgggtggccagcaggctggcagctccagaccccagagggccagaagaactcaccccagtgccctctggatgcaggtgttggggaacactgaggacaatcccccatctcccctcacccttgagcaggccctccctgcactctctgccacatgtccctcctggtctgatcacggctgtgctcactgatgtggctgctttctgtctctgcccctgtgcccttggaggcaggcagtgaggtgctcctttcccaggcccccaccccttctcccccttcagccacttcccagcgagttggaaatgtgccttgcacccccagccgagtgaagcccagaacgcatctatatgcatcgatgtaacaagctcggatcagggacctaattggtttcccagtagtgggtaatttctcgttgcaaatattaatccgttgtttttctggcgcccagcccggcccgccgcagtactgtactcgaggtacgttcctatgcaaccgagagccccggcaaatacttcatgagcttagcagcctgggctcgagcagctatgcaaacgcgcttttcatttggagcacggggctgatgtgaagataagaattgtttctcctggagaaagatccatcatttctccagcttccaagcccccggcacctctgctcagctcccagatgtgacgagcacctcccgccagggggagtcaggggttgatcaaaccagctcttgtgacccaaaccagtgccgctgcattaaagggaggcccagctactccttcccagctgagatgtgggtacaggtcagatttgtcagggagatggcactaacacgacacaagctcactcccagaaccgcagctgatgtttataataatcgtatgtactgtgcaatttaggaggggaaaaaaaggctgtacaagctttaactctaaaataaatttctatttttttcctcttgcaaaattaataaaagatgttattaagaataaaaac

SEQ ID NO: 355093 - DNA, 6717 bp, Homo sapiens
taacctcgtacctgggttgacgtgagcttccggttcgagctcccggaaccgccgcctctagggatggacggtcagactctgcgaaaggccgagagaagctggtcctgctcacgagagaaaaaggaggatattaaagcatttgaaaagcaaggaccccgtgcaattgaggctggagcacttggagcaaggtttctctgtctatgtcaacggtgccaattcggagctgaaatcatcaccgcggaaagctattcactctgacttctccagaagtgcctcccacacggaggggacacacgattatggacgaagaactctgtttcgagaagctgaagaagccttaagacgcagttcacggacagcccccagtaaagtccagcgccgaggatggcaccagaaatctgtgcagatcagaacagaagctggcccacggctccacatcgaacctcctgtggactattctgatgattttgagctgtgtggggatgtgactctccaggcaaacaacacttctgaggatcgtccgcaggataccaaatctcccaccagtaccaagccctgtggttttaacttctcccttctgaatgcatgtggacattctgacccttcaagcagcgtggacaaagaaaggatcctcttaactattcaggatgtgatggagctgagaagaagcctggaacttagtgtaaatctacaaaggaaacaaaaggattgttccagcgatgagtatgactctattgaggaagacatactctctgagcctgagccagaggacccggcactggtgggccatcccagacatgaccgccctccttccagtggcgactggactcagaaagatgttcacggggaacaggagacagaaggacgctcttctccaggcccagacaccctcgtggtgctggaatttaacccagcttccaaaagtcataaaagggaaaggaatttgtctgcaaagcggaaggacaatgctgaggttttcgttcccaccaaacctgagccaaacctgactccccaagctcctgctgtattcccagaccaggagaggatgtgctccagacctggaagccggcgagagagacccctgtctgcaacccgcaaaactctttgcgaggctgagtacccagaggaagatgcctctgctgtgctccaagccatccaggtggagaacgcagccctgcagagggcgctcctcagcagaaaggccgagcagccagccagcccactgcaggatgcagaaggaccaccagcaaaaccatggaccagtctgctggaggagaaggaagagacccttgagctgcttcccatcaccacggcgactactactcaggagccggccggggcagcaggaggagccagggccatcaaccaggccatggacagaattgggcttctgggaagcagacaacagcagaagcttctgaaagtcctccaggccgtcgaaagtgactctgcccatctcggcagggtggtttcaccaaccaaggagcaagtatcagacacagaggacaaacagagaatgagggcagacgagatcaaagatgccatctacgtgaccatggagatcctgtccaactggggcaactcgtggtgggtgggtctcacagaagtcgagttctttgacttgaatgacacaaagctttatgtgtcgccccacgatgtggatatccggaacacagccacgcctggggagctgggccgcctcgtcaacaggaacttagctggcaagaaagactcctccccgtggacctgccccttccacccaccactccagctgttttttgttattcgaaacacaagacagctgggggacttccatctggccaagatcaaggttcggaattactggacagctgatggcgatcttgacattggtgccaagaacgtgaagctttacgtcaacagaaacctcatcttcaatggcaagttagacaaaggagatagggaggccccagctgaccacagcatcctggttgaccagaagaacgagaagagcgagcaactagaggaggccatgaacgctcactcggaagaaagcaaaggcacccatgagatggctggtgccagcggggacaaggagcttggtctcggttgctcaccgccagctgaaacattagcggatgcaaagctttcttcacaaggaaatgtgtctggcaaaagaaagaattctactaattgcaggaaagacagtttgtcccagttagaggaatatttgagactgtcggcagtccccacttcgatgggtgacatgcccagtgctcctgccacttccccacctgtgaagtgccctcctgtccatgaggagccctctctcatccaacaactggaaaacctcatgggcagaaaaatctgtgagccacccgggaaaaccccatcctggttacaaccttctcccaccggcaaggacaggaagcagggaggcaggaagccaaaacccctctggcttagtcccgagaagcccctggcctggaagggcaggctcccatcagacgatgtcatcggtgagggtcctggagagaccgaggccagggataaaggcctacggcatgagccagggtgggggaccagccggagtgtcaacaccaaggagagaccccagagggcaaccaccaaagtccacagtgatgactcagacatctttaaccagccccccaacagagagcgccctgctagtgggaggaggggctcaaggaaggatgctggcagcagtagtcatggggacgaccagccagccagcagagaagacacctggtcttccaggacgccgtcacggtcaaggtggcgcagtgagcaggagcacacacttcacgagtcatggagctccctcagtgccttcgaccgctcccaccggggacgcatctccaacacggagctcccgggggacatcctggatgagctcctgcagcaaaagagcagccggcacagcgacttgcccccctccaagaagggggagcagccagggctgtcgagagggcaggatggctactctggagagacagacgctgggggtgactttaaaatccccgtcttgccttatggacagcgcttggtcattgacatcaagtctacctggggggacagacactatgtcggcctcaacggaatagaaatattcagttccaagggtgaaccggtgcagatttcaaacataaaagcagaccctcccgatatcaatattttaccagcctatgggaaagacccccgcgtggtcaccaacctcatcgacggggtgaacaggacccaggatgacatgcatgtctggctggcccccttcacgcggggcagatcccactccatcaccattgacttcacgcacccttgccacgttgccctgatcagaatttggaactacaataaatctcggatacattccttccgaggcgtgaaggacatcacaatgctgttagacacccagtgcatctttgaaggagaaatcgccaaggcctctggaaccctggcgggagccccagagcactttggagacacgatcttattcacaaccgatgatgacattctcgaggccatattctattctgatgagatgtttgacctggatgtggggagcctggacagcctgcaggatgaagaggcaatgaggaggcccagcacggccgacggcgagggggatgagcggcccttcacccaggctggcttgggggctgatgaacggatcccggagctagagctcccatccagttcccctgtcccccaagtcaccacgccagagccaggcatctaccacggaatctgccttcagctgaatttcactgcctcctggggagacttgcactacctggggctcactggcctggaagtggtgggcaaggagggccaggcgctgcccatccacctgcaccagatctctgcttcccccagagacttaaatgagctccccgagtactctgacgactcccggaccctggacaagttaattgatggcaccaacatcaccatggaggatgagcatatgtggctgatccccttctcgccggggctggaccatgtggtcacgatccgcctggacagggccgaaagcatcgcaggcctgcgcttctggaactacaataaatctcccgaggacacctatcgcggggccaagattgtccacgtctccctggatggcctgtgcgtctccccgccagagggctttctcatccggaaggggccaggcaactgccactttgattttgctcaagaaatcctcttcgtggactacctacgggctcagctgctgccccagccggccaggaggctggacatgagaagcctggagtgtgcaagcatggactacgaggcaccgctgatgccctgtggcttcattttccagtttcagcttctcaccagctggggcgacccctactacatcggcctcaccggcctggagctgtatgacgagcgaggagaaaaaatccccttgtcggaaaacaatattgcggccttccccgacagcgtgaactccctggagggtgtgggcggggacgtccgcaccccagacaagctcatcgaccaagtgaacgacaccagtgatggccggcacatgtggctggctcccatcctgccgggcctggtgaaccgggtttatgtgattttcgatctgcctaccaccgtgtcaatgatcaaactgtggaattatgcgaaaacaccccatcgaggggtgaaggagtttggcctcctggtggacgacctgcttgtgtacaatgggatcctggccatggtgagccacctggtggggggcatcctgcccacatgtgagcccaccgtgccctaccacaccatcctcttcaccgaggacagggacatccgccaccaggagaaacacaccaccatcagtaatcaggccgaggatcaagatgtccagatgatgaatgaaaaccaaatcattaccaacgcgaaacggaagcagagcgttgttgacccagccttacgtcccaaaacctgcatcagcgagaaggagacgagacgacggcgctgctgactggtgaaggagggagagctggtcctcccactatggtgggctccgtcagcagccccactcagtgcctgcgtccctcaccctcagtcccaggagctggaagcgaaccacagtgttgaggggagcccgctgggaagaggggactcgggaggacagccctggatactaccagagtgacagatggctgtggctgcagggcaaagagatcccctgcagttctgggttggccacagggagcccaggacacccgccttcatgcctctgctgtgagacccagcaaagcagggcccatgaccactagggcctgggctgaccctgactcagaacaggacaatgacggggtggggaggcatcccatccagcctcagagggcccagagaatggctgagcaggacagtgggagaccagaccctaccccgcaactccagtaagcagggcactgcccagggagactgccttcagaaacctgagcttcagcggccaacaccccccatcccctgcgcatccttgtctcatttggggactggtggagctggctgagaggttggggtagtttcctggttacaggggtccacaagaccctctctcatcccggtataggggcctctctcctctcatcgggcctgataagggattggccaaggctgtgtgcatcctgcagagggaaggaagtcagctgggccacccgccatccaccttggcaagagctgggcccactctggcaggccagggtatcatctgcgtgctgctgccgggccaggaagggtgggtgggtggccagcaggctggcagctccagaccccagagggccagaagaactcaccccagtgccctctggatgcaggtgttggggaacactgaggacaatcccccatctcccctcacccttgagcaggccctccctgcactctctgccacatgtccctcctggtctgatcacggctgtgctcactgatgtggctgctttctgtctctgcccctgtgcccttggaggcaggcagtgaggtgctcctttcccaggcccccaccccttctcccccttcagccacttcccagcgagttggaaatgtgccttgcacccccagccgagtgaagcccagaacgcatctatatgcatcgatgtaacaagctcggatcagggacctaattggtttcccagtagtgggtaatttctcgttgcaaatattaatccgttgtttttctggcgcccagcccggcccgccgcagtactgtactcgaggtacgttcctatgcaaccgagagccccggcaaatacttcatgagcttagcagcctgggctcgagcagctatgcaaacgcgcttttcatttggagcacggggctgatgtgaagataagaattgtttctcctggagaaagatccatcatttctccagcttccaagcccccggcacctctgctcagctcccagatgtgacgagcacctcccgccagggggagtcaggggttgatcaaaccagctcttgtgacccaaaccagtgccgctgcattaaagggaggcccagctactccttcccagctgagatgtgggtacaggtcagatttgtcagggagatggcactaacacgacacaagctcactcccagaaccgcagctgatgtttataataatcgtatgtactgtgcaatttaggaggggaaaaaaaggctgtacaagctttaactctaaaataaatttctatttttttcctcttgcaaaattaataaaagatgttattaagaataaaaac

SEQ ID NO: 355094 - DNA, 5751 bp, Homo sapiens
agcggaagcactgcctttcccctccccagagtcatcccacttagtcaattaagtcagtggaagctcattcttagaggaagttccagggcaggcatcttttctgtttgccatcgagaagctggctggcatggtttggaaggaaagcatcccgcctcgacctggaagccggcgagagagacccctgtctgcaacccgcaaaactctttgcgaggctgagtacccagaggaagatgcctctgctgtgctccaagccatccaggtggagaacgcagccctgcagagggcgctcctcagcagaaaggccgagcagccagccagcccactgcagctgcttcccatcaccacggcgactactactcaggagccggccggggcagcaggaggagccagggccatcaaccaggccatggacagaattgggcttctgggaagcagacaacagcagaagcttctgaaagtcctccaggccgtcgaaagtgactctgcccatctcggcagggtggtttcaccaaccaaggagcaagtatcagacacagaggacaaacagagaatgagggcagacgagatcaaagatgccatctacgtgaccatggagatcctgtccaactggggcaactcgtggtgggtgggtctcacagaagtcgagttctttgacttgaatgacacaaagctttatgtgtcgccccacgatgtggatatccggaacacagccacgcctggggagctgggccgcctcgtcaacaggaacttagctggcaagaaagactcctccccgtggacctgccccttccacccaccactccagctgttttttgttattcgaaacacaagacagctgggggacttccatctggccaagatcaaggttcggaattactggacagctgatggcgatcttgacattggtgccaagaacgtgaagctttacgtcaacagaaacctcatcttcaatggcaagttagacaaaggagatagggaggccccagctgaccacagcatcctggttgaccagaagaacgagaagagcgagcaactagaggaggccatgaacgctcactcggaagaaagcaaaggcacccatgagatggctggtgccagcggggacaaggagcttggtctcggttgctcaccgccagctgaaacattagcggatgcaaagctttcttcacaaggaaatgtgtctggcaaaagaaagaattctactaattgcaggaaagacagtttgtcccagttagaggaatatttgagactgtcggcagtccccacttcgatgggtgacatgcccagtgctcctgccacttccccacctgtgaagtgccctcctgtccatgaggagccctctctcatccaacaactggaaaacctcatgggcagaaaaatctgtgagccacccgggaaaaccccatcctggttacaaccttctcccaccggcaaggacaggaagcagggaggcaggaagccaaaacccctctggcttagtcccgagaagcccctggcctggaagggcaggctcccatcagacgatgtcatcggtgagggtcctggagagaccgaggccagggataaaggcctacggcatgagccagggtgggggaccagccggagtgtcaacaccaaggagagaccccagagggcaaccaccaaagtccacagtgatgactcagacatctttaaccagccccccaacagagagcgccctgctagtgggaggaggggctcaaggaaggatgctggcagcagtagtcatggggacgaccagccagccagcagagaagacacctggtcttccaggacgccgtcacggtcaaggtggcgcagtgagcaggagcacacacttcacgagtcatggagctccctcagtgccttcgaccgctcccaccggggacgcatctccaacacggagctcccgggggacatcctggatgagctcctgcagcaaaagagcagccggcacagcgacttgcccccctccaagaagggggagcagccagggctgtcgagagggcaggatggctactctggagagacagacgctgggggtgactttaaaatccccgtcttgccttatggacagcgcttggtcattgacatcaagtctacctggggggacagacactatgtcggcctcaacggaatagaaatattcagttccaagggtgaaccggtgcagatttcaaacataaaagcagaccctcccgatatcaatattttaccagcctatgggaaagacccccgcgtggtcaccaacctcatcgacggggtgaacaggacccaggatgacatgcatgtctggctggcccccttcacgcggggcagatcccactccatcaccattgacttcacgcacccttgccacgttgccctgatcagaatttggaactacaataaatctcggatacattccttccgaggcgtgaaggacatcacaatgctgttagacacccagtgcatctttgaaggagaaatcgccaaggcctctggaaccctggcgggagccccagagcactttggagacacgatcttattcacaaccgatgatgacattctcgaggccatattctattctgatgagatgtttgacctggatgtggggagcctggacagcctgcaggatgaagaggcaatgaggaggcccagcacggccgacggcgagggggatgagcggcccttcacccaggctggcttgggggctgatgaacggatcccggagctagagctcccatccagttcccctgtcccccaagtcaccacgccagagccaggcatctaccacggaatctgccttcagctgaatttcactgcctcctggggagacttgcactacctggggctcactggcctggaagtggtgggcaaggagggccaggcgctgcccatccacctgcaccagatctctgcttcccccagagacttaaatgagctccccgagtactctgacgactcccggaccctggacaagttaattgatggcaccaacatcaccatggaggatgagcatatgtggctgatccccttctcgccggggctggaccatgtggtcacgatccgcctggacagggccgaaagcatcgcaggcctgcgcttctggaactacaataaatctcccgaggacacctatcgcggggccaagattgtccacgtctccctggatggcctgtgcgtctccccgccagagggctttctcatccggaaggggccaggcaactgccactttgattttgctcaagaaatcctcttcgtggactacctacgggctcagctgctgccccagccggccaggaggctggacatgagaagcctggagtgtgcaagcatggactacgaggcaccgctgatgccctgtggcttcattttccagtttcagcttctcaccagctggggcgacccctactacatcggcctcaccggcctggagctgtatgacgagcgaggagaaaaaatccccttgtcggaaaacaatattgcggccttccccgacagcgtgaactccctggagggtgtgggcggggacgtccgcaccccagacaagctcatcgaccaagtgaacgacaccagtgatggccggcacatgtggctggctcccatcctgccgggcctggtgaaccgggtttatgtgattttcgatctgcctaccaccgtgtcaatgatcaaactgtggaattatgcgaaaacaccccatcgaggggtgaaggagtttggcctcctggtggacgacctgcttgtgtacaatgggatcctggccatggtgagccacctggtggggggcatcctgcccacatgtgagcccaccgtgccctaccacaccatcctcttcaccgaggacagggacatccgccaccaggagaaacacaccaccatcagtaatcaggccgaggatcaagatgtccagatgatgaatgaaaaccaaatcattaccaacgcgaaacggaagcagagcgttgttgacccagccttacgtcccaaaacctgcatcagcgagaaggagacgagacgacggcgctgctgactggtgaaggagggagagctggtcctcccactatggtgggctccgtcagcagccccactcagtgcctgcgtccctcaccctcagtcccaggagctggaagcgaaccacagtgttgaggggagcccgctgggaagaggggactcgggaggacagccctggatactaccagagtgacagatggctgtggctgcagggcaaagagatcccctgcagttctgggttggccacagggagcccaggacacccgccttcatgcctctgctgtgagacccagcaaagcagggcccatgaccactagggcctgggctgaccctgactcagaacaggacaatgacggggtggggaggcatcccatccagcctcagagggcccagagaatggctgagcaggacagtgggagaccagaccctaccccgcaactccagtaagcagggcactgcccagggagactgccttcagaaacctgagcttcagcggccaacaccccccatcccctgcgcatccttgtctcatttggggactggtggagctggctgagaggttggggtagtttcctggttacaggggtccacaagaccctctctcatcccggtataggggcctctctcctctcatcgggcctgataagggattggccaaggctgtgtgcatcctgcagagggaaggaagtcagctgggccacccgccatccaccttggcaagagctgggcccactctggcaggccagggtatcatctgcgtgctgctgccgggccaggaagggtgggtgggtggccagcaggctggcagctccagaccccagagggccagaagaactcaccccagtgccctctggatgcaggtgttggggaacactgaggacaatcccccatctcccctcacccttgagcaggccctccctgcactctctgccacatgtccctcctggtctgatcacggctgtgctcactgatgtggctgctttctgtctctgcccctgtgcccttggaggcaggcagtgaggtgctcctttcccaggcccccaccccttctcccccttcagccacttcccagcgagttggaaatgtgccttgcacccccagccgagtgaagcccagaacgcatctatatgcatcgatgtaacaagctcggatcagggacctaattggtttcccagtagtgggtaatttctcgttgcaaatattaatccgttgtttttctggcgcccagcccggcccgccgcagtactgtactcgaggtacgttcctatgcaaccgagagccccggcaaatacttcatgagcttagcagcctgggctcgagcagctatgcaaacgcgcttttcatttggagcacggggctgatgtgaagataagaattgtttctcctggagaaagatccatcatttctccagcttccaagcccccggcacctctgctcagctcccagatgtgacgagcacctcccgccagggggagtcaggggttgatcaaaccagctcttgtgacccaaaccagtgccgctgcattaaagggaggcccagctactccttcccagctgagatgtgggtacaggtcagatttgtcagggagatggcactaacacgacacaagctcactcccagaaccgcagctgatgtttataataatcgtatgtactgtgcaatttaggaggggaaaaaaaggctgtacaagctttaactctaaaataaatttctatttttttcctcttgcaaaattaataaaagatgttattaagaataaaaac

SEQ ID NO: 355095 - DNA, 3076 bp, Homo sapiens
cctctgcttctccaacccatgtgcagatcccggagctagagctcccatccagttcccctgtcccccaagtcaccacgccagagccaggcatctaccacggaatctgccttcagctgaatttcactgcctcctggggagacttgcactacctggggctcactggcctggaagtggtgggcaaggagggccaggcgctgcccatccacctgcaccagatctctgcttcccccagagacttaaatgagctccccgagtactctgacgactcccggaccctggacaagttaattgatggcaccaacatcaccatggaggatgagcatatgtggctgatccccttctcgccggggctggaccatgtggtcacgatccgcctggacagggccgaaagcatcgcaggcctgcgcttctggaactacaataaatctcccgaggacacctatcgcggggccaagattgtccacgtctccctggatggcctgtgcgtctccccgccagagggctttctcatccggaaggggccaggcaactgccactttgattttgctcaagaaatcctcttcgtggactacctacgggctcagctgctgccccagccggccaggaggctggacatgagaagcctggagtgtgcaagcatggactacgaggcaccgctgatgccctgtggcttcattttccagtttcagcttctcaccagctggggcgacccctactacatcggcctcaccggcctggagctgtatgacgagcgaggagaaaaaatccccttgtcggaaaacaatattgcggccttccccgacagcgtgaactccctggagggtgtgggcggggacgtccgcaccccagacaagctcatcgaccaagtgaacgacaccagtgatggccggcacatgtggctggctcccatcctgccgggcctggtgaaccgggtttatgtgattttcgatctgcctaccaccgtgtcaatgatcaaactgtggaattatgcgaaaacaccccatcgaggggtgaaggagtttggcctcctggtggacgacctgcttgtgtacaatgggatcctggccatggtgagccacctggtggggggcatcctgcccacatgtgagcccaccgtgccctaccacaccatcctcttcaccgaggacagggacatccgccaccaggagaaacacaccaccatcagtaatcaggccgaggatcaagatgtccagatgatgaatgaaaaccaaatcattaccaacgcgaaacggaagcagagcgttgttgacccagccttacgtcccaaaacctgcatcagcgagaaggagacgagacgacggcgctgctgactggtgaaggagggagagctggtcctcccactatggtgggctccgtcagcagccccactcagtgcctgcgtccctcaccctcagtcccaggagctggaagcgaaccacagtgttgaggggagcccgctgggaagaggggactcgggaggacagccctggatactaccagagtgacagatggctgtggctgcagggcaaagagatcccctgcagttctgggttggccacagggagcccaggacacccgccttcatgcctctgctgtgagacccagcaaagcagggcccatgaccactagggcctgggctgaccctgactcagaacaggacaatgacggggtggggaggcatcccatccagcctcagagggcccagagaatggctgagcaggacagtgggagaccagaccctaccccgcaactccagtaagcagggcactgcccagggagactgccttcagaaacctgagcttcagcggccaacaccccccatcccctgcgcatccttgtctcatttggggactggtggagctggctgagaggttggggtagtttcctggttacaggggtccacaagaccctctctcatcccggtataggggcctctctcctctcatcgggcctgataagggattggccaaggctgtgtgcatcctgcagagggaaggaagtcagctgggccacccgccatccaccttggcaagagctgggcccactctggcaggccagggtatcatctgcgtgctgctgccgggccaggaagggtgggtgggtggccagcaggctggcagctccagaccccagagggccagaagaactcaccccagtgccctctggatgcaggtgttggggaacactgaggacaatcccccatctcccctcacccttgagcaggccctccctgcactctctgccacatgtccctcctggtctgatcacggctgtgctcactgatgtggctgctttctgtctctgcccctgtgcccttggaggcaggcagtgaggtgctcctttcccaggcccccaccccttctcccccttcagccacttcccagcgagttggaaatgtgccttgcacccccagccgagtgaagcccagaacgcatctatatgcatcgatgtaacaagctcggatcagggacctaattggtttcccagtagtgggtaatttctcgttgcaaatattaatccgttgtttttctggcgcccagcccggcccgccgcagtactgtactcgaggtacgttcctatgcaaccgagagccccggcaaatacttcatgagcttagcagcctgggctcgagcagctatgcaaacgcgcttttcatttggagcacggggctgatgtgaagataagaattgtttctcctggagaaagatccatcatttctccagcttccaagcccccggcacctctgctcagctcccagatgtgacgagcacctcccgccagggggagtcaggggttgatcaaaccagctcttgtgacccaaaccagtgccgctgcattaaagggaggcccagctactccttcccagctgagatgtgggtacaggtcagatttgtcagggagatggcactaacacgacacaagctcactcccagaaccgcagctgatgtttataataatcgtatgtactgtgcaatttaggaggggaaaaaaaggctgtacaagctttaactctaaaataaatttctatttttttcctcttgcaaaattaataaaagatgttattaagaataaaaac

SEQ ID NO: 355096 - DNA, 1653 bp, Homo sapiens
agctcctcacctcagtccagactgaaagagcccgctgggaagaggggactcgggaggacagccctggatactaccagagtgacagatggctgtggctgcagggcaaagagatcccctgcagttctgggttggccacagggagcccaggacacccgccttcatgcctctgctgtgagacccagcaaagcagggcccatgaccactagggcctgggctgaccctgactcagaacaggacaatgacggggtggggaggcatcccatccagcctcagagggcccagagaatggctgagcaggacagtgggagaccagaccctaccccgcaactccagtaagcagggcactgcccagggagactgccttcagaaacctgagcttcagcggccaacaccccccatcccctgcgcatccttgtctcatttggggactggtggagctggctgagaggttggggtagtttcctggttacaggggtccacaagaccctctctcatcccggtataggggcctctctcctctcatcgggcctgataagggattggccaaggctgtgtgcatcctgcagagggaaggaagtcagctgggccacccgccatccaccttggcaagagctgggcccactctggcaggccagggtatcatctgcgtgctgctgccgggccaggaagggtgggtgggtggccagcaggctggcagctccagaccccagagggccagaagaactcaccccagtgccctctggatgcaggtgttggggaacactgaggacaatcccccatctcccctcacccttgagcaggccctccctgcactctctgccacatgtccctcctggtctgatcacggctgtgctcactgatgtggctgctttctgtctctgcccctgtgcccttggaggcaggcagtgaggtgctcctttcccaggcccccaccccttctcccccttcagccacttcccagcgagttggaaatgtgccttgcacccccagccgagtgaagcccagaacgcatctatatgcatcgatgtaacaagctcggatcagggacctaattggtttcccagtagtgggtaatttctcgttgcaaatattaatccgttgtttttctggcgcccagcccggcccgccgcagtactgtactcgaggtacgttcctatgcaaccgagagccccggcaaatacttcatgagcttagcagcctgggctcgagcagctatgcaaacgcgcttttcatttggagcacggggctgatgtgaagataagaattgtttctcctggagaaagatccatcatttctccagcttccaagcccccggcacctctgctcagctcccagatgtgacgagcacctcccgccagggggagtcaggggttgatcaaaccagctcttgtgacccaaaccagtgccgctgcattaaagggaggcccagctactccttcccagctgagatgtgggtacaggtcagatttgtcagggagatggcactaacacgacacaagctcactcccagaaccgcagctgatgtttataataatcgtatgtactgtgcaatttaggaggggaaaaaaaggctgtacaagctttaactctaaaataaatttctatttttttcctcttgcaaaattaataaaagatgttattaagaataaaaac

SEQ ID NO: 355097 - DNA, 5086 bp, Homo sapiens
taacctcgtacctgggttgacgtgagcttccggttcgagctcccggaaccgccgcctctagggatggacggtcagactctgcgaaaggccgagagaagctggtcctgctcacgagagaaaaaggagggttacgctaaggacatggtgacagactttgatgagaaacatgatgagtatttaatattgcttcagcagaggaaccggatattaaagcatttgaaaagcaaggaccccgtgcaattgaggctggagcacttggagcaaggtttctctgtctatgtcaacggtgccaattcggagctgaaatcatcaccgcggaaagctattcactctgacttctccagaagtgcctcccacacggaggggacacacgattatggacgaagaactctgtttcgagaagctgaagaagccttaagacgcagttcacggacagcccccagtaaagtccagcgccgaggatggcaccagaaatctgtgcagatcagaacagaagctggcccacggctccacatcgaacctcctgtggactattctgatgattttgagctgtgtggggatgtgactctccaggcaaacaacacttctgaggatcgtccgcaggataccaaatctcccaccagtaccaagccctgtggttttaacttctcccttctgaatgcatgtggacattctgacccttcaagcagcgtggacaaagaaaggatcctcttaactattcaggatgtgatggagctgagaagaagcctggaacttagtgtaaatctacaaaggaaacaaaaggattgttccagcgatgagtatgactctattgaggaagacatactctctgagcctgagccagaggacccggcactggtgggccatcccagacatgaccgccctccttccagtggcgactggactcagaaagatgttcacggggaacaggagacagaaggacgctcttctccaggcccagacaccctcgtggtgctggaatttaacccagcttccaaaagtcataaaagggaaaggaatttgtctgcaaagcggaaggacaatgctgaggttttcgttcccaccaaacctgagccaaacctgactccccaagctcctgctgtattcccagaccaggagaggatgtgctccagacctggaagccggcgagagagacccctgtctgcaacccgcaaaactctttgcgaggctgagtacccagaggaagatgcctctgctgtgctccaagccatccaggtggagaacgcagccctgcagagggcgctcctcagcagaaaggccgagcagccagccagcccactgcaggatgcagaaggaccaccagcaaaaccatggaccagtctgctggaggagaaggaagagacccttgagctgcttcccatcaccacggcgactactactcaggagccggccggggcagcaggaggagccagggccatcaaccaggccatggacagaattgggcttctgggaagcagacaacagcagaagcttctgaaagtcctccaggccgtcgaaagtgactctgcccatctcggcagggtggtttcaccaaccaaggagcaagtatcagacacagaggacaaacagagaatgagggcagacgagatcaaagatgccatctacgtgaccatggagatcctgtccaactggggcaactcgtggtgggtgggtctcacagaagtcgagttctttgacttgaatgacacaaagctttatgtgtcgccccacgatgtggatatccggaacacagccacgcctggggagctgggccgcctcgtcaacaggaacttagctggcaagaaagactcctccccgtggacctgccccttccacccaccactccagctgttttttgttattcgaaacacaagacagctgggggacttccatctggccaagatcaaggttcggaattactggacagctgatggcgatcttgacattggtgccaagaacgtgaagctttacgtcaacagaaacctcatcttcaatggcaagttagacaaaggagatagggaggccccagctgaccacagcatcctggttgaccagaagaacgagaagagcgagcaactagaggaggccatgaacgctcactcggaagaaagcaaaggcacccatgagatggctggtgccagcggggacaaggagcttggtctcggttgctcaccgccagctgaaacattagcggatgcaaagctttcttcacaaggaaatgtgtctggcaaaagaaagaattctactaattgcaggaaagacagtttgtcccagttagaggaatatttgagactgtcggcagtccccacttcgatgggtgacatgcccagtgctcctgccacttccccacctgtgaagtgccctcctgtccatgaggagccctctctcatccaacaactggaaaacctcatgggcagaaaaatctgtgagccacccgggaaaaccccatcctggttacaaccttctcccaccggcaaggacaggaagcagggaggcaggaagccaaaacccctctggcttagtcccgagaagcccctggcctggaagggcaggctcccatcagacgatgtcatcggtgagggtcctggagagaccgaggccagggataaaggcctacggcatgagccagggtgggggaccagccggagtgtcaacaccaaggagagaccccagagggcaaccaccaaagtccacagtgatgactcagacatctttaaccagccccccaacagagagcgccctgctagtgggaggaggggctcaaggaaggatgctggcagcagtagtcatggggacgaccagccagccagcagagaagacacctggtcttccaggacgccgtcacggtcaaggtggcgcagtgagcaggagcacacacttcacgagtcatggagctccctcagtgccttcgaccgctcccaccggggacgcatctccaacacggagctcccgggggacatcctggatgagctcctgcagcaaaagagcagccggcacagcgacttgcccccctccaagaagggggagcagccagggctgtcgagagggcaggatggctactctggagagacagacgctgggggtgactttaaaatccccgtcttgccttatggacagcgcttggtcattgacatcaagtctacctggggggacagacactatgtcggcctcaacggaatagaaatattcagttccaagggtgaaccggtgcagatttcaaacataaaagcagaccctcccgatatcaatattttaccagcctatgggaaagacccccgcgtggtcaccaacctcatcgacggggtgaacaggacccaggatgacatgcatgtctggctggcccccttcacgcggggcagatcccactccatcaccattgacttcacgcacccttgccacgttgccctgatcagaatttggaactacaataaatctcggatacattccttccgaggcgtgaaggacatcacaatgctgttagacacccagtgcatctttgaaggagaaatcgccaaggcctctggaaccctggcgggagccccagagcactttggagacacgatcttattcacaaccgatgatgacattctcgaggccatattctattctgatgagatgtttgacctggatgtggggagcctggacagcctgcaggatgaagaggcaatgaggaggcccagcacggccgacggcgagggggatgagcggcccttcacccaggctggcttgggggctgatgaacggatcccggagctagagctcccatccagttcccctgtcccccaagtcaccacgccagagccaggcatctaccacggaatctgccttcagctgaatttcactgcctcctggggagacttgcactacctggggctcactggcctggaagtggtgggcaaggagggccaggcgctgcccatccacctgcaccagatctctgcttcccccagagacttaaatgagctccccgagtactctgacgactcccggaccctggacaagttaattgatggcaccaacatcaccatggaggatgagcatatgtggctgatccccttctcgccggggctggaccatgtggtcacgatccgcctggacagggccgaaagcatcgcaggcctgcgcttctggaactacaataaatctcccgaggacacctatcgcggggccaagattgtccacgtctccctggatggcctgtgcgtctccccgccagagggctttctcatccggaaggggccaggcaactgccactttgattttgctcaagaaatcctcttcgtggactacctacgggctcagctgctgccccagccggccaggaggctggacatgagaagcctggagtgtgcaagcatggactacgaggcaccgctgatgccctgtggcttcattttccagtttcagcttctcaccagctggggcgacccctactacatcggcctcaccggcctggagctgtatgacgagcgaggagaaaaaatccccttgtcggaaaacaatattgcggccttccccgacagcgtgaactccctggagggtgtgggcggggacgtccgcaccccagacaagctcatcgaccaagtgaacgacaccagtgatggccggcacatgtggctggctcccatcctgccgggcctggtgaaccgggtttatgtgattttcgatctgcctaccaccgtgtcaatgatcaaactgtggaattatgcgaaaacaccccatcgaggggtgaaggagtttggcctcctggtggacgacctgcttgtgtacaatgggatcctggccatggtgagccacctggtggggggcatcctgcccacatgtgagcccaccgtgccctaccacaccatcctcttcaccgaggacagggacatccgccaccaggagaaacacaccaccatcagtaatcaggccgaggatcaagatgtccagatgatgaatgaaaaccaaatcattaccaacgcgaaacggaagcagagcgttgttgacccagccttacgtcccaaaacctgcatcgaggaggaagaggaaagcaccgagggccttgcaagactggagagcagaagaggctgggcgcgcttagctg

SEQ ID NO: 355098 - DNA, 707 bp, Homo sapiens
taacctcgtacctgggttgacgtgagcttccggttcgagctcccggaaccgccgcctctagggatggacggtcagactctgcgaaaggccgagagaagctggtcctgctcacgagagaaaaaggagggttacgctaaggacatggtgacagactttgatgagaaacatgatgagtatttaatattgcttcagcagaggaaccggatattaaagcatttgaaaagcaaggaccccgtgcaattgaggctggagcacttggagcaaggtttctctgtctatgtcaacggtgccaattcggagctgaaatcatcaccgcggaaagctattcactctgacttctccagaagtgcctcccacacggaggggacacacgattatggacgaagaactctgtttcgagaagctgaagaagccttaagacgcagttcacggacagcccccagtaaagtccagcgccgaggatggcaccaggtctggagactgtggccccagcccacgctttagaatacagagtgtgggtggctgtgggaatagaaatacaatcagagcatttaaaacccccatgggccaggcacagtggctcctttatgcaatcccagcattttgggagggtgaggtgggaggatcactttgagcccagaagttcgagaccagcttgggcaacaaagtgagacttcatctctactaaaaataaaaataaaaaattc

SEQ ID NO: 355099 - DNA, 6665 bp, Homo sapiens
taacctcgtacctgggttgacgtgagcttccggttcgagctcccggaaccgccgcctctagggatggacggtcagactctgcgaaaggccgagagaagctggtcctgctcacgagagaaaaaggagggttacgctaaggacatggtgacagactttgatgagaaacatgatgagtatttaatattgcttcagcagaggaaccggatattaaagcatttgaaaagcaaggaccccgtgcaattgaggctggagcacttggagcaaggtttctctgtctatgtcaacggtgccaattcggagctgaaatcatcaccgcggaaagctattcactctgacttctccagaagtgcctcccacacggaggggacacacgattatggacgaagaactctgtttcgagaagctgaagaagccttaagacgcagttcacggacagcccccagtaaagtccagcgccgaggatggcaccagaaatctgtgcagatcagaacagaagctggcccacggctccacatcgaacctcctgtggactattctgatgattttgagctgtgtggggatgtgactctccaggcaaacaacacttctgaggatcgtccgcaggagctgagaagaagcctggaacttagtgtaaatctacaaaggaaacaaaaggattgttccagcgatgagtatgactctattgaggaagacatactctctgagcctgagccagaggacccggcactggtgggccatcccagacatgaccgccctccttccagtggcgactggactcagaaagatgttcacggggaacaggagacagaaggacgctcttctccaggcccagacaccctcgtggtgctggaatttaacccagcttccaaaagtcataaaagggaaaggaatttgtctgcaaagcggaaggacaatgctgaggttttcgttcccaccaaacctgagccaaacctgactccccaagctcctgctgtattcccagaccaggagaggatgtgctccagacctggaagccggcgagagagacccctgtctgcaacccgcaaaactctttgcgaggctgagtacccagaggaagatgcctctgctgtgctccaagccatccaggtggagaacgcagccctgcagagggcgctcctcagcagaaaggccgagcagccagccagcccactgcaggatgcagaaggaccaccagcaaaaccatggaccagtctgctggaggagaaggaagagacccttgagctgcttcccatcaccacggcgactactactcaggagccggccggggcagcaggaggagccagggccatcaaccaggccatggacagaattgggcttctgggaagcagacaacagcagaagcttctgaaagtcctccaggccgtcgaaagtgactctgcccatctcggcagggtggtttcaccaaccaaggagcaagtatcagacacagaggacaaacagagaatgagggcagacgagatcaaagatgccatctacgtgaccatggagatcctgtccaactggggcaactcgtggtgggtgggtctcacagaagtcgagttctttgacttgaatgacacaaagctttatgtgtcgccccacgatgtggatatccggaacacagccacgcctggggagctgggccgcctcgtcaacaggaacttagctggcaagaaagactcctccccgtggacctgccccttccacccaccactccagctgttttttgttattcgaaacacaagacagctgggggacttccatctggccaagatcaaggttcggaattactggacagctgatggcgatcttgacattggtgccaagaacgtgaagctttacgtcaacagaaacctcatcttcaatggcaagttagacaaaggagatagggaggccccagctgaccacagcatcctggttgaccagaagaacgagaagagcgagcaactagaggaggccatgaacgctcactcggaagaaagcaaaggcacccatgagatggctggtgccagcggggacaaggagcttggtctcggttgctcaccgccagctgaaacattagcggatgcaaagctttcttcacaaggaaatgtgtctggcaaaagaaagaattctactaattgcaggaaagacagtttgtcccagttagaggaatatttgagactgtcggcagtccccacttcgatgggtgacatgcccagtgctcctgccacttccccacctgtgaagtgccctcctgtccatgaggagccctctctcatccaacaactggaaaacctcatgggcagaaaaatctgtgagccacccgggaaaaccccatcctggttacaaccttctcccaccggcaaggacaggaagcagggaggcaggaagccaaaacccctctggcttagtcccgagaagcccctggcctggaagggcaggctcccatcagacgatgtcatcggtgagggtcctggagagaccgaggccagggataaaggcctacggcatgagccagggtgggggaccagccggagtgtcaacaccaaggagagaccccagagggcaaccaccaaagtccacagtgatgactcagacatctttaaccagccccccaacagagagcgccctgctagtgggaggaggggctcaaggaaggatgctggcagcagtagtcatggggacgaccagccagccagcagagaagacacctggtcttccaggacgccgtcacggtcaaggtggcgcagtgagcaggagcacacacttcacgagtcatggagctccctcagtgccttcgaccgctcccaccggggacgcatctccaacacggagctcccgggggacatcctggatgagctcctgcagcaaaagagcagccggcacagcgacttgcccccctccaagaagggggagcagccagggctgtcgagagggcaggatggctactctggagagacagacgctgggggtgactttaaaatccccgtcttgccttatggacagcgcttggtcattgacatcaagtctacctggggggacagacactatgtcggcctcaacggaatagaaatattcagttccaagggtgaaccggtgcagatttcaaacataaaagcagaccctcccgatatcaatattttaccagcctatgggaaagacccccgcgtggtcaccaacctcatcgacggggtgaacaggacccaggatgacatgcatgtctggctggcccccttcacgcggggcagatcccactccatcaccattgacttcacgcacccttgccacgttgccctgatcagaatttggaactacaataaatctcggatacattccttccgaggcgtgaaggacatcacaatgctgttagacacccagtgcatctttgaaggagaaatcgccaaggcctctggaaccctggcgggagccccagagcactttggagacacgatcttattcacaaccgatgatgacattctcgaggccatattctattctgatgagatgtttgacctggatgtggggagcctggacagcctgcaggatgaagaggcaatgaggaggcccagcacggccgacggcgagggggatgagcggcccttcacccaggctggcttgggggctgatgaacggatcccggagctagagctcccatccagttcccctgtcccccaagtcaccacgccagagccaggcatctaccacggaatctgccttcagctgaatttcactgcctcctggggagacttgcactacctggggctcactggcctggaagtggtgggcaaggagggccaggcgctgcccatccacctgcaccagatctctgcttcccccagagacttaaatgagctccccgagtactctgacgactcccggaccctggacaagttaattgatggcaccaacatcaccatggaggatgagcatatgtggctgatccccttctcgccggggctggaccatgtggtcacgatccgcctggacagggccgaaagcatcgcaggcctgcgcttctggaactacaataaatctcccgaggacacctatcgcggggccaagattgtccacgtctccctggatggcctgtgcgtctccccgccagagggctttctcatccggaaggggccaggcaactgccactttgattttgctcaagaaatcctcttcgtggactacctacgggctcagctgctgccccagccggccaggaggctggacatgagaagcctggagtgtgcaagcatggactacgaggcaccgctgatgccctgtggcttcattttccagtttcagcttctcaccagctggggcgacccctactacatcggcctcaccggcctggagctgtatgacgagcgaggagaaaaaatccccttgtcggaaaacaatattgcggccttccccgacagcgtgaactccctggagggtgtgggcggggacgtccgcaccccagacaagctcatcgaccaagtgaacgacaccagtgatggccggcacatgtggctggctcccatcctgccgggcctggtgaaccgggtttatgtgattttcgatctgcctaccaccgtgtcaatgatcaaactgtggaattatgcgaaaacaccccatcgaggggtgaaggagtttggcctcctggtggacgacctgcttgtgtacaatgggatcctggccatggtgagccacctggtggggggcatcctgcccacatgtgagcccaccgtgccctaccacaccatcctcttcaccgaggacagggacatccgccaccaggagaaacacaccaccatcagtaatcaggccgaggatcaagatgtccagatgatgaatgaaaaccaaatcattaccaacgcgaaacggaagcagagcgttgttgacccagccttacgtcccaaaacctgcatcagcgagaaggagacgagacgacggcgctgctgactggtgaaggagggagagctggtcctcccactatggtgggctccgtcagcagccccactcagtgcctgcgtccctcaccctcagtcccaggagctggaagcgaaccacagtgttgaggggagcccgctgggaagaggggactcgggaggacagccctggatactaccagagtgacagatggctgtggctgcagggcaaagagatcccctgcagttctgggttggccacagggagcccaggacacccgccttcatgcctctgctgtgagacccagcaaagcagggcccatgaccactagggcctgggctgaccctgactcagaacaggacaatgacggggtggggaggcatcccatccagcctcagagggcccagagaatggctgagcaggacagtgggagaccagaccctaccccgcaactccagtaagcagggcactgcccagggagactgccttcagaaacctgagcttcagcggccaacaccccccatcccctgcgcatccttgtctcatttggggactggtggagctggctgagaggttggggtagtttcctggttacaggggtccacaagaccctctctcatcccggtataggggcctctctcctctcatcgggcctgataagggattggccaaggctgtgtgcatcctgcagagggaaggaagtcagctgggccacccgccatccaccttggcaagagctgggcccactctggcaggccagggtatcatctgcgtgctgctgccgggccaggaagggtgggtgggtggccagcaggctggcagctccagaccccagagggccagaagaactcaccccagtgccctctggatgcaggtgttggggaacactgaggacaatcccccatctcccctcacccttgagcaggccctccctgcactctctgccacatgtccctcctggtctgatcacggctgtgctcactgatgtggctgctttctgtctctgcccctgtgcccttggaggcaggcagtgaggtgctcctttcccaggcccccaccccttctcccccttcagccacttcccagcgagttggaaatgtgccttgcacccccagccgagtgaagcccagaacgcatctatatgcatcgatgtaacaagctcggatcagggacctaattggtttcccagtagtgggtaatttctcgttgcaaatattaatccgttgtttttctggcgcccagcccggcccgccgcagtactgtactcgaggtacgttcctatgcaaccgagagccccggcaaatacttcatgagcttagcagcctgggctcgagcagctatgcaaacgcgcttttcatttggagcacggggctgatgtgaagataagaattgtttctcctggagaaagatccatcatttctccagcttccaagcccccggcacctctgctcagctcccagatgtgacgagcacctcccgccagggggagtcaggggttgatcaaaccagctcttgtgacccaaaccagtgccgctgcattaaagggaggcccagctactccttcccagctgagatgtgggtacaggtcagatttgtcagggagatggcactaacacgacacaagctcactcccagaaccgcagctgatgtttataataatcgtatgtactgtgcaatttaggaggggaaaaaaaggctgtacaagctttaactctaaaataaatttctatttttttcctcttgcaaaattaataaaagatgttattaagaataaaaac

SEQ ID NO: 355100 - DNA, 6462 bp, Homo sapiens
tcgtcttaggcttcttcagcttctcgaaacagagtcttcgtccataatcgtgtgtcccctccgtgtgggaggcacttctggagaagtcagagtgaatagctttccgcggtgatgatttcagcgccgaggatggcaccagaaatctgtgcagatcagaacagaagctggcccacggctccacatcgaacctcctgtggactattctgatgattttgagctgtgtggggatgtgactctccaggcaaacaacacttctgaggatcgtccgcaggataccaaatctcccaccagtaccaagccctgtggttttaacttctcccttctgaatgcatgtggacattctgacccttcaagcagcgtggacaaagaaaggatcctcttaactattcaggatgtgatggagctgagaagaagcctggaacttagtgtaaatctacaaaggaaacaaaaggattgttccagcgatgagtatgactctattgaggaagacatactctctgagcctgagccagaggacccggcactggtgggccatcccagacatgaccgccctccttccagtggcgactggactcagaaagatgttcacggggaacaggagacagaaggacgctcttctccaggcccagacaccctcgtggtgctggaatttaacccagcttccaaaagtcataaaagggaaaggaatttgtctgcaaagcggaaggacaatgctgaggttttcgttcccaccaaacctgagccaaacctgactccccaagctcctgctgtattcccagaccaggagaggatgtgctccagacctggaagccggcgagagagacccctgtctgcaacccgcaaaactctttgcgaggctgagtacccagaggaagatgcctctgctgtgctccaagccatccaggtggagaacgcagccctgcagagggcgctcctcagcagaaaggccgagcagccagccagcccactgcaggatgcagaaggaccaccagcaaaaccatggaccagtctgctggaggagaaggaagagacccttgagctgcttcccatcaccacggcgactactactcaggagccggccggggcagcaggaggagccagggccatcaaccaggccatggacagaattgggcttctgggaagcagacaacagcagaagcttctgaaagtcctccaggccgtcgaaagtgactctgcccatctcggcagggtggtttcaccaaccaaggagcaagtatcagacacagaggacaaacagagaatgagggcagacgagatcaaagatgccatctacgtgaccatggagatcctgtccaactggggcaactcgtggtgggtgggtctcacagaagtcgagttctttgacttgaatgacacaaagctttatgtgtcgccccacgatgtggatatccggaacacagccacgcctggggagctgggccgcctcgtcaacaggaacttagctggcaagaaagactcctccccgtggacctgccccttccacccaccactccagctgttttttgttattcgaaacacaagacagctgggggacttccatctggccaagatcaaggttcggaattactggacagctgatggcgatcttgacattggtgccaagaacgtgaagctttacgtcaacagaaacctcatcttcaatggcaagttagacaaaggagatagggaggccccagctgaccacagcatcctggttgaccagaagaacgagaagagcgagcaactagaggaggccatgaacgctcactcggaagaaagcaaaggcacccatgagatggctggtgccagcggggacaaggagcttggtctcggttgctcaccgccagctgaaacattagcggatgcaaagctttcttcacaaggaaatgtgtctggcaaaagaaagaattctactaattgcaggaaagacagtttgtcccagttagaggaatatttgagactgtcggcagtccccacttcgatgggtgacatgcccagtgctcctgccacttccccacctgtgaagtgccctcctgtccatgaggagccctctctcatccaacaactggaaaacctcatgggcagaaaaatctgtgagccacccgggaaaaccccatcctggttacaaccttctcccaccggcaaggacaggaagcagggaggcaggaagccaaaacccctctggcttagtcccgagaagcccctggcctggaagggcaggctcccatcagacgatgtcatcggtgagggtcctggagagaccgaggccagggataaaggcctacggcatgagccagggtgggggaccagccggagtgtcaacaccaaggagagaccccagagggcaaccaccaaagtccacagtgatgactcagacatctttaaccagccccccaacagagagcgccctgctagtgggaggaggggctcaaggaaggatgctggcagcagtagtcatggggacgaccagccagccagcagagaagacacctggtcttccaggacgccgtcacggtcaaggtggcgcagtgagcaggagcacacacttcacgagtcatggagctccctcagtgccttcgaccgctcccaccggggacgcatctccaacacggagctcccgggggacatcctggatgagctcctgcagcaaaagagcagccggcacagcgacttgcccccctccaagaagggggagcagccagggctgtcgagagggcaggatggctactctggagagacagacgctgggggtgactttaaaatccccgtcttgccttatggacagcgcttggtcattgacatcaagtctacctggggggacagacactatgtcggcctcaacggaatagaaatattcagttccaagggtgaaccggtgcagatttcaaacataaaagcagaccctcccgatatcaatattttaccagcctatgggaaagacccccgcgtggtcaccaacctcatcgacggggtgaacaggacccaggatgacatgcatgtctggctggcccccttcacgcggggcagatcccactccatcaccattgacttcacgcacccttgccacgttgccctgatcagaatttggaactacaataaatctcggatacattccttccgaggcgtgaaggacatcacaatgctgttagacacccagtgcatctttgaaggagaaatcgccaaggcctctggaaccctggcgggagccccagagcactttggagacacgatcttattcacaaccgatgatgacattctcgaggccatattctattctgatgagatgtttgacctggatgtggggagcctggacagcctgcaggatgaagaggcaatgaggaggcccagcacggccgacggcgagggggatgagcggcccttcacccaggctggcttgggggctgatgaacggatcccggagctagagctcccatccagttcccctgtcccccaagtcaccacgccagagccaggcatctaccacggaatctgccttcagctgaatttcactgcctcctggggagacttgcactacctggggctcactggcctggaagtggtgggcaaggagggccaggcgctgcccatccacctgcaccagatctctgcttcccccagagacttaaatgagctccccgagtactctgacgactcccggaccctggacaagttaattgatggcaccaacatcaccatggaggatgagcatatgtggctgatccccttctcgccggggctggaccatgtggtcacgatccgcctggacagggccgaaagcatcgcaggcctgcgcttctggaactacaataaatctcccgaggacacctatcgcggggccaagattgtccacgtctccctggatggcctgtgcgtctccccgccagagggctttctcatccggaaggggccaggcaactgccactttgattttgctcaagaaatcctcttcgtggactacctacgggctcagctgctgccccagccggccaggaggctggacatgagaagcctggagtgtgcaagcatggactacgaggcaccgctgatgccctgtggcttcattttccagtttcagcttctcaccagctggggcgacccctactacatcggcctcaccggcctggagctgtatgacgagcgaggagaaaaaatccccttgtcggaaaacaatattgcggccttccccgacagcgtgaactccctggagggtgtgggcggggacgtccgcaccccagacaagctcatcgaccaagtgaacgacaccagtgatggccggcacatgtggctggctcccatcctgccgggcctggtgaaccgggtttatgtgattttcgatctgcctaccaccgtgtcaatgatcaaactgtggaattatgcgaaaacaccccatcgaggggtgaaggagtttggcctcctggtggacgacctgcttgtgtacaatgggatcctggccatggtgagccacctggtggggggcatcctgcccacatgtgagcccaccgtgccctaccacaccatcctcttcaccgaggacagggacatccgccaccaggagaaacacaccaccatcagtaatcaggccgaggatcaagatgtccagatgatgaatgaaaaccaaatcattaccaacgcgaaacggaagcagagcgttgttgacccagccttacgtcccaaaacctgcatcagcgagaaggagacgagacgacggcgctgctgactggtgaaggagggagagctggtcctcccactatggtgggctccgtcagcagccccactcagtgcctgcgtccctcaccctcagtcccaggagctggaagcgaaccacagtgttgaggggagcccgctgggaagaggggactcgggaggacagccctggatactaccagagtgacagatggctgtggctgcagggcaaagagatcccctgcagttctgggttggccacagggagcccaggacacccgccttcatgcctctgctgtgagacccagcaaagcagggcccatgaccactagggcctgggctgaccctgactcagaacaggacaatgacggggtggggaggcatcccatccagcctcagagggcccagagaatggctgagcaggacagtgggagaccagaccctaccccgcaactccagtaagcagggcactgcccagggagactgccttcagaaacctgagcttcagcggccaacaccccccatcccctgcgcatccttgtctcatttggggactggtggagctggctgagaggttggggtagtttcctggttacaggggtccacaagaccctctctcatcccggtataggggcctctctcctctcatcgggcctgataagggattggccaaggctgtgtgcatcctgcagagggaaggaagtcagctgggccacccgccatccaccttggcaagagctgggcccactctggcaggccagggtatcatctgcgtgctgctgccgggccaggaagggtgggtgggtggccagcaggctggcagctccagaccccagagggccagaagaactcaccccagtgccctctggatgcaggtgttggggaacactgaggacaatcccccatctcccctcacccttgagcaggccctccctgcactctctgccacatgtccctcctggtctgatcacggctgtgctcactgatgtggctgctttctgtctctgcccctgtgcccttggaggcaggcagtgaggtgctcctttcccaggcccccaccccttctcccccttcagccacttcccagcgagttggaaatgtgccttgcacccccagccgagtgaagcccagaacgcatctatatgcatcgatgtaacaagctcggatcagggacctaattggtttcccagtagtgggtaatttctcgttgcaaatattaatccgttgtttttctggcgcccagcccggcccgccgcagtactgtactcgaggtacgttcctatgcaaccgagagccccggcaaatacttcatgagcttagcagcctgggctcgagcagctatgcaaacgcgcttttcatttggagcacggggctgatgtgaagataagaattgtttctcctggagaaagatccatcatttctccagcttccaagcccccggcacctctgctcagctcccagatgtgacgagcacctcccgccagggggagtcaggggttgatcaaaccagctcttgtgacccaaaccagtgccgctgcattaaagggaggcccagctactccttcccagctgagatgtgggtacaggtcagatttgtcagggagatggcactaacacgacacaagctcactcccagaaccgcagctgatgtttataataatcgtatgtactgtgcaatttaggaggggaaaaaaaggctgtacaagctttaactctaaaataaatttctatttttttcctcttgcaaaattaataaaagatgttattaagaataaaaac

SEQ ID NO: 355101 - DNA, 5578 bp, Homo sapiens
gctccaggcagttgctgtcaccctcacattcctgttcctgttttctacaaagggactgtcagcctgagcatgcctgcccttgaccgtgaccctgctgtgtcttaggccaggagtgttgcctgagacatctgtttaataagcctttccatcctcagctgcttcccatcaccacggcgactactactcaggagccggccggggcagcaggaggagccagggccatcaaccaggccatggacagaattgggcttctgggaagcagacaacagcagaagcttctgaaagtcctccaggccgtcgaaagtgactctgcccatctcggcagggtggtttcaccaaccaaggagcaagtatcagacacagaggacaaacagagaatgagggcagacgagatcaaagatgccatctacgtgaccatggagatcctgtccaactggggcaactcgtggtgggtgggtctcacagaagtcgagttctttgacttgaatgacacaaagctttatgtgtcgccccacgatgtggatatccggaacacagccacgcctggggagctgggccgcctcgtcaacaggaacttagctggcaagaaagactcctccccgtggacctgccccttccacccaccactccagctgttttttgttattcgaaacacaagacagctgggggacttccatctggccaagatcaaggttcggaattactggacagctgatggcgatcttgacattggtgccaagaacgtgaagctttacgtcaacagaaacctcatcttcaatggcaagttagacaaaggagatagggaggccccagctgaccacagcatcctggttgaccagaagaacgagaagagcgagcaactagaggaggccatgaacgctcactcggaagaaagcaaaggcacccatgagatggctggtgccagcggggacaaggagcttggtctcggttgctcaccgccagctgaaacattagcggatgcaaagctttcttcacaaggaaatgtgtctggcaaaagaaagaattctactaattgcaggaaagacagtttgtcccagttagaggaatatttgagactgtcggcagtccccacttcgatgggtgacatgcccagtgctcctgccacttccccacctgtgaagtgccctcctgtccatgaggagccctctctcatccaacaactggaaaacctcatgggcagaaaaatctgtgagccacccgggaaaaccccatcctggttacaaccttctcccaccggcaaggacaggaagcagggaggcaggaagccaaaacccctctggcttagtcccgagaagcccctggcctggaagggcaggctcccatcagacgatgtcatcggtgagggtcctggagagaccgaggccagggataaaggcctacggcatgagccagggtgggggaccagccggagtgtcaacaccaaggagagaccccagagggcaaccaccaaagtccacagtgatgactcagacatctttaaccagccccccaacagagagcgccctgctagtgggaggaggggctcaaggaaggatgctggcagcagtagtcatggggacgaccagccagccagcagagaagacacctggtcttccaggacgccgtcacggtcaaggtggcgcagtgagcaggagcacacacttcacgagtcatggagctccctcagtgccttcgaccgctcccaccggggacgcatctccaacacggagctcccgggggacatcctggatgagctcctgcagcaaaagagcagccggcacagcgacttgcccccctccaagaagggggagcagccagggctgtcgagagggcaggatggctactctggagagacagacgctgggggtgactttaaaatccccgtcttgccttatggacagcgcttggtcattgacatcaagtctacctggggggacagacactatgtcggcctcaacggaatagaaatattcagttccaagggtgaaccggtgcagatttcaaacataaaagcagaccctcccgatatcaatattttaccagcctatgggaaagacccccgcgtggtcaccaacctcatcgacggggtgaacaggacccaggatgacatgcatgtctggctggcccccttcacgcggggcagatcccactccatcaccattgacttcacgcacccttgccacgttgccctgatcagaatttggaactacaataaatctcggatacattccttccgaggcgtgaaggacatcacaatgctgttagacacccagtgcatctttgaaggagaaatcgccaaggcctctggaaccctggcgggagccccagagcactttggagacacgatcttattcacaaccgatgatgacattctcgaggccatattctattctgatgagatgtttgacctggatgtggggagcctggacagcctgcaggatgaagaggcaatgaggaggcccagcacggccgacggcgagggggatgagcggcccttcacccaggctggcttgggggctgatgaacggatcccggagctagagctcccatccagttcccctgtcccccaagtcaccacgccagagccaggcatctaccacggaatctgccttcagctgaatttcactgcctcctggggagacttgcactacctggggctcactggcctggaagtggtgggcaaggagggccaggcgctgcccatccacctgcaccagatctctgcttcccccagagacttaaatgagctccccgagtactctgacgactcccggaccctggacaagttaattgatggcaccaacatcaccatggaggatgagcatatgtggctgatccccttctcgccggggctggaccatgtggtcacgatccgcctggacagggccgaaagcatcgcaggcctgcgcttctggaactacaataaatctcccgaggacacctatcgcggggccaagattgtccacgtctccctggatggcctgtgcgtctccccgccagagggctttctcatccggaaggggccaggcaactgccactttgattttgctcaagaaatcctcttcgtggactacctacgggctcagctgctgccccagccggccaggaggctggacatgagaagcctggagtgtgcaagcatggactacgaggcaccgctgatgccctgtggcttcattttccagtttcagcttctcaccagctggggcgacccctactacatcggcctcaccggcctggagctgtatgacgagcgaggagaaaaaatccccttgtcggaaaacaatattgcggccttccccgacagcgtgaactccctggagggtgtgggcggggacgtccgcaccccagacaagctcatcgaccaagtgaacgacaccagtgatggccggcacatgtggctggctcccatcctgccgggcctggtgaaccgggtttatgtgattttcgatctgcctaccaccgtgtcaatgatcaaactgtggaattatgcgaaaacaccccatcgaggggtgaaggagtttggcctcctggtggacgacctgcttgtgtacaatgggatcctggccatggtgagccacctggtggggggcatcctgcccacatgtgagcccaccgtgccctaccacaccatcctcttcaccgaggacagggacatccgccaccaggagaaacacaccaccatcagtaatcaggccgaggatcaagatgtccagatgatgaatgaaaaccaaatcattaccaacgcgaaacggaagcagagcgttgttgacccagccttacgtcccaaaacctgcatcagcgagaaggagacgagacgacggcgctgctgactggtgaaggagggagagctggtcctcccactatggtgggctccgtcagcagccccactcagtgcctgcgtccctcaccctcagtcccaggagctggaagcgaaccacagtgttgaggggagcccgctgggaagaggggactcgggaggacagccctggatactaccagagtgacagatggctgtggctgcagggcaaagagatcccctgcagttctgggttggccacagggagcccaggacacccgccttcatgcctctgctgtgagacccagcaaagcagggcccatgaccactagggcctgggctgaccctgactcagaacaggacaatgacggggtggggaggcatcccatccagcctcagagggcccagagaatggctgagcaggacagtgggagaccagaccctaccccgcaactccagtaagcagggcactgcccagggagactgccttcagaaacctgagcttcagcggccaacaccccccatcccctgcgcatccttgtctcatttggggactggtggagctggctgagaggttggggtagtttcctggttacaggggtccacaagaccctctctcatcccggtataggggcctctctcctctcatcgggcctgataagggattggccaaggctgtgtgcatcctgcagagggaaggaagtcagctgggccacccgccatccaccttggcaagagctgggcccactctggcaggccagggtatcatctgcgtgctgctgccgggccaggaagggtgggtgggtggccagcaggctggcagctccagaccccagagggccagaagaactcaccccagtgccctctggatgcaggtgttggggaacactgaggacaatcccccatctcccctcacccttgagcaggccctccctgcactctctgccacatgtccctcctggtctgatcacggctgtgctcactgatgtggctgctttctgtctctgcccctgtgcccttggaggcaggcagtgaggtgctcctttcccaggcccccaccccttctcccccttcagccacttcccagcgagttggaaatgtgccttgcacccccagccgagtgaagcccagaacgcatctatatgcatcgatgtaacaagctcggatcagggacctaattggtttcccagtagtgggtaatttctcgttgcaaatattaatccgttgtttttctggcgcccagcccggcccgccgcagtactgtactcgaggtacgttcctatgcaaccgagagccccggcaaatacttcatgagcttagcagcctgggctcgagcagctatgcaaacgcgcttttcatttggagcacggggctgatgtgaagataagaattgtttctcctggagaaagatccatcatttctccagcttccaagcccccggcacctctgctcagctcccagatgtgacgagcacctcccgccagggggagtcaggggttgatcaaaccagctcttgtgacccaaaccagtgccgctgcattaaagggaggcccagctactccttcccagctgagatgtgggtacaggtcagatttgtcagggagatggcactaacacgacacaagctcactcccagaaccgcagctgatgtttataataatcgtatgtactgtgcaatttaggaggggaaaaaaaggctgtacaagctttaactctaaaataaatttctatttttttcctcttgcaaaattaataaaagatgttattaagaataaaaac

SEQ ID NO: 355102 - DNA, 2354 bp, Homo sapiens
ttgttgcaaatgcagccacacgtgacctgactcaagatgggcttcgaggagatgaaagggggcggaactccaggctggcccacgtggcaggcgctgccttgggcaccaccgctcaccccagcccacgcctggcacccccagcccagccaagcgcctctgtttccaaacatgcctgttttaattagtgccgctctctgacaggtgaaccgggtttatgtgattttcgatctgcctaccaccgtgtcaatgatcaaactgtggaattatgcgaaaacaccccatcgaggggtgaaggagtttggcctcctggtggacgacctgcttgtgtacaatgggatcctggccatggtgagccacctggtggggggcatcctgcccacatgtgagcccaccgtgccctaccacaccatcctcttcaccgaggacagggacatccgccaccaggagaaacacaccaccatcagtaatcaggccgaggatcaagatgtccagatgatgaatgaaaaccaaatcattaccaacgcgaaacggaagcagagcgttgttgacccagccttacgtcccaaaacctgcatcagcgagaaggagacgagacgacggcgctgctgactggtgaaggagggagagctggtcctcccactatggtgggctccgtcagcagccccactcagtgcctgcgtccctcaccctcagtcccaggagctggaagcgaaccacagtgttgaggggagcccgctgggaagaggggactcgggaggacagccctggatactaccagagtgacagatggctgtggctgcagggcaaagagatcccctgcagttctgggttggccacagggagcccaggacacccgccttcatgcctctgctgtgagacccagcaaagcagggcccatgaccactagggcctgggctgaccctgactcagaacaggacaatgacggggtggggaggcatcccatccagcctcagagggcccagagaatggctgagcaggacagtgggagaccagaccctaccccgcaactccagtaagcagggcactgcccagggagactgccttcagaaacctgagcttcagcggccaacaccccccatcccctgcgcatccttgtctcatttggggactggtggagctggctgagaggttggggtagtttcctggttacaggggtccacaagaccctctctcatcccggtataggggcctctctcctctcatcgggcctgataagggattggccaaggctgtgtgcatcctgcagagggaaggaagtcagctgggccacccgccatccaccttggcaagagctgggcccactctggcaggccagggtatcatctgcgtgctgctgccgggccaggaagggtgggtgggtggccagcaggctggcagctccagaccccagagggccagaagaactcaccccagtgccctctggatgcaggtgttggggaacactgaggacaatcccccatctcccctcacccttgagcaggccctccctgcactctctgccacatgtccctcctggtctgatcacggctgtgctcactgatgtggctgctttctgtctctgcccctgtgcccttggaggcaggcagtgaggtgctcctttcccaggcccccaccccttctcccccttcagccacttcccagcgagttggaaatgtgccttgcacccccagccgagtgaagcccagaacgcatctatatgcatcgatgtaacaagctcggatcagggacctaattggtttcccagtagtgggtaatttctcgttgcaaatattaatccgttgtttttctggcgcccagcccggcccgccgcagtactgtactcgaggtacgttcctatgcaaccgagagccccggcaaatacttcatgagcttagcagcctgggctcgagcagctatgcaaacgcgcttttcatttggagcacggggctgatgtgaagataagaattgtttctcctggagaaagatccatcatttctccagcttccaagcccccggcacctctgctcagctcccagatgtgacgagcacctcccgccagggggagtcaggggttgatcaaaccagctcttgtgacccaaaccagtgccgctgcattaaagggaggcccagctactccttcccagctgagatgtgggtacaggtcagatttgtcagggagatggcactaacacgacacaagctcactcccagaaccgcagctgatgtttataataatcgtatgtactgtgcaatttaggaggggaaaaaaaggctgtacaagctttaactctaaaataaatttctatttttttcctcttgcaaaattaataaaagatgttattaagaataaaaac

SEQ ID NO: 355103 - DNA, 1991 bp, Homo sapiens
taacctcgtacctgggttgacgtgagcttccggttcgagctcccggaaccgccgcctctagggatggacggtcagactctgcgaaaggccgagagaagctggtcctgctcacgagagaaaaaggagggttacgctaaggacatggtgacagactttgatgagaaacatgatgagtatttaatattgcttcagcagaggaaccggatattaaagcatttgaaaagcaaggaccccgtgcaattgaggctggagcacttggagcaaggtttctctgtctatgtcaacggtgccaattcggagctgaaatcatcaccgcggaaagctattcactctgacttctccagaagtgcctcccacacggaggggacacacgattatggacgaagaactctgtttcgagaagctgaagaagccttaagacgcagttcacggacagcccccagtaaagtccagcgccgaggatggcaccagaaatctgtgcagatcagaacagaagctggcccacggctccacatcgaacctcctgtggactattctgatgattttgagctgtgtggggatgtgactctccaggcaaacaacacttctgaggatcgtccgcaggataccaaatctcccaccagtaccaagccctgtggttttaacttctcccttctgaatgcatgtggacattctgacccttcaagcagcgtggacaaagaaaggatcctcttaactattcaggatgtgatggagctgagaagaagcctggaacttagtgtaaatctacaaaggaaacaaaaggattgttccagcgatgagtatgactctattgaggaagacatactctctgagcctgagccagaggacccggcactggtgggccatcccagacatgaccgccctccttccagtggcgactggactcagaaagatgttcacggggaacaggagacagaaggacgctcttctccaggcccagacaccctcgtggtgctggaatttaacccagcttccaaaagtcataaaagggaaaggaatttgtctgcaaagcggaaggacaatgctgaggttttcgttcccaccaaacctgagccaaacctgactccccaagctcctgctgtattcccagaccaggagaggatgtgctccagacctggaagccggcgagagagacccctgtctgcaacccgcaaaactctttgcgaggctgagtacccagaggaagatgcctctgctgtgctccaagccatccaggtggagaacgcagccctgcagagggcgctcctcagcagaaaggccgagcagccagccagcccactgcaggatgcagaaggaccaccagcaaaaccatggaccagtctgctggaggagaaggaagagacccttgagctgcttcccatcaccacggcgactactactcaggagccggccggggcagcaggaggagccagggccatcaaccaggccatggacagaattgggcttctgggaagcagacaacagcagaagcttctgaaagtcctccaggccgtcgaaagtgactctgcccatctcggcagggtggtttcaccaaccaaggagcaagtatcagacacagaggacaaacagagaatgagggcagacgagatcaaagatgccatctacgtgaccatggagatcctgtccaactggggcaactcgtggtgggtgggtctcacagaagtcgagttctttgacttgaatgacacaaagctttatgtgtcgccccacgatgtggatatccggaacacagccacgcctggggagctgggccgcctcgtcaacaggaacttagctggcaagaaagactcctccccgtggacctgccccttccacccaccactccagctgttttttgttattcgaaacacaagacagctgggggacttccatctggccaagatcaaggttcggaattactggacagctgatggcgatcttgacagttggttgccaagcacgtgaagctatagcgtcttactagttacctc

SEQ ID NO: 355104 - DNA, 866 bp, Homo sapiens
  misc_feature (739)..(739): n is a, c, g, or t
agccggctgtccggtggccgcgctgtggccgccggtggccgttaggctacctgaggccgttccttctggtctctctctcctgggccgcggagagaccgtctccctgccgttacagcaggccccatcccagcgcccagccgtacttggggaaaggccggttgcgattccggggctttcccgccagagctgggtcttctctggggagagctgttttcaccgggaagctcggctttctgtggtaccggcttcatctcccgccttccttgagacccgagtgatatttcttgactacttctgcgtctcacgtaaacatttctccaactctcctactctgtggtatctccctgagatgtgatatcgctagtgccaccatcagaaagaaacgtctggaccctcctgctcaggttatgaaaatccccttaactgccacaatttgcttacctggctcatcgcctcctggactttgtatctttgctaaagtcagtgatgtgaaaagacttgaaatggatgatattgctgataggatgaggatggatgctggagaagtgactttagtgaaccacaactccgtattcaaaacccacctcctgccacaaacaggttttccagaggaccagctttcgctttctgaccagcagattttatcttccaggcaaggacatttggaccgatcttttacatgttccacaagaagtgcagcttataatccaagctattactcagataatctttctccganaggtttctggctcaggcgatttaggaacctggcagagtgcatggcagtggaatttcccatggaggtctttaaaatcagaatgtgaggttactgaacgaaaccggtggataagtgggtagtcacatgt

SEQ ID NO: 355105 - DNA, 864 bp, Homo sapiens
gagcggggaaaccccttcgcatggcagccggttccggttcggactttgtatctttgctaaagtcagtgatgtgaaaagacttgaaatggatgatattgctgataggatgaggatggatgctggagaagtgactttagtgaaccacaactccgtattcaaaacccacctcctgccacaaacaggttttccagaggaccagctttcgctttctgaccagcagattttatcttccaggcaaggacatttggaccgatcttttacatgttccacaagaagtgcagcttataatccaagctattactcagatgacgatttaattcaagatttcttgtggatggactgctgctgtaaaattgcagacaagtatcttttggctatgacctttgtttatttcaagagggctaaatttactataagtgagcataccaggataaatttctttattgctctgtatctggctaatacagttgaagaagatgaagaagaaaccaagtacgaaatttttccatgggctttagggaaaaactggagaaaattgttccctaatttcttaaagttaagggaccagctctgggatagaattgactatagggctattgtaagcaggcgatgttgtgaggaggttatggccattgcaccaagccattatatctggcaaagagaacgttctgttcatcacagtggagctgtcagaaactacaacagagatgaagttcagctgccccggggaccctagttgcacaccagtagactgttcactctgtggtaaaaaaagaagatctgttagactgggattgtcttcatcatcatcttaatccagtcatacagcaggggtgacagaaaaactttcaggactcatacaaa

SEQ ID NO: 355106 - DNA, 429 bp, Homo sapiens
ggttcaagtgattcttctgcctcggctttgcaaagtgctgagattataggcatgagccactgcacctggcttatagtcttgtttaattatatatttttcctagtatatgtttttattttattgttaaaaaagtgacatggccgggcgcggtcgtcacgcctgtaatcccagcattttgggaggccgaggtgggcggatcacctgaggtcaggagttcaagaccagcctggccaacatggtgaaaccccgtctctactaaaaatacaaaaattagccaggtgtgatggcgcgtgcctgtaatcccagctactcaggaggctgaggcaggagaatcacttgaactcaggaggcggaggttgcagtgagcagagattgtgccggtgtactccagcctgggcaacaagagtgagactgtctcaaaaaaaaaaa

SEQ ID NO: 355107 - DNA, 312 bp, Homo sapiens
aacacaggagaaaaaagtcttatttagtttaaagtaaattacataagatattaataacatgcctttgggccataaaatgcagaaatacctttttttttttcctggtcatcaaagcctacccctaaacaaggtagaagttagtgaccctgagaccatcttaccaccctggacctggtccaaatacagacttacacagtggaccattctttcctgagctagccaacaagagcaggagtagtatctggaaactttcccctttgtttaggggtaggctttgatgaccaggaaaaaaaaaaaggtatttctgcattt

SEQ ID NO: 355108 - DNA, 4358 bp, Homo sapiens
  misc_feature (8)..(8): n is a, c, g, or t
agcgggcntggcagccggttccggttcggactttgtatctttgctaaagtcagtgatgtgaaaagacttgaaatggatgatattgctgataggatgaggatggatgctggagaagtgactttagtgaaccacaactccgtattcaaaacccacctcctgccacaaacaggttttccagaggaccagctttcgctttctgaccagcagattttatcttccaggcaaggacatttggaccgatcttttacatgttccacaagaagtgcagcttataatccaagctattactcagataatccttcctcagacagttttcttggctcaggcgatttaagaacctttggccagagtgcaaatggccaatggagaaattctaccccatcgtcaagctcatctttacaaaaatcaagaaacagccgaagtctttacctcgaaacccgaaagacctcaagtggattatcaaacagttttgcgggaaagtcaaaccatcactgccatgtatctgcatatgaaaaatcttttcctattaaacctgttccaagtccatcttggagtggttcatgtcgtcgaagtcttttgagccccaagaaaactcagaggcgacatgttagtacagcagaagagacagttcaagaagaagaaagagagatttacagacagctgctacagatggtcacagggaaacagtttactatagccaaacccaccacacattttcctttacacctgtctcgatgtcttagttccagtaaaaatactttgaaagactcactgtttaaaaatggaaactcttgtgcatctcagatcattggctctgatacttcatcatctggatctgccagcattttaactaaccaggaacagctgtcccacagtgtatattccctatcttcttataccccagatgttgcatttggatccaaagattctggtactcttcatcatccccatcatcaccactctgttccacatcagccagataacttagcagcttcaaatacacaatctgaaggatcagactctgtgattttactgaaagtgaaagattcccagactccaactcccagttctactttcttccaggcagagctgtggatcaaagaattaactagtgtttatgattctcgagcacgagaaagattgcgccagattgaagaacagaaggcattggccttacagcttcaaaaccagagattgcaggagcgggaacattcagtacatgattcagtagaactacatcttcgtgtacctcttgaaaaggagattcctgttactgttgtccaagaaacacaaaaaaaaggtcataaattaactgatagtgaagatgaatttcctgaaattacagaggaaatggagaaagaaataaagaatgtatttcgtaatgggaatcaggatgaagttctcagtgaagcatttcgcctgaccattacacgcaaagatattcaaactctaaaccatctgaattggctcaatgatgagatcatcaatttctacatgaatatgctgatggagcgaagtaaagagaagggcttgccaagtgtgcatgcatttaatacctttttcttcactaaattaaaaacggctggttatcaggcagtgaaacgttggacaaagaaagtagatgtattttctgttgacattcttttggtgcccattcacctgggagtacactggtgtctagctgttgtggactttagaaagaagaatattacctattacgactccatgggtgggataaacaatgaagcctgcagaatactcttgcaatacctaaagcaagaaagcattgacaagaaaaggaaagagtttgacaccaatggctggcagcttttcagcaagaaaagccaggagattcctcagcagatgaatggaagtgactgtgggatgtttgcctgcaaatatgctgactgtattaccaaagacagaccaatcaacttcacacagcaacacatgccatacttccggaagcggatggtctgggagatcctccaccgaaaactcttgtgaagactgtctcacttagcagaccttgaccatgtgggggaccagctctttgttgtctacagccagagaccttggaaacagctgctcccagccctctgctgttgtaacacccttgatcctggaccaggccctggcgagatgcattcacaagcacatctgcctttccttttgtatctcagatactatttttgcaaagaaactttggtgctgtgaaaggggtgagggacatccctaagctgaagagagagactgcttttcacttcttcagttctgccatcttgttttcaaagggctccagcctcactcagtccctaattatgggactgagaaaagcttggaaagaatcttggtttcatataaattcttgttgttaggccttactaagaagtaggaaagggcatgggcaaaaggtagggataaaaaccaccagcatatacatggacatacacacacacccacacacacaaacacacacacacacacaattttcacgatgtatggtcaggaatgtgactgtaaactggactttggggcccaggcataagtcccttcctccaggacctttcctatttatatgtccctatacaaaatccatctgcttttatacgtagctgttttatcatctgtagcttcatcctatccggaggcacagcacatgagccctggacaggtcccaaagttccaagcagtcctttccgtaaaagcaggggtttgcatgtgctaccaacacatgatacggggaagacccacccagggagcggtttcagtggcgcaacaaagcaccacttttactgttgcctacttctgaccaagaagaaaaaggaccttagtatttagcataaaattccagcgctggatgaatgcagatctagtttggtctgtggctagtttaaatatgtttctaaccacagagaatttcatatatatatacatatatatatacacatacatatatatatatatatatgtatgtataaaatttcacagggatatgcttttttttttaaagactgaatgtgttcaccatttagcctgtagatttatttccattttccaaattccagcacacagagatcccagcccctatgagtagggtgtttgtggactacctaatggaatatttttgaggcctggatgaactttgccatatgggtagaggttacagagggaggtgatattttcagctaaaaaaaaaaacgggtggagtttggactgatcaacttgagatttaaaaactgctattccttttgttctttctagcatctctccccaccctctgagagctcctcaggcttagatagtgaagtgatcaaatgccagtgtcattttgtacttaagttccaaagtaggaacattttatacttttttctgtattgtaataggtagttttgtatgaaatcttttctcctctcccgttgtaccgcattctttccagcattgtgctttttccctgggcttatttgaaaattttactgttttatacaagctcgtttagtacatttttctatgttttaccacaagttacaatttgaaaagaaaactattttttttaaatattccattgttaactgaatgttactgtttccactccagcaactacatgtcctcccttcaactgcctgccttttggggaaagaccaccttttgtgtgtttgttttttctctctctttctttccctttctctttctatctctctttatttttctttctttttctttgtttttgagttttctataggaaataaatagctttctatatatgagttgctggggaccttcacattctcttttagaaagctgtggcatgcagtctcattgcaggactcctggaatattgtctggttcttggtatttactgtatgtaagcaacaacttgaaaggtggcaatatggtgtcgatttggactatgaatcaaaagacctttttcaggttctttcactattgtctgggggactcagaacaagattgttctctgtatttattgtttgtccatttaggtaacatctgtcttaccttcctcacagactttgtacagaccaaagcaacaaatatttattgccatgtatagcagaaaatgaaacatgcaacaaaagcactttgaaaaatatataaggaattgttgagcctgtctgaatttgggccccctttctgactaatgcagttttgcacaaggtagaagttagtgaccctgagaccatcttaccaccctggacctggtccaaatacagacttacacagtggaccattctttcctgagctagccaacaagagcaggagtagtatctggaaactttcccctttgtttaggggtaggctttgatgaccaggaaaaaaaaaaaggtatttctgcattt

SEQ ID NO: 355109 - DNA, 4502 bp, Homo sapiens
gagcggggaaaccccttcgcatggcagccggttccggttcggactttgtatctttgctaaagtcagtgatgtgaaaagacttgaaatggatgatattgctgataggatgaggatggatgctggagaagtgactttagtgaaccacaactccgtattcaaaacccacctcctgccacaaacaggttttccagaggaccagctttcgctttctgaccagcagattttatcttccaggcaaggacatttggaccgatcttttacatgttccacaagaagtgcagcttataatccaagctattactcaggcccaggcctgggagtgcttgcaagatatagttggggtaaaatgttgacttttggtggacaccacggagtcacattgatgcagataaggcacatggctgtggcaggattcagctccttcatcaattttcagataatccttcctcagacagttttcttggctcaggcgatttaagaacctttggccagagtgcaaatggccaatggagaaattctaccccatcgtcaagctcatctttacaaaaatcaagaaacagccgaagtctttacctcgaaacccgaaagacctcaagtggattatcaaacagttttgcgggaaagtcaaaccatcactgccatgtatctgcatatgaaaaatcttttcctattaaacctgttccaagtccatcttggagtggttcatgtcgtcgaagtcttttgagccccaagaaaactcagaggcgacatgttagtacagcagaagagacagttcaagaagaagaaagagagatttacagacagctgctacagatggtcacagggaaacagtttactatagccaaacccaccacacattttcctttacacctgtctcgatgtcttagttccagtaaaaatactttgaaagactcactgtttaaaaatggaaactcttgtgcatctcagatcattggctctgatacttcatcatctggatctgccagcattttaactaaccaggaacagctgtcccacagtgtatattccctatcttcttataccccagatgttgcatttggatccaaagattctggtactcttcatcatccccatcatcaccactctgttccacatcagccagataacttagcagcttcaaatacacaatctgaaggatcagactctgtgattttactgaaagtgaaagattcccagactccaactcccagttctactttcttccaggcagagctgtggatcaaagaattaactagtgtttatgattctcgagcacgagaaagattgcgccagattgaagaacagaaggcattggccttacagcttcaaaaccagagattgcaggagcgggaacattcagtacatgattcagtagaactacatcttcgtgtacctcttgaaaaggagattcctgttactgttgtccaagaaacacaaaaaaaaggtcataaattaactgatagtgaagatgaatttcctgaaattacagaggaaatggagaaagaaataaagaatgtatttcgtaatgggaatcaggatgaagttctcagtgaagcatttcgcctgaccattacacgcaaagatattcaaactctaaaccatctgaattggctcaatgatgagatcatcaatttctacatgaatatgctgatggagcgaagtaaagagaagggcttgccaagtgtgcatgcatttaatacctttttcttcactaaattaaaaacggctggttatcaggcagtgaaacgttggacaaagaaagtagatgtattttctgttgacattcttttggtgcccattcacctgggagtacactggtgtctagctgttgtggactttagaaagaagaatattacctattacgactccatgggtgggataaacaatgaagcctgcagaatactcttgcaatacctaaagcaagaaagcattgacaagaaaaggaaagagtttgacaccaatggctggcagcttttcagcaagaaaagccaggagattcctcagcagatgaatggaagtgactgtgggatgtttgcctgcaaatatgctgactgtattaccaaagacagaccaatcaacttcacacagcaacacatgccatacttccggaagcggatggtctgggagatcctccaccgaaaactcttgtgaagactgtctcacttagcagaccttgaccatgtgggggaccagctctttgttgtctacagccagagaccttggaaacagctgctcccagccctctgctgttgtaacacccttgatcctggaccaggccctggcgagatgcattcacaagcacatctgcctttccttttgtatctcagatactatttttgcaaagaaactttggtgctgtgaaaggggtgagggacatccctaagctgaagagagagactgcttttcacttcttcagttctgccatcttgttttcaaagggctccagcctcactcagtccctaattatgggactgagaaaagcttggaaagaatcttggtttcatataaattcttgttgttaggccttactaagaagtaggaaagggcatgggcaaaaggtagggataaaaaccaccagcatatacatggacatacacacacacccacacacacaaacacacacacacacacaattttcacgatgtatggtcaggaatgtgactgtaaactggactttggggcccaggcataagtcccttcctccaggacctttcctatttatatgtccctatacaaaatccatctgcttttatacgtagctgttttatcatctgtagcttcatcctatccggaggcacagcacatgagccctggacaggtcccaaagttccaagcagtcctttccgtaaaagcaggggtttgcatgtgctaccaacacatgatacggggaagacccacccagggagcggtttcagtggcgcaacaaagcaccacttttactgttgcctacttctgaccaagaagaaaaaggaccttagtatttagcataaaattccagcgctggatgaatgcagatctagtttggtctgtggctagtttaaatatgtttctaaccacagagaatttcatatatatatacatatatatatacacatacatatatatatatatatatgtatgtataaaatttcacagggatatgcttttttttttaaagactgaatgtgttcaccatttagcctgtagatttatttccattttccaaattccagcacacagagatcccagcccctatgagtagggtgtttgtggactacctaatggaatatttttgaggcctggatgaactttgccatatgggtagaggttacagagggaggtgatattttcagctaaaaaaaaaaacgggtggagtttggactgatcaacttgagatttaaaaactgctattccttttgttctttctagcatctctccccaccctctgagagctcctcaggcttagatagtgaagtgatcaaatgccagtgtcattttgtacttaagttccaaagtaggaacattttatacttttttctgtattgtaataggtagttttgtatgaaatcttttctcctctcccgttgtaccgcattctttccagcattgtgctttttccctgggcttatttgaaaattttactgttttatacaagctcgtttagtacatttttctatgttttaccacaagttacaatttgaaaagaaaactattttttttaaatattccattgttaactgaatgttactgtttccactccagcaactacatgtcctcccttcaactgcctgccttttggggaaagaccaccttttgtgtgtttgttttttctctctctttctttccctttctctttctatctctctttatttttctttctttttctttgtttttgagttttctataggaaataaatagctttctatatatgagttgctggggaccttcacattctcttttagaaagctgtggcatgcagtctcattgcaggactcctggaatattgtctggttcttggtatttactgtatgtaagcaacaacttgaaaggtggcaatatggtgtcgatttggactatgaatcaaaagacctttttcaggttctttcactattgtctgggggactcagaacaagattgttctctgtatttattgtttgtccatttaggtaacatctgtcttaccttcctcacagactttgtacagaccaaagcaacaaatatttattgccatgtatagcagaaaatgaaacatgcaacaaaagcactttgaaaaatatataaggaattgttgagcctgtctgaatttgggccccctttctgactaatgcagttttgcacaaggtagaagttagtgaccctgagaccatcttaccaccctggacctggtccaaatacagacttacacagtggaccattctttcctgagctagccaacaagagcaggagtagtatctggaaactttcccctttgtttaggggtaggctttgatgaccaggaaaaaaaaaaaggtatttctgcattt

SEQ ID NO: 355110 - DNA, 1882 bp, Homo sapiens
agccggctgtccggtggccgcgctgtggccgccggtggccgttaggctacctgaggccgttccttctggtctctctctcctgggccgcggagagaccgtctccctgccgttacagcaggccccatcccagcgcccagccgtacttggggaaaggccggttgcgattccggggctttcccgccagagctgggtcttctctggggagagctgttttcaccgggaagctcggctttctgtggtaccggcttcatctcccgccttccttgagacccgagtgatatttcttgactacttctgcgtctcacgtaaacatttctccaactctcctactctgtggtatctccctgagatgtgatatcgctagtgccaccatcagaaagaaacgtctggaccctcctgctcaggactttgtatctttgctaaagtcagtgatgtgaaaagacttgaaatggagacaagattttgccttatttcccaggctggtctcgaactcctgggctcaagccattcgtctgcctcagcctcccaaagtgctagtattacagatgatattgctgataggatgaggatggatgctggagaagtgactttagtgaaccacaactccgtattcaaaacccacctcctgccacaaacaggttttccagaggaccagctttcgctttctgaccagcagattttatcttccaggcaaggacatttggaccgatcttttacatgttccacaagaagtgcagcttataatccaagctattactcaggcccaggcctgggagtgcttgcaagatatagttggggtaaaatgttgacttttggtggacaccacggagtcacattgatgcagataaggcacatggctgtggcaggattcagctccttcatcaattttcagataatccttcctcagacagttttcttggctcaggcgatttaagaacctttggccagagtgcaaatggccaatggagaaattctaccccatcgtcaagctcatctttacaaaaatcaagaaacagccgaagtctttacctcgaaacccgaaagacctcaagtggattatcaaacagttttgcgggaaagtcaaaccatcactgccatgtatctgcatatgaaaaatcttttcctattaaacctgttccaagtccatcttggagtggttcatgtcgtcgaagtcttttgagccccaagaaaactcagaggcgacatgttagtacagcagaagaggaatatgaagtcttctacaaaattaacaattaagatgatgtcaccactgcactgctcagtcttacaacagaggtttgaagagaacacatgaagaagaatttagaaatatgcaagtagtggctgtgcagaatggctgatgctcaagaggcaacatcaaaaagctgtgctattcagtagggtaacggctagccacaagcactgtttaaattaattcaaattcaaattgaaaatttagttactcagtgacactagccacattttaagtattcattagccacatgtggctagtggctaccatattggacagggcaaatatagaacatttctattactacagaaatttctgttagataatgctgttatagaggatataaagttctgtttggaaaagagaaaatacttgtgacaataaaaatgtaaaatggcaaaaacacaggtagtttcttttcagttacatgttgcttctagacacgcttctttgcaaattattgagcaacattttaagatactggacccccctctcccgtaccaaagcccgttgtaaacctttaccagggcccccttttttttttagcccccgtcaagcatagcggtttccccaatcttttgaaaagggcgaccttcaaattcaatttggccccgggttaaaaactttgcc

SEQ ID NO: 355111 - DNA, 1658 bp, Homo sapiens
agccggctgtccggtggccgcgctgtggccgccggtggccgttaggctacctgaggccgttccttctggtctctctctcctgggccgcggagagaccgtctccctgccgttacagcaggccccatcccagcgcccagccgtacttggggaaaggccggttgcgattccggggctttcccgccagagctgggtcttctctggggagagctgttttcaccgggaagctcggctttctgtggtaccggcttcatctcccgccttccttgagacccgagtgatatttcttgactacttctgcgtctcacgtaaacatttctccaactctcctactctgtggtatctccctgagatgtgatatcgctagtgccaccatcagaaagaaacgtctggaccctcctgctcaggactttgtatctttgctaaagtcagtgatgtgaaaagacttgaaatggatgatattgctgataggatgaggatggatgctggagaagtgactttagtgaaccacaactccgtattcaaaacccacctcctgccacaaacaggttttccagaggaccagctttcgctttctgaccagcagattttatcttccaggcaaggacatttggaccgatcttttacatgttccacaagaagtgcagcttataatccaagctattactcagataatccttcctcagacagttttcttggctcaggcgatttaagaacctttggccagagtgcaaatggccaatggagaaattctaccccatcgtcaagctcatctttacaaaaatcaagaaacagccgaagtctttacctcgaaacccgaaagacctcaagtggattatcaaacagttttgcgggaaagtcaaaccatcactgccatgtatctgcatatgaaaaatcttttcctattaaacctgttccaagtccatcttggagtggttcatgtcgtcgaagtcttttgagccccaagaaaactcagaggcgacatgttagtacagcagaagaggaatatgaagtcttctacaaaattaacaattaagatgatgtcaccactgcactgctcagtcttacaacagaggtttgaagagaacacatgaagaagaatttagaaatatgcaagtagtggctgtgcagaatggctgatgctcaagaggcaacatcaaaaagctgtgctattcagtagggtaacggctagccacaagcactgtttaaattaattcaaattcaaattgaaaatttagttactcagtgacactagccacattttaagtattcattagccacatgtggctagtggctaccatattggacagggcaaatatagaacatttctattactacagaaatttctgttagataatgctgttatagaggatataaagttctgtttggaaaagagaaaatacttgtgacaataaaaatgtaaaatggcaaaaacacaggtagtttcttttcagttacatgttgcttctagacacgcttctttgcaaattattgagcaacattttaagatactggacccccctctcccgtaccaaagcccgttgtaaacctttaccagggcccccttttttttttagcccccgtcaagcatagcggtttccccaatcttttgaaaagggcgaccttcaaattcaatttggccccgggttaaaaactttgcc

SEQ ID NO: 355112 - DNA, 2195 bp, Homo sapiens
agccggctgtccggtggccgcgctgtggccgccggtggccgttaggctacctgaggccgttccttctggtctctctctcctgggccgcggagagaccgtctccctgccgttacagcaggccccatcccagcgcccagccgtacttggggaaaggccggttgcgattccggggctttcccgccagagctgggtcttctctggggagagctgttttcaccgggaagctcggctttctgtggtaccggcttcatctcccgccttccttgagacccgagtgatatttcttgactacttctgcgtctcacgtaaacatttctccaactctcctactctgtggtatctccctgagatgtgatatcgctagtgccaccatcagaaagaaacgtctggaccctcctgctcaggactttgtatctttgctaaagtcagtgatgtgaaaagacttgaaatggatgatattgctgataggatgaggatggatgctggagaagtgactttagtgaaccacaactccgtattcaaaacccacctcctgccacaaacaggttttccagaggaccagctttcgctttctgaccagcagattttatcttccaggcaaggacatttggaccgatcttttacatgttccacaagaagtgcagcttataatccaagctattactcagataatccttcctcagacagttttcttggctcaggcgatttaagaacctttggccagagtgcaaatggccaatggagaaattctaccccatcgtcaagctcatctttacaaaaatcaagaaacagccgaagtctttacctcgaaacccgaaagacctcaagtggattatcaaacagttttgcgggaaagtcaaaccatcactgccatgtatctgcatatgaaaaatcttttcctattaaacctgttccaagtccatcttggagtggttcatgtcgtcgaagtcttttgagccccaagaaaactcagaggcgacatgttagtacagcagaagagacagttcaagaagaagaaagagagatttacagacagctgctacagatggtcacagggaaacagtttactatagccaaacccaccacacattttcctttacacctgtctcgatgtcttagttccagtaaaaatactttgaaagactcactgtttaaaaatggaaactcttgtgcatctcagatcattggctctgatacttcatcatctggatctgccagcattttaactaaccaggaacagctgtcccacagtgtatattccctatcttcttataccccagatgttgcatttggatccaaagattctggtactcttcatcatccccatcatcaccactctgttccacatcagccagataacttagcagcttcaaatacacaatctgaaggatcagactctgtgattttactgaaagtgaaagattcccagactccaactcccagttctactttcttccaggcagagctgtggatcaaagaattaactagtgtttatgattctcgagcacgagaaagattgcgccagattgaagaacagaaggcattggccttacagcttcaaaaccagagattgcaggagcgggaacattcagtacatgattcagtagaactacatcttcgtgtacctcttgaaaaggagattcctgttactgttgtccaagaaacacaaaaaaaaggtcataaattaactgatagtgaagatgaatttcctgaaattacagaggaaatggagaaagaaataaagaatgtatttcgtaatgggaatcaggatgaagttctcagtgaagcatttcgcctgaccattacacgcaaagatattcaaactctaaaccatctgaattggctcaatgatgaggtaatgttgcatctatttttacatacaaatagtaaacattaagtggcagttaaattaaggcattatctcactttttctcttcttgtaactatgagggagtgtggtggagacaggcatttttaacaaacatctcaggtgtattttaaagtctgagaaccactgaatttaccttttcttgttgaagatttgaacattgaagaagacattcactcattggtattctcactctttaaggctcctattctgcagttcatctcttctgaacaaataagtattagccgaccatgttgcagcatgagggaatactgtgggatttctttataggaatccagttttactt

SEQ ID NO: 355113 - DNA, 971 bp, Homo sapiens
gagagagagagagagagagagagagagagagagagagagagagactttccagcattgtgctttttccctgggcttatttgaaaattttactgttttatacaagctcgtttagtacatttttctatgttttaccacaagttacaatttgaaaagaaaactattttttttaaatattccattgttaactgaatgttactgtttccactccagcaactacatgtcctcccttcaactgcctgccttttggggaaagaccaccttttgtgtgtttgttttttctctctctttctttccctttctctttctatctctctttatttttctttctttttctttgtttttgagttttctataggaaataaatagctttctatatatgagttgctggggaccttcacattctcttttagaaagctgtggcatgcagtctcattgcaggactcctggaatattgtctggttcttggtatttactgtatgtaagcaacaacttgaaaggtggcaatatggtgtcgatttggactatgaatcaaaagacctttttcaggttctttcactattgtctgggggactcagaacaagattgttctctgtatttattgtttgtccatttaggtaacatctgtcttaccttcctcacagactttgtacagaccaaagcaacaaatatttattgccatgtatagcagaaaatgaaacatgcaacaaaagcactttgaaaaatatataaggaattgttgagcctgtctgaatttgggccccctttctgactaatgcagttttgcacaaggtagaagttagtgaccctgagaccatcttaccaccctggacctggtccaaatacagacttacacagtggaccattctttcctgagctagccaacaagagcaggagtagtatctggaaactttcccctttgtttaggggtaggctttgatgaccaggaaaaaaaaaaaggtatttctgcattt

SEQ ID NO: 355114 - DNA, 456 bp, Homo sapiens
taaattaattcaaattcaaattgaaaatttagttactcagtgacactagccacattttaagtattcattagccacatgtggctagtggctaccatattggacagggcaaatatagaacatttctattactacagaaatttctgttagataatgctgttatagaggatataaagttctgtttggaaaagagaaaatacttgtgacaataaaaatgtaaaatggcaaaaacacaggtagtttcttttcagttacatgttgcttctagacacgcttctttgcaaattattgagcaacattttaagatactggacttttgtaataggtgacagtgatggttttatacttttcttagaactgctttacagtgttgtcataagtcaagcatttgggactcagaaaattattgaaatttgcactttgcatattttatatggtataaagttattactttaaaca

SEQ ID NO: 355115 - DNA, 440 bp, Homo sapiens
gaggttgcagtgagcagagattgtgccggtgtactccagcctgggcaacaagagtgagactgtctcaaaaaaaaaaaaaatgtgacttaagaaaaatcttctgctttgtttagattttatcttccaggcaaggacatttggaccgatcttttacatgttccacaagaagtgcagcttataatccaagctattactcaggtatgacacattacttggagtcaagggactttataccttttggatttcttgatagcatatcgtttatgtttatcatctccaaaagtaaaaacattgtcaaaaacaagatggtattttcttcactaaaacatcatttgaatggcttttcctgtgtatgtggttgctatgatactttactgattttgtctcatccaaatactggttttctagtgggaaagtgttttgagaatctaactgtccat

SEQ ID NO: 355116 - DNA, 4734 bp, Homo sapiens
agccggctgtccggtggccgcgctgtggccgccggtggccgttaggctacctgaggccgttccttctggtctctctctcctgggccgcggagagaccgtctccctgccgttacagcaggccccatcccagcgcccagccgtacttggggaaaggccggttgcgattccggggctttcccgccagagctgggtcttctctggggagagctgttttcaccgggaagctcggctttctgtggtaccggcttcatctcccgccttccttgagacccgagtgatatttcttgactacttctgcgtctcacgtaaacatttctccaactctcctactctgtggtatctccctgagatgtgatatcgctagtgccaccatcagaaagaaacgtctggaccctcctgctcaggactttgtatctttgctaaagtcagtgatgtgaaaagacttgaaatggatgatattgctgataggatgaggatggatgctggagaagtgactttagtgaaccacaactccgtattcaaaacccacctcctgccacaaacaggttttccagaggaccagctttcgctttctgaccagcagattttatcttccaggcaaggacatttggaccgatcttttacatgttccacaagaagtgcagcttataatccaagctattactcagataatccttcctcagacagttttcttggctcaggcgatttaagaacctttggccagagtgcaaatggccaatggagaaattctaccccatcgtcaagctcatctttacaaaaatcaagaaacagccgaagtctttacctcgaaacccgaaagacctcaagtggattatcaaacagttttgcgggaaagtcaaaccatcactgccatgtatctgcatatgaaaaatcttttcctattaaacctgttccaagtccatcttggagtggttcatgtcgtcgaagtcttttgagccccaagaaaactcagaggcgacatgttagtacagcagaagagacagttcaagaagaagaaagagagatttacagacagctgctacagatggtcacagggaaacagtttactatagccaaacccaccacacattttcctttacacctgtctcgatgtcttagttccagtaaaaatactttgaaagactcactgtttaaaaatggaaactcttgtgcatctcagatcattggctctgatacttcatcatctggatctgccagcattttaactaaccaggaacagctgtcccacagtgtatattccctatcttcttataccccagatgttgcatttggatccaaagattctggtactcttcatcatccccatcatcaccactctgttccacatcagccagataacttagcagcttcaaatacacaatctgaaggatcagactctgtgattttactgaaagtgaaagattcccagactccaactcccagttctactttcttccaggcagagctgtggatcaaagaattaactagtgtttatgattctcgagcacgagaaagattgcgccagattgaagaacagaaggcattggccttacagcttcaaaaccagagattgcaggagcgggaacattcagtacatgattcagtagaactacatcttcgtgtacctcttgaaaaggagattcctgttactgttgtccaagaaacacaaaaaaaaggtcataaattaactgatagtgaagatgaatttcctgaaattacagaggaaatggagaaagaaataaagaatgtatttcgtaatgggaatcaggatgaagttctcagtgaagcatttcgcctgaccattacacgcaaagatattcaaactctaaaccatctgaattggctcaatgatgagatcatcaatttctacatgaatatgctgatggagcgaagtaaagagaagggcttgccaagtgtgcatgcatttaatacctttttcttcactaaattaaaaacggctggttatcaggcagtgaaacgttggacaaagaaagtagatgtattttctgttgacattcttttggtgcccattcacctgggagtacactggtgtctagctgttgtggactttagaaagaagaatattacctattacgactccatgggtgggataaacaatgaagcctgcagaatactcttgcaatacctaaagcaagaaagcattgacaagaaaaggaaagagtttgacaccaatggctggcagcttttcagcaagaaaagccaggagattcctcagcagatgaatggaagtgactgtgggatgtttgcctgcaaatatgctgactgtattaccaaagacagaccaatcaacttcacacagcaacacatgccatacttccggaagcggatggtctgggagatcctccaccgaaaactcttgtgaagactgtctcacttagcagaccttgaccatgtgggggaccagctctttgttgtctacagccagagaccttggaaacagctgctcccagccctctgctgttgtaacacccttgatcctggaccaggccctggcgagatgcattcacaagcacatctgcctttccttttgtatctcagatactatttttgcaaagaaactttggtgctgtgaaaggggtgagggacatccctaagctgaagagagagactgcttttcacttcttcagttctgccatcttgttttcaaagggctccagcctcactcagtccctaattatgggactgagaaaagcttggaaagaatcttggtttcatataaattcttgttgttaggccttactaagaagtaggaaagggcatgggcaaaaggtagggataaaaaccaccagcatatacatggacatacacacacacccacacacacaaacacacacacacacacaattttcacgatgtatggtcaggaatgtgactgtaaactggactttggggcccaggcataagtcccttcctccaggacctttcctatttatatgtccctatacaaaatccatctgcttttatacgtagctgttttatcatctgtagcttcatcctatccggaggcacagcacatgagccctggacaggtcccaaagttccaagcagtcctttccgtaaaagcaggggtttgcatgtgctaccaacacatgatacggggaagacccacccagggagcggtttcagtggcgcaacaaagcaccacttttactgttgcctacttctgaccaagaagaaaaaggaccttagtatttagcataaaattccagcgctggatgaatgcagatctagtttggtctgtggctagtttaaatatgtttctaaccacagagaatttcatatatatatacatatatatatacacatacatatatatatatatatatgtatgtataaaatttcacagggatatgcttttttttttaaagactgaatgtgttcaccatttagcctgtagatttatttccattttccaaattccagcacacagagatcccagcccctatgagtagggtgtttgtggactacctaatggaatatttttgaggcctggatgaactttgccatatgggtagaggttacagagggaggtgatattttcagctaaaaaaaaaaacgggtggagtttggactgatcaacttgagatttaaaaactgctattccttttgttctttctagcatctctccccaccctctgagagctcctcaggcttagatagtgaagtgatcaaatgccagtgtcattttgtacttaagttccaaagtaggaacattttatacttttttctgtattgtaataggtagttttgtatgaaatcttttctcctctcccgttgtaccgcattctttccagcattgtgctttttccctgggcttatttgaaaattttactgttttatacaagctcgtttagtacatttttctatgttttaccacaagttacaatttgaaaagaaaactattttttttaaatattccattgttaactgaatgttactgtttccactccagcaactacatgtcctcccttcaactgcctgccttttggggaaagaccaccttttgtgtgtttgttttttctctctctttctttccctttctctttctatctctctttatttttctttctttttctttgtttttgagttttctataggaaataaatagctttctatatatgagttgctggggaccttcacattctcttttagaaagctgtggcatgcagtctcattgcaggactcctggaatattgtctggttcttggtatttactgtatgtaagcaacaacttgaaaggtggcaatatggtgtcgatttggactatgaatcaaaagacctttttcaggttctttcactattgtctgggggactcagaacaagattgttctctgtatttattgtttgtccatttaggtaacatctgtcttaccttcctcacagactttgtacagaccaaagcaacaaatatttattgccatgtatagcagaaaatgaaacatgcaacaaaagcactttgaaaaatatataaggaattgttgagcctgtctgaatttgggccccctttctgactaatgcagttttgcacaaggtagaagttagtgaccctgagaccatcttaccaccctggacctggtccaaatacagacttacacagtggaccattctttcctgagctagccaacaagagcaggagtagtatctggaaactttcccctttgtttaggggtaggctttgatgaccaggaaaaaaaaaaaggtatttctgcattt

SEQ ID NO: 355117 - DNA, 4958 bp, Homo sapiens
agccggctgtccggtggccgcgctgtggccgccggtggccgttaggctacctgaggccgttccttctggtctctctctcctgggccgcggagagaccgtctccctgccgttacagcaggccccatcccagcgcccagccgtacttggggaaaggccggttgcgattccggggctttcccgccagagctgggtcttctctggggagagctgttttcaccgggaagctcggctttctgtggtaccggcttcatctcccgccttccttgagacccgagtgatatttcttgactacttctgcgtctcacgtaaacatttctccaactctcctactctgtggtatctccctgagatgtgatatcgctagtgccaccatcagaaagaaacgtctggaccctcctgctcaggactttgtatctttgctaaagtcagtgatgtgaaaagacttgaaatggagacaagattttgccttatttcccaggctggtctcgaactcctgggctcaagccattcgtctgcctcagcctcccaaagtgctagtattacagatgatattgctgataggatgaggatggatgctggagaagtgactttagtgaaccacaactccgtattcaaaacccacctcctgccacaaacaggttttccagaggaccagctttcgctttctgaccagcagattttatcttccaggcaaggacatttggaccgatcttttacatgttccacaagaagtgcagcttataatccaagctattactcaggcccaggcctgggagtgcttgcaagatatagttggggtaaaatgttgacttttggtggacaccacggagtcacattgatgcagataaggcacatggctgtggcaggattcagctccttcatcaattttcagataatccttcctcagacagttttcttggctcaggcgatttaagaacctttggccagagtgcaaatggccaatggagaaattctaccccatcgtcaagctcatctttacaaaaatcaagaaacagccgaagtctttacctcgaaacccgaaagacctcaagtggattatcaaacagttttgcgggaaagtcaaaccatcactgccatgtatctgcatatgaaaaatcttttcctattaaacctgttccaagtccatcttggagtggttcatgtcgtcgaagtcttttgagccccaagaaaactcagaggcgacatgttagtacagcagaagagacagttcaagaagaagaaagagagatttacagacagctgctacagatggtcacagggaaacagtttactatagccaaacccaccacacattttcctttacacctgtctcgatgtcttagttccagtaaaaatactttgaaagactcactgtttaaaaatggaaactcttgtgcatctcagatcattggctctgatacttcatcatctggatctgccagcattttaactaaccaggaacagctgtcccacagtgtatattccctatcttcttataccccagatgttgcatttggatccaaagattctggtactcttcatcatccccatcatcaccactctgttccacatcagccagataacttagcagcttcaaatacacaatctgaaggatcagactctgtgattttactgaaagtgaaagattcccagactccaactcccagttctactttcttccaggcagagctgtggatcaaagaattaactagtgtttatgattctcgagcacgagaaagattgcgccagattgaagaacagaaggcattggccttacagcttcaaaaccagagattgcaggagcgggaacattcagtacatgattcagtagaactacatcttcgtgtacctcttgaaaaggagattcctgttactgttgtccaagaaacacaaaaaaaaggtcataaattaactgatagtgaagatgaatttcctgaaattacagaggaaatggagaaagaaataaagaatgtatttcgtaatgggaatcaggatgaagttctcagtgaagcatttcgcctgaccattacacgcaaagatattcaaactctaaaccatctgaattggctcaatgatgagatcatcaatttctacatgaatatgctgatggagcgaagtaaagagaagggcttgccaagtgtgcatgcatttaatacctttttcttcactaaattaaaaacggctggttatcaggcagtgaaacgttggacaaagaaagtagatgtattttctgttgacattcttttggtgcccattcacctgggagtacactggtgtctagctgttgtggactttagaaagaagaatattacctattacgactccatgggtgggataaacaatgaagcctgcagaatactcttgcaatacctaaagcaagaaagcattgacaagaaaaggaaagagtttgacaccaatggctggcagcttttcagcaagaaaagccaggagattcctcagcagatgaatggaagtgactgtgggatgtttgcctgcaaatatgctgactgtattaccaaagacagaccaatcaacttcacacagcaacacatgccatacttccggaagcggatggtctgggagatcctccaccgaaaactcttgtgaagactgtctcacttagcagaccttgaccatgtgggggaccagctctttgttgtctacagccagagaccttggaaacagctgctcccagccctctgctgttgtaacacccttgatcctggaccaggccctggcgagatgcattcacaagcacatctgcctttccttttgtatctcagatactatttttgcaaagaaactttggtgctgtgaaaggggtgagggacatccctaagctgaagagagagactgcttttcacttcttcagttctgccatcttgttttcaaagggctccagcctcactcagtccctaattatgggactgagaaaagcttggaaagaatcttggtttcatataaattcttgttgttaggccttactaagaagtaggaaagggcatgggcaaaaggtagggataaaaaccaccagcatatacatggacatacacacacacccacacacacaaacacacacacacacacaattttcacgatgtatggtcaggaatgtgactgtaaactggactttggggcccaggcataagtcccttcctccaggacctttcctatttatatgtccctatacaaaatccatctgcttttatacgtagctgttttatcatctgtagcttcatcctatccggaggcacagcacatgagccctggacaggtcccaaagttccaagcagtcctttccgtaaaagcaggggtttgcatgtgctaccaacacatgatacggggaagacccacccagggagcggtttcagtggcgcaacaaagcaccacttttactgttgcctacttctgaccaagaagaaaaaggaccttagtatttagcataaaattccagcgctggatgaatgcagatctagtttggtctgtggctagtttaaatatgtttctaaccacagagaatttcatatatatatacatatatatatacacatacatatatatatatatatatgtatgtataaaatttcacagggatatgcttttttttttaaagactgaatgtgttcaccatttagcctgtagatttatttccattttccaaattccagcacacagagatcccagcccctatgagtagggtgtttgtggactacctaatggaatatttttgaggcctggatgaactttgccatatgggtagaggttacagagggaggtgatattttcagctaaaaaaaaaaacgggtggagtttggactgatcaacttgagatttaaaaactgctattccttttgttctttctagcatctctccccaccctctgagagctcctcaggcttagatagtgaagtgatcaaatgccagtgtcattttgtacttaagttccaaagtaggaacattttatacttttttctgtattgtaataggtagttttgtatgaaatcttttctcctctcccgttgtaccgcattctttccagcattgtgctttttccctgggcttatttgaaaattttactgttttatacaagctcgtttagtacatttttctatgttttaccacaagttacaatttgaaaagaaaactattttttttaaatattccattgttaactgaatgttactgtttccactccagcaactacatgtcctcccttcaactgcctgccttttggggaaagaccaccttttgtgtgtttgttttttctctctctttctttccctttctctttctatctctctttatttttctttctttttctttgtttttgagttttctataggaaataaatagctttctatatatgagttgctggggaccttcacattctcttttagaaagctgtggcatgcagtctcattgcaggactcctggaatattgtctggttcttggtatttactgtatgtaagcaacaacttgaaaggtggcaatatggtgtcgatttggactatgaatcaaaagacctttttcaggttctttcactattgtctgggggactcagaacaagattgttctctgtatttattgtttgtccatttaggtaacatctgtcttaccttcctcacagactttgtacagaccaaagcaacaaatatttattgccatgtatagcagaaaatgaaacatgcaacaaaagcactttgaaaaatatataaggaattgttgagcctgtctgaatttgggccccctttctgactaatgcagttttgcacaaggtagaagttagtgaccctgagaccatcttaccaccctggacctggtccaaatacagacttacacagtggaccattctttcctgagctagccaacaagagcaggagtagtatctggaaactttcccctttgtttaggggtaggctttgatgaccaggaaaaaaaaaaaggtatttctgcattt

SEQ ID NO: 355118 - DNA, 4191 bp, Homo sapiens
  misc_feature (25)..(25): n is a, c, g, or t
gcctagcggcaacgactctcttaantttccaccgctacacattttatcttccaggcaaggacatttggaccgatcttttacatgttccacaagaagtgcagcttataatccaagctattactcagataatccttcctcagacagttttcttggctcaggcgatttaagaacctttggccagagtgcaaatggccaatggagaaattctaccccatcgtcaagctcatctttacaaaaatcaagaaacagccgaagtctttacctcgaaacccgaaagacctcaagtggattatcaaacagttttgcgggaaagtcaaaccatcactgccatgtatctgcatatgaaaaatcttttcctattaaacctgttccaagtccatcttggagtggttcatgtcgtcgaagtcttttgagccccaagaaaactcagaggcgacatgttagtacagcagaagagacagttcaagaagaagaaagagagatttacagacagctgctacagatggtcacagggaaacagtttactatagccaaacccaccacacattttcctttacacctgtctcgatgtcttagttccagtaaaaatactttgaaagactcactgtttaaaaatggaaactcttgtgcatctcagatcattggctctgatacttcatcatctggatctgccagcattttaactaaccaggaacagctgtcccacagtgtatattccctatcttcttataccccagatgttgcatttggatccaaagattctggtactcttcatcatccccatcatcaccactctgttccacatcagccagataacttagcagcttcaaatacacaatctgaaggatcagactctgtgattttactgaaagtgaaagattcccagactccaactcccagttctactttcttccaggcagagctgtggatcaaagaattaactagtgtttatgattctcgagcacgagaaagattgcgccagattgaagaacagaaggcattggccttacagcttcaaaaccagagattgcaggagcgggaacattcagtacatgattcagtagaactacatcttcgtgtacctcttgaaaaggagattcctgttactgttgtccaagaaacacaaaaaaaaggtcataaattaactgatagtgaagatgaatttcctgaaattacagaggaaatggagaaagaaataaagaatgtatttcgtaatgggaatcaggatgaagttctcagtgaagcatttcgcctgaccattacacgcaaagatattcaaactctaaaccatctgaattggctcaatgatgagatcatcaatttctacatgaatatgctgatggagcgaagtaaagagaagggcttgccaagtgtgcatgcatttaatacctttttcttcactaaattaaaaacggctggttatcaggcagtgaaacgttggacaaagaaagtagatgtattttctgttgacattcttttggtgcccattcacctgggagtacactggtgtctagctgttgtggactttagaaagaagaatattacctattacgactccatgggtgggataaacaatgaagcctgcagaatactcttgcaatacctaaagcaagaaagcattgacaagaaaaggaaagagtttgacaccaatggctggcagcttttcagcaagaaaagccaggagattcctcagcagatgaatggaagtgactgtgggatgtttgcctgcaaatatgctgactgtattaccaaagacagaccaatcaacttcacacagcaacacatgccatacttccggaagcggatggtctgggagatcctccaccgaaaactcttgtgaagactgtctcacttagcagaccttgaccatgtgggggaccagctctttgttgtctacagccagagaccttggaaacagctgctcccagccctctgctgttgtaacacccttgatcctggaccaggccctggcgagatgcattcacaagcacatctgcctttccttttgtatctcagatactatttttgcaaagaaactttggtgctgtgaaaggggtgagggacatccctaagctgaagagagagactgcttttcacttcttcagttctgccatcttgttttcaaagggctccagcctcactcagtccctaattatgggactgagaaaagcttggaaagaatcttggtttcatataaattcttgttgttaggccttactaagaagtaggaaagggcatgggcaaaaggtagggataaaaaccaccagcatatacatggacatacacacacacccacacacacaaacacacacacacacacaattttcacgatgtatggtcaggaatgtgactgtaaactggactttggggcccaggcataagtcccttcctccaggacctttcctatttatatgtccctatacaaaatccatctgcttttatacgtagctgttttatcatctgtagcttcatcctatccggaggcacagcacatgagccctggacaggtcccaaagttccaagcagtcctttccgtaaaagcaggggtttgcatgtgctaccaacacatgatacggggaagacccacccagggagcggtttcagtggcgcaacaaagcaccacttttactgttgcctacttctgaccaagaagaaaaaggaccttagtatttagcataaaattccagcgctggatgaatgcagatctagtttggtctgtggctagtttaaatatgtttctaaccacagagaatttcatatatatatacatatatatatacacatacatatatatatatatatatgtatgtataaaatttcacagggatatgcttttttttttaaagactgaatgtgttcaccatttagcctgtagatttatttccattttccaaattccagcacacagagatcccagcccctatgagtagggtgtttgtggactacctaatggaatatttttgaggcctggatgaactttgccatatgggtagaggttacagagggaggtgatattttcagctaaaaaaaaaaacgggtggagtttggactgatcaacttgagatttaaaaactgctattccttttgttctttctagcatctctccccaccctctgagagctcctcaggcttagatagtgaagtgatcaaatgccagtgtcattttgtacttaagttccaaagtaggaacattttatacttttttctgtattgtaataggtagttttgtatgaaatcttttctcctctcccgttgtaccgcattctttccagcattgtgctttttccctgggcttatttgaaaattttactgttttatacaagctcgtttagtacatttttctatgttttaccacaagttacaatttgaaaagaaaactattttttttaaatattccattgttaactgaatgttactgtttccactccagcaactacatgtcctcccttcaactgcctgccttttggggaaagaccaccttttgtgtgtttgttttttctctctctttctttccctttctctttctatctctctttatttttctttctttttctttgtttttgagttttctataggaaataaatagctttctatatatgagttgctggggaccttcacattctcttttagaaagctgtggcatgcagtctcattgcaggactcctggaatattgtctggttcttggtatttactgtatgtaagcaacaacttgaaaggtggcaatatggtgtcgatttggactatgaatcaaaagacctttttcaggttctttcactattgtctgggggactcagaacaagattgttctctgtatttattgtttgtccatttaggtaacatctgtcttaccttcctcacagactttgtacagaccaaagcaacaaatatttattgccatgtatagcagaaaatgaaacatgcaacaaaagcactttgaaaaatatataaggaattgttgagcctgtctgaatttgggccccctttctgactaatgcagttttgcacaaggtagaagttagtgaccctgagaccatcttaccaccctggacctggtccaaatacagacttacacagtggaccattctttcctgagctagccaacaagagcaggagtagtatctggaaactttcccctttgtttaggggtaggctttgatgaccaggaaaaaaaaaaaggtatttctgcattt

SEQ ID NO: 355119 - DNA, 1115 bp, Homo sapiens
  misc_feature (25)..(25): n is a, c, g, or t
gcctagcggcaacgactctcttaantttccaccgctacacattttatcttccaggcaaggacatttggaccgatcttttacatgttccacaagaagtgcagcttataatccaagctattactcagataatccttcctcagacagttttcttggctcaggcgatttaagaacctttggccagagtgcaaatggccaatggagaaattctaccccatcgtcaagctcatctttacaaaaatcaagaaacagccgaagtctttacctcgaaacccgaaagacctcaagtggattatcaaacagttttgcgggaaagtcaaaccatcactgccatgtatctgcatatgaaaaatcttttcctattaaacctgttccaagtccatcttggagtggttcatgtcgtcgaagtcttttgagccccaagaaaactcagaggcgacatgttagtacagcagaagaggaatatgaagtcttctacaaaattaacaattaagatgatgtcaccactgcactgctcagtcttacaacagaggtttgaagagaacacatgaagaagaatttagaaatatgcaagtagtggctgtgcagaatggctgatgctcaagaggcaacatcaaaaagctgtgctattcagtagggtaacggctagccacaagcactgtttaaattaattcaaattcaaattgaaaatttagttactcagtgacactagccacattttaagtattcattagccacatgtggctagtggctaccatattggacagggcaaatatagaacatttctattactacagaaatttctgttagataatgctgttatagaggatataaagttctgtttggaaaagagaaaatacttgtgacaataaaaatgtaaaatggcaaaaacacaggtagtttcttttcagttacatgttgcttctagacacgcttctttgcaaattattgagcaacattttaagatactggacccccctctcccgtaccaaagcccgttgtaaacctttaccagggcccccttttttttttagcccccgtcaagcatagcggtttccccaatcttttgaaaagggcgaccttcaaattcaatttggccccgggttaaaaactttgcc

SEQ ID NO: 355120 - DNA, 374 bp, Homo sapiens
aaacaaataatatgtggctgagactttatgtggcctgcaaagcctaaaatatttgctgtctgactcttgatagaaaatgtttgccaacccagacttagtttattagctcttcaacctaacaaaacagcttagtttctgaaacaatttactgtgactttttttagtttggcttcatatcccttatgtttggcttggtaatcattttatgagttggataagattcatagtttttttaaatgatgaggcatcaggcaaacagtgttatgagtagccagggaaaaaatggaaatcgacacaattagatgctttaaaatgcataatcacatctatcacttcatgggcctgtaaaaaataaatcacatattctaaagatg

SEQ ID NO: 355121 - DNA, 2185 bp, Homo sapiens
gaattccttttttttgaatttctctctttaattaaggtctaccccaagccacggaaagaggagtagaccatgattactgtgaacccccccttaccccaggacactgtgaatctcttctcgcctgtgcccccacccgacaaggtggacggcttctcccgccgttccctccgcagagcccggccccgccgctcccacagctcctctcagttccgctatcagagcaaccagcaagagctcacaccgctgcccctgctcaaagatgtgccggcttccgagctgcacgagctgctgagccggaagctggcccagtgtggggtgatgtttgacttcttggactgtgtggccgacctcaaggggaaggaggtgaagcgggcagccctcaacgagctggtggagtgtgtggggagcacccggggtgtcctcatcgagcccgtctacccagacatcatccgcatgatctcagtgaatatcttccggactctgccgcccagtgagaaccctgaatttgaccctgaagaggatgagcccaatcttgagccttcgtggccacacctgcagctggtatatgagtttttcctgcgtttcttggagagcccagacttccagccctccgtggccaagagatatgtggatcaaaagtttgtcctgatgctcctggagctatttgatagtgaggatccccgggagcgtgagtacctcaagaccatcctgcaccgggtctatggcaagttcctgggtctccgggcctacatccgcaaacagtgcaaccacatcttcctccggttcatctatgaattcgagcacttcaatggtgtggctgagctgctggagatcctaggaagcatcatcaatggctttgcgctgcccctgaagacggagcacaagcagttcctggttcgcgtcctgatccccctgcactctgtcaagtcgctgtctgtcttccatgcccagctggcatactgtgtggtgcagttcctggagaaggatgccactctgacagagcacgtgatccgggggctgctcaaatactggccaaaaacctgcacccagaaggaggtgatgtttctgggggagatggaagagattcttgatgtcatcgagccctcccagtttgtgaagatccaggagcccctttttaagcaggtggctcgctgtgtttccagcccccatttccaggttgcagagcgggctctgtatttctggaacaatgagtatatcctaagcctcattgaggacaactgccacactgtgctgcctgctgtgtttgggaccctctaccaagtctccaaggagcactggaaccaaaccatcgtatcactgatctacaatgtgctcaagaccttcatggagatgaatgggaagctgtttgatgagctcacagcctcctacaagctggaaaagcagcaggagcagcagaaggcccaggagcgtcaggagttatggcaaggtctggaggagctgcggctacgccggctacaggggacccagggggccaaggaggcccccctccagcggcttacaccccaggtggccgccagtgggggtcagagctagacagcacctcagaaggggaaaagctaaacccagagctgtcagtccctctatcccttctcctgtccaggggcccagagagaaacacacctacccctggccttgccagagtggcttctgaggactccctgcccagcccagctttcactggggggagacgaggagaggcaatggtggtcttggcaacagaatgctcagcccctcgtggcaggacttgacaagggcaagcttgaccaggaagctgccatcagggatcttcccctgccccgcaaagctaggctccagctgcaggcgggctcccaccctctgctcctggccttgggcaagggcactcagcgcctcgcctgcccctgccttggccaatgcgaggtccttccttatccccaccatggggtccatggtctatttattctcgcccagctcaccctctacacagacactgtcctgggtgcacactcctcccttccctcgctgtgtacttccttgtcccctttttatttattgggcagggggagggggagggcacaggcaagaagagattcacagtgtcctggggtaagggggggttcacagtaatcatggtctactcctctttccgtggctgggggtagacttaataaagagagaaattcaa

SEQ ID NO: 355122 - DNA, 2747 bp, Homo sapiens
ggtggggggaggtgacttgatgtcatcctgagcagctgggcggcgggtgccggtgcgcacggagccgagccggggctcccgttgcgctgcaccgcgttgggtcggagtcccaggacttcagcggagatccgcgcgctgcgacggccggtgcagagcccgccgagcgcccagtcccggcccggggctgagttgggggcatgctctagccgcccccccggagcccgggagagaacccaggagcgccgccgcccagccccagcgccccgagcggaaccgctgcgaaggggccctgaacggccgtcgccctccctacgggcagcccccgggggttggcgaccgaagtctaggttttcgagaaagccagggtgggaaccctaactggactcttcgggacccccaggaaggatctgaggcctgagccatcctcctttctaccctgtctgccccccaggactgggcagttgcaggaggccctgggggggggcccaggactgtggttgtgccccccccccaaaggccggacaggatgggaccaagttagtctgtccagtctcacccagcacctcccaggcccagagagaacccccggggctctgaaagcttgccctgccgcctgaccgccatggagacgaagctgccccctgcaagcacccccactagcccctcctcccccgggctgtcgcctgtgcccccacccgacaaggtggacggcttctcccgccgttccctccgcagagcccggccccgccgctcccacagctcctctcagttccgctatcagagcaaccagcaagagctcacaccgctgcccctgctcaaagatgtgccggcttccgagctgcacgagctgctgagccggaagctggcccagtgtggggtgatgtttgacttcttggactgtgtggccgacctcaaggggaaggaggtgaagcgggcagccctcaacgagctggtggagtgtgtggggagcacccggggtgtcctcatcgagcccgtctacccagacatcatccgcatgatctcagtgaatatcttccggactctgccgcccagtgagaaccctgaatttgaccctgaagaggatgagcccaatcttgagccttcgtggccacacctgcagctggtatatgagtttttcctgcgtttcttggagagcccagacttccagccctccgtggccaagagatatgtggatcaaaagtttgtcctgatgctcctggagctatttgatagtgaggatccccgggagcgtgagtacctcaagaccatcctgcaccgggtctatggcaagttcctgggtctccgggcctacatccgcaaacagtgcaaccacatcttcctccggttcatctatgaattcgagcacttcaatggtgtggctgagctgctggagatcctaggaagcatcatcaatggctttgcgctgcccctgaagacggagcacaagcagttcctggttcgcgtcctgatccccctgcactctgtcaagtcgctgtctgtcttccatgcccagctggcatactgtgtggtgcagttcctggagaaggatgccactctgacagagcacgtgatccgggggctgctcaaatactggccaaaaacctgcacccagaaggaggtgatgtttctgggggagatggaagagattcttgatgtcatcgagccctcccagtttgtgaagatccaggagcccctttttaagcaggtggctcgctgtgtttccagcccccatttccaggttgcagagcgggctctgtatttctggaacaatgagtatatcctaagcctcattgaggacaactgccacactgtgctgcctgctgtgtttgggaccctctaccaagtctccaaggagcactggaaccaaaccatcgtatcactgatctacaatgtgctcaagaccttcatggagatgaatgggaagctgtttgatgagctcacagcctcctacaagctggaaaagcagcaggagcagcagaaggcccaggagcgtcaggagttatggcaaggtctggaggagctgcggctacgccggctacaggggacccagggggccaaggaggcccccctccagcggcttacaccccaggtggccgccagtgggggtcagagctagacagcacctcagaaggggaaaagctaaacccagagctgtcagtccctctatcccttctcctgtccaggggcccagagagaaacacacctacccctggccttgccagagtggcttctgaggactccctgcccagcccagctttcactggggggagacgaggagaggcaatggtggtcttggcaacagaatgctcagcccctcgtggcaggacttgacaagggcaagcttgaccaggaagctgccatcagggatcttcccctgccccgcaaagctaggctccagctgcaggcgggctcccaccctctgctcctggccttgggcaagggcactcagcgcctcgcctgcccctgccttggccaatgcgaggtccttccttatccccaccatggggtccatggtctatttattctcgcccagctcaccctctacacagacactgtcctgggtgcacactcctcccttccctcgctgtgtacttccttgtcccctttttatttattgggcagggggagggggagggcacaggcaagaagagattcacagtgtcctggggtaagggggggttcacagtaatcatggtctactcctctttccgtggctgggggtagacttaataaagagagaaattcaa

SEQ ID NO: 355123 - DNA, 2776 bp, Homo sapiens
ggtggggggaggtgacttgatgtcatcctgagcagctgggcggcgggtgccggtgcgcacggagccgagccggggctcccgttgcgctgcaccgcgttgggtcggagtcccaggacttcagcggagatccgcgcgctgcgacggccggtgcagagcccgccgagcgcccagtcccggcccggggctgagttgggggcatgctctagccgcccccccggagcccgggagagaacccaggagcgccgccgcccagccccagcgccccgagcggaaccgctgcgaaggggccctgaacggccgtcgccctccctacgggcagcccccgggggttggcgaccgaagtctaggttttcgagaaatctttctgcctgacttcgttttcaaaagagccagggtgggaaccctaactggactcttcgggacccccaggaaggatctgaggcctgagccatcctcctttctaccctgtctgccccccaggactgggcagttgcaggaggccctgggggggggcccaggactgtggttgtgccccccccccaaaggccggacaggatgggaccaagttagtctgtccagtctcacccagcacctcccaggcccagagagaacccccggggctctgaaagcttgccctgccgcctgaccgccatggagacgaagctgccccctgcaagcacccccactagcccctcctcccccgggctgtcgcctgtgcccccacccgacaaggtggacggcttctcccgccgttccctccgcagagcccggccccgccgctcccacagctcctctcagttccgctatcagagcaaccagcaagagctcacaccgctgcccctgctcaaagatgtgccggcttccgagctgcacgagctgctgagccggaagctggcccagtgtggggtgatgtttgacttcttggactgtgtggccgacctcaaggggaaggaggtgaagcgggcagccctcaacgagctggtggagtgtgtggggagcacccggggtgtcctcatcgagcccgtctacccagacatcatccgcatgatctcagtgaatatcttccggactctgccgcccagtgagaaccctgaatttgaccctgaagaggatgagcccaatcttgagccttcgtggccacacctgcagctggtatatgagtttttcctgcgtttcttggagagcccagacttccagccctccgtggccaagagatatgtggatcaaaagtttgtcctgatgctcctggagctatttgatagtgaggatccccgggagcgtgagtacctcaagaccatcctgcaccgggtctatggcaagttcctgggtctccgggcctacatccgcaaacagtgcaaccacatcttcctccggttcatctatgaattcgagcacttcaatggtgtggctgagctgctggagatcctaggaagcatcatcaatggctttgcgctgcccctgaagacggagcacaagcagttcctggttcgcgtcctgatccccctgcactctgtcaagtcgctgtctgtcttccatgcccagctggcatactgtgtggtgcagttcctggagaaggatgccactctgacagagcacgtgatccgggggctgctcaaatactggccaaaaacctgcacccagaaggaggtgatgtttctgggggagatggaagagattcttgatgtcatcgagccctcccagtttgtgaagatccaggagcccctttttaagcaggtggctcgctgtgtttccagcccccatttccaggttgcagagcgggctctgtatttctggaacaatgagtatatcctaagcctcattgaggacaactgccacactgtgctgcctgctgtgtttgggaccctctaccaagtctccaaggagcactggaaccaaaccatcgtatcactgatctacaatgtgctcaagaccttcatggagatgaatgggaagctgtttgatgagctcacagcctcctacaagctggaaaagcagcaggagcagcagaaggcccaggagcgtcaggagttatggcaaggtctggaggagctgcggctacgccggctacaggggacccagggggccaaggaggcccccctccagcggcttacaccccaggtggccgccagtgggggtcagagctagacagcacctcagaaggggaaaagctaaacccagagctgtcagtccctctatcccttctcctgtccaggggcccagagagaaacacacctacccctggccttgccagagtggcttctgaggactccctgcccagcccagctttcactggggggagacgaggagaggcaatggtggtcttggcaacagaatgctcagcccctcgtggcaggacttgacaagggcaagcttgaccaggaagctgccatcagggatcttcccctgccccgcaaagctaggctccagctgcaggcgggctcccaccctctgctcctggccttgggcaagggcactcagcgcctcgcctgcccctgccttggccaatgcgaggtccttccttatccccaccatggggtccatggtctatttattctcgcccagctcaccctctacacagacactgtcctgggtgcacactcctcccttccctcgctgtgtacttccttgtcccctttttatttattgggcagggggagggggagggcacaggcaagaagagattcacagtgtcctggggtaagggggggttcacagtaatcatggtctactcctctttccgtggctgggggtagacttaataaagagagaaattcaa

SEQ ID NO: 355124 - DNA, 2138 bp, Homo sapiens
  misc_feature (29)..(29): n is a, c, g, or t
tctgggattaccggcccccccgggggtangcgattcgtcgaccacgcgctcggggccctgaacggccgtcgccctccctacgggcagcccccgggggttggcgaccgaagtctaggttttcgagaaagcccggccccgccgctcccacagctcctctcagttccgctatcagagcaaccagcaagagctcacaccgctgcccctgctcaaagatgtgccggcttccgagctgcacgagctgctgagccggaagctggcccagtgtggggtgatgtttgacttcttggactgtgtggccgacctcaaggggaaggaggtgaagcgggcagccctcaacgagctggtggagtgtgtggggagcacccggggtgtcctcatcgagcccgtctacccagacatcatccgcatgatctcagtgaatatcttccggactctgccgcccagtgagaaccctgaatttgaccctgaagaggatgagcccaatcttgagccttcgtggccacacctgcagctggtatatgagtttttcctgcgtttcttggagagcccagacttccagccctccgtggccaagagatatgtggatcaaaagtttgtcctgatgctcctggagctatttgatagtgaggatccccgggagcgtgagtacctcaagaccatcctgcaccgggtctatggcaagttcctgggtctccgggcctacatccgcaaacagtgcaaccacatcttcctccggttcatctatgaattcgagcacttcaatggtgtggctgagctgctggagatcctaggaagcatcatcaatggctttgcgctgcccctgaagacggagcacaagcagttcctggttcgcgtcctgatccccctgcactctgtcaagtcgctgtctgtcttccatgcccagctggcatactgtgtggtgcagttcctggagaaggatgccactctgacagagcacgtgatccgggggctgctcaaatactggccaaaaacctgcacccagaaggaggtgatgtttctgggggagatggaagagattcttgatgtcatcgagccctcccagtttgtgaagatccaggagcccctttttaagcaggtggctcgctgtgtttccagcccccatttccaggttgcagagcgggctctgtatttctggaacaatgagtatatcctaagcctcattgaggacaactgccacactgtgctgcctgctgtgtttgggaccctctaccaagtctccaaggagcactggaaccaaaccatcgtatcactgatctacaatgtgctcaagaccttcatggagatgaatgggaagctgtttgatgagctcacagcctcctacaagctggaaaagcagcaggagcagcagaaggcccaggagcgtcaggagttatggcaaggtctggaggagctgcggctacgccggctacaggggacccagggggccaaggaggcccccctccagcggcttacaccccaggtggccgccagtgggggtcagagctagacagcacctcagaaggggaaaagctaaacccagagctgtcagtccctctatcccttctcctgtccaggggcccagagagaaacacacctacccctggccttgccagagtggcttctgaggactccctgcccagcccagctttcactggggggagacgaggagaggcaatggtggtcttggcaacagaatgctcagcccctcgtggcaggacttgacaagggcaagcttgaccaggaagctgccatcagggatcttcccctgccccgcaaagctaggctccagctgcaggcgggctcccaccctctgctcctggccttgggcaagggcactcagcgcctcgcctgcccctgccttggccaatgcgaggtccttccttatccccaccatggggtccatggtctatttattctcgcccagctcaccctctacacagacactgtcctgggtgcacactcctcccttccctcgctgtgtacttccttgtcccctttttatttattgggcagggggagggggagggcacaggcaagaagagattcacagtgtcctggggtaagggggggttcacagtaatcatggtctactcctctttccgtggctgggggtagacttaataaagagagaaattcaa

SEQ ID NO: 355125 - DNA, 2624 bp, Homo sapiens
ggtggggggaggtgacttgatgtcatcctgagcagctgggcggcgggtgccggtgcgcacggagccgagccggggctcccgttgcgctgcaccgcgttgggtcggagtcccaggacttcagcggagatccgcgcgctgcgacggccggtgcagagcccgccgagcgcccagtcccggcccggggctgagttgggggcatgctctagccgcccccccggagcccgggagagaacccaggagcgccgccgcccagccccagcgccccgagcggaaccgctgcgaaggggccctgaacggccgtcgccctccctacgggcagcccccgggggttggcgaccgaagtctaggttttcgagaaagccagggtgggaaccctaactggactcttcgggacccccaggaaggatctgaggcctgagccatcctcctttctaccctgtctgccccccaggactgggcagttgcaggaggccctgggggggggcccaggactgtggttgtgccccccccccaaaggccggacaggatgggaccaagttagtctgtccagtctcacccagcacctcccaggcccagagagaacccccggggctctgaaagcttgccctgccgcctgaccgccatggagacgaagctgccccctgcaagcacccccactagcccctcctcccccgggctgtcgcctgtgcccccacccgacaaggtggacggcttctcccgccgttccctccgcagagcccggccccgccgctcccacagctcctctcagttccgctatcagagcaaccagcaagagctcacaccgctgcccctgctcaaagatgtgccggcttccgagctgcacgagctgctgagccggaagctggcccagtgtggggtgatgtttgacttcttggactgtgtggccgacctcaaggggaaggaggtgaagcgggcagccctcaacgagctggtggagtgtgtggggagcacccggggtgtcctcatcgagcccgtctacccagacatcatccgcatgatctcagtgaatatcttccggactctgccgcccagtgagaaccctgaatttgaccctgaagaggatgagcccaatcttgagccttcgtggccacacctgcagctggtatatgagtttttcctgcgtttcttggagagcccagacttccagccctccgtggccaagagatatgtggatcaaaagtttgtcctgatgctcctggagctatttgatagtgaggatccccgggagcgtgagtacctcaagaccatcctgcaccgggtctatggcaagttcctgggtctccgggcctacatccgcaaacagtgcaaccacatcttcctccggttcatctatgaattcgagcacttcaatggtgtggctgagctgctggagatcctaggaagcatcatcaatggctttgcgctgcccctgaagacggagcacgtgatccgggggctgctcaaatactggccaaaaacctgcacccagaaggaggtgatgtttctgggggagatggaagagattcttgatgtcatcgagccctcccagtttgtgaagatccaggagcccctttttaagcaggtggctcgctgtgtttccagcccccatttccaggttgcagagcgggctctgtatttctggaacaatgagtatatcctaagcctcattgaggacaactgccacactgtgctgcctgctgtgtttgggaccctctaccaagtctccaaggagcactggaaccaaaccatcgtatcactgatctacaatgtgctcaagaccttcatggagatgaatgggaagctgtttgatgagctcacagcctcctacaagctggaaaagcagcaggagcagcagaaggcccaggagcgtcaggagttatggcaaggtctggaggagctgcggctacgccggctacaggggacccagggggccaaggaggcccccctccagcggcttacaccccaggtggccgccagtgggggtcagagctagacagcacctcagaaggggaaaagctaaacccagagctgtcagtccctctatcccttctcctgtccaggggcccagagagaaacacacctacccctggccttgccagagtggcttctgaggactccctgcccagcccagctttcactggggggagacgaggagaggcaatggtggtcttggcaacagaatgctcagcccctcgtggcaggacttgacaagggcaagcttgaccaggaagctgccatcagggatcttcccctgccccgcaaagctaggctccagctgcaggcgggctcccaccctctgctcctggccttgggcaagggcactcagcgcctcgcctgcccctgccttggccaatgcgaggtccttccttatccccaccatggggtccatggtctatttattctcgcccagctcaccctctacacagacactgtcctgggtgcacactcctcccttccctcgctgtgtacttccttgtcccctttttatttattgggcagggggagggggagggcacaggcaagaagagattcacagtgtcctggggtaagggggggttcacagtaatcatggtctactcctctttccgtggctgggggtagacttaataaagagagaaattcaa

SEQ ID NO: 355126 - DNA, 1092 bp, Homo sapiens
tatgcctgactgtctgcccctgtatcctcccgtcattcttcgagtagctcagacttgttctgactccctgtagcttcctacagaagccagaaccactcaggccccacccgtcatcttctctgtgactgcaggctgggatctgtctgtcctctgctctcttccctcagtagagggtttttatggagtcacagaacaaaaatggttccatgccttccctttgccggtggggtggtagtgagggagtctggactgtgagggagtctggactgtggggggccccaggaaagggagctgcctcaccctctctccccagggagcagcagaaggcccaggagcgtcaggagttatggcaaggtctggaggagctgcggctacgccggctacaggggacccagggggccaaggaggcccccctccagcggcttacaccccaggtggccgccagtgggggtcagagctagacagcacctcagaaggggaaaagctaaacccagagctgtcagtccctctatcccttctcctgtccaggggcccagagagaaacacacctacccctggccttgccagagtggcttctgaggactccctgcccagcccagctttcactggggggagacgaggagaggcaatggtggtcttggcaacagaatgctcagcccctcgtggcaggacttgacaagggcaagcttgaccaggaagctgccatcagggatcttcccctgccccgcaaagctaggctccagctgcaggcgggctcccaccctctgctcctggccttgggcaagggcactcagcgcctcgcctgcccctgccttggccaatgcgaggtccttccttatccccaccatggggtccatggtctatttattctcgcccagctcaccctctacacagacactgtcctgggtgcacactcctcccttccctcgctgtgtacttccttgtcccctttttatttattgggcagggggagggggagggcacaggcaagaagagattcacagtgtcctggggtaagggggggttcacagtaatcatggtctactcctctttccgtggctgggggtagacttaataaagagagaaattcaa

SEQ ID NO: 355127 - DNA, 2413 bp, Homo sapiens
ggtggggggaggtgacttgatgtcatcctgagcagctgggcggcgggtgccggtgcgcacggagccgagccggggctcccgttgcgctgcaccgcgttgggtcggagtcccaggacttcagcggagatccgcgcgctgcgacggccggtgcagagcccgccgagcgcccagtcccggcccggggctgagttgggggcatgctctagccgcccccccggagcccgggagagaacccaggagcgccgccgcccagccccagcgccccgagcggaaccgctgcgaaggggccctgaacggccgtcgccctccctacgggcagcccccgggggttggcgaccgaagtctaggttttcgagaaagccagggtgggaaccctaactggactcttcgggacccccaggaaggatctgaggcctgagccatcctcctttctaccctgtctgccccccaggactgggcagttgcaggaggccctgggggggggcccaggactgtggttgtgccccccccccaaaggccggacaggatgggaccaagttagtctgtccagtctcacccagcacctcccaggcccagagagaacccccggggctctgaaagcttgccctgccgcctgaccgccatggagacgaagctgccccctgcaagcacccccactagcccctcctcccccgggctgtcgcctgtgcccccacccgacaaggtggacggcttctcccgccgttccctccgcagagcccggccccgccgctcccacagctcctctcagttccgctatcagagcaaccagcaagagctcacaccgctgcccctgctcaaagatgtgccggcttccgagctgcacgagctgctgagccggaagctggcccagtgtggggtgatgtttgacttcttggactgtgtggccgacctcaaggggaaggaggtgaagcgggcagccctcaacgagctggtggagtgtgtggggagcacccggggtgtcctcatcgagcccgtctacccagacatcatccgcatgatctcagtgaatatcttccggactctgccgcccagtgagaaccctgaatttgaccctgaagaggatgagcccaatcttgagccttcgtggccacacctgcagctggtatatgagtttttcctgcgtttcttggagagcccagacttccagccctccgtggccaagagatatgtggatcaaaagtttgtcctgatgctcctggagctatttgatagtgaggatccccgggagcgtgagtacctcaagaccatcctgcaccgggtctatggcaagttcctgggtctccgggcctacatccgcaaacagtgcaaccacatcttcctccggttcatctatgaattcgagcacttcaatggtgtggctgagctgctggagatcctaggaagcatcatcaatggctttgcgctgcccctgaagacggagcacaagcagttcctggttcgcgtcctgatccccctgcactctgtcaagtcgctgtctgtcttccatgcccagctggcatactgtgtggtgcagttcctggagaaggatgccactctgacagagcacgtgatccgggggctgctcaaatactggccaaaaacctgcacccagaaggaggtgatgtttctgggggagatggaagagattcttgatgtcatcgagccctcccagtttgtgaagatccaggagcccctttttaagcaggtggctcgctgtgtttccagcccccatttccaggttgcagagcgggctctgtatttctggaacaatgagtatatcctaagcctcattgaggacaactgccacactgtgctgcctgctgtgtttgggaccctctaccaagtctccaaggagcactggaaccaaaccatcgtatcactgatctacaatgtgctcaagaccttcatggagatgaatgggaagctgtttgatgagctcacagcctcctacaagctggaaaagcagcaggagcagcagaaggcccaggagcgtcaggagttatggcaaggtctggaggagctgcggctacgccggctacaggggacccagggggccaaggaggcccccctccagcggcttacaccccaggtggccgccagtgggggtcagagctagacagcacctcagaaggggaaaagctaaacccagagctgtcagtccctctatcccttctcctgtccaggggcccagagagaaacacacctacccctggccttgccagagtggcttctgaggactcccttccctcgctgtgtacttccttgtcccctttttatttattgggcagggggagggggagggcacaggcaagaagagattcacagtgtcctggggtaagggggggttcacagtaatcatggtctactcctctttccgtggctgggggtagacttaataaagagagaaattcaa

SEQ ID NO: 355128 - DNA, 1676 bp, Homo sapiens
ggtggggggaggtgacttgatgtcatcctgagcagctgggcggcgggtgccggtgcgcacggagccgagccggggctcccgttgcgctgcaccgcgttgggtcggagtcccaggacttcagcggagatccgcgcgctgcgacggccggtgcagagcccgccgagcgcccagtcccggcccggggctgagttgggggcatgctctagccgcccccccggagcccgggagagaacccaggagcgccgccgcccagccccagcgccccgagcggaaccgctgcgaaggggccctgaacggccgtcgccctccctacgggcagcccccgggggttggcgaccgaagtctaggttttcgagaaagccagggtgggaaccctaactggactcttcgggacccccaggaaggatctgaggcctgagccatcctcctttctaccctgtctgccccccaggactgggcagttgcaggaggccctgggggggggcccaggactgtggttgtgccccccccccaaaggccggacaggatgggaccaagttagtctgtccagtctcacccagcacctcccaggcccagagagaacccccggggctctgaaagcttgccctgccgcctgaccgccatggagacgaagctgccccctgcaagcacccccactagcccctcctcccccgggctgtcgcctgtgcccccacccgacaaggtggacggcttctcccgccgttccctccgcagagcccggccccgccgctcccacagctcctctcagttccgctatcagagcaaccagcaagagctcacaccgctgcccctgctcaaagatgtgccggcttccgagctgcacgagctgctgagccggaagctggcccagtgtggggtgatgtttgacttcttggactgtgtggccgacctcaaggggaaggaggtgaagcgggcagccctcaacgagctggtggagtgtgtggggagcacccggggtgtcctcatcgagcccgtctacccagacatcatccgcatgatctcagtgaatatcttccggactctgccgcccagtgagaaccctgaatttgaccctgaagaggatgagcccaatcttgagccttcgtggccacacctgcagctggtatatgagtttttcctgcgtttcttggagagcccagacttccagccctccgtggccaagagatatgtggatcaaaagtttgtcctgatgctcctggagctatttgatagtgaggatccccgggagcgtgagtacctcaagaccatcctgcaccgggtctatggcaagttcctgggtctccgggcctacatccgcaaacagtgcaaccacatcttcctccggttcatctatgaattcgagcacttcaatggtgtggctgagctgctggagatcctaggaagcatcatcaatggctttgcgctgcccctgaagacggagcacgtgatccgggggctgctcaaatactggccaaaaacctgcacccagaaggaggtgatgtttctgggggagatggaagagattcttgatgtcatcgagccctcccagtttgtgaagatccaggagcccctttttaagcaggtggctcgctgtgtttccagcccccatttccaacattgcggagcggactccgcctttccggctcgaagcacttatgctaagccccatttaaaga

SEQ ID NO: 355129 - DNA, 1434 bp, Homo sapiens
ggtggggggaggtgacttgatgtcatcctgagcagctgggcggcgggtgccggtgcgcacggagccgagccggggctcccgttgcgctgcaccgcgttgggtcggagtcccaggacttcagcggagatccgcgcgctgcgacggccggtgcagagcccgccgagcgcccagtcccggcccggggctgagttgggggcatgctctagccgcccccccggagcccgggagagaacccaggagcgccgccgcccagccccagcgccccgagcggaaccgctgcgaaggggccctgaacggccgtcgccctccctacgggcagcccccgggggttggcgaccgaagtctaggttttcgagaaagccagggtgggaaccctaactggactcttcgggacccccaggaaggatctgaggcctgagccatcctcctttctaccctgtctgccccccaggactgggcagttgcaggaggccctgggggggggcccaggactgtggttgtgccccccccccaaaggccggacaggatgggaccaagttagtctgtccagtctcacccagcacctcccaggcccagagagaacccccggggctctgaaagcttgccctgccgcctgaccgccatggagacgaagctgccccctgcaagcacccccactagcccctcctcccccgggctgtcgcctgtgcccccacccgacaaggtggacggcttctcccgccgttccctccgcagagcccggccccgccgctcccacagctcctctcagttccgctatcagagcaaccagcaagagctcacaccgctgcccctgctcaaagatgtgccggcttccgagctgcacgagctgctgagccggaagctggcccagtgtggggtgatgtttgacttcttggactgtgtggccgacctcaaggggaaggaggtgaagcgggcagccctcaacgagctggtggagtgtgtggggagcacccggggtgtcctcatcgagcccgtctacccagacatcatccgcatggtgagcacctgccacccaggctccgagggccggccgagagggcgtgtgagccccgtttcctgtccgcaggacccctgcgtggagaataaccctgtactcatcggcttggcctcagtccacgacttccttccccccgacctgctgctgcccaacacccactgaatgcctccgggcctgccccacgtccacacctttgcttatgcttgcctgagacctggagtgccctgccccacaccccataccatccatggcctggctcaggtgccgcctctgccaagaagccgctgtcaataaccaagctggaaatctctcttttcctgcccgtagacctcacagcttctagccttgttctccccactggattgcacctgcctagaaggcagggatgtgtcccattcactgctgggttcccagcc

SEQ ID NO: 355130 - DNA, 836 bp, Homo sapiens
ggtggggggaggtgacttgatgtcatcctgagcagctgggcggcgggtgccggtgcgcacggagccgagccggggctcccgttgcgctgcaccgcgttgggtcggagtcccaggacttcagcggagatccgcgcgctgcgacggccggtgcagagcccgccgagcgcccagtcccggcccggggctgagttgggggcatgctctagccgcccccccggagcccgggagagaacccaggagcgccgccgcccagccccagcgccccgagcggaaccgctgcgaaggggccctgaacggccgtcgccctccctacgggcagcccccgggggttggcgaccgaagtctaggttttcgagaaagccagggtgggaaccctaactggactcttcgggacccccaggaaggatctgaggcctgagccatcctcctttctaccctgtctgccccccaggactgggcagttgcaggaggccctgggggggggcccaggactgtggttgtgccccccccccaaaggccggacaggatgggaccaagttagtctgtccagtctcacccagcacctcccaggcccagagagaacccccggggctctgaaagcttgccctgccgcctgaccgccatggagacgaagctgccccctgcaagcacccccactagcccctcctcccccgggctgtcgcctgtgccccctttttatttattgggcagggggagggggagggcacaggcaagaagagattcacagtgtcctggggtaagggggggttcacagtaatcatggtctactcctctttccgtggctgggggtagacttaataaagagagaaattcaa

SEQ ID NO: 355131 - DNA, 155 bp, Homo sapiens
ggaaaagacctgggcactccacgcagcctcccggctctcctgaggaactgatgggctttctctgtctctttcttgctgatctttctgcctgacttcgttttcaaaagagccagggtgggaaccctaactggactcttcgggacccccaggaagga

SEQ ID NO: 355132 - DNA, 2515 bp, Homo sapiens
  misc_feature (29)..(29): n is a, c, g, or t
tctgggattaccggcccccccgggggtangcgattcgtcgaccacgcgctcggggccctgaacggccgtcgccctccctacgggcagcccccgggggttggcgaccgaagtctaggttttcgagaaagccagggtgggaaccctaactggactcttcgggacccccaggaaggatctgaggcctgagccatcctcctttctaccctgtctgccccccaggactgggcagttgcaggaggccctgggggggggcccaggactgtggttgtgccccccccccaaaggccggacaggatgggaccaagttagtctgtccagtctcacccagcacctcccaggcccagagagaacccccggggctctgaaagcttgccctgccgcctgaccgccatggagacgaagctgccccctgcaagcacccccactagcccctcctcccccgggctgtcgcctgtgcccccacccgacaaggtggacggcttctcccgccgttccctccgcagagcccggccccgccgctcccacagctcctctcagttccgctatcagagcaaccagcaagagctcacaccgctgcccctgctcaaagatgtgccggcttccgagctgcacgagctgctgagccggaagctggcccagtgtggggtgatgtttgacttcttggactgtgtggccgacctcaaggggaaggaggtgaagcgggcagccctcaacgagctggtggagtgtgtggggagcacccggggtgtcctcatcgagcccgtctacccagacatcatccgcatgatctcagtgaatatcttccggactctgccgcccagtgagaaccctgaatttgaccctgaagaggatgagcccaatcttgagccttcgtggccacacctgcagctggtatatgagtttttcctgcgtttcttggagagcccagacttccagccctccgtggccaagagatatgtggatcaaaagtttgtcctgatgctcctggagctatttgatagtgaggatccccgggagcgtgagtacctcaagaccatcctgcaccgggtctatggcaagttcctgggtctccgggcctacatccgcaaacagtgcaaccacatcttcctccggttcatctatgaattcgagcacttcaatggtgtggctgagctgctggagatcctaggaagcatcatcaatggctttgcgctgcccctgaagacggagcacaagcagttcctggttcgcgtcctgatccccctgcactctgtcaagtcgctgtctgtcttccatgcccagctggcatactgtgtggtgcagttcctggagaaggatgccactctgacagagcacgtgatccgggggctgctcaaatactggccaaaaacctgcacccagaaggaggtgatgtttctgggggagatggaagagattcttgatgtcatcgagccctcccagtttgtgaagatccaggagcccctttttaagcaggtggctcgctgtgtttccagcccccatttccaggttgcagagcgggctctgtatttctggaacaatgagtatatcctaagcctcattgaggacaactgccacactgtgctgcctgctgtgtttgggaccctctaccaagtctccaaggagcactggaaccaaaccatcgtatcactgatctacaatgtgctcaagaccttcatggagatgaatgggaagctgtttgatgagctcacagcctcctacaagctggaaaagcagcaggagcagcagaaggcccaggagcgtcaggagttatggcaaggtctggaggagctgcggctacgccggctacaggggacccagggggccaaggaggcccccctccagcggcttacaccccaggtggccgccagtgggggtcagagctagacagcacctcagaaggggaaaagctaaacccagagctgtcagtccctctatcccttctcctgtccaggggcccagagagaaacacacctacccctggccttgccagagtggcttctgaggactccctgcccagcccagctttcactggggggagacgaggagaggcaatggtggtcttggcaacagaatgctcagcccctcgtggcaggacttgacaagggcaagcttgaccaggaagctgccatcagggatcttcccctgccccgcaaagctaggctccagctgcaggcgggctcccaccctctgctcctggccttgggcaagggcactcagcgcctcgcctgcccctgccttggccaatgcgaggtccttccttatccccaccatggggtccatggtctatttattctcgcccagctcaccctctacacagacactgtcctgggtgcacactcctcccttccctcgctgtgtacttccttgtcccctttttatttattgggcagggggagggggagggcacaggcaagaagagattcacagtgtcctggggtaagggggggttcacagtaatcatggtctactcctctttccgtggctgggggtagacttaataaagagagaaattcaa

SEQ ID NO: 355133 - DNA, 2632 bp, Homo sapiens
gtaaactcagtgcgcgatcttaagcgcgcatctgtggaaacaattaaaaaaagtttgccaaccgctgctctgtagggggcagccacacaaaacctcttacatcatgggcgacttcaggaacagccatagggtctctgtcacccaggctggaatgcgacagcacaatcacagcttactgcagcctctaactcctgggcttatgtgatcttcccacctcagcctcccaaagtattgagattacagagccagggtgggaaccctaactggactcttcgggacccccaggaaggatctgaggcctgagccatcctcctttctaccctgtctgccccccaggactgggcagttgcaggaggccctgggggggggcccaggactgtggttgtgccccccccccaaaggccggacaggatgggaccaagttagtctgtccagtctcacccagcacctcccaggcccagagagaacccccggggctctgaaagcttgccctgccgcctgaccgccatggagacgaagctgccccctgcaagcacccccactagcccctcctcccccgggctgtcgcctgtgcccccacccgacaaggtggacggcttctcccgccgttccctccgcagagcccggccccgccgctcccacagctcctctcagttccgctatcagagcaaccagcaagagctcacaccgctgcccctgctcaaagatgtgccggcttccgagctgcacgagctgctgagccggaagctggcccagtgtggggtgatgtttgacttcttggactgtgtggccgacctcaaggggaaggaggtgaagcgggcagccctcaacgagctggtggagtgtgtggggagcacccggggtgtcctcatcgagcccgtctacccagacatcatccgcatgatctcagtgaatatcttccggactctgccgcccagtgagaaccctgaatttgaccctgaagaggatgagcccaatcttgagccttcgtggccacacctgcagctggtatatgagtttttcctgcgtttcttggagagcccagacttccagccctccgtggccaagagatatgtggatcaaaagtttgtcctgatgctcctggagctatttgatagtgaggatccccgggagcgtgagtacctcaagaccatcctgcaccgggtctatggcaagttcctgggtctccgggcctacatccgcaaacagtgcaaccacatcttcctccggttcatctatgaattcgagcacttcaatggtgtggctgagctgctggagatcctaggaagcatcatcaatggctttgcgctgcccctgaagacggagcacaagcagttcctggttcgcgtcctgatccccctgcactctgtcaagtcgctgtctgtcttccatgcccagctggcatactgtgtggtgcagttcctggagaaggatgccactctgacagagcacgtgatccgggggctgctcaaatactggccaaaaacctgcacccagaaggaggtgatgtttctgggggagatggaagagattcttgatgtcatcgagccctcccagtttgtgaagatccaggagcccctttttaagcaggtggctcgctgtgtttccagcccccatttccaggttgcagagcgggctctgtatttctggaacaatgagtatatcctaagcctcattgaggacaactgccacactgtgctgcctgctgtgtttgggaccctctaccaagtctccaaggagcactggaaccaaaccatcgtatcactgatctacaatgtgctcaagaccttcatggagatgaatgggaagctgtttgatgagctcacagcctcctacaagctggaaaagcagcaggagcagcagaaggcccaggagcgtcaggagttatggcaaggtctggaggagctgcggctacgccggctacaggggacccagggggccaaggaggcccccctccagcggcttacaccccaggtggccgccagtgggggtcagagctagacagcacctcagaaggggaaaagctaaacccagagctgtcagtccctctatcccttctcctgtccaggggcccagagagaaacacacctacccctggccttgccagagtggcttctgaggactccctgcccagcccagctttcactggggggagacgaggagaggcaatggtggtcttggcaacagaatgctcagcccctcgtggcaggacttgacaagggcaagcttgaccaggaagctgccatcagggatcttcccctgccccgcaaagctaggctccagctgcaggcgggctcccaccctctgctcctggccttgggcaagggcactcagcgcctcgcctgcccctgccttggccaatgcgaggtccttccttatccccaccatggggtccatggtctatttattctcgcccagctcaccctctacacagacactgtcctgggtgcacactcctcccttccctcgctgtgtacttccttgtcccctttttatttattgggcagggggagggggagggcacaggcaagaagagattcacagtgtcctggggtaagggggggttcacagtaatcatggtctactcctctttccgtggctgggggtagacttaataaagagagaaattcaa

SEQ ID NO: 355134 - DNA, 2693 bp, Homo sapiens
ggtggggggaggtgacttgatgtcatcctgagcagctgggcggcgggtgccggtgcgcacggagccgagccggggctcccgttgcgctgcaccgcgttgggtcggagtcccaggacttcagcggagatccgcgcgctgcgacggccggtgcagagcccgccgagcgcccagtcccggcccggggctgagttgggggcatgctctagccgcccccccggagcccgggagagaacccaggagcgccgccgcccagccccagcgccccgagcggaaccgctgcgaaggggccctgaacggccgtcgccctccctacgggcagcccccgggggttggcgaccgaagtctaggttttcgagaaagccagggtgggaaccctaactggactcttcgggacccccaggaaggatctgaggcctgagccatcctcctttctaccctgtctgccccccaggactgggcagttgcaggaggccctgggggggggcccaggactgtggttgtgccccccccccaaaggccggacaggatgggaccaagttagtctgtccagtctcacccagcacctcccaggcccagagagaacccccggggctctgaaagcttgccctgccgcctgaccgccatggagacgaagctgccccctgcaagcacccccactagcccctcctcccccgggctgtcgcctgtgcccccacccgacaaggtggacggcttctcccgccgttccctccgcagagcccggccccgccgctcccacagctcctctcagttccgctatcagagcaaccagcaagagctcacaccgctgcccctgctcaaagatgtgccggcttccgagctgcacgagctgctgagccggaagctggcccagtgtggggtgatgtttgacttcttggactgtgtggccgacctcaaggggaaggaggtgaagcgggcagccctcaacgagctggtggagtgtgtggggagcacccggggtgtcctcatcgagcccgtctacccagacatcatccgcatgatctcagtgaatatcttccggactctgccgcccagtgagaaccctgaatttgaccctgaagaggatgagcccaatcttgagccttcgtggccacacctgcagctggtatatgagtttttcctgcgtttcttggagagcccagacttccagccctccgtggccaagagatatgtggatcgtgagtacctcaagaccatcctgcaccgggtctatggcaagttcctgggtctccgggcctacatccgcaaacagtgcaaccacatcttcctccggttcatctatgaattcgagcacttcaatggtgtggctgagctgctggagatcctaggaagcatcatcaatggctttgcgctgcccctgaagacggagcacaagcagttcctggttcgcgtcctgatccccctgcactctgtcaagtcgctgtctgtcttccatgcccagctggcatactgtgtggtgcagttcctggagaaggatgccactctgacagagcacgtgatccgggggctgctcaaatactggccaaaaacctgcacccagaaggaggtgatgtttctgggggagatggaagagattcttgatgtcatcgagccctcccagtttgtgaagatccaggagcccctttttaagcaggtggctcgctgtgtttccagcccccatttccaggttgcagagcgggctctgtatttctggaacaatgagtatatcctaagcctcattgaggacaactgccacactgtgctgcctgctgtgtttgggaccctctaccaagtctccaaggagcactggaaccaaaccatcgtatcactgatctacaatgtgctcaagaccttcatggagatgaatgggaagctgtttgatgagctcacagcctcctacaagctggaaaagcagcaggagcagcagaaggcccaggagcgtcaggagttatggcaaggtctggaggagctgcggctacgccggctacaggggacccagggggccaaggaggcccccctccagcggcttacaccccaggtggccgccagtgggggtcagagctagacagcacctcagaaggggaaaagctaaacccagagctgtcagtccctctatcccttctcctgtccaggggcccagagagaaacacacctacccctggccttgccagagtggcttctgaggactccctgcccagcccagctttcactggggggagacgaggagaggcaatggtggtcttggcaacagaatgctcagcccctcgtggcaggacttgacaagggcaagcttgaccaggaagctgccatcagggatcttcccctgccccgcaaagctaggctccagctgcaggcgggctcccaccctctgctcctggccttgggcaagggcactcagcgcctcgcctgcccctgccttggccaatgcgaggtccttccttatccccaccatggggtccatggtctatttattctcgcccagctcaccctctacacagacactgtcctgggtgcacactcctcccttccctcgctgtgtacttccttgtcccctttttatttattgggcagggggagggggagggcacaggcaagaagagattcacagtgtcctggggtaagggggggttcacagtaatcatggtctactcctctttccgtggctgggggtagacttaataaagagagaaattcaa

SEQ ID NO: 355135 - DNA, 554 bp, Homo sapiens
tatgaatatgccagcagcggcaggaagcctggggggttctgactctccctgcccagcccagctttcactggggggagacgaggagaggcaatggtggtcttggcaacagaatgctcagcccctcgtggcaggacttgacaagggcaagcttgaccaggaagctgccatcagggatcttcccctgccccgcaaagctaggctccagctgcaggcgggctcccaccctctgctcctggccttgggcaagggcactcagcgcctcgcctgcccctgccttggccaatgcgaggtccttccttatccccaccatggggtccatggtctatttattctcgcccagctcaccctctacacagacactgtcctgggtgcacactcctcccttccctcgctgtgtacttccttgtcccctttttatttattgggcagggggagggggagggcacaggcaagaagagattcacagtgtcctggggtaagggggggttcacagtaatcatggtctactcctctttccgtggctgggggtagacttaataaagagagaaattcaa

SEQ ID NO: 355136 - DNA, 1424 bp, Homo sapiens
ggtggggggaggtgacttgatgtcatcctgagcagctgggcggcgggtgccggtgcgcacggagccgagccggggctcccgttgcgctgcaccgcgttgggtcggagtcccaggacttcagcggagatccgcgcgctgcgacggccggtgcagagcccgccgagcgcccagtcccggcccggggctgagttgggggcatgctctagccgcccccccggagcccgggagagaacccaggagcgccgccgcccagccccagcgccccgagcggaaccgctgcgaaggggccctgaacggccgtcgccctccctacgggcagcccccgggggttggcgaccgaagtctaggttttcgagaaagccagggtgggaaccctaactggactcttcgggacccccaggaaggatctgaggcctgagccatcctcctttctaccctgtctgccccccaggactgggcagttgcaggaggccctgggggggggcccaggactgtggttgtgccccccccccaaaggccggacaggatgggaccaagttagtctgtccagtctcacccagcacctcccaggcccagagagaacccccggggctctgaaagcttgccctgccgcctgaccgccatggagacgaagctgccccctgcaagcacccccactagcccctcctcccccgggctgtcgcctgtgcccccacccgacaaggtggacggcttctcccgccgttccctccgcagagcccggccccgccgctcccacagctcctctcagttccgctatcagagcaaccagcaagagctcacaccgctgcccctgctcaaagatgtgccggcttccgagctgcacgagctgctgagccggaagctggcccagtgtggggtgatgtttgacttcttggactgtgtggccgacctcaaggggaaggaggtgaagcgggcagccctcaacgagctggtggagtgtgtggggagcacccggggtgtcctcatcgagcccgtctacccagacatcatccgcatgatctcagtgaatatcttccggactctgccgcccagtgagaaccctgaatttgaccctgaagaggcgggctcccaccctctgctcctggccttgggcaagggcactcagcgcctcgcctgcccctgccttggccaatgcgaggtccttccttatccccaccatggggtccatggtctatttattctcgcccagctcaccctctacacagacactgtcctgggtgcacactcctcccttccctcgctgtgtacttccttgtcccctttttatttattgggcagggggagggggagggcacaggcaagaagagattcacagtgtcctggggtaagggggggttcacagtaatcatggtctactcctctttccgtggctgggggtagacttaataaagagagaaattcaa

SEQ ID NO: 355137 - DNA, 446 bp, Homo sapiens
cccacatctgtttccagacactgagcacagaaataaacacccagctctgtcaaaccactgagccggcaagagaacacgctccatgaacatgcacggaaaccatatcgaggtggagagcaaggggcgctctcctgtgatgtggttggagttttaaaaaccgtgtttgccagtaattctcttgtccctttcatgttgtggcaaagagctggatcttatttctcgtgggctgcgaggtgccagtggcagaagtgatttgctgggtttgcattctgagatcctccaaagctgtctgctatcaaaacacagtcgtgccaggacaatggggcagcctgaagatgaaggtggctttgtagcctctgctcctaagatgatactgacacttaaggacagggttcagggcggggggtgcccagggcacatcctctctagcctgctattagtccaca

SEQ ID NO: 355138 - DNA, 323 bp, Homo sapiens
agtagagacagggtttcaccatgttggccaggctggtctcaaactcctgagctcaggtgatccacctgcctcggcctcccaaagtgctgggattacaggcataagccactatgctcagccaggcttgggtatttggatgggagataatgcggtgagagaggacggtaaagtcaaacaacagaagagggtaaatggcttttcttggatggaagaaaattcttccagctctcccttatgcctagaatctaaaagtcagcttggcaatgcagtgattcagctccactttaaggagacaaactccaccatggaaaggcttggaaacc

SEQ ID NO: 355139 - DNA, 319 bp, Homo sapiens
tccacccgccttggcctcccaaattcctgtgattacaggcatgagccaccatgcctggccttcttcctttttaaataatggcacgagtcccatcatcctcatgatcctccacccttgggatctcatctaaacctagttacctttcaaaggcctcacctcctactcccatcacattggagattagagattcagcatatgaggctgggcacagtggctcatgcctgtaattccagcactttggaaggctgaggcgggtggatcacttgaggtcaggagttcaagaccagcctggccaacgtgatgaaaccccatctctact

SEQ ID NO: 355140 - DNA, 913 bp, Homo sapiens
tgctcctggtgccgccaccgtccgccggtgcctgttgctgccgccgccgcgggacctgctgtgtcctcagctgggtggagaagaggcgggcgccgagccgaggggagccccctccccgtccccccgcggcgggaagagcgcagccagccgggtgcgatggactccccgcccgcccaggccgtccccaggatgcccccaagcacctgcgcgtcccggcccggccccgggctctgagcgcgccgcggcacaggtttctgcatatgaagtgtgtaaaatagattgcttgatccaaaacagaaaaacagtgataactgttttgctgagttcccagacccttcccaagatggaaccaataacattcacagcaaggaaacatctgctttctaacgaggtctcggtggattttggcctgcagctggtgggctccctgcctgtgcattccctgaccaccatgcccatgctgccctgggttgtggctgaggtgcgaagactcagcaggcagtccaccagaaaggaacctgtaaccaagcaagtccggctttgcgtttcaccctctggactgagatgtgaacctgagccagggagaagtcaacagtgggatcccctgatctattccagcatctttgagtgcaagcctcagcgtgttcacaaactgattcacaacagtcatgacccaagttactttgcttgtctgattaaggaagacgctgtccaccggcagagtatctgctatgtgttcaaagccgatgatcaaacaaaatgctcatcatcactgtaggggacctttgaaagagctgccggagaaggtgaggaagaaagccctgcctggaaagcaacagtgaaccaccagtgtcagcaacgtgaagcttgctgcaaggcctgcagtcatgatgaacccagcagcttctagttc

SEQ ID NO: 355141 - DNA, 593 bp, Homo sapiens
ctctgttcttgattttgtgtttttgttctgtttatgggaggatttctaaaaatttttttgtgacttgtggaggtcacatgatttaaacaacccatgctattgtgaaaagaaaacaaaaatttgatcatttctcatgtttgtagaatgtttattatacacctgtaattccagcgcttggggaggctgaggtgggcagatcacttcaggccaagagttcgagaccagcctgggcaacatggtgaaaccctgtctctacgaaatacaaatacatctcaaatacgtttctactaaatacaaaaattagctgggtgtggtggtgtgtgcctgtaattccagctacttgggaggctgaggcaggagaatcatttgagcccgggagatggaggttgcagtgagccgagattgtgccgctgtgctccagcctgggcaacagagcgagatgtctgggaaatgctatgtgtaaaaaatagcaaaccagtgttgtcccaacctgggggaaggtgccttgagttcgtcttggtttcaggggtgaccaatcttttggtcttccctgggccacattggaagaagaaggattgtcctggaccacacat

SEQ ID NO: 355142 - DNA, 3497 bp, Homo sapiens
cccgcccccggccgcccgcgggcccacgggccggcggcgggagtgagcgggagccggcgggcgaagagccgccgcccggcccgcgatgtcaccattgttcagctgggtggccaaggtgcctgagatcatcagctccatccgtcaggcggggaagatcgcccggcaggaggagctgcactgcccgtccgagttcgacgacacgttttccaagaagttcgaggtgctcttctgcggccgcgtgacggtggcgcacaagaaggctccgccggccctgatcgacgagtgcatcgagaagttcaatcacgtcagcggcagccgggggtccgagagcccccgccccaacccgccccatgccgcgcccacagggagccaggagcctgtgcgcaggcccatgcgcaagtccttctcccagcccggcctgcgctcgctggcctttaggaaggagctgcaggatgggggcctccgaagcagcggcttcttcagctccttcgaggagagcgacattgagaaccacctcattagcggacacaatattgtgcagcccacagatatcgaggaaaatcgaactatgctcttcacgattggccagtctgaagtttacctcatcagtcctgacaccaaaaaaatagcattggagaaaaattttaaggagatatccttttgctctcagggcatcagacacgtggaccactttgggtttatctgtcgggagtcttccggaggtggcggctttcattttgtctgttacgtgtttcagtgcacaaatgaggctctggttgatgaaattatgatgaccctgaaacaggccttcacggtggccgcagtgcagcagacagctaaggcgccagcccagctgtgtgagggctgccccctgcaaagcctgcacaagctctgtgagaggatagagggaatgaattcttccaaaacaaaactagaactgcaaaagcacctgacgacattaaccaatcaggagcaggcgactatttttgaagaggttcagaaattgagaccgagaaatgagcagcgagagaatgaattgattatttcttttctgagatgtttatatgaagagaaacagaaagaacacatccatattggggagatgaagcagacatcgcagatggcagcagagaatattggaagtgaattaccacccagtgccactcgatttaggctagatatgctgaaaaacaaagcaaagagatctttaacagagtctttagaaagtattttgtcccggggtaataaagccagaggcctgcaggaacactccatcagtgtggatctggatagctccctgtctagtacattaagtaacaccagcaaagagccatctgtgtgtgaaaaggaggccttgcccatctctgagagctcctttaagctcctcggctcctcggaggacctgtccagtgactcggagagtcatctcccagaagagccagctccgctgtcgccccagcaggccttcaggaggcgagcaaacaccctgagtcacttccccatcgaatgccaggaacctccacaacctgcccgggggtccccgggggtttcgcaaaggaaacttatgaggtatcactcagtgagcacagagacgcctcatgaacgaaaggactttgaatccaaagcaaaccatcttggtgattctggtgggactcctgtgaagacccggaggcattcctggaggcagcagatattcctccgagtagccaccccgcagaaggcgtgcgattcttccagcagatatgaagattattcagagctgggagagcttcccccacgatctcctttagaaccagtttgtgaagatgggccctttggccccccaccagaggaaaagaaaaggacatctcgtgagctccgagagctgtggcaaaaggctattcttcaacagatactgctgcttagaatggagaaggaaaatcagaagctccaagcctctgaaaatgatttgctgaacaagcgcctgaagctcgattatgaagaaattactccctgtcttaaagaagtaactacagtgtgggaaaagatgcttagcactccaggaagatcaaaaattaagtttgacatggaaaaaatgcactcggctgttgggcaaggtgtgccacgtcatcaccgaggtgaaatctggaaatttctagctgagcaattccaccttaaacaccagtttcccagcaaacagcagccaaaggatgtgccatacaaagaactcttaaagcagctgacttcccagcagcatgcgattcttattgaccttgggcgaacctttcctacacacccatacttctctgcccagcttggagcaggacagctatcgctttacaacattttgaaggcctactcacttctagaccaggaagtgggatattgccaaggtctcagctttgtagcaggcattttgcttcttcatatgagtgaggaagaggcgtttaaaatgctcaagtttctgatgtttgacatggggctgcggaaacagtatcggccagacatgattattttacagatccagatgtaccagctctcgaggttgcttcatgattaccacagagacctctacaatcacctggaggagcacgagatcggccccagcctctacgctgccccctggttcctcaccatgtttgcctcacagttcccgctgggattcgtagccagagtctttgatatgatttttcttcagggaacagaggtcatatttaaagtggctttaagtctgttgggaagccataagcccttgattctgcagcatgaaaacctagaaaccatagttgactttataaaaagcacgctacccaaccttggcttggtacagatggaaaagaccatcaatcaggtatttgaaatggacatcgctaaacagttacaagcttatgaagttgagtaccacgtccttcaagaagaacttatcgattcctctcctctcagtgacaaccaaagaatggataaattagagaaaaccaacagcagcttacgcaaacagaaccttgacctccttgaacagttgcaggtggcaaatggtaggatccaaagccttgaggccaccattgagaagctcctgagcagtgagagcaagctgaagcaggccatgcttaccttagaactggagcggtcggccctgctgcagacggtggaggagctgcggcggcggagcgcagagcccagcgaccgggagcctgagtgcacgcagcccgagcccacgggcgactgacagctctgcaggagagattgcaacaccatcccacactgtccaggccttaactgagagggacagaagacgctggaaggagagaaggaagcgggaagtgtgcttctcagggaggaaaccggcttgccagcaagtagattcttacgaactccaacttgcaattcagggggcatgtcccagtgttttttttgttgtttttagatactaaatcgtcccttctccagtcctgattactgtacacagtagctttagatggcgtggacgtgaataaatgcaacttatgttttcttgttgg

SEQ ID NO: 355143 - DNA, 5679 bp, Homo sapiens
tgctcctggtgccgccaccgtccgccggtgcctgttgctgccgccgccgcgggacctgctgtgtcctcagctgggtggagaagaggcgggcgccgagccgaggggagccccctccccgtccccccgcggcgggaagagcgcagccagccgggtgcgatggactccccgcccgcccaggccgtccccaggatgcccccaagcacctgcgcgtcccggcccggccccgggctctgagcgcgccgcggcacaggtttctgcatatgaagtgtgtaaaatagattgcttgatccaaaacagaaaaacagtgataactgttttgctgagttcccagacccttcccaagatggaaccaataacattcacagcaaggaaacatctgctttctaacgaggtctcggtggattttggcctgcagctggtgggctccctgcctgtgcattccctgaccaccatgcccatgctgccctgggttgtggctgaggtgcgaagactcagcaggcagtccaccagaaaggaacctgtaaccaagcaagtccggctttgcgtttcaccctctggactgagatgtgaacctgagccagggagaagtcaacagtgggatcccctgatctattccagcatctttgagtgcaagcctcagcgtgttcacaaactgattcacaacagtcatgacccaagttactttgcttgtctgattaaggaagacgctgtccaccggcagagtatctgctatgtgttcaaagccgatgatcaaacaaaagtgcctgagatcatcagctccatccgtcaggcggggaagatcgcccggcaggaggagctgcactgcccgtccgagttcgacgacacgttttccaagaagttcgaggtgctcttctgcggccgcgtgacggtggcgcacaagaaggctccgccggccctgatcgacgagtgcatcgagaagttcaatcacgtcagcggcagccgggggtccgagagcccccgccccaacccgccccatgccgcgcccacagggagccaggagcctgtgcgcaggcccatgcgcaagtccttctcccagcccggcctgcgctcgctggcctttaggaaggagctgcaggatgggggcctccgaagcagcggcttcttcagctccttcgaggagagcgacattgagaaccacctcattagcggacacaatattgtgcagcccacagatatcgaggaaaatcgaactatgctcttcacgattggccagtctgaagtttacctcatcagtcctgacaccaaaaaaatagcattggagaaaaattttaaggagatatccttttgctctcagggcatcagacacgtggaccactttgggtttatctgtcgggagtcttccggaggtggcggctttcattttgtctgttacgtgtttcagtgcacaaatgaggctctggttgatgaaattatgatgaccctgaaacaggccttcacggtggccgcagtgcagcagacagctaaggcgccagcccagctgtgtgagggctgccccctgcaaagcctgcacaagctctgtgagaggatagagggaatgaattcttccaaaacaaaactagaactgcaaaagcacctgacgacattaaccaatcaggagcaggcgactatttttgaagaggttcagaaattgagaccgagaaatgagcagcgagagaatgaattgattatttcttttctgagatgtttatatgaagagaaacagaaagaacacatccatattggggagatgaagcagacatcgcagatggcagcagagaatattggaagtgaattaccacccagtgccactcgatttaggctagatatgctgaaaaacaaagcaaagagatctttaacagagtctttagaaagtattttgtcccggggtaataaagccagaggcctgcaggaacactccatcagtgtggatctggatagctccctgtctagtacattaagtaacaccagcaaagagccatctgtgtgtgaaaaggaggccttgcccatctctgagagctcctttaagctcctcggctcctcggaggacctgtccagtgactcggagagtcatctcccagaagagccagctccgctgtcgccccagcaggccttcaggaggcgagcaaacaccctgagtcacttccccatcgaatgccaggaacctccacaacctgcccgggggtccccgggggtttcgcaaaggaaacttatgaggtatcactcagtgagcacagagacgcctcatgaacgaaaggactttgaatccaaagcaaaccatcttggtgattctggtgggactcctgtgaagacccggaggcattcctggaggcagcagatattcctccgagtagccaccccgcagaaggcgtgcgattcttccagcagatatgaagattattcagagctgggagagcttcccccacgatctcctttagaaccagtttgtgaagatgggccctttggccccccaccagaggaaaagaaaaggacatctcgtgagctccgagagctgtggcaaaaggctattcttcaacagatactgctgcttagaatggagaaggaaaatcagaagctccaagcctctgaaaatgatttgctgaacaagcgcctgaagctcgattatgaagaaattactccctgtcttaaagaagtaactacagtgtgggaaaagatgcttagcactccaggaagatcaaaaattaagtttgacatggaaaaaatgcactcggctgttgggcaaggtgtgccacgtcatcaccgaggtgaaatctggaaatttctagctgagcaattccaccttaaacaccagtttcccagcaaacagcagccaaaggatgtgccatacaaagaactcttaaagcagctgacttcccagcagcatgcgattcttattgaccttgggcgaacctttcctacacacccatacttctctgcccagcttggagcaggacagctatcgctttacaacattttgaaggcctactcacttctagaccaggaagtgggatattgccaaggtctcagctttgtagcaggcattttgcttcttcatatgagtgaggaagaggcgtttaaaatgctcaagtttctgatgtttgacatggggctgcggaaacagtatcggccagacatgattattttacagatccagatgtaccagctctcgaggttgcttcatgattaccacagagacctctacaatcacctggaggagcacgagatcggccccagcctctacgctgccccctggttcctcaccatgtttgcctcacagttcccgctgggattcgtagccagagtctttgatatgatttttcttcagggaacagaggtcatatttaaagtggctttaagtctgttgggaagccataagcccttgattctgcagcatgaaaacctagaaaccatagttgactttataaaaagcacgctacccaaccttggcttggtacagatggaaaagaccatcaatcaggtatttgaaatggacatcgctaaacagttacaagcttatgaagttgagtaccacgtccttcaagaagaacttatcgattcctctcctctcagtgacaaccaaagaatggataaattagagaaaaccaacagcagcttacgcaaacagaaccttgacctccttgaacagttgcaggtggcaaatggtaggatccaaagccttgaggccaccattgagaagctcctgagcagtgagagcaagctgaagcaggccatgcttaccttagaactggagcggtcggccctgctgcagacggtggaggagctgcggcggcggagcgcagagcccagcgaccgggagcctgagtgcacgcagcccgagcccacgggcgactgacagctctgcaggagagattgcaacaccatcccacactgtccaggccttaactgagagggacagaagacgctggaaggagagaaggaagcgggaagtgtgcttctcagggaggaaaccggcttgccagcaagtagattcttacgaactccaacttgcaattcagggggcatgtcccagtgttttttttgttgtttttagatactaaatcgtcccttctccagtcctgattactgtacacagtagctttagatggcgtggacgtgaataaatgcaacttatgttttcttgttggttcctttttgagtgtcactgtgtttgtaaagagcattcacaatacggtggaatttcaaaagctggaagagctcgagatcatgcctcaggcaaaggcgtgggtccatcgttcttccgagagggtttgtgtggcgactacaccctcagcgtccctggcaaggtgcagttggctctcgcccattcttgttatggaaacctaagatgatcattgggaagatcagtgatcttgggtcattgatccctggctcagaggatagcggtttccatcataaaccaagatgatgagttcagcctttatccctcgtggttccactagatgtaacttaaaggagttaacatttgaggactttgttctacatcagattttactatttgaatgtttaagatcactttattgaatttgaagatcatcaaattaaataaaatgatttatttaatttggatatcctgatcactgtcaagtgaaatggatctctctctttggtatttaaggaagtttgtctttaaaaaaaaaatagagtgttttcatacatttttgcttatcccataagtacagttgatcaaagtcatagtaggtaaatgctttatgggacagctgacaccttttagaccctaccaggtattgctagcatgtgagctgcagttgtggggtctgagatatttctttgtggtagtttcatacccatactatagagtcatgtatttatttttgcctgttgtgtgatgtaatgcaatcatgttcctttgagtctccatcccttggaaatctgacttcttgcagaaggagtaggcacatcaagatattcaggggtgccccaagagtctgggactttcaaaaaaaaaagatcaggctgaaactgcagtcagatttatgacagctgacagtttttcagaggtcgcacacagtgactctcctctctcaggatgacgaggacctgtgccttcaacaagcaaaatgctgctcacggttgtcctgcttgcagccagtcactgtgtaaagcctctctgatgtgcacttaagagtgggttgctttctcacaaagatggggttctgtgcagtcacaggtcacttccttgacaacacaatcatttctgatctttatcactgtaaccacgtcttctattccataggagtttcttttgattctctcagttgcgggggcatctcttaatcctggggtaaaaggagagattgccatacttagactcactgtgagtctccccggccatttcacgaggagaccacagtgctgccaccagtgcctaaacaggtggctggcattcgagacttcctcctgttccctgggtcagaggatagcggtttccatcataaaccaagatgatgagttcagcctttatccctcgtggttccgctagatgtaacttataggagttaacatttgaggactttgttctgcatcagatcttactatttgaatgtttactgttggattttgggcatcttattactgttactcaaaaacattgactctgcatcaagaaagaaacaagaaagcaataaaacaagaaataattca

SEQ ID NO: 355144 - DNA, 2836 bp, Homo sapiens
ttttatcgatgccactctctgggaccctgtcttgatcctcagaatctcaaccctgtggggagagcagggtggctgtcttactaccagacccactgatcagaaaatgaggctctggttgatgaaattatgatgaccctgaaacaggccttcacggtggccgcagtgcagcagacagctaaggcgccagcccagctgtgtgagggctgccccctgcaaagcctgcacaagctctgtgagaggatagagggaatgaattcttccaaaacaaaactagaactgcaaaagcacctgacgacattaaccaatcaggagcaggcgactatttttgaagaggttcagaaattgagaccgagaaatgagcagcgagagaatgaattgattatttcttttctgagatgtttatatgaagagaaacagaaagaacacatccatattggggagatgaagcagacatcgcagatggcagcagagaatattggaagtgaattaccacccagtgccactcgatttaggctagatatgctgaaaaacaaagcaaagagatctttaacagagtctttagaaagtattttgtcccggggtaataaagccagaggcctgcaggaacactccatcagtgtggatctggatagctccctgtctagtacattaagtaacaccagcaaagagccatctgtgtgtgaaaaggaggccttgcccatctctgagagctcctttaagctcctcggctcctcggaggacctgtccagtgactcggagagtcatctcccagaagagccagctccgctgtcgccccagcaggccttcaggaggcgagcaaacaccctgagtcacttccccatcgaatgccaggaacctccacaacctgcccgggggtccccgggggtttcgcaaaggaaacttatgaggtatcactcagtgagcacagagacgcctcatgaacgaaaggactttgaatccaaagcaaaccatcttggtgattctggtgggactcctgtgaagacccggaggcattcctggaggcagcagatattcctccgagtagccaccccgcagaaggcgtgcgattcttccagcagatatgaagattattcagagctgggagagcttcccccacgatctcctttagaaccagtttgtgaagatgggccctttggccccccaccagaggaaaagaaaaggacatctcgtgagctccgagagctgtggcaaaaggctattcttcaacagatactgctgcttagaatggagaaggaaaatcagaagctccaagcctctgaaaatgatttgctgaacaagcgcctgaagctcgattatgaagaaattactccctgtcttaaagaagtaactacagtgtgggaaaagatgcttagcactccaggaagatcaaaaattaagtttgacatggaaaaaatgcactcggctgttgggcaaggtgtgccacgtcatcaccgaggtgaaatctggaaatttctagctgagcaattccaccttaaacaccagtttcccagcaaacagcagccaaaggatgtgccatacaaagaactcttaaagcagctgacttcccagcagcatgcgattcttattgaccttgggcgaacctttcctacacacccatacttctctgcccagcttggagcaggacagctatcgctttacaacattttgaaggcctactcacttctagaccaggaagtgggatattgccaaggtctcagctttgtagcaggcattttgcttcttcatatgagtgaggaagaggcgtttaaaatgctcaagtttctgatgtttgacatggggctgcggaaacagtatcggccagacatgattattttacagatccagatgtaccagctctcgaggttgcttcatgattaccacagagacctctacaatcacctggaggagcacgagatcggccccagcctctacgctgccccctggttcctcaccatgtttgcctcacagttcccgctgggattcgtagccagagtctttgatatgatttttcttcagggaacagaggtcatatttaaagtggctttaagtctgttgggaagccataagcccttgattctgcagcatgaaaacctagaaaccatagttgactttataaaaagcacgctacccaaccttggcttggtacagatggaaaagaccatcaatcaggtatttgaaatggacatcgctaaacagttacaagcttatgaagttgagtaccacgtccttcaagaagaacttatcgattcctctcctctcagtgacaaccaaagaatggataaattagagaaaaccaacagcagcttacgcaaacagaaccttgacctccttgaacagttgcaggtggcaaatggtaggatccaaagccttgaggccaccattgagaagctcctgagcagtgagagcaagctgaagcaggccatgcttaccttagaactggagcggtcggccctgctgcagacggtggaggagctgcggcggcggagcgcagagcccagcgaccgggagcctgagtgcacgcagcccgagcccacgggcgactgacagctctgcaggagagattgcaacaccatcccacactgtccaggccttaactgagagggacagaagacgctggaaggagagaaggaagcgggaagtgtgcttctcagggaggaaaccggcttgccagcaagtagattcttacgaactccaacttgcaattcagggggcatgtcccagtgttttttttgttgtttttagatactaaatcgtcccttctccagtcctgattactgtacacagtagctttagatggcgtggacgtgaataaatgcaacttatgttttcttgttgg

SEQ ID NO: 355145 - DNA, 4425 bp, Homo sapiens
tgctcctggtgccgccaccgtccgccggtgcctgttgctgccgccgccgcgggacctgctgtgtcctcagctgggtggagaagaggcgggcgccgagccgaggggagccccctccccgtccccccgcggcgggaagagcgcagccagccgggtgcgatggactccccgcccgcccaggccgtccccaggatgcccccaagcacctgcgcgtcccggcccggccccgggctctgagcgcgccgcggcacaggtttctgcatatgaagtgtgtaaaatagattgcttgatccaaaacagaaaaacagtgataactgttttgctgagttcccagacccttcccaagatggaaccaataacattcacagcaaggaaacatctgctttctaacgaggtctcggtggattttggcctgcagctggtgggctccctgcctgtgcattccctgaccaccatgcccatgctgccctgggttgtggctgaggtgcgaagactcagcaggcagtccaccagaaaggaacctgtaaccaagcaagtccggctttgcgtttcaccctctggactgagatgtgaacctgagccagggagaagtcaacagtgggatcccctgatctattccagcatctttgagtgcaagcctcagcgtgttcacaaactgattcacaacagtcatgacccaagttactttgcttgtctgattaaggaagacgctgtccaccggcagagtatctgctatgtgttcaaagccgatgatcaaacaaaagtgcctgagatcatcagctccatccgtcaggcggggaagatcgcccggcaggaggagctgcactgcccgtccgagttcgacgacacgttttccaagaagttcgaggtgctcttctgcggccgcgtgacggtggcgcacaagaaggctccgccggccctgatcgacgagtgcatcgagaagttcaatcacgtcagcggcagccgggggtccgagagcccccgccccaacccgccccatgccgcgcccacagggagccaggagcctgtgcgcaggcccatgcgcaagtccttctcccagcccggcctgcgctcgctggcctttaggaaggagctgcaggatgggggcctccgaagcagcggcttcttcagctccttcgaggagagcgacattgagaaccacctcattagcggacacaatattgtgcagcccacagatatcgaggaaaatcgaactatgctcttcacgattggccagtctgaagtttacctcatcagtcctgacaccaaaaaaatagcattggagaaaaattttaaggagatatccttttgctctcagggcatcagacacgtggaccactttgggtttatctgtcgggagtcttccggaggtggcggctttcattttgtctgttacgtgtttcagtgcacaaatgaggctctggttgatgaaattatgatgaccctgaaacaggccttcacggtggccgcagtgcagcagacagctaaggcgccagcccagctgtgtgagggctgccccctgcaaagcctgcacaagctctgtgagaggatagagggaatgaattcttccaaaacaaaactagaactgcaaaagcacctgacgacattaaccaatcaggagcaggcgactatttttgaagaggttcagaaattgagaccgagaaatgagcagcgagagaatgaattgattatttcttttctgagatgtttatatgaagagaaacagaaagaacacatccatattggggagatgaagcagacatcgcagatggcagcagagaatattggaagtgaattaccacccagtgccactcgatttaggctagatatgctgaaaaacaaagcaaagagatctttaacagagtctttagaaagtattttgtcccggggtaataaagccagaggcctgcaggaacactccatcagtgtggatctggatagctccctgtctagtacattaagtaacaccagcaaagagccatctgtgtgtgaaaaggaggccttgcccatctctgagagctcctttaagctcctcggctcctcggaggacctgtccagtgactcggagagtcatctcccagaagagccagctccgctgtcgccccagcaggccttcaggaggcgagcaaacaccctgagtcacttccccatcgaatgccaggaacctccacaacctgcccgggggtccccgggggtttcgcaaaggaaacttatgaggtatcactcagtgagcacagagacgcctcatgaacgaaagtgtggatccttcacctgtgggtgagtctaagcaccgcccaggtcagtcttcagctcctgctcctccacctcgtcttaacccctccgcctcctcgccaaacttttttaagtacctaaaacataattccagtggagaacaaagtgggaatgctgtgccaaagagcatctcctaccgtaatgccctgcggaaaaaacttcattcttcttcctctgtgccaaattttctaaaatttctggctcctgtagatgaaaataacacctctgattttatgaacacaaaaagggactttgaatccaaagcaaaccatcttggtgattctggtgggactcctgtgaagacccggaggcattcctggaggcagcagatattcctccgagtagccaccccgcagaaggcgtgcgattcttccagcagatatgaagattattcagagctgggagagcttcccccacgatctcctttagaaccagtttgtgaagatgggccctttggccccccaccagaggaaaagaaaaggacatctcgtgagctccgagagctgtggcaaaaggctattcttcaacagatactgctgcttagaatggagaaggaaaatcagaagctccaagcctctgaaaatgatttgctgaacaagcgcctgaagctcgattatgaagaaattactccctgtcttaaagaagtaactacagtgtgggaaaagatgcttagcactccaggaagatcaaaaattaagtttgacatggaaaaaatgcactcggctgttgggcaaggtgtgccacgtcatcaccgaggtgaaatctggaaatttctagctgagcaattccaccttaaacaccagtttcccagcaaacagcagccaaaggatgtgccatacaaagaactcttaaagcagctgacttcccagcagcatgcgattcttattgaccttgggcgaacctttcctacacacccatacttctctgcccagcttggagcaggacagctatcgctttacaacattttgaaggcctactcacttctagaccaggaagtgggatattgccaaggtctcagctttgtagcaggcattttgcttcttcatatgagtgaggaagaggcgtttaaaatgctcaagtttctgatgtttgacatggggctgcggaaacagtatcggccagacatgattattttacagatccagatgtaccagctctcgaggttgcttcatgattaccacagagacctctacaatcacctggaggagcacgagatcggccccagcctctacgctgccccctggttcctcaccatgtttgcctcacagttcccgctgggattcgtagccagagtctttgatatgatttttcttcagggaacagaggtcatatttaaagtggctttaagtctgttgggaagccataagcccttgattctgcagcatgaaaacctagaaaccatagttgactttataaaaagcacgctacccaaccttggcttggtacagatggaaaagaccatcaatcaggtatttgaaatggacatcgctaaacagttacaagcttatgaagttgagtaccacgtccttcaagaagaacttatcgattcctctcctctcagtgacaaccaaagaatggataaattagagaaaaccaacagcagcttacgcaaacagaaccttgacctccttgaacagttgcaggtggcaaatggtaggatccaaagccttgaggccaccattgagaagctcctgagcagtgagagcaagctgaagcaggccatgcttaccttagaactggagcggtcggccctgctgcagacggtggaggagctgcggcggcggagcgcagagcccagcgaccgggagcctgagtgcacgcagcccgagcccacgggcgactgacagctctgcaggagagattgcaacaccatcccacactgtccaggccttaactgagagggacagaagacgctggaaggagagaaggaagcgggaagtgtgcttctcagggaggaaaccggcttgccagcaagtagattcttacgaactccaacttgcaattcagggggcatgtcccagtgttttttttgttgtttttagatactaaatcgtcccttctccagtcctgattactgtacacagtagctttagatggcgtggacgtgaataaatgcaacttatgttttcttgttgg

SEQ ID NO: 355146 - DNA, 6104 bp, Homo sapiens
tgctcctggtgccgccaccgtccgccggtgcctgttgctgccgccgccgcgggacctgctgtgtcctcagctgggtggagaagaggcgggcgccgagccgaggggagccccctccccgtccccccgcggcgggaagagcgcagccagccgggtgcgatggactccccgcccgcccaggccgtccccaggatgcccccaagcacctgcgcgtcccggcccggccccgggctctgagcgcgccgcggcacaggtttctgcatatgaagtgtgtaaaatagattgcttgatccaaaacagaaaaacagtgataactgttttgctgagttcccagacccttcccaagatggaaccaataacattcacagcaaggaaacatctgctttctaacgaggtctcggtggattttggcctgcagctggtgggctccctgcctgtgcattccctgaccaccatgcccatgctgccctgggttgtggctgaggtgcgaagactcagcaggcagtccaccagaaaggaacctgtaaccaagcaagtccggctttgcgtttcaccctctggactgagatgtgaacctgagccagggagaagtcaacagtgggatcccctgatctattccagcatctttgagtgcaagcctcagcgtgttcacaaactgattcacaacagtcatgacccaagttactttgcttgtctgattaaggaagacgctgtccaccggcagagtatctgctatgtgttcaaagccgatgatcaaacaaaagtgcctgagatcatcagctccatccgtcaggcggggaagatcgcccggcaggaggagctgcactgcccgtccgagttcgacgacacgttttccaagaagttcgaggtgctcttctgcggccgcgtgacggtggcgcacaagaaggctccgccggccctgatcgacgagtgcatcgagaagttcaatcacgtcagcggcagccgggggtccgagagcccccgccccaacccgccccatgccgcgcccacagggagccaggagcctgtgcgcaggcccatgcgcaagtccttctcccagcccggcctgcgctcgctggcctttaggaaggagctgcaggatgggggcctccgaagcagcggcttcttcagctccttcgaggagagcgacattgagaaccacctcattagcggacacaatattgtgcagcccacagatatcgaggaaaatcgaactatgctcttcacgattggccagtctgaagtttacctcatcagtcctgacaccaaaaaaatagcattggagaaaaattttaaggagatatccttttgctctcagggcatcagacacgtggaccactttgggtttatctgtcgggagtcttccggaggtggcggctttcattttgtctgttacgtgtttcagtgcacaaatgaggctctggttgatgaaattatgatgaccctgaaacaggccttcacggtggccgcagtgcagcagacagctaaggcgccagcccagctgtgtgagggctgccccctgcaaagcctgcacaagctctgtgagaggatagagggaatgaattcttccaaaacaaaactagaactgcaaaagcacctgacgacattaaccaatcaggagcaggcgactatttttgaagaggttcagaaattgagaccgagaaatgagcagcgagagaatgaattgattatttcttttctgagatgtttatatgaagagaaacagaaagaacacatccatattggggagatgaagcagacatcgcagatggcagcagagaatattggaagtgaattaccacccagtgccactcgatttaggctagatatgctgaaaaacaaagcaaagagatctttaacagagtctttagaaagtattttgtcccggggtaataaagccagaggcctgcaggaacactccatcagtgtggatctggatagctccctgtctagtacattaagtaacaccagcaaagagccatctgtgtgtgaaaaggaggccttgcccatctctgagagctcctttaagctcctcggctcctcggaggacctgtccagtgactcggagagtcatctcccagaagagccagctccgctgtcgccccagcaggccttcaggaggcgagcaaacaccctgagtcacttccccatcgaatgccaggaacctccacaacctgcccgggggtccccgggggtttcgcaaaggaaacttatgaggtatcactcagtgagcacagagacgcctcatgaacgaaaggactttgaatccaaagcaaaccatcttggtgattctggtgggactcctgtgaagacccggaggcattcctggaggcagcagatattcctccgagtagccaccccgcagaaggcgtgcgattcttccagcagatatgaagattattcagagctgggagagcttcccccacgatctcctttagaaccagtttgtgaagatgggccctttggccccccaccagaggaaaagaaaaggacatctcgtgagctccgagagctgtggcaaaaggctattcttcaacagatactgctgcttagaatggagaaggaaaatcagaagctccaagcctctgaaaatgatttgctgaacaagcgcctgaagctcgattatgaagaaattactccctgtcttaaagaagtaactacagtgtgggaaaagatgcttagcactccaggaagatcaaaaattaagtttgacatggaaaaaatgcactcggctgttgggcaaggtgtgccacgtcatcaccgaggtgaaatctggaaatttctagctgagcaattccaccttaaacaccagtttcccagcaaacagcagccaaaggatgtgccatacaaagaactcttaaagcagctgacttcccagcagcatgcgattcttattgaccttgggcgaacctttcctacacacccatacttctctgcccagcttggagcaggacagctatcgctttacaacattttgaaggcctactcacttctagaccaggaagtgggatattgccaaggtctcagctttgtagcaggcattttgcttcttcatatgagtgaggaagaggcgtttaaaatgctcaagtttctgatgtttgacatggggctgcggaaacagtatcggccagacatgattattttacagatccagatgtaccagctctcgaggttgcttcatgattaccacagagacctctacaatcacctggaggagcacgagatcggccccagcctctacgctgccccctggttcctcaccatgtttgcctcacagttcccgctgggattcgtagccagagtctttgatatgatttttcttcagggaacagaggtcatatttaaagtggctttaagtctgttgggaagccataagcccttgattctgcagcatgaaaacctagaaaccatagttgactttataaaaagcacgctacccaaccttggcttggtacagatggaaaagaccatcaatcaggtatttgaaatggacatcgctaaacagttacaagcttatgaagttgagtaccacgtccttcaagaagaacttatcgattcctctcctctcagtgacaaccaaagaatggataaattagagaaaaccaacagcagcttacgcaaacagaaccttgacctccttgaacagttgcaggtggcaaatggtaggatccaaagccttgaggccaccattgagaagctcctgagcagtgagagcaagctgaagcaggccatgcttaccttagaactggagcggtcggccctgctgcagacggtggaggagctgcggcggcggagcgcagagcccagcgaccgggagcctgagtgcacgcagcccgagcccacgggcgactgacagctctgcaggagagattgcaacaccatcccacactgtccaggccttaactgagagggacagaagacgctggaaggagagaaggaagcgggaagtgtgcttctcagggaggaaaccggcttgccagcaagtagattcttacgaactccaacttgcaattcagggggcatgtcccagtgttttttttgttgtttttagatactaaatcgtcccttctccagtcctgattactgtacacagtagctttagatggcgtggacgtgaataaatgcaacttatgttttcttgttggttcctttttgagtgtcactgtgtttgtaaagagcattcacaatacggtggaatttcaaaagctggaagagctcgagatcatgcctcaggcaaaggcgtgggtccatcgttcttccgagagggtttgtgtggcgactacaccctcagcgtccctggcaaggtgcagttggctctcgcccattcttgttatggaaacctaagatgatcattgggaagatcagtgatcttgggtcattgatccctggctcagaggatagcggtttccatcataaaccaagatgatgagttcagcctttatccctcgtggttccactagatgtaacttaaaggagttaacatttgaggactttgttctacatcagattttactatttgaatgtttaagatcactttattgaatttgaagatcatcaaattaaataaaatgatttatttaatttggatatcctgatcactgtcaagtgaaatggatctctctctttggtatttaaggaagtttgtctttaaaaaaaaaatagagtgttttcatacatttttgcttatcccataagtacagttgatcaaagtcatagtaggtaaatgctttatgggacagctgacaccttttagaccctaccaggtattgctagcatgtgagctgcagttgtggggtctgagatatttctttgtggtagtttcatacccatactatagagtcatgtatttatttttgcctgttgtgtgatgtaatgcaatcatgttcctttgagtctccatcccttggaaatctgacttcttgcagaaggagtaggcacatcaagatattcaggggtgccccaagagtctgggactttcaaaaaaaaaagatcaggctgaaactgcagtcagatttatgacagctgacagtttttcagaggtcgcacacagtgactctcctctctcaggatgacgaggacctgtgccttcaacaagcaaaatgctgctcacggttgtcctgcttgcagccagtcactgtgtaaagcctctctgatgtgcacttaagagtgggttgctttctcacaaagatggggttctgtgcagtcacaggtcacttccttgacaacacaatcatttctgatctttatcactgtaaccacgtcttctattccataggagtttcttttgattctctcagttgcgggggcatctcttaatcctggggtaaaaggagagattgccatacttagactcactgtgagtctccccggccatttcacgaggagaccacagtgctgccaccagtgcctaaacaggtggctggcattcgagacttcctcctgttccctgggtcagaggatagcggtttccatcataaaccaagatgatgagttcagcctttatccctcgtggttccgctagatgtaacttataggagttaacatttgaggactttgttctgcatcagatcttactatttgaatgtttactgttggattttgggcatcttattactgttactcaaaaacattgactctgcatcaagaaagaaacaagaaagcaataaaacaagaaataattcatgctcacatttttatggtggttttttttttttttttaactttggatttttgcttttcagcccaggagtaaaggaatgccttatgaacacctgtggcctacgtgtggtcatgacccaaccatcagtgagattatttgagatattggtgtctgcatccagtgttgttatctgagtgtttattacgtaagttgtaacacctctacacagggtgtgagtttagcactgatgagaccagctccatcattgtatgtggcagtgagtcctgttacgagattgggttgggcagaaaggactgttgacatgagcctgtggatgtaggttggacagtctcagcctgtgactgactaggcaaggagcggagaggcaactgtgtgaggattctcagagccaaatttttaagccatgttttgggttatatttccccca

SEQ ID NO: 355147 - DNA, 5735 bp, Homo sapiens
tgctcctggtgccgccaccgtccgccggtgcctgttgctgccgccgccgcgggacctgctgtgtcctcagctgggtggagaagaggcgggcgccgagccgaggggagccccctccccgtccccccgcggcgggaagagcgcagccagccgggtgcgatggactccccgcccgcccaggccgtccccaggatgcccccaagcacctgcgcgtcccggcccggccccgggctctgagcgcgccgcggcacaggtttctgcatatgaagtgtgtaaaatagattgcttgatccaaaacagaaaaacagtgataactgttttgctgagttcccagacccttcccaagatggaaccaataacattcacagcaaggaaacatctgctttctaacgaggtctcggtggattttggcctgcagctggtgggctccctgcctgtgcattccctgaccaccatgcccatgctgccctgggttgtggctgaggtgcgaagactcagcaggcagtccaccagaaaggaacctgtaaccaagcaagtccggctttgcgtttcaccctctggactgagatgtgaacctgagccagggagaagtcaacagtgggatcccctgatctattccagcatctttgagtgcaagcctcagcgtgttcacaaactgattcacaacagtcatgacccaagttactttgcttgtctgattaaggaagacgctgtccaccggcagagtatctgctatgtgttcaaagccgatgatcaaacaaaagtgcctgagatcatcagctccatccgtcaggcggggaagatcgcccggcaggaggagctgcactgcccgtccgagttcgacgacacgttttccaagaagttcgaggtgctcttctgcggccgcgtgacggtggcgcacaagaaggctccgccggccctgatcgacgagtgcatcgagaagttcaatcacgtcagcggcagccgggggtccgagagcccccgccccaacccgccccatgccgcgcccacagggagccaggagcctgtgcgcaggcccatgcgcaagtccttctcccagcccggcctgcgctcgctggcctttaggaaggagctgcaggatgggggcctccgaagcagcggcttcttcagctccttcgaggagagcgacattgagaaccacctcattagcggacacaatattgtgcagcccacagatatcgaggaaaatcgaactatgctcttcacgattggccagtctgaagtttacctcatcagtcctgacaccaaaaaaatagcattggagaaaaattttaaggagatatccttttgctctcagggcatcagacacgtggaccactttgggtttatctgtcgggagtcttccggaggtggcggctttcattttgtctgttacgtgtttcagtgcacaaatgaggctctggttgatgaaattatgatgaccctgaaacaggccttcacggtggccgcagtgcagcagacagctaaggcgccagcccagctgtgtgagggctgccccctgcaaagcctgcacaagctctgtgagaggatagagggaatgaattcttccaaaacaaaactagaactgcaaaagcacctgacgacattaaccaatcaggagcaggcgactatttttgaagaggttcagaaattgagaccgagaaatgagcagcgagagaatgaattgattatttcttttctgagatgtttatatgaagagaaacagaaagaacacatccatattggggagatgaagcagacatcgcagatggcagcagagaatattggaagtgaattaccacccagtgccactcgatttaggctagatatgctgaaaaacaaagcaaagagatctttaacagagtctttagaaagtattttgtcccggggtaataaagccagaggcctgcaggaacactccatcagtgtggatctggatagctccctgtctagtacattaagtaacaccagcaaagagccatctgtgtgtgaaaaggaggccttgcccatctctgagagctcctttaagctcctcggctcctcggaggacctgtccagtgactcggagagtcatctcccagaagagccagctccgctgtcgccccagcaggccttcaggaggcgagcaaacaccctgagtcacttccccatcgaatgccaggaacctccacaacctgcccgggggtccccgggggtttcgcaaaggaaacttatgaggtatcactcagtgagcacagagacgcctcatgaacgaaaggactttgaatccaaagcaaaccatcttggtgattctggtgggactcctgtgaagacccggaggcattcctggaggcagcagatattcctccgagtagccaccccgcagaaggcgtgcgattcttccagcagatatgaagattattcagagctgggagagcttcccccacgatctcctttagaaccagtttgtgaagatgggccctttggccccccaccagaggaaaagaaaaggacatctcgtgagctccgagagctgtggcaaaaggctattcttcaacagatactgctgcttagaatggagaaggaaaatcagaagctccaagcctctgaaaatgatttgctgaacaagcgcctgaagctcgattatgaagaaattactccctgtcttaaagaagtaactacagtgtgggaaaagatgcttagcactccaggaagatcaaaaattaagtttgacatggaaaaaatgcactcggctgttgggcaaggtgtgccacgtcatcaccgaggtgaaatctggaaatttctagctgagcaattccaccttaaacaccagtttcccagcaaacagcagccaaaggatgtgccatacaaagaactcttaaagcagctgacttcccagcagcatgcgattcttattgaccttgggcgaacctttcctacacacccatacttctctgcccagcttggagcaggacagctatcgctttacaacattttgaaggcctactcacttctagaccaggaagtgggatattgccaaggtctcagctttgtagcaggcattttgcttcttcatatgagtgaggaagaggcgtttaaaatgctcaagtttctgatgtttgacatggggctgcggaaacagtatcggccagacatgattattttacagatccagatgtaccagctctcgaggttgcttcatgattaccacagagacctctacaatcacctggaggagcacgagatcggccccagcctctacgctgccccctggttcctcaccatgtttgcctcacagttcccgctgggattcgtagccagagtctttgatatgatttttcttcagggaacagaggtcatatttaaagtggctttaagtctgttgggaagccataagcccttgattctgcagcatgaaaacctagaaaccatagttgactttataaaaagcacgctacccaaccttggcttggtacagatggaaaagaccatcaatcaggtatttgaaatggacatcgctaaacagttacaagcttatgaagttgagtaccacgtccttcaagaagaacttatcgattcctctcctctcagtgacaaccaaagaatggataaattagagaaaaccaacagcagcttacgcaaacagaaccttgacctccttgaacagttgcaggtggcaaatggtaggatccaaagccttgaggccaccattgagaagctcctgagcagtgagagcaagctgaagcaggccatgcttaccttagaactggagcggtcggccctgctgcagacggtggaggagctgcggcggcggagcgcagagcccagcgaccgggagcctgagtgcacgcagcccgagcccacgggcgactgacagctctgcaggagagattgcaacaccatcccacactgtccaggccttaactgagagggacagaagacgctggaaggagagaaggaagcgggaagtgtgcttctcagggaggaaaccggcttgccagcaagtagattcttacgaactccaacttgcaattcagggggcatgtcccagtgttttttttgttgtttttagatactaaatcgtcccttctccagtcctgattactgtacacagtagctttagatggcgtggacgtgaataaatgcaacttatgttttcttgttggttcctttttgagtgtcactgtgtttgtaaagagcattcacaatacggtggaatttcaaaagctggaagagctcgagatcatgcctcaggcaaaggcgtgggtccatcgttcttccgagagggtttgtgtggcgactacaccctcagcgtccctggcaaggtgcagttggctctcgcccattcttgttatggaaacctaagatgatcattgggaagatcagtgatcttgggtcattgatccctggctcagaggatagcggtttccatcataaaccaagatgatgagttcagcctttatccctcgtggttccactagatgtaacttaaaggagttaacatttgaggactttgttctacatcagattttactatttgaatgtttaagatcactttattgaatttgaagatcatcaaattaaataaaatgatttatttaatttggatatcctgatcactgtcaagtgaaatggatctctctctttggtatttaaggaagtttgtctttaaaaaaaaaatagagtgttttcatacatttttgcttatcccataagtacagttgatcaaagtcatagtaggtaaatgctttatgggacagctgacaccttttagaccctaccaggtattgctagcatgtgagctgcagttgtggggtctgagatatttctttgtggtagtttcatacccatactatagagtcatgtatttatttttgcctgttgtgtgatgtaatgcaatcatgttcctttgagtctccatcccttggaaatctgacttcttgcagaaggagtaggcacatctcttaatcctggggtaaaaggagagattgccatacttagactcactgtgagtctccccggccatttcacgaggagaccacagtgctgccaccagtgcctaaacaggtggctggcattcgagacttcctcctgttccctgggtcagaggatagcggtttccatcataaaccaagatgatgagttcagcctttatccctcgtggttccgctagatgtaacttataggagttaacatttgaggactttgttctgcatcagatcttactatttgaatgtttactgttggattttgggcatcttattactgttactcaaaaacattgactctgcatcaagaaagaaacaagaaagcaataaaacaagaaataattcatgctcacatttttatggtggttttttttttttttttaactttggatttttgcttttcagcccaggagtaaaggaatgccttatgaacacctgtggcctacgtgtggtcatgacccaaccatcagtgagattatttgagatattggtgtctgcatccagtgttgttatctgagtgtttattacgtaagttgtaacacctctacacagggtgtgagtttagcactgatgagaccagctccatcattgtatgtggcagtgagtcctgttacgagattgggttgggcagaaaggactgttgacatgagcctgtggatgtaggttggacagtctcagcctgtgactgactaggcaaggagcggagaggcaactgtgtgaggattctcagagccaaatttttaagccatgttttgggttatatttccccca

SEQ ID NO: 355148 - DNA, 4179 bp, Homo sapiens
tgctcctggtgccgccaccgtccgccggtgcctgttgctgccgccgccgcgggacctgctgtgtcctcagctgggtggagaagaggcgggcgccgagccgaggggagccccctccccgtccccccgcggcgggaagagcgcagccagccgggtgcgatggactccccgcccgcccaggccgtccccaggatgcccccaagcacctgcgcgtcccggcccggccccgggctctgagcgcgccgcggcacaggtttctgcatatgaagtgtgtaaaatagattgcttgatccaaaacagaaaaacagtgataactgttttgctgagttcccagacccttcccaagatggaaccaataacattcacagcaaggaaacatctgctttctaacgaggtctcggtggattttggcctgcagctggtgggctccctgcctgtgcattccctgaccaccatgcccatgctgccctgggttgtggctgaggtgcgaagactcagcaggcagtccaccagaaaggaacctgtaaccaagcaagtccggctttgcgtttcaccctctggactgagatgtgaacctgagccagggagaagtcaacagtgggatcccctgatctattccagcatctttgagtgcaagcctcagcgtgttcacaaactgattcacaacagtcatgacccaagttactttgcttgtctgattaaggaagacgctgtccaccggcagagtatctgctatgtgttcaaagccgatgatcaaacaaaagtgcctgagatcatcagctccatccgtcaggcggggaagatcgcccggcaggaggagctgcactgcccgtccgagttcgacgacacgttttccaagaagttcgaggtgctcttctgcggccgcgtgacggtggcgcacaagaaggctccgccggccctgatcgacgagtgcatcgagaagttcaatcacgtcagcggcagccgggggtccgagagcccccgccccaacccgccccatgccgcgcccacagggagccaggagcctgtgcgcaggcccatgcgcaagtccttctcccagcccggcctgcgctcgctggcctttaggaaggagctgcaggatgggggcctccgaagcagcggcttcttcagctccttcgaggagagcgacattgagaaccacctcattagcggacacaatattgtgcagcccacagatatcgaggaaaatcgaactatgctcttcacgattggccagtctgaagtttacctcatcagtcctgacaccaaaaaaatagcattggagaaaaattttaaggagatatccttttgctctcagggcatcagacacgtggaccactttgggtttatctgtcgggagtcttccggaggtggcggctttcattttgtctgttacgtgtttcagtgcacaaatgaggctctggttgatgaaattatgatgaccctgaaacaggccttcacggtggccgcagtgcagcagacagctaaggcgccagcccagctgtgtgagggctgccccctgcaaagcctgcacaagctctgtgagaggatagagggaatgaattcttccaaaacaaaactagaactgcaaaagcacctgacgacattaaccaatcaggagcaggcgactatttttgaagaggttcagaaattgagaccgagaaatgagcagcgagagaatgaattgattatttcttttctgagatgtttatatgaagagaaacagaaagaacacatccatattggggagatgaagcagacatcgcagatggcagcagagaatattggaagtgaattaccacccagtgccactcgatttaggctagatatgctgaaaaacaaagcaaagagatctttaacagagtctttagaaagtattttgtcccggggtaataaagccagaggcctgcaggaacactccatcagtgtggatctggatagctccctgtctagtacattaagtaacaccagcaaagagccatctgtgtgtgaaaaggaggccttgcccatctctgagagctcctttaagctcctcggctcctcggaggacctgtccagtgactcggagagtcatctcccagaagagccagctccgctgtcgccccagcaggccttcaggaggcgagcaaacaccctgagtcacttccccatcgaatgccaggaacctccacaacctgcccgggggtccccgggggtttcgcaaaggaaacttatgaggtatcactcagtgagcacagagacgcctcatgaacgaaaggactttgaatccaaagcaaaccatcttggtgattctggtgggactcctgtgaagacccggaggcattcctggaggcagcagatattcctccgagtagccaccccgcagaaggcgtgcgattcttccagcagatatgaagattattcagagctgggagagcttcccccacgatctcctttagaaccagtttgtgaagatgggccctttggccccccaccagaggaaaagaaaaggacatctcgtgagctccgagagctgtggcaaaaggctattcttcaacagatactgctgcttagaatggagaaggaaaatcagaagctccaagcctctgaaaatgatttgctgaacaagcgcctgaagctcgattatgaagaaattactccctgtcttaaagaagtaactacagtgtgggaaaagatgcttagcactccaggaagatcaaaaattaagtttgacatggaaaaaatgcactcggctgttgggcaaggtgtgccacgtcatcaccgaggtgaaatctggaaatttctagctgagcaattccaccttaaacaccagtttcccagcaaacagcagccaaaggatgtgccatacaaagaactcttaaagcagctgacttcccagcagcatgcgattcttattgaccttgggcgaacctttcctacacacccatacttctctgcccagcttggagcaggacagctatcgctttacaacattttgaaggcctactcacttctagaccaggaagtgggatattgccaaggtctcagctttgtagcaggcattttgcttcttcatatgagtgaggaagaggcgtttaaaatgctcaagtttctgatgtttgacatggggctgcggaaacagtatcggccagacatgattattttacagatccagatgtaccagctctcgaggttgcttcatgattaccacagagacctctacaatcacctggaggagcacgagatcggccccagcctctacgctgccccctggttcctcaccatgtttgcctcacagttcccgctgggattcgtagccagagtctttgatatgatttttcttcagggaacagaggtcatatttaaagtggctttaagtctgttgggaagccataagcccttgattctgcagcatgaaaacctagaaaccatagttgactttataaaaagcacgctacccaaccttggcttggtacagatggaaaagaccatcaatcaggtatttgaaatggacatcgctaaacagttacaagcttatgaagttgagtaccacgtccttcaagaagaacttatcgattcctctcctctcagtgacaaccaaagaatggataaattagagaaaaccaacagcagcttacgcaaacagaaccttgacctccttgaacagttgcaggtggcaaatggtaggatccaaagccttgaggccaccattgagaagctcctgagcagtgagagcaagctgaagcaggccatgcttaccttagaactggagcggtcggccctgctgcagacggtggaggagctgcggcggcggagcgcagagcccagcgaccgggagcctgagtgcacgcagcccgagcccacgggcgactgacagctctgcaggagagattgcaacaccatcccacactgtccaggccttaactgagagggacagaagacgctggaaggagagaaggaagcgggaagtgtgcttctcagggaggaaaccggcttgccagcaagtagattcttacgaactccaacttgcaattcagggggcatgtcccagtgttttttttgttgtttttagatactaaatcgtcccttctccagtcctgattactgtacacagtagctttagatggcgtggacgtgaataaatgcaacttatgttttcttgttggaaaaaataataatttcttgattttgcattaactgtgt

SEQ ID NO: 355149 - DNA, 4174 bp, Homo sapiens
tgctcctggtgccgccaccgtccgccggtgcctgttgctgccgccgccgcgggacctgctgtgtcctcagctgggtggagaagaggcgggcgccgagccgaggggagccccctccccgtccccccgcggcgggaagagcgcagccagccgggtgcgatggactccccgcccgcccaggccgtccccaggatgcccccaagcacctgcgcgtcccggcccggccccgggctctgagcgcgccgcggcacaggtttctgcatatgaagtgtgtaaaatagattgcttgatccaaaacagaaaaacagtgataactgttttgctgagttcccagacccttcccaagatggaaccaataacattcacagcaaggaaacatctgctttctaacgaggtctcggtggattttggcctgcagctggtgggctccctgcctgtgcattccctgaccaccatgcccatgctgccctgggttgtggctgaggtgcgaagactcagcaggcagtccaccagaaaggaacctgtaaccaagcaagtccggctttgcgtttcaccctctggactgagatgtgaacctgagccagggagaagtcaacagtgggatcccctgatctattccagcatctttgagtgcaagcctcagcgtgttcacaaactgattcacaacagtcatgacccaagttactttgcttgtctgattaaggaagacgctgtccaccggcagagtatctgctatgtgttcaaagccgatgatcaaacaaaagtgcctgagatcatcagctccatccgtcaggcggggaagatcgcccggcaggaggagctgcactgcccgtccgagttcgacgacacgttttccaagaagttcgaggtgctcttctgcggccgcgtgacggtggcgcacaagaaggctccgccggccctgatcgacgagtgcatcgagaagttcaatcacgtcagcggcagccgggggtccgagagcccccgccccaacccgccccatgccgcgcccacagggagccaggagcctgtgcgcaggcccatgcgcaagtccttctcccagcccggcctgcgctcgctggcctttaggaaggagctgcaggatgggggcctccgaagcagcggcttcttcagctccttcgaggagagcgacattgagaaccacctcattagcggacacaatattgtgcagcccacagatatcgaggaaaatcgaactatgctcttcacgattggccagtctgaagtttacctcatcagtcctgacaccaaaaaaatagcattggagaaaaattttaaggagatatccttttgctctcagggcatcagacacgtggaccactttgggtttatctgtcgggagtcttccggaggtggcggctttcattttgtctgttacgtgtttcagtgcacaaatgaggctctggttgatgaaattatgatgaccctgaaacaggccttcacggtggccgcagtgcagcagacagctaaggcgccagcccagctgtgtgagggctgccccctgcaaagcctgcacaagctctgtgagaggatagagggaatgaattcttccaaaacaaaactagaactgcaaaagcacctgacgacattaaccaatcaggagcaggcgactatttttgaagaggttcagaaattgagaccgagaaatgagcagcgagagaatgaattgattatttcttttctgagatgtttatatgaagagaaacagaaagaacacatccatattggggagatgaagcagacatcgcagatggcagcagagaatattggaagtgaattaccacccagtgccactcgatttaggctagatatgctgaaaaacaaagcaaagagatctttaacagagtctttagaaagtattttgtcccggggtaataaagccagaggcctgcaggaacactccatcagtgtggatctggatagctccctgtctagtacattaagtaacaccagcaaagagccatctgtgtgtgaaaaggaggccttgcccatctctgagagctcctttaagctcctcggctcctcggaggacctgtccagtgactcggagagtcatctcccagaagagccagctccgctgtcgccccagcaggccttcaggaggcgagcaaacaccctgagtcacttccccatcgaatgccaggaacctccacaacctgcccgggggtccccgggggtttcgcaaaggaaacttatgaggtatcactcagtgagcacagagacgcctcatgaacgaaaggactttgaatccaaagcaaaccatcttggtgattctggtgggactcctgtgaagacccggaggcattcctggaggcagcagatattcctccgagtagccaccccgcagaaggcgtgcgattcttccagcagatatgaagattattcagagctgggagagcttcccccacgatctcctttagaaccagtttgtgaagatgggccctttggccccccaccagaggaaaagaaaaggacatctcgtgagctccgagagctgtggcaaaaggctattcttcaacagatactgctgcttagaatggagaaggaaaatcagaagctccaagcctctgaaaatgatttgctgaacaagcgcctgaagctcgattatgaagaaattactccctgtcttaaagaagtaactacagtgtgggaaaagatgcttagcactccaggaagatcaaaaattaagtttgacatggaaaaaatgcactcggctgttgggcaaggtgtgccacgtcatcaccgaggtgaaatctggaaatttctagctgagcaattccaccttaaacaccagtttcccagcaaacagcagccaaaggatgtgccatacaaagaactcttaaagcagctgacttcccagcagcatgcgattcttattgaccttgggcgaacctttcctacacacccatacttctctgcccagcttggagcaggacagctatcgctttacaacattttgaaggcctactcacttctagaccaggaagtgggatattgccaaggtctcagctttgtagcaggcattttgcttcttcatatgagtgaggaagaggcgtttaaaatgctcaagtttctgatgtttgacatggggctgcggaaacagtatcggccagacatgattattttacagatccagatgtaccagctctcgaggttgcttcatgattaccacagagacctctacaatcacctggaggagcacgagatcggccccagcctctacgctgccccctggttcctcaccatgtttgcctcacagttcccgctgggattcgtagccagagtctttgatatgatttttcttcagggaacagaggtcatatttaaagtggctttaagtctgttgggaagccataagcccttgattctgcagcatgaaaacctagaaaccatagttgactttataaaaagcacgctacccaaccttggcttggtacagatggaaaagaccatcaatcaggtatttgaaatggacatcgctaaacagttacaagcttatgaagttgagtaccacgtccttcaagaagaacttatcgattcctctcctctcagtgacaaccaaagaatggataaattagagaaaaccaacagcagcttacgcaaacagaaccttgacctccttgaacagttgcaggtggcaaatggtaggatccaaagccttgaggccaccattgagaagctcctgagcagtgagagcaagctgaagcaggccatgcttaccttagaactggagcggtcggccctgctgcagacggtggaggagctgcggcggcggagcgcagagcccagcgaccgggagcctgagtgcacgcagcccgagcccacgggcgactgacagctctgcaggagagattgcaacaccatcccacactgtccaggccttaactgagagggacagaagacgctggaaggagagaaggaagcgggaagtgtgcttctcagggaggaaaccggcttgccagcaagtagattcttacgaactccaacttgcaattcagggaggtgactcgttcagaggtgtttgttctttgtgtgttggttacgatagtagaagtggcttcccattggtggcatgtccgtgagttcacgtagtacggcagctagcctttcaagaggtgccgtggacggtggagagttaatgaaaggttatggttctaag

SEQ ID NO: 355150 - DNA, 3700 bp, Homo sapiens
tgctcctggtgccgccaccgtccgccggtgcctgttgctgccgccgccgcgggacctgctgtgtcctcagctgggtggagaagaggcgggcgccgagccgaggggagccccctccccgtccccccgcggcgggaagagcgcagccagccgggtgcgatggactccccgcccgcccaggccgtccccaggatgcccccaagcacctgcgcgtcccggcccggccccgggctctgagcgcgccgcggcacaggtttctgcatatgaagtgtgtaaaatagattgcttgatccaaaacagaaaaacagtgataactgttttgctgagttcccagacccttcccaagatggaaccaataacattcacagcaaggaaacatctgctttctaacgaggtctcggtggattttggcctgcagctggtgggctccctgcctgtgcattccctgaccaccatgcccatgctgccctgggttgtggctgaggtgcgaagactcagcaggcagtccaccagaaaggaacctgtaaccaagcaagtccggctttgcgtttcaccctctggactgagatgtgaacctgagccagggagaagtcaacagtgggatcccctgatctattccagcatctttgagtgcaagcctcagcgtgttcacaaactgattcacaacagtcatgacccaagttactttgcttgtctgattaaggaagacgctgtccaccggcagagtatctgctatgtgttcaaagccgatgatcaaacaaaagtgcctgagatcatcagctccatccgtcaggcggggaagatcgcccggcaggaggagctgcactgcccgtccgagttcgacgacacgttttccaagaagttcgaggtgctcttctgcggccgcgtgacggtggcgcacaagaaggctccgccggccctgatcgacgagtgcatcgagaagttcaatcacgtcagcggcagccgggggtccgagagcccccgccccaacccgccccatgccgcgcccacagggagccaggagcctgtgcgcaggcccatgcgcaagtccttctcccagcccggcctgcgctcgctggcctttaggaaggagctgcaggatgggggcctccgaagcagcggcttcttcagctccttcgaggagagcgacattgagaaccacctcattagcggacacaatattgtgcagcccacagatatcgaggaaaatcgaactatgctcttcacgattggccagtctgaagtttacctcatcagtcctgacaccaaaaaaatagcattggagaaaaattttaaggagatatccttttgctctcagggcatcagacacgtggaccactttgggtttatctgtcgggagtcttccggaggtggcggctttcattttgtctgttacgtgtttcagtgcacaaatgaggctctggttgatgaaattatgatgaccctgaaacaggccttcacggtggccgcagtgcagcagacagctaaggcgccagcccagctgtgtgagggctgccccctgcaaagcctgcacaagctctgtgagaggatagagggaatgaattcttccaaaacaaaactagaactgcaaaagcacctgacgacattaaccaatcaggagcaggcgactatttttgaagaggttcagaaattgagaccgagaaatgagcagcgagagaatgaattgattatttcttttctgagatgtttatatgaagagaaacagaaagaacacatccatattggggagatgaagcagacatcgcagatggcagcagagaatattggaagtgaattaccacccagtgccactcgatttaggctagatatgctgaaaaacaaagcaaagagatctttaacagagtctttagaaagtattttgtcccggggtaataaagccagaggcctgcaggaacactccatcagtgtggatctggatagctccctgtctagtacattaagtaacaccagcaaagagccatctgtgtgtgaaaaggaggccttgcccatctctgagagctcctttaagctcctcggctcctcggaggacctgtccagtgactcggagagtcatctcccagaagagccagctccgctgtcgccccagcaggccttcaggaggcgagcaaacaccctgagtcacttccccatcgaatgccaggaacctccacaacctgcccgggggtccccgggggtttcgcaaaggaaacttatgaggtatcactcagtgagcacagagacgcctcatgaacgaaaggactttgaatccaaagcaaaccatcttggtgattctggtgggactcctgtgaagacccggaggcattcctggaggcagcagatattcctccgagtagccaccccgcagaaggcgtgcgattcttccagcagatatgaagattattcagagctgggagagcttcccccacgatctcctttagaaccagtttgtgaagatgggccctttggccccccaccagaggaaaagaaaaggacatctcgtgagctccgagagctgtggcaaaaggctattcttcaacagatactgctgcttagaatggagaaggaaaatcagaagctccaagcctctgaaaatgatttgctgaacaagcgcctgaagctcgattatgaagaaattactccctgtcttaaagaagtaactacagtgtgggaaaagatgcttagcactccaggaagatcaaaaattaagtttgacatggaaaaaatgcactcggctgttgggcaaggtgtgccacgtcatcaccgaggtgaaatctggaaatttctagctgagcaattccaccttaaacaccagtttcccagcaaacagcagccaaaggatgtgccatacaaagaactcttaaagcagctgacttcccagcagcatgcgattcttattgaccttgggcgaacctttcctacacacccatacttctctgcccagcttggagcaggacagctatcgctttacaacattttgaaggcctactcacttctagaccaggaagtgggatattgccaaggtctcagctttgtagcaggcattttgcttcttcatatgagtgaggaagaggcgtttaaaatgctcaagtttctgatgtttgacatggggctgcggaaacagtatcggccagacatgattattttacagatccagatgtaccagctctcgaggttgcttcatgattaccacagagacctctacaatcacctggaggagcacgagatcggccccagcctctacgctgccccctggttcctcaccatgtttgcctcacagttcccgctgggattcgtagccagagtctttggtgagcattagtaaatctgtttgccagaaccagccttctcttattagaggggaaacatttcctgtctctccatggtgattcttatttttatacctgtagctcttaccagaacagggtattgtttgatagtctaagattagtcaggggtgggttttgtgactttggagtcctccttaacttctgataatcacggggcttcccttagatgccttcatcttgtgggatgtggatccgatccgtgtagatccgatcgctcaccatgagggtctccctagagcagacatttggaggacttggctgaggagccacaggtgtatgtttctcatgaattgccttcctcagccactctgggttgtgagtattgactgatgctgactgtgggcctctgggccctt

SEQ ID NO: 355151 - DNA, 3177 bp, Homo sapiens
tgctcctggtgccgccaccgtccgccggtgcctgttgctgccgccgccgcgggacctgctgtgtcctcagctgggtggagaagaggcgggcgccgagccgaggggagccccctccccgtccccccgcggcgggaagagcgcagccagccgggtgcgatggactccccgcccgcccaggccgtccccaggatgcccccaagcacctgcgcgtcccggcccggccccgggctctgagcgcgccgcggcacaggtttctgcatatgaagtgtgtaaaatagattgcttgatccaaaacagaaaaacagtgataactgttttgctgagttcccagacccttcccaagatggaaccaataacattcacagcaaggaaacatctgctttctaacgaggtctcggtggattttggcctgcagctggtgggctccctgcctgtgcattccctgaccaccatgcccatgctgccctgggttgtggctgaggtgcgaagactcagcaggcagtccaccagaaaggaacctgtaaccaagcaagtccggctttgcgtttcaccctctggactgagatgtgaacctgagccagggagaagtcaacagtgggatcccctgatctattccagcatctttgagtgcaagcctcagcgtgttcacaaactgattcacaacagtcatgacccaagttactttgcttgtctgattaaggaagacgctgtccaccggcagagtatctgctatgtgttcaaagccgatgatcaaacaaaagtgcctgagatcatcagctccatccgtcaggcggggaagatcgcccggcaggaggagctgcactgcccgtccgagttcgacgacacgttttccaagaagttcgaggtgctcttctgcggccgcgtgacggtggcgcacaagaaggctccgccggccctgatcgacgagtgcatcgagaagttcaatcacgtcagcggcagccgggggtccgagagcccccgccccaacccgccccatgccgcgcccacagggagccaggagcctgtgcgcaggcccatgcgcaagtccttctcccagcccggcctgcgctcgctggcctttaggaaggagctgcaggatgggggcctccgaagcagcggcttcttcagctccttcgaggagagcgacattgagaaccacctcattagcggacacaatattgtgcagcccacagatatcgaggaaaatcgaactatgctcttcacgattggccagtctgaagtttacctcatcagtcctgacaccaaaaaaatagcattggagaaaaattttaaggagatatccttttgctctcagggcatcagacacgtggaccactttgggtttatctgtcgggagtcttccggaggtggcggctttcattttgtctgttacgtgtttcagtgcacaaatgaggctctggttgatgaaattatgatgaccctgaaacaggccttcacggtggccgcagtgcagcagacagctaaggcgccagcccagctgtgtgagggctgccccctgcaaagcctgcacaagctctgtgagaggatagagggaatgaattcttccaaaacaaaactagaactgcaaaagcacctgacgacattaaccaatcaggagcaggcgactatttttgaagaggttcagaaattgagaccgagaaatgagcagcgagagaatgaattgattatttcttttctgagatgtttatatgaagagaaacagaaagaacacatccatattggggagatgaagcagacatcgcagatggcagcagagaatattggaagtgaattaccacccagtgccactcgatttaggctagatatgctgaaaaacaaagcaaagagatctttaacagagtctttagaaagtattttgtcccggggtaataaagccagaggcctgcaggaacactccatcagtgtggatctggatagctccctgtctagtacattaagtaacaccagcaaagagccatctgtgtgtgaaaaggaggccttgcccatctctgagagctcctttaagctcctcggctcctcggaggacctgtccagtgactcggagagtcatctcccagaagagccagctccgctgtcgccccagcaggccttcaggaggcgagcaaacaccctgagtcacttccccatcgaatgccaggaacctccacaacctgcccgggggtccccgggggtttcgcaaaggaaacttatgaggtatcactcagtgagcacagagacgcctcatgaacgaaaggactttgaatccaaagcaaaccatcttggtgattctggtgggactcctgtgaagacccggaggcattcctggaggcagcagatattcctccgagtagccaccccgcagaaggcgtgcgattcttccagcagatatgaagattattcagagctgggagagcttcccccacgatctcctttagaaccagtttgtgaagatgggccctttggccccccaccagaggaaaagaaaaggacatctcgtgagctccgagagctgtggcaaaaggctattcttcaacagatactgctgcttagaatggagaaggaaaatcagaagctccaagcctctgaaaatgatttgctgaacaagcgcctgaagctcgattatgaagaaattactccctgtcttaaagaagtaactacagtgtgggaaaagatgcttagcactccaggaagatcaaaaattaagtttgacatggaaaaaatgcactcggctgttgggcaaggtgtgccacgtcatcaccgaggtgaaatctggaaatttctagctgagcaattccaccttaaacaccagtttcccagcaaacagcagccaaaggatgtgccatacaaagaactcttaaagcagctgacttcccagcagcatgcgattcttattgaccttgggcgaacctttcctacacacccatacttctctgcccagcttggagcaggacagctatcgctttacaacattttgaaggcctactcacttctagaccaggaagtgggatattgccaaggtctcagctttgtagcaggcattttgcttcttcatatgagtgaggaagaggcgtttaaaatgctcaagtttctgatgtttgacatggggctgcggaaacagtatcggccagacatgattattttacagatcccgactacccgggggacctctagaacgcc

SEQ ID NO: 355152 - DNA, 1055 bp, Homo sapiens
ttttccttctccattctaagcagcagtatctgttgaagaatagagaaggaaaatcagaagctccaagcctctgaaaatgatttgctgaacaagcgcctgaagctcgattatgaagaaattactccctgtcttaaagaagtaactacagtgtgggaaaagatgcttagcactccaggaagatcaaaaattaagtttgacatggaaaaaatgcactcggctgttgggcaaggtgtgccacgtcatcaccgaggtgaaatctggaaatttctagctgagcaattccaccttaaacaccagtttcccagcaaacagcagccaaaggatgtgccatacaaagaactcttaaagcagctgacttcccagcagcatgcgattcttattgaccttggtatttgaaatggacatcgctaaacagttacaagcttatgaagttgagtaccacgtccttcaagaagaacttatcgattcctctcctctcagtgacaaccaaagaatggataaattagagaaaaccaacagcagcttacgcaaacagaaccttgacctccttgaacagttgcaggtggcaaatggtaggatccaaagccttgaggccaccattgagaagctcctgagcagtgagagcaagctgaagcaggccatgcttaccttagaactggagcggtcggccctgctgcagacggtggaggagctgcggcggcggagcgcagagcccagcgaccgggagcctgagtgcacgcagcccgagcccacgggcgactgacagctctgcaggagagattgcaacaccatcccacactgtccaggccttaactgagagggacagaagacgctggaaggagagaaggaagcgggaagtgtgcttctcagggaggaaaccggcttgccagcaagtagattcttacgaactccaacttgcaattcagggggcatgtcccagtgttttttttgttgtttttagatactaaatcgtcccttctccagtcctgattactgtacacagtagctttagatggcgtggacgtgaataaatgcaacttatgttttcttgttgg

SEQ ID NO: 355153 - DNA, 2730 bp, Homo sapiens
tgctcctggtgccgccaccgtccgccggtgcctgttgctgccgccgccgcgggacctgctgtgtcctcagctgggtggagaagaggcgggcgccgagccgaggggagccccctccccgtccccccgcggcgggaagagcgcagccagccgggtgcgatggactccccgcccgcccaggccgtccccaggatgcccccaagcacctgcgcgtcccggcccggccccgggctctgagcgcgccgcggcacaggtttctgcatatgaagtgtgtaaaatagattgcttgatccaaaacagaaaaacagtgataactgttttgctgagttcccagacccttcccaagatggaaccaataacattcacagcaaggaaacatctgctttctaacgaggtctcggtggattttggcctgcagctggtgggctccctgcctgtgcattccctgaccaccatgcccatgctgccctgggttgtggctgaggtgcgaagactcagcaggcagtccaccagaaaggaacctgtaaccaagcaagtccggctttgcgtttcaccctctggactgagatgtgaacctgagccagggagaagtcaacagtgggatcccctgatctattccagcatctttgagtgcaagcctcagcgtgttcacaaactgattcacaacagtcatgacccaagttactttgcttgtctgattaaggaagacgctgtccaccggcagagtatctgctatgtgttcaaagccgatgatcaaacaaaagtgcctgagatcatcagctccatccgtcaggcggggaagatcgcccggcaggaggagctgcactgcccgtccgagttcgacgacacgttttccaagaagttcgaggtgctcttctgcggccgcgtgacggtggcgcacaagaaggctccgccggccctgatcgacgagtgcatcgagaagttcaatcacgtcagcggcagccgggggtccgagagcccccgccccaacccgccccatgccgcgcccacagggagccaggagcctgtgcgcaggcccatgcgcaagtccttctcccagcccggcctgcgctcgctggcctttaggaaggagctgcaggatgggggcctccgaagcagcggcttcttcagctccttcgaggagagcgacattgagaaccacctcattagcggacacaatattgtgcagcccacagatatcgaggaaaatcgaactatgctcttcacgattggccagtctgaagtttacctcatcagtcctgacaccaaaaaaatagcattggagaaaaattttaaggagatatccttttgctctcagggcatcagacacgtggaccactttgggtttatctgtcgggagtcttccggaggtggcggctttcattttgtctgttacgtgtttcagtgcacaaatgaggctctggttgatgaaattatgatgaccctgaaacaggccttcacggtggccgcagtgcagcagacagctaaggcgccagcccagctgtgtgagggctgccccctgcaaagcctgcacaagctctgtgagaggatagagggaatgaattcttccaaaacaaaactagaactgcaaaagcacctgacgacattaaccaatcaggagcaggcgactatttttgaagaggttcagaaattgagaccgagaaatgagcagcgagagaatgaattgattatttcttttctgagatgtttatatgaagagaaacagaaagaacacatccatattggggagatgaagcagacatcgcagatggcagcagagaatattggaagtgaattaccacccagtgccactcgatttaggctagatatgctgaaaaacaaagcaaagagatctttaacagagtctttagaaagtattttgtcccggggtaataaagccagaggcctgcaggaacactccatcagtgtggatctggatagctccctgtctagtacattaagtaacaccagcaaagagccatctgtgtgtgaaaaggaggccttgcccatctctgagagctcctttaagctcctcggctcctcggaggacctgtccagtgactcggagagtcatctcccagaagagccagctccgctgtcgccccagcaggccttcaggaggcgagcaaacaccctgagtcacttccccatcgaatgccaggaacctccacaacctgcccgggggtccccgggggtttcgcaaaggaaacttatgaggtatcactcagtgagcacagagacgcctcatgaacgaaagtgtggatccttcacctgtgggtgagtctaagcaccgcccaggtcagtcttcagctcctgctcctccacctcgtcttaacccctccgcctcctcgccaaacttttttaagtacctaaaacataattccagtggagaacaaagtgggaatgctgtgccaaagagcatctcctaccgtaatgccctgcggaaaaaacttcattcttcttcctctgtgccaaattttctaaaatttctggctcctgtagatgaaaataacacctctgattttatgaacacaaaaagggactttgaatccaaagcaaaccatcttggtgattctggtgggactcctgtgaagacccggaggcattcctggaggcagcagatattcctccgagtagccaccccgcagaaggcgtgcgattcttccagcagatatgaagtctagcattcctagaggaacgtcatgcaccaggtaaattccgccacgtgcctct

SEQ ID NO: 355154 - DNA, 1949 bp, Homo sapiens
tgctcctggtgccgccaccgtccgccggtgcctgttgctgccgccgccgcgggacctgctgtgtcctcagctgggtggagaagaggcgggcgccgagccgaggggagccccctccccgtccccccgcggcgggaagagcgcagccagccgggtgcgatggactccccgcccgcccaggccgtccccaggatgcccccaagcacctgcgcgtcccggcccggccccgggctctgagcgcgccgcggcacaggtttctgcatatgaagtgtgtaaaatagattgcttgatccaaaacagaaaaacagtgataactgttttgctgagttcccagacccttcccaagatggaaccaataacattcacagcaaggaaacatctgctttctaacgaggtctcggtggattttggcctgcagctggtgggctccctgcctgtgcattccctgaccaccatgcccatgctgccctgggttgtggctgaggtgcgaagactcagcaggcagtccaccagaaaggaacctgtaaccaagcaagtccggctttgcgtttcaccctctggactgagatgtgaacctgagccagggagaagtcaacagtgggatcccctgatctattccagcatctttgagtgcaagcctcagcgtgttcacaaactgattcacaacagtcatgacccaagttactttgcttgtctgattaaggaagacgctgtccaccggcagagtatctgctatgtgttcaaagccgatgatcaaacaaaagtgcctgagatcatcagctccatccgtcaggcggggaagatcgcccggcaggaggagctgcactgcccgtccgagttcgacgacacgttttccaagaagttcgaggtgctcttctgcggccgcgtgacggtggcgcacaagaaggctccgccggccctgatcgacgagtgcatcgagaagttcaatcacgtcagcggcagccgggggtccgagagcccccgccccaacccgccccatgccgcgcccacagggagccaggagcctgtgcgcaggcccatgcgcaagtccttctcccagcccggcctgcgctcgctggcctttaggaaggagctgcaggatgggggcctccgaagcagcggcttcttcagctccttcgaggagagcgacattgagaaccacctcattagcggacacaatattgtgcagcccacagatatcgaggaaaatcgaactatgctcttcacgattggccagtctgaagtttacctcatcagtcctgacaccaaaaaaatagcattggagaaaaattttaaggagatatccttttgctctcagggcatcagacacgtggaccactttgggtttatctgtcgggagtcttccggaggtggcggctttcattttgtctgttacgtgtttcagtgcacaaatgaggctctggttgatgaaattatgatgaccctgaaacaggccttcacggtggccgcagtgcagcagacagctaaggcgccagcccagctgtgtgagggctgccccctgcaaagcctgcacaagctctgtgagaggatagagggaatgaattcttccaaaacaaaactagaactgcaaaagcacctgacgacattaaccaatcaggagcaggcgactatttttgaagaggttcagaaattgagaccgagaaatgagcagcgagagaatgaattgattatttcttttctgagatgtttatatgaagagaaacagaaagaacacatccatattggggagatgaagcagacatcgcagatggcagcagagaatattggaagtgaattaccacccagtgccactcgatttaggctagatatgctgaaaaacaaagcaaagagatctttaacagagtctttagaaagccttttgccacagctctcggagctcacgagatgtccttttcttgtcctctggtggggggccaaagggcccatcttca

SEQ ID NO: 355155 - DNA, 1589 bp, Homo sapiens
tgctcctggtgccgccaccgtccgccggtgcctgttgctgccgccgccgcgggacctgctgtgtcctcagctgggtggagaagaggcgggcgccgagccgaggggagccccctccccgtccccccgcggcgggaagagcgcagccagccgggtgcgatggactccccgcccgcccaggccgtccccaggatgcccccaagcacctgcgcgtcccggcccggccccgggctctgagcgcgccgcggcacaggtttctgcatatgaagtgtgtaaaatagattgcttgatccaaaacagaaaaacagtgataactgttttgctgagttcccagacccttcccaagatggaaccaataacattcacagcaaggaaacatctgctttctaacgaggtctcggtggattttggcctgcagctggtgggctccctgcctgtgcattccctgaccaccatgcccatgctgccctgggttgtggctgaggtgcgaagactcagcaggcagtccaccagaaaggaacctgtaaccaagcaagtccggctttgcgtttcaccctctggactgagatgtgaacctgagccagggagaagtcaacagtgggatcccctgatctattccagcatctttgagtgcaagcctcagcgtgttcacaaactgattcacaacagtcatgacccaagttactttgcttgtctgattaaggaagacgctgtccaccggcagagtatctgctatgtgttcaaagccgatgatcaaacaaaagtgcctgagatcatcagctccatccgtcaggcggggaagatcgcccggcaggaggagctgcactgcccgtccgagttcgacgacacgttttccaagaagttcgaggtgctcttctgcggccgcgtgacggtggcgcacaagaaggctccgccggccctgatcgacgagtgcatcgagaagttcaatcacgtcagcggcagccgggggtccgagagcccccgccccaacccgccccatgccgcgcccacagggagccaggagcctgtgcgcaggcccatgcgcaagtccttctcccagcccggcctgcgctcgctggcctttaggaaggagctgcaggatgggggcctccgaagcagcggcttcttcagctccttcgaggagagcgacattgagaaccacctcattagcggacacaatattgtgcagcccacagatatcgaggaaaatcgaactatgctcttcacgattggccagtctgaagtttacctcatcagtcctgacaccaaaaaaatagcattggagaaaaattttaaggagatatccttttgctctcagggcatcagacacgtggaccactttgggtttatctgtcgggagtcttccggaggtggcggctttcattttgtctgttacgtgtttcagtgcacaaatgaggctctggtgagagaggacaagcaattcttaccttggaaccttctttacaaggaattttagctccactgatttttctgtccttagggaaaaccagatggtcattgacatatcattatttgtctttagttatttacttatgactatttagtaagcagctaatacacatctgaagctt

SEQ ID NO: 355156 - DNA, 378 bp, Homo sapiens
ccttgcagggtgctgtgggcatgtaaatcctccagcgcagcccttggcaggtaagaggtgcttcataagtgtcgtcccccttctcttttctgtggaagctgtgtgttcacctcccatgggaagacattcctagtcccctcccgtgggctcctcctccagtgggctcctcctccagtgctccgcagtggagtagccagcggggcgtcccgaaagagcatggtgcattcattccgtgagtgccagccacactgcatgttccaaataacacgcctctctctctcctcaggtgcctgagatcatcagctccatccgtcaggcggggaagatcgcccggcaggaggagctgcactgcccgtccgagttcgacgacacgttttc

SEQ ID NO: 355157 - DNA, 381 bp, Homo sapiens
ggttaactccctatctcacaacttttatatagaattttttcatgcctctcttttttctcttaataggaatgaattcttccaaaacaaaactagaactgcaaaagcacctgacgacattaaccaatcaggagcaggcgactatttttgaagaggttcaggtacagtacagttgctaatttctagaaggaaagaaaaggcaggcagcttacctgggaaatgctatgtgtaaaaaatagcaaaccagtgttgtcccaacctgggggaaggtgccttgagttcgtcttggtttcaggggtgaccaatcttttggtcttccctgggccacattggaagaagaaggattgtcctggaccacacataaaagacacgatagctgatgag

SEQ ID NO: 355158 - DNA, 425 bp, Homo sapiens
ctccctatctcacaacttttatatagaattttttcatgcctctcttttttctcttaataggaatgaattcttccaaaacaaaactagaactgcaaaagcacctgacgacattaaccaatcaggagcaggcgactatttttgaagaggttcaggtacagtacagttgctaatttctagaaggaaagaaaaggcaggcagcttacctgggaaatgctatgtgtaaaaaatagcaaaccagtgttgtcccaacctgggggaaggtgccttgagttcgtcttggtttcaggggtgaccaatcttttggtcttccctgggccacattggaagaagaaggattgtcctggaccacacataaaagacacgatagctgatgagctgctaaaaaaacaaacaaacaaacaaacaaaaaaaacagcaaaaaaaaa

SEQ ID NO: 355159 - DNA, 4142 bp, Homo sapiens
tgctcctggtgccgccaccgtccgccggtgcctgttgctgccgccgccgcgggacctgctgtgtcctcagctgggtggagaagaggcgggcgccgagccgaggggagccccctccccgtccccccgcggcgggaagagcgcagccagccgggtgcgatggactccccgcccgcccaggccgtccccaggatgcccccaagcacctgcgcgtcccggcccggccccgggctctgagcgcgccgcggcacaggtttctgcatatgaagtgtgtaaaatagattgcttgatccaaaacagaaaaacagtgataactgttttgctgagttcccagacccttcccaagatggaaccaataacattcacagcaaggaaacatctgctttctaacgaggtctcggtggattttggcctgcagctggtgggctccctgcctgtgcattccctgaccaccatgcccatgctgccctgggttgtggctgaggtgcgaagactcagcaggcagtccaccagaaaggaacctgtaaccaagcaagtccggctttgcgtttcaccctctggactgagatgtgaacctgagccagggagaagtcaacagtgggatcccctgatctattccagcatctttgagtgcaagcctcagcgtgttcacaaactgattcacaacagtcatgacccaagttactttgcttgtctgattaaggaagacgctgtccaccggcagagtatctgctatgtgttcaaagccgatgatcaaacaaaagtgcctgagatcatcagctccatccgtcaggcggggaagatcgcccggcaggaggagctgcactgcccgtccgagttcgacgacacgttttccaagaagttcgaggtgctcttctgcggccgcgtgacggtggcgcacaagaaggctccgccggccctgatcgacgagtgcatcgagaagttcaatcacgtcagcggcagccgggggtccgagagcccccgccccaacccgccccatgccgcgcccacagggagccaggagcctgtgcgcaggcccatgcgcaagtccttctcccagcccggcctgcgctcgctggcctttaggaaggagctgcaggatgggggcctccgaagcagcggcttcttcagctccttcgaggagagcgacattgagaaccacctcattagcggacacaatattgtgcagcccacagatatcgaggaaaatcgaactatgctcttcacgattggccagtctgaagtttacctcatcagtcctgacaccaaaaaaatagcattggagaaaaattttaaggagatatccttttgctctcagggcatcagacacgtggaccactttgggtttatctgtcgggagtcttccggaggtggcggctttcattttgtctgttacgtgtttcagtgcacaaatgaggctctggttgatgaaattatgatgaccctgaaacaggccttcacggtggccgcagtgcagcagacagctaaggcgccagcccagctgtgtgagggctgccccctgcaaagcctgcacaagctctgtgagaggatagagggaatgaattcttccaaaacaaaactagaactgcaaaagcacctgacgacattaaccaatcaggagcaggcgactatttttgaagaggttcagaaattgagaccgagaaatgagcagcgagagaatgaattgattatttcttttctgagatgtttatatgaagagaaacagaaagaacacatccatattggggagatgaagcagacatcgcagatggcagcagagaatattggaagtgaattaccacccagtgccactcgatttaggctagatatgctgaaaaacaaagcaaagagatctttaacagagtctttagaaagtattttgtcccggggtaataaagccagaggcctgcaggaacactccatcagtgtggatctggatagctccctgtctagtacattaagtaacaccagcaaagagccatctgtgtgtgaaaaggaggccttgcccatctctgagagctcctttaagctcctcggctcctcggaggacctgtccagtgactcggagagtcatctcccagaagagccagctccgctgtcgccccagcaggccttcaggaggcgagcaaacaccctgagtcacttccccatcgaatgccaggaacctccacaacctgcccgggggtccccgggggtttcgcaaaggaaacttatgaggtatcactcagtgagcacagagacgcctcatgaacgaaaggactttgaatccaaagcaaaccatcttggtgattctggtgggactcctgtgaagacccggaggcattcctggaggcagcagatattcctccgagtagccaccccgcagaaggcgtgcgattcttccagcagatatgaagattattcagagctgggagagcttcccccacgatctcctttagaaccagtttgtgaagatgggccctttggccccccaccagaggaaaagaaaaggacatctcgtgagctccgagagctgtggcaaaaggctattcttcaacagatactgctgcttagaatggagaaggaaaatcagaagctccaagcctctgaaaatgatttgctgaacaagcgcctgaagctcgattatgaagaaattactccctgtcttaaagaagtaactacagtgtgggaaaagatgcttagcactccaggaagatcaaaaattaagtttgacatggaaaaaatgcactcggctgttgggcaaggtgtgccacgtcatcaccgaggtgaaatctggaaatttctagctgagcaattccaccttaaacaccagtttcccagcaaacagcagccaaaggatgtgccatacaaagaactcttaaagcagctgacttcccagcagcatgcgattcttattgaccttgggcgaacctttcctacacacccatacttctctgcccagcttggagcaggacagctatcgctttacaacattttgaaggcctactcacttctagaccaggaagtgggatattgccaaggtctcagctttgtagcaggcattttgcttcttcatatgagtgaggaagaggcgtttaaaatgctcaagtttctgatgtttgacatggggctgcggaaacagtatcggccagacatgattattttacagatccagatgtaccagctctcgaggttgcttcatgattaccacagagacctctacaatcacctggaggagcacgagatcggccccagcctctacgctgccccctggttcctcaccatgtttgcctcacagttcccgctgggattcgtagccagagtctttgatatgatttttcttcagggaacagaggtcatatttaaagtggctttaagtctgttgggaagccataagcccttgattctgcagcatgaaaacctagaaaccatagttgactttataaaaagcacgctacccaaccttggcttggtacagatggaaaagaccatcaatcaggtatttgaaatggacatcgctaaacagttacaagcttatgaagttgagtaccacgtccttcaagaagaacttatcgattcctctcctctcagtgacaaccaaagaatggataaattagagaaaaccaacagcagcttacgcaaacagaaccttgacctccttgaacagttgcaggtggcaaatggtaggatccaaagccttgaggccaccattgagaagctcctgagcagtgagagcaagctgaagcaggccatgcttaccttagaactggagcggtcggccctgctgcagacggtggaggagctgcggcggcggagcgcagagcccagcgaccgggagcctgagtgcacgcagcccgagcccacgggcgactgacagctctgcaggagagattgcaacaccatcccacactgtccaggccttaactgagagggacagaagacgctggaaggagagaaggaagcgggaagtgtgcttctcagggaggaaaccggcttgccagcaagtagattcttacgaactccaacttgcaattcagggggcatgtcccagtgttttttttgttgtttttagatactaaatcgtcccttctccagtcctgattactgtacacagtagctttagatggcgtggacgtgaataaatgcaacttatgttttcttgttgg

SEQ ID NO: 355160 - DNA, 3581 bp, Homo sapiens
cccgcccccggccgcccgcgggcccacgggccggcggcgggagtgagcgggagccggcgggcgaagagccgccgcccggcccgcgatgtcaccattgttcagctgggtggccaagagcgatgaagtaacttgatttgaacaagatcacacagctagtttatggcagaacttaaaaagttcttggacacctgtttttgaggtgcctgagatcatcagctccatccgtcaggcggggaagatcgcccggcaggaggagctgcactgcccgtccgagttcgacgacacgttttccaagaagttcgaggtgctcttctgcggccgcgtgacggtggcgcacaagaaggctccgccggccctgatcgacgagtgcatcgagaagttcaatcacgtcagcggcagccgggggtccgagagcccccgccccaacccgccccatgccgcgcccacagggagccaggagcctgtgcgcaggcccatgcgcaagtccttctcccagcccggcctgcgctcgctggcctttaggaaggagctgcaggatgggggcctccgaagcagcggcttcttcagctccttcgaggagagcgacattgagaaccacctcattagcggacacaatattgtgcagcccacagatatcgaggaaaatcgaactatgctcttcacgattggccagtctgaagtttacctcatcagtcctgacaccaaaaaaatagcattggagaaaaattttaaggagatatccttttgctctcagggcatcagacacgtggaccactttgggtttatctgtcgggagtcttccggaggtggcggctttcattttgtctgttacgtgtttcagtgcacaaatgaggctctggttgatgaaattatgatgaccctgaaacaggccttcacggtggccgcagtgcagcagacagctaaggcgccagcccagctgtgtgagggctgccccctgcaaagcctgcacaagctctgtgagaggatagagggaatgaattcttccaaaacaaaactagaactgcaaaagcacctgacgacattaaccaatcaggagcaggcgactatttttgaagaggttcagaaattgagaccgagaaatgagcagcgagagaatgaattgattatttcttttctgagatgtttatatgaagagaaacagaaagaacacatccatattggggagatgaagcagacatcgcagatggcagcagagaatattggaagtgaattaccacccagtgccactcgatttaggctagatatgctgaaaaacaaagcaaagagatctttaacagagtctttagaaagtattttgtcccggggtaataaagccagaggcctgcaggaacactccatcagtgtggatctggatagctccctgtctagtacattaagtaacaccagcaaagagccatctgtgtgtgaaaaggaggccttgcccatctctgagagctcctttaagctcctcggctcctcggaggacctgtccagtgactcggagagtcatctcccagaagagccagctccgctgtcgccccagcaggccttcaggaggcgagcaaacaccctgagtcacttccccatcgaatgccaggaacctccacaacctgcccgggggtccccgggggtttcgcaaaggaaacttatgaggtatcactcagtgagcacagagacgcctcatgaacgaaaggactttgaatccaaagcaaaccatcttggtgattctggtgggactcctgtgaagacccggaggcattcctggaggcagcagatattcctccgagtagccaccccgcagaaggcgtgcgattcttccagcagatatgaagattattcagagctgggagagcttcccccacgatctcctttagaaccagtttgtgaagatgggccctttggccccccaccagaggaaaagaaaaggacatctcgtgagctccgagagctgtggcaaaaggctattcttcaacagatactgctgcttagaatggagaaggaaaatcagaagctccaagcctctgaaaatgatttgctgaacaagcgcctgaagctcgattatgaagaaattactccctgtcttaaagaagtaactacagtgtgggaaaagatgcttagcactccaggaagatcaaaaattaagtttgacatggaaaaaatgcactcggctgttgggcaaggtgtgccacgtcatcaccgaggtgaaatctggaaatttctagctgagcaattccaccttaaacaccagtttcccagcaaacagcagccaaaggatgtgccatacaaagaactcttaaagcagctgacttcccagcagcatgcgattcttattgaccttgggcgaacctttcctacacacccatacttctctgcccagcttggagcaggacagctatcgctttacaacattttgaaggcctactcacttctagaccaggaagtgggatattgccaaggtctcagctttgtagcaggcattttgcttcttcatatgagtgaggaagaggcgtttaaaatgctcaagtttctgatgtttgacatggggctgcggaaacagtatcggccagacatgattattttacagatccagatgtaccagctctcgaggttgcttcatgattaccacagagacctctacaatcacctggaggagcacgagatcggccccagcctctacgctgccccctggttcctcaccatgtttgcctcacagttcccgctgggattcgtagccagagtctttgatatgatttttcttcagggaacagaggtcatatttaaagtggctttaagtctgttgggaagccataagcccttgattctgcagcatgaaaacctagaaaccatagttgactttataaaaagcacgctacccaaccttggcttggtacagatggaaaagaccatcaatcaggtatttgaaatggacatcgctaaacagttacaagcttatgaagttgagtaccacgtccttcaagaagaacttatcgattcctctcctctcagtgacaaccaaagaatggataaattagagaaaaccaacagcagcttacgcaaacagaaccttgacctccttgaacagttgcaggtggcaaatggtaggatccaaagccttgaggccaccattgagaagctcctgagcagtgagagcaagctgaagcaggccatgcttaccttagaactggagcggtcggccctgctgcagacggtggaggagctgcggcggcggagcgcagagcccagcgaccgggagcctgagtgcacgcagcccgagcccacgggcgactgacagctctgcaggagagattgcaacaccatcccacactgtccaggccttaactgagagggacagaagacgctggaaggagagaaggaagcgggaagtgtgcttctcagggaggaaaccggcttgccagcaagtagattcttacgaactccaacttgcaattcagggggcatgtcccagtgttttttttgttgtttttagatactaaatcgtcccttctccagtcctgattactgtacacagtagctttagatggcgtggacgtgaataaatgcaacttatgttttcttgttgg

SEQ ID NO: 355161 - DNA, 4181 bp, Homo sapiens
tgctcctggtgccgccaccgtccgccggtgcctgttgctgccgccgccgcgggacctgctgtgtcctcagctgggtggagaagaggcgggcgccgagccgaggggagccccctccccgtccccccgcggcgggaagagcgcagccagccgggtgcgatggactccccgcccgcccaggccgtccccaggatgcccccaagcacctgcgcgtcccggcccggccccgggctctgagcgcgccgcggcacaggtttctgcatatgaagtgtgtaaaatagattgcttgatccaaaacagaaaaacagtgataactgttttgctgagttcccagacccttcccaagatggaaccaataacattcacagcaaggaaacatctgctttctaacgaggtctcggtggattttggcctgcagctggtgggctccctgcctgtgcattccctgaccaccatgcccatgctgccctgggttgtggctgaggtgcgaagactcagcaggcagtccaccagaaaggaacctgtaaccaagcaagtccggctttgcgtttcaccctctggactgagatgtgaacctgagccagggagaagtcaacagtgggatcccctgatctattccagcatctttgagtgcaagcctcagcgtgttcacaaactgattcacaacagtcatgacccaagttactttgcttgtctgattaaggaagacgctgtccaccggcagagtatctgctatgtgttcaaagccgatgatcaaacaaaagtgcctgagatcatcagctccatccgtcaggcggggaagatcgcccggcaggaggagctgcactgcccgtccgagttcgacgacacgttttccaagaagttcgaggtgctcttctgcggccgcgtgacggtggcgcacaagaaggctccgccggccctgatcgacgagtgcatcgagaagttcaatcacgtcagcggcagccgggggtccgagagcccccgccccaacccgccccatgccgcgcccacagggagccaggagcctgtgcgcaggcccatgcgcaagtccttctcccagcccggcctgcgctcgctggcctttaggaaggagctgcaggatgggggcctccgaagcagcggcttcttcagctccttcgaggagagcgacattgagaaccacctcattagcggacacaatattgtgcagcccacagatatcgaggaaaatcgaactatgctcttcacgattggccagtctgaagtttacctcatcagtcctgacaccaaaaaaatagcattggagaaaaattttaaggagatatccttttgctctcagggcatcagacacgtggaccactttgggtttatctgtcgggagtcttccggaggtggcggctttcattttgtctgttacgtgtttcagtgcacaaatgaggctctggttgatgaaattatgatgaccctgaaacaggccttcacggtggccgcagtgcagcagacagctaaggcgccagcccagctgtgtgagggctgccccctgcaaagcctgcacaagctctgtgagaggatagagggaatgaattcttccaaaacaaaactagaactgcaaaagcacctgacgacattaaccaatcaggagcaggcgactatttttgaagaggttcagaaattgagaccgagaaatgagcagcgagagaatgaattgattatttcttttctgagatgtttatatgaagagaaacagaaagaacacatccatattggggagatgaagcagacatcgcagatggcagcagagaatattggaagtgaattaccacccagtgccactcgatttaggctagatatgctgaaaaacaaagcaaagagatctttaacagagtctttagaaagtattttgtcccggggtaataaagccagaggcctgcaggaacactccatcagtgtggatctggatagctccctgtctagtacattaagtaacaccagcaaagagccatctgtgtgtgaaaaggaggccttgcccatctctgagagctcctttaagctcctcggctcctcggaggacctgtccagtgactcggagagtcatctcccagaagagccagctccgctgtcgccccagcaggccttcaggaggcgagcaaacaccctgagtcacttccccatcgaatgccaggaacctccacaacctgcccgggggtccccgggggtttcgcaaaggaaacttatgaggtatcactcagtgagcacagagacgcctcatgaacgaaaggactttgaatccaaagcaaaccatcttggtgattctggtgggactcctgtgaagacccggaggcattcctggaggcagcagatattcctccgagtagccaccccgcagaaggcgtgcgattcttccagcagatatgaagaacctcactgtggatcgccatcgttggcctgtactgaagattattcagagctgggagagcttcccccacgatctcctttagaaccagtttgtgaagatgggccctttggccccccaccagaggaaaagaaaaggacatctcgtgagctccgagagctgtggcaaaaggctattcttcaacagatactgctgcttagaatggagaaggaaaatcagaagctccaagcctctgaaaatgatttgctgaacaagcgcctgaagctcgattatgaagaaattactccctgtcttaaagaagtaactacagtgtgggaaaagatgcttagcactccaggaagatcaaaaattaagtttgacatggaaaaaatgcactcggctgttgggcaaggtgtgccacgtcatcaccgaggtgaaatctggaaatttctagctgagcaattccaccttaaacaccagtttcccagcaaacagcagccaaaggatgtgccatacaaagaactcttaaagcagctgacttcccagcagcatgcgattcttattgaccttgggcgaacctttcctacacacccatacttctctgcccagcttggagcaggacagctatcgctttacaacattttgaaggcctactcacttctagaccaggaagtgggatattgccaaggtctcagctttgtagcaggcattttgcttcttcatatgagtgaggaagaggcgtttaaaatgctcaagtttctgatgtttgacatggggctgcggaaacagtatcggccagacatgattattttacagatccagatgtaccagctctcgaggttgcttcatgattaccacagagacctctacaatcacctggaggagcacgagatcggccccagcctctacgctgccccctggttcctcaccatgtttgcctcacagttcccgctgggattcgtagccagagtctttgatatgatttttcttcagggaacagaggtcatatttaaagtggctttaagtctgttgggaagccataagcccttgattctgcagcatgaaaacctagaaaccatagttgactttataaaaagcacgctacccaaccttggcttggtacagatggaaaagaccatcaatcaggtatttgaaatggacatcgctaaacagttacaagcttatgaagttgagtaccacgtccttcaagaagaacttatcgattcctctcctctcagtgacaaccaaagaatggataaattagagaaaaccaacagcagcttacgcaaacagaaccttgacctccttgaacagttgcaggtggcaaatggtaggatccaaagccttgaggccaccattgagaagctcctgagcagtgagagcaagctgaagcaggccatgcttaccttagaactggagcggtcggccctgctgcagacggtggaggagctgcggcggcggagcgcagagcccagcgaccgggagcctgagtgcacgcagcccgagcccacgggcgactgacagctctgcaggagagattgcaacaccatcccacactgtccaggccttaactgagagggacagaagacgctggaaggagagaaggaagcgggaagtgtgcttctcagggaggaaaccggcttgccagcaagtagattcttacgaactccaacttgcaattcagggggcatgtcccagtgttttttttgttgtttttagatactaaatcgtcccttctccagtcctgattactgtacacagtagctttagatggcgtggacgtgaataaatgcaacttatgttttcttgttgg

SEQ ID NO: 355162 - DNA, 5956 bp, Homo sapiens
tgctcctggtgccgccaccgtccgccggtgcctgttgctgccgccgccgcgggacctgctgtgtcctcagctgggtggagaagaggcgggcgccgagccgaggggagccccctccccgtccccccgcggcgggaagagcgcagccagccgggtgcgatggactccccgcccgcccaggccgtccccaggatgcccccaagcacctgcgcgtcccggcccggccccgggctctgagcgcgccgcggcacaggtttctgcatatgaagtgtgtaaaatagattgcttgatccaaaacagaaaaacagtgataactgttttgctgagttcccagacccttcccaagatggaaccaataacattcacagcaaggaaacatctgctttctaacgaggtctcggtggattttggcctgcagctggtgggctccctgcctgtgcattccctgaccaccatgcccatgctgccctgggttgtggctgaggtgcgaagactcagcaggcagtccaccagaaaggaacctgtaaccaagcaagtccggctttgcgtttcaccctctggactgagatgtgaacctgagccagggagaagtcaacagtgggatcccctgatctattccagcatctttgagtgcaagcctcagcgtgttcacaaactgattcacaacagtcatgacccaagttactttgcttgtctgattaaggaagacgctgtccaccggcagagtatctgctatgtgttcaaagccgatgatcaaacaaaagtgcctgagatcatcagctccatccgtcaggcggggaagatcgcccggcaggaggagctgcactgcccgtccgagttcgacgacacgttttccaagaagttcgaggtgctcttctgcggccgcgtgacggtggcgcacaagaaggctccgccggccctgatcgacgagtgcatcgagaagttcaatcacgtcagcggcagccgggggtccgagagcccccgccccaacccgccccatgccgcgcccacagggagccaggagcctgtgcgcaggcccatgcgcaagtccttctcccagcccggcctgcgctcgctggcctttaggaaggagctgcaggatgggggcctccgaagcagcggcttcttcagctccttcgaggagagcgacattgagaaccacctcattagcggacacaatattgtgcagcccacagatatcgaggaaaatcgaactatgctcttcacgattggccagtctgaagtttacctcatcagtcctgacaccaaaaaaatagcattggagaaaaattttaaggagatatccttttgctctcagggcatcagacacgtggaccactttgggtttatctgtcgggagtcttccggaggtggcggctttcattttgtctgttacgtgtttcagtgcacaaatgaggctctggttgatgaaattatgatgaccctgaaacaggccttcacggtggccgcagtgcagcagacagctaaggcgccagcccagctgtgtgagggctgccccctgcaaagcctgcacaagctctgtgagaggatagagggaatgaattcttccaaaacaaaactagaactgcaaaagcacctgacgacattaaccaatcaggagcaggcgactatttttgaagaggttcagaaattgagaccgagaaatgagcagcgagagaatgaattgattatttcttttctgagatgtttatatgaagagaaacagaaagaacacatccatattggggagatgaagcagacatcgcagatggcagcagagaatattggaagtgaattaccacccagtgccactcgatttaggctagatatgctgaaaaacaaagcaaagagatctttaacagagtctttagaaagtattttgtcccggggtaataaagccagaggcctgcaggaacactccatcagtgtggatctggatagctccctgtctagtacattaagtaacaccagcaaagagccatctgtgtgtgaaaaggaggccttgcccatctctgagagctcctttaagctcctcggctcctcggaggacctgtccagtgactcggagagtcatctcccagaagagccagctccgctgtcgccccagcaggccttcaggaggcgagcaaacaccctgagtcacttccccatcgaatgccaggaacctccacaacctgcccgggggtccccgggggtttcgcaaaggaaacttatgaggtatcactcagtgagcacagagacgcctcatgaacgaaaggactttgaatccaaagcaaaccatcttggtgattctggtgggactcctgtgaagacccggaggcattcctggaggcagcagatattcctccgagtagccaccccgcagaaggcgtgcgattcttccagcagatatgaagattattcagagctgggagagcttcccccacgatctcctttagaaccagtttgtgaagatgggccctttggccccccaccagaggaaaagaaaaggacatctcgtgagctccgagagctgtggcaaaaggctattcttcaacagatactgctgcttagaatggagaaggaaaatcagaagctccaagcctctgaaaatgatttgctgaacaagcgcctgaagctcgattatgaagaaattactccctgtcttaaagaagtaactacagtgtgggaaaagatgcttagcactccaggaagatcaaaaattaagtttgacatggaaaaaatgcactcggctgttgggcaaggtgtgccacgtcatcaccgaggtgaaatctggaaatttctagctgagcaattccaccttaaacaccagtttcccagcaaacagcagccaaaggatgtgccatacaaagaactcttaaagcagctgacttcccagcagcatgcgattcttattgaccttgggcgaacctttcctacacacccatacttctctgcccagcttggagcaggacagctatcgctttacaacattttgaaggcctactcacttctagaccaggaagtgggatattgccaaggtctcagctttgtagcaggcattttgcttcttcatatgagtgaggaagaggcgtttaaaatgctcaagtttctgatgtttgacatggggctgcggaaacagtatcggccagacatgattattttacagatccagatgtaccagctctcgaggttgcttcatgattaccacagagacctctacaatcacctggaggagcacgagatcggccccagcctctacgctgccccctggttcctcaccatgtttgcctcacagttcccgctgggattcgtagccagagtctttgatatgatttttcttcagggaacagaggtcatatttaaagtggctttaagtctgttgggaagccataagcccttgattctgcagcatgaaaacctagaaaccatagttgactttataaaaagcacgctacccaaccttggcttggtacagatggaaaagaccatcaatcaggtatttgaaatggacatcgctaaacagttacaagcttatgaagttgagtaccacgtccttcaagaagaacttatcgattcctctcctctcagtgacaaccaaagaatggataaattagagaaaaccaacagcagcttacgcaaacagaaccttgacctccttgaacagttgcaggtggcaaatggtaggatccaaagccttgaggccaccattgagaagctcctgagcagtgagagcaagctgaagcaggccatgcttaccttagaactggagcggtcggccctgctgcagacggtggaggagctgcggcggcggagcgcagagcccagcgaccgggagcctgagtgcacgcagcccgagcccacgggcgactgacagctctgcaggagagattgcaacaccatcccacactgtccaggccttaactgagagggacagaagacgctggaaggagagaaggaagcgggaagtgtgcttctcagggaggaaaccggcttgccagcaagtagattcttacgaactccaacttgcaattcagggggcatgtcccagtgttttttttgttgtttttagatactaaatcgtcccttctccagtcctgattactgtacacagtagctttagatggcgtggacgtgaataaatgcaacttatgttttcttgttggttcctttttgagtgtcactgtgtttgtaaagagcattcacaatacggtggaatttcaaaagctggaagagctcgagatcatgcctcaggcaaaggcgtgggtccatcgttcttccgagagggtttgtgtggcgactacaccctcagcgtccctggcaaggtgcagttggctctcgcccattcttgttatggaaacctaagatgatcattgggaagatcagtgatcttgggtcattgatccctggctcagaggatagcggtttccatcataaaccaagatgatgagttcagcctttatccctcgtggttccactagatgtaacttaaaggagttaacatttgaggactttgttctacatcagattttactatttgaatgtttaagatcactttattgaatttgaagatcatcaaattaaataaaatgatttatttaatttggatatcctgatcactgtcaagtgaaatggatctctctctttggtatttaaggaagtttgtctttaaaaaaaaaatagagtgttttcatacatttttgcttatcccataagtacagttgatcaaagtcatagtaggtaaatgctttatgggacagctgacaccttttagaccctaccaggtattgctagcatgtgagctgcagttgtggggtctgagatatttctttgtggtagtttcatacccatactatagagtcatgtatttatttttgcctgttgtgtgatgtaatgcaatcatgttcctttgagtctccatcccttggaaatctgacttcttgcagaaggagtaggcacatcaagatattcaggggtgccccaagagtctgggactttcaaaaaaaaaagatcaggctgaaactgcagtcagatttatgacagctgacagtttttcagaggtcgcacacagtgactctcctctctcaggatgacgaggacctgtgccttcaacaagcaaaatgctgctcacggttgtcctgcttgcagccagtcactgtgtaaagcctctctgatgtgcacttaagagtgggttgctttctcacaaagatggggttctgtgcagtcacaggtcacttccttgacaacacaatcatttctgatctttatcactgtaaccacgtcttctattccataggagtttcttttgattctctcagttgcgggggcatctcttaatcctggggtaaaaggagagattgccatacttagactcactgtgagtctccccggccatttcacgaggagaccacagtgctgccaccagtgcctaaacaggtggctggcattcgagacttcctcctgttccctgggtcagaggatagcggtttccatcataaaccaagatgatgagttcagcctttatccctcgtggttccgctagatgtaacttataggagttaacatttgaggactttgttctgcatcagatcttactatttgaatgtttactgttggattttgggcatcttattactgttactcaaaaacattgactctgcatcaagaaagaaacaagaaagcaataaaacaagaaataattcaaaccccacacgcacacaacaaccactgttgggagcctgtggcctcagaaaagtttttaaaccaccttgctgtaggggcgcccggggccccataggtgaccgcgaacctcgggggccaagagcggtccccagaggagaccgccggggctagaacacagggcggggattcccccccgtagtaaaaaacgccccgggggacccgcagctgttcgaacacatccccgaagggtgccgagaggccaaacgggtcacaaccaggagccccggaggcaatatcg

SEQ ID NO: 355163 - DNA, 4050 bp, Homo sapiens
tgctcctggtgccgccaccgtccgccggtgcctgttgctgccgccgccgcgggacctgctgtgtcctcagctgggtggagaagaggcgggcgccgagccgaggggagccccctccccgtccccccgcggcgggaagagcgcagccagccgggtgcgatggactccccgcccgcccaggccgtccccaggatgcccccaagcacctgcgcgtcccggcccggccccgggctctgagcgcgccgcggcacaggtttctgcatatgaagtgtgtaaaatagattgcttgatccaaaacagaaaaacagtgataactgttttgctgagttcccagacccttcccaagatggaaccaataacattcacagcaaggaaacatctgctttctaacgaggtctcggtggattttggcctgcagctggtgggctccctgcctgtgcattccctgaccaccatgcccatgctgccctgggttgtggctgaggtgcgaagactcagcaggcagtccaccagaaaggaacctgtaaccaagcaagtccggctttgcgtttcaccctctggactgagatgtgaacctgagccagggagaagtcaacagtgggatcccctgatctattccagcatctttgagtgcaagcctcagcgtgttcacaaactgattcacaacagtcatgacccaagttactttgcttgtctgattaaggaagacgctgtccaccggcagagtatctgctatgtgttcaaagccgatgatcaaacaaaagtgcctgagatcatcagctccatccgtcaggcggggaagatcgcccggcaggaggagctgcactgcccgtccgagttcgacgacacgttttccaagaagttcgaggtgctcttctgcggccgcgtgacggtggcgcacaagaaggctccgccggccctgatcgacgagtgcatcgagaagttcaatcacgtcagcggcagccgggggtccgagagcccccgccccaacccgccccatgccgcgcccacagggagccaggagcctgtgcgcaggcccatgcgcaagtccttctcccagcccggcctgcgctcgctggcctttaggaaggagctgcaggatgggggcctccgaagcagcggcttcttcagctccttcgaggagagcgacattgagaaccacctcattagcggacacaatattgtgcagcccacagatatcgaggaaaatcgaactatgctcttcacgattggccagtctgaagtttacctcatcagtcctgacaccaaaaaaatagcattggagaaaaattttaaggagatatccttttgctctcagggcatcagacacgtggaccactttgggtttatctgtcgggagtcttccggaggtggcggctttcattttgtctgttacgtgtttcagtgcacaaatgaggctctggttgatgaaattatgatgaccctgaaacaggccttcacggtggccgcagtgcagcagacagctaaggcgccagcccagctgtgtgagggctgccccctgcaaagcctgcacaagctctgtgagaggatagaggaaattgagaccgagaaatgagcagcgagagaatgaattgattatttcttttctgagatgtttatatgaagagaaacagaaagaacacatccatattggggagatgaagcagacatcgcagatggcagcagagaatattggaagtgaattaccacccagtgccactcgatttaggctagatatgctgaaaaacaaagcaaagagatctttaacagagtctttagaaagtattttgtcccggggtaataaagccagaggcctgcaggaacactccatcagtgtggatctggatagctccctgtctagtacattaagtaacaccagcaaagagccatctgtgtgtgaaaaggaggccttgcccatctctgagagctcctttaagctcctcggctcctcggaggacctgtccagtgactcggagagtcatctcccagaagagccagctccgctgtcgccccagcaggccttcaggaggcgagcaaacaccctgagtcacttccccatcgaatgccaggaacctccacaacctgcccgggggtccccgggggtttcgcaaaggaaacttatgaggtatcactcagtgagcacagagacgcctcatgaacgaaaggactttgaatccaaagcaaaccatcttggtgattctggtgggactcctgtgaagacccggaggcattcctggaggcagcagatattcctccgagtagccaccccgcagaaggcgtgcgattcttccagcagatatgaagattattcagagctgggagagcttcccccacgatctcctttagaaccagtttgtgaagatgggccctttggccccccaccagaggaaaagaaaaggacatctcgtgagctccgagagctgtggcaaaaggctattcttcaacagatactgctgcttagaatggagaaggaaaatcagaagctccaagcctctgaaaatgatttgctgaacaagcgcctgaagctcgattatgaagaaattactccctgtcttaaagaagtaactacagtgtgggaaaagatgcttagcactccaggaagatcaaaaattaagtttgacatggaaaaaatgcactcggctgttgggcaaggtgtgccacgtcatcaccgaggtgaaatctggaaatttctagctgagcaattccaccttaaacaccagtttcccagcaaacagcagccaaaggatgtgccatacaaagaactcttaaagcagctgacttcccagcagcatgcgattcttattgaccttgggcgaacctttcctacacacccatacttctctgcccagcttggagcaggacagctatcgctttacaacattttgaaggcctactcacttctagaccaggaagtgggatattgccaaggtctcagctttgtagcaggcattttgcttcttcatatgagtgaggaagaggcgtttaaaatgctcaagtttctgatgtttgacatggggctgcggaaacagtatcggccagacatgattattttacagatccagatgtaccagctctcgaggttgcttcatgattaccacagagacctctacaatcacctggaggagcacgagatcggccccagcctctacgctgccccctggttcctcaccatgtttgcctcacagttcccgctgggattcgtagccagagtctttgatatgatttttcttcagggaacagaggtcatatttaaagtggctttaagtctgttgggaagccataagcccttgattctgcagcatgaaaacctagaaaccatagttgactttataaaaagcacgctacccaaccttggcttggtacagatggaaaagaccatcaatcaggtatttgaaatggacatcgctaaacagttacaagcttatgaagttgagtaccacgtccttcaagaagaacttatcgattcctctcctctcagtgacaaccaaagaatggataaattagagaaaaccaacagcagcttacgcaaacagaaccttgacctccttgaacagttgcaggtggcaaatggtaggatccaaagccttgaggccaccattgagaagctcctgagcagtgagagcaagctgaagcaggccatgcttaccttagaactggagcggtcggccctgctgcagacggtggaggagctgcggcggcggagcgcagagcccagcgaccgggagcctgagtgcacgcagcccgagcccacgggcgactgacagctctgcaggagagattgcaacaccatcccacactgtccaggccttaactgagagggacagaagacgctggaaggagagaaggaagcgggaagtgtgcttctcagggaggaaaccggcttgccagcaagtagattcttacgaactccaacttgcaattcagggggcatgtcccagtgttttttttgttgtttttagatactaaatcgtcccttctccagtcctgattactgtacacagtagctttagatggcgtggacgtgaataaatgcaacttatgttttcttgttgg

SEQ ID NO: 355164 - DNA, 2234 bp, Homo sapiens
  misc_feature (56)..(56): n is a, c, g, or t
  misc_feature (64)..(64): n is a, c, g, or t
gcccggccggcgccaactaggctaggtcgggccggtgttaattcggccgagggtanaccagcangagccatctgtgtgtgaaaaggaggccttgcccatctctgagagctcctttaagctcctcggctcctcggaggacctgtccagtgactcggagagtcatctcccagaagagccagctccgctgtcgccccagcaggccttcaggaggcgagcaaacaccctgagtcacttccccatcgaatgccaggaacctccacaacctgcccgggggtccccgggggtttcgcaaaggaaacttatgaggtatcactcagtgagcacagagacgcctcatgaacgaaaggactttgaatccaaagcaaaccatcttggtgattctggtgggactcctgtgaagacccggaggcattcctggaggcagcagatattcctccgagtagccaccccgcagaaggcgtgcgattcttccagcagatatgaagattattcagagctgggagagcttcccccacgatctcctttagaaccagtttgtgaagatgggccctttggccccccaccagaggaaaagaaaaggacatctcgtgagctccgagagctgtggcaaaaggctattcttcaacagatactgctgcttagaatggagaaggaaaatcagaagctccaagcctctgaaaatgatttgctgaacaagcgcctgaagctcgattatgaagaaattactccctgtcttaaagaagtaactacagtgtgggaaaagatgcttagcactccaggaagatcaaaaattaagtttgacatggaaaaaatgcactcggctgttgggcaaggtgtgccacgtcatcaccgaggtgaaatctggaaatttctagctgagcaattccaccttaaacaccagtttcccagcaaacagcagccaaaggatgtgccatacaaagaactcttaaagcagctgacttcccagcagcatgcgattcttattgaccttgggcgaacctttcctacacacccatacttctctgcccagcttggagcaggacagctatcgctttacaacattttgaaggcctactcacttctagaccaggaagtgggatattgccaaggtctcagctttgtagcaggcattttgcttcttcatatgagtgaggaagaggcgtttaaaatgctcaagtttctgatgtttgacatggggctgcggaaacagtatcggccagacatgattattttacagatccagatgtaccagctctcgaggttgcttcatgattaccacagagacctctacaatcacctggaggagcacgagatcggccccagcctctacgctgccccctggttcctcaccatgtttgcctcacagttcccgctgggattcgtagccagagtctttgatatgatttttcttcagggaacagaggtcatatttaaagtggctttaagtctgttgggaagccataagcccttgattctgcagcatgaaaacctagaaaccatagttgactttataaaaagcacgctacccaaccttggcttggtacagatggaaaagaccatcaatcaggtatttgaaatggacatcgctaaacagttacaagcttatgaagttgagtaccacgtccttcaagaagaacttatcgattcctctcctctcagtgacaaccaaagaatggataaattagagaaaaccaacagcagcttacgcaaacagaaccttgacctccttgaacagttgcaggtggcaaatggtaggatccaaagccttgaggccaccattgagaagctcctgagcagtgagagcaagctgaagcaggccatgcttaccttagaactggagcggtcggccctgctgcagacggtggaggagctgcggcggcggagcgcagagcccagcgaccgggagcctgagtgcacgcagcccgagcccacgggcgactgacagctctgcaggagagattgcaacaccatcccacactgtccaggccttaactgagagggacagaagacgctggaaggagagaaggaagcgggaagtgtgcttctcagggaggaaaccggcttgccagcaagtagattcttacgaactccaacttgcaattcagggggcatgtcccagtgttttttttgttgtttttagatactaaatcgtcccttctccagtcctgattactgtacacagtagctttagatggcgtggacgtgaataaatgcaacttatgttttcttgttgg

SEQ ID NO: 355165 - DNA, 4048 bp, Homo sapiens
tgctcctggtgccgccaccgtccgccggtgcctgttgctgccgccgccgcgggacctgctgtgtcctcagctgggtggagaagaggcgggcgccgagccgaggggagccccctccccgtccccccgcggcgggaagagcgcagccagccgggtgcgatggactccccgcccgcccaggccgtccccaggatgcccccaagcacctgcgcgtcccggcccggccccgggctctgagcgcgccgcggcacaggtttctgcatatgaagtgtgtaaaatagattgcttgatccaaaacagaaaaacagtgataactgttttgctgagttcccagacccttcccaagatggaaccaataacattcacagcaaggaaacatctgctttctaacgaggtctcggtggattttggcctgcagctggtgggctccctgcctgtgcattccctgaccaccatgcccatgctgccctgggttgtggctgaggtgcgaagactcagcaggcagtccaccagaaaggaacctgtaaccaagcaagtccggctttgcgtttcaccctctggactgagatgtgaacctgagccagggagaagtcaacagtgggatcccctgatctattccagcatctttgagtgcaagcctcagcgtgttcacaaactgattcacaacagtcatgacccaagttactttgcttgtctgattaaggaagacgctgtccaccggcagagtatctgctatgtgttcaaagccgatgatcaaacaaaagtgcctgagatcatcagctccatccgtcaggcggggaagatcgcccggcaggaggagctgcactgcccgtccgagttcgacgacacgttttccaagaagttcgaggtgctcttctgcggccgcgtgacggtggcgcacaagaaggctccgccggccctgatcgacgagtgcatcgagaagttcaatcacgtcagcggcagccgggggtccgagagcccccgccccaacccgccccatgccgcgcccacagggagccaggagcctgtgcgcaggcccatgcgcaagtccttctcccagcccggcctgcgctcgctggcctttaggaaggagctgcaggatgggggcctccgaagcagcggcttcttcagctccttcgaggagagcgacattgagaaccacctcattagcggacacaatattgtgcagcccacagatatcgaggaaaatcgaactatgctcttcacgattggccagtctgaagtttacctcatcagtcctgacaccaaaaaaatagcattggagaaaaattttaaggagatatccttttgctctcagggcatcagacacgtggaccactttgggtttatctgtcgggagtcttccggaggtggcggctttcattttgtctgttacgtgtttcagtgcacaaatgaggctctggttgatgaaattatgatgaccctgaaacaggccttcacggtggccgcagtgcagcagacagctaaggcgccagcccagctgtgtgagggctgccccctgcaaagcctgcacaagctctgtgagaggatagagggaatgaattcttccaaaacaaaactagaactgcaaaagcacctgacgacattaaccaatcaggagcaggcgactatttttgaagaggttcagaaattgagaccgagaaatgagcagcgagagaatgaattgattatttcttttctgagatgtttatatgaagagaaacagaaagaacacatccatattggggagatgaagcagacatcgcagatggcagcagagaatattggaagtgaattaccacccagtgccactcgatttaggctagatatgctgaaaaacaaagcaaagagatctttaacagagtctttagaaagtattttgtcccggggtaataaagccagaggcctgcaggaacactccatcagtgtggatctggatagctccctgtctagtacattaagtaacaccagcaaagagccatctgtgtgtgaaaaggaggccttgcccatctctgagagctcctttaagctcctcggctcctcggaggacctgtccagtgactcggagagtcatctcccagaagagccagctccgctgtcgccccagcaggccttcaggaggcgagcaaacaccctgagtcacttccccatcgaatgccaggaacctccacaacctgcccgggggtccccgggggtttcgcaaaggaaacttatgaggtatcactcagtgagcacagagacgcctcatgaacgaaaggactttgaatccaaagcaaaccatcttggtgattctggtgggactcctgtgaagacccggaggcattcctggaggcagcagatattcctccgagtagccaccccgcagaaggcgtgcgattcttccagcagatatgaagattattcagagctgggagagcttcccccacgatctcctttagaaccagtttgtgaagatgggccctttggccccccaccagaggaaaagaaaaggacatctcgtgagctccgagagctgtggcaaaaggctattcttcaacagatactgctgcttagaatggagaaggaaaatcagaagctccaagcctctgaaaatgatttgctgaacaagcgcctgaagctcgattatgaagaaattactccctgtcttaaagaagtaactacagtgtgggaaaagatgcttagcactccaggaagatcaaaaattaagtttgacatggaaaaaatgcactcggctgttgggcaaggtgtgccacgtcatcaccgaggtgaaatctggaaatttctagctgagcaattccaccttaaacaccagtttcccagcaaacagcagccaaaggatgtgccatacaaagaactcttaaagcagctgacttcccagcagcatgcgattcttattgaccttgggcgaacctttcctacacacccatacttctctgcccagcttggagcaggacagctatcgctttacaacattttgaaggcctactcacttctagaccaggaagtgggatattgccaaggtctcagctttgtagcaggcattttgcttcttcatatgagtgaggaagaggcgtttaaaatgctcaagtttctgatgtttgacatggggctgcggaaacagtatcggccagacatgattattttacagatccagatgtaccagctctcgaggttgcttcatgattaccacagagacctctacaatcacctggaggagcacgagatcggccccagcctctacgctgccccctggttcctcaccatgtttgcctcacagttcccgctgggattcgtagccagagtctttgatatgatttttcttcagggaacagaggtcatatttaaagtggctttaagtctgttgggaagccataagcccttgattctgcagcatgaaaacctagaaaccatagttgactttataaaaagcacgctacccaaccttggcttggtacagatggaaaagaccatcaatcaggtatttgaaatggacatcgctaaacagttacaagcttatgaagttgagtaccacgtccttcaagaagaacttatcgattcctctcctctcagtgacaaccaaagaatggataaattagagaaaaccaacagcagcttacgcaaacagaaccttgacctccttgaacagttgcaggtggcaaatggtaggatccaaagccttgaggccaccattgagaagctcctgagcagtgagagcaagctgaagcaggccatgcttaccttagaactggagcggtcggccctgctgcagacggtggaggagctgcggcggcggagcgcagagcccagcgaccgggagcctgagtgcacgcagcccgagcccacgggcgactgacagtgcttctcagggaggaaaccggcttgccagcaagtagattcttacgaactccaacttgcaattcagggggcatgtcccagtgttttttttgttgtttttagatactaaatcgtcccttctccagtcctgattactgtacacagtagctttagatggcgtggacgtgaataaatgcaacttatgttttcttgttgg

SEQ ID NO: 355166 - DNA, 992 bp, Homo sapiens
gagaaatttttccttcggctcataaatgggtaaaaagacgttaacaaacaagcagactccactttggaaatgatagcccttctattgcagagtaatttgaagctctctgaagctcactctaatgacttcataaatcaaagctgcagcttgtaaagatatgatttttcttcagggaacagaggtcatatttaaagtggctttaagtctgttgggaagccataagcccttgattctgcagcatgaaaacctagaaaccatagttgactttataaaaagcacgctacccaaccttggcttggtacagatggaaaagaccatcaatcaggtatttgaaatggacatcgctaaacagttacaagcttatgaagttgagtaccacgtccttcaagaagaacttatcgattcctctcctctcagtgacaaccaaagaatggataaattagagaaaaccaacagcagcttacgcaaacagaaccttgacctccttgaacagttgcaggtggcaaatggtaggatccaaagccttgaggccaccattgagaagctcctgagcagtgagagcaagctgaagcaggccatgcttaccttagaactggagcggtcggccctgctgcagacggtggaggagctgcggcggcggagcgcagagcccagcgaccgggagcctgagtgcacgcagcccgagcccacgggcgactgacagctctgcaggagagattgcaacaccatcccacactgtccaggccttaactgagagggacagaagacgctggaaggagagaaggaagcgggaagtgtgcttctcagggaggaaaccggcttgccagcaagtagattcttacgaactccaacttgcaattcagggggcatgtcccagtgttttttttgttgtttttagatactaaatcgtcccttctccagtcctgattactgtacacagtagctttagatggcgtggacgtgaataaatgcaacttatgttttcttgttgg

SEQ ID NO: 355167 - DNA, 2822 bp, Homo sapiens
tgctcctggtgccgccaccgtccgccggtgcctgttgctgccgccgccgcgggacctgctgtgtcctcagctgggtggagaagaggcgggcgccgagccgaggggagccccctccccgtccccccgcggcgggaagagcgcagccagccgggtgcgatggactccccgcccgcccaggccgtccccaggatgcccccaagcacctgcgcgtcccggcccggccccgggctctgagcgcgccgcggcacaggtttctgcatatgaagtgtgtaaaatagattgcttgatccaaaacagaaaaacagtgataactgttttgctgagttcccagacccttcccaagatggaaccaataacattcacagcaaggaaacatctgctttctaacgaggtctcggtggattttggcctgcagctggtgggctccctgcctgtgcattccctgaccaccatgcccatgctgccctgggttgtggctgaggtgcgaagactcagcaggcagtccaccagaaaggaacctgtaaccaagcaagtccggctttgcgtttcaccctctggactgagatgtgaacctgagccagggagaagtcaacagtgggatcccctgatctattccagcatctttgagtgcaagcctcagcgtgttcacaaactgattcacaacagtcatgacccaagttactttgcttgtctgattaaggaagacgctgtccaccggcagagtatctgctatgtgttcaaagccgatgatcaaacaaaagtgcctgagatcatcagctccatccgtcaggcggggaagatcgcccggcaggaggagctgcactgcccgtccgagttcgacgacacgttttccaagaagttcgaggtgctcttctgcggccgcgtgacggtggcgcacaagaaggctccgccggccctgatcgacgagtgcatcgagaagttcaatcacgtcagcggcagccgggggtccgagagcccccgccccaacccgccccatgccgcgcccacagggagccaggagcctgtgcgcaggcccatgcgcaagtccttctcccagcccggcctgcgctcgctggcctttaggaaggagctgcaggatgggggcctccgaagcagcggcttcttcagctccttcgaggagagcgacattgagaaccacctcattagcggacacaatattgtgcagcccacagatatcgaggaaaatcgaactatgctcttcacgattggccagtctgaagtttacctcatcagtcctgacaccaaaaaaatagcattggagaaaaattttaaggagatatccttttgctctcagggcatcagacacgtggaccactttgggtttatctgtcgggagtcttccggaggtggcggctttcattttgtctgttacgtgtttcagtgcacaaatgaggctctggttgatgaaattatgatgaccctgaaacaggccttcacggtggccgcagtgcagcagacagctaaggcgccagcccagctgtgtgagggctgccccctgcaaagcctgcacaagctctgtgagaggatagagggaatgaattcttccaaaacaaaactagaactgcaaaagcacctgacgacattaaccaatcaggagcaggcgactatttttgaagaggttcagaaattgagaccgagaaatgagcagcgagagaatgaattgattatttcttttctgagatgtttatatgaagagaaacagaaagaacacatccatattggggagatgaagcagacatcgcagatggcagcagagaatattggaagtgaattaccacccagtgccactcgatttaggctagatatgctgaaaaacaaagcaaagagatctttaacagagtctttagaaagtattttgtcccggggtaataaagccagaggcctgcaggaacactccatcagtgtggatctggatagctccctgtctagtacattaagtaacaccagcaaagagccatctgtgtgtgaaaaggaggccttgcccatctctgagagctcctttaagctcctcggctcctcggaggacctgtccagtgactcggagagtcatctcccagaagagccagctccgctgtcgccccagcaggccttcaggaggcgagcaaacaccctgagtcacttccccatcgaatgccaggaacctccacaacctgcccgggggtccccgggggtttcgcaaaggaaacttatgaggtatcactcagtgagcacagagacgcctcatgaacgaaaggactttgaatccaaagcaaaccatcttggtgattctggtgggactcctgtgaagacccggaggcattcctggaggcagcagatattcctccgagtagccaccccgcagaaggcgtgcgattcttccagcagatatgaagattattcagagctgggagagcttcccccacgatctcctttagaaccagtttgtgaagatgggccctttggccccccaccagaggaaaagaaaaggacatctcgtgagctccgagagctgtggcaaaaggctattcttcaacagatactgctgcttagaatggagaaggaaaatcagaagctccaagcctctgaaaatgatttgctgaacaagcgcctgaagctcgattatgaagtgcttctcagggaggaaaccggcttgccagcaagtagattcttacgaactccaacttgcaattcagggggcatgtcccagtgttttttttgttgtttttagatactaaatcgtcccttctccagtcctgattactgtacacagtagctttagatggcgtggacgtgaataaatgcaacttatgttttcttgttgg

SEQ ID NO: 355168 - DNA, 2676 bp, Homo sapiens
tgctcctggtgccgccaccgtccgccggtgcctgttgctgccgccgccgcgggacctgctgtgtcctcagctgggtggagaagaggcgggcgccgagccgaggggagccccctccccgtccccccgcggcgggaagagcgcagccagccgggtgcgatggactccccgcccgcccaggccgtccccaggatgcccccaagcacctgcgcgtcccggcccggccccgggctctgagcgcgccgcggcacaggtttctgcatatgaagtgtgtaaaatagattgcttgatccaaaacagaaaaacagtgataactgttttgctgagttcccagacccttcccaagatggaaccaataacattcacagcaaggaaacatctgctttctaacgaggtctcggtggattttggcctgcagctggtgggctccctgcctgtgcattccctgaccaccatgcccatgctgccctgggttgtggctgaggtgcgaagactcagcaggcagtccaccagaaaggaacctgtaaccaagcaagtccggctttgcgtttcaccctctggactgagatgtgaacctgagccagggagaagtcaacagtgggatcccctgatctattccagcatctttgagtgcaagcctcagcgtgttcacaaactgattcacaacagtcatgacccaagttactttgcttgtctgattaaggaagacgctgtccaccggcagagtatctgctatgtgttcaaagccgatgatcaaacaaaagtgcctgagatcatcagctccatccgtcaggcggggaagatcgcccggcaggaggagctgcactgcccgtccgagttcgacgacacgttttccaagaagttcgaggtgctcttctgcggccgcgtgacggtggcgcacaagaaggctccgccggccctgatcgacgagtgcatcgagaagttcaatcacgtcagcggcagccgggggtccgagagcccccgccccaacccgccccatgccgcgcccacagggagccaggagcctgtgcgcaggcccatgcgcaagtccttctcccagcccggcctgcgctcgctggcctttaggaaggagctgcaggatgggggcctccgaagcagcggcttcttcagctccttcgaggagagcgacattgagaaccacctcattagcggacacaatattgtgcagcccacagatatcgaggaaaatcgaactatgctcttcacgattggccagtctgaagtttacctcatcagtcctgacaccaaaaaaatagcattggagaaaaattttaaggagatatccttttgctctcagggcatcagacacgtggaccactttgggtttatctgtcgggagtcttccggaggtggcggctttcattttgtctgttacgtgtttcagtgcacaaatgaggctctggttgatgaaattatgatgaccctgaaacaggccttcacggtggccgcagtgcagcagacagctaaggcgccagcccagctgtgtgagggctgccccctgcaaagcctgcacaagctctgtgagaggatagagggaatgaattcttccaaaacaaaactagaactgcaaaagcacctgacgacattaaccaatcaggagcaggcgactatttttgaagaggttcagaaattgagaccgagaaatgagcagcgagagaatgaattgattatttcttttctgagatgtttatatgaagagaaacagaaagaacacatccatattggggagatgaagcagacatcgcagatggcagcagagaatattggaagtgaattaccacccagtgccactcgatttaggctagatatgctgaaaaacaaagcaaagagatctttaacagagtctttagaaagtattttgtcccggggtaataaagccagaggcctgcaggaacactccatcagtgtggatctggatagctccctgtctagtacattaagtaacaccagcaaagagccatctgtgtgtgaaaaggaggccttgcccatctctgagagctcctttaagctcctcggctcctcggaggacctgtccagtgactcggagagtcatctcccagaagagccagctccgctgtcgccccagcaggccttcaggaggcgagcaaacaccctgagtcacttccccatcgaatgccaggaacctccacaacctgcccgggggtccccgggggtttcgcaaaggaaacttatgaggtatcactcagtgagcacagagacgcctcatgaacgaaagtgtggatccttcacctgtgggtgagtctaagcaccgcccaggtcagtcttcagctcctgctcctccacctcgtcttaacccctccgcctcctcgccaaacttttttaagtacctaaaacataattccagtggagaacaaagtgggaatgctgtgccaaagagcatctcctaccgtaatgccctgcggaaaaaacttcattcttcttcctctgtgccaaattttctaaaatttctggctcctgtagatgaaaataacacctctgattttatgaacacaaaaaggcttgatccaagcaacatctggtattctggtggactcctgtgaagaccgagcattctgagcacagatatctccgagtacaccgcagagcgtcgattccacaatagattagcatctagaggacgtagcacagtattcacgt

SEQ ID NO: 355169 - DNA, 3579 bp, Homo sapiens
cacttccccaatctacaggagccattttaacagctaaaacttgtcggattgctttttattttcaagctcaaaagacgatagagaaagaatacttgaaggccaagaagcttgagagaagaaaaatttcagaaaaattgtctcaatttgactagaatatcaatgaaccaggaaaactgaagcaccttccctaaagaaaacttgggtatacaattactccacagacagagctgagggttttttacccaaatcagtcactggattttgctgcctgatacgtgaatcttcttggaatttttctcatgtggatctaaggggaatgctttattatggctgctgttgtccaacagaacgacctagtatttgaatttgctagtaacgtcatggaggatgaacgacagcttggtgatccagctatttttcctgccgtaattgtggaacatgttcctggtgctgatattctcaatagttatgccggtctagcctgtgtggaagagcccagtgacatgattactgagagttcactggatgttgctgaagaagaaatcatagacgatgatgatgatgacatcacccttacagttgaagcttcttgtcatgacggggatgaaacaattgaaactattgaggctgctgaggcactcctcaatatggattcccctggccctatgctggatgaaaaacgaataaataataatatatttagttcacctgaagatgacatggttgttgccccagtcacccatgtgtccgtcacattagatgggattcctgaagtgatggaaacacagcaggtgcaagaaaaatatgcagactcaccgggagcctcatcaccagaacagcctaagaggaaaaaaggaagaaaaactaaaccaccacgaccagattccccagccactacgccaaatatatctgtgaagaagaaaaacaaagatggaaagggaaacacaatttatctttgggagtttttactggcactgctccaggacaaggctacttgtcctaaatacatcaagtggacccagcgagagaaaggcatttttaaattggtggattctaaagcagtgtccaggttgtgggggaagcacaaaaacaaacctgatatgaattatgagaccatgggaagagcactcaggtactattaccaaaggggtattctggcaaaagtggaaggtcagcgcttggtgtatcagtttaaagaaatgccaaaagatcttatatatataaatgatgaggatccaagttccagcatagagtcttcagatccatcgctatcttcatcagccacttcaaataggaatcaaaccagccggtcgagagtatcttcaagtccaggggtaaaaggaggagccactacagttctaaaaccagggaattctaaagctgcaaaacccaaagatcctgtggaagttgcacaaccatcagaagttttgaggacagtgcagcccacgcagtctccatatcctacccagctcttccggactgttcatgtagtacagccagtacaggctgtcccagagggagaagcagctagaaccagtaccatgcaggatgaaacattaaattcttccgttcagagtattaggactatacaggctccaacccaagttccagtggttgtgtctcctaggaatcagcagttgcatacagtaacactccaaacagtgccactcacaacagttatagccagcacagatccatcagcaggtactggatctcagaagtttattttacaagccattccatcatcacagcccatgacagtactgaaagaaaatgtcatgctgcagtcacaaaaggcgggctctcctccttcaattgtcttgggccctgcccaggttcagcaggtccttactagcaatgttcagaccatttgcaatggaaccgtcagtgtggcttcctctccatccttcagtgctactgcacctgtggtgaccttttctcctcgcagttcacagctggttgctcacccacctggcactgtaatcacttcagttatcaaaactcaagaaacaaaaactcttacacaggaagtagagaaaaaggaatctgaagatcatttgaaagagaacactgagaaaacggagcagcagccacagccttatgtgatggtagtgtccagttccaatggatttacttctcaggtagctatgaaacaaaacgaactgctggaacccaactctttttagttaatataccaaagcttatgaataattgtttgttaattgaacattttcaattatatgcagactgactgattctaagataaattctaaggaggtttctaattttgtaattgttaaaaatagagttaattttgactttgttagatgagggaggaaaactcaactgtttctctttgttatctaaatgtttcagaattcaatcgtgaaggaacaggcattttacactatgaagacattcttttgagatttttatttcagttgctatatcataagcatttttaaagtttcttttctaattttacattgtattagattttctgattcttttgtaaatacagaacttaaatagaaggcaacaggaaatttatataggaactattttcattccacttgtgtaagttaagtcttgactctttcaaatgcaaaaaacctattttatgctttgttaaaattatggtgtcacttagattgactttagttgactgcactatataatatagaactatgaatatgtagaataacatgaaaaattggaggtgctggtggtatggctgaccctgtttcagaagcaggatagtataaaagcatcagcctaagaatggcactcccactaactagctatgtaatcttgacctctttgggctttagttcctctcataaaaggaagagatgtattggactagactagatgatcaccactttctcttctagttctaatttttttaattctaatacctatattttcaagttatgtcaattaaatcattatcaggttatttcctaatgtaagaatagctaaaatgttgcagagaaataagtgacccaacaaaatttattcatctattatgggtaagatctgccataaattcttcctaaataatttgtttactaactctttaggccactgtgctttgcggtccattagtaaacttgtgttgctaagtgctaaacagaatactgctattttgagagagtcaagactctttcttaagggccaagaaagcaacttgagccttgggctaatctggctgagtagtcagttataaaagcataattgctttatattttggatcattttttactgggggcggacttggggggggttgcatacaaagataacatatatatccaactttctgaaatgaaatgtttttagattactttttcaactgtaaataatgtacatttaatgtcacaagaaaaaaatgtcttctgcaaattttctagtataacagaaatttttgtagatgaaaaaaatcattatgtttagaggtctaatgctatgttttcatattacagagtgaatttgtatttaaacaaaaatttaaattttggaatcctctaaacatttttgtatctttaattggtttattattaaataaatcatataaaaatt

SEQ ID NO: 355170 - DNA, 497 bp, Homo sapiens
cacttccccaatctacaggagccattttaacagctaaaacttgtcggattgctttttattttcaagctcaaaagacgatagagaaagaatacttgaaggccaagaagcttgagagaagaaaaatttcagaaaaattgtctcaatttgactagaatatcaatgaaccaggaaaactgaagcaccttccctaaagaaaacttgggtatacaattactccacagacagagctgagggttttttacccaaatcagtcactggattttgctgcctgatacgtgaatcttcttggaatttttctcatgtggatctaaggggaatgctttattatggctgctgttgtccaacagaacgacctagtatttgaatttgctagtaacgtcatggaggatgaacgacaggctttggagtcaggggagctgttgaagactgtgggaggagtaaggcaccagacccctcttggtgttttcttgccttgatgcaaagatgttgcgtgaact

SEQ ID NO: 355171 - DNA, 3525 bp, Homo sapiens
cacttccccaatctacaggagccattttaacagctaaaacttgtcggattgctttttattttcaagctcaaaagacgatagagaaagaatacttgaaggccaagaagcttgagagaagaaaaatttcagaaaaattgtctcaatttgactagaatatcaatgaaccaggaaaactgaagcaccttccctaaagaaaacttgggtatacaattactccacagacagagctgagggttttttacccaaatcagtcactggattttgctgcctgatacgtgaatcttcttggaatttttctcatgtggatctaaggggaatgctttattatggctgctgttgtccaacagaacgacctagtatttgaatttgctagtaacgtcatggaggatgaacgacagcttggtgatccagctatttttcctgccgtaattgtggaacatgttcctggtgctgatattctcaatagttatgccggtctagcctgtgtggaagagcccagtgacatgattactgagagttcactggatgttgctgaagaagaaatcatagacgatgatgatgatgacatcacccttacagttgaagcttcttgtcatgacggggatgaaacaattgaaactattgaggctgctgaggcactcctcaatatggattcccctggccctatgctggatgaaaaacgaataaataataatatatttagttcacctgaagatgacatggttgttgccccagtcacccatgtgtccgtcacattagatgggattcctgaagtgatggaaacacagcaggtgcaagaaaaatatgcagactcaccgggagcctcatcaccagaacagcctaagaggaaaaaaggaagaaaaactaaaccaccacgaccagattccccagccactacgccaaatatatctgtgaagaagaaaaacaaagatggaaagggaaacacaatttatctttgggagtttttactggcactgctccaggacaaggctacttgtcctaaatacatcaagtggacccagcgagagaaaggcatttttaaattggtggattctaaagcagtgtccaggttgtgggggaagcacaaaaacaaacctgatatgaattatgagaccatgggaagagcactcaggtactattaccaaaggggtattctggcaaaagtggaaggtcagcgcttggtgtatcagtttaaagaaatgccaaaagatcttatatatataaatgatgaggatccaagttccagcatagagtcttcagatccatcgctatcttcatcagccacttcaaataggaatcaaaccagccggtcgagagtatcttcaagtccaggggtaaaaggaggagccactacagttctaaaaccagggaattctaaagctgcaaaacccaaagatcctgtggaagttgcacaaccatcagaagttttgaggacagtgcagcccacgcagtctccatatcctacccagctcttccggactgttcatgtagtacagccagtacaggctgtcccagagggagaagcagctagaaccagtaccatgcaggatgaaacattaaattcttccgttcagagtattaggactatacaggctccaacccaagttccagtggttgtgtctcctaggaatcagcagttgcatacagtaacactccaaacagtgccactcacaacagttatagccagcacagatccatcagcaggtactggatctcagaagtttattttacaagccattccatcatcacagcccatgacagtactgaaagaaaatgtcatgctgcagtcacaaaaggcgggctctcctccttcaattgtcttgggccctgcccaggttcagcaggtccttactagcaatgttcagaccatttgcaatggaaccgtcagtgtggcttcctctccatccttcagtgctactgcacctgtggtgaccttttctcctcgcagttcacagctggttgctcacccacctggcactgtaatcacttcagttatcaaaactcaagaaacaaaaactcttacacaggaagtagagaaaaaggaatctgaagatcatttgaaagagaacactgagaaaacggagcagcagccacagccttatgtgatggtagtgtccagttccaatggatttacttctcaggtagctatgaaacaaaacgaactgctggaacccaactctttttagttaatataccaaagcttatgaataattgtttgttaattgaacattttcaattatatgcagactgactgattctaagataaattctaaggaggtttctaattttgtaattgttaaaaatagagttaattttgactttgttagatgagggagggaacaggcattttacactatgaagacattcttttgagatttttatttcagttgctatatcataagcatttttaaagtttcttttctaattttacattgtattagattttctgattcttttgtaaatacagaacttaaatagaaggcaacaggaaatttatataggaactattttcattccacttgtgtaagttaagtcttgactctttcaaatgcaaaaaacctattttatgctttgttaaaattatggtgtcacttagattgactttagttgactgcactatataatatagaactatgaatatgtagaataacatgaaaaattggaggtgctggtggtatggctgaccctgtttcagaagcaggatagtataaaagcatcagcctaagaatggcactcccactaactagctatgtaatcttgacctctttgggctttagttcctctcataaaaggaagagatgtattggactagactagatgatcaccactttctcttctagttctaatttttttaattctaatacctatattttcaagttatgtcaattaaatcattatcaggttatttcctaatgtaagaatagctaaaatgttgcagagaaataagtgacccaacaaaatttattcatctattatgggtaagatctgccataaattcttcctaaataatttgtttactaactctttaggccactgtgctttgcggtccattagtaaacttgtgttgctaagtgctaaacagaatactgctattttgagagagtcaagactctttcttaagggccaagaaagcaacttgagccttgggctaatctggctgagtagtcagttataaaagcataattgctttatattttggatcattttttactgggggcggacttggggggggttgcatacaaagataacatatatatccaactttctgaaatgaaatgtttttagattactttttcaactgtaaataatgtacatttaatgtcacaagaaaaaaatgtcttctgcaaattttctagtataacagaaatttttgtagatgaaaaaaatcattatgtttagaggtctaatgctatgttttcatattacagagtgaatttgtatttaaacaaaaatttaaattttggaatcctctaaacatttttgtatctttaattggtttattattaaataaatcatataaaaatt

SEQ ID NO: 355172 - DNA, 3997 bp, Homo sapiens
cacttccccaatctacaggagccattttaacagctaaaacttgtcggattgctttttattttcaagctcaaaagacgatagagaaagaatacttgaaggccaagaagcttgagagaagaaaaatttcagaaaaattgtctcaatttgactagaatatcaatgaaccaggaaaactgaagcaccttccctaaagaaaacttgggtatacaattactccacagacagagctgagggttttttacccaaatcagtcactggattttgctgcctgatacgtgaatcttcttggaatttttctcatgtggatctaaggggaatgctttattatggctgctgttgtccaacagaacgacctagtatttgaatttgctagtaacgtcatggaggatgaacgacagcttggtgatccagctatttttcctgccgtaattgtggaacatgttcctggtgctgatattctcaatagttatgccggtctagcctgtgtggaagagcccagtgacatgattactgagagttcactggatgttgctgaagaagaaatcatagacgatgatgatgatgacatcacccttacagttgaagcttcttgtcatgacggggatgaaacaattgaaactattgaggctgctgaggcactcctcaatatggattcccctggccctatgctggatgaaaaacgaataaataataatatatttagttcacctgaagatgacatggttgttgccccagtcacccatgtgtccgtcacattagatgggattcctgaagtgatggaaacacagcaggtgcaagaaaaatatgcagactcaccgggagcctcatcaccagaacagcctaagaggaaaaaaggaagaaaaactaaaccaccacgaccagattccccagccactacgccaaatatatctgtgaagaagaaaaacaaagatggaaagggaaacacaatttatctttgggagtttttactggcactgctccaggacaaggctacttgtcctaaatacatcaagtggacccagcgagagaaaggcatttttaaattggtggattctaaagcagtgtccaggttgtgggggaagcacaaaaacaaacctgatatgaattatgagaccatgggaagagcactcaggtactattaccaaaggggtattctggcaaaagtggaaggtcagcgcttggtgtatcagtttaaagaaatgccaaaagatcttatatatataaatgatgaggatccaagttccagcatagagtcttcagatccatcgctatcttcatcagccacttcaaataggaatcaaaccagccggtcgagagtatcttcaagtccaggggtaaaaggaggagccactacagttctaaaaccagggaattctaaagctgcaaaacccaaagatcctgtggaagttgcacaaccatcagaagttttgaggacagtgcagcccacgcagtctccatatcctacccagctcttccggactgttcatgtagtacagccagtacaggctgtcccagagggagaagcagctagaaccagtaccatgcaggatgaaacattaaattcttccgttcagagtattaggactatacaggctccaacccaagttccagtggttgtgtctcctaggaatcagcagttgcatacagtaacactccaaacagtgccactcacaacagttatagccagcacagatccatcagcaggtactggatctcagaagtttattttacaagccattccatcatcacagcccatgacagtactgaaagaaaatgtcatgctgcagtcacaaaaggcgggctctcctccttcaattgtcttgggccctgcccaggttcagcaggtccttactagcaatgttcagaccatttgcaatggaaccgtcagtgtggcttcctctccatccttcagtgctactgcacctgtggtgaccttttctcctcgcagttcacagctggttgctcacccacctggcactgtaatcacttcagttatcaaaactcaagaaacaaaaactcttacacaggaagtagagaaaaaggaatctgaagatcatttgaaagagaacactgagaaaacggagcagcagccacagccttatgtgatggtagtgtccagttccaatggatttacttctcaggtagctatgaaacaaaacgaactgctggaacccaactctttttagttaatataccaaagcttatgaataattgtttgttaattgaacattttcaattatatgcagactgactgattctaagataaattctaaggaggtttctaattttgtaattgttaaaaatagagttaattttgactttgttagatgagggaggaaaactcaactgtttctctttgttatctaaatgtttcagaattcaatcgtgaaggaacaggcattttacactatgaagacattcttttgagatttttatttcagttgctatatcataagcatttttaaagtttcttttctaattttacattgtattagattttctgattcttttgtaaatacagaacttaaatagaaggcaacaggaaatttatataggaactattttcattccacttgtgtaagttaagtcttgactctttcaaatgcaaaaaacctattttatgctttgttaaaattatggtgtcacttagattgactttagttgactgcactatataatatagaactatgaatatgtagaataacatgaaaaattggaggtgctggtggtatggctgaccctgtttcagaagcaggatagtataaaagcatcagcctaagaatggcactcccactaactagctatgtaatcttgacctctttgggctttagttcctctcataaaaggaagagatgtattggactagactagatgatcaccactttctcttctagttctaatttttttaattctaatacctatattttcaagttatgtcaattaaatcattatcaggttatttcctaatgtaagaatagctaaaatgttgcagagaaataagtgacccaacaaaatttattcatctattatgggtaagatctgccataaattcttcctaaataatttgtttactaactctttaggccactgtgctttgcggtccattagtaaacttgtgttgctaagtgctaaacagaatactgctattttgagagagtcaagactctttcttaagggccaagaaagcaacttgagccttgggctaatctggctgagtagtcagttataaaagcataattgctttatattttggatcattttttactgggggcggacttggggggggttgcatacaaagataacatatatatccaactttctgaaatgaaatgtttttagattactttttcaactgtaaataatgtacatttaatgtcacaagaaaaaaatgtcttctgcaaattttctagtataacagaaatttttgtagatgaaaaaaatcattatgtttagaggtctaatgctatgttttcatattacagagtgaatttgtatttaaacaaaaatttaaattttggaatcctctaaacatttttgtatctttaattggtttattattaaataaatcatataaaaattaaaaaaaaaaaaaaaaaaaaaaaaaaaaaaaaaaaaaaaaaaaaaaaaaaaaaaacgcagcgacagagagaacgacaggagcgaagacgaaagaaagaggaggcgggacgaagaaagacaaaagcaagagtagaaaggagggacaacacggcgacccacagaaaaccccaacagacccccaaaaccgcaccacaccgaccaaccagcagaagcaccagcacaacacacaacccacacacacagcgaccaccacgacgagagaagcacaacactcacccaggagacccacacacacggaacagcacacaccacccgaacaccccccaagaaaacaggaccaaacagcaccccacacaacaactgacaaccaccaaaaccaccgcacgccacacccccacaacaaaccccagacaaccag

SEQ ID NO: 355173 - DNA, 2353 bp, Homo sapiens
ttcctaattttaagaagctcatgcaactttcttgctaagcattgtaacatcctcctccttccccaacaaaattagctcctcatttgtgttaatgtggccctatgtacagacctttcttccatagcactcagcagatggtatcatagttaatggcctgagagttttgtgttaggcatctctgtatgtagtgtttaatacaaagtctggcatgatattggtcatgctctgttgaaaatatgggaagcagcattttgaaacacataactggtattttgtaaaatgacttgtcaagtgttaaagttttaaatgatgtagaatatgctaattgtctcactttaatttcatcatctcaataggactatacaggctccaacccaagttccagtggttgtgtctcctaggaatcagcagttgcatacagtaacactccaaacagtgccactcacaacagttatagccagcacagatccatcagcaggtactggatctcagaagtttattttacaagccattccatcatcacagcccatgacagtactgaaagaaaatgtcatgctgcagtcacaaaaggcgggctctcctccttcaattgtcttgggccctgcccaggttcagcaggtccttactagcaatgttcagaccatttgcaatggaaccgtcagtgtggcttcctctccatccttcagtgctactgcacctgtggtgaccttttctcctcgcagttcacagctggttgctcacccacctggcactgtaatcacttcagttatcaaaactcaagaaacaaaaactcttacacaggaagtagagaaaaaggaatctgaagatcatttgaaagagaacactgagaaaacggagcagcagccacagccttatgtgatggtagtgtccagttccaatggatttacttctcaggtagctatgaaacaaaacgaactgctggaacccaactctttttagttaatataccaaagcttatgaataattgtttgttaattgaacattttcaattatatgcagactgactgattctaagataaattctaaggaggtttctaattttgtaattgttaaaaatagagttaattttgactttgttagatgagggaggaaaactcaactgtttctctttgttatctaaatgtttcagaattcaatcgtgaaggaacaggcattttacactatgaagacattcttttgagatttttatttcagttgctatatcataagcatttttaaagtttcttttctaattttacattgtattagattttctgattcttttgtaaatacagaacttaaatagaaggcaacaggaaatttatataggaactattttcattccacttgtgtaagttaagtcttgactctttcaaatgcaaaaaacctattttatgctttgttaaaattatggtgtcacttagattgactttagttgactgcactatataatatagaactatgaatatgtagaataacatgaaaaattggaggtgctggtggtatggctgaccctgtttcagaagcaggatagtataaaagcatcagcctaagaatggcactcccactaactagctatgtaatcttgacctctttgggctttagttcctctcataaaaggaagagatgtattggactagactagatgatcaccactttctcttctagttctaatttttttaattctaatacctatattttcaagttatgtcaattaaatcattatcaggttatttcctaatgtaagaatagctaaaatgttgcagagaaataagtgacccaacaaaatttattcatctattatgggtaagatctgccataaattcttcctaaataatttgtttactaactctttaggccactgtgctttgcggtccattagtaaacttgtgttgctaagtgctaaacagaatactgctattttgagagagtcaagactctttcttaagggccaagaaagcaacttgagccttgggctaatctggctgagtagtcagttataaaagcataattgctttatattttggatcattttttactgggggcggacttggggggggttgcatacaaagataacatatatatccaactttctgaaatgaaatgtttttagattactttttcaactgtaaataatgtacatttaatgtcacaagaaaaaaatgtcttctgcaaattttctagtataacagaaatttttgtagatgaaaaaaatcattatgtttagaggtctaatgctatgttttcatattacagagtgaatttgtatttaaacaaaaatttaaattttggaatcctctaaacatttttgtatctttaattggtttattattaaataaatcatataaaaatt

SEQ ID NO: 355174 - DNA, 1520 bp, Homo sapiens
gagagagagagcgagagcgcgagagagagagagagagagagatagagatcgtgagagagagagcgcatgtaaaacggagcagcagccacagccttatgtgatggtagtgtccagttccaatggatttacttctcaggtagctatgaaacaaaacgaactgctggaacccaactctttttagttaatataccaaagcttatgaataattgtttgttaattgaacattttcaattatatgcagactgactgattctaagataaattctaaggaggtttctaattttgtaattgttaaaaatagagttaattttgactttgttagatgagggagggaacaggcattttacactatgaagacattcttttgagatttttatttcagttgctatatcataagcatttttaaagtttcttttctaattttacattgtattagattttctgattcttttgtaaatacagaacttaaatagaaggcaacaggaaatttatataggaactattttcattccacttgtgtaagttaagtcttgactctttcaaatgcaaaaaacctattttatgctttgttaaaattatggtgtcacttagattgactttagttgactgcactatataatatagaactatgaatatgtagaataacatgaaaaattggaggtgctggtggtatggctgaccctgtttcagaagcaggatagtataaaagcatcagcctaagaatggcactcccactaactagctatgtaatcttgacctctttgggctttagttcctctcataaaaggaagagatgtattggactagactagatgatcaccactttctcttctagttctaatttttttaattctaatacctatattttcaagttatgtcaattaaatcattatcaggttatttcctaatgtaagaatagctaaaatgttgcagagaaataagtgacccaacaaaatttattcatctattatgggtaagatctgccataaattcttcctaaataatttgtttactaactctttaggccactgtgctttgcggtccattagtaaacttgtgttgctaagtgctaaacagaatactgctattttgagagagtcaagactctttcttaagggccaagaaagcaacttgagccttgggctaatctggctgagtagtcagttataaaagcataattgctttatattttggatcattttttactgggggcggacttggggggggttgcatacaaagataacatatatatccaactttctgaaatgaaatgtttttagattactttttcaactgtaaataatgtacatttaatgtcacaagaaaaaaatgtcttctgcaaattttctagtataacagaaatttttgtagatgaaaaaaatcattatgtttagaggtctaatgctatgttttcatattacagagtgaatttgtatttaaacaaaaatttaaattttggaatcctctaaacatttttgtatctttaattggtttattattaaataaatcatataaaaatt

SEQ ID NO: 355175 - DNA, 1740 bp, Homo sapiens
cacttccccaatctacaggagccattttaacagctaaaacttgtcggattgctttttattttcaagctcaaaagacgatagagaaagaatacttgaaggccaagaagcttgagagaagaaaaatttcagaaaaattgtctcaatttgactagaatatcaatgaaccaggaaaactgaagcaccttccctaaagaaaacttgggtatacaattactccacagacagagctgagggttttttacccaaatcagtcactggattttgctgcctgatacgtgaatcttcttggaatttttctcatgtggatctaaggggaatgctttattatggctgctgttgtccaacagaacgacctagtatttgaatttgctagtaacgtcatggaggatgaacgacagcttggtgatccagctatttttcctgccgtaattgtggaacatgttcctggtgctgatattctcaatagttatgccggtctagcctgtgtggaagagcccagtgacatgattactgagagttcactggatgttgctgaagaagaaatcatagacgatgatgatgatgacatcacccttacagttgaagcttcttgtcatgacggggatgaaacaattgaaactattgaggctgctgaggcactcctcaatatggattcccctggccctatgctggatgaaaaacgaataaataataatatatttagttcacctgaagatgacatggttgttgccccagtcacccatgtgtccgtcacattagatgggattcctgaagtgatggaaacacagcaggtgcaagaaaaatatgcagactcaccgggagcctcatcaccagaacagcctaagaggaaaaaaggaagaaaaactaaaccaccacgaccagattccccagccactacgccaaatatatctgtgaagaagaaaaacaaagatggaaagggaaacacaatttatctttgggagtttttactggcactgctccaggacaaggctacttgtcctaaatacatcaagtggacccagcgagagaaaggcatttttaaattggtggattctaaagcagtgtccaggttgtgggggaagcacaaaaacaaacctgatatgaattatgagaccatgggaagagcactcaggtactattaccaaaggggtattctggcaaaagtggaaggtcagcgcttggtgtatcagtttaaagaaatgccaaaagatcttatatatataaatgatgaggatccaagttccagcatagagtcttcagatccatcgctatcttcatcagccacttcaaataggaatcaaaccagccggtcgagagtatcttcaagtccaggggtaaaaggaggagccactacagttctaaaaccagggaattctaaagctgcaaaacccaaagatcctgtggaagttgcacaaccatcagaagttttgaggacagtgcagcccacgcagtctccatatcctacccagctcttccggactgttcatgtagtacagccagtacaggctgtcccagagggagaagcagctagaaccagtaccatgcaggatgaaacattaaattcttccgttcagagtattaggtgagaaaaccaaactactgatgcttatcacttcaatatgtttctgaccagagacattatttgttaagtgggtcaagattcagaaatgaaaataaaagtataaaggtttcaagctagaattcttggttaccagatttttcaggagcagttactattat

SEQ ID NO: 355176 - DNA, 695 bp, Homo sapiens
ccaaatggaatccccaaatggaatccccaaatggaatccccaaatggaatcctcaattaaatcattatcaggttatttcctaatgtaagaatagctaaaatgttgcagagaaataagtgacccaacaaaatttattcatctattatgggtaagatctgccataaattcttcctaaataatttgtttactaactctttaggccactgtgctttgcggtccattagtaaacttgtgttgctaagtgctaaacagaatactgctattttgagagagtcaagactctttcttaagggccaagaaagcaacttgagccttgggctaatctggctgagtagtcagttataaaagcataattgctttatattttggatcattttttactgggggcggacttggggggggttgcatacaaagataacatatatatccaactttctgaaatgaaatgtttttagattactttttcaactgtaaataatgtacatttaatgtcacaagaaaaaaatgtcttctgcaaattttctagtataacagaaatttttgtagatgaaaaaaatcattatgtttagaggtctaatgctatgttttcatattacagagtgaatttgtatttaaacaaaaatttaaattttggaatcctctaaacatttttgtatctttaattggtttattattaaataaatcatataaaaatt

SEQ ID NO: 355177 - DNA, 4151 bp, Homo sapiens
gaaggggtaaaagcgcgacgggacctgagctgaaggacgggatctcaagcctcaagtccctgcgccatcccgccgtctctgtgtcctcccctggggcccaaaacctccatcctccttctaggctcgctggctcaaggccaaggagctcagcgcgccgcctccgcccggaacgcaaacagctgttcccagagacgtctccgctctcaactttgccaactactccgcacgcactttgaccagcggagcaaccgggacctgtgggtcggggtcctctggcggagttaaaaaaaaaagaggtgaaactgcgggaccggcgctgcgagtcgctaggcttcgcctcaaactttgctgttgcagcggagcggacccgcccctcctctcccctacgacgcccacgcgctcggatggggcttgttccctagctcgggagcgtgtgggcagaagcagcggcggcggcggcggcggcggcggcggcagcagcagcttcagtagcgcagaggcggcggtggcgagaggtgcggcgaaggaggcagaggcacttatgcttgtcaggccaagaagcttgagagaagaaaaatttcagaaaaattgtctcaatttgactagaatatcaatgaaccaggaaaactgaagcaccttccctaaagaaaacttgggtatacaattactccacagacagagctgagggttttttacccaaatcagtcactggattttgctgcctgatacgtgaatcttcttggaatttttctcatgtggatctaaggggaatgctttattatggctgctgttgtccaacagaacgacctagtatttgaatttgctagtaacgtcatggaggatgaacgacagcttggtgatccagctatttttcctgccgtaattgtggaacatgttcctggtgctgatattctcaatagttatgccggtctagcctgtgtggaagagcccagtgacatgattactgagagttcactggatgttgctgaagaagaaatcatagacgatgatgatgatgacatcacccttacagtggaaacagggtttctccatgttggccagtctcagactcctgacctcaagcaatctgcttgcctcggcttcccaaagtgcgggattacaggaatgagccactgcgccagccaggtttgttgaagcttcttgtcatgacggggatgaaacaattgaaactattgaggctgctgaggcactcctcaatatggattcccctggccctatgctggatgaaaaacgaataaataataatatatttagttcacctgaagatgacatggttgttgccccagtcacccatgtgtccgtcacattagatgggattcctgaagtgatggaaacacagcaggtgcaagaaaaatatgcagactcaccgggagcctcatcaccagaacagcctaagaggaaaaaaggaagaaaaactaaaccaccacgaccagattccccagccactacgccaaatatatctgtgaagaagaaaaacaaagatggaaagggaaacacaatttatctttgggagtttttactggcactgctccaggacaaggctacttgtcctaaatacatcaagtggacccagcgagagaaaggcatttttaaattggtggattctaaagcagtgtccaggttgtgggggaagcacaaaaacaaacctgatatgaattatgagaccatgggaagagcactcaggtactattaccaaaggggtattctggcaaaagtggaaggtcagcgcttggtgtatcagtttaaagaaatgccaaaagatcttatatatataaatgatgaggatccaagttccagcatagagtcttcagatccatcgctatcttcatcagccacttcaaataggaatcaaaccagccggtcgagagtatcttcaagtccaggggtaaaaggaggagccactacagttctaaaaccagggaattctaaagctgcaaaacccaaagatcctgtggaagttgcacaaccatcagaagttttgaggacagtgcagcccacgcagtctccatatcctacccagctcttccggactgttcatgtagtacagccagtacaggctgtcccagagggagaagcagctagaaccagtaccatgcaggatgaaacattaaattcttccgttcagagtattaggactatacaggctccaacccaagttccagtggttgtgtctcctaggaatcagcagttgcatacagtaacactccaaacagtgccactcacaacagttatagccagcacagatccatcagcaggtactggatctcagaagtttattttacaagccattccatcatcacagcccatgacagtactgaaagaaaatgtcatgctgcagtcacaaaaggcgggctctcctccttcaattgtcttgggccctgcccaggttcagcaggtccttactagcaatgttcagaccatttgcaatggaaccgtcagtgtggcttcctctccatccttcagtgctactgcacctgtggtgaccttttctcctcgcagttcacagctggttgctcacccacctggcactgtaatcacttcagttatcaaaactcaagaaacaaaaactcttacacaggaagtagagaaaaaggaatctgaagatcatttgaaagagaacactgagaaaacggagcagcagccacagccttatgtgatggtagtgtccagttccaatggatttacttctcaggtagctatgaaacaaaacgaactgctggaacccaactctttttagttaatataccaaagcttatgaataattgtttgttaattgaacattttcaattatatgcagactgactgattctaagataaattctaaggaggtttctaattttgtaattgttaaaaatagagttaattttgactttgttagatgagggaggaaaactcaactgtttctctttgttatctaaatgtttcagaattcaatcgtgaaggaacaggcattttacactatgaagacattcttttgagatttttatttcagttgctatatcataagcatttttaaagtttcttttctaattttacattgtattagattttctgattcttttgtaaatacagaacttaaatagaaggcaacaggaaatttatataggaactattttcattccacttgtgtaagttaagtcttgactctttcaaatgcaaaaaacctattttatgctttgttaaaattatggtgtcacttagattgactttagttgactgcactatataatatagaactatgaatatgtagaataacatgaaaaattggaggtgctggtggtatggctgaccctgtttcagaagcaggatagtataaaagcatcagcctaagaatggcactcccactaactagctatgtaatcttgacctctttgggctttagttcctctcataaaaggaagagatgtattggactagactagatgatcaccactttctcttctagttctaatttttttaattctaatacctatattttcaagttatgtcaattaaatcattatcaggttatttcctaatgtaagaatagctaaaatgttgcagagaaataagtgacccaacaaaatttattcatctattatgggtaagatctgccataaattcttcctaaataatttgtttactaactctttaggccactgtgctttgcggtccattagtaaacttgtgttgctaagtgctaaacagaatactgctattttgagagagtcaagactctttcttaagggccaagaaagcaacttgagccttgggctaatctggctgagtagtcagttataaaagcataattgctttatattttggatcattttttactgggggcggacttggggggggttgcatacaaagataacatatatatccaactttctgaaatgaaatgtttttagattactttttcaactgtaaataatgtacatttaatgtcacaagaaaaaaatgtcttctgcaaattttctagtataacagaaatttttgtagatgaaaaaaatcattatgtttagaggtctaatgctatgttttcatattacagagtgaatttgtatttaaacaaaaatttaaattttggaatcctctaaacatttttgtatctttaattggtttattattaaataaatcatataaaaatt

SEQ ID NO: 355178 - DNA, 3872 bp, Homo sapiens
cacttccccaatctacaggagccattttaacagctaaaacttgtcggattgctttttattttcaagctcaaaagacgatagagaaagaatacttgaaggccaagaagcttgagagaagaaaaatttcagaaaaattgtctcaatttgactagaatatcaatgaaccaggaaaactgaagcaccttccctaaagaaaacttgggtatacaattactccacagacagagctgagggttttttacccaaatcagtcactggattttgctgcctgatacgtgaatcttcttggaatttttctcatgtggatctaaggggaatgctttattatggctgctgttgtccaacagaacgacctagtatttgaatttgctagtaacgtcatggaggatgaacgacagcttggtgatccagctatttttcctgccgtaattgtggaacatgttcctggtgctgatattctcaatagttatgccggtctagcctgtgtggaagagcccagtgacatgattactgagagttcactggatgttgctgaagaagaaatcatagacgatgatgatgatgacatcacccttacagttgaagcttcttgtcatgacggggatgaaacaattgaaactattgaggctgctgaggcactcctcaatatggattcccctggccctatgctggatgaaaaacgaataaataataatatatttagttcacctgaagatgacatggttgttgccccagtcacccatgtgtccgtcacattagatgggattcctgaagtgatggaaacacagcaggtgcaagaaaaatatgcagactcaccgggagcctcatcaccagaacagcctaagaggaaaaaaggaagaaaaactaaaccaccacgaccagattccccagccactacgccaaatatatctgtgaagaagaaaaacaaagatggaaagggaaacacaatttatctttgggagtttttactggcactgctccaggacaaggctacttgtcctaaatacatcaagtggacccagcgagagaaaggcatttttaaattggtggattctaaagcagtgtccaggttgtgggggaagcacaaaaacaaacctgatatgaattatgagaccatgggaagagcactcaggtactattaccaaaggggtattctggcaaaagtggaaggtcagcgcttggtgtatcagtttaaagaaatgccaaaagatcttatatatataaatgatgaggatccaagttccagcatagagtcttcagatccatcgctatcttcatcagccacttcaaataggaatcaaaccagccggtcgagagtatcttcaagtccaggggtaaaaggaggagccactacagttctaaaaccagggaattctaaagctgcaaaacccaaagatcctgtggaagttgcacaaccatcagaagttttgaggacagtgcagcccacgcagtctccatatcctacccagctcttccggactgttcatgtagtacagccagtacaggctgtcccagagggagaagcagctagaaccagtaccatgcaggatgaaacattaaattcttccgttcagagtattaggactatacaggctccaacccaagttccagtggttgtgtctcctaggaatcagcagttgcatacagtaacactccaaacagtgccactcacaacagttatagccagcacagatccatcagcaggtactggatctcagaagtttattttacaagccattccatcatcacagcccatgacagtactgaaagaaaatgtcatgctgcagtcacaaaaggcgggctctcctccttcaattgtcttgggccctgcccaggttcagcaggtccttactagcaatgttcagaccatttgcaatggaaccgtcagtgtggcttcctctccatccttcagtgctactgcacctgtggtgaccttttctcctcgcagttcacagctggttgctcacccacctggcactgtaatcacttcagttatcaaaactcaagaaacaaaaactcttacacaggaagtagagaaaaaggaatctgaagatcatttgaaagagaacactgagaaaacggagcagcagccacagccttatgtgatggtagtgtccagttccaatggatttacttctcaggtagctatgaaacaaaacgaactgctggaacccaactctttttagttaatataccaaagcttatgaataattgtttgttaattgaacattttcaattatatgcagactgactgattctaagataaattctaaggaggtttctaattttgtaattgttaaaaatagagttaattttgactttgttagatgagggaggaaaactcaactgtttctctttgttatctaaatgtttcagaattcaatcgtgaaggaacaggcattttacactatgaagacattcttttgagatttttatttcagttgctatatcataagcatttttaaagtttcttttctaattttacattgtattagattttctgattcttttgtaaatacagaacttaaatagaaggcaacaggaaatttatataggaactattttcattccacttgtgtaagttaagtcttgactctttcaaatgcaaaaaacctattttatgctttgttaaaattatggtgtcacttagattgactttagttgactgcactatataatatagaactatgaatatgtagaataacatgaaaaattggaggtgctggtggtatggctgaccctgtttcagaagcaggatagtataaaagcatcagcctaagaatggcactcccactaactagctatgtaatcttgacctctttgggctttagttcctctcataaaaggaagagatgtattggactagactagatgatcaccactttctcttctagttctaatttttttaattctaatacctatattttcaagttatgtcaattaaatcattatcaggttatttcctaatgtaagaatagctaaaatgttgcagagaaataagtgacccaacaaaatttattcatctattatgggtaagatctgccataaattcttcctaaataatttgtttactaactctttaggccactgtgctttgcggtccattagtaaacttgtgttgctaagtgctaaacagaatactgctattttgagagagtcaagactctttcttaagggccaagaaagcaacttgagccttgggctaatctggctgagtagtcagttataaaagcataattgctttatattttggatcattttttactgggggcggacttggggggggttgcatacaaagataacatatatatccaactttctgaaatgaaatgtttttagattactttttcaactgtaaataatgtacatttaatgtcacaagaaaaaaatgtcttctgcaaattttctagtataacagaaatttttgtagatgaaaaaaatcattatgtttagaggtctaatgctatgttttcatattacagagtgaatttgtatttaaacaaaaatttaaattttggaatcctctaaacatttttgtatctttaattggtttattattaaataaatcatataaaaattaaaaaaaaaaaacgagagcaagagctcctcatgcgtatgataaccaagtacccagcacgaaatcagcatcaacccacaaaatcaggcgcccgggcgcaactaaatcctcaggggagcacaatctggtcgcacaccagttgtaggaaggggccgcccacgaagctataaataaggacggggcgccgtaaacacgctgcgagaaacggctgtactttggacagcccatctggtggagcaatgagcaccacacagattagcctggaaaaatcggttgggacccacggtcggatttg

SEQ ID NO: 355179 - DNA, 3961 bp, Homo sapiens
gaaggggtaaaagcgcgacgggacctgagctgaaggacgggatctcaagcctcaagtccctgcgccatcccgccgtctctgtgtcctcccctggggcccaaaacctccatcctccttctaggctcgctggctcaaggccaaggagctcagcgcgccgcctccgcccggaacgcaaacagctgttcccagagacgtctccgctctcaactttgccaactactccgcacgcactttgaccagcggagcaaccgggacctgtgggtcggggtcctctggcggagttaaaaaaaaaagaggtgaaactgcgggaccggcgctgcgagtcgctaggcttcgcctcaaactttgctgttgcagcggagcggacccgcccctcctctcccctacgacgcccacgcgctcggatggggcttgttccctagctcgggagcgtgtgggcagaagcagcggcggcggcggcggcggcggcggcggcagcagcagcttcagtagcgcagaggcggcggtggcgagaggtgcggcgaaggaggcagaggcacttatgcttgtcaggccaagaagcttgagagaagaaaaatttcagaaaaattgtctcaatttgactagaatatcaatgaaccaggaaaactgaagcaccttccctaaagaaaacttgggtatacaattactccacagacagagctgagggttttttacccaaatcagtcactggattttgctgcctgatacgtgaatcttcttggaatttttctcatgtggatctaaggggaatgctttattatggctgctgttgtccaacagaacgacctagtatttgaatttgctagtaacgtcatggaggatgaacgacagcttggtgatccagctatttttcctgccgtaattgtggaacatgttcctggtgctgatattctcaatagttatgccggtctagcctgtgtggaagagcccagtgacatgattactgagagttcactggatgttgctgaagaagaaatcatagacgatgatgatgatgacatcacccttacagttgaagcttcttgtcatgacggggatgaaacaattgaaactattgaggctgctgaggcactcctcaatatggattcccctggccctatgctggatgaaaaacgaataaatgggattcctgaagtgatggaaacacagcaggtgcaagaaaaatatgcagactcaccgggagcctcatcaccagaacagcctaagaggaaaaaaggaagaaaaactaaaccaccacgaccagattccccagccactacgccaaatatatctgtgaagaagaaaaacaaagatggaaagggaaacacaatttatctttgggagtttttactggcactgctccaggacaaggctacttgtcctaaatacatcaagtggacccagcgagagaaaggcatttttaaattggtggattctaaagcagtgtccaggttgtgggggaagcacaaaaacaaacctgatatgaattatgagaccatgggaagagcactcaggtactattaccaaaggggtattctggcaaaagtggaaggtcagcgcttggtgtatcagtttaaagaaatgccaaaagatcttatatatataaatgatgaggatccaagttccagcatagagtcttcagatccatcgctatcttcatcagccacttcaaataggaatcaaaccagccggtcgagagtatcttcaagtccaggggtaaaaggaggagccactacagttctaaaaccagggaattctaaagctgcaaaacccaaagatcctgtggaagttgcacaaccatcagaagttttgaggacagtgcagcccacgcagtctccatatcctacccagctcttccggactgttcatgtagtacagccagtacaggctgtcccagagggagaagcagctagaaccagtaccatgcaggatgaaacattaaattcttccgttcagagtattaggactatacaggctccaacccaagttccagtggttgtgtctcctaggaatcagcagttgcatacagtaacactccaaacagtgccactcacaacagttatagccagcacagatccatcagcaggtactggatctcagaagtttattttacaagccattccatcatcacagcccatgacagtactgaaagaaaatgtcatgctgcagtcacaaaaggcgggctctcctccttcaattgtcttgggccctgcccaggttcagcaggtccttactagcaatgttcagaccatttgcaatggaaccgtcagtgtggcttcctctccatccttcagtgctactgcacctgtggtgaccttttctcctcgcagttcacagctggttgctcacccacctggcactgtaatcacttcagttatcaaaactcaagaaacaaaaactcttacacaggaagtagagaaaaaggaatctgaagatcatttgaaagagaacactgagaaaacggagcagcagccacagccttatgtgatggtagtgtccagttccaatggatttacttctcaggtagctatgaaacaaaacgaactgctggaacccaactctttttagttaatataccaaagcttatgaataattgtttgttaattgaacattttcaattatatgcagactgactgattctaagataaattctaaggaggtttctaattttgtaattgttaaaaatagagttaattttgactttgttagatgagggaggaaaactcaactgtttctctttgttatctaaatgtttcagaattcaatcgtgaaggaacaggcattttacactatgaagacattcttttgagatttttatttcagttgctatatcataagcatttttaaagtttcttttctaattttacattgtattagattttctgattcttttgtaaatacagaacttaaatagaaggcaacaggaaatttatataggaactattttcattccacttgtgtaagttaagtcttgactctttcaaatgcaaaaaacctattttatgctttgttaaaattatggtgtcacttagattgactttagttgactgcactatataatatagaactatgaatatgtagaataacatgaaaaattggaggtgctggtggtatggctgaccctgtttcagaagcaggatagtataaaagcatcagcctaagaatggcactcccactaactagctatgtaatcttgacctctttgggctttagttcctctcataaaaggaagagatgtattggactagactagatgatcaccactttctcttctagttctaatttttttaattctaatacctatattttcaagttatgtcaattaaatcattatcaggttatttcctaatgtaagaatagctaaaatgttgcagagaaataagtgacccaacaaaatttattcatctattatgggtaagatctgccataaattcttcctaaataatttgtttactaactctttaggccactgtgctttgcggtccattagtaaacttgtgttgctaagtgctaaacagaatactgctattttgagagagtcaagactctttcttaagggccaagaaagcaacttgagccttgggctaatctggctgagtagtcagttataaaagcataattgctttatattttggatcattttttactgggggcggacttggggggggttgcatacaaagataacatatatatccaactttctgaaatgaaatgtttttagattactttttcaactgtaaataatgtacatttaatgtcacaagaaaaaaatgtcttctgcaaattttctagtataacagaaatttttgtagatgaaaaaaatcattatgtttagaggtctaatgctatgttttcatattacagagtgaatttgtatttaaacaaaaatttaaattttggaatcctctaaacatttttgtatctttaattggtttattattaaataaatcatataaaaatt

SEQ ID NO: 355180 - DNA, 2502 bp, Homo sapiens
cacttccccaatctacaggagccattttaacagctaaaacttgtcggattgctttttattttcaagctcaaaagacgatagagaaagaatacttgaaggccaagaagcttgagagaagaaaaatttcagaaaaattgtctcaatttgactagaatatcaatgaaccaggaaaactgaagcaccttccctaaagaaaacttgggtatacaattactccacagacagagctgagggttttttacccaaatcagtcactggattttgctgcctgatacgtgaatcttcttggaatttttctcatgtggatctaaggggaatgctttattatggctgctgttgtccaacagaacgacctagtatttgaatttgctagtaacgtcatggaggatgaacgacagcttggtgatccagctatttttcctgccgtaattgtggaacatgttcctggtgctgatattctcaatagttatgccggtctagcctgtgtggaagagcccagtgacatgattactgagagttcactggatgttgctgaagaagaaatcatagacgatgatgatgatgacatcacccttacagttgaagcttcttgtcatgacggggatgaaacaattgaaactattgaggctgctgaggcactcctcaatatggattcccctggccctatgctggatgaaaaacgaataaataataatatatttagttcacctgaagatgacatggttgttgccccagtcacccatgtgtccgtcacattagatgggattcctgaagtgatggaaacacagcaggtgcaagaaaaatatgcagactcaccgggagcctcatcaccagaacagcctaagaggaaaaaaggaagaaaaactaaaccaccacgaccagattccccagccactacgccaaatatatctgtgaagaagaaaaacaaagatggaaagggaaacacaatttatctttgggagtttttactggcactgctccaggacaaggctacttgtcctaaatacatcaagtggacccagcgagagaaaggcatttttaaattggtggattctaaagcagtgtccaggttgtgggggaagcacaaaaacaaacctgatatgaattatgagaccatgggaagagcactcaggtactattaccaaaggggtattctggcaaaagtggaaggtcagcgcttggtgtatcagtttaaagaaatgccaaaagatcttatatatataaatgatgaggatccaagttccagcatagagtcttcagatccatcgctatcttcatcagccacttcaaataggaatcaaaccagccggtcgagagtatcttcaagtccaggggtaaaaggaggagccactacagttctaaaaccagggaattctaaagctgcaaaacccaaagatcctgtggaagttgcacaaccatcagaagttttgaggacagtgcagcccacgcagtctccatatcctacccagctcttccggactgttcatgtagtacagccagtacaggctgtcccagagggagaagcagctagaaccagtaccatgcaggatgaaacattaaattcttccgttcagagtattaggactatacaggctccaacccaagttccagtggttgtgtctcctaggaatcagcagttgcatacagtaacactccaaacagtgccactcacaacagttatagccagcacagatccatcagcaggtactggatctcagaagtttattttacaagccattccatcatcacagcccatgacagtactgaaagaaaatgtcatgctgcagtcacaaaaggcgggctctcctccttcaattgtcttgggccctgcccaggttcagcaggtccttactagcaatgttcagaccatttgcaatggaaccgtcagtgtggcttcctctccatccttcagtgctactgcacctgtggtgaccttttctcctcgcagttcacagctggttgctcacccacctggcactgtaatcacttcagttatcaaaactcaagaaacaaaaactcttacacaggaagtagagaaaaaggaatctgaagatcatttgaaagagaacactgagaaaacggagcagcagccacagccttatgtgatggtagtgtccagttccaatggatttacttctcagttctggagtctgggaagtccgatatcaatgcaccagcaggtttgacggttctcattccaaacagtgcctgaacaccgtgtcctctggaggggaagaaggcttcatcttcaaatggcgaagacagaaaagcaaagacagcccacttccacttccaaaagactttttatttatttatttatttatttttttgagacagatttttgctcttgatgcccaggctggagtgcaatggcgtgatctcagctcacctcaacttccgtctcccaggttcaagtgattcttctacctcagcctcccaagtagctgggattacaggcatgtgccaccacgcccggctaattttctatttttagtaaaggtg

SEQ ID NO: 355181 - DNA, 2491 bp, Homo sapiens
ggaaacatcccgtccccgaccgcacccgcccgaagctgggtcaaggagcccagcaggacgggagcgcggcgcccccgacgcccgggaactggctcccccggttcccatctggtgacctcacctggtcccaccctttcaggtgaacggccaggcccggtgacgtcacttcctgccagaagcacctctctccctcgctccgcccttcacccagacgctcgccaatccgtgtgtggttccgagccggacttcatttccccgaaggcgtcgcggcctgaggagacccgttgggtcctcagcgtcttggcggcagttggtggaaccggagcttcgagtccgtccccggtgctgcctgcgcgttcacctgagtctcgctggagctcttctcgcccgcccacctcatctcaacccactttccgcggggagcggcgccaagctgggccttcctcggatcaggcgtcccctgaagtcggcacgcccctctgcgtcccccttcggtcccgctaggaccccgtccgggctgccgtcgcctcgtcgctatggcgcccaccatccagacccaggcccagcgggaggatggccacaggcccaattcccaccggactctgcctgagaggtctggagtggtctgccgagtcaagtactgcaatagcctccctgatatccccttcgaccccaagttcatcacctaccccttcgaccagaacaggttcgtccagtacaaagccacttccttggagaaacagcacaaacatgacctcctgactgagccagacctgggggtcaccatcgatctcatcaatcctgacacctaccgcatcgaccccaatgttcttctagatccagctgatgagaaacttttggaagaggagattcaggcccccaccagctccaagagatcccagcagcacgcgaaggtggtgccatggatgcgaaagacagagtacatctccactgagttcaaccgttatggcatctccaatgagaagcctgaggtcaagattggggtttctgtgaagcagcagtttaccgaggaagaaatatacaaagacagggatagccagatcacagccattgagaagacttttgaggatgcccagaaatcaatctcacagcattacagcaaaccccgagtcacaccggtggaggtcatgcctgtcttcccagactttaagatgtggatcaatccatgtgctcaggtgatctttgactcagacccagcccccaaggacacgagtggtgcagctgcgttggagatgatgtctcaggccatgattaggggcatgatggatgaggaagggaaccagtttgtggcctatttcctgcctgtagaagagacgttgaagaaacgaaagcgggaccaggaggaggagatggactatgcaccagatgatgtgtatgactacaaaattgctcgggagtacaactggaacgtgaagaacaaagctagcaagggctatgaggaaaactacttcttcatcttccgagagggtgacggggtttactacaatgagttggaaaccagggtccgccttagtaagcgccgggccaaggctggggttcagtcaggcaccaacgccctgcttgtggtcaaacatcgggacatgaatgagaaggaactggaagctcaggaggcacggaaggcccagctagaaaaccacgaaccggaggaggaagaggaagaggagatggagacagaagagaaagaagctgggggctcagatgaggagcaggagaagggcagcagcagtgagaaggagggcagtgaagatgagcactcgggcagcgagagtgaacgggaggaaggtgacagggacgaggccagtgacaagagtggcagtggtgaggacgagagcagcgaggatgaggcccgggctgcccgtgacaaagaggagatctttggcagtgatgctgattctgaggacgatgccgactctgatgatgaggacagaggacaggcccaaggtggcagtgacaatgattcagacagcggcagcaatgggggtggccagcggagccggagccacagccgcagcgccagtcccttccccagtggcagcgagcactcggcccaggaggatggcagtgaagctgcagcttctgattccagtgaagctgatagtgacagtgactgagtcccagggcattcagggctggttcagacaccattattgtgagcagcaaagcacttttctagtggtctgtttgtgagcctttcacttgtttgttccccacccccaaacctttgctgttaataaagtcaacttctctttacttcccctcccagcccctatgatgtcattcagcccagcacatacctcccgcaacccccaggtgctcaaggatcttggcttgaggcttagaaacacaggccagaggcagggccaatggtttcccacaaaatgtagcacaacgaaggtcagaattcgttttttttgtttgttttttttttttccaaaataagcccagaccattaaacaagtgaaactccaac

SEQ ID NO: 355182 - DNA, 2278 bp, Homo sapiens
ggaaacatcccgtccccgaccgcacccgcccgaagctgggtcaaggagcccagcaggacgggagcgcggcgcccccgacgcccgggaactggctcccccggttcccatctggtgacctcacctggtcccaccctttcaggtgaacggccaggcccggtgacgtcacttcctgccagaagcacctctctccctcgctccgcccttcacccagacgctcgccaatccgtgtgtggttccgagccggacttcatttccccgaaggcgtcgcggcctgaggagacccgttgggtcctcagcgtcttggcggcagttggtggaaccggagcttcgagtccgtccccggtgctgcctgcgcgttcacctgagtctcgctggagctcttctcgcccgcccacctcatctcaacccactttccgcggggagcggcgccaagctgggccttcctcggatcaggcgtcccctgaagtcggcacgcccctctgcgtcccccttcggtcccgctaggaccccgtccgggctgccgtcgcctcgtcgctatggcgcccaccatccagacccaggcccagcgggaggatggccacaggcccaattcccaccggactctgcctgagaggtctggagtggtctgccgagtcaagtactgcaatagcctccctgatatccccttcgaccccaagttcatcacctaccccttcgaccagaacaggttcgtccagtacaaagccacttccttggagaaacagcacaaacatgacctcctgactgagccagacctgggggtcaccatcgatctcatcaatcctgacacctaccgcatcgaccccaatgttcttctagatccagctgatgagaaacttttggaagaggagattcaggcccccaccagctccaagagatcccagcagcacgcgaaggtggtgccatggatgcgaaagacagagtacatctccactgagttcaaccgttatggcatctccaatgagaagcctgaggtcaagattggggtttctgtgaagcagcagtttaccgaggaagaaatatacaaagacagggatagccagatcacagccattgagaagacttttgaggatgcccagaaatcaatctcacagcattacagcaaaccccgagtcacaccggtggaggtcatgcctgtcttcccagactttaagatgtggatcaatccatgtgctcaggtgatctttgactcagacccagcccccaaggacacgagtggtgcagctgcgttggagatgatgtctcaggccatgattaggggcatgatggatgaggaagggaaccagtttgtggcctatttcctgcctgtagaagagacgttgaagaaacgaaagcgggaccaggaggaggagatggactatgcaccagatgatgtgtatgactacaaaattgctcgggagtacaactggaacgtgaagaacaaagctagcaagggctatgaggaaaactacttcttcatcttccgagagggtgacggggtttactacaatgagttggaaaccagggtccgccttagtaagcgccgggccaaggctggggttcagtcaggcaccaacgccctgcttgtggtcaaacatcgggacatgaatgagaaggaactggaagctcaggaggcacggaaggcccagctagaaaaccacgaaccggaggaggaagaggaagaggagatggagacagaagagaaagaagctgggggctcagatgaggagcaggagaagggcagcagcagtgagaaggagggcagtgaagatgagcactcgggcagcgagagtgaacgggaggaaggtgacagggacgaggccagtgacaagagtggcagtggtgaggacgagagcagcgaggatgaggcccgggctgcccgtgacaaagaggagatctttggcagtgatgctgattctgaggacgatgccgactctgatgatgaggacagaggacaggcccaaggtggcagtgacaatgattcagacagcggcagcaatgggggtggccagcggagccggagccacagccgcagcgccagtcccttccccagtggcagcgagcactcggcccaggaggatggcagtgaagctgcagcttctgattccagtgaagctgatagtgacagtgactgagtcccagggcattcagggctggttcagacaccattattgtgagcagcaaagcacttttctagtggtctgtttgtgagcctttcacttgtttgttccccacccccaaacctttgctgtttcaaaccagggtaccgagctcgaattct

SEQ ID NO: 355183 - DNA, 2569 bp, Homo sapiens
ggaaacatcccgtccccgaccgcacccgcccgaagctgggtcaaggagcccagcaggacgggagcgcggcgcccccgacgcccgggaactggctcccccggttcccatctggtgacctcacctggtcccaccctttcaggtgaacggccaggcccggtgacgtcacttcctgccagaagcacctctctccctcgctccgcccttcacccagacgctcgccaatccgtgtgtggttccgagccggacttcatttccccgaaggcgtcgcggcctgaggagacccgttgggtcctcagcgtcttggcggcagttggtggaaccggagcttcgagtccgtccccggtgctgcctgcgcgttcacctgagtctcgctggagctcttctcgcccgcccacctcatctcaacccactttccgcggggagcggcgccaagctgggccttcctcggatcaggcgtcccctgaagtcggcacgcccctctgcgtcccccttcggtcccgctaggaccccgtccgggctgccgtcgcctcgtcgctatggcgcccaccatccagacccaggcccagcgggaggatggccacaggcccaattcccaccggactctgcctgagaggtctggagtggtctgccgagtcaagtactgcaatagcctccctgatatccccttcgaccccaagttcatcacctaccccttcgaccagaacaggttcgtccagtacaaagccacttccttggagaaacagcacaaacatgacctcctgactgagccagacctgggggtcaccatcgatctcatcaatcctgacacctaccgcatcgaccccaatgttcttctagatccagctgatgagaaacttttggaagaggagattcaggcccccaccagctccaagagatcccagcagcacgcgaaggtggtgccatggatgcgaaagacagagtacatctccactgagttcaaccgttatggcatctccaatgagaagcctgaggtcaagattggggtttctgtgaagcagcagtttaccgaggaagaaatatacaaagacagggatagccagatcacagccattgagaagacttttgaggatgcccagaaatcaatctcacagcattacagcaaaccccgagtcacaccggtggaggtcatgcctgtcttcccagactttaagatgtggatcaatccatgtgctcaggtgatctttgactcagacccagcccccaaggacacgagtggtgcagctgcgttggagatgatgtctcaggccatgattaggggcatgatggatgaggaagggaaccagtttgtggcctatttcctgcctgtagaagagacgttgaagaaacgaaagcgggaccaggaggaggagatggactatgcaccagatgatgtgtatgactacaaaattgctcgggagtacaactggaacgtgaagaacaaagctagcaagggctatgaggaaaactacttcttcatcttccgagagggtgacggggtttactacaatgagttggaaaccagggtccgccttagtaagcgccgggccaaggctggggttcagtcaggcaccaacgccctgcttgtggtcaaacatcgggacatgaatgagaaggaactggaagctcaggaggcacggaaggcccagctagaaaaccacgaaccggaggaggaagaggaagaggagatggagacagaagagaaagaagctgggggctcaggtaaatctggacaggccagactctgggagccctgggagggtggaaaagtgggtttcatctctctccactcccttccagatgaggagcaggagaagggcagcagcagtgagaaggagggcagtgaagatgagcactcgggcagcgagagtgaacgggaggaaggtgacagggacgaggccagtgacaagagtggcagtggtgaggacgagagcagcgaggatgaggcccgggctgcccgtgacaaagaggagatctttggcagtgatgctgattctgaggacgatgccgactctgatgatgaggacagaggacaggcccaaggtggcagtgacaatgattcagacagcggcagcaatgggggtggccagcggagccggagccacagccgcagcgccagtcccttccccagtggcagcgagcactcggcccaggaggatggcagtgaagctgcagcttctgattccagtgaagctgatagtgacagtgactgagtcccagggcattcagggctggttcagacaccattattgtgagcagcaaagcacttttctagtggtctgtttgtgagcctttcacttgtttgttccccacccccaaacctttgctgttaataaagtcaacttctctttacttcccctcccagcccctatgatgtcattcagcccagcacatacctcccgcaacccccaggtgctcaaggatcttggcttgaggcttagaaacacaggccagaggcagggccaatggtttcccacaaaatgtagcacaacgaaggtcagaattcgttttttttgtttgttttttttttttccaaaataagcccagaccattaaacaagtgaaactccaac

SEQ ID NO: 355184 - DNA, 2652 bp, Homo sapiens
ggaaacatcccgtccccgaccgcacccgcccgaagctgggtcaaggagcccagcaggacgggagcgcggcgcccccgacgcccgggaactggctcccccggttcccatctggtgacctcacctggtcccaccctttcaggtgaacggccaggcccggtgacgtcacttcctgccagaagcacctctctccctcgctccgcccttcacccagacgctcgccaatccgtgtgtggttccgagccggacttcatttccccgaaggcgtcgcggcctgaggagacccgttgggtcctcagcgtcttggcggcagttggtggaaccggagcttcgagtccgtccccggtgctgcctgcgcgttcacctgagtctcgctggagctcttctcgcccgcccacctcatctcaacccactttccgcggggagcggcgccaagctgggccttcctcggatcaggcgtcccctgaagtcggcacgcccctctgcgtcccccttcggtcccgctaggaccccgtccgggctgccgtcgcctcgtcgctatggcgcccaccatccagacccaggcccagcgggaggatggccacaggcccaattcccaccggactctgcctgagaggtctggagtggtctgccgagtcaagtactgcaatagcctccctgatatccccttcgaccccaagttcatcacctaccccttcgaccagaacaggttcgtccagtacaaagccacttccttggagaaacagcacaaacatgacctcctgactgagccagacctgggggtcaccatcgatctcatcaatcctgacacctaccgcatcgaccccaatgttcttctagatccagctgatgagaaacttttggaagaggagattcaggcccccaccagctccaagagatcccagcagcacgcgaaggtggtgccatggatgcgaaagacagagtacatctccactgagttcaaccgttatggcatctccaatgagaagcctgaggtcaagattggggtttctgtgaagcagcagtttaccgaggaagaaatatacaaagacagggatagccagatcacagccattgagaagacttttgaggatgcccagaaatcaatctcacagcattacagcaaaccccgagtcacaccggtggaggtcatgcctgtcttcccagactttaagatgtggatcaatccatgtgctcaggtgatctttgactcagacccagcccccaaggacacgagtggtgcagctgcgttggagatgatgtctcaggccatgattaggggcatgatggatgaggaagggaaccagtttgtggcctatttcctgcctgtagaagagacgttgaagaaacgaaagcgggaccaggaggaggagatggactatgcaccagatgatgtgtatgactacaaaattgctcgggagtacaactggaacgtgaagaacaaagctagcaagggctatgaggaaaactacttcttcatcttccgagagggtgacggggtttactacaatgagttggaaaccagggtccgccttagtaagcgccgggccaaggctggggttcagtcaggcaccaacgccctgcttgtggtcaaacatcgggacatgaatgagaaggaactggaagctcaggaggcaccggacaggcccagcctagaaaaccacgcaaccgggaggcacggacacgaagcgacgcaggaccacgcgagaccgacgcagcacaagcacagccggcgcgcgcctcaaaactcgaggagccaggcacaaccgcgccacgcacccccgctgacacaaggacggcacgctgacaccactgagccaacatccgaggcccagcgcaagagctcgaacggccgcacggaacaggctgaacccggggcaccgacgggccccgctgaacaaaaccaagtgggcccacctgcgccgacgccgacggacgaagcacaccgaacccgactcgacaggcccagcgcgcctgcccaggtcgcaccacacccgaagcgcccacccccctctcgcgcaccgcagatggcctcgcacttcccagcacgcgaacgcatccgcccaaagtccacgcaccggaccggagggcacacgcaccgcaccagggccccaaccggcagcggaacgccgaaccactcgaacatccacgaagaccgagcgacagacgcacacgggcaggttggacacacagcaggaaaagcccggcgcacacaccaaccaccggcaagcaggcccacggtccccacctcaccagcacgacggacccaccacgcagcccactcaagcgcccccaggcaaccgaataggccagcgccggaccagcctcgaaagaaccccatccgaaacaccaagccagaaacctcagaacacgaccgaaaagcgccacccgtagaagccacagccaagggcccatccccagggggcctagaggtcgagcaaaagaccaccattcaccgcaggacgcccaaggccacgggaacatcactgcacaagccgcgcaaccgagataggaggaagccccatacgcacacgtgcccacggacccccggcaccaccgcacaaccccttgcacaggccccaacacacaggccaccccctgcccttctcacacgcacaagagcaccaagcaaccccaacacaagcgcccagacaa

SEQ ID NO: 355185 - DNA, 1870 bp, Homo sapiens
tgctgtagcctgaatctagagtatacccccctggtgacttgcggtgtttccctcgggatacactctctggccccttcgaccaggagttcgtccagtacaaagccacttccttggagaaacagcacaaacatgacctcctgactgagccagacctgggggtcaccatcgatctcatcaatcctgacacctaccgcatcgaccccaatgttcttctagatccagctgatgagaaacttttggaagaggagattcaggcccccaccagctccaagagatcccagcagcacgcgaaggtggtgccatggatgcgaaagacagagtacatctccactgagttcaaccgttatggcatctccaatgagaagcctgaggtcaagattggggtttctgtgaagcagcagtttaccgaggaagaaatatacaaagacagggatagccagatcacagccattgagaagacttttgaggatgcccagaaatcaatctcacagcattacagcaaaccccgagtcacaccggtggaggtcatgcctgtcttcccagactttaagatgtggatcaatccatgtgctcaggtgatctttgactcagacccagcccccaaggacacgagtggtgcagctgcgttggagatgatgtctcaggccatgattaggggcatgatggatgaggaagggaaccagtttgtggcctatttcctgcctgtagaagagacgttgaagaaacgaaagcgggaccaggaggaggagatggactatgcaccagatgatgtgtatgactacaaaattgctcgggagtacaactggaacgtgaagaacaaagctagcaagggctatgaggaaaactacttcttcatcttccgagagggtgacggggtttactacaatgagttggaaaccagggtccgccttagtaagcgccgggccaaggctggggttcagtcaggcaccaacgccctgcttgtggtcaaacatcgggacatgaatgagaaggaactggaagctcaggaggcacggaaggcccagctagaaaaccacgaaccggaggaggaagaggaagaggagatggagacagaagagaaagaagctgggggctcagatgaggagcaggagaagggcagcagcagtgagaaggagggcagtgaagatgagcactcgggcagcgagagtgaacgggaggaaggtgacagggacgaggccagtgacaagagtggcagtggtgaggacgagagcagcgaggatgaggcccgggctgcccgtgacaaagaggagatctttggcagtgatgctgattctgaggacgatgccgactctgatgatgaggacagaggacaggcccaaggtggcagtgacaatgattcagacagcggcagcaatgggggtggccagcggagccggagccacagccgcagcgccagtcccttccccagtggcagcgagcactcggcccaggaggatggcagtgaagctgcagcttctgattccagtgaagctgatagtgacagtgactgagtcccagggcattcagggctggttcagacaccattattgtgagcagcaaagcacttttctagtggtctgtttgtgagcctttcacttgtttgttccccacccccaaacctttgctgttaataaagtcaacttctctttacttcccctcccagcccctatgatgtcattcagcccagcacatacctcccgcaacccccaggtgctcaaggatcttggcttgaggcttagaaacacaggccagaggcagggccaatggtttcccacaaaatgtagcacaacgaaggtcagaattcgttttttttgtttgttttttttttttccaaaataagcccagaccattaaacaagtgaaactccaac

SEQ ID NO: 355186 - DNA, 1761 bp, Homo sapiens
tgttctagaggataccagatcgtacgacagaggcagaccatgggggtaccagtcgactctcagtcaaatcctgacacctaccgcatcgacccccattgttcttctagatccagctgatgagaaacttttggaagaggagattcaggcccccaccagctccaagagatcccagcagcacgcgaaggtggtgccatggatgcgaaagacagagtacatctccactgagttcaaccgttatggcatctccaatgagaagcctgaggtcaagattggggtttctgtgaagcagcagtttaccgaggaagaaatatacaaagacagggatagccagatcacagccattgagaagacttttgaggatgcccagaaatcaatctcacagcattacagcaaaccccgagtcacaccggtggaggtcatgcctgtcttcccagactttaagatgtggatcaatccatgtgctcaggtgatctttgactcagacccagcccccaaggacacgagtggtgcagctgcgttggagatgatgtctcaggccatgattaggggcatgatggatgaggaagggaaccagtttgtggcctatttcctgcctgtagaagagacgttgaagaaacgaaagcgggaccaggaggaggagatggactatgcaccagatgatgtgtatgactacaaaattgctcgggagtacaactggaacgtgaagaacaaagctagcaagggctatgaggaaaactacttcttcatcttccgagagggtgacggggtttactacaatgagttggaaaccagggtccgccttagtaagcgccgggccaaggctggggttcagtcaggcaccaacgccctgcttgtggtcaaacatcgggacatgaatgagaaggaactggaagctcaggaggcacggaaggcccagctagaaaaccacgaaccggaggaggaagaggaagaggagatggagacagaagagaaagaagctgggggctcagatgaggagcaggagaagggcagcagcagtgagaaggagggcagtgaagatgagcactcgggcagcgagagtgaacgggaggaaggtgacagggacgaggccagtgacaagagtggcagtggtgaggacgagagcagcgaggatgaggcccgggctgcccgtgacaaagaggagatctttggcagtgatgctgattctgaggacgatgccgactctgatgatgaggacagaggacaggcccaaggtggcagtgacaatgattcagacagcggcagcaatgggggtggccagcggagccggagccacagccgcagcgccagtcccttccccagtggcagcgagcactcggcccaggaggatggcagtgaagctgcagcttctgattccagtgaagctgatagtgacagtgactgagtcccagggcattcagggctggttcagacaccattattgtgagcagcaaagcacttttctagtggtctgtttgtgagcctttcacttgtttgttccccacccccaaacctttgctgttaataaagtcaacttctctttacttcccctcccagcccctatgatgtcattcagcccagcacatacctcccgcaacccccaggtgctcaaggatcttggcttgaggcttagaaacacaggccagaggcagggccaatggtttcccacaaaatgtagcacaacgaaggtcagaattcgttttttttgtttgttttttttttttccaaaataagcccagaccattaaacaagtgaaactccaac

SEQ ID NO: 355187 - DNA, 404 bp, Homo sapiens
ctcaggtatgagttccttgaaggcagggactgcttgtctcgttggctgctgtctgctcagggcctagcacagtacctaccctagcacatagtagtagctgctcaattgttaatggagcaagcagtgtccaagtcccttcccactggggagccagctttcagactctgccatgggggacacttcattctgagttcctccccagagaagctccgcctctgggaagcagggctgtgaggggtgaagctggaatccaaacaccacaataggtgtttccccacccaggtgttcgtccagtacaaagccacttccttggagaaacagcacaaacatgacctcctgactgagccagacctgggggtcaccatcgatctcatcaatcctgacacctaccgcatcgaccccaa

SEQ ID NO: 355188 - DNA, 486 bp, Homo sapiens
tgttctagaggataccagatcgtacgacagaggcagaccatgggggtaccagtcgactctcagtcaaatcctgacacctaccgcatcgacccccattgttcttctagatccagctgatgagaaacttttggaagaggagattcaggcccccaccagctccaagagatcccagcagcacgcgaaggtggtgccatggatgcgaaagacagagtacatctccactgagttcaaccgttatggcatctccaatgagaagcctgaggtcaagattggggtttctgtgaagcagcagtttaccgaggaagaaatatacaaagacagggatagccagatcacagccattgagaagacttttgaggatgcccagaaatcaatctcacagcattacagcaaaccccgagtcacaccggtggaggtcatgcctgtcttcccagactttaagatgtggatcaatccatgtgctcaggagctcagtcgaacggactg

SEQ ID NO: 355189 - DNA, 2180 bp, Homo sapiens
aattaggctaggtacgaggcctggtgttgcggtgctgcctgcgcgttcacctgagtctcgctggagctcttctcgcccgcccacctcatctcaacccactttccgcggggagcggcgccaagctgggccttcctcggatcaggcgtcccctgaagtcggcacgcccctctgcgtcccccttcggtcccgctaggaccccgtccgggctgccgtcgcctcgtcgctatggcgcccaccatccagacccaggcccagcgggaggatggccacaggcccaattcccaccggactctgcctgagaggtctggagtggtctgccgagtcaagtactgcaatagcctccctgatatccccttcgaccccaagttcatcacctaccccttcgaccagaacaggttcgtccagtacaaagccacttccttggagaaacagcacaaacatgacctcctgactgagccagacctgggggtcaccatcgatctcatcaatcctgacacctaccgcatcgaccccaatgttcttctagatccagctgatgagaaacttttggaagaggagattcaggcccccaccagctccaagagatcccagcagcacgcgaaggtggtgccatggatgcgaaagacagagtacatctccactgagttcaaccgttatggcatctccaatgagaagcctgaggtcaagattggggtttctgtgaagcagcagtttaccgaggaagaaatatacaaagacagggatagccagatcacagccattgagaagacttttgaggatgcccagaaatcaatctcacagcattacagcaaaccccgagtcacaccggtggaggtcatgcctgtcttcccagactttaagatgtggatcaatccatgtgctcaggtgatctttgactcagacccagcccccaaggacacgagtggtgcagctgcgttggagatgatgtctcaggccatgattaggggcatgatggatgaggaagggaaccagtttgtggcctatttcctgcctgtagaagagacgttgaagaaacgaaagcgggaccaggaggaggagatggactatgcaccagatgatgtgtatgactacaaaattgctcgggagtacaactggaacgtgaagaacaaagctagcaagggctatgaggaaaactacttcttcatcttccgagagggtgacggggtttactacaatgagttggaaaccagggtccgccttagtaagcgccgggccaaggctggggttcagtcaggcaccaacgccctgcttgtggtcaaacatcgggacatgaatgagaaggaactggaagctcaggaggcacggaaggcccagctagaaaaccacgaaccggaggaggaagaggaagaggagatggagacagaagagaaagaagctgggggctcagatgaggagcaggagaagggcagcagcagtgagaaggagggcagtgaagatgagcactcgggcagcgagagtgaacgggaggaaggtgacagggacgaggccagtgacaagagtggcagtggtgaggacgagagcagcgaggatgaggcccgggctgcccgtgacaaagaggagatctttggcagtgatgctgattctgaggacgatgccgactctgatgatgaggacagaggacaggcccaaggtggcagtgacaatgattcagacagcggcagcaatgggggtggccagcggagccggagccacagccgcagcgccagtcccttccccagtggcagcgagcactcggcccaggaggatggcagtgaagctgcagcttctgattccagtgaagctgatagtgacagtgactgagtcccagggcattcagggctggttcagacaccattattgtgagcagcaaagcacttttctagtggtctgtttgtgagcctttcacttgtttgttccccacccccaaacctttgctgttaataaagtcaacttctctttacttcccctcccagcccctatgatgtcattcagcccagcacatacctcccgcaacccccaggtgctcaaggatcttggcttgaggcttagaaacacaggccagaggcagggccaatggtttcccacaaaatgtagcacaacgaaggtcagaattcgttttttttgtttgttttttttttttccaaaataagcccagaccattaaacaagtgaaactccaac

SEQ ID NO: 355190 - DNA, 2572 bp, Homo sapiens
ggaaacatcccgtccccgaccgcacccgcccgaagctgggtcaaggagcccagcaggacgggagcgcggcgcccccgacgcccgggaactggctcccccggttcccatctggtgacctcacctggtcccaccctttcaggtgaacggccaggcccggtgacgtcacttcctgccagaagcacctctctccctcgctccgcccttcacccagacgctcgccaatccgtgtgtggttccgagccggacttcatttccccgaaggcgtcgcggcctgaggagacccgttgggtcctcagcgtcttggcggcagttggtggaaccggagcttcgagtccgtccccggtgctgcctgcgcgttcacctgagtctcgctggagctcttctcgcccgcccacctcatctcaacccactttccgcggggagcggcgccaagctgggccttcctcggatcaggcgtcccctgaagtcggcacgcccctctgcgtcccccttcggtcccgctaggaccccgtccgggctgccgtcgcctcgtcgctatggcgcccaccatccagacccaggcccagcgggaggatggccacaggcccaattcccaccggactctgcctgagaggtctggagtggtctgccgagtcaagtactgcaatagcctccctgatatccccttcgaccccaagttcatcacctaccccttcgaccagaacaggttcgtccagtacaaagccacttccttggagaaacagcacaaacatgacctcctgactgagccagacctgggggtcaccatcgatctcatcaatcctgacacctaccgcatcgaccccaatgttcttctagatccagctgatgagaaacttttggaagaggagattcaggcccccaccagctccaagagatcccagcagcacgcgaaggtggtgccatggatgcgaaagacagagtacatctccactgagttcaaccgttatggcatctccaatgagaagcctgaggtcaagattggggtttctgtgaagcagcagtttaccgaggaagaaatatacaaagacagggatagccagatcacagccattgagaagacttttgaggatgcccagaaatcaatctcacagcattacagcaaaccccgagtcacaccggtggaggtcatgcctgtcttcccagactttaaggtcaggcccaaggtgggaggtagaaagggacagcctatttgtgcctgttcccatctaaccccagtgcctccatctccctagatgtggatcaatccatgtgctcaggtgatctttgactcagacccagcccccaaggacacgagtggtgcagctgcgttggagatgatgtctcaggccatgattaggggcatgatggatgaggaagggaaccagtttgtggcctatttcctgcctgtagaagagacgttgaagaaacgaaagcgggaccaggaggaggagatggactatgcaccagatgatgtgtatgactacaaaattgctcgggagtacaactggaacgtgaagaacaaagctagcaagggctatgaggaaaactacttcttcatcttccgagagggtgacggggtttactacaatgagttggaaaccagggtccgccttagtaagcgccgggccaaggctggggttcagtcaggcaccaacgccctgcttgtggtcaaacatcgggacatgaatgagaaggaactggaagctcaggaggcacggaaggcccagctagaaaaccacgaaccggaggaggaagaggaagaggagatggagacagaagagaaagaagctgggggctcagatgaggagcaggagaagggcagcagcagtgagaaggagggcagtgaagatgagcactcgggcagcgagagtgaacgggaggaaggtgacagggacgaggccagtgacaagagtggcagtggtgaggacgagagcagcgaggatgaggcccgggctgcccgtgacaaagaggagatctttggcagtgatgctgattctgaggacgatgccgactctgatgatgaggacagaggacaggcccaaggtggcagtgacaatgattcagacagcggcagcaatgggggtggccagcggagccggagccacagccgcagcgccagtcccttccccagtggcagcgagcactcggcccaggaggatggcagtgaagctgcagcttctgattccagtgaagctgatagtgacagtgactgagtcccagggcattcagggctggttcagacaccattattgtgagcagcaaagcacttttctagtggtctgtttgtgagcctttcacttgtttgttccccacccccaaacctttgctgttaataaagtcaacttctctttacttcccctcccagcccctatgatgtcattcagcccagcacatacctcccgcaacccccaggtgctcaaggatcttggcttgaggcttagaaacacaggccagaggcagggccaatggtttcccacaaaatgtagcacaacgaaggtcagaattcgttttttttgtttgttttttttttttccaaaataagcccagaccattaaacaagtgaaactccaac

SEQ ID NO: 355191 - DNA, 2369 bp, Homo sapiens
ggaaacatcccgtccccgaccgcacccgcccgaagctgggtcaaggagcccagcaggacgggagcgcggcgcccccgacgcccgggaactggctcccccggttcccatctggtgacctcacctggtcccaccctttcaggtgaacggccaggcccggtgacgtcacttcctgccagaagcacctctctccctcgctccgcccttcacccagacgctcgccaatccgtgtgtggttccgagccggacttcatttccccgaaggcgtcgcggcctgaggagacccgttgggtcctcagcgtcttggcggcagttggtggaaccggagcttcgagtccgtccccggtgctgcctgcgcgttcacctgagtctcgctggagctcttctcgcccgcccacctcatctcaacccactttccgcggggagcggcgccaagctgggccttcctcggatcaggcgtcccctgaagtcggcacgcccctctgcgtcccccttcggtcccgctaggaccccgtccgggctgccgtcgcctcgtcgctatggcgcccaccatccagacccaggcccagcgggaggatggccacaggcccaattcccaccggactctgcctgagaggtctggagtggtctgccgagtcaagtactgcaatagcctccctgatatccccttcgaccccaagttcatcacctaccccttcgaccagaacagttcttctagatccagctgatgagaaacttttggaagaggagattcaggcccccaccagctccaagagatcccagcagcacgcgaaggtggtgccatggatgcgaaagacagagtacatctccactgagttcaaccgttatggcatctccaatgagaagcctgaggtcaagattggggtttctgtgaagcagcagtttaccgaggaagaaatatacaaagacagggatagccagatcacagccattgagaagacttttgaggatgcccagaaatcaatctcacagcattacagcaaaccccgagtcacaccggtggaggtcatgcctgtcttcccagactttaagatgtggatcaatccatgtgctcaggtgatctttgactcagacccagcccccaaggacacgagtggtgcagctgcgttggagatgatgtctcaggccatgattaggggcatgatggatgaggaagggaaccagtttgtggcctatttcctgcctgtagaagagacgttgaagaaacgaaagcgggaccaggaggaggagatggactatgcaccagatgatgtgtatgactacaaaattgctcgggagtacaactggaacgtgaagaacaaagctagcaagggctatgaggaaaactacttcttcatcttccgagagggtgacggggtttactacaatgagttggaaaccagggtccgccttagtaagcgccgggccaaggctggggttcagtcaggcaccaacgccctgcttgtggtcaaacatcgggacatgaatgagaaggaactggaagctcaggaggcacggaaggcccagctagaaaaccacgaaccggaggaggaagaggaagaggagatggagacagaagagaaagaagctgggggctcagatgaggagcaggagaagggcagcagcagtgagaaggagggcagtgaagatgagcactcgggcagcgagagtgaacgggaggaaggtgacagggacgaggccagtgacaagagtggcagtggtgaggacgagagcagcgaggatgaggcccgggctgcccgtgacaaagaggagatctttggcagtgatgctgattctgaggacgatgccgactctgatgatgaggacagaggacaggcccaaggtggcagtgacaatgattcagacagcggcagcaatgggggtggccagcggagccggagccacagccgcagcgccagtcccttccccagtggcagcgagcactcggcccaggaggatggcagtgaagctgcagcttctgattccagtgaagctgatagtgacagtgactgagtcccagggcattcagggctggttcagacaccattattgtgagcagcaaagcacttttctagtggtctgtttgtgagcctttcacttgtttgttccccacccccaaacctttgctgttaataaagtcaacttctctttacttcccctcccagcccctatgatgtcattcagcccagcacatacctcccgcaacccccaggtgctcaaggatcttggcttgaggcttagaaacacaggccagaggcagggccaatggtttcccacaaaatgtagcacaacgaaggtcagaattcgttttttttgtttgttttttttttttccaaaataagcccagaccattaaacaagtgaaactccaac

SEQ ID NO: 355192 - DNA, 1281 bp, Homo sapiens
ctcccactatgaggaggtactgacgcagctacgccacgtactggagcggcagaacaatgaataccaagtgctgctgggcatctatacccacctggagaaggaaatcaccacgtaccgacggctcctggagggagagagtgaagggacacgggaagaggagatggactatgcaccagatgatgtgtatgactacaaaattgctcgggagtacaactggaacgtgaagaacaaagctagcaagggctatgaggaaaactacttcttcatcttccgagagggtgacggggtttactacaatgagttggaaaccagggtccgccttagtaagcgccgggccaaggctggggttcagtcaggcaccaacgccctgcttgtggtcaaacatcgggacatgaatgagaaggaactggaagctcaggaggcacggaaggcccagctagaaaaccacgaaccggaggaggaagaggaagaggagatggagacagaagagaaagaagctgggggctcagatgaggagcaggagaagggcagcagcagtgagaaggagggcagtgaagatgagcactcgggcagcgagagtgaacgggaggaaggtgacagggacgaggccagtgacaagagtggcagtggtgaggacgagagcagcgaggatgaggcccgggctgcccgtgacaaagaggagatctttggcagtgatgctgattctgaggacgatgccgactctgatgatgaggacagaggacaggcccaaggtggcagtgacaatgattcagacagcggcagcaatgggggtggccagcggagccggagccacagccgcagcgccagtcccttccccagtggcagcgagcactcggcccaggaggatggcagtgaagctgcagcttctgattccagtgaagctgatagtgacagtgactgagtcccagggcattcagggctggttcagacaccattattgtgagcagcaaagcacttttctagtggtctgtttgtgagcctttcacttgtttgttccccacccccaaacctttgctgttaataaagtcaacttctctttacttcccctcccagcccctatgatgtcattcagcccagcacatacctcccgcaacccccaggtgctcaaggatcttggcttgaggcttagaaacacaggccagaggcagggccaatggtttcccacaaaatgtagcacaacgaaggtcagaattcgttttttttgtttgttttttttttttccaaaataagcccagaccattaaacaagtgaaactccaac

SEQ ID NO: 355193 - DNA, 408 bp, Homo sapiens
agaggggatgagaggatgaaacaaggatgcagaagcaagatgtcaattgaaagataactctcaggtcaggtatggtggctcggtggttcatgcctgtaatcccagcactttgggagaccaaggagggaggatctcttgaagctaggagttggagaccagcctgggcaaagcaagaatccccgcccccgccgcccactccttgtctctacaaaaataaaaaattaaaccaggtgtggtggcatgcacctatagtcctagctacccaaggaggctgaggcaggaggatcgcttgagcccaggagcttgaggttggagtgagctatgttcaagccactgcaccacagcctgggtgagcctgggtgagcctgagtgagcctgggtgagccaaaccccaacaacaacaacaac

SEQ ID NO: 355194 - DNA, 422 bp, Homo sapiens
tattcataaaacctccaggcatcctctgaggacgcctcacgcaggagaaagctgctagttccctttggctctcttgccctttggttatatctgcccctgccgggggtagggatgtggggcttgggggcatctcctgtggtgtgcctggggtgtgcagcccctgattgtcgttgtggtgcccatcaggaccctggacagaagaagggaggactcagtgccagggcaatagggaggccccccagggacgctagtgctgtgacatgcgcctgtcttctccctctgaccccagagaaaggggctgtggtcagctgggatcttctgccaccatcagggacaaacgggggcaggaggaaagtcactgatgcccagatgtttgcatcctgcacagctacaggtccttaaataaaagtgtgctgttggtt

SEQ ID NO: 355195 - DNA, 4208 bp, Homo sapiens
agcgggttgttccggctgcctttcactgaggggacccgccagtttctaactcagtggcgtttgccctgattcccggggcctggctttcagcgtagcaattctgccggcgaagaaggtgagcgcagtgctgtgtggcagcagagctccttaggacgaggagcagcgggacgaggaagggcagactggtgaaatcgcaaactgggcgtctgttccggcgccggacccctatttgcaaaggtccatggctaatgaaacacagaaggttggtgccatccattttccttttcccttcacaccctattccatccaggaagacttcatggcagagctgtaccgggttttggaggctggcaagattgggatatttgagagtccaactggcactgggaagtccttaagtcttatttgtggggccctctcttggctccgtgactttgaacagaagaagcgtgaagaagaggcacgactccttgaaactggaactggccccttacatgatgagaaagatgaatccctgtgtctgtcttcttcctgcgaaggggctgcaggcaccccgaggcctgctggagaaccggcctgggttactcagtttgtgcagaagaaagaagagagggacctggtggaccgactaaaggcggagcaggccaggaggaagcagcgagaagaacgcctgcagcagctgcagcacagggtgcagctcaagtatgcagccaagcgcctgaggcaggaagaagaagaaagagagaatctcctccgcctcagcagggagatgctagagacaggcccggaggctgagcggctggagcagctggagtctggggaggaggagctggtcctcgccgaatacgagagtgatgaggagaaaaaggtggcgagcagggcgccttctgatgccacctccagccgccatccaccagacgccagcttccccgctgccctgaacttcctccagcgcaccaggccttcctctgtcctgtctgaggatttgctcatgcaacgtgctgtggccaaacaccctgccctcctcccttggcagatgtcttcctctcctttaaggcctggctcagagtggatgaggatgaggatgacctggaggaagaacacataactaagatttattactgtagtcggacacactcccagctggcccagtttgtgcatgaggtgaagaagagcccctttggcaaggatgttcggctggtctcccttggctcccggcagaacctttgtgtaaatgaagacgtgaaaagcctaggttctgtgcagcttatcaacgaccgctgcgtggacatgcagagaagcaggcacgagaagaagaaaggagctgaggaggagaagccaaagaggaggaggcaggagaagcaggcagcctgccccttctacaaccacgagcagatgggccttctccgggatgaggccctggcagaggtgaaggacatggagcagctgctggcccttgggaaggaggcccgggcctgtccctattacgggagccgccttgccatccctgcagcccagctggtggtgctgccctatcagatgctgctgcatgcggccactcggcaggccgcgggcatccggctgcaggaccaggtggtgatcatcgacgaggcgcacaacctgatcgacaccatcacgggcatgcacagcgtggaggtcagcggctcccagctctgccaggcccattcccagctgctgcagtacgtggagcgatacgggaagcgtttgaaggccaagaacctgatgtacctgaagcagatcctgtatttgctggagaaattcgtggctgtgctaggggggaacattaagcaaaatcccaatacacagagtctgtcacagacagggacggagctgaagaccatcaacgactttctcttccagagccagatcgacaacatcaacctgttcaaggtgcagcgatactgtgagaagagcatgatcagcagaaagctctttggattcactgaacggtacggagcagtgttctcatcccgggagcagcccaaactggctgggtttcagcaattcctgcagagcctgcagcccaggacgactgaagctcttgcagcccctgcagacgagagtcaggccagcaccctgcgaccagcttctccactgatgcacatcgaaggcttcctggcagctctcactacggccaaccaggacggcagggtcatcctgagccgccaaggcagcctcagtcagagcaccctgaagtttttgctcctgaatccagctgtgcactttgcccaagtggtgaaggaatgccgggcagtggtcattgcggggggtaccatgcagccggtgtctgacttccggcagcagctgctggcctgtgccggggtggaagctgagcgcgtggtggagttttcctgtgttttcggcccctccctggctcttaccaggtcacgtgatccctccagacaacatcctgccccttgtcatctgcagcgggatctccaaccagccgctggaattcacgttccagaaaagagagctgcctcagatgatggacgaggtgggtcgcattctctgtaacctgtgcggtgtggttcctggaggggtggtctgtttcttcccctcctacgagtacctgcgccaggtccatgcccactgggagaagggtggcctgctgggccgtctggctgccaggaagaagatattccaggaacctaagagcgcacaccaggtggagcaggtgctgctggcatattccaggtgcatccaggcctgtggccaggagagaggccaggtgacaggggccctgctcctctctgtggttggaggaaagatgagtgaagggatcaacttctctgacaacctaggccggtgtgtggtgatggtgggcatgcccttccccaacatcaggtctgcagagctgcaggagaagatggcctacttggatcaaaccctccccagagcccccggccaggcacccccagggaaggctctggtggagaacctgtgcatgaaggccgtcaaccagtccataggcagggccatcaggcaccagaaggattttgccagcatagtgctcctggaccagcgatatgcccggccccctgtcctggccaagctgccggcctggatccgagcccgtgtggaggtcaaagctacctttggccccgccattgctgctgtgcagaaggtcagtcctacctttttctttctgagagcctccccaccccgagatcacatttctcactgccttctgtctgcccagtttcaccgggagaagtcggcctcttcctgatgggcaaccacaccactgcctggcgccgtgcccttcctttgtcctgcccgctggagacagtgtttgtcgtgggcgtggtctgcggggatcctgttacaaaggtgaaacccaggaggagagtgtggagtccagagtgctgccaggacccaggcacaggcgttagctcccgtaggagaaaatgggggaatcctgaatgaacagtgggtcctggctgtccttggggcgttccagggcagctcccctcctggaatagaatctttctttccatcctgcatggctgagagccaggcttccttcctggtctccgcaggaggctgtggcagctgtggcatccactgtggcatctccgtcctgcccaccttcttaagaggcgagatggagcaggcccatctgcctctgccctttctagccaaggttatagctgccctggactgctcactctctggtctcaatttaaaatgatccatggccacagggctcctgcccaggggcttgtcaccttcccctcctccttcctgagtcactccttcagtagaaggccctgctccctatcctgccccacagccctgcctggatttgtatccttggcttcgtgccagttcctccaagtctatggcacctccctccctctcaaccacttgagcaaactccaagacaccttctaccccaacaccagcaattatgccaagggccgttaggctctcaacatgactatagagaccccgtgtcatcacggagacctttgttcctgtgggaaaatatccctcccacctgcaacagctgcccctgctgactgcgcctgtcttctccctctgaccccagagaaaggggctgtggtcagctgggatcttctgccaccatcagggacaaacgggggcaggaggaaagtcactgatgcccagatgtttgcatcctgcacagctacaggtccttaaataaaagtgtgctgttggtt

SEQ ID NO: 355196 - DNA, 1830 bp, Homo sapiens
tttgctgagtttgctgagggaagactgttttctgttctctctctcacacacagagtggatgaggatgaggatgacctggaggaagaacacataactaagatttattactgtagtcggacacactcccagctggcccagtttgtgcatgaggtgaagaagagcccctttggcaaggatgttcggctggtctcccttggctcccggcaggtaaacagtagccagtatttccaccaggggccatcctgctcctttcgccacaactttgtcctgctcgtccaggccttgggagacgctgggtctgtgacaggctgaaccgtgtgaggagcagccccctccctgacctggccggcccagcactggaaggcaaaggagaggtggcggggcaggtccacatgtgttggtaggatgtcatttagctggcaccatctttttgcctctttctttctcctttgctgcagaacctttgtgtaaatgaagacgtgaaaagcctaggttctgtgcagcttatcaacgaccgctgcgtggacatgcagagaagcaggcacgcggtagccactgggaccgtggtgtagccgcaggtggtctggagagagtgaggcaggggtggcagtgactgaagaccattaagtgtctttcatagaaagaatggcagaggagaccccagttccttcctgagtcccctctccttgggaaaaagtgttcctactctctgggtcagtgtctggtccgaatccttggcttggagatgattttacgggctctttctggagaacagaagtaaaaccttacagtgttccgatgagaccacagtaggcagtacttgggagggtcttatagaccccaccccacggaagtgggtctcaacattacacaaccccctcttgggcccgtggacagttgctgtcctctctgttttctctctttgtgcctgtgccaccctcagagaagaagaaaggagctgaggaggagaagccaaagaggaggaggcaggagaagcaggcagcctgccccttctacaaccacgagcagatgggccttctccgggatgaggccctggcagaggtgaaggacatggagcagctgctggcccttgggaaggaggcccgggcctgtccctattacgggagccgccttgccatccctgcagcccagctggtggtgctgccctatcagatgctgctgcatgcggccactcggcaggccgcgggcatccggctgcaggaccaggtggtgatcatcgacgaggcgcacaacctgatcgacaccatcacgggcatgcacagcgtggaggtcagcggctcccagctctgccaggcccattcccagctgctgcagtacgtggagcgatacgggaagcgtttgaaggccaagaacctgatgtacctgaagcagatcctgtatttgctggagaaattcgtggctgtgctagggggtgagagcctcgtccccctgctgaccccgggcctgcaaaactcgctgggctgctttttccttggatgcccatcaggacacctcagttctctgtgtttttaagaagggtcggccgggtgcggtggctcacgcctgtaatcccagcacttgggaggccgaggcaggtggttcacctgaggttaggagttttgagaccagcctggccaacatggtgaaatcccatctctactaaaaatacaaaaaaattagctgggagtgttgccgtggcctgtagtcccagctgctccagaggctgagacaagagaattgcttgctcaaacccgggaggcggaggttgcagtgagccgagattgtgccactgcagtccagtctgggcgacagagtgagaatcagtctcaa

SEQ ID NO: 355197 - DNA, 4160 bp, Homo sapiens
  misc_feature (3934)..(3934): n is a, c, g, or t
agcgggttgttccggctgcctttcactgaggggacccgccagtttctaactcagtggcgtttgccctgattcccggggcctggctttcagcgtagcaattctgccggcgaagaaggtgagcgcagtgctgtgtggcagcagagctccttaggacgaggagcagcgggacgaggaagggcagactggtgaaatcgcaaactgggcgtctgttccggcgccggacccctatttgcaaaggtccatggctaatgaaacacagaaggttggtgccatccattttccttttcccttcacaccctattccatccaggaagacttcatggcagagctgtaccgggttttggaggctggcaagattgggatatttgagagtccaactggcactgggaagtccttaagtcttatttgtggggccctctcttggctccgtgactttgaacagaagaagcgtgaagaagaggcacgactccttgaaactggaactggccccttacatgatgagaaagatgaatccctgtgtctgtcttcttcctgcgaaggggctgcaggcaccccgaggcctgctggagaaccggcctgggttactcagtttgtgcagaagaaagaagagagggacctggtggaccgactaaaggcggagcaggccaggaggaagcagcgagaagaacgcctgcagcagctgcagcacagggtgcagctcaagtatgcagccaagcgcctgaggcaggaagaagaagaaagagagaatctcctccgcctcagcagggagatgctagagacaggcccggaggctgagcggctggagcagctggagtctggggaggaggagctggtcctcgccgaatacgagagtgatgaggagaaaaaggtggcgagcagagtggatgaggatgaggatgacctggaggaagaacacataactaagatttattactgtagtcggacacactcccagctggcccagtttgtgcatgaggtgaagaagagcccctttggcaaggatgttcggctggtctcccttggctcccggcagaacctttgtgtaaatgaagacgtgaaaagcctaggttctgtgcagcttatcaacgaccgctgcgtggacatgcagagaagcaggcacgagaagaagaaaggagctgaggaggagaagccaaagaggaggaggcaggagaagcaggcagcctgccccttctacaaccacgagcagatgggccttctccgggatgaggccctggcagaggtgaaggacatggagcagctgctggcccttgggaaggaggcccgggcctgtccctattacgggagccgccttgccatccctgcagcccagctggtggtgctgccctatcagatgctgctgcatgcggccactcggcaggccgcgggcatccggctgcaggaccaggtggtgatcatcgacgaggcgcacaacctgatcgacaccatcacgggcatgcacagcgtggaggtcagcggctcccagctctgccaggcccattcccagctgctgcagtacgtggagcgatacgggaagcgtttgaaggccaagaacctgatgtacctgaagcagatcctgtatttgctggagaaattcgtggctgtgctaggggggaacattaagcaaaatcccaatacacagagtctgtcacagacagggacggagctgaagaccatcaacgactttctcttccagagccagatcgacaacatcaacctgttcaaggtgcagcgatactgtgagaagagcatgatcagcagaaagctctttggattcactgaacggtacggagcagtgttctcatcccgggagcagcccaaactggctgggtttcagcaattcctgcagagcctgcagcccaggacgactgaagctcttgcagcccctgcagacgagagtcaggccagcaccctgcgaccagcttctccactgatgcacatcgaaggcttcctggcagctctcactacggccaaccaggacggcagggtcatcctgagccgccaaggcagcctcagtcagagcaccctgaagtttttgctcctgaatccagctgtgcactttgcccaagtggtgaaggaatgccgggcagtggtcattgcggggggtaccatgcagccggtgtctgacttccggcagcagctgctggcctgtgccggggtggaagctgagcgcgtggtggagttttcctgtggtcacgtgatccctccagacaacatcctgccccttgtcatctgcagcgggatctccaaccagccgctggaattcacgttccagaaaagagagctgcctcagatgatggacgaggtgggtcgcattctctgtaacctgtgcggtgtggttcctggaggggtggtctgtttcttcccctcctacgagtacctgcgccaggtccatgcccactgggagaagggtggcctgctgggccgtctggctgccaggaagaagatattccaggaacctaagagcgcacaccaggtggagcaggtgctgctggcatattccaggtgcatccaggcctgtggccaggagagaggccaggtgacaggggccctgctcctctctgtggttggaggaaagatgagtgaagggatcaacttctctgacaacctaggccggtgtgtggtgatggtgggcatgcccttccccaacatcaggtctgcagagctgcaggagaagatggcctacttggatcaaaccctccccagagcccccggccaggcacccccagggaaggctctggtggagaacctgtgcatgaaggccgtcaaccagtccataggcagggccatcaggcaccagaaggattttgccagcatagtgctcctggaccagcgatatgcccggccccctgtcctggccaagctgccggcctggatccgagcccgtgtggaggtcaaagctacctttggccccgccattgctgctgtgcagaagtttcaccgggagaagtcggcctcttcctgatgggcaaccacaccactgcctggcgccgtgcccttcctttgtcctgcccgctggagacagtgtttgtcgtgggcgtggtctgcggggatcctgttacaaaggtgaaacccaggaggagagtgtggagtccagagtgctgccaggacccaggcacaggcgttagctcccgtaggagaaaatgggggaatcctgaatgaacagtgggtcctggctgtccttggggcgttccagggcagctcccctcctggaatagaatctttctttccatcctgcatggctgagagccaggcttccttcctggtctccgcaggaggctgtggcagctgtggcatccactgtggcatctccgtcctgcccaccttcttaagaggcgagatggagcaggcccatctgcctctgccctttctagccaaggttatagctgccctggactgctcactctctggtctcaatttaaaatgatccatggccacagggctcctgcccaggggcttgtcaccttcccctcctccttcctgagtcactccttcagtagaaggccctgctccctatcctgccccacagccctgcctggatttgtatccttggcttcgtgccagttcctccaagtctatggcacctccctccctctcaaccacttgagcaaactccaagacaccttctaccccaacaccagcaattatgccaagggccgttaggctctcaacatgactatagagaccccgtgtcatcacggagacctttgttcctgtgggaaaatatccctcccacctgcaacagctgcccctgctgactgcgcctgtcttctccctctgaccccagagaaaggggctgtggtcagctgggatcttctgccaccatcagggacaaacgggggcaggaggaaagtcactgatgcccagatgtttgcatcctgcacagctacaggtccttaaataaaagtgtgctgttggttaaaaaaaaaaaaaaaanattccccctttggagaggcccgttacccattaccgcccatagtgatacaaattccaatccactgacacccggttgaaaccgccgtgactggaaatccctggggtcccccatttaaaacgcgtgtgagaaataacatcttcgccacgtgggtaataacaaaaaggcccaacccgacggcctaccgacatgtcagcctgttcgattagtgggacgccttatgtttgct

SEQ ID NO: 355198 - DNA, 3750 bp, Homo sapiens
agcgggttgttccggctgcctttcactgaggggacccgccagtttctaactcagtggcgtttgccctgattcccggggcctggctttcagcgtagcaattctgccggcgaagaaggtgagcgcagtgctgtgtggcagcagagctccttaggacgaggagcagcgggacgaggaagggcagactggtgaaatcgcaaactgggcgtctgttccggcgccggacccctatttgcaaaggtccatggctaatgaaacacagaaggttggtgccatccattttccttttcccttcacaccctattccatccaggaagacttcatggcagagctgtaccgggttttggaggctggcaagattgggatatttgagagtccaactggcactgggaagtccttaagtcttatttgtggggccctctcttggctccgtgactttgaacagaagaagcgtgaagaagaggcacgactccttgaaactggaactggccccttacatgatgagaaagatgaatccctgtgtctgtcttcttcctgcgaaggggctgcaggcaccccgaggcctgctggagaaccggcctgggttactcagtttgtgcagaagaaagaagagagggacctggtggaccgactaaaggcggagcaggccaggaggaagcagcgagaagaacgcctgcagcagctgcagcacagggtgcagctcaagtatgcagccaagcgcctgaggcaggaagaagaagaaagagagaatctcctccgcctcagcagggagatgctagagacaggcccggaggctgagcggctggagcagctggagtctggggaggaggagctggtcctcgccgaatacgagagtgatgaggagaaaaaggtggcgagcagagtggatgaggatgaggatgacctggaggaagaacacataactaagatttattactgtagtcggacacactcccagctggcccagtttgtgcatgaggtgaagaagagcccctttggcaaggatgttcggctggtctcccttggctcccggcagagaagaagaaaggagctgaggaggagaagccaaagaggaggaggcaggagaagcaggcagcctgccccttctacaaccacgagcagatgggccttctccgggatgaggccctggcagaggtgaaggacatggagcagctgctggcccttgggaaggaggcccgggcctgtccctattacgggagccgccttgccatccctgcagcccagctggtggtgctgccctatcagatgctgctgcatgcggccactcggcaggccgcgggcatccggctgcaggaccaggtggtgatcatcgacgaggcgcacaacctgatcgacaccatcacgggcatgcacagcgtggaggtcagcggctcccagctctgccaggcccattcccagctgctgcagtacgtggagcgatacgggaagcgtttgaaggccaagaacctgatgtacctgaagcagatcctgtatttgctggagaaattcgtggctgtgctaggggggaacattaagcaaaatcccaatacacagagtctgtcacagacagggacggagctgaagaccatcaacgactttctcttccagagccagatcgacaacatcaacctgttcaaggtgcagcgatactgtgagaagagcatgatcagcagaaagctctttggattcactgaacggtacggagcagtgttctcatcccgggagcagcccaaactggctgggtttcagcaattcctgcagagcctgcagcccaggacgactgaagctcttgcagcccctgcagacgagagtcaggccagcaccctgcgaccagcttctccactgatgcacatcgaaggcttcctggcagctctcactacggccaaccaggacggcagggtcatcctgagccgccaaggcagcctcagtcagagcaccctgaagtttttgctcctgaatccagctgtgcactttgcccaagtggtgaaggaatgccgggcagtggtcattgcggggggtaccatgcagccggtgtctgacttccggcagcagctgctggcctgtgccggggtggaagctgagcgcgtggtggagttttcctgtggtcacgtgatccctccagacaacatcctgccccttgtcatctgcagcgggatctccaaccagccgctggaattcacgttccagaaaagagagctgcctcagatgatggacgaggtgggtcgcattctctgtaacctgtgcggtgtggttcctggaggggtggtctgtttcttcccctcctacgagtacctgcgccaggtccatgcccactgggagaagggtggcctgctgggccgtctggctgccaggaagaagatattccaggaacctaagagcgcacaccaggtggagcaggtgctgctggcatattccaggtgcatccaggcctgtggccaggagagaggccaggtgacaggggccctgctcctctctgtggttggaggaaagatgagtgaagggatcaacttctctgacaacctaggccggtgtgtggtgatggtgggcatgcccttccccaacatcaggtctgcagagctgcaggagaagatggcctacttggatcaaaccctcgcagggccatcaggcaccagaaggattttgccagcatagtgctcctggaccagcgatatgcccggccccctgtcctggccaagctgccggcctggatccgagcccgtgtggaggtcaaagctacctttggccccgccattgctgctgtgcagaagtttcaccgggagaagtcggcctcttcctgatgggcaaccacaccactgcctggcgccgtgcccttcctttgtcctgcccgctggagacagtgtttgtcgtgggcgtggtctgcggggatcctgttacaaaggtgaaacccaggaggagagtgtggagtccagagtgctgccaggacccaggcacaggcgttagctcccgtaggagaaaatgggggaatcctgaatgaacagtgggtcctggctgtccttggggcgttccagggcagctcccctcctggaatagaatctttctttccatcctgcatggctgagagccaggcttccttcctggtctccgcaggaggctgtggcagctgtggcatccactgtggcatctccgtcctgcccaccttcttaagaggcgagatggagcaggcccatctgcctctgccctttctagccaaggttatagctgccctggactgctcactctctggtctcaatttaaaatgatccatggccacagggctcctgcccaggggcttgtcaccttcccctcctccttcctgagtcactccttcagtagaaggccctgctccctatcctgccccacagccctgcctggatttgtatccttggcttcgtgccagttcctccaagtctatggcacctccctccctctcaaccacttgagcaaactccaagacaccttctaccccaacaccagcaattatgccaagggccgttaggctctcaacatgactatagagaccccgtgtcatcacggagacctttgttcctgtgggaaaatatccctcccacctgcaacagctgcccctgctgactgcgcctgtcttctccctctgaccccagagaaaggggctgtggtcagctgggatcttctgccaccatcagggacaaacgggggcaggaggaaagtcactgatgcccagatgtttgcatcctgcacagctacaggtccttaaataaaagtgtgctgttggtt

SEQ ID NO: 355199 - DNA, 3732 bp, Homo sapiens
ggcatcatccattctctctgcccaagttgctctgtatgtgttcgtcagtggcagagcaggctaggagggtgagcagcagccatctccagccaccttgagttccttcctgccttcactctaagttgagcagctccacgtcaaagatgagggtggcattgggagggatgacaccggggtggcccgtggctccatatgccacatcaggggtgcaggtcagcttcgccctctgccccaagctcatctgggctgcaccctcttcaaaacctttgatgacttcctctattccatccaggaagacttcatggcagagctgtaccgggttttggaggctggcaagattgggatatttgagagtccaactggcactgggaagtccttaagtcttatttgtggggccctctcttggctccgtgactttgaacagaagaagcgtgaagaagaggcacgactccttgaaactggaactggccccttacatgatgagaaagatgaatccctgtgtctgtcttcttcctgcgaaggggctgcaggcaccccgaggcctgctggagaaccggcctgggttactcagtttgtgcagaagaaagaagagagggacctggtggaccgactaaaggcggagcaggccaggaggaagcagcgagaagaacgcctgcagcagctgcagcacagggtgcagctcaagtatgcagccaagcgcctgaggcaggaagaagaagaaagagagaatctcctccgcctcagcagggagatgctagagacaggcccggaggctgagcggctggagcagctggagtctggggaggaggagctggtcctcgccgaatacgagagtgatgaggagaaaaaggtggcgagcagagtggatgaggatgaggatgacctggaggaagaacacataactaagatttattactgtagtcggacacactcccagctggcccagtttgtgcatgaggtgaagaagagcccctttggcaaggatgttcggctggtctcccttggctcccggcagagaagaagaaaggagctgaggaggagaagccaaagaggaggaggcaggagaagcaggcagcctgccccttctacaaccacgagcagatgggccttctccgggatgaggccctggcagaggtgaaggacatggagcagctgctggcccttgggaaggaggcccgggcctgtccctattacgggagccgccttgccatccctgcagcccagctggtggtgctgccctatcagatgctgctgcatgcggccactcggcaggccgcgggcatccggctgcaggaccaggtggtgatcatcgacgaggcgcacaacctgatcgacaccatcacgggcatgcacagcgtggaggtcagcggctcccagctctgccaggcccattcccagctgctgcagtacgtggagcgatacgggaagcgtttgaaggccaagaacctgatgtacctgaagcagatcctgtatttgctggagaaattcgtggctgtgctaggggggaacattaagcaaaatcccaatacacagagtctgtcacagacagggacggagctgaagaccatcaacgactttctcttccagagccagatcgacaacatcaacctgttcaaggtgcagcgatactgtgagaagagcatgatcagcagaaagctctttggattcactgaacggtacggagcagtgttctcatcccgggagcagcccaaactggctgggtttcagcaattcctgcagagcctgcagcccaggacgactgaagctcttgcagcccctgcagacgagagtcaggccagcaccctgcgaccagcttctccactgatgcacatcgaaggcttcctggcagctctcactacggccaaccaggacggcagggtcatcctgagccgccaaggcagcctcagtcagagcaccctgaagtttttgctcctgaatccagctgtgcactttgcccaagtggtgaaggaatgccgggcagtggtcattgcggggggtaccatgcagccggtgtctgacttccggcagcagctgctggcctgtgccggggtggaagctgagcgcgtggtggagttttcctgtggtcacgtgatccctccagacaacatcctgccccttgtcatctgcagcgggatctccaaccagccgctggaattcacgttccagaaaagagagctgcctcagatgatggacgaggtgggtcgcattctctgtaacctgtgcggtgtggttcctggaggggtggtctgtttcttcccctcctacgagtacctgcgccaggtccatgcccactgggagaagggtggcctgctgggccgtctggctgccaggaagaagatattccaggaacctaagagcgcacaccaggtggagcaggtgctgctggcatattccaggtgcatccaggcctgtggccaggagagaggccaggtgacaggggccctgctcctctctgtggttggaggaaagatgagtgaagggatcaacttctctgacaacctaggccggtgtgtggtgatggtgggcatgcccttccccaacatcaggtctgcagagctgcaggagaagatggcctacttggatcaaaccctcgcagggccatcaggcaccagaaggattttgccagcatagtgctcctggaccagcgatatgcccggccccctgtcctggccaagctgccggcctggatccgagcccgtgtggaggtcaaagctacctttggccccgccattgctgctgtgcagaagtttcaccgggagaagtcggcctcttcctgatgggcaaccacaccactgcctggcgccgtgcccttcctttgtcctgcccgctggagacagtgtttgtcgtgggcgtggtctgcggggatcctgttacaaaggtgaaacccaggaggagagtgtggagtccagagtgctgccaggacccaggcacaggcgttagctcccgtaggagaaaatgggggaatcctgaatgaacagtgggtcctggctgtccttggggcgttccagggcagctcccctcctggaatagaatctttctttccatcctgcatggctgagagccaggcttccttcctggtctccgcaggaggctgtggcagctgtggcatccactgtggcatctccgtcctgcccaccttcttaagaggcgagatggagcaggcccatctgcctctgccctttctagccaaggttatagctgccctggactgctcactctctggtctcaatttaaaatgatccatggccacagggctcctgcccaggggcttgtcaccttcccctcctccttcctgagtcactccttcagtagaaggccctgctccctatcctgccccacagccctgcctggatttgtatccttggcttcgtgccagttcctccaagtctatggcacctccctccctctcaaccacttgagcaaactccaagacaccttctaccccaacaccagcaattatgccaagggccgttaggctctcaacatgactatagagaccccgtgtcatcacggagacctttgttcctgtgggaaaatatccctcccacctgcaacagctgcccctgctgactgcgcctgtcttctccctctgaccccagagaaaggggctgtggtcagctgggatcttctgccaccatcagggacaaacgggggcaggaggaaagtcactgatgcccagatgtttgcatcctgcacagctacaggtccttaaataaaagtgtgctgttggtt

SEQ ID NO: 355200 - DNA, 4181 bp, Homo sapiens
  misc_feature (3870)..(3870): n is a, c, g, or t
  misc_feature (3880)..(3880): n is a, c, g, or t
  misc_feature (3898)..(3898): n is a, c, g, or t
  misc_feature (3911)..(3911): n is a, c, g, or t
agcgggttgttccggctgcctttcactgaggggacccgccagtttctaactcagtggcgtttgccctgattcccggggcctggctttcagcgtagcaattctgccggcgaagaaggtgagcgcagtgctgtgtggcagcagagctccttaggacgaggagcagcgggacgaggaagggcagactggtgaaatcgcaaactgggcgtctgttccggcgccggacccctatttgcaaaggtccatggctaatgaaacacagaaggttggtgccatccattttccttttcccttcacaccctattccatccaggaagacttcatggcagagctgtaccgggttttggaggctggcaagattgggatatttgagagtccaactggcactgggaagtccttaagtcttatttgtggggccctctcttggctccgtgactttgaacagaagaagcgtgaagaagaggcacgactccttgaaactggaactggccccttacatgatgagaaagatgaatccctgtgtctgtcttcttcctgcgaaggggctgcaggcaccccgaggcctgctggagaaccggcctgggttactcagtttgtgcagaagaaagaagagagggacctggtggaccgactaaaggcggagcaggccaggaggaagcagcgagaagaacgcctgcagcagctgcagcacagggtgcagctcaagtatgcagccaagcgcctgaggcaggaagaagaagaaagagagaatctcctccgcctcagcagggagatgctagagacaggcccggaggctgagcggctggagcagctggagtctggggaggaggagctggtcctcgccgaatacgagagtgatgaggagaaaaaggtggcgagcagagtggatgaggatgaggatgacctggaggaagaacacataactaagatttattactgtagtcggacacactcccagctggcccagtttgtgcatgaggtgaagaagagcccctttggcaaggatgttcggctggtctcccttggctcccggcagaacctttgtgtaaatgaagacgtgaaaagcctaggttctgtgcagcttatcaacgaccgctgcgtggacatgcagagaagcaggcacgagaagaagaaaggagctgaggaggagaagccaaagaggaggaggcaggagaagcaggcagcctgccccttctacaaccacgagcagatgggccttctccgggatgaggccctggcagaggtgaaggacatggagcagctgctggcccttgggaaggaggcccgggcctgtccctattacgggagccgccttgccatccctgcagcccagctggtggtgctgccctatcagatgctgctgcatgcggccactcggcaggccgcgggcatccggctgcaggaccaggtggtgatcatcgacgaggcgcacaacctgatcgacaccatcacgggcatgcacagcgtggaggtcagcggctcccagctctgccaggcccattcccagctgctgcagtacgtggagcgatacgggaagcgtttgaaggccaagaacctgatgtacctgaagcagatcctgtatttgctggagaaattcgtggctgtgctaggggggaacattaagcaaaatcccaatacacagagtctgtcacagacagggacggagctgaagaccatcaacgactttctcttccagagccagatcgacaacatcaacctgttcaaggtgcagcgatactgtgagaagagcatgatcagcagaaagctctttggattcactgaacggtacggagcagtgttctcatcccgggagcagcccaaactggctgggtttcagcaattcctgcagagcctgcagcccaggacgactgaagctcttgcagcccctgcagacgagagtcaggccagcaccctgcgaccagcttctccactgatgcacatcgaaggcttcctggcagctctcactacggccaaccaggacggcagggtcatcctgagccgccaaggcagcctcagtcagagcaccctgaagtttttgctcctgaatccagctgtgcactttgcccaagtggtgaaggaatgccgggcagtggtcattgcggggggtaccatgcagccggtgtctgacttccggcagcagctgctggcctgtgccggggtggaagctgagcgcgtggtggagttttcctgtggtcacgtgatccctccagacaacatcctgccccttgtcatctgcagcgggatctccaaccagccgctggaattcacgttccagaaaagagagctgcctcagatgatggacgaggtgggtcgcattctctgtaacctgtgcggtgtggttcctggaggggtggtctgtttcttcccctcctacgagtacctgcgccaggtccatgcccactgggagaagggtggcctgctgggccgtctggctgccaggaagaagatattccaggaacctaagagcgcacaccaggtggagcaggtgctgctggcatattccaggtgcatccaggcctgtggccaggagagaggccaggtgacaggggccctgctcctctctgtggttggaggaaagatgagtgaagggatcaacttctctgacaacctaggccggtgtgtggtgatggtgggcatgcccttccccaacatcaggtctgcagagctgcaggagaagatggcctacttggatcaaaccctccccagagcccccggccaggcacccccagggaaggctctggtggagaacctgtgcatgaaggccgtcaaccagtccataggcagggccatcaggcaccagaaggattttgccagcatagtgctcctggaccagcgatatgcccggccccctgtcctggccaagctgccggcctggatccgagcccgtgtggaggtcaaagctacctttggccccgccattgctgctgtgcagaagtttcaccgggagaagtcggcctcttcctgatgggcaaccacaccactgcctggcgccgtgcccttcctttgtcctgcccgctggagacagtgtttgtcgtgggcgtggtctgcggggatcctgttacaaaggtgaaacccaggaggagagtgtggagtccagagtgctgccaggacccaggcacaggcgttagctcccgtaggagaaaatgggggaatcctgaatgaacagtgggtcctggctgtccttggggcgttccagggcagctcccctcctggaatagaatctttctttccatcctgcatggctgagagccaggcttccttcctggtctccgcaggaggctgtggcagctgtggcatccactgtggcatctccgtcctgcccaccttcttaagaggcgagatggagcaggcccatctgcctctgccctttctagccaaggttatagctgccctggactgctcactctctggtctcaatttaaaatgatccatggccacagggctcctgcccaggggcttgtcaccttcccctcctccttcctgagtcactccttcagtagaaggccctgctccctatcctgccccacagccctgcctggatttgtatccttggcttcgtgccagttcctccaagtctatggcacctccctccctctcaaccacttgagcaaactccaagacaccttctaccccaacaccagcaattatgccggagacctttgttcctgtgggaaaatatccctcccacctgcaacagctgcccctgctgactgcgcctgtcttctccctctgaccccagagaaaggggctgtggtcagctgggatcttctgccaccatcagggacaaacgggggcaggaggaaagtcactgatgcccagatgtttgcatcctgcacagctacaggtccttaaataaaagtgtgctgttggttnaaaaaaaaanaattcaatttacaaaatnacctttaggggtntcctttcgctattccccgtctgggggggacaacctcgggggggccgttccaatttcccttagggggcgcttacattcacggccgtgtttaaacacgtgctggaaaccacggggtacaaataaaggccttgacacagcctcttaagcgatggcgtattgtgaaagcccaaacggcgccttcaaaaggtggcccctaggggatggcaaataacctttttttttttgactccgggaaatttgtacctattttacccaggccccggttcctttt

SEQ ID NO: 355201 - DNA, 3753 bp, Homo sapiens
agcgggttgttccggctgcctttcactgaggggacccgccagtttctaactcagtggcgtttgccctgattcccggggcctggctttcagcgtagcaattctgccggcgaagaaggtgagcgcagtgctgtgtggcagcagagctccttaggacgaggagcagcgggacgaggaagggcagactggtgaaatcgcaaactgggcgtctgttccggcgccggacccctatttgcaaaggtccatggctaatgaaacacagaaggttggtgccatccattttccttttcccttcacaccctattccatccaggaagacttcatggcagagctgtaccgggttttggaggctggcaagattgggatatttgagagtccaactggcactgggaagtccttaagtcttatttgtggggccctctcttggctccgtgactttgaacagaagaagcgtgaagaagaggcacgactccttgaaactggaactggccccttacatgatgagaaagatgaatccctgtgtctgtcttcttcctgcgaaggggctgcaggcaccccgaggcctgctggagaaccggcctgggttactcagtttgtgcagaagaaagaagagagggacctggtggaccgactaaaggcggagcaggccaggaggaagcagcgagaagaacgcctgcagcagctgcagcacagggtgcagctcaagtatgcagccaagcgcctgaggcaggaagaagaagaaagagagaatctcctccgcctcagcagggagatgctagagacaggcccggaggctgagcggctggagcagctggagtctggggaggaggagctggtcctcgccgaatacgagagtgatgaggagaaaaaggtggcgagcagagtggatgaggatgaggatgacctggaggaagaacacataactaagatttattactgtagtcggacacactcccagctggcccagtttgtgcatgaggtgaagaagagcccctttggcaaggatgttcggctggtctcccttggctcccggcagaacctttgtgtaaatgaagacgtgaaaagcctaggttctgtgcagcttatcaacgaccgctgcgtggacatgcagagaagcaggcacgagaagaagaaaggagctgaggaggagaagccaaagaggaggaggcaggagaagcaggcagcctgccccttctacaaccacgagcagatgggccttctccgggatgaggccctggcagaggtgaaggacatggagcagctgctggcccttgggaaggaggcccgggcctgtccctattacgggagccgccttgccatccctgcagcccagctggtggtgctgccctatcagatgctgctgcatgcggccactcggcaggccgcgggcatccggctgcaggaccaggtggtgatcatcgacgaggcgcacaacctgatcgacaccatcacgggcatgcacagcgtggaggtcagcggctcccagctctgccaggcccattcccagctgctgcagtacgtggagcgatacgggaagcgtttgaaggccaagaacctgatgtacctgaagcagatcctgtatttgctggagaaattcgtggctgtgctaggggggaacattaagcaaaatcccaatacacagagtctgtcacagacagggacggagctgaagaccatcaacgactttctcttccagagccagatcgacaacatcaacctgttcaaggtgcagcgatactgtgagaagagcatgatcagcagaaagctctttggattcactgaacggtacggagcagtgttctcatcccgggagcagcccaaactggctgggtttcagcaattcctgcagagcctgcagcccaggacgactgaagctcttgcagcccctgcagacgagagtcaggccagcaccctgcgaccagcttctccactgatgcacatcgaaggcttcctggcagctctcactacggccaaccaggacggcagggtcatcctgagccgccaaggcagcctcagtcagagcaccctgaagtttttgctcctgaatccagctgtgcactttgcccaagtggtgaaggaatgccgggcagtggtcattgcggggggtaccatgcagccggtgtctgacttccggcagcagctgctggcctgtgccggggtggaagctgagcgcgtggtggagttttcctgtggtcacgtgatccctccagacaacatcctgccccttgtcatctgcagcgggatctccaaccagccgctggaattcacgttccagaaaagagagctgcctcagatgatggacgaggtgggtcgcattctctgtaacctgtgcggtgtggttcctggaggggtggtctgtttcttcccctcctacgagtacctgcgccaggtccatgcccactgggagaagggtggcctgctgggccgtctggctgccaggaagaagatattccaggaacctaagagcgcacaccaggtggagcaggtgctgctggcatattccaggtgcatccaggcctgtggccaggagagaggccaggtgacaggggccctgctcctctctgtggttggaggaaagatgagtgaagggatcaacttctctgacaacctaggccggcagggccatcaggcaccagaaggattttgccagcatagtgctcctggaccagcgatatgcccggccccctgtcctggccaagctgccggcctggatccgagcccgtgtggaggtcaaagctacctttggccccgccattgctgctgtgcagaagtttcaccgggagaagtcggcctcttcctgatgggcaaccacaccactgcctggcgccgtgcccttcctttgtcctgcccgctggagacagtgtttgtcgtgggcgtggtctgcggggatcctgttacaaaggtgaaacccaggaggagagtgtggagtccagagtgctgccaggacccaggcacaggcgttagctcccgtaggagaaaatgggggaatcctgaatgaacagtgggtcctggctgtccttggggcgttccagggcagctcccctcctggaatagaatctttctttccatcctgcatggctgagagccaggcttccttcctggtctccgcaggaggctgtggcagctgtggcatccactgtggcatctccgtcctgcccaccttcttaagaggcgagatggagcaggcccatctgcctctgccctttctagccaaggttatagctgccctggactgctcactctctggtctcaatttaaaatgatccatggccacagggctcctgcccaggggcttgtcaccttcccctcctccttcctgagtcactccttcagtagaaggccctgctccctatcctgccccacagccctgcctggatttgtatccttggcttcgtgccagttcctccaagtctatggcacctccctccctctcaaccacttgagcaaactccaagacaccttctaccccaacaccagcaattatgccaagggccgttaggctctcaacatgactatagagaccccgtgtcatcacggagacctttgttcctgtgggaaaatatccctcccacctgcaacagctgcccctgctgactgcgcctgtcttctccctctgaccccagagaaaggggctgtggtcagctgggatcttctgccaccatcagggacaaacgggggcaggaggaaagtcactgatgcccagatgtttgcatcctgcacagctacaggtccttaaataaaagtgtgctgttggtt

SEQ ID NO: 355202 - DNA, 4072 bp, Homo sapiens
agcgggttgttccggctgcctttcactgaggggacccgccagtttctaactcagtggcgtttgccctgattcccggggcctggctttcagcgtagcaattctgccggcgaagaaggtgagcgcagtgctgtgtggcagcagagctccttaggacgaggagcagcgggacgaggaagggcagactggtgaaatcgcaaactgggcgtctgttccggcgccggacccctatttgcaaaggtccatggctaatgaaacacagaaggttggtgccatccattttccttttcccttcacaccctattccatccaggaagacttcatggcagagctgtaccgggttttggaggctggcaagattgggatatttgagagtccaactggcactgggaagtccttaagtcttatttgtggggccctctcttggctccgtgactttgaacagaagaagcgtgaagaagaggcacgactccttgaaactggaactggccccttacatgatgagaaagatgaatccctgtgtctgtcttcttcctgcgaaggggctgcaggcaccccgaggcctgctggagaaccggcctgggttactcagtttgtgcagaagaaagaagagagggacctggtggaccgactaaaggcggagcaggccaggaggaagcagcgagaagaacgcctgcagcagctgcagcacagggtgcagctcaagtatgcagccaagcgcctgaggcaggaagaagaagaaagagagaatctcctccgcctcagcagggagatgctagagacaggcccggaggctgagcggctggagcagctggagtctggggaggaggagctggtcctcgccgaatacgagagtgatgaggagaaaaaggtggcgagcagagtggatgaggatgaggatgacctggaggaagaacacataactaagatttattactgtagtcggacacactcccagctggcccagtttgtgcatgaggtgaagaagagcccctttggcaaggatgttcggctggtctcccttggctcccggcagaacctttgtgtaaatgaagacgtgaaaagcctaggttctgtgcagcttatcaacgaccgctgcgtggacatgcagagaagcaggcacgagaagaagaaaggagctgaggaggagaagccaaagaggaggaggcaggagaagcaggcagcctgccccttctacaaccacgagcagatgggccttctccgggatgaggccctggcagaggtgaaggacatggagcagctgctggcccttgggaaggaggcccgggcctgtccctattacgggagccgccttgccatccctgcagcccagctggtggtgctgccctatcagatgctgctgcatgcggccactcggcaggccgcgggcatccggctgcaggaccaggtggtgatcatcgacgaggcgcacaacctgatcgacaccatcacgggcatgcacagcgtggaggtcagcggctcccagctctgccaggcccattcccagctgctgcagtacgtggagcgatacgggaagcgtttgaaggccaagaacctgatgtacctgaagcagatcctgtatttgctggagaaattcgtggctgtgctaggggggaacattaagcaaaatcccaatacacagagtctgtcacagacagggacggagctgaagaccatcaacgactttctcttccagagccagatcgacaacatcaacctgttcaaggtgcagcgatactgtgagaagagcatgatcagcagaaagctctttggattcactgaacggtacggagcagtgttctcatcccgggagcagcccaaactggctgggtttcagcaattcctgcagagcctgcagcccaggacgactgaagctcttgcagcccctgcagacgagagtcaggccagcaccctgcgaccagcttctccactgatgcacatcgaaggcttcctggcagctctcactacggccaaccaggacggcagggtcatcctgagccgccaaggcagcctcagtcagagcaccctgaagtttttgctcctgaatccagctgtgcactttgcccaagtggtgaaggaatgccgggcagtggtcattgcggggggtaccatgcagccggtgtctgacttccggcagcagctgctggcctgtgccggggtggaagctgagcgcgtggtggagttttcctgtggtgagaagctgtgcccagggtggggcaggctagaggtcaggttctggcccccgttttctgtgggtaatacctcatactgcgaccaggcacaggggcggaggagaccccggggtgggagcctcacccttcgtgcgctcgcccaggctctcctgctttgctccctgctgcctgctgcccagtgtgactggtgatggtgggcgggtgagcgctgtcagtcgctgttcctgtgctggatgatggggcagggaaatgccctctctgcagtgtcttgcagcacacctgcatctccagttttcggcccctccctggctcttaccaggtcacgtgatccctccagacaacatcctgccccttgtcatctgcagcgggatctccaaccagccgctggaattcacgttccagaaaagagagctgcctcagatgatggacgaggtgggtcgcattctctgtaacctgtgcggtgtggttcctggaggggtggtctgtttcttcccctcctacgagtacctgcgccaggtccatgcccactgggagaagggtggcctgctgggccgtctggctgccaggaagaagatattccaggaacctaagagcgcacaccaggtggagcaggtgctgctggcatattccaggtgcatccaggcctgtggccaggagagaggccaggtgacaggggccctgctcctctctgtggttggaggaaagatgagtgaagggatcaacttctctgacaacctaggccggcagggccatcaggcaccagaaggattttgccagcatagtgctcctggaccagcgatatgcccggccccctgtcctggccaagctgccggcctggatccgagcccgtgtggaggtcaaagctacctttggccccgccattgctgctgtgcagaagtttcaccgggagaagtcggcctcttcctgatgggcaaccacaccactgcctggcgccgtgcccttcctttgtcctgcccgctggagacagtgtttgtcgtgggcgtggtctgcggggatcctgttacaaaggtgaaacccaggaggagagtgtggagtccagagtgctgccaggacccaggcacaggcgttagctcccgtaggagaaaatgggggaatcctgaatgaacagtgggtcctggctgtccttggggcgttccagggcagctcccctcctggaatagaatctttctttccatcctgcatggctgagagccaggcttccttcctggtctccgcaggaggctgtggcagctgtggcatccactgtggcatctccgtcctgcccaccttcttaagaggcgagatggagcaggcccatctgcctctgccctttctagccaaggttatagctgccctggactgctcactctctggtctcaatttaaaatgatccatggccacagggctcctgcccaggggcttgtcaccttcccctcctccttcctgagtcactccttcagtagaaggccctgctccctatcctgccccacagccctgcctggatttgtatccttggcttcgtgccagttcctccaagtctatggcacctccctccctctcaaccacttgagcaaactccaagacaccttctaccccaacaccagcaattatgccaagggccgttaggctctcaacatgactatagagaccccgtgtcatcacggagacctttgttcctgtgggaaaatatccctcccacctgcaacagctgcccctgctgactgcgcctgtcttctccctctgaccccagagaaaggggctgtggtcagctgggatcttctgccaccatcagggacaaacgggggcaggaggaaagtcactgatgcccagatgtttgcatcctgcacagctacaggtccttaaataaaagtgtgctgttggtt

SEQ ID NO: 355203 - DNA, 2825 bp, Homo sapiens
agcgggttgttccggctgcctttcactgaggggacccgccagtttctaactcagtggcgtttgccctgattcccggggcctggctttcagcgtagcaattctgccggcgaagaaggtgagcgcagtgctgtgtggcagcagagctccttaggacgaggagcagcgggacgaggaagggcagactggtgaaatcgcaaactgggcgtctgttccggcgccggacccctatttgcaaaggtccatggctaatgaaacacagaaggttggtgccatccattttccttttcccttcacaccctattccatccaggaagacttcatggcagagctgtaccgggttttggaggctggcaagattgggatatttgagagtccaactggcactgggaagtccttaagtcttatttgtggggccctctcttggctccgtgactttgaacagaagaagcgtgaagaagaggcacgactccttgaaactggaactggccccttacatgatgagaaagatgaatccctgtgtctgtcttcttcctgcgaaggggctgcaggcaccccgaggcctgctggagaaccggcctgggttactcagtttgtgcagaagaaagaagagagggacctggtggaccgactaaaggcggagcaggccaggaggaagcagcgagaagaacgcctgcagcagctgcagcacagggtgcagctcaagtatgcagccaagcgcctgaggcaggaagaagaagaaagagagaatctcctccgcctcagcagggagatgctagagacaggcccggaggctgagcggctggagcagctggagtctggggaggaggagctggtcctcgccgaatacgagagtgatgaggagaaaaaggtggcgagcagagtggatgaggatgaggatgacctggaggaagaacacataactaagatttattactgtagtcggacacactcccagctggcccagtttgtgcatgaggtgaaggaatgccgggcagtggtcattgcggggggtaccatgcagccggtgtctgacttccggcagcagctgctggcctgtgccggggtggaagctgagcgcgtggtggagttttcctgtggtcacgtgatccctccagacaacatcctgccccttgtcatctgcagcgggatctccaaccagccgctggaattcacgttccagaaaagagagctgcctcagatgatggacgaggtgggtcgcattctctgtaacctgtgcggtgtggttcctggaggggtggtctgtttcttcccctcctacgagtacctgcgccaggtccatgcccactgggagaagggtggcctgctgggccgtctggctgccaggaagaagatattccaggaacctaagagcgcacaccaggtggagcaggtgctgctggcatattccaggtgcatccaggcctgtggccaggagagaggccaggtgacaggggccctgctcctctctgtggttggaggaaagatgagtgaagggatcaacttctctgacaacctaggccggtgtgtggtgatggtgggcatgcccttccccaacatcaggtctgcagagctgcaggagaagatggcctacttggatcaaaccctccccagagcccccggccaggcacccccagggaaggctctggtggagaacctgtgcatgaaggccgtcaaccagtccataggcagggccatcaggcaccagaaggattttgccagcatagtgctcctggaccagcgatatgcccggccccctgtcctggccaagctgccggcctggatccgagcccgtgtggaggtcaaagctacctttggccccgccattgctgctgtgcagaagtttcaccgggagaagtcggcctcttcctgatgggcaaccacaccactgcctggcgccgtgcccttcctttgtcctgcccgctggagacagtgtttgtcgtgggcgtggtctgcggggatcctgttacaaaggtgaaacccaggaggagagtgtggagtccagagtgctgccaggacccaggcacaggcgttagctcccgtaggagaaaatgggggaatcctgaatgaacagtgggtcctggctgtccttggggcgttccagggcagctcccctcctggaatagaatctttctttccatcctgcatggctgagagccaggcttccttcctggtctccgcaggaggctgtggcagctgtggcatccactgtggcatctccgtcctgcccaccttcttaagaggcgagatggagcaggcccatctgcctctgccctttctagccaaggttatagctgccctggactgctcactctctggtctcaatttaaaatgatccatggccacagggctcctgcccaggggcttgtcaccttcccctcctccttcctgagtcactccttcagtagaaggccctgctccctatcctgccccacagccctgcctggatttgtatccttggcttcgtgccagttcctccaagtctatggcacctccctccctctcaaccacttgagcaaactccaagacaccttctaccccaacaccagcaattatgccaagggccgttaggctctcaacatgactatagagaccccgtgtcatcacggagacctttgttcctgtgggaaaatatccctcccacctgcaacagctgcccctgctgactgcgcctgtcttctccctctgaccccagagaaaggggctgtggtcagctgggatcttctgccaccatcagggacaaacgggggcaggaggaaagtcactgatgcccagatgtttgcatcctgcacagctacaggtccttaaataaaagtgtgctgttggtt

SEQ ID NO: 355204 - DNA, 2178 bp, Homo sapiens
agcgggttgttccggctgcctttcactgaggggacccgccagtttctaactcagtggcgtttgccctgattcccggggcctggctttcagcgtagcaattctgccggcgaagaaggtgagcgcagtgctgtgtggcagcagagctccttaggacgaggagcagcgggacgaggaagggcagactggtgaaatcgcaaactgggcgtctgttccggcgccggacccctatttgcaaaggtccatggctaatgaaacacagaaggttggtgccatccattttccttttcccttcacaccctattccatccaggaagacttcatggcagagctgtaccgggttttggaggctggcaagattgggatatttgagagtccaactggcactgggaagtccttaagtcttatttgtggggccctctcttggctccgtgactttgaacagaagaagcgtgaagaagaggcacgactccttgaaactggaactggccccttacatgatgagaaagatgaatccctgtgtctgtcttcttcctgcgaaggggctgcaggcaccccgaggcctgctggagaaccggcctgggttactcagtttgtgcagaagaaagaagagagggacctggtggaccgactaaaggtgagacctggggtatccggaagcagcgggatctccaaccagccgctggaattcacgttccagaaaagagagctgcctcagatgatggacgaggtgggtcgcattctctgtaacctgtgcggtgtggttcctggaggggtggtctgtttcttcccctcctacgagtacctgcgccaggtccatgcccactgggagaagggtggcctgctgggccgtctggctgccaggaagaagatattccaggaacctaagagcgcacaccaggtggagcaggtgctgctggcatattccaggtgcatccaggcctgtggccaggagagaggccaggtgacaggggccctgctcctctctgtggttggaggaaagatgagtgaagggatcaacttctctgacaacctaggccggcagggccatcaggcaccagaaggattttgccagcatagtgctcctggaccagcgatatgcccggccccctgtcctggccaagctgccggcctggatccgagcccgtgtggaggtcaaagctacctttggccccgccattgctgctgtgcagaagtttcaccgggagaagtcggcctcttcctgatgggcaaccacaccactgcctggcgccgtgcccttcctttgtcctgcccgctggagacagtgtttgtcgtgggcgtggtctgcggggatcctgttacaaaggtgaaacccaggaggagagtgtggagtccagagtgctgccaggacccaggcacaggcgttagctcccgtaggagaaaatgggggaatcctgaatgaacagtgggtcctggctgtccttggggcgttccagggcagctcccctcctggaatagaatctttctttccatcctgcatggctgagagccaggcttccttcctggtctccgcaggaggctgtggcagctgtggcatccactgtggcatctccgtcctgcccaccttcttaagaggcgagatggagcaggcccatctgcctctgccctttctagccaaggttatagctgccctggactgctcactctctggtctcaatttaaaatgatccatggccacagggctcctgcccaggggcttgtcaccttcccctcctccttcctgagtcactccttcagtagaaggccctgctccctatcctgccccacagccctgcctggatttgtatccttggcttcgtgccagttcctccaagtctatggcacctccctccctctcaaccacttgagcaaactccaagacaccttctaccccaacaccagcaattatgccaagggccgttaggctctcaacatgactatagagaccccgtgtcatcacggagacctttgttcctgtgggaaaatatccctcccacctgcaacagctgcccctgctgactgcgcctgtcttctccctctgaccccagagaaaggggctgtggtcagctgggatcttctgccaccatcagggacaaacgggggcaggaggaaagtcactgatgcccagatgtttgcatcctgcacagctacaggtccttaaataaaagtgtgctgttggtt

SEQ ID NO: 355205 - DNA, 2008 bp, Homo sapiens
agcgggttgttccggctgcctttcactgaggggacccgccagtttctaactcagtggcgtttgccctgattcccggggcctggctttcagcgtagcaattctgccggcgaagaaggtgagcgcagtgctgtgtggcagcagagctccttaggacgaggagcagcgggacgaggaagggcagactggtgaaatcgcaaactgggcgtctgttccggcgccggacccctatttgcaaaggtccatggctaatgaaacacagaaggttggtgccatccattttccttttcccttcacaccctattccatccaggaagacttcatggcagagctgtaccgggttttggaggctggcaagattgggatatttgagagtccaactggcactgggaagtccttaagtcttatttgtggggccctctcttggctccgtgactttgaacagaagaagcgtgaagaagaggcacgactccttgaaactggaactggccccttacatgatgagaaagatgaatccctgtgtctgtcttcttcctgcgaaggggctgcaggcaccccgaggcctgctggagaaccggcctgggttactcagtttgtgcagaagaaagaagagagggacctggtggaccgactaaaggcggagcaggccaggaggaagcagcgagaagaacgcctgcagcagctgcagcacagggtgcagctcaagtatgcagccaagcgcctgaggcaggaagaagaagaaagagagaatctcctccgcctcagcagggagatgctagagacaggcccggaggctgagcggctggagcagctggagtctggggaggaggagctggtcctcgccgaatacgagagtgatgaggagaaaaaggtggcgagcagagtggatgaggatgaggatgacctggaggaagaacacataactaagatttattactgtagtcggacacactcccagctggcccagtttgtgcatgaggtgaagaagagcccctttggcaaggatgttcggctggtctcccttggctcccggcagaacctttgtgtaaatgaagacgtgaaaagcctaggttctgtgcagcttatcaacgaccgctgcgtggacatgcagagaagcaggcacgagaagaagaaaggagctgaggaggagaagccaaagaggaggaggcaggagaagcaggcagcctgccccttctacaaccacgagcagatgggccttctccgggatgaggccctggcagaggtgaaggacatggagcagctgctggcccttgggaaggaggcccgggcctgtccctattacgggagccgccttgccatccctgcagcccagctggtggtgctgccctatcagatgctgctgcatgcggccactcggcaggccgcgggcatccggctgcaggaccaggtggtgatcatcgacgaggcgcacaacctgatcgacaccatcacgggcatgcacagcgtggaggtcagcggctcccagctctgccaggcccattcccagctgctgcagtacgtggagcgatacgggaagcgtttgaaggccaagaacctgatgtacctgaagcagatcctgtatttgctggagaaattcgtggctgtgctagggggtgagagcctcgtccccctgctgaccccgggcctgcaaaactcgctgggctgctttttccttggatgcccatcaggacacctcagttctctgtgtttttaagaagggtcggccgggtgcggtggctcacgcctgtaatcccagcacttgggaggccgaggcaggtggttcacctgaggttaggagttttgagaccagcctggccaacatggtgaaatcccatctctactaaaaatacaaaaaaattagctgggagtgttgccgtggcctgtagtcccagctgctccagaggctgagacaagagaattgcttgctcaaacccgggaggcggaggttgcagtgagccgagattgtgccactgcagtccagtctgggcgacagagtgagaatcagtctcaa

SEQ ID NO: 355206 - DNA, 401 bp, Homo sapiens
aaaaggatggagaggacagtgtggtccacctctgtgggctggttgtcctagagattaaatggtgtttaatttaaagagaaagcactagcacttgtgcctcagacctggactcacctgggggaccccctttgctgggacgacagaagtgtctgttgggcttgcactcacctcccaccgatctgtttttccaggcagcctcagtcagagcaccctgaagtttttgctcctgaatccagctgtgcactttgcccaagtggtgaaggaatgccgggcagtggtcattgcggggggtaccatgcagccggtaaggacacctttcccagcccctcgtgccccaggtgttgggatgagatgggggcttgggagagatgcattatcagtcctgttctctcctggggccc

SEQ ID NO: 355207 - DNA, 3917 bp, Homo sapiens
agcgggttgttccggctgcctttcactgaggggacccgccagtttctaactcagtggcgtttgccctgattcccggggcctggctttcagcgtagcaattctgccggcgaagaaggtgagcgcagtgctgtgtggcagcagagctccttaggacgaggagcagcgggacgaggaagggcagactggtgaaatcgcaaactgggcgtctgttccggcgccggacccctatttgcaaaggtccatggctaatgaaacacagaaggttggtgccatccattttccttttcccttcacaccctattccatccaggaagacttcatggcagagctgtaccgggttttggaggctggcaagattgggatatttgagagtccaactggcactgggaagtccttaagtcttatttgtggggccctctcttggctccgtgactttgaacagaagaagcgtgaagaagaggcacgactccttgaaactggaactggccccttacatgatgagaaagatgaatccctgtgtctgtcttcttcctgcgaaggggctgcaggcaccccgaggcctgctggagaaccggcctgggttactcagtttgtgcagaagaaagaagagagggacctggtggaccgactaaaggcggagcaggccaggaggaagcagcgagaagaacgcctgcagcagctgcagcacagggtgcagctcaagtatgcagccaagcgcctgaggcaggaagaagaagaaagagagaatctcctccgcctcagcagggagatgctagagacaggcccggaggctgagcggctggagcagctggagtctggggaggaggagctggtcctcgccgaatacgagagtgatgaggagaaaaaggtggcgagcagagtggatgaggatgaggatgacctggaggaagaacacataactaagatttattactgtagtcggacacactcccagctggcccagtttgtgcatgaggtgaagaagagcccctttggcaaggatgttcggctggtctcccttggctcccggcagaacctttgtgtaaatgaagacgtgaaaagcctaggttctgtgcagcttatcaacgaccgctgcgtggacatgcagagaagcaggcacgagaagaagaaaggagctgaggaggagaagccaaagaggaggaggcaggagaagcaggcagcctgccccttctacaaccacgagcagatgggccttctccgggatgaggccctggcagaggtgaaggacatggagcagctgctggcccttgggaaggaggcccgggcctgtccctattacgggagccgccttgccatccctgcagcccagctggtggtgctgccctatcagatgctgctgcatgcggccactcggcaggccgcgggcatccggctgcaggaccaggtggtgatcatcgacgaggcgcacaacctgatcgacaccatcacgggcatgcacagcgtggaggtcagcggctcccagctctgccaggcccattcccagctgctgcagtacgtggagcgatacgggaagcgtttgaaggccaagaacctgatgtacctgaagcagatcctgtatttgctggagaaattcgtggctgtgctaggggggaacattaagcaaaatcccaatacacagagtctgtcacagacagggacggagctgaagaccatcaacgactttctcttccagagccagatcgacaacatcaacctgttcaaggtgcagcgatactgtgagaagagcatgatcagcagaaagctctttggattcactgaacggtacggagcagtgttctcatcccgggagcagcccaaactggctgggtttcagcaattcctgcagagcctgcagcccaggacgactgaagctcttgcagcccctgcagacgagagtcaggccagcaccctgcgaccagcttctccactgatgcacatcgaaggcttcctggcagctctcactacggccaaccaggacggcagggtcatcctgagccgccaaggcagcctcagtcagagcaccctgaagtttttgctcctgaatccagctgtgcactttgcccaagtggtgaaggaatgccgggcagtggtcattgcggggggtaccatgcagccggtgtctgacttccggcagcagctgctggcctgtgccggggtggaagctgagcgcgtggtggagttttcctgtggtcacgtgatccctccagacaacatcctgccccttgtcatctgcagcgggatctccaaccagccgctggaattcacgttccagaaaagagagctgcctcagatgatggacgaggtgggtcgcattctctgtaacctgtgcggtgtggttcctggaggggtggtctgtttcttcccctcctacgagtacctgcgccaggtccatgcccactgggagaagggtggcctgctgggccgtctggctgccaggaagaagatattccaggaacctaagagcgcacaccaggtggagcaggtgctgctggcatattccaggtgcatccaggcctgtggccaggagagaggccaggtgacaggggccctgctcctctctgtggttggaggaaagatgagtgaagggatcaacttctctgacaacctaggccggtgtgtggtgatggtgggcatgcccttccccaacatcaggtctgcagagctgcaggagaagatggcctacttggatcaaaccctccccagagcccccggccaggcacccccagggaaggctctggtggagaacctgtgcatgaaggccgtcaaccagtccataggcagggccatcaggcaccagaaggattttgccagcatagtgctcctggaccagcgatatgcccggccccctgtcctggccaagctgccggcctggatccgagcccgtgtggaggtcaaagctacctttggccccgccattgctgctgtgcagaagtttcaccgggagaagtcggcctcttcctgatgggcaaccacaccactgcctggcgccgtgcccttcctttgtcctgcccgctggagacagtgtttgtcgtgggcgtggtctgcggggatcctgttacaaaggtgaaacccaggaggagagtgtggagtccagagtgctgccaggacccaggcacaggcgttagctcccgtaggagaaaatgggggaatcctgaatgaacagtgggtcctggctgtccttggggcgttccagggcagctcccctcctggaatagaatctttctttccatcctgcatggctgagagccaggcttccttcctggtctccgcaggaggctgtggcagctgtggcatccactgtggcatctccgtcctgcccaccttcttaagaggcgagatggagcaggcccatctgcctctgccctttctagccaaggttatagctgccctggactgctcactctctggtctcaatttaaaatgatccatggccacagggctcctgcccaggggcttgtcaccttcccctcctccttcctgagtcactccttcagtagaaggccctgctccctatcctgccccacagccctgcctggatttgtatccttggcttcgtgccagttcctccaagtctatggcacctccctccctctcaaccacttgagcaaactccaagacaccttctaccccaacaccagcaattatgccaagggccgttaggctctcaacatgactatagagaccccgtgtcatcacggagacctttgttcctgtgggaaaatatccctcccacctgcaacagctgcccctgctgactgcgcctgtcttctccctctgaccccagagaaaggggctgtggtcagctgggatcttctgccaccatcagggacaaacgggggcaggaggaaagtcactgatgcccagatgtttgcatcctgcacagctacaggtccttaaataaaagtgtgctgttggtt

SEQ ID NO: 355208 - DNA, 3767 bp, Homo sapiens
agcgggttgttccggctgcctttcactgaggggacccgccagtttctaactcagtggcgtttgccctgattcccggggcctggctttcagcgtagcaattctgccggcgaagaaggtgagcgcagtgctgtgtggcagcagagctccttaggacgaggagcagcgggacgaggaagggcagactggtgaaatcgcaaactgggcgtctgttccggcgccggacccctatttgcaaaggtccatggctaatgaaacacagaaggttggtgccatccattttccttttcccttcacaccctattccatccaggaagacttcatggcagagctgtaccgggttttggaggctggcaagattgggatatttgagagtccaactggcactgggaagtccttaagtcttatttgtggggccctctcttggctccgtgactttgaacagaagaagcgtgaagaagaggcacgactccttgaaactggaactggccccttacatgatgagaaagatgaatccctgtgtctgtcttcttcctgcgaaggggctgcaggcaccccgaggcctgctggagaaccggcctgggttactcagtttgtgcagaagaaagaagagagggacctggtggaccgactaaaggcggagcaggccaggaggaagcagcgagaagaacgcctgcagcagctgcagcacagggtgcagctcaagtatgcagccaagcgcctgaggcaggaagaagaagaaagagagaatctcctccgcctcagcagggagatgctagagacaggcccggaggctgagcggctggagcagctggagtctggggaggaggagctggtcctcgccgaatacgagagtgatgaggagaaaaaggtggcgagcagagtggatgaggatgaggatgacctggaggaagaacacataactaagatttattactgtagtcggacacactcccagctggcccagtttgtgcatgaggtgaagaagagcccctttggcaaggatgttcggctggtctcccttggctcccggcagaacctttgtgtaaatgaagacgtgaaaagcctaggttctgtgcagcttatcaacgaccgctgcgtggacatgcagagaagcaggcacgagaagaagaaaggagctgaggaggagaagccaaagaggaggaggcaggagaagcaggcagcctgccccttctacaaccacgagcagatgggccttctccgggatgaggccctggcagaggtgaaggacatggagcagctgctggcccttgggaaggaggcccgggcctgtccctattacgggagccgccttgccatccctgcagcccagctggtggtgctgccctatcagatgctgctgcatgcggccactcggcaggccgcgggcatccggctgcaggaccaggtggtgatcatcgacgaggcgcacaacctgatcgacaccatcacgggcatgcacagcgtggaggtcagcggctcccagctctgccaggcccattcccagctgctgcagtacgtggagcgatacgggaagcgtttgaaggccaagaacctgatgtacctgaagcagatcctgtatttgctggagaaattcgtggctgtgctaggggggaacattaagcaaaatcccaatacacagagtctgtcacagacagggacggagctgaagaccatcaacgactttctcttccagagccagatcgacaacatcaacctgttcaaggtgcagcgatactgtgagaagagcatgatcagcagaaagctctttggattcactgaacggtacggagcagtgttctcatcccgggagcagcccaaactggctgggtttcagcaattcctgcagagcctgcagcccaggacgactgaagctcttgcagcccctgcagacgagagtcaggccagcaccctgcgaccagcttctccactgatgcacatcgaaggcttcctggcagctctcactacggccaaccaggacggcagggtcatcctgagccgccaaggcagcctcagtcagagcaccctgaagtttttgctcctgaatccagctgtgcactttgcccaagtggtgaaggaatgccgggcagtggtcattgcggggggtaccatgcagccggtgtctgacttccggcagcagctgctggcctgtgccggggtggaagctgagcgcgtggtggagttttcctgtggtcacgtgatccctccagacaacatcctgccccttgtcatctgcagcgggatctccaaccagccgctggaattcacgttccagaaaagagagctgcctcagatgatattccaggaacctaagagcgcacaccaggtggagcaggtgctgctggcatattccaggtgcatccaggcctgtggccaggagagaggccaggtgacaggggccctgctcctctctgtggttggaggaaagatgagtgaagggatcaacttctctgacaacctaggccggtgtgtggtgatggtgggcatgcccttccccaacatcaggtctgcagagctgcaggagaagatggcctacttggatcaaaccctccccagagcccccggccaggcacccccagggaaggctctggtggagaacctgtgcatgaaggccgtcaaccagtccataggcagggccatcaggcaccagaaggattttgccagcatagtgctcctggaccagcgatatgcccggccccctgtcctggccaagctgccggcctggatccgagcccgtgtggaggtcaaagctacctttggccccgccattgctgctgtgcagaagtttcaccgggagaagtcggcctcttcctgatgggcaaccacaccactgcctggcgccgtgcccttcctttgtcctgcccgctggagacagtgtttgtcgtgggcgtggtctgcggggatcctgttacaaaggtgaaacccaggaggagagtgtggagtccagagtgctgccaggacccaggcacaggcgttagctcccgtaggagaaaatgggggaatcctgaatgaacagtgggtcctggctgtccttggggcgttccagggcagctcccctcctggaatagaatctttctttccatcctgcatggctgagagccaggcttccttcctggtctccgcaggaggctgtggcagctgtggcatccactgtggcatctccgtcctgcccaccttcttaagaggcgagatggagcaggcccatctgcctctgccctttctagccaaggttatagctgccctggactgctcactctctggtctcaatttaaaatgatccatggccacagggctcctgcccaggggcttgtcaccttcccctcctccttcctgagtcactccttcagtagaaggccctgctccctatcctgccccacagccctgcctggatttgtatccttggcttcgtgccagttcctccaagtctatggcacctccctccctctcaaccacttgagcaaactccaagacaccttctaccccaacaccagcaattatgccaagggccgttaggctctcaacatgactatagagaccccgtgtcatcacggagacctttgttcctgtgggaaaatatccctcccacctgcaacagctgcccctgctgactgcgcctgtcttctccctctgaccccagagaaaggggctgtggtcagctgggatcttctgccaccatcagggacaaacgggggcaggaggaaagtcactgatgcccagatgtttgcatcctgcacagctacaggtccttaaataaaagtgtgctgttggtt

SEQ ID NO: 355209 - DNA, 448 bp, Homo sapiens
ggttgggggtcctgagaaccagcattgtgacctatttccattctcttttttagggaacattaagcaaaatcccaatacacagagtctgtcacagacagggacggagctgaagaccatcaacgactttctcttccagagccagatcgacaacatcaacctgttcaaggtgcagcgatactgtgagaagagcatgatcagcagaaaggtaactgctcccatcttgtggtcctgaacaagacccagctgtgccccaaccccctgcccttgccatgctttcctcccctgccctcagggaactccagagtccccttcgtctccactctccttggtgcagtgggccttgctggggtggtgggatgtgtgctgcaggtgtcttgggcctggcagagcctccgatccacccagcctctctctcatggctgtacctcgttcctctccactgctctct

SEQ ID NO: 355210 - DNA, 3850 bp, Homo sapiens
  misc_feature (3847)..(3847): n is a, c, g, or t
agcgggttgttccggctgcctttcactgaggggacccgccagtttctaactcagtggcgtttgccctgattcccggggcctggctttcagcgtagcaattctgccggcgaagaaggtgagcgcagtgctgtgtggcagcagagctccttaggacgaggagcagcgggacgaggaagggcagactggtgaaatcgcaaactgggcgtctgttccggcgccggacccctatttgcaaaggtccatggctaatgaaacacagaaggttggtgccatccattttccttttcccttcacaccctattccatccaggaagacttcatggcagagctgtaccgggttttggaggctggcaagattgggatatttgagagtccaactggcactgggaagtccttaagtcttatttgtggggccctctcttggctccgtgactttgaacagaagaagcgtgaagaagaggcacgactccttgaaactggaactggccccttacatgatgagaaagatgaatccctgtgtctgtcttcttcctgcgaaggggctgcaggcaccccgaggcctgctggagaaccggcctgggttactcagtttgtgcagaagaaagaagagagggacctggtggaccgactaaaggcggagcaggccaggaggaagcagcgagaagaacgcctgcagcagctgcagcacagggtgcagctcaagtatgcagccaagcgcctgaggcaggaagaagaagaaagagagaatctcctccgcctcagcagggagatgctagagacaggcccggaggctgagcggctggagcagctggagtctggggaggaggagctggtcctcgccgaatacgagagtgatgaggagaaaaaggtggcgagcagagtggatgaggatgaggatgacctggaggaagaacacataactaagatttattactgtagtcggacacactcccagctggcccagtttgtgcatgaggtgaagaagagcccctttggcaaggatgttcggctggtctcccttggctcccggcagaacctttgtgtaaatgaagacgtgaaaagcctaggttctgtgcagcttatcaacgaccgctgcgtggacatgcagagaagcaggcacgagaagaagaaaggagctgaggaggagaagccaaagaggaggaggcaggagaagcaggcagcctgccccttctacaaccacgagcagatgggccttctccgggatgaggccctggcagaggtgaaggacatggagcagctgctggcccttgggaaggaggcccgggcctgtccctattacgggagccgccttgccatccctgcagcccagctggtggtgctgccctatcagatgctgctgcatgcggccactcggcaggccgcgggcatccggctgcaggaccaggtggtgatcatcgacgaggcgcacaacctgatcgacaccatcacgggcatgcacagcgtggaggtcagcggctcccagctctgccaggcccattcccagctgctgcagtacgtggagcgatacgggaagcgtttgaaggccaagaacctgatgtacctgaagcagatcctgtatttgctggagaaattcgtggctgtgctaggggggaacattaagcaaaatcccaatacacagagtctgtcacagacagggacggagctgaagaccatcaacgactttctcttccagagccagatcgacaacatcaacctgttcaaggtgcagcgatactgtgagaagagcatgatcagcagaaagctctttggattcactgaacggtacggagcagtgttctcatcccgggagcagcccaaactggctgggtttcagcaattcctgcagagcctgcagcccaggacgactgaagctcttgcagcccctgcagacgagagtcaggccagcaccctgcgaccagcttctccactgatgcacatcgaaggcttcctggcagctctcactacggccaaccaggacggcagggtcatcctgagccgccaaggcagcctcagtcagagcaccctgaagtttttgctcctgaatccagctgtgcactttgcccaagtggtgaaggaatgccgggcagtggtcattgcggggggtaccatgcagccggtgtctgacttccggcagcagctgctggcctgtgccggggtggaagctgagcgcgtggtggagttttcctgtggtcacgtgatccctccagacaacatcctgccccttgtcatctgcagcgggatctccaaccagccgctggaattcacgttccagaaaagagagctgcctcagatgatggacgaggtgggtcgcattctctgtaacctgtgcggtgtggttcctggaggggtggtctgtttcttcccctcctacgagtacctgcgccaggtccatgcccactgggagaagggtggcctgctgggccgtctggctgccaggaagaagatattccaggaacctaagagcgcacaccaggtggagcaggtgctgctggcatattccaggtgcatccaggcctgtggccaggagagaggccaggtgacaggggccctgctcctctctgtggttggaggaaagatgagtgaagggatcaacttctctgacaacctaggccggtgtgtggtgatggtgggcatgcccttccccaacatcaggtctgcagagctgcaggagaagatggcctacttggatcaaaccctccccagagcccccggccaggcacccccagggaaggctctggtggagaacctgtgcatgaaggccgtcaaccagtccataggcagggccatcaggcaccagaaggattttgccagcatagtgctcctggaccagcgatatgcccggccccctgtcctggccaagctgccggcctggatccgagcccgtgtggaggtcaaagctacctttggccccgccattgctgctgtgcagaagtttcaccgggagaagtcggcctcttcctgatgggcaaccacaccactgcctggcgccgtgcccttcctttgtcctgcccgctggagacagtgtttgtcgtgggcgtggtctgcggggatcctgttacaaaggtgaaacccaggaggagagtgtggagtccagagtgctgccaggacccaggcacaggcgttagctcccgtaggagaaaatgggggaatcctgaatgaacagtgggtcctggctgtccttggggcgttccagggcagctcccctcctggaatagaatctttctttccatcctgcatggctgagagccaggcttccttcctggtctccgcaggaggctgtggcagctgtggcatccactgtggcatctccgtcctgcccaccttcttaagaggcgagatggagcaggcccatctgcctctgccctttctagccaaggttatagctgccctggactgctcactctctggtctcaatttaaaatgatccatggccacagggctcctgcccaggggcttgtcaccttcccctcctccttcctgagtcactccttcagtagaaggccctgctccctatcctgccccacagccctgcctggatttgtatccttggcttcgtgccagttcctccaagtctatggcacctccctccctctcaaccacttgagcaaactccaagacaccttctaccccaacaccagcaattatgccaagggccgttaggctctcaacatgactatagagaccccgtgtcatcacggagacctttgttcctgtgggaaaatatccctcccacctgcaacagctgcccctgctgactgcgcctgtcttctccctctgaccccagagaaaggggctgtggtcagctgggatcttctgccaccatcagggacttcctcctgcccccgtntgt

SEQ ID NO: 355211 - DNA, 3555 bp, Homo sapiens
agcgggttgttccggctgcctttcactgaggggacccgccagtttctaactcagtggcgtttgccctgattcccggggcctggctttcagcgtagcaattctgccggcgaagaaggaagacttcatggcagagctgtaccgggttttggaggctggcaagattgggatatttgagagtccaactggcactgggaagtccttaagtcttatttgtggggccctctcttggctccgtgactttgaacagaagaagcgtgaagaagaggcacgactccttgaaactggaactggccccttacatgatgagaaagatgaatccctgtgtctgtcttcttcctgcgaaggggctgcaggcaccccgaggcctgctggagaaccggcctgggttactcagtttgtgcagaagaaagaagagagggacctggtggaccgactaaaggcggagcaggccaggaggaagcagcgagaagaacgcctgcagcagctgcagcacagggtgcagctcaagtatgcagccaagcgcctgaggcaggaagaagaagaaagagagaatctcctccgcctcagcagggagatgctagagacaggcccggaggctgagcggctggagcagctggagtctggggaggaggagctggtcctcgccgaatacgagagtgatgaggagaaaaaggtggcgagcagagtggatgaggatgaggatgacctggaggaagaacacataactaagatttattactgtagtcggacacactcccagctggcccagtttgtgcatgaggtgaagaagagcccctttggcaaggatgttcggctggtctcccttggctcccggcagagaagaagaaaggagctgaggaggagaagccaaagaggaggaggcaggagaagcaggcagcctgccccttctacaaccacgagcagatgggccttctccgggatgaggccctggcagaggtgaaggacatggagcagctgctggcccttgggaaggaggcccgggcctgtccctattacgggagccgccttgccatccctgcagcccagctggtggtgctgccctatcagatgctgctgcatgcggccactcggcaggccgcgggcatccggctgcaggaccaggtggtgatcatcgacgaggcgcacaacctgatcgacaccatcacgggcatgcacagcgtggaggtcagcggctcccagctctgccaggcccattcccagctgctgcagtacgtggagcgatacgggaagcgtttgaaggccaagaacctgatgtacctgaagcagatcctgtatttgctggagaaattcgtggctgtgctaggggggaacattaagcaaaatcccaatacacagagtctgtcacagacagggacggagctgaagaccatcaacgactttctcttccagagccagatcgacaacatcaacctgttcaaggtgcagcgatactgtgagaagagcatgatcagcagaaagctctttggattcactgaacggtacggagcagtgttctcatcccgggagcagcccaaactggctgggtttcagcaattcctgcagagcctgcagcccaggacgactgaagctcttgcagcccctgcagacgagagtcaggccagcaccctgcgaccagcttctccactgatgcacatcgaaggcttcctggcagctctcactacggccaaccaggacggcagggtcatcctgagccgccaaggcagcctcagtcagagcaccctgaagtttttgctcctgaatccagctgtgcactttgcccaagtggtgaaggaatgccgggcagtggtcattgcggggggtaccatgcagccggtgtctgacttccggcagcagctgctggcctgtgccggggtggaagctgagcgcgtggtggagttttcctgtggtcacgtgatccctccagacaacatcctgccccttgtcatctgcagcgggatctccaaccagccgctggaattcacgttccagaaaagagagctgcctcagatgatggacgaggtgggtcgcattctctgtaacctgtgcggtgtggttcctggaggggtggtctgtttcttcccctcctacgagtacctgcgccaggtccatgcccactgggagaagggtggcctgctgggccgtctggctgccaggaagaagatattccaggaacctaagagcgcacaccaggtggagcaggtgctgctggcatattccaggtgcatccaggcctgtggccaggagagaggccaggtgacaggggccctgctcctctctgtggttggaggaaagatgagtgaagggatcaacttctctgacaacctaggccggtgtgtggtgatggtgggcatgcccttccccaacatcaggtctgcagagctgcaggagaagatggcctacttggatcaaaccctcgcagggccatcaggcaccagaaggattttgccagcatagtgctcctggaccagcgatatgcccggccccctgtcctggccaagctgccggcctggatccgagcccgtgtggaggtcaaagctacctttggccccgccattgctgctgtgcagaagtttcaccgggagaagtcggcctcttcctgatgggcaaccacaccactgcctggcgccgtgcccttcctttgtcctgcccgctggagacagtgtttgtcgtgggcgtggtctgcggggatcctgttacaaaggtgaaacccaggaggagagtgtggagtccagagtgctgccaggacccaggcacaggcgttagctcccgtaggagaaaatgggggaatcctgaatgaacagtgggtcctggctgtccttggggcgttccagggcagctcccctcctggaatagaatctttctttccatcctgcatggctgagagccaggcttccttcctggtctccgcaggaggctgtggcagctgtggcatccactgtggcatctccgtcctgcccaccttcttaagaggcgagatggagcaggcccatctgcctctgccctttctagccaaggttatagctgccctggactgctcactctctggtctcaatttaaaatgatccatggccacagggctcctgcccaggggcttgtcaccttcccctcctccttcctgagtcactccttcagtagaaggccctgctccctatcctgccccacagccctgcctggatttgtatccttggcttcgtgccagttcctccaagtctatggcacctccctccctctcaaccacttgagcaaactccaagacaccttctaccccaacaccagcaattatgccaagggccgttaggctctcaacatgactatagagaccccgtgtcatcacggagacctttgttcctgtgggaaaatatccctcccacctgcaacagctgcccctgctgactgcgcctgtcttctccctctgaccccagagaaaggggctgtggtcagctgggatcttctgccaccatcagggacaaacgggggcaggaggaaagtcactgatgcccagatgtttgcatcctgcacagctacaggtccttaaataaaagtgtgctgttggtt

SEQ ID NO: 355212 - DNA, 4565 bp, Homo sapiens
agcgggttgttccggctgcctttcactgaggggacccgccagtttctaactcagtggcgtttgccctgattcccggggcctggctttcagcgtagcaattctgccggcgaagaaggtgagcgcagtgctgtgtggcagcagagctccttaggacgaggagcagcgggacgaggaagggcagactggtgaaatcgcaaactgggcgtctgttccggcgccggacccctatttgcaaaggtccatggctaatgaaacacagaaggttggtgccatccattttccttttcccttcacaccctattccatccaggaagacttcatggcagagctgtaccgggttttggaggctggcaagattgggatatttgagagtccaactggcactgggaagtccttaagtcttatttgtggggccctctcttggctccgtgactttgaacagaagaagcgtgaagaagaggcacgactccttgaaactggaactggccccttacatgatgagaaagatgaatccctgtgtctgtcttcttcctgcgaaggggctgcaggcaccccgaggcctgctggagaaccggcctgggttactcagtttgtgcagaagaaagaagagagggacctggtggaccgactaaaggcggagcaggccaggaggaagcagcgagaagaacgcctgcagcagctgcagcacagggtgcagctcaagtatgcagccaagcgcctgaggcaggaagaagaagaaagagagaatctcctccgcctcagcagggagatgctagagacaggcccggaggctgagcggctggagcagctggagtctggggaggaggagctggtcctcgccgaatacgagagtgatgaggagaaaaaggtggcgagcagagtggatgaggatgaggatgacctggaggaagaacacataactaagatttattactgtagtcggacacactcccagctggcccagtttgtgcatgaggtgaagaagagcccctttggcaaggatgttcggctggtctcccttggctcccggcaggtaaacagtagccagtatttccaccaggggccatcctgctcctttcgccacaactttgtcctgctcgtccaggccttgggagacgctgggtctgtgacaggctgaaccgtgtgaggagcagccccctccctgacctggccggcccagcactggaaggcaaaggagaggtggcggggcaggtccacatgtgttggtaggatgtcatttagctggcaccatctttttgcctctttctttctcctttgctgcagaacctttgtgtaaatgaagacgtgaaaagcctaggttctgtgcagcttatcaacgaccgctgcgtggacatgcagagaagcaggcacgcggtagccactgggaccgtggtgtagccgcaggtggtctggagagagtgaggcaggggtggcagtgactgaagaccattaagtgtctttcatagaaagaatggcagaggagaccccagttccttcctgagtcccctctccttgggaaaaagtgttcctactctctgggtcagtgtctggtccgaatccttggcttggagatgattttacgggctctttctggagaacagaagtaaaaccttacagtgttccgatgagaccacagtaggcagtacttgggagggtcttatagaccccaccccacggaagtgggtctcaacattacacaaccccctcttgggcccgtggacagttgctgtcctctctgttttctctctttgtgcctgtgccaccctcagagaagaagaaaggagctgaggaggagaagccaaagaggaggaggcaggagaagcaggcagcctgccccttctacaaccacgagcagatgggccttctccgggatgaggccctggcagaggtgaaggacatggagcagctgctggcccttgggaaggaggcccgggcctgtccctattacgggagccgccttgccatccctgcagcccagctggtggtgctgccctatcagatgctgctgcatgcggccactcggcaggccgcgggcatccggctgcaggaccaggtggtgatcatcgacgaggcgcacaacctgatcgacaccatcacgggcatgcacagcgtggaggtcagcggctcccagctctgccaggcccattcccagctgctgcagtacgtggagcgatacgggaagcgtttgaaggccaagaacctgatgtacctgaagcagatcctgtatttgctggagaaattcgtggctgtgctaggggggaacattaagcaaaatcccaatacacagagtctgtcacagacagggacggagctgaagaccatcaacgactttctcttccagagccagatcgacaacatcaacctgttcaaggtgcagcgatactgtgagaagagcatgatcagcagaaagctctttggattcactgaacggtacggagcagtgttctcatcccgggagcagcccaaactggctgggtttcagcaattcctgcagagcctgcagcccaggacgactgaagctcttgcagcccctgcagacgagagtcaggccagcaccctgcgaccagcttctccactgatgcacatcgaaggcttcctggcagctctcactacggccaaccaggacggcagggtcatcctgagccgccaaggcagcctcagtcagagcaccctgaagtttttgctcctgaatccagctgtgcactttgcccaagtggtgaaggaatgccgggcagtggtcattgcggggggtaccatgcagccggtgtctgacttccggcagcagctgctggcctgtgccggggtggaagctgagcgcgtggtggagttttcctgtggtcacgtgatccctccagacaacatcctgccccttgtcatctgcagcgggatctccaaccagccgctggaattcacgttccagaaaagagagctgcctcagatgatggacgaggtgggtcgcattctctgtaacctgtgcggtgtggttcctggaggggtggtctgtttcttcccctcctacgagtacctgcgccaggtccatgcccactgggagaagggtggcctgctgggccgtctggctgccaggaagaagatattccaggaacctaagagcgcacaccaggtggagcaggtgctgctggcatattccaggtgcatccaggcctgtggccaggagagaggccaggtgacaggggccctgctcctctctgtggttggaggaaagatgagtgaagggatcaacttctctgacaacctaggccggtgtgtggtgatggtgggcatgcccttccccaacatcaggtctgcagagctgcaggagaagatggcctacttggatcaaaccctccccagagcccccggccaggcacccccagggaaggctctggtggagaacctgtgcatgaaggccgtcaaccagtccataggcagggccatcaggcaccagaaggattttgccagcatagtgctcctggaccagcgatatgcccggccccctgtcctggccaagctgccggcctggatccgagcccgtgtggaggtcaaagctacctttggccccgccattgctgctgtgcagaagtttcaccgggagaagtcggcctcttcctgatgggcaaccacaccactgcctggcgccgtgcccttcctttgtcctgcccgctggagacagtgtttgtcgtgggcgtggtctgcggggatcctgttacaaaggtgaaacccaggaggagagtgtggagtccagagtgctgccaggacccaggcacaggcgttagctcccgtaggagaaaatgggggaatcctgaatgaacagtgggtcctggctgtccttggggcgttccagggcagctcccctcctggaatagaatctttctttccatcctgcatggctgagagccaggcttccttcctggtctccgcaggaggctgtggcagctgtggcatccactgtggcatctccgtcctgcccaccttcttaagaggcgagatggagcaggcccatctgcctctgccctttctagccaaggttatagctgccctggactgctcactctctggtctcaatttaaaatgatccatggccacagggctcctgcccaggggcttgtcaccttcccctcctccttcctgagtcactccttcagtagaaggccctgctccctatcctgccccacagccctgcctggatttgtatccttggcttcgtgccagttcctccaagtctatggcacctccctccctctcaaccacttgagcaaactccaagacaccttctaccccaacaccagcaattatgccaagggccgttaggctctcaacatgactatagagaccccgtgtcatcacggagacctttgttcctgtgggaaaatatccctcccacctgcaacagctgcccctgctgactgcgcctgtcttctccctctgaccccagagaaaggggctgtggtcagctgggatcttctgccaccatcagggacaaacgggggcaggaggaaagtcactgatgcccagatgtttgcatcctgcacagctacaggtccttaaataaaagtgtgctgttggtt

SEQ ID NO: 355213 - DNA, 2233 bp, Homo sapiens
  misc_feature (5)..(5): n is a, c, g, or t
  misc_feature (12)..(12): n is a, c, g, or t
  misc_feature (39)..(39): n is a, c, g, or t
ccggnccttatnccacgatcccaacatcaacctgtcaangtgcagcgatactgtgagaagagcatgatcagcagaaagctctttggattcactgaacggtacggagcagtgttctcatcccgggagcagcccaaactggctgggtttcagcaattcctgcagagcctgcagcccaggacgactgaagctcttgcagcccctgcagacgagagtcaggccagcaccctgcgaccagcttctccactgatgcacatcgaaggcttcctggcagctctcactacggccaaccaggacggcagggtcatcctgagccgccaaggcagcctcagtcagagcaccctgaagtttttgctcctgaatccagctgtgcactttgcccaagtggtgaaggaatgccgggcagtggtcattgcggggggtaccatgcagccggtgtctgacttccggcagcagctgctggcctgtgccggggtggaagctgagcgcgtggtggagttttcctgtggtcacgtgatccctccagacaacatcctgccccttgtcatctgcagcgggatctccaaccagccgctggaattcacgttccagaaaagagagctgcctcagatgatggacgaggtgggtcgcattctctgtaacctgtgcggtgtggttcctggaggggtggtctgtttcttcccctcctacgagtacctgcgccaggtccatgcccactgggagaagggtggcctgctgggccgtctggctgccaggaagaagatattccaggaacctaagagcgcacaccaggtggagcaggtgctgctggcatattccaggtgcatccaggcctgtggccaggagagaggccaggtgacaggggccctgctcctctctgtggttggaggaaagatgagtgaagggatcaacttctctgacaacctaggccggtgtgtggtgatggtgggcatgcccttccccaacatcaggtctgcagagctgcaggagaagatggcctacttggatcaaaccctccccagagcccccggccaggcacccccagggaaggctctggtggagaacctgtgcatgaaggccgtcaaccagtccataggcagggccatcaggcaccagaaggattttgccagcatagtgctcctggaccagcgatatgcccggccccctgtcctggccaagctgccggcctggatccgagcccgtgtggaggtcaaagctacctttggccccgccattgctgctgtgcagaagtttcaccgggagaagtcggcctcttcctgatgggcaaccacaccactgcctggcgccgtgcccttcctttgtcctgcccgctggagacagtgtttgtcgtgggcgtggtctgcggggatcctgttacaaaggtgaaacccaggaggagagtgtggagtccagagtgctgccaggacccaggcacaggcgttagctcccgtaggagaaaatgggggaatcctgaatgaacagtgggtcctggctgtccttggggcgttccagggcagctcccctcctggaatagaatctttctttccatcctgcatggctgagagccaggcttccttcctggtctccgcaggaggctgtggcagctgtggcatccactgtggcatctccgtcctgcccaccttcttaagaggcgagatggagcaggcccatctgcctctgccctttctagccaaggttatagctgccctggactgctcactctctggtctcaatttaaaatgatccatggccacagggctcctgcccaggggcttgtcaccttcccctcctccttcctgagtcactccttcagtagaaggccctgctccctatcctgccccacagccctgcctggatttgtatccttggcttcgtgccagttcctccaagtctatggcacctccctccctctcaaccacttgagcaaactccaagacaccttctaccccaacaccagcaattatgccaagggccgttaggctctcaacatgactatagagaccccgtgtcatcacggagacctttgttcctgtgggaaaatatccctcccacctgcaacagctgcccctgctgactgcgcctgtcttctccctctgaccccagagaaaggggctgtggtcagctgggatcttctgccaccatcagggacaaacgggggcaggaggaaagtcactgatgcccagatgtttgcatcctgcacagctacaggtccttaaataaaagtgtgctgttggtt

SEQ ID NO: 355214 - DNA, 2630 bp, Homo sapiens
agcgggttgttccggctgcctttcactgaggggacccgccagtttctaactcagtggcgtttgccctgattcccggggcctggctttcagcgtagcaattctgccggcgaagaaggaagacttcatggcagagctgtaccgggttttggaggctggcaagattgggatatttgagagtccaactggcactgggaagtccttaagtcttatttgtggggccctctcttggctccgtgactttgaacagaagaagcgtgaagaagaggcacgactccttgaaactggaactggccccttacatgatgagaaagatgaatccctgtgtctgtcttcttcctgcgaaggggctgcaggcaccccgaggcctgctggagaaccggcctgggttactcagtttgtgcagaagaaagaagagagggacctggtggaccgactaaaggcggagcaggccaggaggaagcagcgagaagaacgcctgcagcagctgcagcacagggtgcagctcaagtatgcagccaagcgcctgaggcaggaagaagaagaaagagagaatctcctccgcctcagcagggagatgctagagacaggcccggaggctgagcggctggagcagctggagtctggggaggaggagctggtcctcgccgaatacgagagtgatgaggagaaaaaggtggcgagcagagtggatgaggatgaggatgacctggaggaagaacacataactaagatttattactgtagtcggacacactcccagctggcccagtttgtgcatgaggtgaaggaatgccgggcagtggtcattgcggggggtaccatgcagccggtgtctgacttccggcagcagctgctggcctgtgccggggtggaagctgagcgcgtggtggagttttcctgtggtcacgtgatccctccagacaacatcctgccccttgtcatctgcagcgggatctccaaccagccgctggaattcacgttccagaaaagagagctgcctcagatgatggacgaggtgggtcgcattctctgtaacctgtgcggtgtggttcctggaggggtggtctgtttcttcccctcctacgagtacctgcgccaggtccatgcccactgggagaagggtggcctgctgggccgtctggctgccaggaagaagatattccaggaacctaagagcgcacaccaggtggagcaggtgctgctggcatattccaggtgcatccaggcctgtggccaggagagaggccaggtgacaggggccctgctcctctctgtggttggaggaaagatgagtgaagggatcaacttctctgacaacctaggccggtgtgtggtgatggtgggcatgcccttccccaacatcaggtctgcagagctgcaggagaagatggcctacttggatcaaaccctccccagagcccccggccaggcacccccagggaaggctctggtggagaacctgtgcatgaaggccgtcaaccagtccataggcagggccatcaggcaccagaaggattttgccagcatagtgctcctggaccagcgatatgcccggccccctgtcctggccaagctgccggcctggatccgagcccgtgtggaggtcaaagctacctttggccccgccattgctgctgtgcagaagtttcaccgggagaagtcggcctcttcctgatgggcaaccacaccactgcctggcgccgtgcccttcctttgtcctgcccgctggagacagtgtttgtcgtgggcgtggtctgcggggatcctgttacaaaggtgaaacccaggaggagagtgtggagtccagagtgctgccaggacccaggcacaggcgttagctcccgtaggagaaaatgggggaatcctgaatgaacagtgggtcctggctgtccttggggcgttccagggcagctcccctcctggaatagaatctttctttccatcctgcatggctgagagccaggcttccttcctggtctccgcaggaggctgtggcagctgtggcatccactgtggcatctccgtcctgcccaccttcttaagaggcgagatggagcaggcccatctgcctctgccctttctagccaaggttatagctgccctggactgctcactctctggtctcaatttaaaatgatccatggccacagggctcctgcccaggggcttgtcaccttcccctcctccttcctgagtcactccttcagtagaaggccctgctccctatcctgccccacagccctgcctggatttgtatccttggcttcgtgccagttcctccaagtctatggcacctccctccctctcaaccacttgagcaaactccaagacaccttctaccccaacaccagcaattatgccaagggccgttaggctctcaacatgactatagagaccccgtgtcatcacggagacctttgttcctgtgggaaaatatccctcccacctgcaacagctgcccctgctgactgcgcctgtcttctccctctgaccccagagaaaggggctgtggtcagctgggatcttctgccaccatcagggacaaacgggggcaggaggaaagtcactgatgcccagatgtttgcatcctgcacagctacaggtccttaaataaaagtgtgctgttggtt

SEQ ID NO: 355215 - DNA, 2635 bp, Homo sapiens
agcgggttgttccggctgcctttcactgaggggacccgccagtttctaactcagtggcgtttgccctgattcccggggcctggctttcagcgtagcaattctgccggcgaagaaggtgagcgcagtgctgtgtggcagcagagctccttaggacgaggagcagcgggacgaggaagggcagactggtgaaatcgcaaactgggcgtctgttccggcgccggacccctatttgcaaaggtccatggctaatgaaacacagaaggttggtgccatccattttccttttcccttcacaccctattccatccaggaagacttcatggcagagctgtaccgggttttggaggctggcaagattgggatatttgagagtccaactggcactgggaagtccttaagtcttatttgtggggccctctcttggctccgtgactttgaacagaagaagcgtgaagaagaggcacgactccttgaaactggaactggccccttacatgatgagaaagatgaatccctgtgtctgtcttcttcctgcgaaggggctgcaggcaccccgaggcctgctggagaaccggcctgggttactcagtttgtgcagaagaaagaagagagggacctggtggaccgactaaaggcggagcaggccaggaggaagcagcgagaagaacgcctgcagcagctgcagcacagggtgcagctcaagtatgcagccaagcgcctgaggcaggaagaagaagaaagagagaatctcctccgcctcagcagggagatgctagagacaggcccggaggctgagcggctggagcagctggagtctggggaggaggagctggtcctcgccgaatacgagagtgatgaggagaaaaaggtggcgagcagagtggatgaggatgaggatgacctggaggaagaacacataactaagatttattactgtagtcggacacactcccagctggcccagtttgtgcatgaggtgaagaagagcccctttggcaaggatgttcggctggtctcccttggctcccggcagaacctttgtgtaaatgaagacgtgaaaagcctaggttctgtgcagcttatcaacgaccgctgcgtggacatgcagagaagcaggcacgagaagaagaaaggagctgaggaggagaagccaaagaggaggaggcaggagaagcaggcagcctgccccttctacaaccacgagcagatgggccttctccgggatgaggccctggcagaggtgaaggacatggagcagctgctggcccttgggaaggaggcccgggcctgtccctattacgggagccgccttgccatccctgcagcccagctggtggtgctgccctatcagatgctgctgcatgcggccactcggcaggccgcgggcatccggctgcaggaccaggtggtgatcatcgacgaggcgcacaacctgatcgacaccatcacgggcatgcacagcgtggaggtcagcggctcccagctctgccaggcccattcccagctgctgcagtacgtggagcgatacgggaagcgtttgaaggccaagaacctgatgtacctgaagcagatcctgtatttgctggagaaattcgtggctgtgctaggggggaacattaagcaaaatcccaatacacagagtctgtcacagacagggacggagctgaagaccatcaacgactttctcttccagagccagatcgacaacatcaacctgttcaaggtgcagcgatactgtgagaagagcatgatcagcagaaagctctttggattcactgaacggtacggagcagtgttctcatcccgggagcagcccaaactggctgggtttcagcaattcctgcagagcctgcagcccaggacgactgaagctcttgcagcccctgcagacgagagtcaggccagcaccctgcgaccagcttctccactgatgcacatcgaaggcttcctggcagctctcactacggccaaccaggacggcagggtcatcctgagccgccaaggcagcctcagtcagagcaccctgaagtttttgctcctgaatccagctgtgcactttgcccaagtggtgaaggaatgccgggcagtggtcattgcggggggtaccatgcagccggtgtctgacttccggcagcagctgctggcctgtgccggggtggaagctgagcgcgtggtggagttttcctgtggtcacgtgatccctccagacaacatcctgccccttgtcatctgcagcgggatctccaaccagccgctggaattcacgttccagaaaagagagctgcctcagatgatggacgaggtgggtcgcattctctgtaacctgtgcggtgtggttcctggaggggtggtctgtttcttcccctcctacgagtacctgcgccaggtccatgcccactgggagaagggtggcctgctgggccgtctggctgccaggaagaaggtgagtggcctgtcggcagccttcccacttgtgaggacagtgccactgagtcctcctgggagctctcgtgctcatcgggtcaggacaggcttctggctcctcatccccaccgctcccagtccctgactacagaggatttcccccaaagtccctggctgtgaggttctccagtcccctggccagaaaacacaa

SEQ ID NO: 355216 - DNA, 1152 bp, Homo sapiens
ctaggccccgccccctgacccgcaccttcccgccgcccctccccggttccatttcattgttggattgtggcgcttcactcctgctggcggccggcagggggcggagttcgagcctggatttttttcctcggggcctcccccgggaggccgtcccggcgtgggggaggggaggacggggcgggaggacgcggttcggtcggctgcagcgctacttttggtccggggtcggcagggaggccgcggctaccgcatcacagctgacgtgaggactacgtggggccgctgccggctccgggttgctgggcggcggcgccgctgctgagcggcggtcgggctcgccgtctccacctcctcgcgtccgtaatcagtgacgaggtccgctacgtaaatccctttgcggcggacaaatgaccatggaaacagttgaatcccagcatgatggaagtataacagcttctttgacagagagcaagtctgctcatgtgcagactcagactggccaaaattcaatccctgctttagctcaggtagcagcaattgcagagacagatgaatctgcagaatcagaaggtgtaattgattctcataaacgtagagaaatcctttcacgaagaccctcttataggaaaatactgaatgaactgtcctctgatgtgcctggtgttcccaagattgaagaagagagatcagaggaagaaggaacaccacctagtattgctaccatggcagtaccaactagcatatatcagactagcacggggcaatacattgctatagcccaaggtggaacaatccagatttctaacccaggatctgatggtgttcagggactgcaggcattaacaatgacaaattcaggagctcctccaccaggtgctacaattgtacagtacgcagcacaatcagctgatggcacacagcagttctttgtcccaggcagccaggttgttgttcaagctgccactggtgacatgccaacttaccagatccgagctcctactgctgctttgccacagggagtggtgatggctgcatcgcccggaagtttgcacagtccccagcagctggcagaagaagcaacacgcaaacgagagctgaggctaatgaaaaacagggaaggtgtccagggaatgtcacgtctaggacactttt

SEQ ID NO: 355217 - DNA, 797 bp, Homo sapiens
ctaggccccgccccctgacccgcaccttcccgccgcccctccccggttccatttcattgttggattgtggcgcttcactcctgctggcggccggcagggggcggagttcgagcctggatttttttcctcggggcctcccccgggaggccgtcccggcgtgggggaggggaggacggggcgggaggacgcggttcggtcggctgcagcgctacttttggtccggggtcggcagggaggccgcggctaccgcatcacagctgacgtgaggactacgtggggccgctgccggctccgggttgctgggcggcggcgccgctgctgagcggcggtcgggctcgccgtctccacctcctcgcgtccgtaatcagtgacgaggtccgctacgtaaatccctttgcggcgggataaataaagaaaacaggaaaggaggaaagcattgattacaaatgtcttaacaatgagcaaatgtgcaaggaaaaaatatattaagacaaatccaagacaaatgaccatggaaacagttgaatcccagcatgatggaagtataacagcttctttgacagagagcaagtctgctcatgtgcagactcagactggccaaaattcaatccctgctttagctcaggtaggcaataggcaggcaccgttgaaagtcaaaatatatggaaatgagaattaggtgcagattctgttttcttgccattgatcttaaattttccatgttccctggttatcagccattcttgcttatttgattgtgaagaaaagatacgtgttgtaattagccttgcatttta

SEQ ID NO: 355218 - DNA, 839 bp, Homo sapiens
ctaggccccgccccctgacccgcaccttcccgccgcccctccccggttccatttcattgttggattgtggcgcttcactcctgctggcggccggcagggggcggagttcgagcctggatttttttcctcggggcctcccccgggaggccgtcccggcgtgggggaggggaggacggggcgggaggacgcggttcggtcggctgcagcgctacttttggtccggggtcggcagggaggccgcggctaccgcatcacagctgacgtgaggactacgtggggccgctgccggctccgggttgctgggcggcggcgccgctgctgagcggcggtcgggctcgccgtctccacctcctcgcgtccgtaatcagtgacgaggtccgctacgtaaatccctttgcggcgggtagcagcaattgcagagacagatgaatctgcagaatcagaaggtgtaattgattctcataaacgtagagaaatcctttcacgaagaccctcttataggaaaatactgaatgaactgtcctctgatgtgcctggtgttcccaagattgaagaagagagatcagaggaagaaggaacaccacctagtattgctaccatggcagtaccaactagcatatatcagactagcacggggcaatacactgccactggtgacatgccaacttaccagatccgagctcctactgctgctttgccacagggagtggtgatggctgcatcgcccggaagtttgcacagtccccagcagctggcagaagaagcaacacgcaaacgagagctgaggctaatgaaaaacagggaaggtgtccagggaatgtcacgtctaggacactttt

SEQ ID NO: 355219 - DNA, 2822 bp, Homo sapiens
ctaggccccgccccctgacccgcaccttcccgccgcccctccccggttccatttcattgttggattgtggcgcttcactcctgctggcggccggcagggggcggagttcgagcctggatttttttcctcggggcctcccccgggaggccgtcccggcgtgggggaggggaggacggggcgggaggacgcggttcggtcggctgcagcgctacttttggtccggggtcggcagggaggccgcggctaccgcatcacagctgacgtgaggactacgtggggccgctgccggctccgggttgctgggcggcggcgccgctgctgagcggcggtcgggctcgccgtctccacctcctcgcgtccgtaatcagtgacgaggtccgctacgtaaatccctttgcggcggacaaatgaccatggaaacagttgaatcccagcatgatggaagtataacagcttctttgacagagagcaagtctgctcatgtgcagactcagactggccaaaattcaatccctgctttagctcaggtagcagcaattgcagagacagatgaatctgcagaatcagaaggtgtaattgattctcataaacgtagagaaatcctttcacgaagaccctcttataggaaaatactgaatgaactgtcctctgatgtgcctggtgttcccaagattgaagaagagagatcagaggaagaaggaacaccacctagtattgctaccatggcagtaccaactagcatatatcagactagcacggggcaatacattgctatagcccaaggtggaacaatccagatttctaacccaggatctgatggtgttcagggactgcaggcattaacaatgacaaattcaggagctcctccaccaggtgctacaattgtacagtacgcagcacaatcagctgatggcacacagcagttctttgtcccaggcagccaggttgttgttcaagctgccactggtgacatgccaacttaccagatccgagctcctactgctgctttgccacagggagtggtgatggctgcatcgcccggaagtttgcacagtccccagcagctggcagaagaagcaacacgcaaacgagagctgaggctaatgaaaaacagggaagctgcccgggagtgtcgcaggaagaagaaagaatatgtcaaatgtcttgaaaatcgtgtggctgtgcttgaaaaccaaaacaagactctcattgaggaactcaaggccctcaaagatctttattgccataaagtagagtaactgtctttgacttggaccttgtttactctaatcaaggcaggagatgcagcagtcctacttattgccatgtggacttgtgggaaggacacgtgtgacccttaagaatccagtttggattagtgtttgaaattgaattgggaatgttgttccaggatgtggaatgcagccgtgatcacacttaccgagcttactttgatctgtttgtcaatagcatgcaaaaaatgctttgtttgccctttgcttctgctttttttcagggaagctgccaaagaatgtcgacgtcgaaagaaagaatatgtaaaatgtctggagagccgagttgcagtgctggaagtccagaacaagaagcttatagaggaacttgaaaccttgaaagacatttgttctcccaaaacagattactagaaatatttaactatgaactgaaggcagcatgtatagttgcttttgaaggaatacaatatatagctggcaagaatggtggcttcttttctttgtatcattcatcttcttctttaatcacttaacattcctaaaatgcttcactgtacgtagttaagtcgtagctataacttcaaattttttaaaagagacaaactgtaaaaaatgtgtgtattcttaaaatgcaatatttgtaaggcttgttccaatgccacatacttgcagctcccattctatgtgtcatcaatagtgtcctatgcaataaaattatttgcaggtctttaaatcattttaggaaaggatgatcaaaaataatgcatccagcagtacaataaaagtaaaccacaaaaaaatacctcaggaaagaatagaaagaaagtctatctaatgacatgcctatatgagaagaatagcctagatatgaatatatggcatttgcagatttttatattagttgctttgttaaaaaaaaaaagattgtattgctgtccttgaatgccatagtcaaagagagtttttaatagaaccatgttggttgcactttgtagtgtttggtgctcatttaaatatctgaacatttactacagtttttaactctactgtgtaatataaaagatcttgcagaagttcttagtgttggtttaatattacctaatgaaagtgatgacatattttttatatctggaatgagcctgttgggatcgcattgcataccttcggggtacaagtcagtttctacactgggtgctgatccttgcacgcgccctttctaccatctcacggtggggatggccgcagggctgtgcacccagaagaagatggctgttagcgtttcggccttcataatggcctgagactttctttctgtaggtggtctggagctgtccggctggtggccccctattttgccatttagcgaacaaccacaggaattttaaaaacaaaaacatcccaagattttttcatttcaaaatgcttcaaagtccacattagatcagatactccgctgtcggcacattcagctgaggttcattacaatcgagactgcaatgtgatctatgtttcatcttgtttttataataaaaagcttcagggaacaagcccaaagccctcaccacagga

SEQ ID NO: 355220 - DNA, 2633 bp, Homo sapiens
ctaggccccgccccctgacccgcaccttcccgccgcccctccccggttccatttcattgttggattgtggcgcttcactcctgctggcggccggcagggggcggagttcgagcctggatttttttcctcggggcctcccccgggaggccgtcccggcgtgggggaggggaggacggggcgggaggacgcggttcggtcggctgcagcgctacttttggtccggggtcggcagggaggccgcggctaccgcatcacagctgacgtgaggactacgtggggccgctgccggctccgggttgctgggcggcggcgccgctgctgagcggcggtcgggctcgccgtctccacctcctcgcgtccgtaatcagtgacgaggtccgctacgtaaatccctttgcggcggacaaatgaccatggaaacagttgaatcccagcatgatggaagtataacagcttctttgacagagagcaagtctgctcatgtgcagactcagactggccaaaattcaatccctgctttagctcaggtagcagcaattgcagagacagatgaatctgcagaatcagaaggtgtaattgattctcataaacgtagagaaatcctttcacgaagaccctcttataggaaaatactgaatgaactgtcctctgatgtgcctggtgttcccaagattgaagaagagagatcagaggaagaaggaacaccacctagtattgctaccatggcagtaccaactagcatatatcagactagcacggggcaatacactgccactggtgacatgccaacttaccagatccgagctcctactgctgctttgccacagggagtggtgatggctgcatcgcccggaagtttgcacagtccccagcagctggcagaagaagcaacacgcaaacgagagctgaggctaatgaaaaacagggaagctgcccgggagtgtcgcaggaagaagaaagaatatgtcaaatgtcttgaaaatcgtgtggctgtgcttgaaaaccaaaacaagactctcattgaggaactcaaggccctcaaagatctttattgccataaagtagagtaactgtctttgacttggaccttgtttactctaatcaaggcaggagatgcagcagtcctacttattgccatgtggacttgtgggaaggacacgtgtgacccttaagaatccagtttggattagtgtttgaaattgaattgggaatgttgttccaggatgtggaatgcagccgtgatcacacttaccgagcttactttgatctgtttgtcaatagcatgcaaaaaatgctttgtttgccctttgcttctgctttttttcagggaagctgccaaagaatgtcgacgtcgaaagaaagaatatgtaaaatgtctggagagccgagttgcagtgctggaagtccagaacaagaagcttatagaggaacttgaaaccttgaaagacatttgttctcccaaaacagattactagaaatatttaactatgaactgaaggcagcatgtatagttgcttttgaaggaatacaatatatagctggcaagaatggtggcttcttttctttgtatcattcatcttcttctttaatcacttaacattcctaaaatgcttcactgtacgtagttaagtcgtagctataacttcaaattttttaaaagagacaaactgtaaaaaatgtgtgtattcttaaaatgcaatatttgtaaggcttgttccaatgccacatacttgcagctcccattctatgtgtcatcaatagtgtcctatgcaataaaattatttgcaggtctttaaatcattttaggaaaggatgatcaaaaataatgcatccagcagtacaataaaagtaaaccacaaaaaaatacctcaggaaagaatagaaagaaagtctatctaatgacatgcctatatgagaagaatagcctagatatgaatatatggcatttgcagatttttatattagttgctttgttaaaaaaaaaaagattgtattgctgtccttgaatgccatagtcaaagagagtttttaatagaaccatgttggttgcactttgtagtgtttggtgctcatttaaatatctgaacatttactacagtttttaactctactgtgtaatataaaagatcttgcagaagttcttagtgttggtttaatattacctaatgaaagtgatgacatattttttatatctggaatgagcctgttgggatcgcattgcataccttcggggtacaagtcagtttctacactgggtgctgatccttgcacgcgccctttctaccatctcacggtggggatggccgcagggctgtgcacccagaagaagatggctgttagcgtttcggccttcataatggcctgagactttctttctgtaggtggtctggagctgtccggctggtggccccctattttgccatttagcgaacaaccacaggaattttaaaaacaaaaacatcccaagattttttcatttcaaaatgcttcaaagtccacattagatcagatactccgctgtcggcacattcagctgaggttcattacaatcgagactgcaatgtgatctatgtttcatcttgtttttataataaaaagcttcagggaacaagcccaaagccctcaccacagga

SEQ ID NO: 355221 - DNA, 2565 bp, Homo sapiens
agcggagctacgggtcagagctagtccactaggtgctaatcaaatgctgtgttacaacactgtgaggttttcccagttataagtgtcactattagggttttttttaattgcaaagccaaataaggctgtcaattgcatcatcttaccttatttcttcagattaagtactgtttatagtgggatttttggtggatgtggtggcatcagcataatctatgtttcaggcgtcctatagaagaggattattcttcaggggatgtggaagaaaaggtagcagcaattgcagagacagatgaatctgcagaatcagaaggtgtaattgattctcataaacgtagagaaatcctttcacgaagaccctcttataggaaaatactgaatgaactgtcctctgatgtgcctggtgttcccaagattgaagaagagagatcagaggaagaaggaacaccacctagtattgctaccatggcagtaccaactagcatatatcagactagcacggggcaatacattgctatagcccaaggtggaacaatccagatttctaacccaggatctgatggtgttcagggactgcaggcattaacaatgacaaattcaggagctcctccaccaggtgctacaattgtacagtacgcagcacaatcagctgatggcacacagcagttctttgtcccaggcagccaggttgttgttcaagctgccactggtgacatgccaacttaccagatccgagctcctactgctgctttgccacagggagtggtgatggctgcatcgcccggaagtttgcacagtccccagcagctggcagaagaagcaacacgcaaacgagagctgaggctaatgaaaaacagggaagctgcccgggagtgtcgcaggaagaagaaagaatatgtcaaatgtcttgaaaatcgtgtggctgtgcttgaaaaccaaaacaagactctcattgaggaactcaaggccctcaaagatctttattgccataaagtagagtaactgtctttgacttggaccttgtttactctaatcaaggcaggagatgcagcagtcctacttattgccatgtggacttgtgggaaggacacgtgtgacccttaagaatccagtttggattagtgtttgaaattgaattgggaatgttgttccaggatgtggaatgcagccgtgatcacacttaccgagcttactttgatctgtttgtcaatagcatgcaaaaaatgctttgtttgccctttgcttctgctttttttcagggaagctgccaaagaatgtcgacgtcgaaagaaagaatatgtaaaatgtctggagagccgagttgcagtgctggaagtccagaacaagaagcttatagaggaacttgaaaccttgaaagacatttgttctcccaaaacagattactagaaatatttaactatgaactgaaggcagcatgtatagttgcttttgaaggaatacaatatatagctggcaagaatggtggcttcttttctttgtatcattcatcttcttctttaatcacttaacattcctaaaatgcttcactgtacgtagttaagtcgtagctataacttcaaattttttaaaagagacaaactgtaaaaaatgtgtgtattcttaaaatgcaatatttgtaaggcttgttccaatgccacatacttgcagctcccattctatgtgtcatcaatagtgtcctatgcaataaaattatttgcaggtctttaaatcattttaggaaaggatgatcaaaaataatgcatccagcagtacaataaaagtaaaccacaaaaaaatacctcaggaaagaatagaaagaaagtctatctaatgacatgcctatatgagaagaatagcctagatatgaatatatggcatttgcagatttttatattagttgctttgttaaaaaaaaaaagattgtattgctgtccttgaatgccatagtcaaagagagtttttaatagaaccatgttggttgcactttgtagtgtttggtgctcatttaaatatctgaacatttactacagtttttaactctactgtgtaatataaaagatcttgcagaagttcttagtgttggtttaatattacctaatgaaagtgatgacatattttttatatctggaatgagcctgttgggatcgcattgcataccttcggggtacaagtcagtttctacactgggtgctgatccttgcacgcgccctttctaccatctcacggtggggatggccgcagggctgtgcacccagaagaagatggctgttagcgtttcggccttcataatggcctgagactttctttctgtaggtggtctggagctgtccggctggtggccccctattttgccatttagcgaacaaccacaggaattttaaaaacaaaaacatcccaagattttttcatttcaaaatgcttcaaagtccacattagatcagatactccgctgtcggcacattcagctgaggttcattacaatcgagactgcaatgtgatctatgtttcatcttgtttttataataaaaagcttcagggaacaagcccaaagccctcaccacagga

SEQ ID NO: 355222 - DNA, 2231 bp, Homo sapiens
ctaggccccgccccctgacccgcaccttcccgccgcccctccccggttccatttcattgttggattgtggcgcttcactcctgctggcggccggcagggggcggagttcgagcctggatttttttcctcggggcctcccccgggaggccgtcccggcgtgggggaggggaggacggggcgggaggacgcggttcggtcggctgcagcgctacttttggtccggggtcggcagggaggccgcggctaccgcatcacagctgacgtgaggactacgtggggccgctgccggctccgggttgctgggcggcggcgccgctgctgagcggcggtcgggctcgccgtctccacctcctcgcgtccgtaatcagtgacgaggtccgctacgtaaatccctttgcggcggacaaatgaccatggaaacagttgaatcccagcatgatggaagtataacagcttctttgacagagagcaagtctgctcatgtgcagactcagactggccaaaattcaatccctgctttagctcaggtagcagcaattgcagagacagatgaatctgcagaatcagaaggtgtaattgattctcataaacgtagagaaatcctttcacgaagaccctcttataggaaaatactgaatgaactgtcctctgatgtgcctggtgttcccaagattgaagaagagagatcagaggaagaaggaacaccacctagtattgctaccatggcagtaccaactagcatatatcagactagcacggggcaatacactgccactggtgacatgccaacttaccagatccgagctcctactgctgctttgccacagggagtggtgatggctgcatcgcccggaagtttgcacagtccccagcagctggcagaagaagcaacacgcaaacgagagctgaggctaatgaaaaacagggaagctgccaaagaatgtcgacgtcgaaagaaagaatatgtaaaatgtctggagagccgagttgcagtgctggaagtccagaacaagaagcttatagaggaacttgaaaccttgaaagacatttgttctcccaaaacagattactagaaatatttaactatgaactgaaggcagcatgtatagttgcttttgaaggaatacaatatatagctggcaagaatggtggcttcttttctttgtatcattcatcttcttctttaatcacttaacattcctaaaatgcttcactgtacgtagttaagtcgtagctataacttcaaattttttaaaagagacaaactgtaaaaaatgtgtgtattcttaaaatgcaatatttgtaaggcttgttccaatgccacatacttgcagctcccattctatgtgtcatcaatagtgtcctatgcaataaaattatttgcaggtctttaaatcattttaggaaaggatgatcaaaaataatgcatccagcagtacaataaaagtaaaccacaaaaaaatacctcaggaaagaatagaaagaaagtctatctaatgacatgcctatatgagaagaatagcctagatatgaatatatggcatttgcagatttttatattagttgctttgttaaaaaaaaaaagattgtattgctgtccttgaatgccatagtcaaagagagtttttaatagaaccatgttggttgcactttgtagtgtttggtgctcatttaaatatctgaacatttactacagtttttaactctactgtgtaatataaaagatcttgcagaagttcttagtgttggtttaatattacctaatgaaagtgatgacatattttttatatctggaatgagcctgttgggatcgcattgcataccttcggggtacaagtcagtttctacactgggtgctgatccttgcacgcgccctttctaccatctcacggtggggatggccgcagggctgtgcacccagaagaagatggctgttagcgtttcggccttcataatggcctgagactttctttctgtaggtggtctggagctgtccggctggtggccccctattttgccatttagcgaacaaccacaggaattttaaaaacaaaaacatcccaagattttttcatttcaaaatgcttcaaagtccacattagatcagatactccgctgtcggcacattcagctgaggttcattacaatcgagactgcaatgtgatctatgtttcatcttgtttttataataaaaagcttcagggaacaagcccaaagccctcaccacagga

SEQ ID NO: 355223 - DNA, 2004 bp, Homo sapiens
acatgcttgctaatttggaacactttatgttgaactgtggtagaggaaacaagacagttctgtctgcagaagcccattatggctgtaactggagatgacacagatgaggaaactgaacttgccccaagtcacatggctgctgccactggtgacatgccaacttaccagatccgagctcctactgctgctttgccacagggagtggtgatggctgcatcgcccggaagtttgcacagtccccagcagctggcagaagaagcaacacgcaaacgagagctgaggctaatgaaaaacagggaagctgcccgggagtgtcgcaggaagaagaaagaatatgtcaaatgtcttgaaaatcgtgtggctgtgcttgaaaaccaaaacaagactctcattgaggaactcaaggccctcaaagatctttattgccataaagtagagtaactgtctttgacttggaccttgtttactctaatcaaggcaggagatgcagcagtcctacttattgccatgtggacttgtgggaaggacacgtgtgacccttaagaatccagtttggattagtgtttgaaattgaattgggaatgttgttccaggatgtggaatgcagccgtgatcacacttaccgagcttactttgatctgtttgtcaatagcatgcaaaaaatgctttgtttgccctttgcttctgctttttttcagggaagctgccaaagaatgtcgacgtcgaaagaaagaatatgtaaaatgtctggagagccgagttgcagtgctggaagtccagaacaagaagcttatagaggaacttgaaaccttgaaagacatttgttctcccaaaacagattactagaaatatttaactatgaactgaaggcagcatgtatagttgcttttgaaggaatacaatatatagctggcaagaatggtggcttcttttctttgtatcattcatcttcttctttaatcacttaacattcctaaaatgcttcactgtacgtagttaagtcgtagctataacttcaaattttttaaaagagacaaactgtaaaaaatgtgtgtattcttaaaatgcaatatttgtaaggcttgttccaatgccacatacttgcagctcccattctatgtgtcatcaatagtgtcctatgcaataaaattatttgcaggtctttaaatcattttaggaaaggatgatcaaaaataatgcatccagcagtacaataaaagtaaaccacaaaaaaatacctcaggaaagaatagaaagaaagtctatctaatgacatgcctatatgagaagaatagcctagatatgaatatatggcatttgcagatttttatattagttgctttgttaaaaaaaaaaagattgtattgctgtccttgaatgccatagtcaaagagagtttttaatagaaccatgttggttgcactttgtagtgtttggtgctcatttaaatatctgaacatttactacagtttttaactctactgtgtaatataaaagatcttgcagaagttcttagtgttggtttaatattacctaatgaaagtgatgacatattttttatatctggaatgagcctgttgggatcgcattgcataccttcggggtacaagtcagtttctacactgggtgctgatccttgcacgcgccctttctaccatctcacggtggggatggccgcagggctgtgcacccagaagaagatggctgttagcgtttcggccttcataatggcctgagactttctttctgtaggtggtctggagctgtccggctggtggccccctattttgccatttagcgaacaaccacaggaattttaaaaacaaaaacatcccaagattttttcatttcaaaatgcttcaaagtccacattagatcagatactccgctgtcggcacattcagctgaggttcattacaatcgagactgcaatgtgatctatgtttcatcttgtttttataataaaaagcttcagggaacaagcccaaagccctcaccacagga

SEQ ID NO: 355224 - DNA, 2066 bp, Homo sapiens
tttgtaaaatgctgctgacagatttagagttaactagctcaccactgcctctgcctccaagctgccttttagactgaatagcttttcttgttagccctactttaacatttcttttgaagtggttgtctgcttgaagagggaaacacgtcatgaaactgtaatgcatgaacagaactcaggagttgtctggccagcttagtgctgccactggtgacatgccaacttaccagatccgagctcctactgctgctttgccacagggagtggtgatggctgcatcgcccggaagtttgcacagtccccagcagctggcagaagaagcaacacgcaaacgagagctgaggctaatgaaaaacagggaagctgcccgggagtgtcgcaggaagaagaaagaatatgtcaaatgtcttgaaaatcgtgtggctgtgcttgaaaaccaaaacaagactctcattgaggaactcaaggccctcaaagatctttattgccataaagtagagtaactgtctttgacttggaccttgtttactctaatcaaggcaggagatgcagcagtcctacttattgccatgtggacttgtgggaaggacacgtgtgacccttaagaatccagtttggattagtgtttgaaattgaattgggaatgttgttccaggatgtggaatgcagccgtgatcacacttaccgagcttactttgatctgtttgtcaatagcatgcaaaaaatgctttgtttgccctttgcttctgctttttttcagggaagctgccaaagaatgtcgacgtcgaaagaaagaatatgtaaaatgtctggagagccgagttgcagtgctggaagtccagaacaagaagcttatagaggaacttgaaaccttgaaagacatttgttctcccaaaacagattactagaaatatttaactatgaactgaaggcagcatgtatagttgcttttgaaggaatacaatatatagctggcaagaatggtggcttcttttctttgtatcattcatcttcttctttaatcacttaacattcctaaaatgcttcactgtacgtagttaagtcgtagctataacttcaaattttttaaaagagacaaactgtaaaaaatgtgtgtattcttaaaatgcaatatttgtaaggcttgttccaatgccacatacttgcagctcccattctatgtgtcatcaatagtgtcctatgcaataaaattatttgcaggtctttaaatcattttaggaaaggatgatcaaaaataatgcatccagcagtacaataaaagtaaaccacaaaaaaatacctcaggaaagaatagaaagaaagtctatctaatgacatgcctatatgagaagaatagcctagatatgaatatatggcatttgcagatttttatattagttgctttgttaaaaaaaaaaagattgtattgctgtccttgaatgccatagtcaaagagagtttttaatagaaccatgttggttgcactttgtagtgtttggtgctcatttaaatatctgaacatttactacagtttttaactctactgtgtaatataaaagatcttgcagaagttcttagtgttggtttaatattacctaatgaaagtgatgacatattttttatatctggaatgagcctgttgggatcgcattgcataccttcggggtacaagtcagtttctacactgggtgctgatccttgcacgcgccctttctaccatctcacggtggggatggccgcagggctgtgcacccagaagaagatggctgttagcgtttcggccttcataatggcctgagactttctttctgtaggtggtctggagctgtccggctggtggccccctattttgccatttagcgaacaaccacaggaattttaaaaacaaaaacatcccaagattttttcatttcaaaatgcttcaaagtccacattagatcagatactccgctgtcggcacattcagctgaggttcattacaatcgagactgcaatgtgatctatgtttcatcttgtttttataataaaaagcttcagggaacaagcccaaagccctcaccacagga

SEQ ID NO: 355225 - DNA, 2413 bp, Homo sapiens
agctgggaacattcttagccaccgaagtatgggcaccaaaagcgataaggagcatgtgttccttaataaatgtcacatcagaaaatgactgttccaggacagtaaccacctcccgatggtagcagcaattgcagagacagatgaatctgcagaatcagaaggtgtaattgattctcataaacgtagagaaatcctttcacgaagaccctcttataggaaaatactgaatgaactgtcctctgatgtgcctggtgttcccaagattgaagaagagagatcagaggaagaaggaacaccacctagtattgctaccatggcagtaccaactagcatatatcagactagcacggggcaatacattgctatagcccaaggtggaacaatccagatttctaacccaggatctgatggtgttcagggactgcaggcattaacaatgacaaattcaggagctcctccaccaggtgctacaattgtacagtacgcagcacaatcagctgatggcacacagcagttctttgtcccaggcagccaggttgttgttcaagctgccactggtgacatgccaacttaccagatccgagctcctactgctgctttgccacagggagtggtgatggctgcatcgcccggaagtttgcacagtccccagcagctggcagaagaagcaacacgcaaacgagagctgaggctaatgaaaaacagggaagctgcccgggagtgtcgcaggaagaagaaagaatatgtcaaatgtcttgaaaatcgtgtggctgtgcttgaaaaccaaaacaagactctcattgaggaactcaaggccctcaaagatctttattgccataaagtagagtaactgtctttgacttggaccttgtttactctaatcaaggcaggagatgcagcagtcctacttattgccatgtggacttgtgggaaggacacgtgtgacccttaagaatccagtttggattagtgtttgaaattgaattgggaatgttgttccaggatgtggaatgcagccgtgatcacacttaccgagcttactttgatctgtttgtcaatagcatgcaaaaaatgctttgtttgccctttgcttctgctttttttcagggaagctgccaaagaatgtcgacgtcgaaagaaagaatatgtaaaatgtctggagagccgagttgcagtgctggaagtccagaacaagaagcttatagaggaacttgaaaccttgaaagacatttgttctcccaaaacagattactagaaatatttaactatgaactgaaggcagcatgtatagttgcttttgaaggaatacaatatatagctggcaagaatggtggcttcttttctttgtatcattcatcttcttctttaatcacttaacattcctaaaatgcttcactgtacgtagttaagtcgtagctataacttcaaattttttaaaagagacaaactgtaaaaaatgtgtgtattcttaaaatgcaatatttgtaaggcttgttccaatgccacatacttgcagctcccattctatgtgtcatcaatagtgtcctatgcaataaaattatttgcaggtctttaaatcattttaggaaaggatgatcaaaaataatgcatccagcagtacaataaaagtaaaccacaaaaaaatacctcaggaaagaatagaaagaaagtctatctaatgacatgcctatatgagaagaatagcctagatatgaatatatggcatttgcagatttttatattagttgctttgttaaaaaaaaaaagattgtattgctgtccttgaatgccatagtcaaagagagtttttaatagaaccatgttggttgcactttgtagtgtttggtgctcatttaaatatctgaacatttactacagtttttaactctactgtgtaatataaaagatcttgcagaagttcttagtgttggtttaatattacctaatgaaagtgatgacatattttttatatctggaatgagcctgttgggatcgcattgcataccttcggggtacaagtcagtttctacactgggtgctgatccttgcacgcgccctttctaccatctcacggtggggatggccgcagggctgtgcacccagaagaagatggctgttagcgtttcggccttcataatggcctgagactttctttctgtaggtggtctggagctgtccggctggtggccccctattttgccatttagcgaacaaccacaggaattttaaaaacaaaaacatcccaagattttttcatttcaaaatgcttcaaagtccacattagatcagatactccgctgtcggcacattcagctgaggttcattacaatcgagactgcaatgtgatctatgtttcatcttgtttttataataaaaagcttcagggaacaagcccaaagccctcaccacagga

SEQ ID NO: 355226 - DNA, 2024 bp, Homo sapiens
ctggtacggtcggagttatgggatgcggagccgggtgcggtggagcagcagaggcgccccacgcccgcttcgtgcgctcagctgccccgggacccgcctgcctcctcgcgaacttgggacgagttggaaaatcctccctgagagagccgtgcggctcaggggagcggtttaactcggaaaaggaaaaggaatccagaagataaataaagaaaacaggaaaggaggaaagcattgattacaaatgtcttaacaatgagcaaatgtgcaaggaaaaaatatattaagacaaatccaagacaaatgaccatggaaacagttgaatcccagcatgatggaagtataacagcttctttgacagagagcaagtctgctcatgtgcagactcagactggccaaaattcaatccctgctttagctcagtgcagtgagctgagatcaggcaccagaagaggctccccagctgtaactctagtgcagttaccttcgggccaaactatacatgtccagggagtaattcagacaccacagccatgggttattcagtcatcagaaatacacaccgttcaggtagcagcaattgcagagacagatgaatctgcagaatcagaaggtgtaattgattctcataaacgtagagaaatcctttcacgaagaccctcttataggaaaatactgaatgaactgtcctctgatgtgcctggtgttcccaagattgaagaagagagatcagaggaagaaggaacaccacctagtattgctaccatggcagtaccaactagcatatatcagactagcacggggcaatacattgctatagcccaaggtggaacaatccagatttctaacccaggatctgatggtgttcagggactgcaggcattaacaatgacaaattcaggagctcctccaccaggtgctacaattgtacagtacgcagcacaatcagctgatggcacacagcagttctttgtcccaggcagccaggttgttgttcaagctgccactggtgacatgccaacttaccagatccgagctcctactgctgctttgccacagggagtggtgatggctgcatcgcccggaagtttgcacagtccccagcagctggcagaagaagcaacacgcaaacgagagctgaggctaatgaaaaacagggaagctgcccgggagtgtcgcaggaagaagaaagaatatgtcaaatgtcttgaaaatcgtgtggctgtgcttgaaaaccaaaacaagactctcattgaggaactcaaggccctcaaagatctttattgccataaagtagagtaactgtctttgacttggaccttgtttactctaatcaaggcaggagatgcagcagtcctacttattgccatgtggacttgtgggaaggacacgtgtgacccttaagaatccagtttggattagtgtttgaaattgaattgggaatgttgttccaggatgtggaatgcagccgtgatcacacttaccgagcttactttgatctgtttgtcaatagcatgcaaaaaatgctttgtttgccctttgcttctgctttttttcagggaagctgccaaagaatgtcgacgtcgaaagaaagaatatgtaaaatgtctggagagccgagttgcagtgctggaagtccagaacaagaagcttatagaggaacttgaaaccttgaaagacatttgttctcccaaaacagattactagaaatatttaactatgaactgaaggcagcatgtatagttgcttttgaaggaatacaatatatagctggcaagaatggtggcttcttttctttgtatcattcatcttcttctttaatcacttaacattcctaaaatgcttcactgtacgtagttaagtcgtagctataacttcaaattttttaaaagagacaaactgtaaaaaatgtgtgtattcttaaaatgcaatatttgtaaggcttgttccaatgccacatacttgcagctcccattctatgtgtcatcaatagtgtcctatgcaataaaattatttgcaggtcttta

SEQ ID NO: 355227 - DNA, 2285 bp, Homo sapiens
ctggtacggtcggagttatgggatgcggagccgggtgcggtggagcagcagaggcgccccacgcccgcttcgtgcgctcagctgccccgggacccgcctgcctcctcgcgaacttgggacgagttggaaaatcctccctgagagagccgtgcggctcaggggagcggtttaactcggaaaaggaaaaggaatccagaagataaataaagaaaacaggaaaggaggaaagcattgattacaaatgtcttaacaatgagcaaatgtgcaaggaaaaaatatattaagacaaatccaagacaaatgaccatggaaacagttgaatcccagcatgatggaagtataacagcttctttgacagagagcaagtctgctcatgtgcagactcagactggccaaaattcaatccctgctttagctcagctgccactggtgacatgccaacttaccagatccgagctcctactgctgctttgccacagggagtggtgatggctgcatcgcccggaagtttgcacagtccccagcagctggcagaagaagcaacacgcaaacgagagctgaggctaatgaaaaacagggaagctgcccgggagtgtcgcaggaagaagaaagaatatgtcaaatgtcttgaaaatcgtgtggctgtgcttgaaaaccaaaacaagactctcattgaggaactcaaggccctcaaagatctttattgccataaagtagagtaactgtctttgacttggaccttgtttactctaatcaaggcaggagatgcagcagtcctacttattgccatgtggacttgtgggaaggacacgtgtgacccttaagaatccagtttggattagtgtttgaaattgaattgggaatgttgttccaggatgtggaatgcagccgtgatcacacttaccgagcttactttgatctgtttgtcaatagcatgcaaaaaatgctttgtttgccctttgcttctgctttttttcagggaagctgccaaagaatgtcgacgtcgaaagaaagaatatgtaaaatgtctggagagccgagttgcagtgctggaagtccagaacaagaagcttatagaggaacttgaaaccttgaaagacatttgttctcccaaaacagattactagaaatatttaactatgaactgaaggcagcatgtatagttgcttttgaaggaatacaatatatagctggcaagaatggtggcttcttttctttgtatcattcatcttcttctttaatcacttaacattcctaaaatgcttcactgtacgtagttaagtcgtagctataacttcaaattttttaaaagagacaaactgtaaaaaatgtgtgtattcttaaaatgcaatatttgtaaggcttgttccaatgccacatacttgcagctcccattctatgtgtcatcaatagtgtcctatgcaataaaattatttgcaggtctttaaatcattttaggaaaggatgatcaaaaataatgcatccagcagtacaataaaagtaaaccacaaaaaaatacctcaggaaagaatagaaagaaagtctatctaatgacatgcctatatgagaagaatagcctagatatgaatatatggcatttgcagatttttatattagttgctttgttaaaaaaaaaaagattgtattgctgtccttgaatgccatagtcaaagagagtttttaatagaaccatgttggttgcactttgtagtgtttggtgctcatttaaatatctgaacatttactacagtttttaactctactgtgtaatataaaagatcttgcagaagttcttagtgttggtttaatattacctaatgaaagtgatgacatattttttatatctggaatgagcctgttgggatcgcattgcataccttcggggtacaagtcagtttctacactgggtgctgatccttgcacgcgccctttctaccatctcacggtggggatggccgcagggctgtgcacccagaagaagatggctgttagcgtttcggccttcataatggcctgagactttctttctgtaggtggtctggagctgtccggctggtggccccctattttgccatttagcgaacaaccacaggaattttaaaaacaaaaacatcccaagattttttcatttcaaaatgcttcaaagtccacattagatcagatactccgctgtcggcacattcagctgaggttcattacaatcgagactgcaatgtgatctatgtttcatcttgtttttataataaaaagcttcagggaacaagcccaaagccctcaccacagga

SEQ ID NO: 355228 - DNA, 2506 bp, Homo sapiens
tttgtaaaatgctgctgacagatttagagttaactagctcaccactgcctctgcctccaagctgccttttagactgaatagcttttcttgttagccctactttaacatttcttttgaagtggttgtctgcttgaagagggaaacacgtcatgaaactgtaatgcatgaacagaactcaggagttgtctggccagcttagtggtaagatcgagcctcctactgaggccgtccctgcatgcgcctggtgagaaatggattatgtattgtataagctggcgggttctttactcttactccatcctcttactccatctataggaacttgcgattcagagctcctctagtgttcagtcagggaagtgcttgtcttttacttgttctcccagcctctggtatttaaatttgtaatcggtaatttttcactaggtttgcttttctcagtaacaaagagtgattttggaagacttagttactaataacctttgtgtgcttgcagtgttgtttattcagtggtcttgtttgtaatacagtactgaatttgcagttgaattaagagttttaaacaacttcactacaatttagctcttcgaagttaatgggtctcagccctctttgtggataggaacattggattgtcttgactgccactggtgacatgccaacttaccagatccgagctcctactgctgctttgccacagggagtggtgatggctgcatcgcccggaagtttgcacagtccccagcagctggcagaagaagcaacacgcaaacgagagctgaggctaatgaaaaacagggaagctgcccgggagtgtcgcaggaagaagaaagaatatgtcaaatgtcttgaaaatcgtgtggctgtgcttgaaaaccaaaacaagactctcattgaggaactcaaggccctcaaagatctttattgccataaagtagagtaactgtctttgacttggaccttgtttactctaatcaaggcaggagatgcagcagtcctacttattgccatgtggacttgtgggaaggacacgtgtgacccttaagaatccagtttggattagtgtttgaaattgaattgggaatgttgttccaggatgtggaatgcagccgtgatcacacttaccgagcttactttgatctgtttgtcaatagcatgcaaaaaatgctttgtttgccctttgcttctgctttttttcagggaagctgccaaagaatgtcgacgtcgaaagaaagaatatgtaaaatgtctggagagccgagttgcagtgctggaagtccagaacaagaagcttatagaggaacttgaaaccttgaaagacatttgttctcccaaaacagattactagaaatatttaactatgaactgaaggcagcatgtatagttgcttttgaaggaatacaatatatagctggcaagaatggtggcttcttttctttgtatcattcatcttcttctttaatcacttaacattcctaaaatgcttcactgtacgtagttaagtcgtagctataacttcaaattttttaaaagagacaaactgtaaaaaatgtgtgtattcttaaaatgcaatatttgtaaggcttgttccaatgccacatacttgcagctcccattctatgtgtcatcaatagtgtcctatgcaataaaattatttgcaggtctttaaatcattttaggaaaggatgatcaaaaataatgcatccagcagtacaataaaagtaaaccacaaaaaaatacctcaggaaagaatagaaagaaagtctatctaatgacatgcctatatgagaagaatagcctagatatgaatatatggcatttgcagatttttatattagttgctttgttaaaaaaaaaaagattgtattgctgtccttgaatgccatagtcaaagagagtttttaatagaaccatgttggttgcactttgtagtgtttggtgctcatttaaatatctgaacatttactacagtttttaactctactgtgtaatataaaagatcttgcagaagttcttagtgttggtttaatattacctaatgaaagtgatgacatattttttatatctggaatgagcctgttgggatcgcattgcataccttcggggtacaagtcagtttctacactgggtgctgatccttgcacgcgccctttctaccatctcacggtggggatggccgcagggctgtgcacccagaagaagatggctgttagcgtttcggccttcataatggcctgagactttctttctgtaggtggtctggagctgtccggctggtggccccctattttgccatttagcgaacaaccacaggaattttaaaaacaaaaacatcccaagattttttcatttcaaaatgcttcaaagtccacattagatcagatactccgctgtcggcacattcagctgaggttcattacaatcgagactgcaatgtgatctatgtttcatcttgtttttataataaaaagcttcagggaacaagcccaaagccctcaccacagga

SEQ ID NO: 355229 - DNA, 1816 bp, Homo sapiens
tacctaggatcgattggctgttgagttcggggggcagaagtgcactgacccactgtggattgtgttggaaggctgttcctgtagtcatttgccttgtgttgcttccagggaagctgcccgggagtgtcgcaggaagaagaaagaatatgtcaaatgtcttgaaaatcgtgtggctgtgcttgaaaaccaaaacaagactctcattgaggaactcaaggccctcaaagatctttattgccataaagtagagtaactgtctttgacttggaccttgtttactctaatcaaggcaggagatgcagcagtcctacttattgccatgtggacttgtgggaaggacacgtgtgacccttaagaatccagtttggattagtgtttgaaattgaattgggaatgttgttccaggatgtggaatgcagccgtgatcacacttaccgagcttactttgatctgtttgtcaatagcatgcaaaaaatgctttgtttgccctttgcttctgctttttttcagggaagctgccaaagaatgtcgacgtcgaaagaaagaatatgtaaaatgtctggagagccgagttgcagtgctggaagtccagaacaagaagcttatagaggaacttgaaaccttgaaagacatttgttctcccaaaacagattactagaaatatttaactatgaactgaaggcagcatgtatagttgcttttgaaggaatacaatatatagctggcaagaatggtggcttcttttctttgtatcattcatcttcttctttaatcacttaacattcctaaaatgcttcactgtacgtagttaagtcgtagctataacttcaaattttttaaaagagacaaactgtaaaaaatgtgtgtattcttaaaatgcaatatttgtaaggcttgttccaatgccacatacttgcagctcccattctatgtgtcatcaatagtgtcctatgcaataaaattatttgcaggtctttaaatcattttaggaaaggatgatcaaaaataatgcatccagcagtacaataaaagtaaaccacaaaaaaatacctcaggaaagaatagaaagaaagtctatctaatgacatgcctatatgagaagaatagcctagatatgaatatatggcatttgcagatttttatattagttgctttgttaaaaaaaaaaagattgtattgctgtccttgaatgccatagtcaaagagagtttttaatagaaccatgttggttgcactttgtagtgtttggtgctcatttaaatatctgaacatttactacagtttttaactctactgtgtaatataaaagatcttgcagaagttcttagtgttggtttaatattacctaatgaaagtgatgacatattttttatatctggaatgagcctgttgggatcgcattgcataccttcggggtacaagtcagtttctacactgggtgctgatccttgcacgcgccctttctaccatctcacggtggggatggccgcagggctgtgcacccagaagaagatggctgttagcgtttcggccttcataatggcctgagactttctttctgtaggtggtctggagctgtccggctggtggccccctattttgccatttagcgaacaaccacaggaattttaaaaacaaaaacatcccaagattttttcatttcaaaatgcttcaaagtccacattagatcagatactccgctgtcggcacattcagctgaggttcattacaatcgagactgcaatgtgatctatgtttcatcttgtttttataataaaaagcttcagggaacaagcccaaagccctcaccacagga

SEQ ID NO: 355230 - DNA, 2162 bp, Homo sapiens
ttatttcgttttttttcccccccaccttcctgcgccgccgaaggcccttagtggcagtagcagcaattgcagagacagatgaatctgcagaatcagaaggtgtaattgattctcataaacgtagagaaatcctttcacgaagaccctcttataggaaaatactgaatgaactgtcctctgatgtgcctggtgttcccaagattgaagaagagagatcagaggaagaaggaacaccacctagtattgctaccatggcagtaccaactagcatatatcagactagcacggggcaatacactgccactggtgacatgccaacttaccagatccgagctcctactgctgctttgccacagggagtggtgatggctgcatcgcccggaagtttgcacagtccccagcagctggcagaagaagcaacacgcaaacgagagctgaggctaatgaaaaacagggaagctgcccgggagtgtcgcaggaagaagaaagaatatgtcaaatgtcttgaaaatcgtgtggctgtgcttgaaaaccaaaacaagactctcattgaggaactcaaggccctcaaagatctttattgccataaagtagagtaactgtctttgacttggaccttgtttactctaatcaaggcaggagatgcagcagtcctacttattgccatgtggacttgtgggaaggacacgtgtgacccttaagaatccagtttggattagtgtttgaaattgaattgggaatgttgttccaggatgtggaatgcagccgtgatcacacttaccgagcttactttgatctgtttgtcaatagcatgcaaaaaatgctttgtttgccctttgcttctgctttttttcagggaagctgccaaagaatgtcgacgtcgaaagaaagaatatgtaaaatgtctggagagccgagttgcagtgctggaagtccagaacaagaagcttatagaggaacttgaaaccttgaaagacatttgttctcccaaaacagattactagaaatatttaactatgaactgaaggcagcatgtatagttgcttttgaaggaatacaatatatagctggcaagaatggtggcttcttttctttgtatcattcatcttcttctttaatcacttaacattcctaaaatgcttcactgtacgtagttaagtcgtagctataacttcaaattttttaaaagagacaaactgtaaaaaatgtgtgtattcttaaaatgcaatatttgtaaggcttgttccaatgccacatacttgcagctcccattctatgtgtcatcaatagtgtcctatgcaataaaattatttgcaggtctttaaatcattttaggaaaggatgatcaaaaataatgcatccagcagtacaataaaagtaaaccacaaaaaaatacctcaggaaagaatagaaagaaagtctatctaatgacatgcctatatgagaagaatagcctagatatgaatatatggcatttgcagatttttatattagttgctttgttaaaaaaaaaaagattgtattgctgtccttgaatgccatagtcaaagagagtttttaatagaaccatgttggttgcactttgtagtgtttggtgctcatttaaatatctgaacatttactacagtttttaactctactgtgtaatataaaagatcttgcagaagttcttagtgttggtttaatattacctaatgaaagtgatgacatattttttatatctggaatgagcctgttgggatcgcattgcataccttcggggtacaagtcagtttctacactgggtgctgatccttgcacgcgccctttctaccatctcacggtggggatggccgcagggctgtgcacccagaagaagatggctgttagcgtttcggccttcataatggcctgagactttctttctgtaggtggtctggagctgtccggctggtggccccctattttgccatttagcgaacaaccacaggaattttaaaaacaaaaacatcccaagattttttcatttcaaaatgcttcaaagtccacattagatcagatactccgctgtcggcacattcagctgaggttcattacaatcgagactgcaatgtgatctatgtttcatcttgtttttataataaaaagcttcagggaacaagcccaaagccctcaccacagga

SEQ ID NO: 355231 - DNA, 2026 bp, Homo sapiens
ctggtacggtcggagttatgggatgcggagccgggtgcggtggagcagcagaggcgccccacgcccgcttcgtgcgctcagctgccccgggacccgcctgcctcctcgcgaacttgggacgagttggaaaatcctccctgagagagccgtgcggctcaggggagcggtttaactcggaaaaggaaaaggaatccagaaacaaatgaccatggaaacagttgaatcccagcatgatggaagtataacagcttctttgacagagagcaagtctgctcatgtgcagactcagactggccaaaattcaatccctgctttagctcaggtagcagcaattgcagagacagatgaatctgcagaatcagaaggtgtaattgattctcataaacgtagagaaatcctttcacgaagaccctcttataggaaaatactgaatgaactgtcctctgatgtgcctggtgttcccaagattgaagaagagagatcagaggaagaaggaacaccacctagtattgctaccatggcagtaccaactagcatatatcagactagcacggggcaatacactgccactggtgacatgccaacttaccagatccgagctcctactgctgctttgccacagggagtggtgatggctgcatcgcccggaagtttgcacagtccccagcagctggcagaagaagcaacacgcaaacgagagctgaggctaatgaaaaacagggaagctgccaaagaatgtcgacgtcgaaagaaagaatatgtaaaatgtctggagagccgagttgcagtgctggaagtccagaacaagaagcttatagaggaacttgaaaccttgaaagacatttgttctcccaaaacagattactagaaatatttaactatgaactgaaggcagcatgtatagttgcttttgaaggaatacaatatatagctggcaagaatggtggcttcttttctttgtatcattcatcttcttctttaatcacttaacattcctaaaatgcttcactgtacgtagttaagtcgtagctataacttcaaattttttaaaagagacaaactgtaaaaaatgtgtgtattcttaaaatgcaatatttgtaaggcttgttccaatgccacatacttgcagctcccattctatgtgtcatcaatagtgtcctatgcaataaaattatttgcaggtctttaaatcattttaggaaaggatgatcaaaaataatgcatccagcagtacaataaaagtaaaccacaaaaaaatacctcaggaaagaatagaaagaaagtctatctaatgacatgcctatatgagaagaatagcctagatatgaatatatggcatttgcagatttttatattagttgctttgttaaaaaaaaaaagattgtattgctgtccttgaatgccatagtcaaagagagtttttaatagaaccatgttggttgcactttgtagtgtttggtgctcatttaaatatctgaacatttactacagtttttaactctactgtgtaatataaaagatcttgcagaagttcttagtgttggtttaatattacctaatgaaagtgatgacatattttttatatctggaatgagcctgttgggatcgcattgcataccttcggggtacaagtcagtttctacactgggtgctgatccttgcacgcgccctttctaccatctcacggtggggatggccgcagggctgtgcacccagaagaagatggctgttagcgtttcggccttcataatggcctgagactttctttctgtaggtggtctggagctgtccggctggtggccccctattttgccatttagcgaacaaccacaggaattttaaaaacaaaaacatcccaagattttttcatttcaaaatgcttcaaagtccacattagatcagatactccgctgtcggcacattcagctgaggttcattacaatcgagactgcaatgtgatctatgtttcatcttgtttttataataaaaagcttcagggaacaagcccaaagccctcaccacagga

SEQ ID NO: 355232 - DNA, 1665 bp, Homo sapiens
  misc_feature (42)..(42): n is a, c, g, or t
  misc_feature (50)..(50): n is a, c, g, or t
  misc_feature (67)..(67): n is a, c, g, or t
taggatggaaagcgacgtgatcacacttaccgagcttacttngatctgtntgtcaatagcatgcaanaaaatgctttgtttgccctttgcttctgcttttttttcagggaagctgccaaagaatgtcgacgtcgcctagcaggagatgcagcagtcctacttattgccatgtggacttgtgggaaggacacgtgtgacccttaagaatccagtttggattagtgtttgaaattgaattgggaatgttgttccaggatgtggaatgcagccgtgatcacacttaccgagcttactttgatctgtttgtcaatagcatgcaaaaaatgctttgtttgccctttgcttctgctttttttcagggaagctgccaaagaatgtcgacgtcgaaagaaagaatatgtaaaatgtctggagagccgagttgcagtgctggaagtccagaacaagaagcttatagaggaacttgaaaccttgaaagacatttgttctcccaaaacagattactagaaatatttaactatgaactgaaggcagcatgtatagttgcttttgaaggaatacaatatatagctggcaagaatggtggcttcttttctttgtatcattcatcttcttctttaatcacttaacattcctaaaatgcttcactgtacgtagttaagtcgtagctataacttcaaattttttaaaagagacaaactgtaaaaaatgtgtgtattcttaaaatgcaatatttgtaaggcttgttccaatgccacatacttgcagctcccattctatgtgtcatcaatagtgtcctatgcaataaaattatttgcaggtctttaaatcattttaggaaaggatgatcaaaaataatgcatccagcagtacaataaaagtaaaccacaaaaaaatacctcaggaaagaatagaaagaaagtctatctaatgacatgcctatatgagaagaatagcctagatatgaatatatggcatttgcagatttttatattagttgctttgttaaaaaaaaaaagattgtattgctgtccttgaatgccatagtcaaagagagtttttaatagaaccatgttggttgcactttgtagtgtttggtgctcatttaaatatctgaacatttactacagtttttaactctactgtgtaatataaaagatcttgcagaagttcttagtgttggtttaatattacctaatgaaagtgatgacatattttttatatctggaatgagcctgttgggatcgcattgcataccttcggggtacaagtcagtttctacactgggtgctgatccttgcacgcgccctttctaccatctcacggtggggatggccgcagggctgtgcacccagaagaagatggctgttagcgtttcggccttcataatggcctgagactttctttctgtaggtggtctggagctgtccggctggtggccccctattttgccatttagcgaacaaccacaggaattttaaaaacaaaaacatcccaagattttttcatttcaaaatgcttcaaagtccacattagatcagatactccgctgtcggcacattcagctgaggttcattacaatcgagactgcaatgtgatctatgtttcatcttgtttttataataaaaagcttcagggaacaagcccaaagccctcaccacagga

SEQ ID NO: 355233 - DNA, 1770 bp, Homo sapiens
agctgggaacattcttagccaccgaagtatgggcaccaaaagcgataaggagcatgtgttccttaataaatgtcacatcagaaaatgactgttccaggacagtaaccacctcccgatgttgctatagcccaaggtggaacaatccagatttctaacccaggatctgatggtgttcagggactgcaggcattaacaatgacaaattcaggagctcctccaccaggtgctacaattgtacagtacgcagcacaatcagctgatggcacacagcagttctttgtcccaggcagccaggttgttgttcaagctgccactggtgacatgccaacttaccagatccgagctcctactgctgctttgccacagggagtggtgatggctgcatcgcccggaagtttgcacagtccccagcagctggcagaagaagcaacacgcaaacgagagctgaggctaatgaaaaacagggaagctgccaaagaatgtcgacgtcgaaagaaagaatatgtaaaatgtctggagagccgagttgcagtgctggaagtccagaacaagaagcttatagaggaacttgaaaccttgaaagacatttgttctcccaaaacagattactagaaatatttaactatgaactgaaggcagcatgtatagttgcttttgaaggaatacaatatatagctggcaagaatggtggcttcttttctttgtatcattcatcttcttctttaatcacttaacattcctaaaatgcttcactgtacgtagttaagtcgtagctataacttcaaattttttaaaagagacaaactgtaaaaaatgtgtgtattcttaaaatgcaatatttgtaaggcttgttccaatgccacatacttgcagctcccattctatgtgtcatcaatagtgtcctatgcaataaaattatttgcaggtctttaaatcattttaggaaaggatgatcaaaaataatgcatccagcagtacaataaaagtaaaccacaaaaaaatacctcaggaaagaatagaaagaaagtctatctaatgacatgcctatatgagaagaatagcctagatatgaatatatggcatttgcagatttttatattagttgctttgttaaaaaaaaaaagattgtattgctgtccttgaatgccatagtcaaagagagtttttaatagaaccatgttggttgcactttgtagtgtttggtgctcatttaaatatctgaacatttactacagtttttaactctactgtgtaatataaaagatcttgcagaagttcttagtgttggtttaatattacctaatgaaagtgatgacatattttttatatctggaatgagcctgttgggatcgcattgcataccttcggggtacaagtcagtttctacactgggtgctgatccttgcacgcgccctttctaccatctcacggtggggatggccgcagggctgtgcacccagaagaagatggctgttagcgtttcggccttcataatggcctgagactttctttctgtaggtggtctggagctgtccggctggtggccccctattttgccatttagcgaacaaccacaggaattttaaaaacaaaaacatcccaagattttttcatttcaaaatgcttcaaagtccacattagatcagatactccgctgtcggcacattcagctgaggttcattacaatcgagactgcaatgtgatctatgtttcatcttgtttttataataaaaagcttcagggaacaagcccaaagccctcaccacagga

SEQ ID NO: 355234 - DNA, 1664 bp, Homo sapiens
tttgtaaaatgctgctgacagatttagagttaactagctcaccactgcctctgcctccaagctgccttttagactgaatagcttttcttgttagccctactttaacatttcttttgaagtggttgtctgcttgaagagggaaacacgtcatgaaactgtaatgcatgaacagaactcaggagttgtctggccagcttagtgctgccactggtgacatgccaacttaccagatccgagctcctactgctgctttgccacagggagtggtgatggctgcatcgcccggaagtttgcacagtccccagcagctggcagaagaagcaacacgcaaacgagagctgaggctaatgaaaaacagggaagctgccaaagaatgtcgacgtcgaaagaaagaatatgtaaaatgtctggagagccgagttgcagtgctggaagtccagaacaagaagcttatagaggaacttgaaaccttgaaagacatttgttctcccaaaacagattactagaaatatttaactatgaactgaaggcagcatgtatagttgcttttgaaggaatacaatatatagctggcaagaatggtggcttcttttctttgtatcattcatcttcttctttaatcacttaacattcctaaaatgcttcactgtacgtagttaagtcgtagctataacttcaaattttttaaaagagacaaactgtaaaaaatgtgtgtattcttaaaatgcaatatttgtaaggcttgttccaatgccacatacttgcagctcccattctatgtgtcatcaatagtgtcctatgcaataaaattatttgcaggtctttaaatcattttaggaaaggatgatcaaaaataatgcatccagcagtacaataaaagtaaaccacaaaaaaatacctcaggaaagaatagaaagaaagtctatctaatgacatgcctatatgagaagaatagcctagatatgaatatatggcatttgcagatttttatattagttgctttgttaaaaaaaaaaagattgtattgctgtccttgaatgccatagtcaaagagagtttttaatagaaccatgttggttgcactttgtagtgtttggtgctcatttaaatatctgaacatttactacagtttttaactctactgtgtaatataaaagatcttgcagaagttcttagtgttggtttaatattacctaatgaaagtgatgacatattttttatatctggaatgagcctgttgggatcgcattgcataccttcggggtacaagtcagtttctacactgggtgctgatccttgcacgcgccctttctaccatctcacggtggggatggccgcagggctgtgcacccagaagaagatggctgttagcgtttcggccttcataatggcctgagactttctttctgtaggtggtctggagctgtccggctggtggccccctattttgccatttagcgaacaaccacaggaattttaaaaacaaaaacatcccaagattttttcatttcaaaatgcttcaaagtccacattagatcagatactccgctgtcggcacattcagctgaggttcattacaatcgagactgcaatgtgatctatgtttcatcttgtttttataataaaaagcttcagggaacaagcccaaagccctcaccacagga

SEQ ID NO: 355235 - DNA, 1707 bp, Homo sapiens
tttgtaaaatgctgctgacagatttagagttaactagctcaccactgcctctgcctccaagctgccttttagactgaatagcttttcttgttagccctactttaacatttcttttgaagtggttgtctgcttgaagagggaaacacgtcatgaaactgtaatgcatgaacagaactcaggagttgtctggccagcttagtggtaagatcgagcctcctactgaggccgtccctgcatgcgcctgctgccactggtgacatgccaacttaccagatccgagctcctactgctgctttgccacagggagtggtgatggctgcatcgcccggaagtttgcacagtccccagcagctggcagaagaagcaacacgcaaacgagagctgaggctaatgaaaaacagggaagctgccaaagaatgtcgacgtcgaaagaaagaatatgtaaaatgtctggagagccgagttgcagtgctggaagtccagaacaagaagcttatagaggaacttgaaaccttgaaagacatttgttctcccaaaacagattactagaaatatttaactatgaactgaaggcagcatgtatagttgcttttgaaggaatacaatatatagctggcaagaatggtggcttcttttctttgtatcattcatcttcttctttaatcacttaacattcctaaaatgcttcactgtacgtagttaagtcgtagctataacttcaaattttttaaaagagacaaactgtaaaaaatgtgtgtattcttaaaatgcaatatttgtaaggcttgttccaatgccacatacttgcagctcccattctatgtgtcatcaatagtgtcctatgcaataaaattatttgcaggtctttaaatcattttaggaaaggatgatcaaaaataatgcatccagcagtacaataaaagtaaaccacaaaaaaatacctcaggaaagaatagaaagaaagtctatctaatgacatgcctatatgagaagaatagcctagatatgaatatatggcatttgcagatttttatattagttgctttgttaaaaaaaaaaagattgtattgctgtccttgaatgccatagtcaaagagagtttttaatagaaccatgttggttgcactttgtagtgtttggtgctcatttaaatatctgaacatttactacagtttttaactctactgtgtaatataaaagatcttgcagaagttcttagtgttggtttaatattacctaatgaaagtgatgacatattttttatatctggaatgagcctgttgggatcgcattgcataccttcggggtacaagtcagtttctacactgggtgctgatccttgcacgcgccctttctaccatctcacggtggggatggccgcagggctgtgcacccagaagaagatggctgttagcgtttcggccttcataatggcctgagactttctttctgtaggtggtctggagctgtccggctggtggccccctattttgccatttagcgaacaaccacaggaattttaaaaacaaaaacatcccaagattttttcatttcaaaatgcttcaaagtccacattagatcagatactccgctgtcggcacattcagctgaggttcattacaatcgagactgcaatgtgatctatgtttcatcttgtttttataataaaaagcttcagggaacaagcccaaagccctcaccacagga

SEQ ID NO: 355236 - DNA, 1339 bp, Homo sapiens
ctaggccccgccccctgacccgcaccttcccgccgcccctccccggttccatttcattgttggattgtggcgcttcactcctgctggcggccggcagggggcggagttcgagcctggatttttttcctcggggcctcccccgggaggccgtcccggcgtgggggaggggaggacggggcgggaggacgcggttcggtcggctgcagcgctacttttggtccggggtcggcagggaggccgcggctaccgcatcacagctgacgtgaggactacgtggggccgctgccggctccgggttgctgggcggcggcgccgctgctgagcggcggtcgggctcgccgtctccacctcctcgcgtccgtaatcagtgacgaggtccgctacgtaaatccctttgcggcggacaaatgaccatggaaacagttgaatcccagcatgatggaagtataacagcttctttgacagagagcaagtctgctcatgtgcagactcagactggccaaaattcaatccctgctttagctcaggtagcagcaattgcagagacagatgaatctgcagaatcagaaggtgtaattgattctcataaacgtagagaaatcctttcacgaagaccctcttataggaaaatactgaatgaactgtcctctgatgtgcctggtgttcccaagattgaagaagagagatcagaggaagaaggaacaccacctagtattgctaccatggcagtaccaactagcatatatcagactagcacggggcaatacagtatgtatgctgcaattcgatatgatacagtgctagctttaagtcttctctagttatattgaagcaactcaggttttggcattaaattgttccattttaaaatgcatcattaatacctaaactgtatcatagaatgaaagtatatgttaaaaagtgagatctttgtattgacagctgtcatataattttgaaaagtaaaaattttgactgccgaatatagaagaaaattttggggtaaaaaggagaatttttcctatttacatgtttatattaatctctagtaaaacattgtttttgttgtctttatgatgcatgcgaacataaatgtctgtatttcattcttgttggcttttgttacccacaattacatactattcttactaatctgagagttttctaaagtatgttttcaatgtttcactactctctactctgttaatttgtgctacagtttttcctaaaagagaatggaaaaatgatttaattttttaaactgtagcaattggatagataattttatttgaaattttacacactgaaagctctaaataaacagatacattcacattca

SEQ ID NO: 355237 - DNA, 1566 bp, Homo sapiens
acatgcttgctaatttggaacactttatgttgaactgtggtagaggaaacaagacagttctgtctgcagaagcccattatggctgtaactggagatgacacagctgccactggtgacatgccaacttaccagatccgagctcctactgctgctttgccacagggagtggtgatggctgcatcgcccggaagtttgcacagtccccagcagctggcagaagaagcaacacgcaaacgagagctgaggctaatgaaaaacagggaagctgccaaagaatgtcgacgtcgaaagaaagaatatgtaaaatgtctggagagccgagttgcagtgctggaagtccagaacaagaagcttatagaggaacttgaaaccttgaaagacatttgttctcccaaaacagattactagaaatatttaactatgaactgaaggcagcatgtatagttgcttttgaaggaatacaatatatagctggcaagaatggtggcttcttttctttgtatcattcatcttcttctttaatcacttaacattcctaaaatgcttcactgtacgtagttaagtcgtagctataacttcaaattttttaaaagagacaaactgtaaaaaatgtgtgtattcttaaaatgcaatatttgtaaggcttgttccaatgccacatacttgcagctcccattctatgtgtcatcaatagtgtcctatgcaataaaattatttgcaggtctttaaatcattttaggaaaggatgatcaaaaataatgcatccagcagtacaataaaagtaaaccacaaaaaaatacctcaggaaagaatagaaagaaagtctatctaatgacatgcctatatgagaagaatagcctagatatgaatatatggcatttgcagatttttatattagttgctttgttaaaaaaaaaaagattgtattgctgtccttgaatgccatagtcaaagagagtttttaatagaaccatgttggttgcactttgtagtgtttggtgctcatttaaatatctgaacatttactacagtttttaactctactgtgtaatataaaagatcttgcagaagttcttagtgttggtttaatattacctaatgaaagtgatgacatattttttatatctggaatgagcctgttgggatcgcattgcataccttcggggtacaagtcagtttctacactgggtgctgatccttgcacgcgccctttctaccatctcacggtggggatggccgcagggctgtgcacccagaagaagatggctgttagcgtttcggccttcataatggcctgagactttctttctgtaggtggtctggagctgtccggctggtggccccctattttgccatttagcgaacaaccacaggaattttaaaaacaaaaacatcccaagattttttcatttcaaaatgcttcaaagtccacattagatcagatactccgctgtcggcacattcagctgaggttcattacaatcgagactgcaatgtgatctatgtttcatcttgtttttataataaaaagcttcagggaacaagcccaaagccctcaccacagga

SEQ ID NO: 355238 - DNA, 1821 bp, Homo sapiens
ctggtacggtcggagttatgggatgcggagccgggtgcggtggagcagcagaggcgccccacgcccgcttcgtgcgctcagctgccccgggacccgcctgcctcctcgcgaacttgggacgagttggaaaatcctccctgagagagccgtgcggctcaggggagcggtttaactcggaaaaggaaaaggaatccagaagataaataaagaaaacaggaaaggaggaaagcattgattacaaatgtcttaacaatgagcaaatgtgcaaggaaaaaatatattaagacaaatccaagacaaatgaccatggaaacagttgaatcccagcatgatggaagtataacagcttctttgacagagagcaagtctgctcatgtgcagactcagactggccaaaattcaatccctgctttagctcagtgcagtgagctgagatcaggcaccagaagaggctccccagctgtaactctagtgcagttaccttcgggccaaactatacatgtccagggagtaattcagacaccacagccatgggttattcagtcatcagaaatacacaccgttcaggtagcagcaattgcagagacagatgaatctgcagaatcagaaggtgtaattgattctcataaacgtagagaaatcctttcacgaagaccctcttataggaaaatactgaatgaactgtcctctgatgtgcctggtgttcccaagattgaagaagagagatcagaggaagaaggaacaccacctagtattgctaccatggcagtaccaactagcatatatcagactagcacggggcaatacattgctatagcccaaggtggaacaatccagatttctaacccaggatctgatggtgttcagggactgcaggcattaacaatgacaaattcaggagctcctccaccaggtgctacaattgtacagtacgcagcacaatcagctgatggcacacagcagttctttgtcccaggcagccaggttgttgttcaagctgccactggtgacatgccaacttaccagatccgagctcctactgctgctttgccacagggagtggtgatggctgcatcgcccggaagtttgcacagtccccagcagctggcagaagaagcaacacgcaaacgagagctgaggctaatgaaaaacagggaagctgcccgggagtgtcgcaggaagaagaaagaatatgtcaaatgtcttgaaaatcgtgtggctgtgcttgaaaaccaaaacaagactctcattgaggaactcaaggccctcaaagatctttattgccataaagtagagtaactgtctttgacttggaccttgtttactctaatcaaggcaggagatgcagcagtcctacttattgccatgtggacttgtgggaaggacacgtgtgacccttaagaatccagtttggattagtgtttgaaattgaattgggaatgttgttccaggatgtggaatgcagccgtgatcacacttaccgagcttactttgatctgtttgtcaatagcatgcaaaaaatgctttgtttgccctttgcttctgctttttttcagggaagctgccaaagaatgtcgacgtcgaaagaaagaatatgtaaaatgtctggagagccgagttgcagtgctggaagtccagaacaagaagcttatagaggaacttgaaaccttgaaagacatttgttctcccaaaacagattactagaaatatttaactatgaactgaaggcagcatgtatagttgcttttgaaggaataaatgatagagtgcgcgccgaaactctctctttcttttttccttggtttgtggagtttagtaata

SEQ ID NO: 355239 - DNA, 1215 bp, Homo sapiens
ctaggccccgccccctgacccgcaccttcccgccgcccctccccggttccatttcattgttggattgtggcgcttcactcctgctggcggccggcagggggcggagttcgagcctggatttttttcctcggggcctcccccgggaggccgtcccggcgtgggggaggggaggacggggcgggaggacgcggttcggtcggctgcagcgctacttttggtccggggtcggcagggaggccgcggctaccgcatcacagctgacgtgaggactacgtggggccgctgccggctccgggttgctgggcggcggcgccgctgctgagcggcggtcgggctcgccgtctccacctcctcgcgtccgtaatcagtgacgaggtccgctacgtaaatccctttgcggcgggtagcagcaattgcagagacagatgaatctgcagaatcagaaggtgtaattgattctcataaacgtagagaaatcctttcacgaagaccctcttataggaaaatactgaatgaactgtcctctgatgtgcctggtgttcccaagattgaagaagagagatcagaggaagaaggaacaccacctagtattgctaccatggcagtaccaactagcatatatcagactagcacggggcaatacagtatgtatgctgcaattcgatatgatacagtgctagctttaagtcttctctagttatattgaagcaactcaggttttggcattaaattgttccattttaaaatgcatcattaatacctaaactgtatcatagaatgaaagtatatgttaaaaagtgagatctttgtattgacagctgtcatataattttgaaaagtaaaaattttgactgccgaatatagaagaaaattttggggtaaaaaggagaatttttcctatttacatgtttatattaatctctagtaaaacattgtttttgttgtctttatgatgcatgcgaacataaatgtctgtatttcattcttgttggcttttgttacccacaattacatactattcttactaatctgagagttttctaaagtatgttttcaatgtttcactactctctactctgttaatttgtgctacagtttttcctaaaagagaatggaaaaatgatttaattttttaaactgtagcaattggatagataattttatttgaaattttacacactgaaagctctaaataaacagatacattcacattca

SEQ ID NO: 355240 - DNA, 930 bp, Homo sapiens
agctgggaacattcttagccaccgaagtatgggcaccaaaagcgataaggagcatgtgttccttaataaatgtcacatcagaaaatgactgttccaggacagtaaccacctcccgatggtagcagcaattgcagagacagatgaatctgcagaatcagaaggtgtaattgattctcataaacgtagagaaatcctttcacgaagaccctcttataggaaaatactgaatgaactgtcctctgatgtgcctggtgttcccaagattgaagaagagagatcagaggaagaaggaacaccacctagtattgctaccatggcagtaccaactagcatatatcagactagcacggggcaatacagtatgtatgctgcaattcgatatgatacagtgctagctttaagtcttctctagttatattgaagcaactcaggttttggcattaaattgttccattttaaaatgcatcattaatacctaaactgtatcatagaatgaaagtatatgttaaaaagtgagatctttgtattgacagctgtcatataattttgaaaagtaaaaattttgactgccgaatatagaagaaaattttggggtaaaaaggagaatttttcctatttacatgtttatattaatctctagtaaaacattgtttttgttgtctttatgatgcatgcgaacataaatgtctgtatttcattcttgttggcttttgttacccacaattacatactattcttactaatctgagagttttctaaagtatgttttcaatgtttcactactctctactctgttaatttgtgctacagtttttcctaaaagagaatggaaaaatgatttaattttttaaactgtagcaattggatagataattttatttgaaattttacacactgaaagctctaaataaacagatacattcacattca

SEQ ID NO: 355241 - DNA, 966 bp, Homo sapiens
tttgtaaaatgctgctgacagatttagagttaactagctcaccactgcctctgcctccaagctgccttttagactgaatagcttttcttgttagccctactttaacatttcttttgaagtggttgtctgcttgaagagggaaacacgtcatgaaactgtaatgcatgaacagaactcaggagttgtctggccagcttagtggtaagatcgagcctcctactgaggccgtccctgcatgcgcctggtgagaaatggattatgtattgtataagctggcgggttctttactcttactccatcctcttactccatctataggaacttgcgattcagagctcctctagtgttcagtcagggaagtgcttgtcttttacttgttctcccagcctctggtatttaaatttgtaatcggtaatttttcactaggtttgcttttctcagtaacaaagagtgattttggaagacttagttactaataacctttgtgtgcttgcagtgttgtttattcagtggtcttgtttgtaatacagtactgaatttgcagttgaattaagagttttaaacaacttcactacaatttagctcttcgaagttaatgggtctcagccctctttgtggataggaacattggattgtcttgagtaagtaaaacctgtattacattgtttttaaaactgtcttgaggaactatttttttctcgaagttttgtgaagttctagagatgctatagactgcagaactcaaatgatgaatttattataagacatagatgaacttaaaatcatctcaaacactgcatgtcatatgattcttagaaccagaaggcacttttgtacatatattttctaaaaattattggttaatatctttctttaccaagcctttcattcctattacccctttgacttgtctaagcataagactcataacaaaaaataaataaaatgatgtgaaaacgctgtgta

SEQ ID NO: 355242 - DNA, 843 bp, Homo sapiens
ctaggccccgccccctgacccgcaccttcccgccgcccctccccggttccatttcattgttggattgtggcgcttcactcctgctggcggccggcagggggcggagttcgagcctggatttttttcctcggggcctcccccgggaggccgtcccggcgtgggggaggggaggacggggcgggaggacgcggttcggtcggctgcagcgctacttttggtccggggtcggcagggaggccgcggctaccgcatcacagctgacgtgaggactacgtggggccgctgccggctccgggttgctgggcggcggcgccgctgctgagcggcggtcgggctcgccgtctccacctcctcgcgtccgtaatcagtgacgagggaagctgccaaagaatgtcgacgtcgaaagaaagaatatgtaaaatgtctggagagccgagttgcagtgctggaagtccagaacaagaagcttatagaggaacttgaaaccttgaaagacatttgttctcccaaaacagattactagaaatatttaactatgaactgaaggcagcatgtatagttgcttttgaaggaatacaatatatagctggcaagaatggtggcttcttttctttgtatcattcatcttcttctttaatcacttaacattcctaaaatgcttcactgtacgtagttaagtcgtagctataacttcaaattttttaaaagagacaaactgtaaaaaatgtgtgtattcttaaaatgcaatatttgtaaggcttgttccaatgccacatacttgcagctcccattctatgtgtcatcaatagtgtcctatgcaataaaattatttgcaggtcttta

SEQ ID NO: 355243 - DNA, 2862 bp, Homo sapiens
ctggtacggtcggagttatgggatgcggagccgggtgcggtggagcagcagaggcgccccacgcccgcttcgtgcgctcagctgccccgggacccgcctgcctcctcgcgaacttgggacgagttggaaaatcctccctgagagagccgtgcggctcaggggagcggtttaactcggaaaaggaaaaggaatccagaagataaataaagaaaacaggaaaggaggaaagcattgattacaaatgtcttaacaatgagcaaatgtgcaaggaaaaaatatattaagacaaatccaagacaaatgaccatggaaacagttgaatcccagcatgatggaagtataacagcttctttgacagagagcaagtctgctcatgtgcagactcagactggccaaaattcaatccctgctttagctcagtgcagtgagctgagatcaggcaccagaagaggctccccagctgtaactctagtgcagttaccttcgggccaaactatacatgtccagggagtaattcagacaccacagccatgggttattcagtcatcagaaatacacaccgttcaggtagcagcaattgcagagacagatgaatctgcagaatcagaaggtgtaattgattctcataaacgtagagaaatcctttcacgaagaccctcttataggaaaatactgaatgaactgtcctctgatgtgcctggtgttcccaagattgaagaagagagatcagaggaagaaggaacaccacctagtattgctaccatggcagtaccaactagcatatatcagactagcacggggcaatacattgctatagcccaaggtggaacaatccagatttctaacccaggatctgatggtgttcagggactgcaggcattaacaatgacaaattcaggagctcctccaccaggtgctacaattgtacagtacgcagcacaatcagctgatggcacacagcagttctttgtcccaggcagccaggttgttgttcaagctgccactggtgacatgccaacttaccagatccgagctcctactgctgctttgccacagggagtggtgatggctgcatcgcccggaagtttgcacagtccccagcagctggcagaagaagcaacacgcaaacgagagctgaggctaatgaaaaacagggaagctgcccgggagtgtcgcaggaagaagaaagaatatgtcaaatgtcttgaaaatcgtgtggctgtgcttgaaaaccaaaacaagactctcattgaggaactcaaggccctcaaagatctttattgccataaagtagagtaactgtctttgacttggaccttgtttactctaatcaaggcaggagatgcagcagtcctacttattgccatgtggacttgtgggaaggacacgtgtgacccttaagaatccagtttggattagtgtttgaaattgaattgggaatgttgttccaggatgtggaatgcagccgtgatcacacttaccgagcttactttgatctgtttgtcaatagcatgcaaaaaatgctttgtttgccctttgcttctgctttttttcagggaagctgccaaagaatgtcgacgtcgaaagaaagaatatgtaaaatgtctggagagccgagttgcagtgctggaagtccagaacaagaagcttatagaggaacttgaaaccttgaaagacatttgttctcccaaaacagattactagaaatatttaactatgaactgaaggcagcatgtatagttgcttttgaaggaatacaatatatagctggcaagaatggtggcttcttttctttgtatcattcatcttcttctttaatcacttaacattcctaaaatgcttcactgtacgtagttaagtcgtagctataacttcaaattttttaaaagagacaaactgtaaaaaatgtgtgtattcttaaaatgcaatatttgtaaggcttgttccaatgccacatacttgcagctcccattctatgtgtcatcaatagtgtcctatgcaataaaattatttgcaggtctttaaatcattttaggaaaggatgatcaaaaataatgcatccagcagtacaataaaagtaaaccacaaaaaaatacctcaggaaagaatagaaagaaagtctatctaatgacatgcctatatgagaagaatagcctagatatgaatatatggcatttgcagatttttatattagttgctttgttaaaaaaaaaaagattgtattgctgtccttgaatgccatagtcaaagagagtttttaatagaaccatgttggttgcactttgtagtgtttggtgctcatttaaatatctgaacatttactacagtttttaactctactgtgtaatataaaagatcttgcagaagttcttagtgttggtttaatattacctaatgaaagtgatgacatattttttatatctggaatgagcctgttgggatcgcattgcataccttcggggtacaagtcagtttctacactgggtgctgatccttgcacgcgccctttctaccatctcacggtggggatggccgcagggctgtgcacccagaagaagatggctgttagcgtttcggccttcataatggcctgagactttctttctgtaggtggtctggagctgtccggctggtggccccctattttgccatttagcgaacaaccacaggaattttaaaaacaaaaacatcccaagattttttcatttcaaaatgcttcaaagtccacattagatcagatactccgctgtcggcacattcagctgaggttcattacaatcgagactgcaatgtgatctatgtttcatcttgtttttataataaaaagcttcagggaacaagcccaaagccctcaccacagga

SEQ ID NO: 355244 - DNA, 1968 bp, Homo sapiens
acatgcttgctaatttggaacactttatgttgaactgtggtagaggaaacaagacagttctgtctgcagaagcccattatggctgtaactggagatgacacagctgccactggtgacatgccaacttaccagatccgagctcctactgctgctttgccacagggagtggtgatggctgcatcgcccggaagtttgcacagtccccagcagctggcagaagaagcaacacgcaaacgagagctgaggctaatgaaaaacagggaagctgcccgggagtgtcgcaggaagaagaaagaatatgtcaaatgtcttgaaaatcgtgtggctgtgcttgaaaaccaaaacaagactctcattgaggaactcaaggccctcaaagatctttattgccataaagtagagtaactgtctttgacttggaccttgtttactctaatcaaggcaggagatgcagcagtcctacttattgccatgtggacttgtgggaaggacacgtgtgacccttaagaatccagtttggattagtgtttgaaattgaattgggaatgttgttccaggatgtggaatgcagccgtgatcacacttaccgagcttactttgatctgtttgtcaatagcatgcaaaaaatgctttgtttgccctttgcttctgctttttttcagggaagctgccaaagaatgtcgacgtcgaaagaaagaatatgtaaaatgtctggagagccgagttgcagtgctggaagtccagaacaagaagcttatagaggaacttgaaaccttgaaagacatttgttctcccaaaacagattactagaaatatttaactatgaactgaaggcagcatgtatagttgcttttgaaggaatacaatatatagctggcaagaatggtggcttcttttctttgtatcattcatcttcttctttaatcacttaacattcctaaaatgcttcactgtacgtagttaagtcgtagctataacttcaaattttttaaaagagacaaactgtaaaaaatgtgtgtattcttaaaatgcaatatttgtaaggcttgttccaatgccacatacttgcagctcccattctatgtgtcatcaatagtgtcctatgcaataaaattatttgcaggtctttaaatcattttaggaaaggatgatcaaaaataatgcatccagcagtacaataaaagtaaaccacaaaaaaatacctcaggaaagaatagaaagaaagtctatctaatgacatgcctatatgagaagaatagcctagatatgaatatatggcatttgcagatttttatattagttgctttgttaaaaaaaaaaagattgtattgctgtccttgaatgccatagtcaaagagagtttttaatagaaccatgttggttgcactttgtagtgtttggtgctcatttaaatatctgaacatttactacagtttttaactctactgtgtaatataaaagatcttgcagaagttcttagtgttggtttaatattacctaatgaaagtgatgacatattttttatatctggaatgagcctgttgggatcgcattgcataccttcggggtacaagtcagtttctacactgggtgctgatccttgcacgcgccctttctaccatctcacggtggggatggccgcagggctgtgcacccagaagaagatggctgttagcgtttcggccttcataatggcctgagactttctttctgtaggtggtctggagctgtccggctggtggccccctattttgccatttagcgaacaaccacaggaattttaaaaacaaaaacatcccaagattttttcatttcaaaatgcttcaaagtccacattagatcagatactccgctgtcggcacattcagctgaggttcattacaatcgagactgcaatgtgatctatgtttcatcttgtttttataataaaaagcttcagggaacaagcccaaagccctcaccacagga

SEQ ID NO: 355245 - DNA, 2344 bp, Homo sapiens
ctggtacggtcggagttatgggatgcggagccgggtgcggtggagcagcagaggcgccccacgcccgcttcgtgcgctcagctgccccgggacccgcctgcctcctcgcgaacttgggacgagttggaaaatcctccctgagagagccgtgcggctcaggggagcggtttaactcggaaaaggaaaaggaatccagaagataaataaagaaaacaggaaaggaggaaagcattgattacaaatgtcttaacaatgagcaaatgtgcaaggaaaaaatatattaagacaaatccaagacaaatgaccatggaaacagttgaatcccagcatgatggaagtataacagcttctttgacagagagcaagtctgctcatgtgcagactcagactggccaaaattcaatccctgctttagctcagtgcagtgagctgagatcaggcaccagaagaggctccccagctgtaactctagtgcagttaccttcgggccaaactatacatgtccagggagtaattcagacaccacagccatgggttattcagtcatcagaaatacacaccgttcaggtagcagcaattgcagagacagatgaatctgcagaatcagaaggtgtaattgattctcataaacgtagagaaatcctttcacgaagaccctcttataggaaaatactgaatgaactgtcctctgatgtgcctggtgttcccaagattgaagaagagagatcagaggaagaaggaacaccacctagtattgctaccatggcagtaccaactagcatatatcagactagcacggggcaatacattgctatagcccaaggtggaacaatccagatttctaacccaggatctgatggtgttcagggactgcaggcattaacaatgacaaattcaggagctcctccaccaggtgctacaattgtacagtacgcagcacaatcagctgatggcacacagcagttctttgtcccaggcagccaggttgttgttcaagctgccactggtgacatgccaacttaccagatccgagctcctactgctgctttgccacagggagtggtgatggctgcatcgcccggaagtttgcacagtccccagcagctggcagaagaagcaacacgcaaacgagagctgaggctaatgaaaaacagggaagctgcccgggagtgtcgcaggaagaagaaagaatatgtcaaatgtcttgaaaatcgtgtggctgtgcttgaaaaccaaaacaagactctcattgaggaactcaaggccctcaaagatctttattgccataaagtagagtaactgtctttgacttggaccttgtttactctaatcaaggcaggagatgcagcagtcctacttattgccatgtggacttgtgggaaggacacgtgtgacccttaagaatccagtttggattagtgtttgaaattgaattgggaatgttgttccaggatgtggaatgcagccgtgatcacacttaccgagcttactttgatctgtttgtcaatagcatgcaaaaaatgctttgtttgccctttgcttctgctttttttcagggaagctgccaaagaatgtcgacgtcgaaagaaagaatatgtaaaatgtctggagagccgagttgcagtgctggaagtccagaacaagaagcttatagaggaacttgaaaccttgaaagacatttgttctcccaaaacagattactagaaatatttaactatgaactgaaggcagcatgtatagttgcttttgaaggaatacaatatatagctggcaagaatggtggcttcttttctttgtatcattcatcttcttctttaatcacttaacattcctaaaatgcttcactgtacgtagttaagtcgtagctataacttcaaattttttaaaagagacaaactgtaaaaaatgtgtgtattcttaaaatgcaatatttgtaaggcttgttccaatgccacatacttgcagctcccattctatgtgtcatcaatagtgtcctatgcaataaaattatttgcaggtctttaaatcattttaggaaaggatgatcaaaaataatgcatccagcagtacaataaaagtaaaccacaaaaaaatacctcaggaaagaatagaaagaaagtctatctaatgacatgcctatatgagaagaatagcctagatatgaatatatggcatttgcagatttttatattagttgctttgttaaaaaaaaaaagattgtattgctgtccttgaatgccatagtcaaagagagttttttaaataagaaaccattgttgtggttggccccttttgttagttgttttgggggcctcatattaaaattttctggaacacatttttc

SEQ ID NO: 355246 - DNA, 2420 bp, Homo sapiens
ctaggccccgccccctgacccgcaccttcccgccgcccctccccggttccatttcattgttggattgtggcgcttcactcctgctggcggccggcagggggcggagttcgagcctggatttttttcctcggggcctcccccgggaggccgtcccggcgtgggggaggggaggacggggcgggaggacgcggttcggtcggctgcagcgctacttttggtccggggtcggcagggaggccgcggctaccgcatcacagctgacgtgaggactacgtggggccgctgccggctccgggttgctgggcggcggcgccgctgctgagcggcggtcgggctcgccgtctccacctcctcgcgtccgtaatcagtgacgaggtccgctacgtaaatccctttgcggcggacaaatgaccatggaaacagttgaatcccagcatgatggaagtataacagcttctttgacagagagcaagtctgctcatgtgcagactcagactggccaaaattcaatccctgctttagctcaggtagcagcaattgcagagacagatgaatctgcagaatcagaaggtgtaattgattctcataaacgtagagaaatcctttcacgaagaccctcttataggaaaatactgaatgaactgtcctctgatgtgcctggtgttcccaagattgaagaagagagatcagaggaagaaggaacaccacctagtattgctaccatggcagtaccaactagcatatatcagactagcacggggcaatacattgctatagcccaaggtggaacaatccagatttctaacccaggatctgatggtgttcagggactgcaggcattaacaatgacaaattcaggagctcctccaccaggtgctacaattgtacagtacgcagcacaatcagctgatggcacacagcagttctttgtcccaggcagccaggttgttgttcaagctgccactggtgacatgccaacttaccagatccgagctcctactgctgctttgccacagggagtggtgatggctgcatcgcccggaagtttgcacagtccccagcagctggcagaagaagcaacacgcaaacgagagctgaggctaatgaaaaacagggaagctgccaaagaatgtcgacgtcgaaagaaagaatatgtaaaatgtctggagagccgagttgcagtgctggaagtccagaacaagaagcttatagaggaacttgaaaccttgaaagacatttgttctcccaaaacagattactagaaatatttaactatgaactgaaggcagcatgtatagttgcttttgaaggaatacaatatatagctggcaagaatggtggcttcttttctttgtatcattcatcttcttctttaatcacttaacattcctaaaatgcttcactgtacgtagttaagtcgtagctataacttcaaattttttaaaagagacaaactgtaaaaaatgtgtgtattcttaaaatgcaatatttgtaaggcttgttccaatgccacatacttgcagctcccattctatgtgtcatcaatagtgtcctatgcaataaaattatttgcaggtctttaaatcattttaggaaaggatgatcaaaaataatgcatccagcagtacaataaaagtaaaccacaaaaaaatacctcaggaaagaatagaaagaaagtctatctaatgacatgcctatatgagaagaatagcctagatatgaatatatggcatttgcagatttttatattagttgctttgttaaaaaaaaaaagattgtattgctgtccttgaatgccatagtcaaagagagtttttaatagaaccatgttggttgcactttgtagtgtttggtgctcatttaaatatctgaacatttactacagtttttaactctactgtgtaatataaaagatcttgcagaagttcttagtgttggtttaatattacctaatgaaagtgatgacatattttttatatctggaatgagcctgttgggatcgcattgcataccttcggggtacaagtcagtttctacactgggtgctgatccttgcacgcgccctttctaccatctcacggtggggatggccgcagggctgtgcacccagaagaagatggctgttagcgtttcggccttcataatggcctgagactttctttctgtaggtggtctggagctgtccggctggtggccccctattttgccatttagcgaacaaccacaggaattttaaaaacaaaaacatcccaagattttttcatttcaaaatgcttcaaagtccacattagatcagatactccgctgtcggcacattcagctgaggttcattacaatcgagactgcaatgtgatctatgtttcatcttgtttttataataaaaagcttcagggaacaagcccaaagccctcaccacagga

SEQ ID NO: 355247 - DNA, 2460 bp, Homo sapiens
ctggtacggtcggagttatgggatgcggagccgggtgcggtggagcagcagaggcgccccacgcccgcttcgtgcgctcagctgccccgggacccgcctgcctcctcgcgaacttgggacgagttggaaaatcctccctgagagagccgtgcggctcaggggagcggtttaactcggaaaaggaaaaggaatccagaagataaataaagaaaacaggaaaggaggaaagcattgattacaaatgtcttaacaatgagcaaatgtgcaaggaaaaaatatattaagacaaatccaagacaaatgaccatggaaacagttgaatcccagcatgatggaagtataacagcttctttgacagagagcaagtctgctcatgtgcagactcagactggccaaaattcaatccctgctttagctcagtgcagtgagctgagatcaggcaccagaagaggctccccagctgtaactctagtgcagttaccttcgggccaaactatacatgtccagggagtaattcagacaccacagccatgggttattcagtcatcagaaatacacaccgttcaggtagcagcaattgcagagacagatgaatctgcagaatcagaaggtgtaattgattctcataaacgtagagaaatcctttcacgaagaccctcttataggaaaatactgaatgaactgtcctctgatgtgcctggtgttcccaagattgaagaagagagatcagaggaagaaggaacaccacctagtattgctaccatggcagtaccaactagcatatatcagactagcacggggcaatacattgctatagcccaaggtggaacaatccagatttctaacccaggatctgatggtgttcagggactgcaggcattaacaatgacaaattcaggagctcctccaccaggtgctacaattgtacagtacgcagcacaatcagctgatggcacacagcagttctttgtcccaggcagccaggttgttgttcaagctgccactggtgacatgccaacttaccagatccgagctcctactgctgctttgccacagggagtggtgatggctgcatcgcccggaagtttgcacagtccccagcagctggcagaagaagcaacacgcaaacgagagctgaggctaatgaaaaacagggaagctgccaaagaatgtcgacgtcgaaagaaagaatatgtaaaatgtctggagagccgagttgcagtgctggaagtccagaacaagaagcttatagaggaacttgaaaccttgaaagacatttgttctcccaaaacagattactagaaatatttaactatgaactgaaggcagcatgtatagttgcttttgaaggaatacaatatatagctggcaagaatggtggcttcttttctttgtatcattcatcttcttctttaatcacttaacattcctaaaatgcttcactgtacgtagttaagtcgtagctataacttcaaattttttaaaagagacaaactgtaaaaaatgtgtgtattcttaaaatgcaatatttgtaaggcttgttccaatgccacatacttgcagctcccattctatgtgtcatcaatagtgtcctatgcaataaaattatttgcaggtctttaaatcattttaggaaaggatgatcaaaaataatgcatccagcagtacaataaaagtaaaccacaaaaaaatacctcaggaaagaatagaaagaaagtctatctaatgacatgcctatatgagaagaatagcctagatatgaatatatggcatttgcagatttttatattagttgctttgttaaaaaaaaaaagattgtattgctgtccttgaatgccatagtcaaagagagtttttaatagaaccatgttggttgcactttgtagtgtttggtgctcatttaaatatctgaacatttactacagtttttaactctactgtgtaatataaaagatcttgcagaagttcttagtgttggtttaatattacctaatgaaagtgatgacatattttttatatctggaatgagcctgttgggatcgcattgcataccttcggggtacaagtcagtttctacactgggtgctgatccttgcacgcgccctttctaccatctcacggtggggatggccgcagggctgtgcacccagaagaagatggctgttagcgtttcggccttcataatggcctgagactttctttctgtaggtggtctggagctgtccggctggtggccccctattttgccatttagcgaacaaccacaggaattttaaaaacaaaaacatcccaagattttttcatttcaaaatgcttcaaagtccacattagatcagatactccgctgtcggcacattcagctgaggttcattacaatcgagactgcaatgtgatctatgtttcatcttgtttttataataaaaagcttcagggaacaagcccaaagccctcaccacagga

SEQ ID NO: 355248 - DNA, 2268 bp, Homo sapiens
ctaggccccgccccctgacccgcaccttcccgccgcccctccccggttccatttcattgttggattgtggcgcttcactcctgctggcggccggcagggggcggagttcgagcctggatttttttcctcggggcctcccccgggaggccgtcccggcgtgggggaggggaggacggggcgggaggacgcggttcggtcggctgcagcgctacttttggtccggggtcggcagggaggccgcggctaccgcatcacagctgacgtgaggactacgtggggccgctgccggctccgggttgctgggcggcggcgccgctgctgagcggcggtcgggctcgccgtctccacctcctcgcgtccgtaatcagtgacgaggtccgctacgtaaatccctttgcggcggctgccactggtgacatgccaacttaccagatccgagctcctactgctgctttgccacagggagtggtgatggctgcatcgcccggaagtttgcacagtccccagcagctggcagaagaagcaacacgcaaacgagagctgaggctaatgaaaaacagggaagctgcccgggagtgtcgcaggaagaagaaagaatatgtcaaatgtcttgaaaatcgtgtggctgtgcttgaaaaccaaaacaagactctcattgaggaactcaaggccctcaaagatctttattgccataaagtagagtaactgtctttgacttggaccttgtttactctaatcaaggcaggagatgcagcagtcctacttattgccatgtggacttgtgggaaggacacgtgtgacccttaagaatccagtttggattagtgtttgaaattgaattgggaatgttgttccaggatgtggaatgcagccgtgatcacacttaccgagcttactttgatctgtttgtcaatagcatgcaaaaaatgctttgtttgccctttgcttctgctttttttcagggaagctgccaaagaatgtcgacgtcgaaagaaagaatatgtaaaatgtctggagagccgagttgcagtgctggaagtccagaacaagaagcttatagaggaacttgaaaccttgaaagacatttgttctcccaaaacagattactagaaatatttaactatgaactgaaggcagcatgtatagttgcttttgaaggaatacaatatatagctggcaagaatggtggcttcttttctttgtatcattcatcttcttctttaatcacttaacattcctaaaatgcttcactgtacgtagttaagtcgtagctataacttcaaattttttaaaagagacaaactgtaaaaaatgtgtgtattcttaaaatgcaatatttgtaaggcttgttccaatgccacatacttgcagctcccattctatgtgtcatcaatagtgtcctatgcaataaaattatttgcaggtctttaaatcattttaggaaaggatgatcaaaaataatgcatccagcagtacaataaaagtaaaccacaaaaaaatacctcaggaaagaatagaaagaaagtctatctaatgacatgcctatatgagaagaatagcctagatatgaatatatggcatttgcagatttttatattagttgctttgttaaaaaaaaaaagattgtattgctgtccttgaatgccatagtcaaagagagtttttaatagaaccatgttggttgcactttgtagtgtttggtgctcatttaaatatctgaacatttactacagtttttaactctactgtgtaatataaaagatcttgcagaagttcttagtgttggtttaatattacctaatgaaagtgatgacatattttttatatctggaatgagcctgttgggatcgcattgcataccttcggggtacaagtcagtttctacactgggtgctgatccttgcacgcgccctttctaccatctcacggtggggatggccgcagggctgtgcacccagaagaagatggctgttagcgtttcggccttcataatggcctgagactttctttctgtaggtggtctggagctgtccggctggtggccccctattttgccatttagcgaacaaccacaggaattttaaaaacaaaaacatcccaagattttttcatttcaaaatgcttcaaagtccacattagatcagatactccgctgtcggcacattcagctgaggttcattacaatcgagactgcaatgtgatctatgtttcatcttgtttttataataaaaagcttcagggaacaagcccaaagccctcaccacagga

SEQ ID NO: 355249 - DNA, 2428 bp, Homo sapiens
ctggtacggtcggagttatgggatgcggagccgggtgcggtggagcagcagaggcgccccacgcccgcttcgtgcgctcagctgccccgggacccgcctgcctcctcgcgaacttgggacgagttggaaaatcctccctgagagagccgtgcggctcaggggagcggtttaactcggaaaaggaaaaggaatccagaaacaaatgaccatggaaacagttgaatcccagcatgatggaagtataacagcttctttgacagagagcaagtctgctcatgtgcagactcagactggccaaaattcaatccctgctttagctcaggtagcagcaattgcagagacagatgaatctgcagaatcagaaggtgtaattgattctcataaacgtagagaaatcctttcacgaagaccctcttataggaaaatactgaatgaactgtcctctgatgtgcctggtgttcccaagattgaagaagagagatcagaggaagaaggaacaccacctagtattgctaccatggcagtaccaactagcatatatcagactagcacggggcaatacactgccactggtgacatgccaacttaccagatccgagctcctactgctgctttgccacagggagtggtgatggctgcatcgcccggaagtttgcacagtccccagcagctggcagaagaagcaacacgcaaacgagagctgaggctaatgaaaaacagggaagctgcccgggagtgtcgcaggaagaagaaagaatatgtcaaatgtcttgaaaatcgtgtggctgtgcttgaaaaccaaaacaagactctcattgaggaactcaaggccctcaaagatctttattgccataaagtagagtaactgtctttgacttggaccttgtttactctaatcaaggcaggagatgcagcagtcctacttattgccatgtggacttgtgggaaggacacgtgtgacccttaagaatccagtttggattagtgtttgaaattgaattgggaatgttgttccaggatgtggaatgcagccgtgatcacacttaccgagcttactttgatctgtttgtcaatagcatgcaaaaaatgctttgtttgccctttgcttctgctttttttcagggaagctgccaaagaatgtcgacgtcgaaagaaagaatatgtaaaatgtctggagagccgagttgcagtgctggaagtccagaacaagaagcttatagaggaacttgaaaccttgaaagacatttgttctcccaaaacagattactagaaatatttaactatgaactgaaggcagcatgtatagttgcttttgaaggaatacaatatatagctggcaagaatggtggcttcttttctttgtatcattcatcttcttctttaatcacttaacattcctaaaatgcttcactgtacgtagttaagtcgtagctataacttcaaattttttaaaagagacaaactgtaaaaaatgtgtgtattcttaaaatgcaatatttgtaaggcttgttccaatgccacatacttgcagctcccattctatgtgtcatcaatagtgtcctatgcaataaaattatttgcaggtctttaaatcattttaggaaaggatgatcaaaaataatgcatccagcagtacaataaaagtaaaccacaaaaaaatacctcaggaaagaatagaaagaaagtctatctaatgacatgcctatatgagaagaatagcctagatatgaatatatggcatttgcagatttttatattagttgctttgttaaaaaaaaaaagattgtattgctgtccttgaatgccatagtcaaagagagtttttaatagaaccatgttggttgcactttgtagtgtttggtgctcatttaaatatctgaacatttactacagtttttaactctactgtgtaatataaaagatcttgcagaagttcttagtgttggtttaatattacctaatgaaagtgatgacatattttttatatctggaatgagcctgttgggatcgcattgcataccttcggggtacaagtcagtttctacactgggtgctgatccttgcacgcgccctttctaccatctcacggtggggatggccgcagggctgtgcacccagaagaagatggctgttagcgtttcggccttcataatggcctgagactttctttctgtaggtggtctggagctgtccggctggtggccccctattttgccatttagcgaacaaccacaggaattttaaaaacaaaaacatcccaagattttttcatttcaaaatgcttcaaagtccacattagatcagatactccgctgtcggcacattcagctgaggttcattacaatcgagactgcaatgtgatctatgtttcatcttgtttttataataaaaagcttcagggaacaagcccaaagccctcaccacagga

SEQ ID NO: 355250 - DNA, 2011 bp, Homo sapiens
agctgggaacattcttagccaccgaagtatgggcaccaaaagcgataaggagcatgtgttccttaataaatgtcacatcagaaaatgactgttccaggacagtaaccacctcccgatggtagcagcaattgcagagacagatgaatctgcagaatcagaaggtgtaattgattctcataaacgtagagaaatcctttcacgaagaccctcttataggaaaatactgaatgaactgtcctctgatgtgcctggtgttcccaagattgaagaagagagatcagaggaagaaggaacaccacctagtattgctaccatggcagtaccaactagcatatatcagactagcacggggcaatacattgctatagcccaaggtggaacaatccagatttctaacccaggatctgatggtgttcagggactgcaggcattaacaatgacaaattcaggagctcctccaccaggtgctacaattgtacagtacgcagcacaatcagctgatggcacacagcagttctttgtcccaggcagccaggttgttgttcaagctgccactggtgacatgccaacttaccagatccgagctcctactgctgctttgccacagggagtggtgatggctgcatcgcccggaagtttgcacagtccccagcagctggcagaagaagcaacacgcaaacgagagctgaggctaatgaaaaacagggaagctgccaaagaatgtcgacgtcgaaagaaagaatatgtaaaatgtctggagagccgagttgcagtgctggaagtccagaacaagaagcttatagaggaacttgaaaccttgaaagacatttgttctcccaaaacagattactagaaatatttaactatgaactgaaggcagcatgtatagttgcttttgaaggaatacaatatatagctggcaagaatggtggcttcttttctttgtatcattcatcttcttctttaatcacttaacattcctaaaatgcttcactgtacgtagttaagtcgtagctataacttcaaattttttaaaagagacaaactgtaaaaaatgtgtgtattcttaaaatgcaatatttgtaaggcttgttccaatgccacatacttgcagctcccattctatgtgtcatcaatagtgtcctatgcaataaaattatttgcaggtctttaaatcattttaggaaaggatgatcaaaaataatgcatccagcagtacaataaaagtaaaccacaaaaaaatacctcaggaaagaatagaaagaaagtctatctaatgacatgcctatatgagaagaatagcctagatatgaatatatggcatttgcagatttttatattagttgctttgttaaaaaaaaaaagattgtattgctgtccttgaatgccatagtcaaagagagtttttaatagaaccatgttggttgcactttgtagtgtttggtgctcatttaaatatctgaacatttactacagtttttaactctactgtgtaatataaaagatcttgcagaagttcttagtgttggtttaatattacctaatgaaagtgatgacatattttttatatctggaatgagcctgttgggatcgcattgcataccttcggggtacaagtcagtttctacactgggtgctgatccttgcacgcgccctttctaccatctcacggtggggatggccgcagggctgtgcacccagaagaagatggctgttagcgtttcggccttcataatggcctgagactttctttctgtaggtggtctggagctgtccggctggtggccccctattttgccatttagcgaacaaccacaggaattttaaaaacaaaaacatcccaagattttttcatttcaaaatgcttcaaagtccacattagatcagatactccgctgtcggcacattcagctgaggttcattacaatcgagactgcaatgtgatctatgtttcatcttgtttttataataaaaagcttcagggaacaagcccaaagccctcaccacagga

SEQ ID NO: 355251 - DNA, 2145 bp, Homo sapiens
tttgtaaaatgctgctgacagatttagagttaactagctcaccactgcctctgcctccaagctgccttttagactgaatagcttttcttgttagccctactttaacatttcttttgaagtggttgtctgcttgaagagggaaacacgtcatgaaactgtaatgcatgaacagaactcaggagttgtctggccagcttagtggtaagatcgagcctcctactgaggccgtccctgcatgcgcctgatgaggaaactgaacttgccccaagtcacatggctgctgccactggtgacatgccaacttaccagatccgagctcctactgctgctttgccacagggagtggtgatggctgcatcgcccggaagtttgcacagtccccagcagctggcagaagaagcaacacgcaaacgagagctgaggctaatgaaaaacagggaagctgcccgggagtgtcgcaggaagaagaaagaatatgtcaaatgtcttgaaaatcgtgtggctgtgcttgaaaaccaaaacaagactctcattgaggaactcaaggccctcaaagatctttattgccataaagtagagtaactgtctttgacttggaccttgtttactctaatcaaggcaggagatgcagcagtcctacttattgccatgtggacttgtgggaaggacacgtgtgacccttaagaatccagtttggattagtgtttgaaattgaattgggaatgttgttccaggatgtggaatgcagccgtgatcacacttaccgagcttactttgatctgtttgtcaatagcatgcaaaaaatgctttgtttgccctttgcttctgctttttttcagggaagctgccaaagaatgtcgacgtcgaaagaaagaatatgtaaaatgtctggagagccgagttgcagtgctggaagtccagaacaagaagcttatagaggaacttgaaaccttgaaagacatttgttctcccaaaacagattactagaaatatttaactatgaactgaaggcagcatgtatagttgcttttgaaggaatacaatatatagctggcaagaatggtggcttcttttctttgtatcattcatcttcttctttaatcacttaacattcctaaaatgcttcactgtacgtagttaagtcgtagctataacttcaaattttttaaaagagacaaactgtaaaaaatgtgtgtattcttaaaatgcaatatttgtaaggcttgttccaatgccacatacttgcagctcccattctatgtgtcatcaatagtgtcctatgcaataaaattatttgcaggtctttaaatcattttaggaaaggatgatcaaaaataatgcatccagcagtacaataaaagtaaaccacaaaaaaatacctcaggaaagaatagaaagaaagtctatctaatgacatgcctatatgagaagaatagcctagatatgaatatatggcatttgcagatttttatattagttgctttgttaaaaaaaaaaagattgtattgctgtccttgaatgccatagtcaaagagagtttttaatagaaccatgttggttgcactttgtagtgtttggtgctcatttaaatatctgaacatttactacagtttttaactctactgtgtaatataaaagatcttgcagaagttcttagtgttggtttaatattacctaatgaaagtgatgacatattttttatatctggaatgagcctgttgggatcgcattgcataccttcggggtacaagtcagtttctacactgggtgctgatccttgcacgcgccctttctaccatctcacggtggggatggccgcagggctgtgcacccagaagaagatggctgttagcgtttcggccttcataatggcctgagactttctttctgtaggtggtctggagctgtccggctggtggccccctattttgccatttagcgaacaaccacaggaattttaaaaacaaaaacatcccaagattttttcatttcaaaatgcttcaaagtccacattagatcagatactccgctgtcggcacattcagctgaggttcattacaatcgagactgcaatgtgatctatgtttcatcttgtttttataataaaaagcttcagggaacaagcccaaagccctcaccacagga

SEQ ID NO: 355252 - DNA, 1521 bp, Homo sapiens
  misc_feature (3)..(3): n is a, c, g, or t
  misc_feature (10)..(13): n is a, c, g, or t
  misc_feature (16)..(18): n is a, c, g, or t
  misc_feature (21)..(21): n is a, c, g, or t
atnctgtatnnnnatnnnacngatgaggaaactgaacttgccccaagtcacatggctgctgccactggtgacatgccaacttaccagatccgagctcctactgctgctttgccacagggagtggtgatggctgcatcgcccggaagtttgcacagtccccagcagctggcagaagaagcaacacgcaaacgagagctgaggctaatgaaaaacagggaagctgccaaagaatgtcgacgtcgaaagaaagaatatgtaaaatgtctggagagccgagttgcagtgctggaagtccagaacaagaagcttatagaggaacttgaaaccttgaaagacatttgttctcccaaaacagattactagaaatatttaactatgaactgaaggcagcatgtatagttgcttttgaaggaatacaatatatagctggcaagaatggtggcttcttttctttgtatcattcatcttcttctttaatcacttaacattcctaaaatgcttcactgtacgtagttaagtcgtagctataacttcaaattttttaaaagagacaaactgtaaaaaatgtgtgtattcttaaaatgcaatatttgtaaggcttgttccaatgccacatacttgcagctcccattctatgtgtcatcaatagtgtcctatgcaataaaattatttgcaggtctttaaatcattttaggaaaggatgatcaaaaataatgcatccagcagtacaataaaagtaaaccacaaaaaaatacctcaggaaagaatagaaagaaagtctatctaatgacatgcctatatgagaagaatagcctagatatgaatatatggcatttgcagatttttatattagttgctttgttaaaaaaaaaaagattgtattgctgtccttgaatgccatagtcaaagagagtttttaatagaaccatgttggttgcactttgtagtgtttggtgctcatttaaatatctgaacatttactacagtttttaactctactgtgtaatataaaagatcttgcagaagttcttagtgttggtttaatattacctaatgaaagtgatgacatattttttatatctggaatgagcctgttgggatcgcattgcataccttcggggtacaagtcagtttctacactgggtgctgatccttgcacgcgccctttctaccatctcacggtggggatggccgcagggctgtgcacccagaagaagatggctgttagcgtttcggccttcataatggcctgagactttctttctgtaggtggtctggagctgtccggctggtggccccctattttgccatttagcgaacaaccacaggaattttaaaaacaaaaacatcccaagattttttcatttcaaaatgcttcaaagtccacattagatcagatactccgctgtcggcacattcagctgaggttcattacaatcgagactgcaatgtgatctatgtttcatcttgtttttataataaaaagcttcagggaacaagcccaaagccctcaccacagga

SEQ ID NO: 355253 - DNA, 1866 bp, Homo sapiens
ctaggccccgccccctgacccgcaccttcccgccgcccctccccggttccatttcattgttggattgtggcgcttcactcctgctggcggccggcagggggcggagttcgagcctggatttttttcctcggggcctcccccgggaggccgtcccggcgtgggggaggggaggacggggcgggaggacgcggttcggtcggctgcagcgctacttttggtccggggtcggcagggaggccgcggctaccgcatcacagctgacgtgaggactacgtggggccgctgccggctccgggttgctgggcggcggcgccgctgctgagcggcggtcgggctcgccgtctccacctcctcgcgtccgtaatcagtgacgaggtccgctacgtaaatccctttgcggcggctgccactggtgacatgccaacttaccagatccgagctcctactgctgctttgccacagggagtggtgatggctgcatcgcccggaagtttgcacagtccccagcagctggcagaagaagcaacacgcaaacgagagctgaggctaatgaaaaacagggaagctgccaaagaatgtcgacgtcgaaagaaagaatatgtaaaatgtctggagagccgagttgcagtgctggaagtccagaacaagaagcttatagaggaacttgaaaccttgaaagacatttgttctcccaaaacagattactagaaatatttaactatgaactgaaggcagcatgtatagttgcttttgaaggaatacaatatatagctggcaagaatggtggcttcttttctttgtatcattcatcttcttctttaatcacttaacattcctaaaatgcttcactgtacgtagttaagtcgtagctataacttcaaattttttaaaagagacaaactgtaaaaaatgtgtgtattcttaaaatgcaatatttgtaaggcttgttccaatgccacatacttgcagctcccattctatgtgtcatcaatagtgtcctatgcaataaaattatttgcaggtctttaaatcattttaggaaaggatgatcaaaaataatgcatccagcagtacaataaaagtaaaccacaaaaaaatacctcaggaaagaatagaaagaaagtctatctaatgacatgcctatatgagaagaatagcctagatatgaatatatggcatttgcagatttttatattagttgctttgttaaaaaaaaaaagattgtattgctgtccttgaatgccatagtcaaagagagtttttaatagaaccatgttggttgcactttgtagtgtttggtgctcatttaaatatctgaacatttactacagtttttaactctactgtgtaatataaaagatcttgcagaagttcttagtgttggtttaatattacctaatgaaagtgatgacatattttttatatctggaatgagcctgttgggatcgcattgcataccttcggggtacaagtcagtttctacactgggtgctgatccttgcacgcgccctttctaccatctcacggtggggatggccgcagggctgtgcacccagaagaagatggctgttagcgtttcggccttcataatggcctgagactttctttctgtaggtggtctggagctgtccggctggtggccccctattttgccatttagcgaacaaccacaggaattttaaaaacaaaaacatcccaagattttttcatttcaaaatgcttcaaagtccacattagatcagatactccgctgtcggcacattcagctgaggttcattacaatcgagactgcaatgtgatctatgtttcatcttgtttttataataaaaagcttcagggaacaagcccaaagccctcaccacagga

SEQ ID NO: 355254 - DNA, 1134 bp, Homo sapiens
ctggtacggtcggagttatgggatgcggagccgggtgcggtggagcagcagaggcgccccacgcccgcttcgtgcgctcagctgccccgggacccgcctgcctcctcgcgaacttgggacgagttggaaaatcctccctgagagagccgtgcggctcaggggagcggtttaactcggaaaaggaaaaggaatccagaaacaaatgaccatggaaacagttgaatcccagcatgatggaagtataacagcttctttgacagagagcaagtctgctcatgtgcagactcagactggccaaaattcaatccctgctttagctcaggtagcagcaattgcagagacagatgaatctgcagaatcagaaggtgtaattgattctcataaacgtagagaaatcctttcacgaagaccctcttataggaaaatactgaatgaactgtcctctgatgtgcctggtgttcccaagattgaagaagagagatcagaggaagaaggaacaccacctagtattgctaccatggcagtaccaactagcatatatcagactagcacggggcaatacagtatgtatgctgcaattcgatatgatacagtgctagctttaagtcttctctagttatattgaagcaactcaggttttggcattaaattgttccattttaaaatgcatcattaatacctaaactgtatcatagaatgaaagtatatgttaaaaagtgagatctttgtattgacagctgtcatataattttgaaaagtaaaaattttgactgccgaatatagaagaaaattttggggtaaaaaggagaatttttcctatttacatgtttatattaatctctagtaaaacattgtttttgttgtctttatgatgcatgcgaacataaatgtctgtatttcattcttgttggcttttgttacccacaattacatactattcttactaatctgagagttttctaaagtatgttttcaatgtttcactactctctactctgttaatttgtgctacagtttttcctaaaagagaatggaaaaatgatttaattttttaaactgtagcaattggatagataattttatttgaaattttacacactgaaagctctaaataaacagatacattcacattca

SEQ ID NO: 355255 - DNA, 908 bp, Homo sapiens
ctggtacggtcggagttatgggatgcggagccgggtgcggtggagcagcagaggcgccccacgcccgcttcgtgcgctcagctgccccgggacccgcctgcctcctcgcgaacttgggacgagttggaaaatcctccctgagagagccgtgcggctcaggggagcggtttaactcggaaaaggaaaaggaatccagaagataaataaagaaaacaggaaaggaggaaagcattgattacaaatgtcttaacaatgagcaaatgtgcaaggaaaaaatatattaagacaaatccaagacaaatgaccatggaaacagttgaatcccagcatgatggaagtataacagcttctttgacagagagcaagtctgctcatgtgcagactcagactggccaaaattcaatccctgctttagctcaggtagcagcaattgcagagacagatgaatctgcagaatcagaaggtgtaattgattctcataaacgtagagaaatcctttcacgaagaccctcttataggaaaatactgaatgaactgtcctctgatgtgcctggtgttcccaagattgaagaagagagatcagaggaagaaggaacaccacctagtattgctaccatggcagtaccaactagcatatatcagactagcacggggcaatacattgctatagcccaaggtggaacaatccagatttctaacccaggatctgatggtgttcaggggaactgggcaagggcaattttttcaaaaaccaaatttggaacccaaaaaaacacttttttcccaagggggaaggccttcctcgtttcacaaacgcccaaaggtgctgtgcctttttaaacccaaaaattgttgaggttaacccaagggttaacacggcctaggcaaaatctcagaaagattcccga

SEQ ID NO: 355256 - DNA, 1129 bp, Homo sapiens
gcttctcgttgtgccccgcccgcaagcgccctcctccgggccttcgtgacagccaggtcgtgcgcgggtcatcctgggattggtagttcgctttctctcatttagccagtttctttctctaccggggactccgtgtcccggcatccaccgcggcacctgacccttggcgcttgcgtgttgccctcttccccaccctccctaatttccactccccccaccccacttcgcctgccgcggtcgggtccgcggcctgcgctgtagcggtcgccgccgttccctggaagtagcaacttccctaccccaccccagtcctggtccccgtccagccgctgacgtgaagatgagcagctcagaggaggtgtcctggatttcctggttctgtgggctccgtggcaatgaattcttctgtgaagtggatgaagactacatccaggacaaatttaatcttactggactcaatgagcaggtccctcactatcgacaagctctagacatgatcttggacctggagcctgatgaagaactggaagacaaccccaaccagagtgacctgattgagcaggcagccgagatgctttatggattgatccacgcccgctacatccttaccaaccgtggcatcgcccagatgttggaaaagtaccagcaaggagactttggttactgtcctcgtgtgtactgtgagaaccagccaatgcttcccattggcctttcagacatcccaggtgaagccatggtgaagctctactgccccaagtgcatggatgtgtacacacccaagtcatcaagacaccatcacacggatggcgcctacttcggcactggtttccctcacatgctcttcatggtgcatcccgagtaccggcccaagagacctgccaaccagtttgtgcccaggctctacggtttcaagatccatccgatggcctaccagctgcagctccaagccgccagcaacttcaagagcccagtcaagacgattcgctgattccctcccccacctgtcctgcagtctttgacttttcctttcttttttgccaccctttcaggaaccctgtatggtttttagtttaaattaaaggagtcgttatcgtggtgggaatatgaaataaagtagaagaaaaggcca

SEQ ID NO: 355257 - DNA, 745 bp, Homo sapiens
cggacgcgtgggtcgacccacgcgtcgcgtggatgaagactacatccaggacaaatttaatcttactggactcaatgagcaggtccctcactatcgacaagctctagacatgatcttggacctggagcctgatgaagaactggaagacaaccccaaccagagtgacctgattgagcaggcagccgagatgctttatggattgatccacgcccgctacatccttaccaaccgtggcatcgcccagatgttggaaaagtaccagcaaggagactttggttactgtcctcgtgtgtactgtgagaaccagccaatgcttcccattggcctttcagacatcccaggtgaagccatggtgaagctctactgccccaagtgcatggatgtgtacacacccaagtcatcaagacaccatcacacggatggcgcctacttcggcactggtttccctcacatgctcttcatggtgcatcccgagtaccggcccaagagacctgccaaccagtttgtgcccaggctctacggtttcaagatccatccgatggcctaccagctgcagctccaagccgccagcaacttcaagagcccagtcaagacgattcgctgattccctcccccacctgtcctgcagtctttgacttttcctttcttttttgccaccctttcaggaaccctgtatggtttttagtttaaattaaaggagtcgttatcgtggtgggaatatgaaataaagtagaagaaaaggcca

SEQ ID NO: 355258 - DNA, 833 bp, Homo sapiens
  misc_feature (26)..(26): n is a, c, g, or t
ccggccgactctagaggaaacccaantcggcccgggcaatgaattcttctgtgaagtggatgaagactacatccaggacaaatttaatcttactggactcaatgagcaggtccctcactatcgacaagctctagacatgatcttggacctggagcctgatgaagaactggaagacaaccccaaccagagtgacctgattgagcaggcagccgagatgctttatggattgatccacgcccgctacatccttaccaaccgtggcatcgcccagatgttggaaaagtaccagcaaggagactttggttactgtcctcgtgtgtactgtgagaaccagccaatgcttcccattggcctttcagacatcccaggtgaagccatggtgaagctctactgccccaagtgcatggatgtgtacacacccaagtcatcaagacaccatcacacggatggcgcctacttcggcactggtttccctcacatgctcttcatggtgcatcccgagtaccggcccaagagacctgccaaccagtttgtgcccaggctctacggtttcaagatccatccgatggcctaccagctgcagctccaagccgccagcaacttcaagagcccagtcaagacgattcgctgattccctcccccacctgtcctgcagtctttgacttttcctttcttttttgccaccctttcaggaaccctgtatggtttttagtttaaattaaaggagtcgttatcgtggtgggaatatgaaataaagtagaagaaaaggccaaaaaaataaaaaagagaaccctaaatttgaatataaaaggattattaaaaaaaaaccttgt

SEQ ID NO: 355259 - DNA, 925 bp, Homo sapiens
cggacgcgtgggtcgacccacgcgtcgccgcggtcgggtccgcggcctgcgctgtagcggtcgccgccgttccctggaagtagcaacttccctaccccaccccagtcctggtccccgtccagccgctgacgtgaagatgagcagctcagaggaggtgtcctggatttcctggttctgtgggctccgtggcaatgaattcttctgtgaagtggatgaagactacatccaggacaaatttaatcttactggactcaatgagcaggtccctcactatcgacaagctctagacatgatcttggacctggagcctgatgaagaactggaagacaaccccaaccagagtgacctgattgagcaggcagccgagatgctttatggattgatccacgcccgctacatccttaccaaccgtggcatcgcccagatgttggaaaagtaccagcaaggagactttggttactgtcctcgtgtgtactgtgagaaccagccaatgcttcccattggcctttcagacatcccaggtgaagccatggtgaagctctactgccccaagtgcatggatgtgtacacacccaagtcatcaagacaccatcacacggatggcgcctacttcggcactggtttccctcacatgctcttcatggtgcatcccgagtaccggcccaagagacctgccaaccagtttgtgcccaggctctacggtttcaagatccatccgatggcctaccagctgcagctccaagccgccagcaacttcaagagcccagtcaagacgattcgctgattccctcccccacctgtcctgcagtctttgacttttcctttcttttttgccaccctttcaggaaccctgtatggtttttagtttaaattaaaggagtcgttatcgtggtgggaatatgaaataaagtagaagaaaaggcca

SEQ ID NO: 355260 - DNA, 1270 bp, Homo sapiens
  misc_feature (1135)..(1135): n is a, c, g, or t
gcttctcgttgtgccccgcccgcaagcgccctcctccgggccttcgtgacagccaggtcgtgcgcgggtcatcctgggattggtagttcgctttctctcatttagccagtttctttctctaccggggactccgtgtcccggcatccaccgcggcacctgacccttggcgcttgcgtgttgccctcttccccaccctccctaatttccactccccccaccccacttcgcctgccgcggtcgggtccgcggcctgcgctgtagcggtcgccgccgttccctggaagtagcaacttccctaccccaccccagtcctggtccccgtccagccgctgacgtgaagatgagcagctcagaggaggtgtcctggatttcctggttctgtgggctccgtggcaatgaattcttctgtgaagtggatgaagactacatccaggacaaatttaatcttactggactcaatgagcaggtccctcactatcgacaagctctagacatgatcttggacctggagcctgatgaagaactggaagacaaccccaaccagagtgacctgattgagcaggcagccgagatgctttatggattgatccacgcccgctacatccttaccaaccgtggcatcgcccagatgttggaaaagtaccagcaaggagactttggttactgtcctcgtgtgtactgtgagaaccagccaatgcttcccattggcctttcagacatcccaggtgaagccatggtgaagctctactgccccaagtgcatggatgtgtacacacccaagtcatcaagacaccatcacacggatggcgcctacttcggcactggtttccctcacatgctcttcatggtgcatcccgagtaccggcccaagagacctgccaaccagtttgtgcccaggctctacggtttcaagatccatccgatggcctaccagctgcagctccaagccgccagcaacttcaagagcccagtcaagacgattcgctgattccctcccccacctgtcctgcagtctttgacttttcctttcttttttgccaccctttcaggaaccctgtatggtttttagtttaaattaaaggagtcgttatcgtggtgggaatatgaaataaagtagaagaaaaggccaaaaaanaaaaaagaaactcgggtttggggggaaaaaaaggagggaatgttcgccttgaaggaatggcctaggggttcgaagctttaagagaagaaagaaaaagaaaaagaaaggagacaaataagaaagtaatacataggg

SEQ ID NO: 355261 - DNA, 1246 bp, Homo sapiens
gcttctcgttgtgccccgcccgcaagcgccctcctccgggccttcgtgacagccaggtcgtgcgcgggtcatcctgggattggtagttcgctttctctcatttagccagtttctttctctaccggggactccgtgtcccggcatccaccgcggcacctgacccttggcgcttgcgtgttgccctcttccccaccctccctaatttccactccccccaccccacttcgcctgccgcggtcgggtccgcggcctgcgctgtagcggtcgccgccgttccctggaagtagcaacttccctaccccaccccagtcctggtccccgtccagccgctgacgtgaagatgagcagctcagaggaggtgtcctggatttcctggttctgtgggctccgtggcaatgaattcttctgtgaagtggatgaagactacatccaggacaaatttaatcttactggactcaatgagcaggtccctcactatcgacaagctctagacatgatcttggacctggagcctgatgaagaactggaagacaaccccaaccagagtgacctgattgagcaggcagccgagatgctttatggattgatccacgcccgctacatccttaccaaccgtggcatcgcccagatgttggaaaagtaccagcaaggagactttggttactgtcctcgtgtgtactgtgagaaccagccaatgcttcccattggcctttcagacatcccaggtgaagccatggtgaagctctactgccccaagtgcatggatgtgtacacacccaagtcatcaagacaccatcacacggatggcgcctacttcggcactggtttccctcacatgctcttcatggtgcatcccgagtaccggcccaagagacctgccaaccagtttgtgcccaggctctacggtttcaagatccatccgatggcctaccagctgcagctccaagccgccagcaacttcaagagcccagtcaagacgattcgctgattccctcccccacctgtcctgcagtctttgacttttcctttcttttttgccaccctttcaggaaccctgtatggtttttagtttaaattaaaggagtcgttatcgtggtgggaatatgaaataaagtagaagaaaaggccaaaaaagagagaaggaggagaaagaaaagaaggggggtgcggcgaagagggaccaaatttgggaggactcccgccggaatagggaaagggggagaaagggccccaaaaggggagagga

SEQ ID NO: 355262 - DNA, 1473 bp, Homo sapiens
gcttctcgttgtgccccgcccgcaagcgccctcctccgggccttcgtgacagccaggtcgtgcgcgggtcatcctgggattggtagttcgctttctctcatttagccagtttctttctctaccggggactccgtgtcccggcatccaccgcggcacctgacccttggcgcttgcgtgttgccctcttccccaccctccctaatttccactccccccaccccacttcgcctgccgcggtcgggtccgcggcctgcgctgtagcggtcgccgccgttccctggaagtagcaacttccctaccccaccccagtcctggtccccgtccagccgctgacgtgaagatgagcagctcagaggaggtgtcctggatttcctggttctgtgggctccgtggcaatgaattcttctgtgaagtggatgaagactacatccaggacaaatttaatcttactggactcaatgagcaggtccctcactatcgacaagctctagacatgatcttggacctggagcctgatgaagaactggaagacaaccccaaccagagtgacctgattgagcaggcagccgagatgctttatggattgatccacgcccgctacatccttaccaaccgtggcatcgcccagatgttggaaaagtaccagcaaggagactttggttactgtcctcgtgtgtactgtgagaaccagccaatgcttcccattggcctttcagacatcccaggtgaagccatggtgaagctctactgccccaagtgcatggatgtgtacacacccaagtcatcaagacaccatcacacggatggcgcctacttcggcactggtttccctcacatgctcttcatggtgcatcccgagtaccggcccaagagacctgccaaccagtttgtgcccaggctctacggtttcaagatccatccgatggcctaccagctgcagctccaagccgccagcaacttcaagagcccagtcaagacgattcgctgattccctcccccacctgtcctgcagtctttgacttttcctttcttttttgccaccctttcaggaaccctgtatggtttttagtttaaattaaaggagtcgttatcgtggtgggaatatgaaataaagtagaagaaaaggccatcaaaaaaaaaaaaaaaaaaaaaaaaaaaatttggggggggccggggcctggaaaaggttttcaagcacattcgcggtgggcgccggcgggcgcacccaaggtaggtctatgtggacacttggcccataaacgctggtccccaaaaggggaaaaccccgggtcgaaggattaaagcggctgggtttctccccaccaatttaaaaaaaacgcgccgcggggggaaacaccagcggctgtttctggaaccaatcccgagaaggaggtccgagacggccgtaacgggattcctaccaacaagggtgccaagggggagacgaaaaaaatacgcgggcgggggggggag

SEQ ID NO: 355263 - DNA, 908 bp, Homo sapiens
gggggaggaagcgaccaggtccggcacgaaggagggagaggtggcctgaggagcggaggggggatgtgtggattccggtgaaagggacctgacaatcgcccccaacccctgacgtgaagatgagcagctcagaggaggtgtcctggatttcctggttctgtgggctccgtggcaatgaattcttctgtgaagtggatgaagactacatccaggacaaatttaatcttactggactcaatgagcaggtccctcactatcgacaagctctagacatgatcttggacctggagcctgatgaagaactggaagacaaccccaaccagagtgacctgattgagcaggcagccgagatgctttatggattgatccacgcccgctacatccttaccaaccgtggcatcgcccagatgttggaaaagtaccagcaaggagactttggttactgtcctcgtgtgtactgtgagaaccagccaatgcttcccattggcctttcagacatcccaggtgaagccatggtgaagctctactgccccaagtgcatggatgtgtacacacccaagtcatcaagacaccatcacacggatggcgcctacttcggcactggtttccctcacatgctcttcatggtgcatcccgagtaccggcccaagagacctgccaaccagtttgtgcccaggctctacggtttcaagatccatccgatggcctaccagctgcagctccaagccgccagcaacttcaagagcccagtcaagacgattcgctgattccctcccccacctgtcctgcagtctttgacttttcctttcttttttgccaccctttcaggaaccctgtatggtttttagtttaaattaaaggagtcgttatcgtggtgggaatatgaaataaagtagaagaaaaggcca

SEQ ID NO: 355264 - DNA, 1156 bp, Homo sapiens
  misc_feature (1088)..(1088): n is a, c, g, or t
  misc_feature (1096)..(1096): n is a, c, g, or t
  misc_feature (1105)..(1105): n is a, c, g, or t
  misc_feature (1111)..(1111): n is a, c, g, or t
gcttctcgttgtgccccgcccgcaagcgccctcctccgggccttcgtgacagccaggtcgtgcgcgggtcatcctgggattggtagttcgctttctctcatttagccagtttctttctctaccggggactccgtgtcccggcatccaccgcggcacctgacccttggcgcttgcgtgttgccctcttccccaccctccctaatttccactccccccaccccacttcgcctgccgcggtcgggtccgcggcctgcgctgtagcggtcgccgccgttccctggaagtagcaacttccctaccccaccccagtcctggtccccgtccagccgctgacgtgaagatgagcagctcagaggaggtgtcctggatttcctggttctgtgggctccgtggcaatgaattcttctgtgaagtggatgaagactacatccaggacaaatttaatcttactggactcaatgagcaggtccctcactatcgacaagctctagacatgatcttggacctggagcctgatgaagaactggaagacaaccccaaccagagtgacctgattgagcaggcagccgagatgctttatggattgatccacgcccgctacatccttaccaaccgtggcatcgcccagatgttggaaaagtaccagcaaggagactttggttactgtcctcgtgtgtactgtgagaaccagccaatgcttcccattggcctttcagacatcccaggtgaagccatggtgaagctctactgccccaagtgcatggatgtgtacacacccaagtcatcaagacaccatcacacggatggcgcctacttcggcactggtttccctcacatgctcttcatggtgcatcccgagtaccggcccaagagacctgccaaccagtttgtgcccaggctctacggtttcaagatccatccgatggcctaccagctgcagctccaagccgccagcaacttcaagagcccagtcaagacgattcgctgattccctcccccacctgtcctgcagtctttgacttttcctttcttttttgccaccctttcaggaaccctgtatggtttttagtttaaattaaagggcgtcnggggggantgaaagganaagggnaaaaaacgcaaacagaacaacaaacaaaacggtttgggaacaacg

SEQ ID NO: 355265 - DNA, 1226 bp, Homo sapiens
  misc_feature (1226)..(1226): n is a, c, g, or t
gcttctcgttgtgccccgcccgcaagcgccctcctccgggccttcgtgacagccaggtcgtgcgcgggtcatcctgggattggtagttcgctttctctcatttagccagtttctttctctaccggggactccgtgtcccggcatccaccgcggcacctgacccttggcgcttgcgtgttgccctcttccccaccctccctaatttccactccccccaccccacttcgcctgccgcggtcgggtccgcggcctgcgctgtagcggtcgccgccgttccctggaagtagcaacttccctaccccaccccagtcctggtccccgtccagccgctgacgtgaagatgagcagctcagaggaggtgtcctggatttcctggttctgtgggctccgtggcaatgaattcttctgtgaagtggatgaagactacatccaggacaaatttaatcttactggactcaatgagcaggtccctcactatcgacaagctctagacatgatcttggacctggagcctgatgaagaactggaagacaaccccaaccagagtgacctgattgagcaggcagccgagatgctttatggattgatccacgcccgctacatccttaccaaccgtggcatcgcccagatgttggaaaagtaccagcaaggagactttggttactgtcctcgtgtgtactgtgagaaccagccaatgcttcccattggcctttcagacatcccaggtgaagccatggtgaagctctactgccccaagtgcatggatgtgtacacacccaagtcatcaagacaccatcacacggatggcgcctacttcggcactggtttccctcacatgctcttcatggtgcatcccgagtaccggcccaagagacctgccaaccagtttgtgcccaggctctacggtttcaagatccatccgatggcctaccagctgcagctccaagccgccagcaacttcaagagcccagtcaagacgattcgctgattccctcccccacctgtcctgcagtctttgacttttcctttcttttttgccaccctttcaggaaccgtatgtttagttacataaggagccgtatcgggggaacttaattgttcagaagggacaccaacaaaaaaaaaagggggctaaactcagggcaaagcccttgtaagcaaaagataaaaggggggaatgggaagggttgaacctggtggcccacggaaatgtttggtatcaaacn

SEQ ID NO: 355266 - DNA, 1176 bp, Homo sapiens
gcttctcgttgtgccccgcccgcaagcgccctcctccgggccttcgtgacagccaggtcgtgcgcgggtcatcctgggattggtagttcgctttctctcatttagccagtttctttctctaccggggactccgtgtcccggcatccaccgcggcacctgacccttggcgcttgcgtgttgccctcttccccaccctccctaatttccactccccccaccccacttcgcctgccgcggtcgggtccgcggcctgcgctgtagcggtcgccgccgttccctggaagtagcaacttccctaccccaccccagtcctggtccccgtccagccgctgacgtgaagatgagcagctcagaggaggtgtcctggatttcctggttctgtgggctccgtggcaatgaattcttctgtgaagtggatgaagactacatccaggacaaatttaatcttactggactcaatgagcaggtccctcactatcgacaagctctagacatgatcttggacctggagcctgatgaagaactggaagacaaccccaaccagagtgacctgattgagcaggcagccgagatgctttatggattgatccacgcccgctacatccttaccaaccgtggcatcgcccagatgttggaaaagtaccagcaaggagactttggttactgtcctcgtgtgtactgtgagaaccagccaatgcttcccattggcctttcagacatcccaggtgaagccatggtgaagctctactgccccaagtgcatggatgtgtacacacccaagtcatcaagacaccatcacacggatggcgcctacttcggcactggtttccctcacatgctcttcatggtgcatcccgagtaccggcccaagagacctgccaaccagtttgtgcccaggctctacggtttcaagatccatccgatggcctaccagctgcagctccaagccgccagcaacttcaagagcccagtcaagacgattcgctgattccctcccccacctgtctgagctgattttcttcttttgcaccttcggactgttgtttagtactaagggccgccggggacagaaccgtgaaaaggccaaacaaacaaaaggggggaacctcgggcccccatttaggccaggttaacgcggcacgggggggggtcgggccaccaatattgtgttaaacg

SEQ ID NO: 355267 - DNA, 1717 bp, Homo sapiens
gcttctcgttgtgccccgcccgcaagcgccctcctccgggccttcgtgacagccaggtcgtgcgcgggtcatcctgggattggtagttcgctttctctcatttagccagtttctttctctaccggggactccgtgtcccggcatccaccgcggcacctgacccttggcgcttgcgtgttgccctcttccccaccctccctaatttccactccccccaccccacttcgcctgccgcggtcgggtccgcggcctgcgctgtagcggtcgccgccgttccctggaagtagcaacttccctaccccaccccagtcctggtccccgtccagccgctgacgtgaagatgagcagctcagaggaggtgtcctggatttcctggttctgtgggctccgtggcaatgaattcttctgtgaagtggatgaagactacatccaggacaaatttaatcttactggactcaatgagcaggtccctcactatcgacaagctctagacatgatcttggacctggagcctgatgaagaactggaagacaaccccaaccagagtgacctgattgagcaggcagccgagatgctttatggattgatccacgcccgctacatccttaccaaccgtggcatcgcccagatggtgaggcctctctgctcctacctgcctccttctgagcagtaagagacacaggttcctgcagcaagaagtcatgtttaagccctgtttaaggaagctagctgagaagaggggaagaaccccagaacttgggcctgggaattgaattctgattgggggtcatcctgaagggattgttttcagggagggagacagaccttgaatcagagagttgtgatagactgcctcttcctcaaggaacaaacaacaaatggctctgatggtttgtagcctgcctaattggaagaaaggcaacacagaagtttgagagcccatctagtccagagaaggggcctctggacagaggtgggaggagtgggggacagagtggtatgggttgggctgcgaagggagttgcctcttctttacatctacctgccaaccccttccattgtattcacctcagttggaaaagtaccagcaaggagactttggttactgtcctcgtgtgtactgtgagaaccagccaatgcttcccattggtgagtgttgaagaagggaaaggaaagcaccgtgtggcagtcttatgggaaggagttggggctcaacacattggagcctgagtcctgaggggaggttaggtaggaatagggggatacctggcctgctgagtctggctgtctcccaggcctttcagacatcccaggtgaagccatggtgaagctctactgccccaagtgcatggatgtgtacacacccaagtcatcaagacaccatcacacggatggcgcctacttcggcactggtttccctcacatgctcttcatggtgcatcccgagtaccggcccaagagacctgccaaccagtttgtgcccaggctctacggtttcaagatccatccgatggcctaccagctgcagctccaagccgccagcaacttcaagagcccagtcaagacgattcgctgattccctcccccacctgtcctgcagtctttgacttttcctttcttttttgccaccctttcaggaaccctgtatggtttttagtttaaattaaaggagtcgttatcgtggtgggaatatgaaataaagtagaagaaaaggcca

SEQ ID NO: 355268 - DNA, 772 bp, Homo sapiens
  misc_feature (26)..(26): n is a, c, g, or t
ccggccgactctagaggaaacccaantcggcccgggcaatgaattcttctgtgaagtggatgaagactacatccaggacaaatttaatcttactggactcaatgagcaggtccctcactatcgacaagctctagacatgatcttggacctggagcctgatgaagaactggaagacaaccccaaccagagtgacctgattgagcaggcagccgagatgctttatggattgatccacgcccgctacatccttaccaaccgtggcatcgcccagatgttggaaaagtaccagcaaggagactttggttactgtcctcgtgtgtactgtgagaaccagccaatgcttcccattggcctttcagacatcccaggtgaagccatggtgaagctctactgccccaagtgcatggatgtgtacacacccaagtcatcaagacaccatcacacggatggcgcctacttcggcactggtttccctcacatgctcttcatggtgcatcccgagtaccggcccaagagacctgccaaccagtttgtgcccaggctctacggtttcaagatccatccgatggcctaccagctgcagctccaagccgccagcaacttcaagagcccagtcaagacgattcgctgattccctcccccacctgtcctgcagtctttgacttttcctttcttttttgccaccctttcaggaaccctgtatggtttttagtttaaattaaaggagtcgttatcgtggtgggaatatgaaataaagtagaagaaaaggcca

SEQ ID NO: 355269 - DNA, 934 bp, Homo sapiens
  misc_feature (18)..(19): n is a, c, g, or t
  misc_feature (22)..(22): n is a, c, g, or t
  misc_feature (25)..(25): n is a, c, g, or t
accttaggcagtagaggnnggngtnaatcggccgaggcgcggtcgggtccgcggcctgcgctgtagcggtcgccgccgttccctggaagtagcaacttccctaccccaccccagtcctggtccccgtccagccgctgacgtgaagatgagcagctcagaggaggtgtcctggatttcctggttctgtgggctccgtggcaatgaattcttctgtgaagtggatgaagactacatccaggacaaatttaatcttactggactcaatgagcaggtccctcactatcgacaagctctagacatgatcttggacctggagcctgatgaagaactggaagacaaccccaaccagagtgacctgattgagcaggcagccgagatgctttatggattgatccacgcccgctacatccttaccaaccgtggcatcgcccagatgttggaaaagtaccagcaaggagactttggttactgtcctcgtgtgtactgtgagaaccagccaatgcttcccattggcctttcagacatcccaggtgaagccatggtgaagctctactgccccaagtgcatggatgtgtacacacccaagtcatcaagacaccatcacacggatggcgcctacttcggcactggtttccctcacatgctcttcatggtgcatcccgagtaccggcccaagagacctgccaaccagtttgtgcccaggctctacggtttcaagatccatccgatggcctaccagctgcagctccaagccgccagcaacttcaagagcccagtcaagacgattcgctgattccctcccccacctgtcctgcagtctttgacttttcctttcttttttgccaccctttcaggaaccctgtatggtttttagtttaaattaaaggagtcgttatcgtggtgggaatatgaaataaagtagaagaaaaggcca

SEQ ID NO: 355270 - DNA, 560 bp, Homo sapiens
acaatgcccttcgccttcctcaacgtggcccccgctccaagcccattttctggagccaggaatccactctgtgggttaggaaaggccctcaggaggcggagggaaacctgtggaatgccgagaagccgtgtaatgaaataacgtcacgcctgcccctcaccattactctgaccagggttcgaaggtcacacttagagcctaaggggaaatggagaagtgcaaagggacgagcagaatggctggcaccacctcaggttagcgcactgggacgttccagttctcacaccgcccaccccaccccacccaagtccctacgcacggagccaagccgcacctctcccctcatgaggcaggagcccggaggaaacagtatgcccgtcaagggtctctggcgggactgattcgcactaggggcccaacaggcaataaggacccagcggattggccgaggataggccagtcccctgggcagcagcgccgcgccgggactagaggggaacgtgaggagagctgcggaaagagatccagcctggcttcctcctttccccgccctaagtcag

SEQ ID NO: 355271 - DNA, 1460 bp, Homo sapiens
gcttctcgttgtgccccgcccgcaagcgccctcctccgggccttcgtgacagccaggtcgtgcgcgggtcatcctgggattggtagttcgctttctctcatttagccagtttctttctctaccggggactccgtgtcccggcatccaccgcggcacctgacccttggcgcttgcgtgttgccctcttccccaccctccctaatttccactccccccaccccacttcgcctgccgcggtcgggtccgcggcctgcgctgtagcggtcgccgccgttccctggaagtagcaacttccctaccccaccccagtcctggtccccgtccagccgctgacgtgaagatgagcagctcagaggaggtgtcctggatttcctggttctgtgggctccgtggcaatgaattcttctgtgaagtggatgaagactacatccaggacaaatttaatcttactggactcaatgagcaggtccctcactatcgacaagctctagacatgatcttggacctggagcctgatgaagaactggaagacaaccccaaccagagtgacctgattgagcaggcagccgagatgctttatggattgatccacgcccgctacatccttaccaaccgtggcatcgcccagatgttggaaaagtaccagcaaggagactttggttactgtcctcgtgtgtactgtgagaaccagccaatgcttcccattggcctttcagacatcccaggtgaagccatggtgaagctctactgccccaagtgcatggatgtgtacacacccaagtcatcaagacaccatcacacggatggcgcctacttcggcactggtttccctcacatgctcttcatggtgcatcccgagtaccggcccaagagacctgccaaccagtttgtgcccaggctctacggtttcaagatccatccgatggcctaccagctgcagctccaagccgccagcaacttcaagagcccagtcaagacgattcgctgattccctcccccacctgtcctgcagtctttgacttttcctttcttttttgccaccctttcaggaaccctgtatggtttttagtttaaattaaaggagtcgttatcgtggtgggaatatgaaataaagtagaagaaaaggccaaaaaaaaaagcagtatccgccgcatcctcttccgtgaggcgcgctgagacccggaccggccctcctgagaggatgccggtgcgggcgcccgcggagagggacccgtcgccatgggccgtgtgatccgtggcacagaggaagggcgccgggtctgtgtcccgcgcgcacgttgaagcaccgtaaaggcggctgcgcgctgcgcgcggtggatttcgctgagcggacggttaatcagggctcggtcaggacctctccacgaccgggcggggcgcccttgcagggggtctccggatccgattggttaaaagggacggactgtcatgcgccgagg

SEQ ID NO: 355272 - DNA, 1190 bp, Homo sapiens
gcttctcgttgtgccccgcccgcaagcgccctcctccgggccttcgtgacagccaggtcgtgcgcgggtcatcctgggattggtagttcgctttctctcatttagccagtttctttctctaccggggactccgtgtcccggcatccaccgcggcacctgacccttggcgcttgcgtgttgccctcttccccaccctccctaatttccactccccccaccccacttcgcctgccgcggtcgggtccgcggcctgcgctgtagcggtcgccgccgttccctggaagtagcaacttccctaccccaccccagtcctggtccccgtccagccgctgacgtgaagatgagcagctcagaggaggtgtcctggatttcctggttctgtgggctccgtggcaatgaattcttctgtgaagtggatgaagactacatccaggacaaatttaatcttactggactcaatgagcaggtccctcactatcgacaagctctagacatgatcttggacctggagcctgatgaagaactggaagacaaccccaaccagagtgacctgattgagcaggcagccgagatgctttatggattgatccacgcccgctacatccttaccaaccgtggcatcgcccagatgttggaaaagtaccagcaaggagactttggttactgtcctcgtgtgtactgtgagaaccagccaatgcttcccattggcctttcagacatcccaggtgaagccatggtgaagctctactgccccaagtgcatggatgtgtacacacccaagtcatcaagacaccatcacacggatggcgcctacttcggcactggtttccctcacatgctcttcatggtgcatcccgagtaccggcccaagagacctgccaaccagtttgtgcccaggctctacggtttcaagatccatccgatggcctaccagctgcagctccaagccgccagcaacttcaagagcccagtcaagacgattcgctgattccctcccccacctgtcctgcagtctttgacttttcctttcttttttgccaccctttcaggaaccctgtatggtttttagtttaaattaaaggagtcgttatcgtggtgggaatatgaaataaagtagaagaaaaggccaaaaaaataaaaaagagaaccctaaatttgaatataaaaggattattaaaaaaaaaccttgt

SEQ ID NO: 355273 - DNA, 1054 bp, Homo sapiens
acaatgcccttcgccttcctcaacgtggcccccgctccaagcccattttctggagccaggaatccactctgtgggttaggaaaggccctcaggaggcggagggaaacctgtggaatgccgagaagccgtgtaatgaaataacgtcacgcctgcccctcaccattactctgaccagggttcgaaggtcacacttagagcctaaggggaaatggagaagtgcaaagggacgagcagaatggctggcaccacctcagctgacgtgaagatgagcagctcagaggaggtgtcctggatttcctggttctgtgggctccgtggcaatgaattcttctgtgaagtggatgaagactacatccaggacaaatttaatcttactggactcaatgagcaggtccctcactatcgacaagctctagacatgatcttggacctggagcctgatgaagaactggaagacaaccccaaccagagtgacctgattgagcaggcagccgagatgctttatggattgatccacgcccgctacatccttaccaaccgtggcatcgcccagatgttggaaaagtaccagcaaggagactttggttactgtcctcgtgtgtactgtgagaaccagccaatgcttcccattggcctttcagacatcccaggtgaagccatggtgaagctctactgccccaagtgcatggatgtgtacacacccaagtcatcaagacaccatcacacggatggcgcctacttcggcactggtttccctcacatgctcttcatggtgcatcccgagtaccggcccaagagacctgccaaccagtttgtgcccaggctctacggtttcaagatccatccgatggcctaccagctgcagctccaagccgccagcaacttcaagagcccagtcaagacgattcgctgattccctcccccacctgtcctgcagtctttgacttttcctttcttttttgccaccctttcaggaaccctgtatggtttttagtttaaattaaaggagtcgttatcgtggtgggaatatgaaataaagtagaagaaaaggcca

SEQ ID NO: 355274 - DNA, 999 bp, Homo sapiens
gggggaggaagcgaccaggtccggcacgaaggagggagaggtggcctgaggagcggaggggggatgtgtggattccggtgaaagggacctgacaatcgcccccaacccgtgagaaaaggaggagcccggttcttgcttgagaatgataaacttggaaacccttgggaaaggcgtgggggtcatgcagagacttgtattgctgacgtgaagatgagcagctcagaggaggtgtcctggatttcctggttctgtgggctccgtggcaatgaattcttctgtgaagtggatgaagactacatccaggacaaatttaatcttactggactcaatgagcaggtccctcactatcgacaagctctagacatgatcttggacctggagcctgatgaagaactggaagacaaccccaaccagagtgacctgattgagcaggcagccgagatgctttatggattgatccacgcccgctacatccttaccaaccgtggcatcgcccagatgttggaaaagtaccagcaaggagactttggttactgtcctcgtgtgtactgtgagaaccagccaatgcttcccattggcctttcagacatcccaggtgaagccatggtgaagctctactgccccaagtgcatggatgtgtacacacccaagtcatcaagacaccatcacacggatggcgcctacttcggcactggtttccctcacatgctcttcatggtgcatcccgagtaccggcccaagagacctgccaaccagtttgtgcccaggctctacggtttcaagatccatccgatggcctaccagctgcagctccaagccgccagcaacttcaagagcccagtcaagacgattcgctgattccctcccccacctgtcctgcagtctttgacttttcctttcttttttgccaccctttcaggaaccctgtatggtttttagtttaaattaaaggagtcgttatcgtggtgggaatatgaaataaagtagaagaaaaggcca

SEQ ID NO: 355275 - DNA, 943 bp, Homo sapiens
cggacgcgtgggtcgacccacgcgtcgccgcggtcgggtccgcggcctgcgctgtagcggtcgccgccgttccctggaagtagcaacttccctaccccaccccagtcctggtccccgtccagccgctgacgtgaagatgagcagctcagaggaggtgtcctggatttcctggttctgtgggctccgtggcaatgaattcttctgtgaagcttccatgtcctgacaggtggatgaagactacatccaggacaaatttaatcttactggactcaatgagcaggtccctcactatcgacaagctctagacatgatcttggacctggagcctgatgaagaactggaagacaaccccaaccagagtgacctgattgagcaggcagccgagatgctttatggattgatccacgcccgctacatccttaccaaccgtggcatcgcccagatgttggaaaagtaccagcaaggagactttggttactgtcctcgtgtgtactgtgagaaccagccaatgcttcccattggcctttcagacatcccaggtgaagccatggtgaagctctactgccccaagtgcatggatgtgtacacacccaagtcatcaagacaccatcacacggatggcgcctacttcggcactggtttccctcacatgctcttcatggtgcatcccgagtaccggcccaagagacctgccaaccagtttgtgcccaggctctacggtttcaagatccatccgatggcctaccagctgcagctccaagccgccagcaacttcaagagcccagtcaagacgattcgctgattccctcccccacctgtcctgcagtctttgacttttcctttcttttttgccaccctttcaggaaccctgtatggtttttagtttaaattaaaggagtcgttatcgtggtgggaatatgaaataaagtagaagaaaaggcca

SEQ ID NO: 355276 - DNA, 1571 bp, Homo sapiens
gcttctcgttgtgccccgcccgcaagcgccctcctccgggccttcgtgacagccaggtcgtgcgcgggtcatcctgggattggtagttcgctttctctcatttagccagtttctttctctaccggggactccgtgtcccggcatccaccgcggcacctgacccttggcgcttgcgtgttgccctcttccccaccctccctaatttccactccccccaccccacttcgcctgccgcggtcgggtccgcggcctgcgctgtagcggtcgccgccgttccctggaagtagcaacttccctaccccaccccagtcctggtccccgtccagccgctgacgtgaagatgagcagctcagaggaggtgtcctggatttcctggttctgtgggctccgtggcaatgaattcttctgtgaagtggatgaagactacatccaggacaaatttaatcttactggactcaatgagcaggtccctcactatcgacaagctctagacatgatcttggacctggagcctgatgaagaactggaagacaaccccaaccagagtgacctgattgagcaggcagccgagatgctttatggattgatccacgcccgctacatccttaccaaccgtggcatcgcccagatggtgaggcctctctgctcctacctgcctccttctgagcagtaagagacacaggttcctgcagcaagaagtcatgtttaagccctgtttaaggaagctagctgagaagaggggaagaaccccagaacttgggcctgggaattgaattctgattgggggtcatcctgaagggattgttttcagggagggagacagaccttgaatcagagagttgtgatagactgcctcttcctcaaggaacaaacaacaaatggctctgatggtttgtagcctgcctaattggaagaaaggcaacacagaagtttgagagcccatctagtccagagaaggggcctctggacagaggtgggaggagtgggggacagagtggtatgggttgggctgcgaagggagttgcctcttctttacatctacctgccaaccccttccattgtattcacctcagttggaaaagtaccagcaaggagactttggttactgtcctcgtgtgtactgtgagaaccagccaatgcttcccattggcctttcagacatcccaggtgaagccatggtgaagctctactgccccaagtgcatggatgtgtacacacccaagtcatcaagacaccatcacacggatggcgcctacttcggcactggtttccctcacatgctcttcatggtgcatcccgagtaccggcccaagagacctgccaaccagtttgtgcccaggctctacggtttcaagatccatccgatggcctaccagctgcagctccaagccgccagcaacttcaagagcccagtcaagacgattcgctgattccctcccccacctgtcctgcagtctttgacttttcctttcttttttgccaccctttcaggaaccctgtatggtttttagtttaaattaaaggagtcgttatcgtggtgggaatatgaaataaagtagaagaaaaggcca

SEQ ID NO: 355277 - DNA, 1275 bp, Homo sapiens
gcttctcgttgtgccccgcccgcaagcgccctcctccgggccttcgtgacagccaggtcgtgcgcgggtcatcctgggattggtagttcgctttctctcatttagccagtttctttctctaccggggactccgtgtcccggcatccaccgcggcacctgacccttggcgcttgcgtgttgccctcttccccaccctccctaatttccactccccccaccccacttcgcctgccgcggtcgggtccgcggcctgcgctgtagcggtcgccgccgttccctggaagtagcaacttccctaccccaccccagtcctggtccccgtccagccgctgacgtgaagatgagcagctcagaggaggtgtcctggatttcctggttctgtgggctccgtggcaatgaattcttctgtgaagtggatgaagactacatccaggacaaatttaatcttactggactcaatgagcaggtccctcactatcgacaagctctagacatgatcttggacctggagcctgatgaagaactggaagacaaccccaaccagagtgacctgattgagcaggcagccgagatgctttatggattgatccacgcccgctacatccttaccaaccgtggcatcgcccagatgttggaaaagtaccagcaaggagactttggttactgtcctcgtgtgtactgtgagaaccagccaatgcttcccattggtgagtgttgaagaagggaaaggaaagcaccgtgtggcagtcttatgggaaggagttggggctcaacacattggagcctgagtcctgaggggaggttaggtaggaatagggggatacctggcctgctgagtctggctgtctcccaggcctttcagacatcccaggtgaagccatggtgaagctctactgccccaagtgcatggatgtgtacacacccaagtcatcaagacaccatcacacggatggcgcctacttcggcactggtttccctcacatgctcttcatggtgcatcccgagtaccggcccaagagacctgccaaccagtttgtgcccaggctctacggtttcaagatccatccgatggcctaccagctgcagctccaagccgccagcaacttcaagagcccagtcaagacgattcgctgattccctcccccacctgtcctgcagtctttgacttttcctttcttttttgccaccctttcaggaaccctgtatggtttttagtttaaattaaaggagtcgttatcgtggtgggaatatgaaataaagtagaagaaaaggcca

SEQ ID NO: 355278 - DNA, 6061 bp, Homo sapiens
gctgagatttagccgtgcgatgcccgcgcaggggcgggggccgcgggccaggggaggcgctcagagtccggagccgccgagcgagataaccagcccgagtcatgcagtcttttcgagaaaggtgtggtttccatggcaaacaacagaactaccagcagacctcgcaggaaacatcacgcctagagaattacaggcagccgagtcaggccgggctaagctgcgaccggcagcggctgctcgccaaggactattataacccgcagccttacccgagctatgagggtggcgctggcacgccctctggcactgcagccgcggtggccgccgacaagtaccaccgaggcagcaaggccctgcccacacagcaaggcctgcaggggaggccggctttccctggctacggcgtccaggacagcagcccctacccaggccgctatgctggtgaggagagccttcaggcttggggggccccacagccaccacccccacagccgcagccactacctgcaggggtggccaagtatgatgagaacttgatgaaaaagacagcagtgccccccagcaggcagtatgcagagcagggcgcccaggtgccctttcggactcactccctgcacgtccagcagccaccgccgccccagcagcccctggcataccccaagctccaaaggcagaagctgcagaacgacattgcctcccctctgcccttcccccaggggtggtgggcagggggcccactcctataagagttgcacagcaccgactgcccagccccatgacaggccgctgactgccagctccagcctggccccggggcagcgggtccagaatcttcatgcctaccagtcgggccgcctcagctatgaccagcagcagcagcagcagcagcagcagcagcagcagcagcaagcccttcagagccggcaccatgcccaggaaaccctccattaccaaaacctcgccaagtatcagcactacgggcagcaaggccagggctactgccagccggacgcagccgtccggaccccagagcagtactaccagaccttcagccccagctccagccactcacccgcccgctccgtgggccgctcaccttcctacagttccacaccgtcgccgctgatgccaaacctggagaactttccctacagccagcagccgctcagcaccggggccttccccgcagggatcactgaccacagccacttcatgcccctgctcaatccctccccaacggatgccaccagctctcctgcagagcctcacggcgctgacctcacaggtggagaacatctccaacaccgtccagcagctgctgctctccaaggctgctgtgccgcagaagaaaggtgtcaagaacctcgtgtccaggaccccagagcagcataaaagccagcactgcagccccgaagggagcggctactcagccgagcccgcaggcacaccgctgtcagagccgccgagcagcacgccacagtccacgcatgcggagccgcaggaggccgactacctgagcggctccgaggacccactggagcgcagcttcctctactgcaaccaggcccgtggcagccctgccagggtcaacagcaactcgaaggccaagcccgagtccgtgtccacctgttctgtgacctctcctgacgacatgtccaccaaatctgacgactccttccagagcctacacggcagtctgccgctcgacagcttctccaagttcgtggcgggtgagcgggactgtccgcggctgctgctcagcgccctggcacaggaggacctggcctccgagatcctggggctgcaggaagccatcggtgagaaggccgacaaagcttgggctgaagcacccagcctggtcaaggacagcagcaagccacccttctcgctggagaaccacagcgcctgcctggactctgtggccaagagtgcgtggccccggcctggggagccggaggccctgcccgactccttgcagctggacaagggcggcaatgccaaggacttcagcccagggctgtttgaagacccttccgtggccttcgctacgcctgaccccaaaaagacaactggtcctctctcctttggtaccaagcccacccttggggttcctgctccagaccccactacagcagcttttgactgtttcccggacacaaccgctgccagctcagcggacagcgccaacccctttgcctggccagaggaaaacctgggggatgcttgtcccaggtggggattgcaccctggcgagcttaccaagggcctggagcagggtgggaaggcctcagatggcatcagcaaaggggacacccatgaggcttcggcctgcctgggcttccaggaggaggacccccctggggagaaggtggcctcgttgcccggggacttcaagcaggaggaggtgggtggggtgaaggaggaggcaggtgggctgctgcagtgccccgaggtggccaaggctgaccggtggctggaggacagccggcactgctgttccaccgccgacttcggggacctcccactgctgccacccaccagcaggaaggaggacctggaagctgaggaggagtactcctccctatgtgagctcctgggcagccccgagcagaggcctggcatgcaggacccgctgtcacccaaggccccactcatctgcaccaaggaggaggtggaggaggtgctggactccaaggccggctggggctctccgtgccacctctcaggggagtccgtcatcctgctgggccctacagtgggcaccgagtcaaaggtccagagctggtttgagtcctctctgtcacacatgaagccaggtgaagaggggcctgatggggagcgagctccaggggattccaccacctcggacgcctctctggcccagaagcccaacaagcctgctgtgcccgaggcgcccatcgcaaagaaagagcctgtgccacggggcaaaagcttacggagccgtcgggtgcaccgggggctgcccgaggccgaggactccccatgcagggcaccagtgctgcccaaagacctcttgctccctgaatcctgcacagggcccccccagggacagatggaaggggctggagccccaggccggggggcctcggaagggctccccaggatgtgtactcgttctctcacggccctgagtgagccccgcacgcccggacccccaggcctgaccaccacccctgcacccccagacaaactggggggcaagcagcgagccgccttcaagtcgggcaagcgggtggggaagccctcacccaaggctgcctccagccccagcaacccggccgccctgcctgtggcctccgacagcagcccgatgggctccaagaccaaggagacagactcacccagcacgcctggcaaggaccagcgctccatgatccttcggtcacgcaccaaaacccaggagatcttccactccaagcggcggaggccctctgagggccggctccccaactgccgtgccaccaagaagctcctcgacaacagccacttgcccgccacattcaaggtctccagcagcccccagaaggagggcagggtgagccagcgggcaagggtccccaaacctggtgcaggcagcaagctctctgaccggcccctccatgcgctcaaaaggaagtcggccttcatggcgccggtccccaccaagaagcggaacctggtcttgcggagccgcagcagcagcagcagcaacgccagtggcaatgggggagatgggaaggaggagaggcctgagggttcccccaccctcttcaagaggatgtcttctcccaagaaagccaagcccaccaagggcaatggcgagcctgccacaaagctcccacccccggagacccccgatgcctgcctcaagctcgcctctcgggcagccttccagggggccatgaagaccaaggtgctgccaccccggaagggccggggcctgaagctggaagccatcgtgcagaagatcacctcgcccagcctcaagaagttcgcatgtaaagcgccaggggcctctcctggtaatcctctgagcccatccctttccgacaaagaccgtgggctcaagggtgctgggggcagcccagtgggggtggaagaaggcctggtaaatgtgggcaccgggcagaagctcccaacttctggggctgatccgttatgcagaaatccaaccaacagatccttaaaaggcaaactcatgaacaagggccagtggcacacaaggggccagtgaggacaactctggtggaggaggcaagaagccaaagatggaggagctgggcctggcctcccagcccccggagggcaggccctgccagccccagacaagggcacagaaacagccaggccacaccaactacagcagctattccaagcggaagcgcctcactcggggccgggccaagaacaccacctcttcaccctgtaaggggcgtgccaagcgacgacgacagcagcaggtgctgcccctggatcccgcagagcctgaaatccgcctcaagtacatttcctcttgcaagcggctgaggtcagacagccggacccccgccttctcacccttcgtgcgggtggagaagcgagacgcgttcaccaccatatgcactgttgtcaactcccctggagatgcgcccaagccccacaggaagccttcctcctctgcctcctcttcctcatcctcgtcctcgttctccttggatgcagccggggcctccctggccacactccctggaggctccatcctgcagccgcggccctccttgcccctctcctccacgatgcacttggggcctgtggtttccaaggccctgagtacctcttgccttgtttgctgcctctgccaaaacccggccaacttcaaggaccttggggacctctgtgggccctactaccctgaacactgcctccccaaaaagaagccaaaactcaaggagaaggtgcggccagaaggcacctgtgaggaggcctcgctgccgcttgagagaacactcaaaggtcccgagtgtgcagctgccgccactgccgggaagccccccaggcctgacggcccagctgacccggccaagcagggcccactgcgcaccagtgcccggggcctgtcccggaggctgcagagctgctactgctgtgatggccgggaggatgggggcgaggaggcagccccagccgacaagggagcactgggtgcatgaggcctgtgccgtgtggaccggcggcgtctacctggtggccgggaagctctttgggctgcaggaggccatgaaggtggccgtggacatgcacggtggcactgtggctctggcgcctggtgacttctccctccccggcctcaggtttgcttcactcttccaagggccttcttggtgtgactgtcctgtcctggccacgtccactccaagcagctggtccagatgtgttccagctgccaagaagccggggccaccattgggtgctgccacaaaggatgcctccacacctaccactacccgtgtgccagcgatgcaggtacgagcccgcccaggaacaggagggcattggagcccatccaagcagtccagggggaccctccctgggcacagctccccaaacccaggccccatctcactcttcagtttccctcctctcttgccccagcaattcttttatccttctgtctgcctagacctctgctgggcaatgccagggacatggaaatgaggcattccccaggcacctgcttgaggagtgcccagagcagtgagggaagatagaagcataaattacaatgtggaatgctgtctgcggagccatcattgccaaggggcagggaggatctcaggcctcagagagaaaggggtattggaggttgggcctttgaaggataaataggagttcactcagcagagacaaggggaaaggcactactacaacagcaaaaaccaactgagttgggggtgatgaggttcaaaacagactgagacccatggagcaattgtggaagttttgaagcagggtaatggggtatggaggtaggcccaggctccccgcatcctctccccggtccttcctctcactcatgtattca

SEQ ID NO: 355279 - DNA, 6519 bp, Homo sapiens
tcttgctctccttctccccccgcgcgtcgcccgcccgcccgtccgctcgtccgctcttcctgtgcggaggggatcgcattcctcgcggcacccgcggacaccaggcaggcccggccgggtgcgcggccaaggcccgctccccgcgtccccgggcgccgcccccgcccgcggctgggctccgagagacgagtgggagagcgagtgcagcgagggcgagaggcgagccgagcaggccgccctgcccgcggccctagcgccggcgcgaggagggggcgccgcggcccaccctccttcctgcctggccgcgggccggccgggccgccgcgccccgacccccatggccacccaggcctccgggccgcgaagtcgcagcgccagacccaaggcccccgagtgagcgcgggcgccgaggatctcatctggccaccgcgttctggaagaggcgagagggagagcgtgcgcgagaggagagagacggcgggggaaagggagacggcgagacgcgcagcgccggcgcccgggagacccaggaggagcccgcagataaccagcccgagtcatgcagtcttttcgagaaaggtgtggtttccatggcaaacaacagaactaccagcagacctcgcaggaaacatcacgcctagagaattacaggcagccgagtcaggccgggctaagctgcgaccggcagcggctgctcgccaaggactattataacccgcagccttacccgagctatgagggtggcgctggcacgccctctggcactgcagccgcggtggccgccgacaagtaccaccgaggcagcaaggccctgcccacacagcaaggcctgcaggggaggccggctttccctggctacggcgtccaggacagcagcccctacccaggccgctatgctggtgaggagagccttcaggcttggggggccccacagccaccacccccacagccgcagccactacctgcaggggtggccaagtatgatgagaacttgatgaaaaagacagcagtgccccccagcaggcagtatgcagagcagggcgcccaggtgccctttcggactcactccctgcacgtccagcagccaccgccgccccagcagcccctggcataccccaagctccaaaggcagaagctgcagaacgacattgcctcccctctgcccttcccccaggggtggtgggcagggggcccactcctataagagttgcacagcaccgactgcccagccccatgacaggccgctgactgccagctccagcctggccccggggcagcgggtccagaatcttcatgcctaccagtcgggccgcctcagctatgaccagcagcagcagcagcagcagcagcagcagcagcagcagcaagcccttcagagccggcaccatgcccaggaaaccctccattaccaaaacctcgccaagtatcagcactacgggcagcaaggccagggctactgccagccggacgcagccgtccggaccccagagcagtactaccagaccttcagccccagctccagccactcacccgcccgctccgtgggccgctcaccttcctacagttccacaccgtcgccgctgatgccaaacctggagaactttccctacagccagcagccgctcagcaccggggccttccccgcagggatcactgaccacagccacttcatgcccctgctcaatccctccccaacggatgccaccagctctcctgcagagcctcacggcgctgacctcacaggtggagaacatctccaacaccgtccagcagctgctgctctccaaggctgctgtgccgcagaagaaaggtgtcaagaacctcgtgtccaggaccccagagcagcataaaagccagcactgcagccccgaagggagcggctactcagccgagcccgcaggcacaccgctgtcagagccgccgagcagcacgccacagtccacgcatgcggagccgcaggaggccgactacctgagcggctccgaggacccactggagcgcagcttcctctactgcaaccaggcccgtggcagccctgccagggtcaacagcaactcgaaggccaagcccgagtccgtgtccacctgttctgtgacctctcctgacgacatgtccaccaaatctgacgactccttccagagcctacacggcagtctgccgctcgacagcttctccaagttcgtggcgggtgagcgggactgtccgcggctgctgctcagcgccctggcacaggaggacctggcctccgagatcctggggctgcaggaagccatcggtgagaaggccgacaaagcttgggctgaagcacccagcctggtcaaggacagcagcaagccacccttctcgctggagaaccacagcgcctgcctggactctgtggccaagagtgcgtggccccggcctggggagccggaggccctgcccgactccttgcagctggacaagggcggcaatgccaaggacttcagcccagggctgtttgaagacccttccgtggccttcgctacgcctgaccccaaaaagacaactggtcctctctcctttggtaccaagcccacccttggggttcctgctccagaccccactacagcagcttttgactgtttcccggacacaaccgctgccagctcagcggacagcgccaacccctttgcctggccagaggaaaacctgggggatgcttgtcccaggtggggattgcaccctggcgagcttaccaagggcctggagcagggtgggaaggcctcagatggcatcagcaaaggggacacccatgaggcttcggcctgcctgggcttccaggaggaggacccccctggggagaaggtggcctcgttgcccggggacttcaagcaggaggaggtgggtggggtgaaggaggaggcaggtgggctgctgcagtgccccgaggtggccaaggctgaccggtggctggaggacagccggcactgctgttccaccgccgacttcggggacctcccactgctgccacccaccagcaggaaggaggacctggaagctgaggaggagtactcctccctatgtgagctcctgggcagccccgagcagaggcctggcatgcaggacccgctgtcacccaaggccccactcatctgcaccaaggaggaggtggaggaggtgctggactccaaggccggctggggctctccgtgccacctctcaggggagtccgtcatcctgctgggccctacagtgggcaccgagtcaaaggtccagagctggtttgagtcctctctgtcacacatgaagccaggtgaagaggggcctgatggggagcgagctccaggggattccaccacctcggacgcctctctggcccagaagcccaacaagcctgctgtgcccgaggcgcccatcgcaaagaaagagcctgtgccacggggcaaaagcttacggagccgtcgggtgcaccgggggctgcccgaggccgaggactccccatgcagggcaccagtgctgcccaaagacctcttgctccctgaatcctgcacagggcccccccagggacagatggaaggggctggagccccaggccggggggcctcggaagggctccccaggatgtgtactcgttctctcacggccctgagtgagccccgcacgcccggacccccaggcctgaccaccacccctgcacccccagacaaactggggggcaagcagcgagccgccttcaagtcgggcaagcgggtggggaagccctcacccaaggctgcctccagccccagcaacccggccgccctgcctgtggcctccgacagcagcccgatgggctccaagaccaaggagacagactcacccagcacgcctggcaaggaccagcgctccatgatccttcggtcacgcaccaaaacccaggagatcttccactccaagcggcggaggccctctgagggccggctccccaactgccgtgccaccaagaagctcctcgacaacagccacttgcccgccacattcaaggtctccagcagcccccagaaggagggcagggtgagccagcgggcaagggtccccaaacctggtgcaggcagcaagctctctgaccggcccctccatgcgctcaaaaggaagtcggccttcatggcgccggtccccaccaagaagcggaacctggtcttgcggagccgcagcagcagcagcagcaacgccagtggcaatgggggagatgggaaggaggagaggcctgagggttcccccaccctcttcaagaggatgtcttctcccaagaaagccaagcccaccaagggcaatggcgagcctgccacaaagctcccacccccggagacccccgatgcctgcctcaagctcgcctctcgggcagccttccagggggccatgaagaccaaggtgctgccaccccggaagggccggggcctgaagctggaagccatcgtgcagaagatcacctcgcccagcctcaagaagttcgcatgtaaagcgccaggggcctctcctggtaatcctctgagcccatccctttccgacaaagaccgtgggctcaagggtgctgggggcagcccagtgggggtggaagaaggcctggtaaatgtgggcaccgggcagaagctcccaacttctggggctgatccgttatgcagaaatccaaccaacagatccttaaaaggcaaactcatgaacaagggccagtggcacacaaggggccagtgaggacaactctggtggaggaggcaagaagccaaagatggaggagctgggcctggcctcccagcccccggagggcaggccctgccagccccagacaagggcacagaaacagccaggccacaccaactacagcagctattccaagcggaagcgcctcactcggggccgggccaagaacaccacctcttcaccctgtaaggggcgtgccaagcgacgacgacagcagcaggtgctgcccctggatcccgcagagcctgaaatccgcctcaagtacatttcctcttgcaagcggctgaggtcagacagccggacccccgccttctcacccttcgtgcgggtggagaagcgagacgcgttcaccaccatatgcactgttgtcaactcccctggagatgcgcccaagccccacaggaagccttcctcctctgcctcctcttcctcatcctcgtcctcgttctccttggatgcagccggggcctccctggccacactccctggaggctccatcctgcagccgcggccctccttgcccctctcctccacgatgcacttggggcctgtggtttccaaggccctgagtacctcttgccttgtttgctgcctctgccaaaacccggccaacttcaaggaccttggggacctctgtgggccctactaccctgaacactgcctccccaaaaagaagccaaaactcaaggagaaggtgcggccagaaggcacctgtgaggaggcctcgctgccgcttgagagaacactcaaaggtcccgagtgtgcagctgccgccactgccgggaagccccccaggcctgacggcccagctgacccggccaagcagggcccactgcgcaccagtgcccggggcctgtcccggaggctgcagagctgctactgctgtgatggccgggaggatgggggcgaggaggcagccccagccgacaagggagcactgggtgcatgaggcctgtgccgtgtggaccggcggcgtctacctggtggccgggaagctctttgggctgcaggaggccatgaaggtggccgtggacatgcacggtggcactgtggctctggcgcctggtgacttctccctccccggcctcaggtttgcttcactcttccaagggccttcttggtgtgactgtcctgtcctggccacgtccactccaagcagctggtccagatgtgttccagctgccaagaagccggggccaccattgggtgctgccacaaaggatgcctccacacctaccactacccgtgtgccagcgatgcaggtacgagcccgcccaggaacaggagggcattggagcccatccaagcagtccagggggaccctccctgggcacagctccccaaacccaggccccatctcactcttcagtttccctcctctcttgccccagcaattcttttatccttctgtctgcctagacctctgctgggcaatgccagggacatggaaatgaggcattccccaggcacctgcttgaggagtgcccagagcagtgagggaagatagaagcataaattacaatgtggaatgctgtctgcggagccatcattgccaaggggcagggaggatctcaggcctcagagagaaaggggtattggaggttgggcctttgaaggataaataggagttcactcagcagagacaaggggaaaggcactactacaacagcaaaaaccaactgagttgggggtgatgaggttcaaaacagactgagacccatggagcaattgtggaagttttgaagcagggtaatggggtatggaggtaggcccaggctccccgcatcctctccccggtccttcctctcactcatgtattca

SEQ ID NO: 355280 - DNA, 7248 bp, Homo sapiens
gctgagatttagccgtgcgatgcccgcgcaggggcgggggccgcgggccaggggaggcgctcagagtccggagccgccgagcgagataaccagcccgagtcatgcagtcttttcgagaaaggtgtggtttccatggcaaacaacagaactaccagcagacctcgcaggaaacatcacgcctagagaattacaggcagccgagtcaggccgggctaagctgcgaccggcagcggctgctcgccaaggactattataacccgcagccttacccgagctatgagggtggcgctggcacgccctctggcactgcagccgcggtggccgccgacaagtaccaccgaggcagcaaggccctgcccacacagcaaggcctgcaggggaggccggctttccctggctacggcgtccaggacagcagcccctacccaggccgctatgctggtgaggagagccttcaggcttggggggccccacagccaccacccccacagccgcagccactacctgcaggggtggccaagtatgatgagaacttgatgaaaaagacagcagtgccccccagcaggcagtatgcagagcagggcgcccaggtgccctttcggactcactccctgcacgtccagcagccaccgccgccccagcagcccctggcataccccaagctccaaaggcagaagctgcagaacgacattgcctcccctctgcccttcccccagggtacccactttcctcagcattcccagtccttccccacctcctccacctactcctcctctgtccagggtggtgggcagggggcccactcctataagagttgcacagcaccgactgcccagccccatgacaggccgctgactgccagctccagcctggccccggggcagcgggtccagaatcttcatgcctaccagtcgggccgcctcagctatgaccagcagcagcagcagcagcagcagcagcagcagcagcagcaagcccttcagagccggcaccatgcccaggaaaccctccattaccaaaacctcgccaagtatcagcactacgggcagcaaggccagggctactgccagccggacgcagccgtccggaccccagagcagtactaccagaccttcagccccagctccagccactcacccgcccgctccgtgggccgctcaccttcctacagttccacaccgtcgccgctgatgccaaacctggagaactttccctacagccagcagccgctcagcaccggggccttccccgcagggatcactgaccacagccacttcatgcccctgctcaatccctccccaacggatgccaccagctctgtggacacccaggctggcaactgcaagccccttcagaaggacaagctccctgagaacctgctgtcggatctcagcctgcagagcctcacggcgctgacctcacaggtggagaacatctccaacaccgtccagcagctgctgctctccaaggctgctgtgccgcagaagaaaggtgtcaagaacctcgtgtccaggaccccagagcagcataaaagccagcactgcagccccgaagggagcggctactcagccgagcccgcaggcacaccgctgtcagagccgccgagcagcacgccacagtccacgcatgcggagccgcaggaggccgactacctgagcggctccgaggacccactggagcgcagcttcctctactgcaaccaggcccgtggcagccctgccagggtcaacagcaactcgaaggccaagcccgagtccgtgtccacctgttctgtgacctctcctgacgacatgtccaccaaatctgacgactccttccagagcctacacggcagtctgccgctcgacagcttctccaagttcgtggcgggtgagcgggactgtccgcggctgctgctcagcgccctggcacaggaggacctggcctccgagatcctggggctgcaggaagccatcggtgagaaggccgacaaagcttgggctgaagcacccagcctggtcaaggacagcagcaagccacccttctcgctggagaaccacagcgcctgcctggactctgtggccaagagtgcgtggccccggcctggggagccggaggccctgcccgactccttgcagctggacaagggcggcaatgccaaggacttcagcccagggctgtttgaagacccttccgtggccttcgctacgcctgaccccaaaaagacaactggtcctctctcctttggtaccaagcccacccttggggttcctgctccagaccccactacagcagcttttgactgtttcccggacacaaccgctgccagctcagcggacagcgccaacccctttgcctggccagaggaaaacctgggggatgcttgtcccaggtggggattgcaccctggcgagcttaccaagggcctggagcagggtgggaaggcctcagatggcatcagcaaaggggacacccatgaggcttcggcctgcctgggcttccaggaggaggacccccctggggagaaggtggcctcgttgcccggggacttcaagcaggaggaggtgggtggggtgaaggaggaggcaggtgggctgctgcagtgccccgaggtggccaaggctgaccggtggctggaggacagccggcactgctgttccaccgccgacttcggggacctcccactgctgccacccaccagcaggaaggaggacctggaagctgaggaggagtactcctccctatgtgagctcctgggcagccccgagcagaggcctggcatgcaggacccgctgtcacccaaggccccactcatctgcaccaaggaggaggtggaggaggtgctggactccaaggccggctggggctctccgtgccacctctcaggggagtccgtcatcctgctgggccctacagtgggcaccgagtcaaaggtccagagctggtttgagtcctctctgtcacacatgaagccaggtgaagaggggcctgatggggagcgagctccaggggattccaccacctcggacgcctctctggcccagaagcccaacaagcctgctgtgcccgaggcgcccatcgcaaagaaagagcctgtgccacggggcaaaagcttacggagccgtcgggtgcaccgggggctgcccgaggccgaggactccccatgcagggcaccagtgctgcccaaagacctcttgctccctgaatcctgcacagggcccccccagggacagatggaaggggctggagccccaggccggggggcctcggaagggctccccaggatgtgtactcgttctctcacggccctgagtgagccccgcacgcccggacccccaggcctgaccaccacccctgcacccccagacaaactggggggcaagcagcgagccgccttcaagtcgggcaagcgggtggggaagccctcacccaaggctgcctccagccccagcaacccggccgccctgcctgtggcctccgacagcagcccgatgggctccaagaccaaggagacagactcacccagcacgcctggcaaggaccagcgctccatgatccttcggtcacgcaccaaaacccaggagatcttccactccaagcggcggaggccctctgagggccggctccccaactgccgtgccaccaagaagctcctcgacaacagccacttgcccgccacattcaaggtctccagcagcccccagaaggagggcagggtgagccagcgggcaagggtccccaaacctggtgcaggcagcaagctctctgaccggcccctccatgcgctcaaaaggaagtcggccttcatggcgccggtccccaccaagaagcggaacctggtcttgcggagccgcagcagcagcagcagcaacgccagtggcaatgggggagatgggaaggaggagaggcctgagggttcccccaccctcttcaagaggatgtcttctcccaagaaagccaagcccaccaagggcaatggcgagcctgccacaaagctcccacccccggagacccccgatgcctgcctcaagctcgcctctcgggcagccttccagggggccatgaagaccaaggtgctgccaccccggaagggccggggcctgaagctggaagccatcgtgcagaagatcacctcgcccagcctcaagaagttcgcatgtaaagcgccaggggcctctcctggtaatcctctgagcccatccctttccgacaaagaccgtgggctcaagggtgctgggggcagcccagtgggggtggaagaaggcctggtaaatgtgggcaccgggcagaagctcccaacttctggggctgatccgttatgcagaaatccaaccaacagatccttaaaaggcaaactcatgaacagtaagaaactgtcttctactgactgtttcaaaaccgaggccttcacatccccggaggccctgcagcctggggggactgccctggcgcctaagaagaggagccggaaaggccgggcaggggcccatggactctccaaaggcccgctggagaagcggccctatcttggcccggctctgctcctgactccccgagacagggccagtggcacacaaggggccagtgaggacaactctggtggaggaggcaagaagccaaagatggaggagctgggcctggcctcccagcccccggagggcaggccctgccagccccagacaagggcacagaaacagccaggccacaccaactacagcagctattccaagcggaagcgcctcactcggggccgggccaagaacaccacctcttcaccctgtaaggggcgtgccaagcgacgacgacagcagcaggtgctgcccctggatcccgcagagcctgaaatccgcctcaagtacatttcctcttgcaagcggctgaggtcagacagccggacccccgccttctcacccttcgtgcgggtggagaagcgagacgcgttcaccaccatatgcactgttgtcaactcccctggagatgcgcccaagccccacaggaagccttcctcctctgcctcctcttcctcatcctcgtcctcgttctccttggatgcagccggggcctccctggccacactccctggaggctccatcctgcagccgcggccctccttgcccctctcctccacgatgcacttggggcctgtggtttccaaggccctgagtacctcttgccttgtttgctgcctctgccaaaacccggccaacttcaaggaccttggggacctctgtgggccctactaccctgaacactgcctccccaaaaagaagccaaaactcaaggagaaggtgcggccagaaggcacctgtgaggaggcctcgctgccgcttgagagaacactcaaaggtcccgagtgtgcagctgccgccactgccgggaagccccccaggcctgacggcccagctgacccggccaagcagggcccactgcgcaccagtgcccggggcctgtcccggaggctgcagagctgctactgctgtgatggccgggaggatgggggcgaggaggcagccccagccgacaagggtcgcaaacatgagtgcagcaaggaggctccggcagagcccggcggggaggcccaggagcactgggtgcatgaggcctgtgccgtgtggaccggcggcgtctacctggtggccgggaagctctttgggctgcaggaggccatgaaggtggccgtggacatgatgtgttccagctgccaagaagccggggccaccattgggtgctgccacaaaggatgcctccacacctaccactacccgtgtgccagcgatgcaggttgcatattcatcgaagagaacttttctttgaaatgtcccaaacataagaggctgccgtagtaatccaccccaacggccggaggagccgccggagcccgcctgcccgcccgccgccgaaggagaggagccgcctgcgcagcccccgggcctttgagctgctcccagcgctggtccagagccgatccttgatccgggtcccggatcgtggatccggccgcctagggctcagacttgcggccccgggttgggaggaaaacccgttccggagccgcctgctcccggaaccggacggcacagggcgttcttgcccaccccaggggccaggcttgcggagggggagcccgcggagcggccagactccccggggcgctcagcctccggcgagggtgggagacggctttgtcctggggacactttccctctggaatctcaagacgacgtggcacacattccacgtgggtgctgccgccaccccagtcggtcgtggcgtgcagctgggagccctgggcttgggggtgggggtcgaaacagtactggaagaggcggagggcggctcctagctccgtggactaggcgggggagaaaggaagcctttctgagagcgggctaggccggcactggagaggccggagcctttggaacaaaccgtgcggaacgcgtccaggggccttcccgcccagcctttgccagatctctcgtgcggttcgggcaaagccggggtagacctgggctatgctcagttaggggttgcgggatccccgagtgtgggcgggactgggacaccctttggcctctgtttgtcccctttccagtcctccaccccacccctggagcccagcctgggagcgcaaaacccaagaagcggccagaacgcacctccggctccggcggacgcgcgaccgttgtgcaccaccagggaccgccgcgcctactctgcacgggagcagggacagcgctagatttcgtgtacaaaacctgtgtacccctctatatatatgttacatagaatgtatatatgttgggaacatgctcgcttctcccgtgtgtcgccgccgtgcgtcgtgcgcccgcaacagagccccaaccgggcctttgccgggtaaggggctaccgcgacgccacttgtccacgcagccaccaccggcccgggccagtccctgccagtccgtccgcctgtccgtccgtgtcctcagctctgtccacgcttcgataggcctgacgcagcccccagcccagggccgccctagcaacttcctgtacatatgactgtaaaatggtaaacgtgtgtattatatctggcctcgttatatagtgtatatatatgtatacatatacatatatataatatatatgaagactgtaaatgttaagacgactagtgttcttattagtatattgcttcacactgaagattgtgtgtatcgagctgtttctaaaagatgtttattttccttaagagtaaaaaacagtcattgcattcagaaaa

SEQ ID NO: 355281 - DNA, 7010 bp, Homo sapiens
gctgagatttagccgtgcgatgcccgcgcaggggcgggggccgcgggccaggggaggcgctcagagtccggagccgccgagcgagataaccagcccgagtcatgcagtcttttcgagaaaggtgtggtttccatggcaaacaacagaactaccagcagacctcgcaggaaacatcacgcctagagaattacaggcagccgagtcaggccgggctaagctgcgaccggcagcggctgctcgccaaggactattataacccgcagccttacccgagctatgagggtggcgctggcacgccctctggcactgcagccgcggtggccgccgacaagtaccaccgaggcagcaaggccctgcccacacagcaaggcctgcaggggaggccggctttccctggctacggcgtccaggacagcagcccctacccaggccgctatgctggtgaggagagccttcaggcttggggggccccacagccaccacccccacagccgcagccactacctgcaggggtggccaagtatgatgagaacttgatgaaaaagacagcagtgccccccagcaggcagtatgcagagcagggcgcccaggtgccctttcggactcactccctgcacgtccagcagccaccgccgccccagcagcccctggcataccccaagctccaaaggcagaagctgcagaacgacattgcctcccctctgcccttcccccagggtacccactttcctcagcattcccagtccttccccacctcctccacctactcctcctctgtccagggtggtgggcagggggcccactcctataagagttgcacagcaccgactgcccagccccatgacaggccgctgactgccagctccagcctggccccggggcagcgggtccagaatcttcatgcctaccagtcgggccgcctcagctatgaccagcagcagcagcagcagcagcagcagcagcagcagcagcaagcccttcagagccggcaccatgcccaggaaaccctccattaccaaaacctcgccaagtatcagcactacgggcagcaaggccagggctactgccagccggacgcagccgtccggaccccagagcagtactaccagaccttcagccccagctccagccactcacccgcccgctccgtgggccgctcaccttcctacagttccacaccgtcgccgctgatgccaaacctggagaactttccctacagccagcagccgctcagcaccggggccttccccgcagggatcactgaccacagccacttcatgcccctgctcaatccctccccaacggatgccaccagctctgtggacacccaggctggcaactgcaagccccttcagaaggacaagctccctgagaacctgctgtcggatctcagcctgcagagcctcacggcgctgacctcacaggtggagaacatctccaacaccgtccagcagctgctgctctccaaggctgctgtgccgcagaagaaaggtgtcaagaacctcgtgtccaggaccccagagcagcataaaagccagcactgcagccccgaagggagcggctactcagccgagcccgcaggcacaccgctgtcagagccgccgagcagcacgccacagtccacgcatgcggagccgcaggaggccgactacctgagcggctccgaggacccactggagcgcagcttcctctactgcaaccaggcccgtggcagccctgccagggtcaacagcaactcgaaggccaagcccgagtccgtgtccacctgttctgtgacctctcctgacgacatgtccaccaaatctgacgactccttccagagcctacacggcagtctgccgctcgacagcttctccaagttcgtggcgggtgagcgggactgtccgcggctgctgctcagcgccctggcacaggaggacctggcctccgagatcctggggctgcaggaagccatcggtgagaaggccgacaaagcttgggctgaagcacccagcctggtcaaggacagcagcaagccacccttctcgctggagaaccacagcgcctgcctggactctgtggccaagagtgcgtggccccggcctggggagccggaggccctgcccgactccttgcagctggacaagggcggcaatgccaaggacttcagcccagggctgtttgaagacccttccgtggccttcgctacgcctgaccccaaaaagacaactggtcctctctcctttggtaccaagcccacccttggggttcctgctccagaccccactacagcagcttttgactgtttcccggacacaaccgctgccagctcagcggacagcgccaacccctttgcctggccagaggaaaacctgggggatgcttgtcccaggtggggattgcaccctggcgagcttaccaagggcctggagcagggtgggaaggcctcagatggcatcagcaaaggggacacccatgaggcttcggcctgcctgggcttccaggaggaggacccccctggggagaaggtggcctcgttgcccggggacttcaagcaggaggaggtgggtggggtgaaggaggaggcaggtgggctgctgcagtgccccgaggtggccaaggctgaccggtggctggaggacagccggcactgctgttccaccgccgacttcggggacctcccactgctgccacccaccagcaggaaggaggacctggaagctgaggaggagtactcctccctatgtgagctcctgggcagccccgagcagaggcctggcatgcaggacccgctgtcacccaaggccccactcatctgcaccaaggaggaggtggaggaggtgctggactccaaggccggctggggctctccgtgccacctctcaggggagtccgtcatcctgctgggccctacagtgggcaccgagtcaaaggtccagagctggtttgagtcctctctgtcacacatgaagccaggtgaagaggggcctgatggggagcgagctccaggggattccaccacctcggacgcctctctggcccagaagcccaacaagcctgctgtgcccgaggcgcccatcgcaaagaaagagcctgtgccacggggcaaaagcttacggagccgtcgggtgcaccgggggctgcccgaggccgaggactccccatgcagggcaccagtgctgcccaaagacctcttgctccctgaatcctgcacagggcccccccagggacagatggaaggggctggagccccaggccggggggcctcggaagggctccccaggatgtgtactcgttctctcacggccctgagtgagccccgcacgcccggacccccaggcctgaccaccacccctgcacccccagacaaactggggggcaagcagcgagccgccttcaagtcgggcaagcgggtggggaagccctcacccaaggctgcctccagccccagcaacccggccgccctgcctgtggcctccgacagcagcccgatgggctccaagaccaaggagacagactcacccagcacgcctggcaaggaccagcgctccatgatccttcggtcacgcaccaaaacccaggagatcttccactccaagcggcggaggccctctgagggccggctccccaactgccgtgccaccaagaagctcctcgacaacagccacttgcccgccacattcaaggtctccagcagcccccagaaggagggcagggtgagccagcgggcaagggtccccaaacctggtgcaggcagcaagctctctgaccggcccctccatgcgctcaaaaggaagtcggccttcatggcgccggtccccaccaagaagcggaacctggtcttgcggagccgcagcagcagcagcagcaacgccagtggcaatgggggagatgggaaggaggagaggcctgagggttcccccaccctcttcaagaggatgtcttctcccaagaaagccaagcccaccaagggcaatggcgagcctgccacaaagctcccacccccggagacccccgatgcctgcctcaagctcgcctctcgggcagccttccagggggccatgaagaccaaggtgctgccaccccggaagggccggggcctgaagctggaagccatcgtgcagaagatcacctcgcccagcctcaagaagttcgcatgtaaagcgccaggggcctctcctggtaatcctctgagcccatccctttccgacaaagaccgtgggctcaagggtgctgggggcagcccagtgggggtggaagaaggcctggtaaatgtgggcaccgggcagaagctcccaacttctggggctgatccgttatgcagaaatccaaccaacagatccttaaaaggcaaactcatgaacagtaagaaactgtcttctactgactgtttcaaaaccgaggccttcacatccccggaggccctgcagcctggggggactgccctggcgcctaagaagaggagccggaaaggccgggcaggggcccatggactctccaaaggcccgctggagaagcggccctatcttggcccggctctgctcctgactccccgagacagggccagtggcacacaaggggccagtgaggacaactctggtggaggaggcaagaagccaaagatggaggagctgggcctggcctcccagcccccggagggcaggccctgccagccccagacaagggcacagaaacagccaggccacaccaactacagcagctattccaagcggaagcgcctcactcggggccgggccaagaacaccacctcttcaccctgtaaggggcgtgccaagcgacgacgacagcagcaggtgctgcccctggatcccgcagagcctgaaatccgcctcaagtacatttcctcttgcaagcggctgaggtcagacagccggacccccgccttctcacccttcgtgcgggtggagaagcgagacgcgttcaccaccatatgcactgttgtcaactcccctggagatgcgcccaagccccacaggaagccttcctcctctgcctcctcttcctcatcctcgtcctcgttctccttggatgcagccggggcctccctggccacactccctggaggctccatcctgcagccgcggccctccttgcccctctcctccacgatgcacttggggcctgtggtttccaaggccctgagtacctcttgccttgtttgctgcctctgccaaaacccggccaacttcaaggaccttggggacctctgtgggccctactaccctgaacactgcctccccaaaaagaagccaaaactcaaggagaaggtgcggccagaaggcacctgtgaggaggcctcgctgccgcttgagagaacactcaaaggtcccgagtgtgcagctgccgccactgccgggaagccccccaggcctgacggcccagctgacccggccaagcagggcccactgcgcaccagtgcccggggcctgtcccggaggctgcagagctgctactgctgtgatggccgggaggatgggggcgaggaggcagccccagccgacaagggtcgcaaacatgagtgcagcaaggaggctccggcagagcccggcggggaggcccaggagcactgggtgcatgaggcctgtgccgtgtggaccggcggcgtctacctggtggccgggaagctctttgggctgcaggaggccatgaaggtggccgtggacatgatgtgttccagctgccaagaagccggggccaccattgggtgctgccacaaaggatgcctccacacctaccactacccgtgtgccagcgatgcaggttgcatattcatcgaagagaacttttctttgaaatgtcccaaacataagaggctgccgtagtaatccaccccaacggccggaggagccgccggagcccgcctgcccgcccgccgccgaaggagaggagccgcctgcgcagcccccgggcctttgagctgctcccagcgctggtccagagccgatccttgatccgggtcccggatcgtggatccggccgcctagggctcagacttgcggccccgggttgggaggaaaacccgttccggagccgcctgctcccggaaccggacggcacagggcgttcttgcccaccccaggggccaggcttgcggagggggagcccgcggagcggccagactccccggggcgctcagcctccggcgagggtgggagacggctttgtcctggggacactttccctctggaatctcaagacgacgtggcacacattccacgtgggtgctgccgccaccccagtcggtcgtggcgtgcagctgggagccctgggcttgggggtgggggtcgaaacagtactggaagaggcggagggcggctcctagctccgtggactaggcgggggagaaaggaagcctttctgagagcgggctaggccggcactggagaggccggagcctttggaacaaaccgtgcggaacgccgaccgttgtgcaccaccagggaccgccgcgcctactctgcacgggagcagggacagcgctagatttcgtgtacaaaacctgtgtacccctctatatatatgttacatagaatgtatatatgttgggaacatgctcgcttctcccgtgtgtcgccgccgtgcgtcgtgcgcccgcaacagagccccaaccgggcctttgccgggtaaggggctaccgcgacgccacttgtccacgcagccaccaccggcccgggccagtccctgccagtccgtccgcctgtccgtccgtgtcctcagctctgtccacgcttcgataggcctgacgcagcccccagcccagggccgccctagcaacttcctgtacatatgactgtaaaatggtaaacgtgtgtattatatctggcctcgttatatagtgtatatatatgtatacatatacatatatataatatatatgaagactgtaaatgttaagacgactagtgttcttattagtatattgcttcacactgaagattgtgtgtatcgagctgtttctaaaagatgtttattttccttaagagtaaaaaacagtcattgcattcagaaaa

SEQ ID NO: 355282 - DNA, 1766 bp, Homo sapiens
tcttgctctccttctccccccgcgcgtcgcccgcccgcccgtccgctcgtccgctcttcctgtgcggaggggatcgcattcctcgcggcacccgcggacaccaggcaggcccggccgggtgcgcggccaaggcccgctccccgcgtccccgggcgccgcccccgcccgcggctgggctccgagagacgagtgggagagcgagtgcagcgagggcgagaggcgagccgagcaggccgccctgcccgcggccctagcgccggcgcgaggagggggcgccgcggcccaccctccttcctgcctggccgcgggccggccgggccgccgcgccccgacccccatggccacccaggcctccgggccgcgaagtcgcagcgccagacccaaggcccccgagtgagcgcgggcgccgaggcaagccggtatattcggggcccaggagcaaggaaaagtggccttttgcgtgacacagaagtggacacatcattctgatctcagggcaggctcagccccataactctggcaaaagctctcacaagcaaaagccttggagaggaggagaatgtatcaaggtgagatccaggccccagaagccaactgtggagtgggcaaaataggacctttcccaccagcctagcatccctctggcttctgtggagataaagggaactcaggggtactggagctgcctttctcttccactagactgtggggctctcataggcagggaccctgtcttactcctctttgttttatttttgagacagggtcttgctgtgtggcccaggctggagtgccttggcacaaacacagctcacttcagcctcaacctccagggctcaagcgatcctccagcatcagtctcctgagtagctgggatcacaggcgcccgacaccacacgtagctaattttaaatttttttttttttctagagacaggggtcttgccatggctggtcttgaagtcctgggctcaagcgatcctccctctttggcctcccaaagtgctgggattacaggagtgagtcactgcacccagccttactcctctttagactcccaagcctagaccaatggctttcaaattcttgcccgtgacctatagtaagaaatacatcgtaggtaactacacaggtcacactgtatatagctgaaacaaaagtttactgaaataactcccttactgtgtctgctggtctgtaatcctttttgttcttgtgtatttgttttttttttaattactgattgctacccacgaaattaattttgcaatccactgatgggtcatacccagaatttgaaaaaaacaagcctaggaaatgaatttgccatctattcatgcaacaaatgttaattgcaaccctaataattcctctcatgttaaactactcaagtaacacttggatacttgggtgaaaaatgcaaataagccagaaatatatgtagtaaaagtaaaagttcccttggcaccctccctgcaggtaaccccagttaatagtttgaacgtatccttccagactttttgttactcacttaatgcatatatatatatatatatgtatgtatgtatgtatattacatataccaatccatgcatagttttctttttccccaagtgaggacatactgtgggctcttcctcggcagcttcctttttcctctccgtttgtcttggagaggttggttgtgtggcgaagtccttcagggcaagttctgggttgactcctggctccaccacatactgaacaggccatttacctctctgtgcc

SEQ ID NO: 355283 - DNA, 6010 bp, Homo sapiens
tcttgctctccttctccccccgcgcgtcgcccgcccgcccgtccgctcgtccgctcttcctgtgcggaggggatcgcattcctcgcggcacccgcggacaccaggcaggcccggccgggtgcgcggccaaggcccgctccccgcgtccccgggcgccgcccccgcccgcggctgggctccgagagacgagtgggagagcgagtgcagcgagggcgagaggcgagccgagcaggccgccctgcccgcggccctagcgccggcgcgaggagggggcgccgcggcccaccctccttcctgcctggccgcgggccggccgggccgccgcgccccgacccccatggccacccaggcctccgggccgcgaagtcgcagcgccagacccaaggcccccgagtgagcgcgggcgccgaggatctcatctggccaccgcgttctggaagaggcgagagggagagcgtgcgcgagaggagagagacggcgggggaaagggagacggcgagacgcgcagcgccggcgcccgggagacccaggaggagcccgcagataaccagcccgagtcatgcagtcttttcgagaaaggtgtggtttccatggcaaacaacagaactaccagcagacctcgcaggaaacatcacgcctagagaattacaggcagccgagtcaggccgggctaagctgcgaccggcagcggctgctcgccaaggactattataacccgcagccttacccgagctatgagggtggcgctggcacgccctctggcactgcagccgcggtggccgccgacaagtaccaccgaggcagcaaggccctgcccacacagcaaggcctgcaggggaggccggctttccctggctacggcgtccaggacagcagcccctacccaggccgctatgctggtgaggagagccttcaggcttggggggccccacagccaccacccccacagccgcagccactacctgcaggggtggccaagtatgatgagaacttgatgaaaaagacagcagtgccccccagcaggcagtatgcagagcagggcgcccaggtgccctttcggactcactccctgcacgtccagcagccaccgccgccccagcagcccctggcataccccaagctccaaaggcagaagctgcagaacgacattgcctcccctctgcccttcccccagggtacccactttcctcagcattcccagtccttccccacctcctccacctactcctcctctgtccagggtggtgggcagggggcccactcctataagagttgcacagcaccgactgcccagccccatgacaggccgctgactgccagctccagcctggccccggggcagcgggtccagaatcttcatgcctaccagtcgggccgcctcagctatgaccagcagcagcagcagcagcagcagcagcagcagcagcagcaagcccttcagagccggcaccatgcccaggaaaccctccattaccaaaacctcgccaagtatcagcactacgggcagcaaggccagggctactgccagccggacgcagccgtccggaccccagagcagtactaccagaccttcagccccagctccagccactcacccgcccgctccgtgggccgctcaccttcctacagttccacaccgtcgccgctgatgccaaacctggagaactttccctacagccagcagccgctcagcaccggggccttccccgcagggatcactgaccacagccacttcatgcccctgctcaatccctccccaacggatgccaccagctctgtggacacccaggctggcaactgcaagccccttcagaaggacaagctccctgagaacctgctgtcggatctcagcctgcagagcctcacggcgctgacctcacaggtggagaacatctccaacaccgtccagcagctgctgctctccaaggctgctgtgccgcagaagaaaggtgtcaagaacctcgtgtccaggaccccagagcagcataaaagccagcactgcagccccgaagggagcggctactcagccgagcccgcaggcacaccgctgtcagagccgccgagcagcacgccacagtccacgcatgcggagccgcaggaggccgactacctgagcggctccgaggacccactggagcgcagcttcctctactgcaaccaggcccgtggcagccctgccagggtcaacagcaactcgaaggccaagcccgagtccgtgtccacctgttctgtgacctctcctgacgacatgtccaccaaatctgacgactccttccagagcctacacggcagtctgccgctcgacagcttctccaagttcgtggcgggtgagcgggactgtccgcggctgctgctcagcgccctggcacaggaggacctggcctccgagatcctggggctgcaggaagccatcggtgagaaggccgacaaagcttgggctgaagcacccagcctggtcaaggacagcagcaagccacccttctcgctggagaaccacagcgcctgcctggactctgtggccaagagtgcgtggccccggcctggggagccggaggccctgcccgactccttgcagctggacaagggcggcaatgccaaggacttcagcccagggctgtttgaagacccttccgtggccttcgctacgcctgaccccaaaaagacaactggtcctctctcctttggtaccaagcccacccttggggttcctgctccagaccccactacagcagcttttgactgtttcccggacacaaccgctgccagctcagcggacagcgccaacccctttgcctggccagaggaaaacctgggggatgcttgtcccaggtggggattgcaccctggcgagcttaccaagggcctggagcagggtgggaaggcctcagatggcatcagcaaaggggacacccatgaggcttcggcctgcctgggcttccaggaggaggacccccctggggagaaggtggcctcgttgcccggggacttcaagcaggaggaggtgggtggggtgaaggaggaggcaggtgggctgctgcagtgccccgaggtggccaaggctgaccggtggctggaggacagccggcactgctgttccaccgccgacttcggggacctcccactgctgccacccaccagcaggaaggaggacctggaagctgaggaggagtactcctccctatgtgagctcctgggcagccccgagcagaggcctggcatgcaggacccgctgtcacccaaggccccactcatctgcaccaaggaggaggtggaggaggtgctggactccaaggccggctggggctctccgtgccacctctcaggggagtccgtcatcctgctgggccctacagtgggcaccgagtcaaaggtccagagctggtttgagtcctctctgtcacacatgaagccaggtgaagaggggcctgatggggagcgagctccaggggattccaccacctcggacgcctctctggcccagaagcccaacaagcctgctgtgcccgaggcgcccatcgcaaagaaagagcctgtgccacggggcaaaagcttacggagccgtcgggtgcaccgggggctgcccgaggccgaggactccccatgcagggcaccagtgctgcccaaagacctcttgctccctgaatcctgcacagggcccccccagggacagatggaaggggctggagccccaggccggggggcctcggaagggctccccaggatgtgtactcgttctctcacggccctgagtgagccccgcacgcccggacccccaggcctgaccaccacccctgcacccccagacaaactggggggcaagcagcgagccgccttcaagtcgggcaagcgggtggggaagccctcacccaaggctgcctccagccccagcaacccggccgccctgcctgtggcctccgacagcagcccgatgggctccaagaccaaggagacagactcacccagcacgcctggcaaggaccagcgctccatgatccttcggtcacgcaccaaaacccaggagatcttccactccaagcggcggaggccctctgagggccggctccccaactgccgtgccaccaagaagctcctcgacaacagccacttgcccgccacattcaaggtctccagcagcccccagaaggagggcagggtgagccagcgggcaagggtccccaaacctggtgcaggcagcaagctctctgaccggcccctccatgcgctcaaaaggaagtcggccttcatggcgccggtccccaccaagaagcggaacctggtcttgcggagccgcagcagcagcagcagcaacgccagtggcaatgggggagatgggaaggaggagaggcctgagggttcccccaccctcttcaagaggatgtcttctcccaagaaagccaagcccaccaagggcaatggcgagcctgccacaaagctcccacccccggagacccccgatgcctgcctcaagctcgcctctcgggcagccttccagggggccatgaagaccaaggtgctgccaccccggaagggccggggcctgaagctggaagccatcgtgcagaagatcacctcgcccagcctcaagaagttcgcatgtaaagcgccaggggcctctcctggtaatcctctgagcccatccctttccgacaaagaccgtgggctcaagggtgctgggggcagcccagtgggggtggaagaaggcctggtaaatgtgggcaccgggcagaagctcccaacttctggggctgatccgttatgcagaaatccaaccaacagatccttaaaaggcaaactcatgaacagtaagaaactgtcttctactgactgtttcaaaaccgaggccttcacatccccggaggccctgcagcctggggggactgccctggcgcctaagaagaggagccggaaaggccgggcaggggcccatggactctccaaaggcccgctggagaagcggccctatcttggcccggctctgctcctgactccccgagacagggccagtggcacacaaggggccagtgaggacaactctggtggaggaggcaagaagccaaagatggaggagctgggcctggcctcccagcccccggagggcaggccctgccagccccagacaagggcacagaaacagccaggccacaccaactacagcagctattccaagcggaagcgcctcactcggggccgggccaagaacaccacctcttcaccctgtaaggggcgtgccaagcgacgacgacagcagcaggtgctgcccctggatcccgcagagcctgaaatccgcctcaagtacatttcctcttgcaagcggctgaggtcagacagccggacccccgccttctcaccccctggagcccagcctgggagcgcaaaacccaagaagcggccagaacgcacctccggctccggcggacgcgcgaccgttgtgcaccaccagggaccgccgcgcctactctgcacgggagcagggacagcgctagatttcgtgtacaaaacctgtgtacccctctatatatatgttacatagaatgtatatatgttgggaacatgctcgcttctcccgtgtgtcgccgccgtgcgtcgtgcgcccgcaacagagccccaaccgggcctttgccgggtaaggggctaccgcgacgccacttgtccacgcagccaccaccggcccgggccagtccctgccagtccgtccgcctgtccgtccgtgtcctcagctctgtccacgcttcgataggcctgacgcagcccccagcccagggccgccctagcaacttcctgtacatatgactgtaaaatggtaaacgtgtgtattatatctggcctcgttatatagtgtatatatatgtatacatatacatatatataatatatatgaagactgtaaatgttaagacgactagtgttcttattagtatattgcttcacactgaagattgtgtgtatcgagctgtttctaaaagatgtttattttccttaagagtaaaaaacagtcattgcattcagaaaa

SEQ ID NO: 355284 - DNA, 6335 bp, Homo sapiens
cgccccacagacggcggcgcagcccgccgcccttttcgaggccggccccccctctcacgcgccttgaaggcaagccggtatattcggggcccaggagcaaggaaaagtggccttttgcgtgacacagaagtggacacatcattctgatctcagggcaggctcagccccataactctggcaaaagctctcacaagcaaaagccttggagaggaggagaatgtatcaaggatctcatctggccaccgcgttctggaagaggcgagagggagagcgtgcgcgagaggagagagacggcgggggaaagggagacggcgagacgcgcagcgccggcgcccgggagacccaggaggagcccgcagataaccagcccgagtcatgcagtcttttcgagaaaggtgtggtttccatggcaaacaacagaactaccagcagacctcgcaggaaacatcacgcctagagaattacaggcagccgagtcaggccgggctaagctgcgaccggcagcggctgctcgccaaggactattataacccgcagccttacccgagctatgagggtggcgctggcacgccctctggcactgcagccgcggtggccgccgacaagtaccaccgaggcagcaaggccctgcccacacagcaaggcctgcaggggaggccggctttccctggctacggcgtccaggacagcagcccctacccaggccgctatgctggtgaggagagccttcaggcttggggggccccacagccaccacccccacagccgcagccactacctgcaggggtggccaagtatgatgagaacttgatgaaaaagacagcagtgccccccagcaggcagtatgcagagcagggcgcccaggtgccctttcggactcactccctgcacgtccagcagccaccgccgccccagcagcccctggcataccccaagctccaaaggcagaagctgcagaacgacattgcctcccctctgcccttcccccaggggtggtgggcagggggcccactcctataagagttgcacagcaccgactgcccagccccatgacaggccgctgactgccagctccagcctggccccggggcagcgggtccagaatcttcatgcctaccagtcgggccgcctcagctatgaccagcagcagcagcagcagcagcagcagcagcagcagcagcaagcccttcagagccggcaccatgcccaggaaaccctccattaccaaaacctcgccaagtatcagcactacgggcagcaaggccagggctactgccagccggacgcagccgtccggaccccagagcagtactaccagaccttcagccccagctccagccactcacccgcccgctccgtgggccgctcaccttcctacagttccacaccgtcgccgctgatgccaaacctggagaactttccctacagccagcagccgctcagcaccggggccttccccgcagggatcactgaccacagccacttcatgcccctgctcaatccctccccaacggatgccaccagctctcctgcagagcctcacggcgctgacctcacaggtggagaacatctccaacaccgtccagcagctgctgctctccaaggctgctgtgccgcagaagaaaggtgtcaagaacctcgtgtccaggaccccagagcagcataaaagccagcactgcagccccgaagggagcggctactcagccgagcccgcaggcacaccgctgtcagagccgccgagcagcacgccacagtccacgcatgcggagccgcaggaggccgactacctgagcggctccgaggacccactggagcgcagcttcctctactgcaaccaggcccgtggcagccctgccagggtcaacagcaactcgaaggccaagcccgagtccgtgtccacctgttctgtgacctctcctgacgacatgtccaccaaatctgacgactccttccagagcctacacggcagtctgccgctcgacagcttctccaagttcgtggcgggtgagcgggactgtccgcggctgctgctcagcgccctggcacaggaggacctggcctccgagatcctggggctgcaggaagccatcggtgagaaggccgacaaagcttgggctgaagcacccagcctggtcaaggacagcagcaagccacccttctcgctggagaaccacagcgcctgcctggactctgtggccaagagtgcgtggccccggcctggggagccggaggccctgcccgactccttgcagctggacaagggcggcaatgccaaggacttcagcccagggctgtttgaagacccttccgtggccttcgctacgcctgaccccaaaaagacaactggtcctctctcctttggtaccaagcccacccttggggttcctgctccagaccccactacagcagcttttgactgtttcccggacacaaccgctgccagctcagcggacagcgccaacccctttgcctggccagaggaaaacctgggggatgcttgtcccaggtggggattgcaccctggcgagcttaccaagggcctggagcagggtgggaaggcctcagatggcatcagcaaaggggacacccatgaggcttcggcctgcctgggcttccaggaggaggacccccctggggagaaggtggcctcgttgcccggggacttcaagcaggaggaggtgggtggggtgaaggaggaggcaggtgggctgctgcagtgccccgaggtggccaaggctgaccggtggctggaggacagccggcactgctgttccaccgccgacttcggggacctcccactgctgccacccaccagcaggaaggaggacctggaagctgaggaggagtactcctccctatgtgagctcctgggcagccccgagcagaggcctggcatgcaggacccgctgtcacccaaggccccactcatctgcaccaaggaggaggtggaggaggtgctggactccaaggccggctggggctctccgtgccacctctcaggggagtccgtcatcctgctgggccctacagtgggcaccgagtcaaaggtccagagctggtttgagtcctctctgtcacacatgaagccaggtgaagaggggcctgatggggagcgagctccaggggattccaccacctcggacgcctctctggcccagaagcccaacaagcctgctgtgcccgaggcgcccatcgcaaagaaagagcctgtgccacggggcaaaagcttacggagccgtcgggtgcaccgggggctgcccgaggccgaggactccccatgcagggcaccagtgctgcccaaagacctcttgctccctgaatcctgcacagggcccccccagggacagatggaaggggctggagccccaggccggggggcctcggaagggctccccaggatgtgtactcgttctctcacggccctgagtgagccccgcacgcccggacccccaggcctgaccaccacccctgcacccccagacaaactggggggcaagcagcgagccgccttcaagtcgggcaagcgggtggggaagccctcacccaaggctgcctccagccccagcaacccggccgccctgcctgtggcctccgacagcagcccgatgggctccaagaccaaggagacagactcacccagcacgcctggcaaggaccagcgctccatgatccttcggtcacgcaccaaaacccaggagatcttccactccaagcggcggaggccctctgagggccggctccccaactgccgtgccaccaagaagctcctcgacaacagccacttgcccgccacattcaaggtctccagcagcccccagaaggagggcagggtgagccagcgggcaagggtccccaaacctggtgcaggcagcaagctctctgaccggcccctccatgcgctcaaaaggaagtcggccttcatggcgccggtccccaccaagaagcggaacctggtcttgcggagccgcagcagcagcagcagcaacgccagtggcaatgggggagatgggaaggaggagaggcctgagggttcccccaccctcttcaagaggatgtcttctcccaagaaagccaagcccaccaagggcaatggcgagcctgccacaaagctcccacccccggagacccccgatgcctgcctcaagctcgcctctcgggcagccttccagggggccatgaagaccaaggtgctgccaccccggaagggccggggcctgaagctggaagccatcgtgcagaagatcacctcgcccagcctcaagaagttcgcatgtaaagcgccaggggcctctcctggtaatcctctgagcccatccctttccgacaaagaccgtgggctcaagggtgctgggggcagcccagtgggggtggaagaaggcctggtaaatgtgggcaccgggcagaagctcccaacttctggggctgatccgttatgcagaaatccaaccaacagatccttaaaaggcaaactcatgaacaagggccagtggcacacaaggggccagtgaggacaactctggtggaggaggcaagaagccaaagatggaggagctgggcctggcctcccagcccccggagggcaggccctgccagccccagacaagggcacagaaacagccaggccacaccaactacagcagctattccaagcggaagcgcctcactcggggccgggccaagaacaccacctcttcaccctgtaaggggcgtgccaagcgacgacgacagcagcaggtgctgcccctggatcccgcagagcctgaaatccgcctcaagtacatttcctcttgcaagcggctgaggtcagacagccggacccccgccttctcacccttcgtgcgggtggagaagcgagacgcgttcaccaccatatgcactgttgtcaactcccctggagatgcgcccaagccccacaggaagccttcctcctctgcctcctcttcctcatcctcgtcctcgttctccttggatgcagccggggcctccctggccacactccctggaggctccatcctgcagccgcggccctccttgcccctctcctccacgatgcacttggggcctgtggtttccaaggccctgagtacctcttgccttgtttgctgcctctgccaaaacccggccaacttcaaggaccttggggacctctgtgggccctactaccctgaacactgcctccccaaaaagaagccaaaactcaaggagaaggtgcggccagaaggcacctgtgaggaggcctcgctgccgcttgagagaacactcaaaggtcccgagtgtgcagctgccgccactgccgggaagccccccaggcctgacggcccagctgacccggccaagcagggcccactgcgcaccagtgcccggggcctgtcccggaggctgcagagctgctactgctgtgatggccgggaggatgggggcgaggaggcagccccagccgacaagggagcactgggtgcatgaggcctgtgccgtgtggaccggcggcgtctacctggtggccgggaagctctttgggctgcaggaggccatgaaggtggccgtggacatgcacggtggcactgtggctctggcgcctggtgacttctccctccccggcctcaggtttgcttcactcttccaagggccttcttggtgtgactgtcctgtcctggccacgtccactccaagcagctggtccagatgtgttccagctgccaagaagccggggccaccattgggtgctgccacaaaggatgcctccacacctaccactacccgtgtgccagcgatgcaggtacgagcccgcccaggaacaggagggcattggagcccatccaagcagtccagggggaccctccctgggcacagctccccaaacccaggccccatctcactcttcagtttccctcctctcttgccccagcaattcttttatccttctgtctgcctagacctctgctgggcaatgccagggacatggaaatgaggcattccccaggcacctgcttgaggagtgcccagagcagtgagggaagatagaagcataaattacaatgtggaatgctgtctgcggagccatcattgccaaggggcagggaggatctcaggcctcagagagaaaggggtattggaggttgggcctttgaaggataaataggagttcactcagcagagacaaggggaaaggcactactacaacagcaaaaaccaactgagttgggggtgatgaggttcaaaacagactgagacccatggagcaattgtggaagttttgaagcagggtaatggggtatggaggtaggcccaggctccccgcatcctctccccggtccttcctctcactcatgtattca

SEQ ID NO: 355285 - DNA, 1596 bp, Homo sapiens
gtctggagcctcgcgggcagtgcggctcccctcctggctgcagacaaaaccccacagctgtggggcccccaccctgtcctaaccaccgaaacttctctttggtcacaggttgcatattcatcgaagagaacttttctttgaaatgtcccaaacataagaggctgccgtagtaatccaccccaacggccggaggagccgccggagcccgcctgcccgcccgccgccgaaggagaggagccgcctgcgcagcccccgggcctttgagctgctcccagcgctggtccagagccgatccttgatccgggtcccggatcgtggatccggccgcctagggctcagacttgcggccccgggttgggaggaaaacccgttccggagccgcctgctcccggaaccggacggcacagggcgttcttgcccaccccaggggccaggcttgcggagggggagcccgcggagcggccagactccccggggcgctcagcctccggcgagggtgggagacggctttgtcctggggacactttccctctggaatctcaagacgacgtggcacacattccacgtgggtgctgccgccaccccagtcggtcgtggcgtgcagctgggagccctgggcttgggggtgggggtcgaaacagtactggaagaggcggagggcggctcctagctccgtggactaggcgggggagaaaggaagcctttctgagagcgggctaggccggcactggagaggccggagcctttggaacaaaccgtgcggaacgcgtccaggggccttcccgcccagcctttgccagatctctcgtgcggttcgggcaaagccggggtagacctgggctatgctcagttaggggttgcgggatccccgagtgtgggcgggactgggacaccctttggcctctgtttgtcccctttccagtcctccaccccacccctggagcccagcctgggagcgcaaaacccaagaagcggccagaacgcacctccggctccggcggacgcgcgaccgttgtgcaccaccagggaccgccgcgcctactctgcacgggagcagggacagcgctagatttcgtgtacaaaacctgtgtacccctctatatatatgttacatagaatgtatatatgttgggaacatgctcgcttctcccgtgtgtcgccgccgtgcgtcgtgcgcccgcaacagagccccaaccgggcctttgccgggtaaggggctaccgcgacgccacttgtccacgcagccaccaccggcccgggccagtccctgccagtccgtccgcctgtccgtccgtgtcctcagctctgtccacgcttcgataggcctgacgcagcccccagcccagggccgccctagcaacttcctgtacatatgactgtaaaatggtaaacgtgtgtattatatctggcctcgttatatagtgtatatatatgtatacatatacatatatataatatatatgaagactgtaaatgttaagacgactagtgttcttattagtatattgcttcacactgaagattgtgtgtatcgagctgtttctaaaagatgtttattttccttaagagtaaaaaacagtcattgcattcagaaaa

SEQ ID NO: 355286 - DNA, 6749 bp, Homo sapiens
gctgagatttagccgtgcgatgcccgcgcaggggcgggggccgcgggccaggggaggcgctcagagtccggagccgccgagcgagataaccagcccgagtcatgcagtcttttcgagaaaggtgtggtttccatggcaaacaacagaactaccagcagacctcgcaggaaacatcacgcctagagaattacaggcagccgagtcaggccgggctaagctgcgaccggcagcggctgctcgccaaggactattataacccgcagccttacccgagctatgagggtggcgctggcacgccctctggcactgcagccgcggtggccgccgacaagtaccaccgaggcagcaaggccctgcccacacagcaaggcctgcaggggaggccggctttccctggctacggcgtccaggacagcagcccctacccaggccgctatgctggtgaggagagccttcaggcttggggggccccacagccaccacccccacagccgcagccactacctgcaggggtggccaagtatgatgagaacttgatgaaaaagacagcagtgccccccagcaggcagtatgcagagcagggcgcccaggtgccctttcggactcactccctgcacgtccagcagccaccgccgccccagcagcccctggcataccccaagctccaaaggcagaagctgcagaacgacattgcctcccctctgcccttcccccagggtacccactttcctcagcattcccagtccttccccacctcctccacctactcctcctctgtccagggtggtgggcagggggcccactcctataagagttgcacagcaccgactgcccagccccatgacaggccgctgactgccagctccagcctggccccggggcagcgggtccagaatcttcatgcctaccagtcgggccgcctcagctatgaccagcagcagcagcagcagcagcagcagcagcagcagcagcaagcccttcagagccggcaccatgcccaggaaaccctccattaccaaaacctcgccaagtatcagcactacgggcagcaaggccagggctactgccagccggacgcagccgtccggaccccagagcagtactaccagaccttcagccccagctccagccactcacccgcccgctccgtgggccgctcaccttcctacagttccacaccgtcgccgctgatgccaaacctggagaactttccctacagccagcagccgctcagcaccggggccttccccgcagggatcactgaccacagccacttcatgcccctgctcaatccctccccaacggatgccaccagctctgtggacacccaggctggcaactgcaagccccttcagaaggacaagctccctgagaacctgctgtcggatctcagcctgcagagcctcacggcgctgacctcacaggtggagaacatctccaacaccgtccagcagctgctgctctccaaggctgctgtgccgcagaagaaaggtgtcaagaacctcgtgtccaggaccccagagcagcataaaagccagcactgcagccccgaagggagcggctactcagccgagcccgcaggcacaccgctgtcagagccgccgagcagcacgccacagtccacgcatgcggagccgcaggaggccgactacctgagcggctccgaggacccactggagcgcagcttcctctactgcaaccaggcccgtggcagccctgccagggtcaacagcaactcgaaggccaagcccgagtccgtgtccacctgttctgtgacctctcctgacgacatgtccaccaaatctgacgactccttccagagcctacacggcagtctgccgctcgacagcttctccaagttcgtggcgggtgagcgggactgtccgcggctgctgctcagcgccctggcacaggaggacctggcctccgagatcctggggctgcaggaagccatcggtgagaaggccgacaaagcttgggctgaagcacccagcctggtcaaggacagcagcaagccacccttctcgctggagaaccacagcgcctgcctggactctgtggccaagagtgcgtggccccggcctggggagccggaggccctgcccgactccttgcagctggacaagggcggcaatgccaaggacttcagcccagggctgtttgaagacccttccgtggccttcgctacgcctgaccccaaaaagacaactggtcctctctcctttggtaccaagcccacccttggggttcctgctccagaccccactacagcagcttttgactgtttcccggacacaaccgctgccagctcagcggacagcgccaacccctttgcctggccagaggaaaacctgggggatgcttgtcccaggtggggattgcaccctggcgagcttaccaagggcctggagcagggtgggaaggcctcagatggcatcagcaaaggggacacccatgaggcttcggcctgcctgggcttccaggaggaggacccccctggggagaaggtggcctcgttgcccggggacttcaagcaggaggaggtgggtggggtgaaggaggaggcaggtgggctgctgcagtgccccgaggtggccaaggctgaccggtggctggaggacagccggcactgctgttccaccgccgacttcggggacctcccactgctgccacccaccagcaggaaggaggacctggaagctgaggaggagtactcctccctatgtgagctcctgggcagccccgagcagaggcctggcatgcaggacccgctgtcacccaaggccccactcatctgcaccaaggaggaggtggaggaggtgctggactccaaggccggctggggctctccgtgccacctctcaggggagtccgtcatcctgctgggccctacagtgggcaccgagtcaaaggtccagagctggtttgagtcctctctgtcacacatgaagccaggtgaagaggggcctgatggggagcgagctccaggggattccaccacctcggacgcctctctggcccagaagcccaacaagcctgctgtgcccgaggcgcccatcgcaaagaaagagcctgtgccacggggcaaaagcttacggagccgtcgggtgcaccgggggctgcccgaggccgaggactccccatgcagggcaccagtgctgcccaaagacctcttgctccctgaatcctgcacagggcccccccagggacagatggaaggggctggagccccaggccggggggcctcggaagggctccccaggatgtgtactcgttctctcacggccctgagtgagccccgcacgcccggacccccaggcctgaccaccacccctgcacccccagacaaactggggggcaagcagcgagccgccttcaagtcgggcaagcgggtggggaagccctcacccaaggctgcctccagccccagcaacccggccgccctgcctgtggcctccgacagcagcccgatgggctccaagaccaaggagacagactcacccagcacgcctggcaaggaccagcgctccatgatccttcggtcacgcaccaaaacccaggagatcttccactccaagcggcggaggccctctgagggccggctccccaactgccgtgccaccaagaagctcctcgacaacagccacttgcccgccacattcaaggtctccagcagcccccagaaggagggcagggtgagccagcgggcaagggtccccaaacctggtgcaggcagcaagctctctgaccggcccctccatgcgctcaaaaggaagtcggccttcatggcgccggtccccaccaagaagcggaacctggtcttgcggagccgcagcagcagcagcagcaacgccagtggcaatgggggagatgggaaggaggagaggcctgagggttcccccaccctcttcaagaggatgtcttctcccaagaaagccaagcccaccaagggcaatggcgagcctgccacaaagctcccacccccggagacccccgatgcctgcctcaagctcgcctctcgggcagccttccagggggccatgaagaccaaggtgctgccaccccggaagggccggggcctgaagctggaagccatcgtgcagaagatcacctcgcccagcctcaagaagttcgcatgtaaagcgccaggggcctctcctggtaatcctctgagcccatccctttccgacaaagaccgtgggctcaagggtgctgggggcagcccagtgggggtggaagaaggcctggtaaatgtgggcaccgggcagaagctcccaacttctggggctgatccgttatgcagaaatccaaccaacagatccttaaaaggcaaactcatgaacagtaagaaactgtcttctactgactgtttcaaaaccgaggccttcacatccccggaggccctgcagcctggggggactgccctggcgcctaagaagaggagccggaaaggccgggcaggggcccatggactctccaaaggcccgctggagaagcggccctatcttggcccggctctgctcctgactccccgagacagggccagtggcacacaaggggccagtgaggacaactctggtggaggaggcaagaagccaaagatggaggagctgggcctggcctcccagcccccggagggcaggccctgccagccccagacaagggcacagaaacagccaggccacaccaactacagcagctattccaagcggaagcgcctcactcggggccgggccaagaacaccacctcttcaccctgtaaggggcgtgccaagcgacgacgacagcagcaggtgctgcccctggatcccgcagagcctgaaatccgcctcaagtacatttcctcttgcaagcggctgaggtcagacagccggacccccgccttctcacccttcgtgcgggtggagaagcgagacgcgttcaccaccatatgcactgttgtcaactcccctggagatgcgcccaagccccacaggaagccttcctcctctgcctcctcttcctcatcctcgtcctcgttctccttggatgcagccggggcctccctggccacactccctggaggctccatcctgcagccgcggccctccttgcccctctcctccacgatgcacttggggcctgtggtttccaaggccctgagtacctcttgccttgtttgctgcctctgccaaaacccggccaacttcaaggaccttggggacctctgtgggccctactaccctgaacactgcctccccaaaaagaagccaaaactcaaggagaaggtgcggccagaaggcacctgtgaggaggcctcgctgccgcttgagagaacactcaaaggtcccgagtgtgcagctgccgccactgccgggaagccccccaggcctgacggcccagctgacccggccaagcagggcccactgcgcaccagtgcccggggcctgtcccggaggctgcagagctgctactgctgtgatggccgggaggatgggggcgaggaggcagccccagccgacaagggtcgcaaacatgagtgcagcaaggaggctccggcagagcccggcggggaggcccaggagcactgggtgcatgaggcctgtgccgtgtggaccggcggcgtctacctggtggccgggaagctctttgggctgcaggaggccatgaaggtggccgtggacatgatgtgttccagctgccaagaagccggggccaccattgggtgctgccacaaaggatgcctccacacctaccactacccgtgtgccagcgatgcaggttgcatattcatcgaagagaacttttctttgaaatgtcccaaacataagaggctgccgtagtaatccaccccaacggccggaggagccgccggagcccgcctgcccgcccgccgccgaaggagaggagccgcctgcgcagcccccgggcctttgagctgctcccagcgctggtccagagccgatccttgatccgggtcccggatcgtggatccggccgcctagggctcagacttgcggccccgggttgggaggaaaacccgttccggagccgcctgctcccggaaccggacggcacagggcgttcttgcccaccccaggggccaggcttgcggagggggagcccgcggagcggccagactccccggggcgctcagcctccggcgagggtgggagacggctttgtcctggggacactttccctctggaatctcaagacgacgtggcacacattccacgtgggtgctgccgccaccccagtcggtcgtggcgtgcagctgggagccctgggcttgggggtgggggtcgaaacagtactggaagaggcggagggcggctcctagctccgtggactaggcgggggagaaaggaagcctttgccgggtaaggggctaccgcgacgccacttgtccacgcagccaccaccggcccgggccagtccctgccagtccgtccgcctgtccgtccgtgtcctcagctctgtccacgcttcgataggcctgacgcagcccccagcccagggccgccctagcaacttcctgtacatatgactgtaaaatggtaaacgtgtgtattatatctggcctcgttatatagtgtatatatatgtatacatatacatatatataatatatatgaagactgtaaatgttaagacgactagtgttcttattagtatattgcttcacactgaagattgtgtgtatcgagctgtttctaaaagatgtttattttccttaagagtaaaaaacagtcattgcattcagaaaa

SEQ ID NO: 355287 - DNA, 4609 bp, Homo sapiens
gtcagctgatgggctgcctgccgaggaggccgcagcagtcgccgcgcgaacatggcggccgaaatccactccaggccgcagagcagccgcccggtgctgctgagcaagatcgaggggcaccaggacgccgtcacggccgcgctgctcatccccaaggaggacggcgtgatcacggccagcgaggacagaaccatccgggtatggctgaaaagagacagtggtcaatactggcccagcatttaccacacaatggcctctccttgctctgctatggcttaccatcatgacagcagacggatatttgtgggccaggataatggagctgtaatggaatttcacgtttctgaagattttaataaaatgaactttatcaagacctacccagctcatcagaaccgggtgtctgcgattatcttcagcttggccacagagtgggtgatcagtaccggccacgacaagtgtgtgagctggatgtgcacgcggagcgggaacatgctcgggaggcacttcttcacgtcctgggcttcgtgtctgcaatatgactttgacactcagtatgctttcgttggtgattattctgggcagatcaccctgctgaagcttgaacagaacacgtgttcagtcatcacaaccctcaaaggacatgaaggtagtgtcgcctgcctctggtgggaccctattcagcggttactcttctcaggagcatctgacaacagcatcatcatgtgggacatcggaggaaggaaaggccggacgctgttacttcagggccatcatgacaaggtgcagtcgctgtgctaccttcagctcaccaggcagctcgtctcctgttcctcggacggcggaattgcagtgtggaacatggatgttagcagagaagaggctcctcagtggttggaaagtgattcttgtcagaaatgtgagcagccatttttctggaacataaagcagatgtgggacaccaagacgctggggctaagacaacatcactgcaggaaatgcgggcaggctgtctgcgggaagtgcagcagcaagcgctcaagttacccagtcatgggcttcgagttccaagtccgggtttgtgattcttgttacgactccatcaaagatgaagatcggacttctctagcgacctttcatgaaggaaaacataacatttcccacatgtccatggacattgccaggggactgatggtgacctgtgggaccgaccgcattgtaaagatctgggacatgacacctgtggtgggctgcagtctggcgactgggttttctccgcactgatctgagagctgggcggcgtccacacctaagaacagcagctccaccaaatgaagtccctctcacgcagctccacagcgctgtctcgtgaatggacagtagccacttacaaacaaatcaacatttttaaaaagaaaatgtaaaggtgtgttttggggcatttgtggaacttacccatggggactaatatggaaaaggtctgtccatagtggttccctgaagactggaattacttcagcaaaacttccccatgaacagctaatgtgtagtgaaagaatgagctagcaaatgagttttagcggggacaaaaaatcaaacaaaaaagtgaatgcttagaaccttctcaaagcagtcacaagtacagacacttcacttagcctagggggccttccagggttcttgtggctgttgtcagagcaggagctgggggagggaagacttgttctctctttcttgaggggtggcattaggaacttacgaaaccagagacctttccctatgacttggcagtatgtgaatatcctctacacttagttattgataaacttcttaaagagatctgttattttcaggtagtgccataatctgcacttagcattggcttgcttcagttgtttctcttcccagccagtatgccacaggtgaactttcgaggttgtcattaagtaagttgtgaaatttctgtaataacaaaggcagtccgcattcttccctttcccccaaattcctagggcaaaacttttttatggtgctgttaacatgggagtcacacaagccgcctgactttttctcattgccattagtaatgactgatggaaaacccagccaccactgtgatgcgaaatgatcagtctgttgcctgaaacagcccagtcctcttaactgaaacagcattctacttcttgttccaagatgagcctctgcaatattctggcaatttaatataccccctacaaaagcactccacagcttttacactattttgactttgagttataactagtattattcatgttttcataaaaagaagttagtgacccagagctataatcatccatcaagtcttccacaataattcccaactcataaattgctttcctaacaactagcaaaagctattgttcataatggcatttctaaagcttttgggcactgtgtaccaggatgaggaagagaagaaatgaggagcctgtcttttaatattccagtatttgtgtgtttgattttttttgacaacagtacatatatctatttctctagggatatggaagtaagtggagaagggcctacctttttaaaggacaaatataaaaatagcaacagtatctttgctaatcttactaatggatattgattaaaaaaaaaaaacctcagtactgcatcactgtgttgggatcgtaccaggacaatagggtcattccatatgataaaactaaaggactaaatttgttttataatgatgtcttagagggactgaaaagtttaaggaggcgatcaaactaaaatgtcttaatggctgtgtgacacacgtaaggaaaggaaagggggtcacgcacatcatgtactggaatgatctgcattaaacattgacttgtcttcagaaataagactgaagggttttgttgttccttagagttttcgtgttacatcacctaaagagatttcttttaaaaactttctagactctttgcaaaatgtatattactaacatagtttggaagaaaaattgagtagtggtaagttttgttcaagcacaatgttgaatgttaagcttcctgtattaattttagttcagttaatggttcagcccatacaaaggtgctatcctagggattttatgaattcctgaaaggaaaatagaatatgatcaattccttgccctgtggaagagtgcagaactgtggttttgttttcctttgacttctgtaaaatgtgaccgtttgacatctgtggtagattgaacggaatatcacagctgctgagtttactccatagctttcaaaccttttttattttaagaaattcttgaaaaaccctatgttccatgggaacataaagttattatagtgcctcctaaggggttaatataaatcaaggaggaagtttatatttaaggaagaattggagtgacgtatcttagaaaaggaaaggctgatgtttccatatagcttgctctccaccaggcctatcatttttctttttagagacaaacgtgacaggctagtcttgtctctctcatatgctaggtagcaaatggggtgatatttttatagaagtgggcaaaaattattttctcaattttactgagtaggcacagaagaaaagtacagataggctgatggttattgccttattttgactgcatttctcttaaatggatcatttaaattagttcttcaagtaacagtttactggttgttccattcctgaatatgcaggctaatttgtacagatagggattaaggaatacagactattagagaagatccttatatttacatctagtatatatgtggtaaggaaatgccgattcttcattataaacaagttttaaaattgttctttcttagttcaaatgatagcaatacccctatagcattaggtagaaacaaattattcattacatcgtaaatctctttactatgtcctagctctgtcctgctacctaaaggatataaagaaatattattgctctagaatgtattactttgttctcccatgaaagaattcagtttgttagtacctatatttttaaactggtgaaactgacccaaatatgtaataaataccatagtagctcagacccaaggagatatttttctaaaatcagttttcgttaaagtacttctacttccgttattggatatggtatctcctaaagtgtaaaaaaaatctgttactatatagtgataaaccatctgctcatcgtaagtgtaaggcttaacaaataagtaatacatgctatatttattcaagtgtctattgcttaattgttaattgtgagcagatttattgaatgcctattctattttctgcagtttacaatacaataactctttgagtaagttgaagtttaattgtgcaacaaatttgtattagagtacaatttaaagtgtttttctctatagccttttttgactggggaagcaaggggtaatgttaattagtacactttgttcttgtactagctatgtttctataagatatggtgccctgtgtatcccagagatgctagaaaactgttctttgctcctatttgtgggttctgtttttgtgggtttttttttttttgagaaaatgtacacaataaaacattccttgcttgtta

SEQ ID NO: 355288 - DNA, 4557 bp, Homo sapiens
gtcagctgatgggctgcctgccgaggaggccgcagcagtcgccgcgcgaacatggcggccgaaatccactccaggccgcagagcagccgcccggtgctgctgagcaagatcgaggggcaccaggacgccgtcacggccgcgctgctcatccccaaggaggacggcgtgatcacggccagcgaggacagaaccatccgggtatggctgaaaagagacagtggtcaatactggcccagcatttaccacacaatggcctctccttgctctgctatggcttaccatcatgacagcagacggatatttgtgggccaggataatggagctgtaatggtaggtagcttttagaatgtatttatattatcttcagcttggccacagagtgggtgatcagtaccggccacgacaagtgtgtgagctggatgtgcacgcggagcgggaacatgctcgggaggcacttcttcacgtcctgggcttcgtgtctgcaatatgactttgacactcagtatgctttcgttggtgattattctgggcagatcaccctgctgaagcttgaacagaacacgtgttcagtcatcacaaccctcaaaggacatgaaggtagtgtcgcctgcctctggtgggaccctattcagcggttactcttctcaggagcatctgacaacagcatcatcatgtgggacatcggaggaaggaaaggccggacgctgttacttcagggccatcatgacaaggtgcagtcgctgtgctaccttcagctcaccaggcagctcgtctcctgttcctcggacggcggaattgcagtgtggaacatggatgttagcagagaagaggctcctcagtggttggaaagtgattcttgtcagaaatgtgagcagccatttttctggaacataaagcagatgtgggacaccaagacgctggggctaagacaacatcactgcaggaaatgcgggcaggctgtctgcgggaagtgcagcagcaagcgctcaagttacccagtcatgggcttcgagttccaagtccgggtttgtgattcttgttacgactccatcaaagatgaagatcggacttctctagcgacctttcatgaaggaaaacataacatttcccacatgtccatggacattgccaggggactgatggtgacctgtgggaccgaccgcattgtaaagatctgggacatgacacctgtggtgggctgcagtctggcgactgggttttctccgcactgatctgagagctgggcggcgtccacacctaagaacagcagctccaccaaatgaagtccctctcacgcagctccacagcgctgtctcgtgaatggacagtagccacttacaaacaaatcaacatttttaaaaagaaaatgtaaaggtgtgttttggggcatttgtggaacttacccatggggactaatatggaaaaggtctgtccatagtggttccctgaagactggaattacttcagcaaaacttccccatgaacagctaatgtgtagtgaaagaatgagctagcaaatgagttttagcggggacaaaaaatcaaacaaaaaagtgaatgcttagaaccttctcaaagcagtcacaagtacagacacttcacttagcctagggggccttccagggttcttgtggctgttgtcagagcaggagctgggggagggaagacttgttctctctttcttgaggggtggcattaggaacttacgaaaccagagacctttccctatgacttggcagtatgtgaatatcctctacacttagttattgataaacttcttaaagagatctgttattttcaggtagtgccataatctgcacttagcattggcttgcttcagttgtttctcttcccagccagtatgccacaggtgaactttcgaggttgtcattaagtaagttgtgaaatttctgtaataacaaaggcagtccgcattcttccctttcccccaaattcctagggcaaaacttttttatggtgctgttaacatgggagtcacacaagccgcctgactttttctcattgccattagtaatgactgatggaaaacccagccaccactgtgatgcgaaatgatcagtctgttgcctgaaacagcccagtcctcttaactgaaacagcattctacttcttgttccaagatgagcctctgcaatattctggcaatttaatataccccctacaaaagcactccacagcttttacactattttgactttgagttataactagtattattcatgttttcataaaaagaagttagtgacccagagctataatcatccatcaagtcttccacaataattcccaactcataaattgctttcctaacaactagcaaaagctattgttcataatggcatttctaaagcttttgggcactgtgtaccaggatgaggaagagaagaaatgaggagcctgtcttttaatattccagtatttgtgtgtttgattttttttgacaacagtacatatatctatttctctagggatatggaagtaagtggagaagggcctacctttttaaaggacaaatataaaaatagcaacagtatctttgctaatcttactaatggatattgattaaaaaaaaaaaacctcagtactgcatcactgtgttgggatcgtaccaggacaatagggtcattccatatgataaaactaaaggactaaatttgttttataatgatgtcttagagggactgaaaagtttaaggaggcgatcaaactaaaatgtcttaatggctgtgtgacacacgtaaggaaaggaaagggggtcacgcacatcatgtactggaatgatctgcattaaacattgacttgtcttcagaaataagactgaagggttttgttgttccttagagttttcgtgttacatcacctaaagagatttcttttaaaaactttctagactctttgcaaaatgtatattactaacatagtttggaagaaaaattgagtagtggtaagttttgttcaagcacaatgttgaatgttaagcttcctgtattaattttagttcagttaatggttcagcccatacaaaggtgctatcctagggattttatgaattcctgaaaggaaaatagaatatgatcaattccttgccctgtggaagagtgcagaactgtggttttgttttcctttgacttctgtaaaatgtgaccgtttgacatctgtggtagattgaacggaatatcacagctgctgagtttactccatagctttcaaaccttttttattttaagaaattcttgaaaaaccctatgttccatgggaacataaagttattatagtgcctcctaaggggttaatataaatcaaggaggaagtttatatttaaggaagaattggagtgacgtatcttagaaaaggaaaggctgatgtttccatatagcttgctctccaccaggcctatcatttttctttttagagacaaacgtgacaggctagtcttgtctctctcatatgctaggtagcaaatggggtgatatttttatagaagtgggcaaaaattattttctcaattttactgagtaggcacagaagaaaagtacagataggctgatggttattgccttattttgactgcatttctcttaaatggatcatttaaattagttcttcaagtaacagtttactggttgttccattcctgaatatgcaggctaatttgtacagatagggattaaggaatacagactattagagaagatccttatatttacatctagtatatatgtggtaaggaaatgccgattcttcattataaacaagttttaaaattgttctttcttagttcaaatgatagcaatacccctatagcattaggtagaaacaaattattcattacatcgtaaatctctttactatgtcctagctctgtcctgctacctaaaggatataaagaaatattattgctctagaatgtattactttgttctcccatgaaagaattcagtttgttagtacctatatttttaaactggtgaaactgacccaaatatgtaataaataccatagtagctcagacccaaggagatatttttctaaaatcagttttcgttaaagtacttctacttccgttattggatatggtatctcctaaagtgtaaaaaaaatctgttactatatagtgataaaccatctgctcatcgtaagtgtaaggcttaacaaataagtaatacatgctatatttattcaagtgtctattgcttaattgttaattgtgagcagatttattgaatgcctattctattttctgcagtttacaatacaataactctttgagtaagttgaagtttaattgtgcaacaaatttgtattagagtacaatttaaagtgtttttctctatagccttttttgactggggaagcaaggggtaatgttaattagtacactttgttcttgtactagctatgtttctataagatatggtgccctgtgtatcccagagatgctagaaaactgttctttgctcctatttgtgggttctgtttttgtgggtttttttttttttgagaaaatgtacacaataaaacattccttgcttgtta

SEQ ID NO: 355289 - DNA, 2781 bp, Homo sapiens
ggtaccctcgtcttttgataggcaggtagtgccataatctgcacttagcattggcttgcttcagttgtttctcttcccagccagtatgccacaggtgaactttcgaggttgtcattaagtaagttgtgaaatttctgtaataacaaaggcagtccgcattcttccctttcccccaaattcctagggcaaaacttttttatggtgctgttaacatgggagtcacacaagccgcctgactttttctcattgccattagtaatgactgatggaaaacccagccaccactgtgatgcgaaatgatcagtctgttgcctgaaacagcccagtcctcttaactgaaacagcattctacttcttgttccaagatgagcctctgcaatattctggcaatttaatataccccctacaaaagcactccacagcttttacactattttgactttgagttataactagtattattcatgttttcataaaaagaagttagtgacccagagctataatcatccatcaagtcttccacaataattcccaactcataaattgctttcctaacaactagcaaaagctattgttcataatggcatttctaaagcttttgggcactgtgtaccaggatgaggaagagaagaaatgaggagcctgtcttttaatattccagtatttgtgtgtttgattttttttgacaacagtacatatatctatttctctagggatatggaagtaagtggagaagggcctacctttttaaaggacaaatataaaaatagcaacagtatctttgctaatcttactaatggatattgattaaaaaaaaaaaacctcagtactgcatcactgtgttgggatcgtaccaggacaatagggtcattccatatgataaaactaaaggactaaatttgttttataatgatgtcttagagggactgaaaagtttaaggaggcgatcaaactaaaatgtcttaatggctgtgtgacacacgtaaggaaaggaaagggggtcacgcacatcatgtactggaatgatctgcattaaacattgacttgtcttcagaaataagactgaagggttttgttgttccttagagttttcgtgttacatcacctaaagagatttcttttaaaaactttctagactctttgcaaaatgtatattactaacatagtttggaagaaaaattgagtagtggtaagttttgttcaagcacaatgttgaatgttaagcttcctgtattaattttagttcagttaatggttcagcccatacaaaggtgctatcctagggattttatgaattcctgaaaggaaaatagaatatgatcaattccttgccctgtggaagagtgcagaactgtggttttgttttcctttgacttctgtaaaatgtgaccgtttgacatctgtggtagattgaacggaatatcacagctgctgagtttactccatagctttcaaaccttttttattttaagaaattcttgaaaaaccctatgttccatgggaacataaagttattatagtgcctcctaaggggttaatataaatcaaggaggaagtttatatttaaggaagaattggagtgacgtatcttagaaaaggaaaggctgatgtttccatatagcttgctctccaccaggcctatcatttttctttttagagacaaacgtgacaggctagtcttgtctctctcatatgctaggtagcaaatggggtgatatttttatagaagtgggcaaaaattattttctcaattttactgagtaggcacagaagaaaagtacagataggctgatggttattgccttattttgactgcatttctcttaaatggatcatttaaattagttcttcaagtaacagtttactggttgttccattcctgaatatgcaggctaatttgtacagatagggattaaggaatacagactattagagaagatccttatatttacatctagtatatatgtggtaaggaaatgccgattcttcattataaacaagttttaaaattgttctttcttagttcaaatgatagcaatacccctatagcattaggtagaaacaaattattcattacatcgtaaatctctttactatgtcctagctctgtcctgctacctaaaggatataaagaaatattattgctctagaatgtattactttgttctcccatgaaagaattcagtttgttagtacctatatttttaaactggtgaaactgacccaaatatgtaataaataccatagtagctcagacccaaggagatatttttctaaaatcagttttcgttaaagtacttctacttccgttattggatatggtatctcctaaagtgtaaaaaaaatctgttactatatagtgataaaccatctgctcatcgtaagtgtaaggcttaacaaataagtaatacatgctatatttattcaagtgtctattgcttaattgttaattgtgagcagatttattgaatgcctattctattttctgcagtttacaatacaataactctttgagtaagttgaagtttaattgtgcaacaaatttgtattagagtacaatttaaagtgtttttctctatagccttttttgactggggaagcaaggggtaatgttaattagtacactttgttcttgtactagctatgtttctataagatatggtgccctgtgtatcccagagatgctagaaaactgttctttgctcctatttgtgggttctgtttttgtgggtttttttttttttgagaaaatgtacacaataaaacattccttgcttgtta

SEQ ID NO: 355290 - DNA, 1661 bp, Homo sapiens
gtcagctgatgggctgcctgccgaggaggccgcagcagtcgccgcgcgaacatggcggccgaaatccactccaggccgcagagcagccgcccggtgctgctgagcaagatcgaggggcaccaggacgccgtcacggccgcgctgctcatccccaaggaggacggcgtgatcacggccagcgaggacagaaccatccgggtatggctgaaaagagacagtggtcaatactggcccagcatttaccacacaatggcctctccttgctctgctatggcttaccatcatgacagcagacggatatttgtgggccaggataatggagctgtaatggaatttcacgtttctgaagattttaataaaatgaactttatcaagacctacccagctcatcagaaccgggtgtctgcgattatcttcagcttggccacagagtgggtgatcagtaccggccacgacaagtgtgtgagctggatgtgcacgcggagcgggaacatgctcgggaggcacttcttcacgtcctgggcttcgtgtctgcaatatgactttgacactcagtatgctttcgttggtgattattctgggcagatcaccctgctgaagcttgaacagaacacgtgttcagtcatcacaaccctcaaaggacatgaaggtagtgtcgcctgcctctggtgggaccctattcagcggttactcttctcaggagcatctgacaacagcatcatcatgtgggacatcggaggaaggaaaggccggacgctgttacttcagggccatcatgacaaggtgcagtcgctgtgctaccttcagctcaccaggcagctcgtctcctgttcctcggacggcggaattgcagtgtggaacatggatgttagcagagaagaggctcctcagtggttggaaagtgattcttgtcagaaatgtgagcagccatttttctggaacataaagcagatgtgggacaccaagacgctggggctaagacaacatcactgcaggaaatgcgggcaggctgtctgcgggaagtgcagcagcaagcgctcaagttacccagtcatgggcttcgagttccaagtccgggtttgtgattcttgttacgactccatcaaagatgaagatcggacttctctagcgacctttcatgaaggaaaacataacatttcccacatgtccatggacattgccaggggactgatggtgacctgtgggaccgaccgcattgtaaagatctgggacatgacacctgtggtgggctgcagtctggcgactgggttttctccgcactgatctgagagctgggcggcgtccacacctaagaacagcagctccaccaaatgaagtccctctcacgcagctccacagcgctgtctcgtgaatggacagtagccacttacaaacaaatcaacatttttaaaaagaaaatgtaaagagatggggtcttgccaggtcttggccaggctggtcttgaactcccggactcaagcaactctcctgacttggcctcccaaagtgttggaattacaggcatgagccactgcagtagccctgattgttttaaatagaagaagatacatttcatattgctcttcagtcgacaagggaaattacggctacagaaatggtacatcactctccctgataaagagaggaagaagatcacccgg

SEQ ID NO: 355291 - DNA, 325 bp, Homo sapiens
gaggcacttcttcacgtcctgggcttcgtgtctgcagtatccttcagagccacggacctctccttcccctggcctctgcttctcagtgtttggttctgaatctcatcccaaatggctgagatctaaagactgaatgaaacctatttaagtttgtgcaaaagtaattgcatttttttttttaccatggaaagtaattgcaaaaattgcaattacttttgcaccaacctaatacatatttcactgaaaatccgagaacttccgtaagtttgctgtaaattgggtttattaaaaataatgaaatgaattgttctgtgctgggaggtgc

SEQ ID NO: 355292 - DNA, 285 bp, Homo sapiens
catggacattgccaggggactgatggtgacctgtgggaccgaccgcattgtaaaggtaagctggctaattgtctgtcagcatctcagttgagattgcctattaccatgctgtgaatgtgcaggagacagtcactctttctgactggcaagctttataagcaaatgattgccagtttaaaaccttgagtaacaaattgcttgcctctgagtttccatgcattcattggtggtcagtcccagtggcacctccctctgcagtgtctgtctggcagagtgagtctggca

SEQ ID NO: 355293 - DNA, 4467 bp, Homo sapiens
gtcagctgatgggctgcctgccgaggaggccgcagcagtcgccgcgcgaacatggcggccgaaatccactccaggccgcagagcagccgcccggtgctgctgagcaagatcgaggggcaccaggacgccgtcacggccgcgctgctcatccccaaggaggacggcgtgatcacggccagcgaggacaggaatttcacgtttctgaagattttaataaaatgaactttatcaagacctacccagctcatcagaaccgggtgtctgcgattatcttcagcttggccacagagtgggtgatcagtaccggccacgacaagtgtgtgagctggatgtgcacgcggagcgggaacatgctcgggaggcacttcttcacgtcctgggcttcgtgtctgcaatatgactttgacactcagtatgctttcgttggtgattattctgggcagatcaccctgctgaagcttgaacagaacacgtgttcagtcatcacaaccctcaaaggacatgaaggtagtgtcgcctgcctctggtgggaccctattcagcggttactcttctcaggagcatctgacaacagcatcatcatgtgggacatcggaggaaggaaaggccggacgctgttacttcagggccatcatgacaaggtgcagtcgctgtgctaccttcagctcaccaggcagctcgtctcctgttcctcggacggcggaattgcagtgtggaacatggatgttagcagagaagaggctcctcagtggttggaaagtgattcttgtcagaaatgtgagcagccatttttctggaacataaagcagatgtgggacaccaagacgctggggctaagacaacatcactgcaggaaatgcgggcaggctgtctgcgggaagtgcagcagcaagcgctcaagttacccagtcatgggcttcgagttccaagtccgggtttgtgattcttgttacgactccatcaaagatgaagatcggacttctctagcgacctttcatgaaggaaaacataacatttcccacatgtccatggacattgccaggggactgatggtgacctgtgggaccgaccgcattgtaaagatctgggacatgacacctgtggtgggctgcagtctggcgactgggttttctccgcactgatctgagagctgggcggcgtccacacctaagaacagcagctccaccaaatgaagtccctctcacgcagctccacagcgctgtctcgtgaatggacagtagccacttacaaacaaatcaacatttttaaaaagaaaatgtaaaggtgtgttttggggcatttgtggaacttacccatggggactaatatggaaaaggtctgtccatagtggttccctgaagactggaattacttcagcaaaacttccccatgaacagctaatgtgtagtgaaagaatgagctagcaaatgagttttagcggggacaaaaaatcaaacaaaaaagtgaatgcttagaaccttctcaaagcagtcacaagtacagacacttcacttagcctagggggccttccagggttcttgtggctgttgtcagagcaggagctgggggagggaagacttgttctctctttcttgaggggtggcattaggaacttacgaaaccagagacctttccctatgacttggcagtatgtgaatatcctctacacttagttattgataaacttcttaaagagatctgttattttcaggtagtgccataatctgcacttagcattggcttgcttcagttgtttctcttcccagccagtatgccacaggtgaactttcgaggttgtcattaagtaagttgtgaaatttctgtaataacaaaggcagtccgcattcttccctttcccccaaattcctagggcaaaacttttttatggtgctgttaacatgggagtcacacaagccgcctgactttttctcattgccattagtaatgactgatggaaaacccagccaccactgtgatgcgaaatgatcagtctgttgcctgaaacagcccagtcctcttaactgaaacagcattctacttcttgttccaagatgagcctctgcaatattctggcaatttaatataccccctacaaaagcactccacagcttttacactattttgactttgagttataactagtattattcatgttttcataaaaagaagttagtgacccagagctataatcatccatcaagtcttccacaataattcccaactcataaattgctttcctaacaactagcaaaagctattgttcataatggcatttctaaagcttttgggcactgtgtaccaggatgaggaagagaagaaatgaggagcctgtcttttaatattccagtatttgtgtgtttgattttttttgacaacagtacatatatctatttctctagggatatggaagtaagtggagaagggcctacctttttaaaggacaaatataaaaatagcaacagtatctttgctaatcttactaatggatattgattaaaaaaaaaaaacctcagtactgcatcactgtgttgggatcgtaccaggacaatagggtcattccatatgataaaactaaaggactaaatttgttttataatgatgtcttagagggactgaaaagtttaaggaggcgatcaaactaaaatgtcttaatggctgtgtgacacacgtaaggaaaggaaagggggtcacgcacatcatgtactggaatgatctgcattaaacattgacttgtcttcagaaataagactgaagggttttgttgttccttagagttttcgtgttacatcacctaaagagatttcttttaaaaactttctagactctttgcaaaatgtatattactaacatagtttggaagaaaaattgagtagtggtaagttttgttcaagcacaatgttgaatgttaagcttcctgtattaattttagttcagttaatggttcagcccatacaaaggtgctatcctagggattttatgaattcctgaaaggaaaatagaatatgatcaattccttgccctgtggaagagtgcagaactgtggttttgttttcctttgacttctgtaaaatgtgaccgtttgacatctgtggtagattgaacggaatatcacagctgctgagtttactccatagctttcaaaccttttttattttaagaaattcttgaaaaaccctatgttccatgggaacataaagttattatagtgcctcctaaggggttaatataaatcaaggaggaagtttatatttaaggaagaattggagtgacgtatcttagaaaaggaaaggctgatgtttccatatagcttgctctccaccaggcctatcatttttctttttagagacaaacgtgacaggctagtcttgtctctctcatatgctaggtagcaaatggggtgatatttttatagaagtgggcaaaaattattttctcaattttactgagtaggcacagaagaaaagtacagataggctgatggttattgccttattttgactgcatttctcttaaatggatcatttaaattagttcttcaagtaacagtttactggttgttccattcctgaatatgcaggctaatttgtacagatagggattaaggaatacagactattagagaagatccttatatttacatctagtatatatgtggtaaggaaatgccgattcttcattataaacaagttttaaaattgttctttcttagttcaaatgatagcaatacccctatagcattaggtagaaacaaattattcattacatcgtaaatctctttactatgtcctagctctgtcctgctacctaaaggatataaagaaatattattgctctagaatgtattactttgttctcccatgaaagaattcagtttgttagtacctatatttttaaactggtgaaactgacccaaatatgtaataaataccatagtagctcagacccaaggagatatttttctaaaatcagttttcgttaaagtacttctacttccgttattggatatggtatctcctaaagtgtaaaaaaaatctgttactatatagtgataaaccatctgctcatcgtaagtgtaaggcttaacaaataagtaatacatgctatatttattcaagtgtctattgcttaattgttaattgtgagcagatttattgaatgcctattctattttctgcagtttacaatacaataactctttgagtaagttgaagtttaattgtgcaacaaatttgtattagagtacaatttaaagtgtttttctctatagccttttttgactggggaagcaaggggtaatgttaattagtacactttgttcttgtactagctatgtttctataagatatggtgccctgtgtatcccagagatgctagaaaactgttctttgctcctatttgtgggttctgtttttgtgggtttttttttttttgagaaaatgtacacaataaaacattccttgcttgtta

SEQ ID NO: 355294 - DNA, 3348 bp, Homo sapiens
gtcagctgatgggctgcctgccgaggaggccgcagcagtcgccgcgcgaacatggcggccgaaatccactccaggccgcagagcagccgcccggtgctgctgagcaagatcgaggggcaccaggacgccgtcacggccgcgctgctcatccccaaggaggacggcgtgatcacggccagcgaggacagaaccatccgggtatggctgaaaagagacagtggtcaatactggcccagcatttaccacacaatggcctctccttgctctgctatggcttaccatcatgacagcagacggatatttgtgggccaggataatggagctgtaatggaatttcacgtttctgaagattttaataaaatgaactttatcaagacctacccagctcatcagaaccgggtgtctgcgattatcttcagcttggccacagagtgggtgatcagtaccggccacgacaagtgtgtgagctggatgtgcacgcggagcgggaacatgctcgggaggcacttcttcacgtcctgggcttcgtgtctgcaatatgactttgacactcagtatgctttcgttggtgattattctgggcagatcaccctgctgaagcttgaacagaacacgtgttcagtcatcacaaccctcaaaggacatgaaggtagtgtcgcctgcctctggtgggaccctattcagcggttactcttctcaggagcatctgacaacagcatcatcatgtgggacatcggaggaaggaaaggccggacgctgttacttcagggccatcatgacaaggtgcagtcgctgtgctaccttcagctcaccaggcagctcgtctcctgttcctcggacggcggaattgcagtgtggaacatggatgttagcagagaagaggctcctcagtggttggaaagtgattcttgtcagaaatgtgagcagccaagatgagcctctgcaatattctggcaatttaatataccccctacaaaagcactccacagcttttacactattttgactttgagttataactagtattattcatgttttcataaaaagaagttagtgacccagagctataatcatccatcaagtcttccacaataattcccaactcataaattgctttcctaacaactagcaaaagctattgttcataatggcatttctaaagcttttgggcactgtgtaccaggatgaggaagagaagaaatgaggagcctgtcttttaatattccagtatttgtgtgtttgattttttttgacaacagtacatatatctatttctctagggatatggaagtaagtggagaagggcctacctttttaaaggacaaatataaaaatagcaacagtatctttgctaatcttactaatggatattgattaaaaaaaaaaaacctcagtactgcatcactgtgttgggatcgtaccaggacaatagggtcattccatatgataaaactaaaggactaaatttgttttataatgatgtcttagagggactgaaaagtttaaggaggcgatcaaactaaaatgtcttaatggctgtgtgacacacgtaaggaaaggaaagggggtcacgcacatcatgtactggaatgatctgcattaaacattgacttgtcttcagaaataagactgaagggttttgttgttccttagagttttcgtgttacatcacctaaagagatttcttttaaaaactttctagactctttgcaaaatgtatattactaacatagtttggaagaaaaattgagtagtggtaagttttgttcaagcacaatgttgaatgttaagcttcctgtattaattttagttcagttaatggttcagcccatacaaaggtgctatcctagggattttatgaattcctgaaaggaaaatagaatatgatcaattccttgccctgtggaagagtgcagaactgtggttttgttttcctttgacttctgtaaaatgtgaccgtttgacatctgtggtagattgaacggaatatcacagctgctgagtttactccatagctttcaaaccttttttattttaagaaattcttgaaaaaccctatgttccatgggaacataaagttattatagtgcctcctaaggggttaatataaatcaaggaggaagtttatatttaaggaagaattggagtgacgtatcttagaaaaggaaaggctgatgtttccatatagcttgctctccaccaggcctatcatttttctttttagagacaaacgtgacaggctagtcttgtctctctcatatgctaggtagcaaatggggtgatatttttatagaagtgggcaaaaattattttctcaattttactgagtaggcacagaagaaaagtacagataggctgatggttattgccttattttgactgcatttctcttaaatggatcatttaaattagttcttcaagtaacagtttactggttgttccattcctgaatatgcaggctaatttgtacagatagggattaaggaatacagactattagagaagatccttatatttacatctagtatatatgtggtaaggaaatgccgattcttcattataaacaagttttaaaattgttctttcttagttcaaatgatagcaatacccctatagcattaggtagaaacaaattattcattacatcgtaaatctctttactatgtcctagctctgtcctgctacctaaaggatataaagaaatattattgctctagaatgtattactttgttctcccatgaaagaattcagtttgttagtacctatatttttaaactggtgaaactgacccaaatatgtaataaataccatagtagctcagacccaaggagatatttttctaaaatcagttttcgttaaagtacttctacttccgttattggatatggtatctcctaaagtgtaaaaaaaatctgttactatatagtgataaaccatctgctcatcgtaagtgtaaggcttaacaaataagtaatacatgctatatttattcaagtgtctattgcttaattgttaattgtgagcagatttattgaatgcctattctattttctgcagtttacaatacaataactctttgagtaagttgaagtttaattgtgcaacaaatttgtattagagtacaatttaaagtgtttttctctatagccttttttgactggggaagcaaggggtaatgttaattagtacactttgttcttgtactagctatgtttctataagatatggtgccctgtgtatcccagagatgctagaaaactgttctttgctcctatttgtgggttctgtttttgtgggtttttttttttttgagaaaatgtacacaataaaacattccttgcttgtta

SEQ ID NO: 355295 - DNA, 1633 bp, Homo sapiens
gtcagctgatgggctgcctgccgaggaggccgcagcagtcgccgcgcgaacatggcggccgaaatccactccaggccgcagagcagccgcccggtgctgctgagcaagatcgaggggcaccaggacgccgtcacggccgcgctgctcatccccaaggaggacggcgtgatcacggccagcgaggacagaaccatccgggtatggctgaaaagagacagtggtcaatactggcccagcatttaccacacaatggcctctccttgctctgctatggcttaccatcatgacagcagacggatatttgtgggccaggataatggagctgtaatggaatttcacgtttctgaagattttaataaaatgaactttatcaagacctacccagctcatcagaaccgggtgtctgcgattatcttcagcttggccacagagtgggtgatcagtaccggccacgacaagtgtgtgagctggatgtgcacgcggagcgggaacatgctcgggaggcacttcttcacgtcctgggcttcgtgtctgcaatatgactttgacactcagtatgctttcgttggtgattattctgggcagatcaccctgctgaagcttgaacagaacacgtgttcagtcatcacaaccctcaaaggacatgaaggtagtgtcgcctgcctctggtgggaccctattcagcggttactcttctcaggagcatctgacaacagcatcatcatgtgggacatcggaggaaggaaaggccggacgctgttacttcagggccatcatgacaaggtgcagtcgctgtgctaccttcagctcaccaggcagctcgtctcctgttcctcggacggcggaattgcagtgtggaacatggatgttagcagagaagaggctcctcagtggttggaaagtgattcttgtcagaaatgtgagcagccatttttctggaacataaagcagatgtgggacaccaagacgctggggctaagacaacatcactgcaggaaatgcgggcaggctgtctgcgggaagtgcagcagcaagcgctcaagttacccagtcatgggcttcgagttccaagtccgggtttgtgattcttgttacgactccatcaaagatgaagatcggacttctctagcgacctttcatgaaggaaaacataacatttcccacatgtccatggacattgccaggggactgatggtgacctgtgggaccgaccgcattgtaaagatctgggacatgacacctgtggtgggctgcagtctggcgactgggttttctccgcactgatctgagagctgggcggcgtccacacctaagaacagcagctccaccaaatgaagtccctctcacgcagctccacagcgctgtctcgtgaatggacagtagccacttacaaacaaatcaacatttttaaaaagaaaatgtaaagagatggggtcttgccaggtcttggccaggctggtcttgaactcccggactcaagcaactctcctgacttggcctcccaaagtgttggaattacaggcatgagccactgcagtagccctgattgttttaaatagaagaaggtaaagtattttctcacataaatttctgaatgtgggaggcagcctactgacattgcttcacgtaacaa

SEQ ID NO: 355296 - DNA, 1350 bp, Homo sapiens
cctcctgaagtgctgagattacacgcgtgagccaccacgcccatcctcggatagtctcaatttgatcctaggataataccaggtcatcagagagctgttgatttggaccatattatgatttgaacctcccagatcattctcggcaccatgtctacaagccacatttagaggacaataggatacagcttggtgaaacacacagcggcatctctcataagacactggtgaggccacagatcccaccatcagtgtcacccgcctggggacatttcactttcagaaaatgcagagcttctcctaagaaatgaatgtggccaggtgtgttggctcacacctgtcatcccagcactttgggaggccaaggcgagcacattgcctgaggtcaggagttcaagaccagcctgaccaacatggtgaaacccagtcactactaaaaatacaaaaattcgccaggcgtggtagtgtgtgcctgtagtcccagccactcaggaggttgaggcaggagaatcgcttgaacccgggaggaggaggttgcggtgagctgagatcacgccactgcactccagcctgggcgacagagcgagacttcgtctcaaaaaacaaacaaaaaaagaaatgaatgttttaggcacacgctaagtatctcttagacgattccaaagatatcaattactgtgactgacgacgactcttccccttccctgggtgtgcctgtcctgcttccctagctcacaggtgctcaggactcaaaggcagcccgccacaggccatgggatctggctggctcaaaagggagagtgaggccattggaattttcccaggagtgagtctgaagcttggaatgttttttggtggagggtcctgaagctaggaggcgatgcagacgtgggggctgagacattatttggggccatttgcaaagagggatactcaggcagtgaccccaaggaaagagcaaggggaggagagggcggcacatccacgccccttcaactcctgcccgtccggaggcctacgcactccacacgccggcctccccgcatggatatccttccaataagcaactcatcgtgctcatgtttatttattttaaagtcacacagaattgcacttattaaaaatgaatttatggagacagaaagcattctggtggctgccaagggctggagagggcgaatggggagtgagtccttcatggatacggggtttccctttggggtgatgaaaaagttctggcgctagacagtgctgatggttgcacgacactgtgaatgtactcagtgttactaatggcaaattttatgttctgtgcattttagcacaataaaaaaatatacatttaaagcaaca

SEQ ID NO: 355297 - DNA, 1384 bp, Homo sapiens
aggccctgaactatttaaggatccaggtgttgcaaggcggtaagttttgcagccagtgtccatgaggtcggggctgggactagattagggtagatctaagcctgggcttgggagtgcagctagcgcagaaagatctgaggaactagagcaaaaagccatgcggatggattgtggtcgtcagaggctcccgtagtctttagcggcgctggcttccgcaggctccgccctctcttgcccacccggaaacagcctcgccccgcctacgcgggacccaaccgcggcgaccggacgtgcactcctccagtagcggctgcacgtcgtgccaatggcccgctatgaggaggtgagcgtgtccggcttcgaggagttccaccgggccgtggaacagcacaatggcaagaccattttcgcctactttacgggttctaaggacgccggggggaaaagctggtgccccgactgcgtgcaggctgaaccagtcgtacgagaggggctgaagcacattagtgaaggatgtgtgttcatctactgccaagtaggagaaaagccttattggaaagatccaaataatgacttcagaaaaaacttgaaagtaacagcagtgcctacactacttaagtatggaacacctcaaaaactggtagaatctgagtgtcttcaggccaacctggtggaaatgttgttctctgaagattaagattttaggatggcaatcatgtcttgatgtcctgatttgttctagtatcaataaactgtatacttgctttgaattcatgttagcaataaatgatgttaaaaaaactggcatgtgtctaaacaatagagtgctattaaaatgcccatgaacctttagtttgcctgtaatacatggatatttttaagatataaagaagtcttcagaaatagcagtaaaggctcaaaggaacgtattcttgaaggtgacggaaatacctaaaaactcctaaaggtgcagagcacaccttccaaatctctcaaaagatcagtatcttttattttaagttatctccatctgcaaagcaactgatgatattcctgaaaccccttctttgattttggaatgtagaacctaacctcaccactgaaggaaagcacatgacctctaatctagcctctgcttaattcaggcagttttgttttgtttaataaaaaacagactcctgagcactagaagcagtttgttttgcagctgtctcaatgtgctttacttgggatgaggcaggtggcggagagcggccggaaagactctataacccagttgtgggaagaactccaagctgggagtcagtcacactgactctaccacttactagctgtgtaaccacaggcaagttactcaccccgtccaaacctcagttttctcttc

SEQ ID NO: 355298 - DNA, 1414 bp, Homo sapiens
aggccctgaactatttaaggatccaggtgttgcaaggcggtaagttttgcagccagtgtccatgaggtcggggctgggactagattagggtagatctaagcctgggcttgggagtgcagctagcgcagaaagatctgaggaactagagcaaaaagccatgcggatggattgtggtcgtcagaggctcccgtagtctttagcggcgctggcttccgcaggctccgccctctcttgcccacccggaaacagcctcgccccgcctacgcgggacccaaccgcggcgaccggacgtgcactcctccagtagcggctgcacgtcgtgccaatggcccgctatgaggaggtgagcgtgtccggcttcgaggagttccaccgggccgtggaacagcacaatggcaagaccattttcgcctactttacgggttctaaggacgccggggggaaaagctggtgccccgactgcgtgcaggctgaaccagtcgtacgagaggggctgaagcacattagtgaaggatgtgtgttcatctactgccaagtaggagaaaagccttattggaaagatccaaataatgacttcagaaaaaacttgaaagtaacagcagtgcctacactacttaagtatggaacacctcaaaaactggtagaatctgagtgtcttcaggccaacctggtggaaatgttgttctctgaagattaagattttaggatggcaatcatgtcttgatgtcctgatttgttctagtatcaataaactgtatacttgctttgaattcatgttagcaataaatgatgttaaaaaaaaacaaaaaaacaaaaaaaagacacaaacaaaaaaaaaacaaaaaaaaaaaacaacaaaacaaaacaacagcacacaaaaaagcaacaacagacaaaaccaacaacaaggaaaggagagggaggtggcaggcacatcaatgctaaatcacctagctgtggaagacgagcactgacacagcgaactgtcacaccgaatgttatattatgaaagaacgagatgatccacataaggacggcgttctatacacataccaacgaggcagacgtctcacgcgctttttttacatacaccgcgtgttaggtaggaggagaaaaacgggcaaggcgtcgtttgggatcagactttatgatagaggagcccaccactaactcgttgtgtgttggggagaattacaccacaacttgctggggcgacctccacaactctcgaatggaggagaaatagataacacagcccgaagcggccggtaaaataatagacaaataaaaaaggaagtaggacgtggagcggtggaaaacaacaacaagcagaaattaatacgttctgtctgagcagaacaaataaatttcgactaccagactaagaagatagaagaagcaaatatctacacgg

SEQ ID NO: 355299 - DNA, 1909 bp, Homo sapiens
aggccctgaactatttaaggatccaggtgttgcaaggcggtaagttttgcagccagtgtccatgaggtcggggctgggactagattagggtagatctaagcctgggcttgggagtgcagctagcgcagaaagatctgaggaactagagcaaaaagccatgcggatggattgtggtcgtcagaggctcccgtagtctttagcggcgctggcttccgcaggctccgccctctcttgcccacccggaaacagcctcgccccgcctacgcgggacccaaccgcggcgaccggacgtgcactcctccagtagcggctgcacgtcgtgccaatggcccgctatgaggaggtgagcgtgtccggcttcgaggagttccaccgggccgtggaacagcacaatggcaagaccattttcgcctactttacgggttctaaggacgccggggggaaaagctggtgccccgactgcgtgcagggtgaggccgggattcgggggctgctgtccaatggaaatggcaggaaggtcgagcctacggccagaaggggggcttagcggaggcagagtcttggttccagacatccgcggagcaatctgagctgtccccaagtctccttctattaaatcctaccccgccctgccaagagcgctcttccttttaccaccttacccggatgatcttggaatctagttccttaaaacttctcactcccccagtaccattagtgtcttacaggatacgtgagttggtcagcaaatacatgtgctttccattgttacgggcgcggtggtgcaggggcaaatcgggactgggatttggtccttacccttaacgtggctctaagaccagaagggaacacctgacttctgttgacctcttcagttagctgcaggttaaagtctgagtgcttaccaagactgggggaagggggaaagaacacagtttatacgtgcctgattgtagagttgacgtgcgattattttatctcaactttttttaaagctgaaccagtcgtacgagaggggctgaagcacattagtgaaggatgtgtgttcatctactgccaagtaggagaaaagccttattggaaagatccaaataatgacttcagaaaaaacttgaaagtaacagcagtgcctacactacttaagtatggaacacctcaaaaactggtagaatctgagtgtcttcaggccaacctggtggaaatgttgttctctgaagattaagattttaggatggcaatcatgtcttgatgtcctgatttgttctagtatcaataaactgtatacttgctttgaattcatgttagcaataaatgatgttaaaaaaactggcatgtgtctaaacaatagagtgctattaaaatgcccatgaacctttagtttgcctgtaatacatggatatttttaagatataaagaagtcttcagaaatagcagtaaaggctcaaaggaacgtattcttgaaggtgacggaaatacctaaaaactcctaaaggtgcagagcacaccttccaaatctctcaaaagatcagtatcttttattttaagttatctccatctgcaaagcaactgatgatattcctgaaaccccttctttgattttggaatgtagaacctaacctcaccactgaaggaaagcacatgacctctaatctagcctctgcttaattcaggcagttttgttttgtttaataaaaaacagactcctgagcactagaagcagtttgttttgcagctgtctcaatgtgctttacttgggatgaggcaggtggcggagagcggccggaaagactctataacccagttgtgggaagaactccaagctgggagtcagtcacactgactctaccacttactagctgtgtaaccacaggcaagttactcaccccgtccaaacctcagttttctcttc

SEQ ID NO: 355300 - DNA, 1309 bp, Homo sapiens
aggccctgaactatttaaggatccaggtgttgcaaggcggtaagttttgcagccagtgtccatgaggtcggggctgggactagattagggtagatctaagcctgggcttgggagtgcagctagcgcagaaagatctgaggaactagagcaaaaagccatgcggatggattgtggtcgtcagaggctcccgtagtctttagcggcgctggcttccgcaggctccgccctctcttgcccacccggaaacagcctcgccccgcctacgcgggacccaaccgcggcgaccggacgtgcactcctccagtagcggctgcacgtcgtgccaatggcccgctatgaggaggtgagcgtgtccggcttcgaggagttccaccgggccgtggaacagcacaatgctgaaccagtcgtacgagaggggctgaagcacattagtgaaggatgtgtgttcatctactgccaagtaggagaaaagccttattggaaagatccaaataatgacttcagaaaaaacttgaaagtaacagcagtgcctacactacttaagtatggaacacctcaaaaactggtagaatctgagtgtcttcaggccaacctggtggaaatgttgttctctgaagattaagattttaggatggcaatcatgtcttgatgtcctgatttgttctagtatcaataaactgtatacttgctttgaattcatgttagcaataaatgatgttaaaaaaactggcatgtgtctaaacaatagagtgctattaaaatgcccatgaacctttagtttgcctgtaatacatggatatttttaagatataaagaagtcttcagaaatagcagtaaaggctcaaaggaacgtattcttgaaggtgacggaaatacctaaaaactcctaaaggtgcagagcacaccttccaaatctctcaaaagatcagtatcttttattttaagttatctccatctgcaaagcaactgatgatattcctgaaaccccttctttgattttggaatgtagaacctaacctcaccactgaaggaaagcacatgacctctaatctagcctctgcttaattcaggcagttttgttttgtttaataaaaaacagactcctgagcactagaagcagtttgttttgcagctgtctcaatgtgctttacttgggatgaggcaggtggcggagagcggccggaaagactctataacccagttgtgggaagaactccaagctgggagtcagtcacactgactctaccacttactagctgtgtaaccacaggcaagttactcaccccgtccaaacctcagttttctcttc

SEQ ID NO: 355301 - DNA, 821 bp, Homo sapiens
  misc_feature (769)..(769): n is a, c, g, or t
aggccctgaactatttaaggatccaggtgttgcaaggcggtaagttttgcagccagtgtccatgaggtcggggctgggactagattagggtagatctaagcctgggcttgggagtgcagctagcgcagaaagatctgaggaactagagcaaaaagccatgcggatggattgtggtcgtcagaggctcccgtagtctttagcggcgctggcttccgcaggctccgccctctcttgcccacccggaaacagcctcgccccgcctacgcgggacccaaccgcggcgaccggacgtgcactcctccagtagcggctgcacgtcgtgccaatggcccgctatgaggaggtgagcgtgtccggcttcgaggagttccaccgggccgtggaacagcacaatggcaagaccattttcgcctactttacgggttctaaggacgccggggggaaaagctggtgccccgactgcgtgcaggctgaaccagtcgtacgagaggggctgaagcacattagtgaaggatgtgtgttcatctactgccaagtaggagaaaagccttattggaaagatccaaataatgacttcagaaaaaacttgaaagtaacagcagtgcctacactacttaagtatggaacacctcaaaaactggtagaatctgagtgtcttcaggccaacctggtggaaatgttgttctctgaagattaagattttaggatggcaatcatgtcttgatgtcctgatttgttctagtatcaataaactgtatacttgcttttnacatcatttattgctaacatgaattcaaagcaaggtcgacgcggccgcgaat

SEQ ID NO: 355302 - DNA, 1257 bp, Homo sapiens
aggccctgaactatttaaggatccaggtgttgcaaggcggtaagttttgcagccagtgtccatgaggtcggggctgggactagattagggtagatctaagcctgggcttgggagtgcagctagcgcagaaagatctgaggaactagagcaaaaagccatgcggatggattgtggtcgtcagaggctcccgtagtctttagcggcgctggcttccgcaggctccgccctctcttgcccacccggaaacagcctcgccccgcctacgcgggacccaaccgcggcgaccggacgtgcactcctccagtagcggctgcacgtcgtgccaatggcccgctatgaggagctgaaccagtcgtacgagaggggctgaagcacattagtgaaggatgtgtgttcatctactgccaagtaggagaaaagccttattggaaagatccaaataatgacttcagaaaaaacttgaaagtaacagcagtgcctacactacttaagtatggaacacctcaaaaactggtagaatctgagtgtcttcaggccaacctggtggaaatgttgttctctgaagattaagattttaggatggcaatcatgtcttgatgtcctgatttgttctagtatcaataaactgtatacttgctttgaattcatgttagcaataaatgatgttaaaaaaactggcatgtgtctaaacaatagagtgctattaaaatgcccatgaacctttagtttgcctgtaatacatggatatttttaagatataaagaagtcttcagaaatagcagtaaaggctcaaaggaacgtattcttgaaggtgacggaaatacctaaaaactcctaaaggtgcagagcacaccttccaaatctctcaaaagatcagtatcttttattttaagttatctccatctgcaaagcaactgatgatattcctgaaaccccttctttgattttggaatgtagaacctaacctcaccactgaaggaaagcacatgacctctaatctagcctctgcttaattcaggcagttttgttttgtttaataaaaaacagactcctgagcactagaagcagtttgttttgcagctgtctcaatgtgctttacttgggatgaggcaggtggcggagagcggccggaaagactctataacccagttgtgggaagaactccaagctgggagtcagtcacactgactctaccacttactagctgtgtaaccacaggcaagttactcaccccgtccaaacctcagttttctcttc

SEQ ID NO: 355303 - DNA, 953 bp, Homo sapiens
aggccctgaactatttaaggatccaggtgttgcaaggcgctgaaccagtcgtacgagaggggctgaagcacattagtgaaggatgtgtgttcatctactgccaagtaggagaaaagccttattggaaagatccaaataatgacttcagaaaaaacttgaaagtaacagcagtgcctacactacttaagtatggaacacctcaaaaactggtagaatctgagtgtcttcaggccaacctggtggaaatgttgttctctgaagattaagattttaggatggcaatcatgtcttgatgtcctgatttgttctagtatcaataaactgtatacttgctttgaattcatgttagcaataaatgatgttaaaaaaactggcatgtgtctaaacaatagagtgctattaaaatgcccatgaacctttagtttgcctgtaatacatggatatttttaagatataaagaagtcttcagaaatagcagtaaaggctcaaaggaacgtattcttgaaggtgacggaaatacctaaaaactcctaaaggtgcagagcacaccttccaaatctctcaaaagatcagtatcttttattttaagttatctccatctgcaaagcaactgatgatattcctgaaaccccttctttgattttggaatgtagaacctaacctcaccactgaaggaaagcacatgacctctaatctagcctctgcttaattcaggcagttttgttttgtttaataaaaaacagactcctgagcactagaagcagtttgttttgcagctgtctcaatgtgctttacttgggatgaggcaggtggcggagagcggccggaaagactctataacccagttgtgggaagaactccaagctgggagtcagtcacactgactctaccacttactagctgtgtaaccacaggcaagttactcaccccgtccaaacctcagttttctcttc

SEQ ID NO: 355304 - DNA, 1308 bp, Homo sapiens
aggccctgaactatttaaggatccaggtgttgcaaggcggtaagttttgcagccagtgtccatgaggtcggggctgggactagattagggtagatctaagcctgggcttgggagtgcagctagcgcagaaagatctgaggaactagagcaaaaagccatgcggatggattgtggtcgtcagaggctcccgtagtctttagcggcgctggcttccgcaggctccgccctctcttgcccacccggaaacagcctcgccccgcctacgcgggacccaaccgcggcgaccggacgtgcactcctccagtagcggctgcacgtcgtgccaatggcccgctatgaggaggtgagcgtgtccggcttcgaggagttccaccgggccgtggaacagcacaatggcaagaccattttcgcctactttacgggttctaaggacgccggggggaaaagctggtgccccgactgcgtgcaggctgaaccagtcgtacgagaggggctgaagcacattagtgaaggatgtgtgttcatctactgccaagtaggagaaaagccttacctcaaaaactggtagaatctgagtgtcttcaggccaacctggtggaaatgttgttctctgaagattaagattttaggatggcaatcatgtcttgatgtcctgatttgttctagtatcaataaactgtatacttgctttgaattcatgttagcaataaatgatgttaaaaaaactggcatgtgtctaaacaatagagtgctattaaaatgcccatgaacctttagtttgcctgtaatacatggatatttttaagatataaagaagtcttcagaaatagcagtaaaggctcaaaggaacgtattcttgaaggtgacggaaatacctaaaaactcctaaaggtgcagagcacaccttccaaatctctcaaaagatcagtatcttttattttaagttatctccatctgcaaagcaactgatgatattcctgaaaccccttctttgattttggaatgtagaacctaacctcaccactgaaggaaagcacatgacctctaatctagcctctgcttaattcaggcagttttgttttgtttaataaaaaacagactcctgagcactagaagcagtttgttttgcagctgtctcaatgtgctttacttgggatgaggcaggtggcggagagcggccggaaagactctataacccagttgtgggaagaactccaagctgggagtcagtcacactgactctaccacttactagctgtgtaaccacaggcaagttactcaccccgtccaaacctcagttttctcttc

SEQ ID NO: 355305 - DNA, 661 bp, Homo sapiens
aggccctgaactatttaaggatccaggtgttgcaaggcggtaagttttgcagccagtgtccatgaggtcggggctgggactagattagggtagatctaagcctgggcttgggagtgcagctagcgcagaaagatctgaggaactagagcaaaaagccatgcggatggattgtggtcgtcagaggctcccgtagtctttagcggcgctggcttccgcaggctccgccctctcttgcccacccggaaacagcctcgccccgcctacgcgggacccaaccgcggcgaccggacgtgcactcctccagtagcggctgcacgtcgtgccaatggcccgctatgaggaggtgagcgtgtccggcttcgaggagttccaccgggccgtggaacagcacaatggcaagaccattttcgcctactttacgggttctaaggacgccggggggaaaagctggtgccccgactgcgtgcaggctgaaccagtcgtacgagaggggctgaagcacattagtgaaggatgtgtgttcatctactgccaagtaggagaaaagccttattggaaagatccaaataatgacttcagaaaaaacttgaaagtaacagcagtgcctacactacttaagtatggaacagtaagtatctttaaatatgctgggcctgtaatt

SEQ ID NO: 355306 - DNA, 1235 bp, Homo sapiens
aggccctgaactatttaaggatccaggtgttgcaaggcggtaagttttgcagccagtgtccatgaggtcggggctgggactagattagggtagatctaagcctgggcttgggagtgcagctagcgcagaaagatctgaggaactagagcaaaaagccatgcggatggattgtggtcgtcagaggctcccgtagtctttagcggcgctggcttccgcaggctccgccctctcttgcccacccggaaacagcctcgccccgcctacgcgggacccaaccgcggcgaccggacgtgcactcctccagtagcggctgcacgtcgtgccaatggcccgctatgaggaggtgagcgtgtccggcttcgaggagttccaccgggccgtggaacagcacaatggcaagaccattttcgcctactttacgggttctaaggacgccggggggaaaagctggtgccccgactgcgtgcaggctgaaccagtcgtacgagaggggctgaagcacattagtgaaggatgtgtgttcatctactgccaagtaggagaaaagccttattggaaagatccaaataatgacttcagaaaaaacttgaaagtaacagcagtgcctacactacttaagtatggaacacctcaaaaactggtagaatctgagtgtcttcaggccaacctggtggaaatgttgttctctgaagattaagattttaggatggcaatcatgtcttgatgtcctgatttgttctagtatcaataaactgtatacttgctttgaattcatgttagcaataaatgatgttaaaaagagaaaaaaaagatgcgagacttagggaaaaccgaattgggaggtgtcttcttaacagggcgcgggaaagaacggggagccagttgatgggaaacgggttgtggaaagggactttgggataacgatgaagaggaagagccccaggtccgtcaaagagcacgccagtccccctaagaaagagatcgggggatccgaacgttccgcaaccaaaggtctggctccccgcgacttctcgtggaagccggaccatctttggggccacccggggactggggtttgagcatcctcggaggtcagctcggattgcttccccaaggccacctggcgatggagtcctgtgacaggccattccgggagggcacaaaggggctcggggggccccaaagattgagccgcacaggactgtgaggctgcttggcacaaagggatgctccac

SEQ ID NO: 355307 - DNA, 1799 bp, Homo sapiens
aggccctgaactatttaaggatccaggtgttgcaaggcggtaagttttgcagccagtgtccatgaggtcggggctgggactagattagggtagatctaagcctgggcttgggagtgcagctagcgcagaaagatctgaggaactagagcaaaaagccatgcggatggattgtggtcgtcagaggctcccgtagtctttagcggcgctggcttccgcaggctccgccctctcttgcccacccggaaacagcctcgccccgcctacgcgggacccaaccgcggcgaccggacgtgcactcctccagtagcggctgcacgtcgtgccaatggcccgctatgaggaggtgagcgtgtccggcttcgaggagttccaccgggccgtggaacagcacaatggcaagaccattttcgcctactttacgggttctaaggacgccggggggaaaagctggtgccccgactgcgtgcagggtgaggccgggattcgggggctgctgtccaatggaaatggcaggaaggtcgagcctacggccagaaggggggcttagcggaggcagagtcttggttccagacatccgcggagcaatctgagctgtccccaagtctccttctattaaatcctaccccgccctgccaagagcgctcttccttttaccaccttacccggatgatcttggaatctagttccttaaaacttctcactcccccagtaccattagtgtcttacaggatacgtgagttggtcagcaaatacatgtgctttccattgttacgggcgcggtggtgcaggggcaaatcgggactgggatttggtccttacccttaacgtggctctaagaccagaagggaacacctgacttctgttgacctcttcagttagctgcagctgaaccagtcgtacgagaggggctgaagcacattagtgaaggatgtgtgttcatctactgccaagtaggagaaaagccttattggaaagatccaaataatgacttcagaaaaaacttgaaagtaacagcagtgcctacactacttaagtatggaacacctcaaaaactggtagaatctgagtgtcttcaggccaacctggtggaaatgttgttctctgaagattaagattttaggatggcaatcatgtcttgatgtcctgatttgttctagtatcaataaactgtatacttgctttgaattcatgttagcaataaatgatgttaaaaaaactggcatgtgtctaaacaatagagtgctattaaaatgcccatgaacctttagtttgcctgtaatacatggatatttttaagatataaagaagtcttcagaaatagcagtaaaggctcaaaggaacgtattcttgaaggtgacggaaatacctaaaaactcctaaaggtgcagagcacaccttccaaatctctcaaaagatcagtatcttttattttaagttatctccatctgcaaagcaactgatgatattcctgaaaccccttctttgattttggaatgtagaacctaacctcaccactgaaggaaagcacatgacctctaatctagcctctgcttaattcaggcagttttgttttgtttaataaaaaacagactcctgagcactagaagcagtttgttttgcagctgtctcaatgtgctttacttgggatgaggcaggtggcggagagcggccggaaagactctataacccagttgtgggaagaactccaagctgggagtcagtcacactgactctaccacttactagctgtgtaaccacaggcaagttactcaccccgtccaaacctcagttttctcttc

SEQ ID NO: 355308 - DNA, 1655 bp, Homo sapiens
aggccctgaactatttaaggatccaggtgttgcaaggcggtaagttttgcagccagtgtccatgaggtcggggctgggactagattagggtagatctaagcctgggcttgggagtgcagctagcgcagaaagatctgaggaactagagcaaaaagccatgcggatggattgtggtcgtcagaggctcccgtagtctttagcggcgctggcttccgcaggctccgccctctcttgcccacccggaaacagcctcgccccgcctacgcgggacccaaccgcggcgaccggacgtgcactcctccagtagcggctgcacgtcgtgccaatggcccgctatgaggaggtgagcgtgtccggcttcgaggagttccaccgggccgtggaacagcacaatggcaagaccattttcgcctactttacgggttctaaggacgccggggggaaaagctggtgccccgactgcgtgcagggtgaggccgggattcgggggctgctgtccaatggaaatggcaggaaggtcgagcctacggccagaaggggggcttagcggaggcagagtcttggttccagacatccgcggagcaatctgagctgtccccaagtctccttctattaaatcctaccccgccctgccaagagcgctcttccttttaccaccttacccggatgatcttggaatctagttccttaaaacttctcactcccccagtaccattagtgtcttacaggatacgtgagttgctgaaccagtcgtacgagaggggctgaagcacattagtgaaggatgtgtgttcatctactgccaagtaggagaaaagccttattggaaagatccaaataatgacttcagaaaaaacttgaaagtaacagcagtgcctacactacttaagtatggaacacctcaaaaactggtagaatctgagtgtcttcaggccaacctggtggaaatgttgttctctgaagattaagattttaggatggcaatcatgtcttgatgtcctgatttgttctagtatcaataaactgtatacttgctttgaattcatgttagcaataaatgatgttaaaaaaactggcatgtgtctaaacaatagagtgctattaaaatgcccatgaacctttagtttgcctgtaatacatggatatttttaagatataaagaagtcttcagaaatagcagtaaaggctcaaaggaacgtattcttgaaggtgacggaaatacctaaaaactcctaaaggtgcagagcacaccttccaaatctctcaaaagatcagtatcttttattttaagttatctccatctgcaaagcaactgatgatattcctgaaaccccttctttgattttggaatgtagaacctaacctcaccactgaaggaaagcacatgacctctaatctagcctctgcttaattcaggcagttttgttttgtttaataaaaaacagactcctgagcactagaagcagtttgttttgcagctgtctcaatgtgctttacttgggatgaggcaggtggcggagagcggccggaaagactctataacccagttgtgggaagaactccaagctgggagtcagtcacactgactctaccacttactagctgtgtaaccacaggcaagttactcaccccgtccaaacctcagttttctcttc

SEQ ID NO: 355309 - DNA, 236 bp, Homo sapiens
gcccccgccgccccggcagatgggccgccgcaactggcccgtgtgcgcttccggaagcgggcgactcgcagctccacgcgacgccgaggggctccgcgccgggaccgggcgggtgctcggagtttcggggaccgcacgggaccgagggcaggcgggcggccaccccccttacccccgcgtccggggcggggcgggcggcgcggggcggggccgggtgacgcggccccgccggggac

SEQ ID NO: 355310 - DNA, 3702 bp, Homo sapiens
gcccccgccgccccggcagatgggccgccgcaactggcccgtgtgcgcttccggaagcgggcgactcgcagctccacgcgacgccgaggggctccgcgccgggaccgggcgggtgctcggagtttcggggaccgcacgggaccgagggcaggaggagacatcacagctttcccagatcgggaggaaaaatatggaatgtgttttaccgctgactgaacacaaccaaatgaactgtcctgacagtagtttgcaaaccagcagctagcagtttgtccagcctctaacattgtccagcactttccagagcaaactcactgtttacaagaactcttggccttacgaagtttataacctcaagctttgtttatttaaaatattcctgcaaaagaaaagtacccggcacccactttccaaaatggccatggatgagtatttgtggatggtcattttgggtttcatcatagctttcatcttggccttttctgttggtgcaaacgatgttgccaactcctttggtacagccgtgggctctggtgtggtgaccttgaggcaggcatgcattttagcttcaatatttgaaaccaccggctccgtgttactaggcgccaaagtaggagaaaccattcgcaaaggtatcattgacgtgaacctgtacaacgagacggtggagactctcatggctggggaagttagtgccatggttggttccgctgtgtggcagctgattgcttccttcctgaggcttccaatctcaggaacgcactgcattgtgggttctactataggattctcactggtcgcaatcggtaccaaaggtgtgcagtggatggagcttgtcaagattgttgcttcttggtttatatctccactgttgtctggtttcatgtctggcctgctgtttgtactcatcagaattttcatcttaaaaaaggaagaccctgttcccaatggcctccgggcactcccagtattctatgctgctaccatagcaatcaatgtcttttccatcatgtacacaggagcaccagtgctcggccttgttctccccatgtgggccatagccctcatttcctttggtgtcgccctcctgttcgctttttttgtgtggctcttcgtgtgtccgtggatgcggaggaaaataacaggcaaattacaaaaagaaggtgctttatcacgagtatctgacgaaagcctcagtaaggttcaggaagcagagtccccagtatttaaagagctaccaggtgccaaggctaatgatgacagcaccatcccgctcacgggagcagcaggggagacactggggacctcggaaggcacttctgcgggcagccaccctcgggctgcatacggaagagcactgtccatgacccatggctctgtgaaatcgcccatctccaacggcaccttcggcttcgacggccacaccaggagcgacggtcatgtgtaccacaccgtgcacaaagactcggggctctacaaagatctgctgcacaaaatccacatcgacaggggccccgaggagaagccagcccaggaaagcaactaccggctgctgcgccgaaacaacagttacacctgctacaccgcagccatttgtgggctgccagtgcacgccacctttcgagctgcggactcatcggccccagaggacagtgagaagctggtgggcgacaccgtgtcctactccaagaagaggctgcgctacgacagctactcgagctactgtaacgcggtggcagaggcggagatcgaggcggaggagggcggcgtggagatgaagctggcgtcggagctggccgaccctgaccagccgcgagaggaccctgcagaggaggagaaggaggagaaggacgcacccgaggttcacctcctgttccatttcctgcaggtcctcaccgcctgtttcgggtcctttgctcacggcggcaatgacgtgagtaatgccatcggtcccctggtagccttgtggctgatttacaaacaaggcggggtaacgcaagaagcagctacacccgtctggctgctgttttatggaggagttggaatctgcacaggcctctgggtctgggggagaagagtgatccagaccatggggaaggacctcactcccatcacgccgtccagcggcttcacgatcgagctggcctcagccttcacagtggtgatcgcctccaacatcgggcttccagtcagcaccacgcactgtaaggtgggctcggtggtggccgtgggctggatccgctcccgcaaggctgtggactggcgcctctttcggaacatcttcgtggcctggttcgtgaccgtccctgtggctgggctgttcagcgctgctgtcatggctcttctcatgtatgggatccttccatatgtgtgatttgtcttcttccagctgcaaacagctaaagggatggtctggtgttggcgtgtgggagacatgtgtgctcgtgccgcacatacacatcctggccgtgcacggctctctcatgaccagctctctgcctcccttccaggaggctccatcccacactgttcacccaggctgcggagactcaccttcccgagctaacttaactactgtacataataatatgtattaaactggtatcgtggtgatataatgtggtgcagttacttatatattaaatatctattgtatccatagaataggcagcattatttcaaacatattcaagttgggagtggagatcattgcctagaagtcaatattcaataaatcttgtacataactatttcgatggcaaatgttaagccttctaaaaggaaagtgtagattggaaaatgattttttttccaaatgatgtttttgccttctaatatactgtaaggtaatgagcttcagaacaggcaacctgaccctgcagaggtcgcgtgctgtgggatgacagcgggacgggagctcacaagtgctttcactgaagatttgttcatatactgtgtattgattgttgtgtaatatatcatcattgcttttgtaaatacgtaaaactgtaattttttaatggtgtgcttcccttatacttttttgatcagagaattttggaaagtaccaaagaagcaggggaatcattggccagtgttacgttttcacattgtctgtctcccaccctcactgatcacgcctgccccagagcagtgtgtggcggtgacaccgtcacccagcatgcgccacgccgtggctcccaccagcagtgccaccgccaccacaccccagatcccacccaccttgcagtggcctttccttgtcatcagagtagagaatgcacaggtgttggtgagggcgtgtggctgagcactacatgtcaagtccagagtcagtttctatcccaattctccctgcagcctgaagaacggatccttgtctccaatgtcagcacaaaggaggctttttctgtgctttgacattctagcacttcagggatgagagggagggagaatcctggatgctggatggagtatttctctgaggcccacacaaagctggacacccccaggctctactccatcccattggagtctcttctttttttgatagcgggagggaggaagtacgactaatgttggagcctgaaactatggaaatgctgctaaaatttttatattgacaaacattttcttggtacttcattgtcatttttcattaatcaaccatattaaatttataataaaaaatgcccctcagaa

SEQ ID NO: 355311 - DNA, 3681 bp, Homo sapiens
acgcggggccactcacgctgccggctccggaggcggcacgcggccagcgctgctccgctccggggctctttaccccggagtcggggccgggcgcgcgggaaacggttaccgagcggacctggacgccctctgccttcgtcatttcctgccggccggtcggtttccggatgaaacgaggagccaggaggagacatcacagctttcccagatcgggaggaaaaatatggaatgtgttttaccgctgactgaacacaaccaaatgaactgtcctgacagtagtttgcaaaccagcagctagcagtttgtccagcctctaacattgtccagcactttccagagcaaactcactgtttacaagaactcttggccttacgaagtttataacctcaagctttgtttatttaaaatattcctgcaaaagaaaagtacccggcacccactttccaaaatggccatggatgagtatttgtggatggtcattttgggtttcatcatagctttcatcttggccttttctgttggtgcaaacgatgttgccaactcctttggtacagccgtgggctctggtgtggtgaccttgaggcaggcatgcattttagcttcaatatttgaaaccaccggctccgtgttactaggcgccaaagtaggagaaaccattcgcaaaggtatcattgacgtgaacctgtacaacgagacggtggagactctcatggctggggaagttagtgccatggttggttccgctgtgtggcagctgattgcttccttcctgaggcttccaatctcaggaacgcactgcattgtgggttctactataggattctcactggtcgcaatcggtaccaaaggtgtgcagtggatggagcttgtcaagattgttgcttcttggtttatatctccactgttgtctggtttcatgtctggcctgctgtttgtactcatcagaattttcatcttaaaaaaggaagaccctgttcccaatggcctccgggcactcccagtattctatgctgctaccatagcaatcaatgtcttttccatcatgtacacaggagcaccagtgctcggccttgttctccccatgtgggccatagccctcatttcctttggtgtcgccctcctgttcgctttttttgtgtggctcttcgtgtgtccgtggatgcggaggaaaataacaggcaaattacaaaaagaaggtgctttatcacgagtatctgacgaaagcctcagtaaggttcaggaagcagagtccccagtatttaaagagctaccaggtgccaaggctaatgatgacagcaccatcccgctcacgggagcagcaggggagacactggggacctcggaaggcacttctgcgggcagccaccctcgggctgcatacggaagagcactgtccatgacccatggctctgtgaaatcgcccatctccaacggcaccttcggcttcgacggccacaccaggagcgacggtcatgtgtaccacaccgtgcacaaagactcggggctctacaaagatctgctgcacaaaatccacatcgacaggggccccgaggagaagccagcccaggaaagcaactaccggctgctgcgccgaaacaacagttacacctgctacaccgcagccatttgtgggctgccagtgcacgccacctttcgagctgcggactcatcggccccagaggacagtgagaagctggtgggcgacaccgtgtcctactccaagaagaggctgcgctacgacagctactcgagctactgtaacgcggtggcagaggcggagatcgaggcggaggagggcggcgtggagatgaagctggcgtcggagctggccgaccctgaccagccgcgagaggaccctgcagaggaggagaaggaggagaaggacgcacccgaggttcacctcctgttccatttcctgcaggtcctcaccgcctgtttcgggtcctttgctcacggcggcaatgacgtgagtaatgccatcggtcccctggtagccttgtggctgatttacaaacaaggcggggtaacgcaagaagcagctacacccgtctggctgctgttttatggaggagttggaatctgcacaggcctctgggtctgggggagaagagtgatccagaccatggggaaggacctcactcccatcacgccgtccagcggcttcacgatcgagctggcctcagccttcacagtggtgatcgcctccaacatcgggcttccagtcagcaccacgcactgtaaggtgggctcggtggtggccgtgggctggatccgctcccgcaaggctgtggactggcgcctctttcggaacatcttcgtggcctggttcgtgaccgtccctgtggctgggctgttcagcgctgctgtcatggctcttctcatgtatgggatccttccatatgtgtgatttgtcttcttccagctgcaaacagctaaagggatggtctggtgttggcgtgtgggagacatgtgtgctcgtgccgcacatacacatcctggccgtgcacggctctctcatgaccagctctctgcctcccttccaggaggctccatcccacactgttcacccaggctgcggagactcaccttcccgagctaacttaactactgtacataataatatgtattaaactggtatcgtggtgatataatgtggtgcagttacttatatattaaatatctattgtatccatagaataggcagcattatttcaaacatattcaagttgggagtggagatcattgcctagaagtcaatattcaataaatcttgtacataactatttcgatggcaaatgttaagccttctaaaaggaaagtgtagattggaaaatgattttttttccaaatgatgtttttgccttctaatatactgtaaggtaatgagcttcagaacaggcaacctgaccctgcagaggtcgcgtgctgtgggatgacagcgggacgggagctcacaagtgctttcactgaagatttgttcatatactgtgtattgattgttgtgtaatatatcatcattgcttttgtaaatacgtaaaactgtaattttttaatggtgtgcttcccttatacttttttgatcagagaattttggaaagtaccaaagaagcaggggaatcattggccagtgttacgttttcacattgtctgtctcccaccctcactgatcacgcctgccccagagcagtgtgtggcggtgacaccgtcacccagcatgcgccacgccgtggctcccaccagcagtgccaccgccaccacaccccagatcccacccaccttgcagtggcctttccttgtcatcagagtagagaatgcacaggtgttggtgagggcgtgtggctgagcactacatgtcaagtccagagtcagtttctatcccaattctcctctgtgctttgacattctagcacttcagggatgagagggagggagaatcctggatgctggatggagtatttctctgaggcccacacaaagctggacacccccaggctctactccatcccattggagtctcttctttttttgatagcgggagggaggaagtacgactaatgttggagcctgaaactatggaaatgctgctaaaatttttatattgacaaacattttcttggtacttcattgtcatttttcattaatcaaccatattaaatttataataaaaaatgcccctcagaa

SEQ ID NO: 355312 - DNA, 3018 bp, Homo sapiens
atgctgttttttgaggcccgagcttggggcaggggttttttgaccctgcattggcagtgtggtcagtggtgtgtgactgtgtgttgatgtttgagtgtggccataaatgtgtgaaggtcagctctgccaagtcacagggcttgttaggttctgaattaaagttgcttcttggtttatatctccactgttgtctggtttcatgtctggcctgctgtttgtactcatcagaattttcatcttaaaaaaggaagaccctgttcccaatggcctccgggcactcccagtattctatgctgctaccatagcaatcaatgtcttttccatcatgtacacaggagcaccagtgctcggccttgttctccccatgtgggccatagccctcatttcctttggtgtcgccctcctgttcgctttttttgtgtggctcttcgtgtgtccgtggatgcggaggaaaataacaggcaaattacaaaaagaaggtgctttatcacgagtatctgacgaaagcctcagtaaggttcaggaagcagagtccccagtatttaaagagctaccaggtgccaaggctaatgatgacagcaccatcccgctcacgggagcagcaggggagacactggggacctcggaaggcacttctgcgggcagccaccctcgggctgcatacggaagagcactgtccatgacccatggctctgtgaaatcgcccatctccaacggcaccttcggcttcgacggccacaccaggagcgacggtcatgtgtaccacaccgtgcacaaagactcggggctctacaaagatctgctgcacaaaatccacatcgacaggggccccgaggagaagccagcccaggaaagcaactaccggctgctgcgccgaaacaacagttacacctgctacaccgcagccatttgtgggctgccagtgcacgccacctttcgagctgcggactcatcggccccagaggacagtgagaagctggtgggcgacaccgtgtcctactccaagaagaggctgcgctacgacagctactcgagctactgtaacgcggtggcagaggcggagatcgaggcggaggagggcggcgtggagatgaagctggcgtcggagctggccgaccctgaccagccgcgagaggaccctgcagaggaggagaaggaggagaaggacgcacccgaggttcacctcctgttccatttcctgcaggtcctcaccgcctgtttcgggtcctttgctcacggcggcaatgacgtgagtaatgccatcggtcccctggtagccttgtggctgatttacaaacaaggcggggtaacgcaagaagcagctacacccgtctggctgctgttttatggaggagttggaatctgcacaggcctctgggtctgggggagaagagtgatccagaccatggggaaggacctcactcccatcacgccgtccagcggcttcacgatcgagctggcctcagccttcacagtggtgatcgcctccaacatcgggcttccagtcagcaccacgcactgtaaggtgggctcggtggtggccgtgggctggatccgctcccgcaaggctgtggactggcgcctctttcggaacatcttcgtggcctggttcgtgaccgtccctgtggctgggctgttcagcgctgctgtcatggctcttctcatgtatgggatccttccatatgtgtgatttgtcttcttccagctgcaaacagctaaagggatggtctggtgttggcgtgtgggagacatgtgtgctcgtgccgcacatacacatcctggccgtgcacggctctctcatgaccagctctctgcctcccttccaggaggctccatcccacactgttcacccaggctgcggagactcaccttcccgagctaacttaactactgtacataataatatgtattaaactggtatcgtggtgatataatgtggtgcagttacttatatattaaatatctattgtatccatagaataggcagcattatttcaaacatattcaagttgggagtggagatcattgcctagaagtcaatattcaataaatcttgtacataactatttcgatggcaaatgttaagccttctaaaaggaaagtgtagattggaaaatgattttttttccaaatgatgtttttgccttctaatatactgtaaggtaatgagcttcagaacaggcaacctgaccctgcagaggtcgcgtgctgtgggatgacagcgggacgggagctcacaagtgctttcactgaagatttgttcatatactgtgtattgattgttgtgtaatatatcatcattgcttttgtaaatacgtaaaactgtaattttttaatggtgtgcttcccttatacttttttgatcagagaattttggaaagtaccaaagaagcaggggaatcattggccagtgttacgttttcacattgtctgtctcccaccctcactgatcacgcctgccccagagcagtgtgtggcggtgacaccgtcacccagcatgcgccacgccgtggctcccaccagcagtgccaccgccaccacaccccagatcccacccaccttgcagtggcctttccttgtcatcagagtagagaatgcacaggtgttggtgagggcgtgtggctgagcactacatgtcaagtccagagtcagtttctatcccaattctccctgcagcctgaagaacggatccttgtctccaatgtcagcacaaaggaggctttttctgtgctttgacattctagcacttcagggatgagagggagggagaatcctggatgctggatggagtatttctctgaggcccacacaaagctggacacccccaggctctactccatcccattggagtctcttctttttttgatagcgggagggaggaagtacgactaatgttggagcctgaaactatggaaatgctgctaaaatttttatattgacaaacattttcttggtacttcattgtcatttttcattaatcaaccatattaaatttataataaaaaatgcccctcagaa

SEQ ID NO: 355313 - DNA, 3678 bp, Homo sapiens
acgcggggccactcacgctgccggctccggaggcggcacgcggccagcgctgctccgctccggggctctttaccccggagtcggggccgggcgcgcgggaaacggttaccgagcggacctggacgccctctgccttcgtcatttcctgccggccggtcggtttccggatgaaacgaggagccaggaggagacatcacagctttcccagatcgggaggaaaaatatggaatgtgttttaccgctgactgaacacaaccaaatgaactgtcctgacagtagtttgcaaaccagcagctagcagtttgtccagcctctaacattgtccagcactttccagagcaaactcactgtttacaagaactcttggccttacgaagtttataacctcaagctttgtttatttaaaatattcctgcaaaagaaaagtacccggcacccactttccaaaatggccatggatgagtatttgtggatggtcattttgggtttcatcatagctttcatcttggccttttctgttggtgcaaacgatgttgccaactcctttggtacagccgtgggctctggtgtggtgaccttgaggcaggcatgcattttagcttcaatatttgaaaccaccggctccgtgttactaggcgccaaagtaggagaaaccattcgcaaaggtatcattgacgtgaacctgtacaacgagacggtggagactctcatggctggggaagttagtgccatggttggttccgctgtgtggcagctgattgcttccttcctgaggcttccaatctcaggaacgcactgcattgtgggttctactataggattctcactggtcgcaatcggtaccaaaggtgtgcagtggatggagcttgtcaagattgttgcttcttggtttatatctccactgttgtctggtttcatgtctggcctgctgtttgtactcatcagaattttcatcttaaaaaaggaagaccctgttcccaatggcctccgggcactcccagtattctatgctgctaccatagcaatcaatgtcttttccatcatgtacacaggagcaccagtgctcggccttgttctccccatgtgggccatagccctcatttcctttggtgtcgccctcctgttcgctttttttgtgtggctcttcgtgtgtccgtggatgcggaggaaaataacaggcaaattacaaaaagaaggtgctttatcacgagtatctgacgaaagcctcagtaaggttcaggaagcagagtccccagtatttaaagagctaccaggtgccaaggctaatgatgacagcaccatcccgctcacgggagcagcaggggagacactggggacctcggaaggcacttctgcgggcagccaccctcgggctgcatacggaagagcactgtccatgacccatggctctgtgaaatcgcccatctccaacggcaccttcggcttcgacggccacaccaggagcgacggtcatgtgtaccacaccgtgcacaaagactcggggctctacaaagatctgctgcacaaaatccacatcgacaggggccccgaggagaagccagcccaggaaagcaactaccggctgctgcgccgaaacaacagttacacctgctacaccgcagccatttgtgggctgccagtgcacgccacctttcgagctgcggactcatcggccccagaggacagtgagaagctggtgggcgacaccgtgtcctactccaagaagaggctgcgctacgacagctactcgagctactgtaacgcggtggcagaggcggagatcgaggcggaggagggcggcgtggagatgaagctggcgtcggagctggccgaccctgaccagccgcgagaggaccctgcagaggaggagaaggaggagaaggacgcacccgaggttcacctcctgttccatttcctgcaggtcctcaccgcctgtttcgggtcctttgctcacggcggcaatgacgtgagtaatgccatcggtcccctggtagccttgtggctgatttacaaacaaggcggggtaacgcaagaagcagctacacccgtctggctgctgttttatggaggagttggaatctgcacaggcctctgggtctgggggagaagagtgatccagaccatggggaaggacctcactcccatcacgccgtccagcggcttcacgatcgagctggcctcagccttcacagtggtgatcgcctccaacatcgggcttccagtcagcaccacgcactgtaaggtgggctcggtggtggccgtgggctggatccgctcccgcaaggctgtggactggcgcctctttcggaacatcttcgtggcctggttcgtgaccgtccctgtggctgggctgttcagcgctgctgtcatggctcttctcatgtatgggatccttccatatgtgtgatttgtcttcttccagctgcaaacagctaaagggatggtctggtgttggcgtgtgggagacatgtgtgctcgtgccgcacatacacatcctggccgtgcacggctctctcatgaccagctctctgcctcccttccaggaggctccatcccacactgttcacccaggctgcggagactcaccttcccgagctaacttaactactgtacataataatatgtattaaactggtatcgtggtgatataatgtggtgcagttacttatatattaaatatctattgtatccatagaataggcagcattatttcaaacatattcaagttgggagtggagatcattgcctagaagtcaatattcaataaatcttgtacataactatttcgatggcaaatgttaagccttctaaaaggaaagtgtagattggaaaatgattttttttccaaatgatgtttttgccttctaatatactgtaaggtaatgagcttcagaacaggcaacctgaccctgcagaggtcgcgtgctgtgggatgacagcgggacgggagctcacaagtgctttcactgaagatttgttcatatactgtgtattgattgttgtgtaatatatcatcattgcttttgtaaaattttggaaagtaccaaagaagcaggggaatcattggccagtgttacgttttcacattgtctgtctcccaccctcactgatcacgcctgccccagagcagtgtgtggcggtgacaccgtcacccagcatgcgccacgccgtggctcccaccagcagtgccaccgccaccacaccccagatcccacccaccttgcagtggcctttccttgtcatcagagtagagaatgcacaggtgttggtgagggcgtgtggctgagcactacatgtcaagtccagagtcagtttctatcccaattctccctgcagcctgaagaacggatccttgtctccaatgtcagcacaaaggaggctttttctgtgctttgacattctagcacttcagggatgagagggagggagaatcctggatgctggatggagtatttctctgaggcccacacaaagctggacacccccaggctctactccatcccattggagtctcttctttttttgatagcgggagggaggaagtacgactaatgttggagcctgaaactatggaaatgctgctaaaatttttatattgacaaacattttcttggtacttcattgtcatttttcattaatcaaccatattaaatttataataaaaaatgcccctcagaa

SEQ ID NO: 355314 - DNA, 3599 bp, Homo sapiens
acgcggggccactcacgctgccggctccggaggcggcacgcggccagcgctgctccgctccggggctctttaccccggagtcggggccgggcgcgcgggaaacggttaccgagcggacctggacgccctctgccttcgtcatttcctgccggccggtcggtttccggatgaaacgaggagccaggaggagacatcacagctttcccagatcgggaggaaaaatatggaatgtgttttaccgctgactgaacacaaccaaatgaactgtcctgacagtagtttgcaaaccagcagctagcagtttgtccagcctctaacattgtccagcactttccagagcaaactcactgtttacaagaactcttggccttacgaagtttataacctcaagctttgtttatttaaaatattcctgcaaaagaaaagtacccggcacccactttccaaaatggccatggatgagtatttgtggatggtcattttgggtttcatcatagctttcatcttggccttttctgttggtgcaaacgatgttgccaactcctttggtacagccgtgggctctggtgtggtgaccttgaggcaggcatgcattttagcttcaatatttgaaaccaccggctccgtgttactaggcgccaaagtaggagaaaccattcgcaaaggtatcattgacgtgaacctgtacaacgagacggtggagactctcatggctggggaagttagtgccatggttggttccgctgtgtggcagctgattgcttccttcctgaggcttccaatctcaggaacgcactgcattgtgggttctactataggattctcactggtcgcaatcggtaccaaaggtgtgcagtggatggagcttgtcaagattgttgcttcttggtttatatctccactgttgtctggtttcatgtctggcctgctgtttgtactcatcagaattttcatcttaaaaaaggaagaccctgttcccaatggcctccgggcactcccagtattctatgctgctaccatagcaatcaatgtcttttccatcatgtacacaggagcaccagtgctcggccttgttctccccatgtgggccatagccctcatttcctttggtgtcgccctcctgttcgctttttttgtgtggctcttcgtgtgtccgtggatgcggaggaaaataacaggcaaattacaaaaagaaggtgctttatcacgagtatctgacgaaagcctcagtaaggttcaggaagcagagtccccagtatttaaagagctaccaggtgccaaggctaatgatgacagcaccatcccgctcacgggagcagcaggggagacactggggacctcggaaggcacttctgcgggcagccaccctcgggctgcatacggaagagcactgtccatgacccatggctctgtgaaatcgcccatctccaacggcaccttcggcttcgacggccacaccaggagcgacggtcatgtgtaccacaccgtgcacaaagactcggggctctacaaagatctgctgcacaaaatccacatcgacaggggccccgaggagaagccagcccaggaaagcaactaccggctgctgcgccgaaacaacagttacacctgctacaccgcagccatttgtgggctgccagtgcacgccacctttcgagctgcggactcatcggccccagaggacagtgagaagctggtgggcgacaccgtgtcctactccaagaagaggctgcgctacgacagctactcgagctactgtaacgcggtggcagaggcggagatcgaggcggaggagggcggcgtggagatgaagctggcgtcggagctggccgaccctgaccagccgcgagaggaccctgcagaggaggagaaggaggagaaggacgcacccgaggttcacctcctgttccatttcctgcaggtcctcaccgcctgtttcgggtcctttgctcacggcggcaatgacgtgagtaatgccatcggtcccctggtagccttgtggctgatttacaaacaaggcggggtaacgcaagaagcagctacacccgtctggctgctgttttatggaggagttggaatctgcacaggcctctgggtctgggggagaagagtgatccagaccatggggaaggacctcactcccatcacgccgtccagcggcttcacgatcgagctggcctcagccttcacagtggtgatcgcctccaacatcgggcttccagtcagcaccacgcactgtaaggtgggctcggtggtggccgtgggctggatccgctcccgcaaggctgtggactggcgcctctttcggaacatcttcgtggcctggttcgtgaccgtccctgtggctgggctgttcagcgctgctgtcatggctcttctcatgtatgggatccttccatatgtgtgatttgtcttcttccagctgcaaacagctaaagggatggtctggtgttggcgtgtgggagacatgtgtgctcgtgccgcacatacacatcctggccgtgcacggctctctcatgaccagctctctgcctcccttccaggaggctccatcccacactgttcacccaggctgcggagactcaccttcccgagctaacttaactactgtacataataatatgtattaaactggtatcgtggtgatataatgtggtgcagttacttatatattaaatatctattgtatccatagaataggcagcattatttcaaacatattcaagttgggagtggagatcattgcctagaagtcaatattcaataaatcttgtacataactatttcgatggcaaatgttaagccttctaaaaggaaagtgtagattggaaaatgattttttttccaaatgatgtttttgccttctaatatactgtaaggtaatgagcttcagaacaggcaacctgaccctgcagaggtcgcgtgctgtgggatgacagcgggacgggagctcacaagtgctttcactgaaatacgtaaaactgtaattttttaatggtgtgcttcccttatacttttttgatcagagaattttggaaagtaccaaagaagcaggggaatcattggccagtgttacgttttcacattgtctgtctcccacccagcagtgccaccgccaccacaccccagatcccacccaccttgcagtggcctttccttgtcatcagagtagagaatgcacaggtgttggtgagggcgtgtggctgagcactacatgtcaagtccagagtcagtttctatcccaattctccctgcagcctgaagaacggatccttgtctccaatgtcagcacaaaggaggctttttctgtgctttgacattctagcacttcagggatgagagggagggagaatcctggatgctggatggagtatttctctgaggcccacacaaagctggacacccccaggctctactccatcccattggagtctcttctttttttgatagcgggagggaggaagtacgactaatgttggagcctgaaactatggaaatgctgctaaaatttttatattgacaaacattttcttggtacttcattgtcatttttcattaatcaaccatattaaatttataataaaaaatgcccctcagaa

SEQ ID NO: 355315 - DNA, 6164 bp, Homo sapiens
  misc_feature (1449)..(1449): n is a, c, g, or t
  misc_feature (1987)..(1987): n is a, c, g, or t
  misc_feature (1990)..(1990): n is a, c, g, or t
  misc_feature (2070)..(2070): n is a, c, g, or t
acgcggggccactcacgctgccggctccggaggcggcacgcggccagcgctgctccgctccggggctctttaccccggagtcggggccgggcgcgcgggaaacggttaccgagcggacctggacgccctctgccttcgtcatttcctgccggccggtcggtttccggatgaaacgaggagccaggcatctccttggaaacaatgccatctttgaatgtgagagataaacctagtttcagcatgtctgcagcagagaccagtacatcaggcttattcccacaggaagcctcctaaagcctgtggcgcggcaaccatttccaggactaaataataatgtgtcagatgcctgtgagtggactgcctggccaaatgactcatgaagatattcacggaagaatagtcaaaaaccaaagaaaaggcatattctagaagcaccttcaattccatcgaggatttttgagcagctgaagaagaaagttctgaaaatatgagtgacaggactccagcacattttttttagttgtttcttacattatctttgttaacccatccgcttttgtgtataatattaagttattttccactactgcaatggctagtaatttacttaggctcagagttttactctgtatggacagagaaataggaggtaacaacagtgggagaacaaataggaacagttcactgggatgttggtccccagaaattggctttcattgaataattcctaaagggtgtcgtgtgctgaattgctttttcatagtgatgtgctgcttcttgttcatactcttatgactttaatttcacctttatctactcccagcctctgtatatgcctacgtttttaaaaataatttttggcactgaagatctgattaccatattttttcagtttaaaaattaaatcctcgcaaatagacctttggtatagttgcattctaccctaggttattttctaggatcaagaatagaacaatttctgttctttccagcattactctttactattcatatgttcttgttcagtgttttgttgttctcatattctaggtggaaatgaagggtaatctctatgttctattttcagttttctaggaaaccagaaaaacatgggtagtagaaatgtatagaaaatgtatgaggtctcttaaccattgtgttaaacttgcattaagcttcttttttagcaatatcgatgtcagtgttacctcttctttcctttttatttattttttttgagacagagtctcattctgtcgcccagactggttggagtgcgatgatgcgatcgcggctaactgcaaccgctgcctcccgggtacaagtgattctcgtgccttgggctcccgagtagctgggatttttagtggagaacaggtttcaccatattggccaggctggtcttgaactcgcaacctcaggtgatccacccacctcagcctccccaangtgttgggattacaggcatgagccaccatacctggccccttttgttgttttgaggggcaggcagtaagaagcagggatttcttcaaatgctagtaagcacaaagagagggagaagtttttgtaagtaacgaacagggccgggcatggtggcgtgagaggccgaggtgggcagatcacgaggtcaggagttcgagaccagcctgaccaacatggtgaaacccccgtctccactagaaatgcaaagattagccgggcatggtggtgcacgcctgtaatccagctagtcgggaggctgaggcaggagaatcgcttgaacctgggaggtggaggttgcagggagctgagatcacgccactgcactccagcctgggcgacagagtaagactcccgtctcaaaaaaaaaaaaaaaaaaaaaagaacagttgatcattaaggccattaatgtgcatggacagtttgttgcccaggttggagtgtgatgacgacgcaatctcggtaaatataaacctactctgtaacctccacctcctgggctcangcngttctcgtgcttcagcctcccgagtagctgggatcacaggcatgcgccactaagcccagctaatttttgtatttttagtngagacggggtttcaccatgttggccaggctggtcttgaactcctggcctcaagtgatgcgcctgcctgggcctcccaaagtgctgggattacaggtgtgagccactgcacctggcccaataggcacatttttttaataagtagtttgttgattagaacgaagagcacttgccgtaagtgcatgtcattgttttcagctgttatggctaagtcagttaacctcatcaacaattttttcttctgtaaattgaggacaatttttgcttttatgaatgaagtcttaaccagcaggaagaaatataaacaaaggaacatatttttaatttaatgaagcaaaattccatacatcattttgaaaatagtgtttctttccctgataggcctgttctgcatcattcttttagcttccttctgccctgtttatcacttggtcccacttttatatttttcctcttcggtccagaatttcttatttagtttcttgtattttgcctactccctcccttctccatgattcagcctagtctttccgtcctctgtggacttgggtgtgccttcctctgggccacctcgtcttttgctgctgttagccctcccgcctgcgcacctgccacttcaccctcgcctgtggtccacttacgttccactcagcccggtcagtcctgctttgttcttctccaccgccttggtctcccgtgtgtcttatctagctctggttccttctcgtctccacatttattttgttttcttcctgtgcttgttagtccttgtgcacttggtccttgagctctttttctattaataggtattactagatggatttgttgtctgcctttacatagaacacacatccttactgtgcatttcctgggtagccaggatgaatcaattattattaacttcccttcgaacattgagcttcctctgttttctgtttctaagaattagattagtattctagaagactaatactactttaaagacagtcaaaacagtcatacgctgccatttcagccctttatttaagagtttgtgacatttatcactcccttgaaagattaaagaacacccaaagcaagtttggggtggaggtggggaaggcaggaagagaaaggtaagtgctataaaaggactcattgttaatttctagaaattggactgagatctgaaagcataagccttaacattttttagataaacggtccctgaaaagaataaaaagtatcagtacttccgttaactagctttagtattgggtcatttgtagtttacattctcctttaagttttaagaccttcagtagttaacaaagcagacagagactggccaggcacagtggctcacacctgtaataccagcactttgggaggctgagttgggtggatcacaaggtcaggagattgaaaccatcctggccaacatggtgaaaccccgtctctactaaaaatacaaaaaaaaaaaaaaattagccaggcgtggtggcaggcacctgtggtcccagctactcgggaggctggggcaggagaatttcttgagcccgggaggccgaggttgcagtgagctgagatcgcgccactgcactccagcctgggtgacagcgagactctgtctcaaaaagaaaaaaaaaaaaaaaagcagagacttaatcttgtaaatactcattttatttttgagaggcttaatgtctccttaaatattaacctgtgtcattttgtaattatactgtaatagtgtcagaatgccattaacaaccaacccttttcgtttcttgtgtgggaaagctcataaattgtgtggtcttacccctctggaccctgtagttgtagcattgtgaaaatggagcttttggcaaaactttgtattatgctgttgactcacattgtctcatatttttcctttattcttctatattctatgaatatggtgctgtcctgtcatttaattattataatatatgtgaactgctggaggtagactgatgtgagtgcagtttttcaacttaaaaacccttatatatcacattcatggtgtttaagatataagaacagccctacaaagaggggttgattgtattgaagattctttctgctgagcctgccttaattgtgagggtggttgtttgggtatcttagagctaaaagaatggctaagagtccattaatggtcctgtaatattcaccatccctgagcagttagtaaagaatggccgcaaagccacaattaggctactaacaaggaacttatgtagatgtgctaggtccagcctgtgttctggaactatagagatgaataaggtatggtcctttctctctggaggctcacagttgaatagggaatattaatacgtgaatgatagcagtacagtgtggcagatgctaaaatatatgtgtgtagcagctattacaggagaactgattaatagggagagtctggctgggctcagtgactcacccctgtaatcccagcactttgggaggccgaggcgggcagatcacttgaggtcaggagttcgagaccagcctggccaacatggtaaaacctcatctctactaaaaaatacaaagaaaattagcaaggcgtggtggcgggcatctgtaatcccagctactggggaggctgaagcaggagaatcccttgaacccgggaggtgaggttgcagtgagctgagatcatgccactgcactccagcctgggtgacagagtaagactgtctcaaaaacaaaacccaaaatactaaccatatttatagttagtcacctcaccctttttttagttaaaagaagtttatttagcctgatcagtttaccagatgtcttttttagtgacttttgtgtcttccataaatccattctcaaaatttgcaacagttgagcatatttgaccaaaatgtgccacaggtttctgaagcctgttcaagaagaagcatgtcaacattattggagtaggtcttcgcaatgactacttttgggaagatttgagtaaaatttatggatacagaagttttggagtatgttagaatattactaagtctttttatagttgtaatcccaacactgggttatatatatttaataccaacctgagtatatttcctgaataatatctgttttggagacttggacaaagttaacttttttgcttttttaaaagttgctgtttaaattaacttcctgcatttctaatgtagaaaaaatatggcacagtgatttgaattttgtttatggtttattatcttcctaaattatcagctctttaaaatatgggtctctggcctgtataccatctgataaattaggttgggtaaatttttcacctgaaaaaattcattcttttgacccaggttgtttggcttggaaaaaaaaaatcacatactcattgcatgattaaacttgtccatcagattgtgattttgtgcgttatgaggattgtagctggggtaattttaaaatgttggtatttggatagaactgccagcccaggattttgataaagatcaaaatatatactgtatctaaagtttcttttttaaaagttatttcacttataatcaaaaggtttaaataagtttagtgtatattttatgattagtattattttgtatcgattcagagagaggaaaactgcattcccatagacagggagacttggtgcattaatatccaaagcttagtttaagctggtgatgattagaaaagtggctttcatttgtgttctctggaagattctcagtagtcctgtgggcatgtgaacaagagcatgtgtaatcttcataatgtatgtcttgttagcagaaatgtctgaggcattgctgagatgtaggatgagctgaggtactggttttgtctttcatggttccctattatgttttttgagaaactgagcttttcctgacagtgtttagtttttcttggctatttactatgctattaatagtaacagtttccattatggagcctcagtaggttcttgacatacattaacccattgctattatgtaattttctaataaaatgatgtgataaaacatattttctgtaatatactcatagaatatgtgattataagtaaataaatagatgttggggtagtcctcca

SEQ ID NO: 355316 - DNA, 6219 bp, Homo sapiens
  misc_feature (1504)..(1504): n is a, c, g, or t
  misc_feature (2042)..(2042): n is a, c, g, or t
  misc_feature (2045)..(2045): n is a, c, g, or t
  misc_feature (2125)..(2125): n is a, c, g, or t
caagatgaagaacagtggtatttctctgaaagtcccagtatgtctcccttttgttgggagctgacagtatgattttgggggcatcgggcatcaacagtcactgaatctaaatggctccacagataggggagtgtatacatcaccacaccagctgtccaggaattaggaggaagtgcccttgaatgaagcctgggctgcaagcctggttagcagccagggaggacacacacacgttgcaggcatctccttggaaacaatgccatctttgaatgtgagagataaacctagtttcagcatgtctgcagcagagaccagtacatcaggcttattcccacaggaagcctcctaaagcctgtggcgcggcaaccatttccaggactaaataataatgtgtcagatgcctgtgagtggactgcctggccaaatgactcatgaagatattcacggaagaatagtcaaaaaccaaagaaaaggcatattctagaagcaccttcaattccatcgaggatttttgagcagctgaagaagaaagttctgaaaatatgagtgacaggactccagcacattttttttagttgtttcttacattatctttgttaacccatccgcttttgtgtataatattaagttattttccactactgcaatggctagtaatttacttaggctcagagttttactctgtatggacagagaaataggaggtaacaacagtgggagaacaaataggaacagttcactgggatgttggtccccagaaattggctttcattgaataattcctaaagggtgtcgtgtgctgaattgctttttcatagtgatgtgctgcttcttgttcatactcttatgactttaatttcacctttatctactcccagcctctgtatatgcctacgtttttaaaaataatttttggcactgaagatctgattaccatattttttcagtttaaaaattaaatcctcgcaaatagacctttggtatagttgcattctaccctaggttattttctaggatcaagaatagaacaatttctgttctttccagcattactctttactattcatatgttcttgttcagtgttttgttgttctcatattctaggtggaaatgaagggtaatctctatgttctattttcagttttctaggaaaccagaaaaacatgggtagtagaaatgtatagaaaatgtatgaggtctcttaaccattgtgttaaacttgcattaagcttcttttttagcaatatcgatgtcagtgttacctcttctttcctttttatttattttttttgagacagagtctcattctgtcgcccagactggttggagtgcgatgatgcgatcgcggctaactgcaaccgctgcctcccgggtacaagtgattctcgtgccttgggctcccgagtagctgggatttttagtggagaacaggtttcaccatattggccaggctggtcttgaactcgcaacctcaggtgatccacccacctcagcctccccaangtgttgggattacaggcatgagccaccatacctggccccttttgttgttttgaggggcaggcagtaagaagcagggatttcttcaaatgctagtaagcacaaagagagggagaagtttttgtaagtaacgaacagggccgggcatggtggcgtgagaggccgaggtgggcagatcacgaggtcaggagttcgagaccagcctgaccaacatggtgaaacccccgtctccactagaaatgcaaagattagccgggcatggtggtgcacgcctgtaatccagctagtcgggaggctgaggcaggagaatcgcttgaacctgggaggtggaggttgcagggagctgagatcacgccactgcactccagcctgggcgacagagtaagactcccgtctcaaaaaaaaaaaaaaaaaaaaaagaacagttgatcattaaggccattaatgtgcatggacagtttgttgcccaggttggagtgtgatgacgacgcaatctcggtaaatataaacctactctgtaacctccacctcctgggctcangcngttctcgtgcttcagcctcccgagtagctgggatcacaggcatgcgccactaagcccagctaatttttgtatttttagtngagacggggtttcaccatgttggccaggctggtcttgaactcctggcctcaagtgatgcgcctgcctgggcctcccaaagtgctgggattacaggtgtgagccactgcacctggcccaataggcacatttttttaataagtagtttgttgattagaacgaagagcacttgccgtaagtgcatgtcattgttttcagctgttatggctaagtcagttaacctcatcaacaattttttcttctgtaaattgaggacaatttttgcttttatgaatgaagtcttaaccagcaggaagaaatataaacaaaggaacatatttttaatttaatgaagcaaaattccatacatcattttgaaaatagtgtttctttccctgataggcctgttctgcatcattcttttagcttccttctgccctgtttatcacttggtcccacttttatatttttcctcttcggtccagaatttcttatttagtttcttgtattttgcctactccctcccttctccatgattcagcctagtctttccgtcctctgtggacttgggtgtgccttcctctgggccacctcgtcttttgctgctgttagccctcccgcctgcgcacctgccacttcaccctcgcctgtggtccacttacgttccactcagcccggtcagtcctgctttgttcttctccaccgccttggtctcccgtgtgtcttatctagctctggttccttctcgtctccacatttattttgttttcttcctgtgcttgttagtccttgtgcacttggtccttgagctctttttctattaataggtattactagatggatttgttgtctgcctttacatagaacacacatccttactgtgcatttcctgggtagccaggatgaatcaattattattaacttcccttcgaacattgagcttcctctgttttctgtttctaagaattagattagtattctagaagactaatactactttaaagacagtcaaaacagtcatacgctgccatttcagccctttatttaagagtttgtgacatttatcactcccttgaaagattaaagaacacccaaagcaagtttggggtggaggtggggaaggcaggaagagaaaggtaagtgctataaaaggactcattgttaatttctagaaattggactgagatctgaaagcataagccttaacattttttagataaacggtccctgaaaagaataaaaagtatcagtacttccgttaactagctttagtattgggtcatttgtagtttacattctcctttaagttttaagaccttcagtagttaacaaagcagacagagactggccaggcacagtggctcacacctgtaataccagcactttgggaggctgagttgggtggatcacaaggtcaggagattgaaaccatcctggccaacatggtgaaaccccgtctctactaaaaatacaaaaaaaaaaaaaaattagccaggcgtggtggcaggcacctgtggtcccagctactcgggaggctggggcaggagaatttcttgagcccgggaggccgaggttgcagtgagctgagatcgcgccactgcactccagcctgggtgacagcgagactctgtctcaaaaagaaaaaaaaaaaaaaaagcagagacttaatcttgtaaatactcattttatttttgagaggcttaatgtctccttaaatattaacctgtgtcattttgtaattatactgtaatagtgtcagaatgccattaacaaccaacccttttcgtttcttgtgtgggaaagctcataaattgtgtggtcttacccctctggaccctgtagttgtagcattgtgaaaatggagcttttggcaaaactttgtattatgctgttgactcacattgtctcatatttttcctttattcttctatattctatgaatatggtgctgtcctgtcatttaattattataatatatgtgaactgctggaggtagactgatgtgagtgcagtttttcaacttaaaaacccttatatatcacattcatggtgtttaagatataagaacagccctacaaagaggggttgattgtattgaagattctttctgctgagcctgccttaattgtgagggtggttgtttgggtatcttagagctaaaagaatggctaagagtccattaatggtcctgtaatattcaccatccctgagcagttagtaaagaatggccgcaaagccacaattaggctactaacaaggaacttatgtagatgtgctaggtccagcctgtgttctggaactatagagatgaataaggtatggtcctttctctctggaggctcacagttgaatagggaatattaatacgtgaatgatagcagtacagtgtggcagatgctaaaatatatgtgtgtagcagctattacaggagaactgattaatagggagagtctggctgggctcagtgactcacccctgtaatcccagcactttgggaggccgaggcgggcagatcacttgaggtcaggagttcgagaccagcctggccaacatggtaaaacctcatctctactaaaaaatacaaagaaaattagcaaggcgtggtggcgggcatctgtaatcccagctactggggaggctgaagcaggagaatcccttgaacccgggaggtgaggttgcagtgagctgagatcatgccactgcactccagcctgggtgacagagtaagactgtctcaaaaacaaaacccaaaatactaaccatatttatagttagtcacctcaccctttttttagttaaaagaagtttatttagcctgatcagtttaccagatgtcttttttagtgacttttgtgtcttccataaatccattctcaaaatttgcaacagttgagcatatttgaccaaaatgtgccacaggtttctgaagcctgttcaagaagaagcatgtcaacattattggagtaggtcttcgcaatgactacttttgggaagatttgagtaaaatttatggatacagaagttttggagtatgttagaatattactaagtctttttatagttgtaatcccaacactgggttatatatatttaataccaacctgagtatatttcctgaataatatctgttttggagacttggacaaagttaacttttttgcttttttaaaagttgctgtttaaattaacttcctgcatttctaatgtagaaaaaatatggcacagtgatttgaattttgtttatggtttattatcttcctaaattatcagctctttaaaatatgggtctctggcctgtataccatctgataaattaggttgggtaaatttttcacctgaaaaaattcattcttttgacccaggttgtttggcttggaaaaaaaaaatcacatactcattgcatgattaaacttgtccatcagattgtgattttgtgcgttatgaggattgtagctggggtaattttaaaatgttggtatttggatagaactgccagcccaggattttgataaagatcaaaatatatactgtatctaaagtttcttttttaaaagttatttcacttataatcaaaaggtttaaataagtttagtgtatattttatgattagtattattttgtatcgattcagagagaggaaaactgcattcccatagacagggagacttggtgcattaatatccaaagcttagtttaagctggtgatgattagaaaagtggctttcatttgtgttctctggaagattctcagtagtcctgtgggcatgtgaacaagagcatgtgtaatcttcataatgtatgtcttgttagcagaaatgtctgaggcattgctgagatgtaggatgagctgaggtactggttttgtctttcatggttccctattatgttttttgagaaactgagcttttcctgacagtgtttagtttttcttggctatttactatgctattaatagtaacagtttccattatggagcctcagtaggttcttgacatacattaacccattgctattatgtaattttctaataaaatgatgtgataaaacatattttctgtaatatactcatagaatatgtgattataagtaaataaatagatgttggggtagtcctcca

SEQ ID NO: 355317 - DNA, 6630 bp, Homo sapiens
  misc_feature (1846)..(1846): n is a, c, g, or t
  misc_feature (2384)..(2384): n is a, c, g, or t
  misc_feature (2387)..(2387): n is a, c, g, or t
  misc_feature (2467)..(2467): n is a, c, g, or t
agccggagagacgcagcggcggccccagtgccgcccccgggcgcgtgagtggagccgggctcctttcccctaccgcgccgcgacccccgcccgggctgcgcgcgccgcctcccgcgagcccccggcccgactcccgggctcccgcgggtgggggccagggctggtcggcgccggcggggctcgcggcggcggcgggttgcgtcccccgcgcctgctggcccacgtggacctggccgtcgcttgccgtgcggcgcctttgcgaaaactcgacggaagtggcagggaccgggcattacctgcgagtgccgggcgcctcctgctccgctgtgcgcgcttggggtgggactcggcgggggaggggtcgtgtacattgtcccaccaggcgcaatgtagccgggcggcgcagaggatttcttttttggtcttgagagcatagagtcccttttcatattcacgtgtactcttaagaaagcgtctgttctccaaactggctttccattctccccgtcctaaatggtgcgtggctgacaccgtagtgttttcaaaactggatatggccaggatgctatagcattgtcagtgcatctccttggaaacaatgccatctttgaatgtgagagataaacctagtttcagcatgtctgcagcagagaccagtacatcaggcttattcccacaggaagcctcctaaagcctgtggcgcggcaaccatttccaggactaaataataatgtgtcagatgcctgtgagtggactgcctggccaaatgactcatgaagatattcacggaagaatagtcaaaaaccaaagaaaaggcatattctagaagcaccttcaattccatcgaggatttttgagcagctgaagaagaaagttctgaaaatatgagtgacaggactccagcacattttttttagttgtttcttacattatctttgttaacccatccgcttttgtgtataatattaagttattttccactactgcaatggctagtaatttacttaggctcagagttttactctgtatggacagagaaataggaggtaacaacagtgggagaacaaataggaacagttcactgggatgttggtccccagaaattggctttcattgaataattcctaaagggtgtcgtgtgctgaattgctttttcatagtgatgtgctgcttcttgttcatactcttatgactttaatttcacctttatctactcccagcctctgtatatgcctacgtttttaaaaataatttttggcactgaagatctgattaccatattttttcagtttaaaaattaaatcctcgcaaatagacctttggtatagttgcattctaccctaggttattttctaggatcaagaatagaacaatttctgttctttccagcattactctttactattcatatgttcttgttcagtgttttgttgttctcatattctaggtggaaatgaagggtaatctctatgttctattttcagttttctaggaaaccagaaaaacatgggtagtagaaatgtatagaaaatgtatgaggtctcttaaccattgtgttaaacttgcattaagcttcttttttagcaatatcgatgtcagtgttacctcttctttcctttttatttattttttttgagacagagtctcattctgtcgcccagactggttggagtgcgatgatgcgatcgcggctaactgcaaccgctgcctcccgggtacaagtgattctcgtgccttgggctcccgagtagctgggatttttagtggagaacaggtttcaccatattggccaggctggtcttgaactcgcaacctcaggtgatccacccacctcagcctccccaangtgttgggattacaggcatgagccaccatacctggccccttttgttgttttgaggggcaggcagtaagaagcagggatttcttcaaatgctagtaagcacaaagagagggagaagtttttgtaagtaacgaacagggccgggcatggtggcgtgagaggccgaggtgggcagatcacgaggtcaggagttcgagaccagcctgaccaacatggtgaaacccccgtctccactagaaatgcaaagattagccgggcatggtggtgcacgcctgtaatccagctagtcgggaggctgaggcaggagaatcgcttgaacctgggaggtggaggttgcagggagctgagatcacgccactgcactccagcctgggcgacagagtaagactcccgtctcaaaaaaaaaaaaaaaaaaaaaagaacagttgatcattaaggccattaatgtgcatggacagtttgttgcccaggttggagtgtgatgacgacgcaatctcggtaaatataaacctactctgtaacctccacctcctgggctcangcngttctcgtgcttcagcctcccgagtagctgggatcacaggcatgcgccactaagcccagctaatttttgtatttttagtngagacggggtttcaccatgttggccaggctggtcttgaactcctggcctcaagtgatgcgcctgcctgggcctcccaaagtgctgggattacaggtgtgagccactgcacctggcccaataggcacatttttttaataagtagtttgttgattagaacgaagagcacttgccgtaagtgcatgtcattgttttcagctgttatggctaagtcagttaacctcatcaacaattttttcttctgtaaattgaggacaatttttgcttttatgaatgaagtcttaaccagcaggaagaaatataaacaaaggaacatatttttaatttaatgaagcaaaattccatacatcattttgaaaatagtgtttctttccctgataggcctgttctgcatcattcttttagcttccttctgccctgtttatcacttggtcccacttttatatttttcctcttcggtccagaatttcttatttagtttcttgtattttgcctactccctcccttctccatgattcagcctagtctttccgtcctctgtggacttgggtgtgccttcctctgggccacctcgtcttttgctgctgttagccctcccgcctgcgcacctgccacttcaccctcgcctgtggtccacttacgttccactcagcccggtcagtcctgctttgttcttctccaccgccttggtctcccgtgtgtcttatctagctctggttccttctcgtctccacatttattttgttttcttcctgtgcttgttagtccttgtgcacttggtccttgagctctttttctattaataggtattactagatggatttgttgtctgcctttacatagaacacacatccttactgtgcatttcctgggtagccaggatgaatcaattattattaacttcccttcgaacattgagcttcctctgttttctgtttctaagaattagattagtattctagaagactaatactactttaaagacagtcaaaacagtcatacgctgccatttcagccctttatttaagagtttgtgacatttatcactcccttgaaagattaaagaacacccaaagcaagtttggggtggaggtggggaaggcaggaagagaaaggtaagtgctataaaaggactcattgttaatttctagaaattggactgagatctgaaagcataagccttaacattttttagataaacggtccctgaaaagaataaaaagtatcagtacttccgttaactagctttagtattgggtcatttgtagtttacattctcctttaagttttaagaccttcagtagttaacaaagcagacagagactggccaggcacagtggctcacacctgtaataccagcactttgggaggctgagttgggtggatcacaaggtcaggagattgaaaccatcctggccaacatggtgaaaccccgtctctactaaaaatacaaaaaaaaaaaaaaattagccaggcgtggtggcaggcacctgtggtcccagctactcgggaggctggggcaggagaatttcttgagcccgggaggccgaggttgcagtgagctgagatcgcgccactgcactccagcctgggtgacagcgagactctgtctcaaaaagaaaaaaaaaaaaaaaagcagagacttaatcttgtaaatactcattttatttttgagaggcttaatgtctccttaaatattaacctgtgtcattttgtaattatactgtaatagtgtcagaatgccattaacaaccaacccttttcgtttcttgtgtgggaaagctcataaattgtgtggtcttacccctctggaccctgtagttgtagcattgtgaaaatggagcttttggcaaaactttgtattatgctgttgactcacattgtctcatatttttcctttattcttctatattctatgaatatggtgctgtcctgtcatttaattattataatatatgtgaactgctggaggtagactgatgtgagtgcagtttttcaacttaaaaacccttatatatcacattcatggtgtttaagatataagaacagccctacaaagaggggttgattgtattgaagattctttctgctgagcctgccttaattgtgagggtggttgtttgggtatcttagagctaaaagaatggctaagagtccattaatggtcctgtaatattcaccatccctgagcagttagtaaagaatggccgcaaagccacaattaggctactaacaaggaacttatgtagatgtgctaggtccagcctgtgttctggaactatagagatgaataaggtatggtcctttctctctggaggctcacagttgaatagggaatattaatacgtgaatgatagcagtacagtgtggcagatgctaaaatatatgtgtgtagcagctattacaggagaactgattaatagggagagtctggctgggctcagtgactcacccctgtaatcccagcactttgggaggccgaggcgggcagatcacttgaggtcaggagttcgagaccagcctggccaacatggtaaaacctcatctctactaaaaaatacaaagaaaattagcaaggcgtggtggcgggcatctgtaatcccagctactggggaggctgaagcaggagaatcccttgaacccgggaggtgaggttgcagtgagctgagatcatgccactgcactccagcctgggtgacagagtaagactgtctcaaaaacaaaacccaaaatactaaccatatttatagttagtcacctcaccctttttttagttaaaagaagtttatttagcctgatcagtttaccagatgtcttttttagtgacttttgtgtcttccataaatccattctcaaaatttgcaacagttgagcatatttgaccaaaatgtgccacaggtttctgaagcctgttcaagaagaagcatgtcaacattattggagtaggtcttcgcaatgactacttttgggaagatttgagtaaaatttatggatacagaagttttggagtatgttagaatattactaagtctttttatagttgtaatcccaacactgggttatatatatttaataccaacctgagtatatttcctgaataatatctgttttggagacttggacaaagttaacttttttgcttttttaaaagttgctgtttaaattaacttcctgcatttctaatgtagaaaaaatatggcacagtgatttgaattttgtttatggtttattatcttcctaaattatcagctctttaaaatatgggtctctggcctgtataccatctgataaattaggttgggtaaatttttcacctgaaaaaattcattcttttgacccaggttgtttggcttggaaaaaaaaaatcacatactcattgcatgattaaacttgtccatcagattgtgattttgtgcgttatgaggattgtagctggggtaattttaaaatgttggtatttggatagaactgccagcccaggattttgataaagatcaaaatatatactgtatctaaagtttcttttttaaaagttatttcacttataatcaaaaggtttaaataagtttagtgtatattttatgattagtattattttgtatcgattcagagagaggaaaactgcattcccatagacagggagacttggtgcattaatatccaaagcttagtttaagctggtgatgattagaaaagtggctttcatttgtgttctctggaagattctcagtagtcctgtgggcatgtgaacaagagcatgtgtaatcttcataatgtatgtcttgttagcagaaatgtctgaggcattgctgagatgtaggatgagctgaggtactggttttgtctttcatggttccctattatgttttttgagaaactgagcttttcctgacagtgtttagtttttcttggctatttactatgctattaatagtaacagtttccattatggagcctcagtaggttcttgacatacattaacccattgctattatgtaattttctaataaaatgatgtgataaaacatattttctgtaatatactcatagaatatgtgattataagtaaataaatagatgttggggtagtcctccagattggttgtattacattttatttttttcaaaattcttttaattttaaaatttcttatttattacattt

SEQ ID NO: 355318 - DNA, 4686 bp, Homo sapiens
  misc_feature (1846)..(1846): n is a, c, g, or t
  misc_feature (2384)..(2384): n is a, c, g, or t
  misc_feature (2387)..(2387): n is a, c, g, or t
  misc_feature (2467)..(2467): n is a, c, g, or t
agccggagagacgcagcggcggccccagtgccgcccccgggcgcgtgagtggagccgggctcctttcccctaccgcgccgcgacccccgcccgggctgcgcgcgccgcctcccgcgagcccccggcccgactcccgggctcccgcgggtgggggccagggctggtcggcgccggcggggctcgcggcggcggcgggttgcgtcccccgcgcctgctggcccacgtggacctggccgtcgcttgccgtgcggcgcctttgcgaaaactcgacggaagtggcagggaccgggcattacctgcgagtgccgggcgcctcctgctccgctgtgcgcgcttggggtgggactcggcgggggaggggtcgtgtacattgtcccaccaggcgcaatgtagccgggcggcgcagaggatttcttttttggtcttgagagcatagagtcccttttcatattcacgtgtactcttaagaaagcgtctgttctccaaactggctttccattctccccgtcctaaatggtgcgtggctgacaccgtagtgttttcaaaactggatatggccaggatgctatagcattgtcagtgcatctccttggaaacaatgccatctttgaatgtgagagataaacctagtttcagcatgtctgcagcagagaccagtacatcaggcttattcccacaggaagcctcctaaagcctgtggcgcggcaaccatttccaggactaaataataatgtgtcagatgcctgtgagtggactgcctggccaaatgactcatgaagatattcacggaagaatagtcaaaaaccaaagaaaaggcatattctagaagcaccttcaattccatcgaggatttttgagcagctgaagaagaaagttctgaaaatatgagtgacaggactccagcacattttttttagttgtttcttacattatctttgttaacccatccgcttttgtgtataatattaagttattttccactactgcaatggctagtaatttacttaggctcagagttttactctgtatggacagagaaataggaggtaacaacagtgggagaacaaataggaacagttcactgggatgttggtccccagaaattggctttcattgaataattcctaaagggtgtcgtgtgctgaattgctttttcatagtgatgtgctgcttcttgttcatactcttatgactttaatttcacctttatctactcccagcctctgtatatgcctacgtttttaaaaataatttttggcactgaagatctgattaccatattttttcagtttaaaaattaaatcctcgcaaatagacctttggtatagttgcattctaccctaggttattttctaggatcaagaatagaacaatttctgttctttccagcattactctttactattcatatgttcttgttcagtgttttgttgttctcatattctaggtggaaatgaagggtaatctctatgttctattttcagttttctaggaaaccagaaaaacatgggtagtagaaatgtatagaaaatgtatgaggtctcttaaccattgtgttaaacttgcattaagcttcttttttagcaatatcgatgtcagtgttacctcttctttcctttttatttattttttttgagacagagtctcattctgtcgcccagactggttggagtgcgatgatgcgatcgcggctaactgcaaccgctgcctcccgggtacaagtgattctcgtgccttgggctcccgagtagctgggatttttagtggagaacaggtttcaccatattggccaggctggtcttgaactcgcaacctcaggtgatccacccacctcagcctccccaangtgttgggattacaggcatgagccaccatacctggccccttttgttgttttgaggggcaggcagtaagaagcagggatttcttcaaatgctagtaagcacaaagagagggagaagtttttgtaagtaacgaacagggccgggcatggtggcgtgagaggccgaggtgggcagatcacgaggtcaggagttcgagaccagcctgaccaacatggtgaaacccccgtctccactagaaatgcaaagattagccgggcatggtggtgcacgcctgtaatccagctagtcgggaggctgaggcaggagaatcgcttgaacctgggaggtggaggttgcagggagctgagatcacgccactgcactccagcctgggcgacagagtaagactcccgtctcaaaaaaaaaaaaaaaaaaaaaagaacagttgatcattaaggccattaatgtgcatggacagtttgttgcccaggttggagtgtgatgacgacgcaatctcggtaaatataaacctactctgtaacctccacctcctgggctcangcngttctcgtgcttcagcctcccgagtagctgggatcacaggcatgcgccactaagcccagctaatttttgtatttttagtngagacggggtttcaccatgttggccaggctggtcttgaactcctggcctcaagtgatgcgcctgcctgggcctcccaaagtgctgggattacaggtgtgagccactgcacctggcccaataggcacatttttttaataagtagtttgttgattagaacgaagagcacttgccgtaagtgcatgtcattgttttcagctgttatggctaagtcagttaacctcatcaacaattttttcttctgtaaattgaggacaatttttgcttttatgaatgaagtcttaaccagcaggaagaaatataaacaaaggaacatatttttaatttaatgaagcaaaattccatacatcattttgaaaatagtgtttctttccctgataggcctgttctgcatcattcttttagcttccttctgccctgtttatcacttggtcccacttttatatttttcctcttcggtccagaatttcttatttagtttcttgtattttgcctactccctcccttctccatgattcagcctagtctttccgtcctctgtggacttgggtgtgccttcctctgggccacctcgtcttttgctgctgttagccctcccgcctgcgcacctgccacttcaccctcgcctgtggtccacttacgttccactcagcccggtcagtcctgctttgttcttctccaccgccttggtctcccgtgtgtcttatctagctctggttccttctcgtctccacatttattttgttttcttcctgtgcttgttagtccttgtgcacttggtccttgagctctttttctattaataggtattactagatggatttgttgtctgcctttacatagaacacacatccttactgtgcatttcctgggtagccaggatgaatcaattattattaacttcccttcgaacattgagcttcctctgttttctgtttctaagaattagattagtattctagaagactaatactactttaaagacagtcaaaacagtcatacgctgccatttcagccctttatttaagagtttgtgacatttatcactcccttgaaagattaaagaacacccaaagcaagtttggggtggaggtggggaaggcaggaagagaaaggtaagtgctataaaaggactcattgttaatttctagaaattggactgagatctgaaagcataagccttaacattttttagataaacggtccctgaaaagaataaaaagtatcagtacttccgttaactagctttagtattgggtcatttgtagtttacattctcctttaagttttaagaccttcagtagttaacaaagcagacagagactggccaggcacagtggctcacacctgtaataccagcactttgggaggctgagttgggtggatcacaaggtcaggagattgaaaccatcctggccaacatggtgaaaccccgtctctactaaaaatacaaaaaaaaaaaaaaattagccaggcgtggtggcaggcacctgtggtcccagctactcgggaggctggggcaggagaatttcttgagcccgggaggccgaggttgcagtgagctgagatcgcgccactgcactccagcctgggtgacagcgagactctgtctcaaaaagaaaaaaaaaaaaaaaagcagagacttaatcttgtaaatactcattttatttttgagaggcttaatgtctccttaaatattaacctgtgtcattttgtaattatactgtaatagtgtcagaatgccattaacaaccaacccttttcgtttcttgtgtgggaaagctcataaattgtgtggtcttacccctctggaccctgtagttgtagcattgtgaaaatggagcttttggcaaaactttgtattatgctgttgactcacattgtctcatatttttcctttattcttctatattctatgaatatggtgctgtcctgtcatttaattattataatatatgtgaactgctggaggtagactgatgtgagtgcagtttttcaacttaaaaacccttatatatcacattcatggtgtttaagatataagaacagccctacaaagaggggttgattgtattgaagattctttctgctgagcctgccttaattgtgagggtggttgtttgggtatcttagagctaaaagaatgccaagcagtcgtcgcaaccggacggggagcacgccaagccgggaccacagcctgcaggtgtggttgtctgtcatg

SEQ ID NO: 355319 - DNA, 4445 bp, Homo sapiens
agccggagagacgcagcggcggccccagtgccgcccccgggcgcgtgagtggagccgggctcctttcccctaccgcgccgcgacccccgcccgggctgcgcgcgccgcctcccgcgagcccccggcccgactcccgggctcccgcgggtgggggccagggctggtcggcgccggcggggctcgcggcggcggcgggttgcgtcccccgcgcctgctggcccacgtggacctggccgtcgcttgccgtgcggcgcctttgcgaaaactcgacggaagtggcagggaccgggcattacctgcgagtgccgggcgcctcctgctccgctgtgcgcgcttggggtgggactcggcgggggaggggtcgtgtacattgtcccaccaggcgcaatgtagccgggcggcgcagaggatttcttttttggtcttgagagcatagagtcccttttcatattcacgtgtactcttaagaaagcgtctgttctccaaactggctttccattctccccgtcctaaatggtgcgtggctgacaccgtagtgttttcaaaactggatatggccaggatgctatagcattgtcagtgcatctccttggaaacaatgccatctttgaatgtgagagataaacctagtttcagcatgtctgcagcagagaccagtacatcaggcttattcccacaggaagcctcctaaagcctgtggcgcggcaaccatttccaggactaaataataatgtgtcagatgcctgtgagtggactgcctggccaaatgactcatgaagatattcacggaagaatagtcaaaaaccaaagaaaaggcatattctagaagcaccttcaattccatcgaggatttttgagcagctgaagaagaaagttctgaaaatatgagtgacaggactccagcacattttttttagttgtttcttacattatctttgttaacccatccgcttttgtgtataatattaagttattttccactactgcaatggctagtaatttacttaggctcagagttttactctgtatggacagagaaataggaggtaacaacagtgggagaacaaataggaacagttcactgggatgttggtccccagaaattggctttcattgaataattcctaaagggtgtcgtgtgctgaattgctttttcatagtgatgtgctgcttcttgttcatactcttatgactttaatttcacctttatctactcccagcctctgtatatgcctacgtttttaaaaataatttttggcactgaagatctgattaccatattttttcagtttaaaaattaaatcctcgcaaatagacctttggtatagttgcattctaccctaggttattttctaggatcaagaatagaacaatttctgttctttccagcattactctttactattcatatgttcttgttcagtgttttgttgttctcatattctaggtggaaatgaagggtaatctctatgttctattttcagttttctaggaaaccagaaaaacatgggtagtagaaatgtatagaaaatgtatgaggtctcttaaccattgtgttaaacttgcattaagcttcttttttagcaatatcgatgtcagtgttacctcttctttcctttttatttattttttttgagacagagtctcattctgtcgcccagactggttggagtgcgatgatgcgatcgcggctaactgcaaccgctgcctcccgggtacaagtgattctcgtgccttgggctcccgagtagctgggatttttagtggaacatggtgaaaccccgtctctactaaaaatacaaaaaaaaaaaaaaattagccaggcgtggtggcaggcacctgtggtcccagctactcgggaggctggggcaggagaatttcttgagcccgggaggccgaggttgcagtgagctgagatcgcgccactgcactccagcctgggtgacagcgagactctgtctcaaaaagaaaaaaaaaaaaaaaagcagagacttaatcttgtaaatactcattttatttttgagaggcttaatgtctccttaaatattaacctgtgtcattttgtaattatactgtaatagtgtcagaatgccattaacaaccaacccttttcgtttcttgtgtgggaaagctcataaattgtgtggtcttacccctctggaccctgtagttgtagcattgtgaaaatggagcttttggcaaaactttgtattatgctgttgactcacattgtctcatatttttcctttattcttctatattctatgaatatggtgctgtcctgtcatttaattattataatatatgtgaactgctggaggtagactgatgtgagtgcagtttttcaacttaaaaacccttatatatcacattcatggtgtttaagatataagaacagccctacaaagaggggttgattgtattgaagattctttctgctgagcctgccttaattgtgagggtggttgtttgggtatcttagagctaaaagaatggctaagagtccattaatggtcctgtaatattcaccatccctgagcagttagtaaagaatggccgcaaagccacaattaggctactaacaaggaacttatgtagatgtgctaggtccagcctgtgttctggaactatagagatgaataaggtatggtcctttctctctggaggctcacagttgaatagggaatattaatacgtgaatgatagcagtacagtgtggcagatgctaaaatatatgtgtgtagcagctattacaggagaactgattaatagggagagtctggctgggctcagtgactcacccctgtaatcccagcactttgggaggccgaggcgggcagatcacttgaggtcaggagttcgagaccagcctggccaacatggtaaaacctcatctctactaaaaaatacaaagaaaattagcaaggcgtggtggcgggcatctgtaatcccagctactggggaggctgaagcaggagaatcccttgaacccgggaggtgaggttgcagtgagctgagatcatgccactgcactccagcctgggtgacagagtaagactgtctcaaaaacaaaacccaaaatactaaccatatttatagttagtcacctcaccctttttttagttaaaagaagtttatttagcctgatcagtttaccagatgtcttttttagtgacttttgtgtcttccataaatccattctcaaaatttgcaacagttgagcatatttgaccaaaatgtgccacaggtttctgaagcctgttcaagaagaagcatgtcaacattattggagtaggtcttcgcaatgactacttttgggaagatttgagtaaaatttatggatacagaagttttggagtatgttagaatattactaagtctttttatagttgtaatcccaacactgggttatatatatttaataccaacctgagtatatttcctgaataatatctgttttggagacttggacaaagttaacttttttgcttttttaaaagttgctgtttaaattaacttcctgcatttctaatgtagaaaaaatatggcacagtgatttgaattttgtttatggtttattatcttcctaaattatcagctctttaaaatatgggtctctggcctgtataccatctgataaattaggttgggtaaatttttcacctgaaaaaattcattcttttgacccaggttgtttggcttggaaaaaaaaaatcacatactcattgcatgattaaacttgtccatcagattgtgattttgtgcgttatgaggattgtagctggggtaattttaaaatgttggtatttggatagaactgccagcccaggattttgataaagatcaaaatatatactgtatctaaagtttcttttttaaaagttatttcacttataatcaaaaggtttaaataagtttagtgtatattttatgattagtattattttgtatcgattcagagagaggaaaactgcattcccatagacagggagacttggtgcattaatatccaaagcttagtttaagctggtgatgattagaaaagtggctttcatttgtgttctctggaagattctcagtagtcctgtgggcatgtgaacaagagcatgtgtaatcttcataatgtatgtcttgttagcagaaatgtctgaggcattgctgagatgtaggatgagctgaggtactggttttgtctttcatggttccctattatgttttttgagaaactgagcttttcctgacagtgtttagtttttcttggctatttactatgctattaatagtaacagtttccattatggagcctcagtaggttcttgacatacattaacccattgctattatgtaattttctaataaaatgatgtgataaaacatattttctgtaatatactcatagaatatgtgattataagtaaataaatagatgttggggtagtcctcca

SEQ ID NO: 355320 - DNA, 3127 bp, Homo sapiens
acgcggggccactcacgctgccggctccggaggcggcacgcggccagcgctgctccgctccggggctctttaccccggagtcggggccgggcgcgcgggaaacggttaccgagcggacctggacgccctctgccttcgtcatttcctgccggccggtcggtttccggatgaaacgaggagccaggaggagacatcacagctttcccagatcgggaggaaaaatatggaatgtgttttaccgctgactgaacacaaccaaatgaactgtcctgacagtagtttgcaaaccagcagctagcagtttgtccagcctctaacattgtccagcactttccagagcaaactcactgtttacaagaactcttggccttacgaagtttataacctcaagctttgtttatttaaaatattcctgcaaaagaaaagtacccggcacccactttccaaaatggccatggatgagtatttgtggatggtcattttgggtttcatcatagctttcatcttggccttttctgttggtgcaaacgatgttgccaactcctttggtacagccgtgggctctggtgtggtgaccttgaggcaggcatgcattttagcttcaatatttgaaaccaccggctccgtgttactaggcgccaaagtaggagaaaccattcgcaaaggtatcattgacgtgaacctgtacaacgagacggtggagactctcatggctggggaagttagtgccatggttggttccgctgtgtggcagctgattgcttccttcctgaggcttccaatctcaggaacgcactgcattgtgggttctactataggattctcactggtcgcaatcggtaccaaaggtgtgcagtggatggagcttgtcaagattgttgcttcttggtttatatctccactgttgtctggtttcatgtctggcctgctgtttgtactcatcagaattttcatcttaaaaaaggaagaccctgttcccaatggcctccgggcactcccagtattctatgctgctaccatagcaatcaatgtcttttccatcatgtacacaggagcaccagtgctcggccttgttctccccatgtgggccatagccctcatttcctttggtgtcgccctcctgttcgctttttttgtgtggctcttcgtgtgtccgtggatgcggaggaaaataacaggcaaattacaaaaagaaggtgctttatcacgagtatctgacgaaagcctcagtaaggttcaggaagcagagtccccagtatttaaagagctaccaggtgccaaggctaatgatgacagcaccatcccgctcacgggagcagcaggggagacactggggacctcggaaggcacttctgcgggcagccaccctcgggctgcatacggaagagcactgtccatgacccatggctctgtgaaatcgcccatctccaacggcaccttcggcttcgacggccacaccaggagcgacggtcatgtgtaccacaccgtgcacaaagactcggggctctacaaagatctgctgcacaaaatccacatcgacaggggccccgaggagaagccagcccaggaaagcaactaccggctgctgcgccgaaacaacagttacacctgctacaccgcagccatttgtgggctgccagtgcacgccacctttcgagctgcggactcatcggccccagaggacagtgagaagctggtgggcgacaccgtgtcctactccaagaagaggctgcgctacgacagctactcgagctactgtaacgcggtggcagaggcggagatcgaggcggaggagggcggcgtggagatgaagctggcgtcggagctggccgaccctgaccagccgcgagaggaccctgcagaggaggagaaggaggagaaggacgcacccgaggttcacctcctgttccatttcctgcaggtcctcaccgcctgtttcgggtcctttgctcacggcggcaatgacgtgagtaatgccatcggtcccctggtagccttgtggctgatttacaaacaaggcggggtaacgcaagaagcagctacacccgtctggctgctgttttatggaggagttggaatctgcacaggcctctgggtctgggggagaagagtgatccagaccatggggaaggacctcactcccatcacgccgtccagcggcttcacgatcgagctggcctcagccttcacagtggtgatcgcctccaacatcgggcttccagtcagcaccacgcactgtaaggtgggctcggtggtggccgtgggctggatccgctcccgcaaggctgtggactggcgcctctttcggaacatcttcgtggcctggttcgtgaccgtccctgtggctgggctgttcagcgctgctgtcatggctcttctcatgtatgggatccttccatatgtgtgatttgtcttcttccagctgcaaacagctaaagggatggtctggtgttggcgtgtgggagacatgtgtgctcgtgccgcacatacacatcctggccgtgcacggctctctcatgaccagctctctgcctcccttccaggaggctccatcccacactgttcacccaggctgcggagactcaccttcccgagctaacttaactactgtacataataatatgtattaaactggtatcgtggtgatataatgtggtgcagttacttatatattaaatatctattgtatccatagaataggcagcattatttcaaacatattcaagttgggagtggagatcattgcctagaagtcaatattcaataaatcttgtacataactatttcgatggcaaatgttaagccttctaaaaggaaagtgtagattggaaaatgattttttttccaaatgatgtttttgccttctaatatactgtaaggtaatgagcttcagaacaggcaacctgaccctgcagaggtcgcgtgctgtgggatgacagcgggacgggagctcacaagtgctttcactgaagatttgttcatatactgtgtattgattgttgtgtaatatatcatcattgcttttgtaaatacgtaaaactgtaattttttaatggtgtgcttctttggtactttccaaaattctctgatcaaaaaagtataagggaagcacaccattaaaaatacc

SEQ ID NO: 355321 - DNA, 3019 bp, Homo sapiens
acgcggggccactcacgctgccggctccggaggcggcacgcggccagcgctgctccgctccggggctctttaccccggagtcggggccgggcgcgcgggaaacggttaccgagcggacctggacgccctctgccttcgtcatttcctgccggccggtcggtttccggatgaaacgaggagccaggaggagacatcacagctttcccagatcgggaggaaaaatatggaatgtgttttaccgctgactgaacacaaccaaatgaactgtcctgacagtagtttgcaaaccagcagctagcagtttgtccagcctctaacattgtccagcactttccagagcaaactcactgtttacaagaactcttggccttacgaagtttataacctcaagctttgtttatttaaaatattcctgcaaaagaaaagtacccggcacccactttccaaaatggccatggatgagtatttgtggatggtcattttgggtttcatcatagctttcatcttggccttttctgttggtgcaaacgatgttgccaactcctttggtacagccgtgggctctggtgtggtgaccttgaggcaggcatgcattttagcttcaatatttgaaaccaccggctccgtgttactaggcgccaaagtaggagaaaccattcgcaaaggtatcattgacgtgaacctgtacaacgagacggtggagactctcatggctggggaagttagtgccatggttggttccgctgtgtggcagctgattgcttccttcctgaggcttccaatctcaggaacgcactgcattgtgggttctactataggattctcactggtcgcaatcggtaccaaaggtgtgcagtggatggagcttgtcaagattgttgcttcttggtttatatctccactgttgtctggtttcatgtctggcctgctgtttgtactcatcagaattttcatcttaaaaaaggaagaccctgttcccaatggcctccgggcactcccagtattctatgctgctaccatagcaatcaatgtcttttccatcatgtacacaggagcaccagtgctcggccttgttctccccatgtgggccatagccctcatttcctttggtgtcgccctcctgttcgctttttttgtgtggctcttcgtgtgtccgtggatgcggaggaaaataacaggcaaattacaaaaagaaggtgctttatcacgagtatctgacgaaagcctcagtaaggttcaggaagcagagtccccagtatttaaagagctaccaggtgccaaggctaatgatgacagcaccatcccgctcacgggagcagcaggggagacactggggacctcggaaggcacttctgcgggcagccaccctcgggctgcatacggaagagcactgtccatgacccatggctctgtgaaatcgcccatctccaacggcaccttcggcttcgacggccacaccaggagcgacggtcatgtgtaccacaccgtgcacaaagactcggggctctacaaagatctgctgcacaaaatccacatcgacaggggccccgaggagaagccagcccaggaaagcaactaccggctgctgcgccgaaacaacagttacacctgctacaccgcagccatttgtgggctgccagtgcacgccacctttcgagctgcggactcatcggccccagaggacagtgagaagctggtgggcgacaccgtgtcctactccaagaagaggctgcgctacgacagctactcgagctactgtaacgcggtggcagaggcggagatcgaggcggaggagggcggcgtggagatgaagctggcgtcggagctggccgaccctgaccagccgcgagaggaccctgcagaggaggagaaggaggagaaggacgcacccgaggttcacctcctgttccatttcctgcaggtcctcaccgcctgtttcgggtcctttgctcacggcggcaatgacgtgagtaatgccatcggtcccctggtagccttgtggctgatttacaaacaaggcggggtaacgcaagaagcagctacacccgtctggctgctgttttatggaggagttggaatctgcacaggcctctgggtctgggggagaagagtgatccagaccatggggaaggacctcactcccatcacgccgtccagcggcttcacgatcgagctggcctcagccttcacagtggtgatcgcctccaacatcgggcttccagtcagcaccacgcactgtaaggtgggctcggtggtggccgtgggctggatccgctcccgcaaggctgtggactggcgcctctttcggaacatcttcgtggcctggttcgtgaccgtccctgtggctgggctgttcagcgctgctgtcatggctcttctcatgtatgggatccttccatatgtgtgatttgtcttcttccagctgcaaacagctaaagggatggtctggtgttggcgtgtgggagacatgtgtgctcgtgccgcacatacacatcctggccgtgcacggctctctcatgaccagctctctgcctcccttccaggaggctccatcccacactgttcacccaggctgcggagactcaccttcccgagctaacttaactactgtacataataatatgtattaaactggtatcgtggtgatataatgtggtgcagttacttatatattaaatatctattgtatccatagaataggcagcattatttcaaacatattcaagttgggagtggagatcattgcctagaagtcaatattcaataaatcttgtacataactatttcgatggcaaatgttaagccttctaaaaggaaagtgtagattggaaaatgattttttttccaaatgatgtttttgccttctaatatactgtaaggtaatgagcttcagaacaggcaacctgaccctgcagaggtcgcgtgctgtgggatgacagcgggacgggagctcacaagtgctttcactgaagatttgttcatatactgtgtagaaagggaacgggatcctctagatcac

SEQ ID NO: 355322 - DNA, 1145 bp, Homo sapiens
agccggagagacgcagcggcggccccagtgccgcccccgggcgcgtgagtggagccgggctcctttcccctaccgcgccgcgacccccgcccgggctgcgcgcgccgcctcccgcgagcccccggcccgactcccgggctcccgcgggtgggggccagggctggtcggcgccggcggggctcgcggcggcggcgggttgcgtcccccgcgcctgctggcccacgtggacctggccgtcgcttgccgtgcggcgcctttgcgaaaactcgacggaagtggcagggaccgggcattacctgcgagtgccgggcgcctcctgctccgctgtgcgcgcttggggtgggactcggcgggggaggggtcgtgtacattgtcccaccaggcgcaatgtagccgggcggcgcagaggatttcttttttggtcttgagagcatagagtcccttttcatattcacgtgtactcttaagaaagcgtctgttctccaaactggctttccattctccccgtcctaaatggtgcgtggctgacaccgtagtgttttcaaaactggatatggccaggatgctatagcattgtcagtgcatctccttggaaacaatgccatctttgaatgtgagagataaacctagtttcagcatgtctgcagcagagaccagtacatcaggcttattcccacaggaagcctcctaaagcctgtggcgcggcaaccatttccaggactaaataataatgtgtcagatgcctgtgagtggactgcctggccaaatgactcatgaagatattcacggaagaatagtcaaaaaccaaagaaaaggcatattctagaagcaccttcaattccatcgaggatttttgagcagctgaagaagaaagttctgaaaatatgagtgacaggactccagcacattttttttagttgtttcttacattatctttgttaacccatccgcttttgtgtataatattaagttattttccactactgcaatggctagtaatttacttaggctcagagttttactctgtatggacagagaaattggcgtgaccccggggggaaccattcgggaccgttccggggatgtggcccctggcgcctggcccaaggggggggcgcggtcagaggcagggcggctcacccccc

SEQ ID NO: 355323 - DNA, 606 bp, Homo sapiens
tcagctcggtaccctctctccacactgggggggaggggtcgtgtacattgtcccaccaggcgcaatgtagccgggcggcgcagaggatttcttttttggtcttgagagcatagagtcccttttcatattcacgtgtactcttaagaaagcgtctgttctccaaactggctttccattctccccgtcctaaatggtgcgtggctgacaccgtagtgttttcaaaactggatatggccaggatgctatagcattgtcagtgtaagtcccttttgggtatttttatttaattgtgtagtgacttgacagaagtgtttcccagcttgacctaagtaatgaatttgcataggatttcagcatcagtatggaagtgatcagatgtcagtggctggtgccaccttgcagataaatggccactggtccacgtagttcgtctttactatacattttgattaagttctctaggaccagctgactggtaattataagtcacatgaaaccctgcagagatgagagcttacattgaacacttcttaacaagttttctattctttgtttcatctgttacaattaaactcaccttcgtctagggtaagaccattactttac

SEQ ID NO: 355324 - DNA, 248 bp, Homo sapiens
ataaagagctatatgctgaagagaagaatccccaaacaattctacctaaaatctaagctattttaaaagctttaacaaatgtaggggactgggtaatgttgtactagagcttgtttctgagattagcccatgtacattggtagagtgtagcctttgtggctcacctgtttttactttgcaatgtctgctcccacaggtgggctcggtggtggccgtgggctggatccgctcccgcaaggctgtggact

SEQ ID NO: 355325 - DNA, 3735 bp, Homo sapiens
acgcggggccactcacgctgccggctccggaggcggcacgcggccagcgctgctccgctccggggctctttaccccggagtcggggccgggcgcgcgggaaacggttaccgagcggacctggacgccctctgccttcgtcatttcctgccggccggtcggtttccggatgaaacgaggagccaggaggagacatcacagctttcccagatcgggaggaaaaatatggaatgtgttttaccgctgactgaacacaaccaaatgaactgtcctgacagtagtttgcaaaccagcagctagcagtttgtccagcctctaacattgtccagcactttccagagcaaactcactgtttacaagaactcttggccttacgaagtttataacctcaagctttgtttatttaaaatattcctgcaaaagaaaagtacccggcacccactttccaaaatggccatggatgagtatttgtggatggtcattttgggtttcatcatagctttcatcttggccttttctgttggtgcaaacgatgttgccaactcctttggtacagccgtgggctctggtgtggtgaccttgaggcaggcatgcattttagcttcaatatttgaaaccaccggctccgtgttactaggcgccaaagtaggagaaaccattcgcaaaggtatcattgacgtgaacctgtacaacgagacggtggagactctcatggctggggaagttagtgccatggttggttccgctgtgtggcagctgattgcttccttcctgaggcttccaatctcaggaacgcactgcattgtgggttctactataggattctcactggtcgcaatcggtaccaaaggtgtgcagtggatggagcttgtcaagattgttgcttcttggtttatatctccactgttgtctggtttcatgtctggcctgctgtttgtactcatcagaattttcatcttaaaaaaggaagaccctgttcccaatggcctccgggcactcccagtattctatgctgctaccatagcaatcaatgtcttttccatcatgtacacaggagcaccagtgctcggccttgttctccccatgtgggccatagccctcatttcctttggtgtcgccctcctgttcgctttttttgtgtggctcttcgtgtgtccgtggatgcggaggaaaataacaggcaaattacaaaaagaaggtgctttatcacgagtatctgacgaaagcctcagtaaggttcaggaagcagagtccccagtatttaaagagctaccaggtgccaaggctaatgatgacagcaccatcccgctcacgggagcagcaggggagacactggggacctcggaaggcacttctgcgggcagccaccctcgggctgcatacggaagagcactgtccatgacccatggctctgtgaaatcgcccatctccaacggcaccttcggcttcgacggccacaccaggagcgacggtcatgtgtaccacaccgtgcacaaagactcggggctctacaaagatctgctgcacaaaatccacatcgacaggggccccgaggagaagccagcccaggaaagcaactaccggctgctgcgccgaaacaacagttacacctgctacaccgcagccatttgtgggctgccagtgcacgccacctttcgagctgcggactcatcggccccagaggacagtgagaagctggtgggcgacaccgtgtcctactccaagaagaggctgcgctacgacagctactcgagctactgtaacgcggtggcagaggcggagatcgaggcggaggagggcggcgtggagatgaagctggcgtcggagctggccgaccctgaccagccgcgagaggaccctgcagaggaggagaaggaggagaaggacgcacccgaggttcacctcctgttccatttcctgcaggtcctcaccgcctgtttcgggtcctttgctcacggcggcaatgacgtgagtaatgccatcggtcccctggtagccttgtggctgatttacaaacaaggcggggtaacgcaagaagcagctacacccgtctggctgctgttttatggaggagttggaatctgcacaggcctctgggtctgggggagaagagtgatccagaccatggggaaggacctcactcccatcacgccgtccagcggcttcacgatcgagctggcctcagccttcacagtggtgatcgcctccaacatcgggcttccagtcagcaccacgcactgtaaggtgggctcggtggtggccgtgggctggatccgctcccgcaaggctgtggactggcgcctctttcggaacatcttcgtggcctggttcgtgaccgtccctgtggctgggctgttcagcgctgctgtcatggctcttctcatgtatgggatccttccatatgtgtgatttgtcttcttccagctgcaaacagctaaagggatggtctggtgttggcgtgtgggagacatgtgtgctcgtgccgcacatacacatcctggccgtgcacggctctctcatgaccagctctctgcctcccttccaggaggctccatcccacactgttcacccaggctgcggagactcaccttcccgagctaacttaactactgtacataataatatgtattaaactggtatcgtggtgatataatgtggtgcagttacttatatattaaatatctattgtatccatagaataggcagcattatttcaaacatattcaagttgggagtggagatcattgcctagaagtcaatattcaataaatcttgtacataactatttcgatggcaaatgttaagccttctaaaaggaaagtgtagattggaaaatgattttttttccaaatgatgtttttgccttctaatatactgtaaggtaatgagcttcagaacaggcaacctgaccctgcagaggtcgcgtgctgtgggatgacagcgggacgggagctcacaagtgctttcactgaagatttgttcatatactgtgtattgattgttgtgtaatatatcatcattgcttttgtaaatacgtaaaactgtaattttttaatggtgtgcttcccttatacttttttgatcagagaattttggaaagtaccaaagaagcaggggaatcattggccagtgttacgttttcacattgtctgtctcccaccctcactgatcacgcctgccccagagcagtgtgtggcggtgacaccgtcacccagcatgcgccacgccgtggctcccaccagcagtgccaccgccaccacaccccagatcccacccaccttgcagtggcctttccttgtcatcagagtagagaatgcacaggtgttggtgagggcgtgtggctgagcactacatgtcaagtccagagtcagtttctatcccaattctccctgcagcctgaagaacggatccttgtctccaatgtcagcacaaaggaggctttttctgtgctttgacattctagcacttcagggatgagagggagggagaatcctggatgctggatggagtatttctctgaggcccacacaaagctggacacccccaggctctactccatcccattggagtctcttctttttttgatagcgggagggaggaagtacgactaatgttggagcctgaaactatggaaatgctgctaaaatttttatattgacaaacattttcttggtacttcattgtcatttttcattaatcaaccatattaaatttataataaaaaatgcccctcagaa

SEQ ID NO: 355326 - DNA, 4188 bp, Homo sapiens
  misc_feature (3746)..(3746): n is a, c, g, or t
  misc_feature (3800)..(3800): n is a, c, g, or t
acgcggggccactcacgctgccggctccggaggcggcacgcggccagcgctgctccgctccggggctctttaccccggagtcggggccgggcgcgcgggaaacggttaccgagcggacctggacgccctctgccttcgtcatttcctgccggccggtcggtttccggatgaaacgaggagccaggaggagacatcacagctttcccagatcgggaggaaaaatatggaatgtgttttaccgctgactgaacacaaccaaatgaactgtcctgacagtagtttgcaaaccagcagctagcagtttgtccagcctctaacattgtccagcactttccagagcaaactcactgtttacaagaactcttggccttacgaagtttataacctcaagctttgtttatttaaaatattcctgcaaaagaaaagtacccggcacccactttccaaaatggccatggatgagtatttgtggatggtcattttgggtttcatcatagctttcatcttggccttttctgttggtgcaaacgatgttgccaactcctttggtacagccgtgggctctggtgtggtgaccttgaggcaggcatgcattttagcttcaatatttgaaaccaccggctccgtgttactaggcgccaaagtaggagaaaccattcgcaaaggtatcattgacgtgaacctgtacaacgagacggtggagactctcatggctggggaagttagtgccatggttggttccgctgtgtggcagctgattgcttccttcctgaggcttccaatctcaggaacgcactgcattgtgggttctactataggattctcactggtcgcaatcggtaccaaaggtgtgcagtggatggagcttgtcaagattgttgcttcttggtttatatctccactgttgtctggtttcatgtctggcctgctgtttgtactcatcagaattttcatcttaaaaaaggaagaccctgttcccaatggcctccgggcactcccagtattctatgctgctaccatagcaatcaatgtcttttccatcatgtacacaggagcaccagtgctcggccttgttctccccatgtgggccatagccctcatttcctttggtgtcgccctcctgttcgctttttttgtgtggctcttcgtgtgtccgtggatgcggaggaaaataacaggcaaattacaaaaagaaggtgctttatcacgagtatctgacgaaagcctcagtaaggttcaggaagcagagtccccagtatttaaagagctaccaggtgccaaggctaatgatgacagcaccatcccgctcacgggagcagcaggggagacactggggacctcggaaggcacttctgcgggcagccaccctcgggctgcatacggaagagcactgtccatgacccatggctctgtgaaatcgcccatctccaacggcaccttcggcttcgacggccacaccaggagcgacggtcatgtgtaccacaccgtgcacaaagactcggggctctacaaagatctgctgcacaaaatccacatcgacaggggccccgaggagaagccagcccaggaaagcaactaccggctgctgcgccgaaacaacagttacacctgctacaccgcagccatttgtgggctgccagtgcacgccacctttcgagctgcggactcatcggccccagaggacagtgagaagctggtgggcgacaccgtgtcctactccaagaagaggctgcgctacgacagctactcgagctactgtaacgcggtggcagaggcggagatcgaggcggaggagggcggcgtggagatgaagctggcgtcggagctggccgaccctgaccagccgcgagaggaccctgcagaggaggagaaggaggagaaggacgcacccgaggttcacctcctgttccatttcctgcaggtcctcaccgcctgtttcgggtcctttgctcacggcggcaatgacgtgagtaatgccatcggtcccctggtagccttgtggctgatttacaaacaaggcggggtaacgcaagaagcagctacacccgtctggctgctgttttatggaggagttggaatctgcacaggcctctgggtctgggggagaagagtgatccagaccatggggaaggacctcactcccatcacgccgtccagcggcttcacgatcgagctggcctcagccttcacagtggtgatcgcctccaacatcgggcttccagtcagcaccacgcactgtaaggtgggctcggtggtggccgtgggctggatccgctcccgcaaggctgtggactggcgcctctttcggaacatcttcgtggcctggttcgtgaccgtccctgtggctgggctgttcagcgctgctgtcatggctcttctcatgtatgggatccttccatatgtgtgatttgtcttcttccagctgcaaacagctaaagggatggtctggtgttggcgtgtgggagacatgtgtgctcgtgccgcacatacacatcctggccgtgcacggctctctcatgaccagctctctgcctcccttccaggaggctccatcccacactgttcacccaggctgcggagactcaccttcccgagctaacttaactactgtacataataatatgtattaaactggtatcgtggtgatataatgtggtgcagttacttatatattaaatatctattgtatccatagaataggcagcattatttcaaacatattcaagttgggagtggagatcattgcctagaagtcaatattcaataaatcttgtacataactatttcgatggcaaatgttaagccttctaaaaggaaagtgtagattggaaaatgattttttttccaaatgatgtttttgccttctaatatactgtaaggtaatgagcttcagaacaggcaacctgaccctgcagaggtcgcgtgctgtgggatgacagcgggacgggagctcacaagtgctttcactgaagatttgttcatatactgtgtattgattgttgtgtaatatatcatcattgcttttgtaaatacgtaaaactgtaattttttaatggtgtgcttcccttatacttttttgatcagagaattttggaaagtaccaaagaagcaggggaatcattggccagtgttacgttttcacattgtctgtctcccaccctcactgatcacgcctgccccagagcagtgtgtggcggtgacaccgtcacccagcatgcgccacgccgtggctcccaccagcagtgccaccgccaccacaccccagatcccacccaccttgcagtggcctttccttgtcatcagagtagagaatgcacaggtgttggtgagggcgtgtggctgagcactacatgtcaagtccagagtcagtttctatcccaattctccctgcagcctgaagaacggatccttgtctccaatgtcagcacaaaggaggctttttctgtgctttgacattctagcacttcagggatgagagggagggagaatcctggatgctggatggagtatttctctgaggcccacacaaagctggacacccccaggctctactccatcccattggagtctcttctttttttgatagcgggagggaggaagtacgactaatgttggagcctgaaactatggaaatgctgctaaaatttttatattgacaaacattttcttggtacttcattgtcatttttcattaatcaaccatattaaatttataataaaaaatgcccctcagaaaaataataaanaaaaaaaaaaaaaaaaaaaaagcacaaaaaaaaaaaaaaaaaaaaaaaaaaaanaaaaaaaaaagacaagggggcggcgcgcgcgccgcgacaaatgatcctccgccacgggggaggacaactcatcggcagcccccacccaatattctttagaaaaaggggcgccgccacgaaaaagaggaggatggcattatatcaaaacagcagcgaggcggaccgcggcagcgcccgcaacacaacaggatgcaggtggcgcggggcgggacacataggctgctgctcggaggcgaatcctctgagtgggcgggagggcccctttttcttgtgggggggggggacgtaacatctactgtgggcacgcttcatcatccccatagaaatgtaattatacgcctgcagttgagtgtggattatcaacaacttgcttgtgttgctagtttgc

SEQ ID NO: 355327 - DNA, 3870 bp, Homo sapiens
acgcggggccactcacgctgccggctccggaggcggcacgcggccagcgctgctccgctccggggctctttaccccggagtcggggccgggcgcgcgggaaacggttaccgagcggacctggacgccctctgccttcgtcatttcctgccggccggtcggtttccggatgaaacgaggagccaggaggagacatcacagctttcccagatcgggaggaaaaatatggaatgtgttttaccgctgactgaacacaaccaaatgaactgtcctgacagtagtttgcaaaccagcagctagcagtttgtccagcctctaacattgtccagcactttccagagcaaactcactgtttacaagaactcttggccttacgaagtttataacctcaagctttgtttatttaaaatattcctgcaaaagaaaagtacccggcacccactttccaaaatggccatggatgagtatttgtggatggtcattttgggtttcatcatagctttcatcttggccttttctgttggtgcaaacgatgttgccaactcctttggtacagccgtgggctctggtgtggtgaccttgaggcaggcatgcattttagcttcaatatttgaaaccaccggctccgtgttactaggcgccaaagtaggagaaaccattcgcaaaggtatcattgacgtgaacctgtacaacgagacggtggagactctcatggctggggaagttagtgccatggttggtagagatgacgacacaacagacagctgatgtatacgggtaatttggttagggagaagagggttagagaggaattctaccaccttctgctttcaacaggacatatcctcttgtaggaagagtcctgcagcaggaggttccgctgtgtggcagctgattgcttccttcctgaggcttccaatctcaggaacgcactgcattgtgggttctactataggattctcactggtcgcaatcggtaccaaaggtgtgcagtggatggagcttgtcaagattgttgcttcttggtttatatctccactgttgtctggtttcatgtctggcctgctgtttgtactcatcagaattttcatcttaaaaaaggaagaccctgttcccaatggcctccgggcactcccagtattctatgctgctaccatagcaatcaatgtcttttccatcatgtacacaggagcaccagtgctcggccttgttctccccatgtgggccatagccctcatttcctttggtgtcgccctcctgttcgctttttttgtgtggctcttcgtgtgtccgtggatgcggaggaaaataacaggcaaattacaaaaagaaggtgctttatcacgagtatctgacgaaagcctcagtaaggttcaggaagcagagtccccagtatttaaagagctaccaggtgccaaggctaatgatgacagcaccatcccgctcacgggagcagcaggggagacactggggacctcggaaggcacttctgcgggcagccaccctcgggctgcatacggaagagcactgtccatgacccatggctctgtgaaatcgcccatctccaacggcaccttcggcttcgacggccacaccaggagcgacggtcatgtgtaccacaccgtgcacaaagactcggggctctacaaagatctgctgcacaaaatccacatcgacaggggccccgaggagaagccagcccaggaaagcaactaccggctgctgcgccgaaacaacagttacacctgctacaccgcagccatttgtgggctgccagtgcacgccacctttcgagctgcggactcatcggccccagaggacagtgagaagctggtgggcgacaccgtgtcctactccaagaagaggctgcgctacgacagctactcgagctactgtaacgcggtggcagaggcggagatcgaggcggaggagggcggcgtggagatgaagctggcgtcggagctggccgaccctgaccagccgcgagaggaccctgcagaggaggagaaggaggagaaggacgcacccgaggttcacctcctgttccatttcctgcaggtcctcaccgcctgtttcgggtcctttgctcacggcggcaatgacgtgagtaatgccatcggtcccctggtagccttgtggctgatttacaaacaaggcggggtaacgcaagaagcagctacacccgtctggctgctgttttatggaggagttggaatctgcacaggcctctgggtctgggggagaagagtgatccagaccatggggaaggacctcactcccatcacgccgtccagcggcttcacgatcgagctggcctcagccttcacagtggtgatcgcctccaacatcgggcttccagtcagcaccacgcactgtaaggtgggctcggtggtggccgtgggctggatccgctcccgcaaggctgtggactggcgcctctttcggaacatcttcgtggcctggttcgtgaccgtccctgtggctgggctgttcagcgctgctgtcatggctcttctcatgtatgggatccttccatatgtgtgatttgtcttcttccagctgcaaacagctaaagggatggtctggtgttggcgtgtgggagacatgtgtgctcgtgccgcacatacacatcctggccgtgcacggctctctcatgaccagctctctgcctcccttccaggaggctccatcccacactgttcacccaggctgcggagactcaccttcccgagctaacttaactactgtacataataatatgtattaaactggtatcgtggtgatataatgtggtgcagttacttatatattaaatatctattgtatccatagaataggcagcattatttcaaacatattcaagttgggagtggagatcattgcctagaagtcaatattcaataaatcttgtacataactatttcgatggcaaatgttaagccttctaaaaggaaagtgtagattggaaaatgattttttttccaaatgatgtttttgccttctaatatactgtaaggtaatgagcttcagaacaggcaacctgaccctgcagaggtcgcgtgctgtgggatgacagcgggacgggagctcacaagtgctttcactgaagatttgttcatatactgtgtattgattgttgtgtaatatatcatcattgcttttgtaaatacgtaaaactgtaattttttaatggtgtgcttcccttatacttttttgatcagagaattttggaaagtaccaaagaagcaggggaatcattggccagtgttacgttttcacattgtctgtctcccaccctcactgatcacgcctgccccagagcagtgtgtggcggtgacaccgtcacccagcatgcgccacgccgtggctcccaccagcagtgccaccgccaccacaccccagatcccacccaccttgcagtggcctttccttgtcatcagagtagagaatgcacaggtgttggtgagggcgtgtggctgagcactacatgtcaagtccagagtcagtttctatcccaattctccctgcagcctgaagaacggatccttgtctccaatgtcagcacaaaggaggctttttctgtgctttgacattctagcacttcagggatgagagggagggagaatcctggatgctggatggagtatttctctgaggcccacacaaagctggacacccccaggctctactccatcccattggagtctcttctttttttgatagcgggagggaggaagtacgactaatgttggagcctgaaactatggaaatgctgctaaaatttttatattgacaaacattttcttggtacttcattgtcatttttcattaatcaaccatattaaatttataataaaaaatgcccctcagaa

SEQ ID NO: 355328 - DNA, 6561 bp, Homo sapiens
  misc_feature (1846)..(1846): n is a, c, g, or t
  misc_feature (2384)..(2384): n is a, c, g, or t
  misc_feature (2387)..(2387): n is a, c, g, or t
  misc_feature (2467)..(2467): n is a, c, g, or t
agccggagagacgcagcggcggccccagtgccgcccccgggcgcgtgagtggagccgggctcctttcccctaccgcgccgcgacccccgcccgggctgcgcgcgccgcctcccgcgagcccccggcccgactcccgggctcccgcgggtgggggccagggctggtcggcgccggcggggctcgcggcggcggcgggttgcgtcccccgcgcctgctggcccacgtggacctggccgtcgcttgccgtgcggcgcctttgcgaaaactcgacggaagtggcagggaccgggcattacctgcgagtgccgggcgcctcctgctccgctgtgcgcgcttggggtgggactcggcgggggaggggtcgtgtacattgtcccaccaggcgcaatgtagccgggcggcgcagaggatttcttttttggtcttgagagcatagagtcccttttcatattcacgtgtactcttaagaaagcgtctgttctccaaactggctttccattctccccgtcctaaatggtgcgtggctgacaccgtagtgttttcaaaactggatatggccaggatgctatagcattgtcagtgcatctccttggaaacaatgccatctttgaatgtgagagataaacctagtttcagcatgtctgcagcagagaccagtacatcaggcttattcccacaggaagcctcctaaagcctgtggcgcggcaaccatttccaggactaaataataatgtgtcagatgcctgtgagtggactgcctggccaaatgactcatgaagatattcacggaagaatagtcaaaaaccaaagaaaaggcatattctagaagcaccttcaattccatcgaggatttttgagcagctgaagaagaaagttctgaaaatatgagtgacaggactccagcacattttttttagttgtttcttacattatctttgttaacccatccgcttttgtgtataatattaagttattttccactactgcaatggctagtaatttacttaggctcagagttttactctgtatggacagagaaataggaggtaacaacagtgggagaacaaataggaacagttcactgggatgttggtccccagaaattggctttcattgaataattcctaaagggtgtcgtgtgctgaattgctttttcatagtgatgtgctgcttcttgttcatactcttatgactttaatttcacctttatctactcccagcctctgtatatgcctacgtttttaaaaataatttttggcactgaagatctgattaccatattttttcagtttaaaaattaaatcctcgcaaatagacctttggtatagttgcattctaccctaggttattttctaggatcaagaatagaacaatttctgttctttccagcattactctttactattcatatgttcttgttcagtgttttgttgttctcatattctaggtggaaatgaagggtaatctctatgttctattttcagttttctaggaaaccagaaaaacatgggtagtagaaatgtatagaaaatgtatgaggtctcttaaccattgtgttaaacttgcattaagcttcttttttagcaatatcgatgtcagtgttacctcttctttcctttttatttattttttttgagacagagtctcattctgtcgcccagactggttggagtgcgatgatgcgatcgcggctaactgcaaccgctgcctcccgggtacaagtgattctcgtgccttgggctcccgagtagctgggatttttagtggagaacaggtttcaccatattggccaggctggtcttgaactcgcaacctcaggtgatccacccacctcagcctccccaangtgttgggattacaggcatgagccaccatacctggccccttttgttgttttgaggggcaggcagtaagaagcagggatttcttcaaatgctagtaagcacaaagagagggagaagtttttgtaagtaacgaacagggccgggcatggtggcgtgagaggccgaggtgggcagatcacgaggtcaggagttcgagaccagcctgaccaacatggtgaaacccccgtctccactagaaatgcaaagattagccgggcatggtggtgcacgcctgtaatccagctagtcgggaggctgaggcaggagaatcgcttgaacctgggaggtggaggttgcagggagctgagatcacgccactgcactccagcctgggcgacagagtaagactcccgtctcaaaaaaaaaaaaaaaaaaaaaagaacagttgatcattaaggccattaatgtgcatggacagtttgttgcccaggttggagtgtgatgacgacgcaatctcggtaaatataaacctactctgtaacctccacctcctgggctcangcngttctcgtgcttcagcctcccgagtagctgggatcacaggcatgcgccactaagcccagctaatttttgtatttttagtngagacggggtttcaccatgttggccaggctggtcttgaactcctggcctcaagtgatgcgcctgcctgggcctcccaaagtgctgggattacaggtgtgagccactgcacctggcccaataggcacatttttttaataagtagtttgttgattagaacgaagagcacttgccgtaagtgcatgtcattgttttcagctgttatggctaagtcagttaacctcatcaacaattttttcttctgtaaattgaggacaatttttgcttttatgaatgaagtcttaaccagcaggaagaaatataaacaaaggaacatatttttaatttaatgaagcaaaattccatacatcattttgaaaatagtgtttctttccctgataggcctgttctgcatcattcttttagcttccttctgccctgtttatcacttggtcccacttttatatttttcctcttcggtccagaatttcttatttagtttcttgtattttgcctactccctcccttctccatgattcagcctagtctttccgtcctctgtggacttgggtgtgccttcctctgggccacctcgtcttttgctgctgttagccctcccgcctgcgcacctgccacttcaccctcgcctgtggtccacttacgttccactcagcccggtcagtcctgctttgttcttctccaccgccttggtctcccgtgtgtcttatctagctctggttccttctcgtctccacatttattttgttttcttcctgtgcttgttagtccttgtgcacttggtccttgagctctttttctattaataggtattactagatggatttgttgtctgcctttacatagaacacacatccttactgtgcatttcctgggtagccaggatgaatcaattattattaacttcccttcgaacattgagcttcctctgttttctgtttctaagaattagattagtattctagaagactaatactactttaaagacagtcaaaacagtcatacgctgccatttcagccctttatttaagagtttgtgacatttatcactcccttgaaagattaaagaacacccaaagcaagtttggggtggaggtggggaaggcaggaagagaaaggtaagtgctataaaaggactcattgttaatttctagaaattggactgagatctgaaagcataagccttaacattttttagataaacggtccctgaaaagaataaaaagtatcagtacttccgttaactagctttagtattgggtcatttgtagtttacattctcctttaagttttaagaccttcagtagttaacaaagcagacagagactggccaggcacagtggctcacacctgtaataccagcactttgggaggctgagttgggtggatcacaaggtcaggagattgaaaccatcctggccaacatggtgaaaccccgtctctactaaaaatacaaaaaaaaaaaaaaattagccaggcgtggtggcaggcacctgtggtcccagctactcgggaggctggggcaggagaatttcttgagcccgggaggccgaggttgcagtgagctgagatcgcgccactgcactccagcctgggtgacagcgagactctgtctcaaaaagaaaaaaaaaaaaaaaagcagagacttaatcttgtaaatactcattttatttttgagaggcttaatgtctccttaaatattaacctgtgtcattttgtaattatactgtaatagtgtcagaatgccattaacaaccaacccttttcgtttcttgtgtgggaaagctcataaattgtgtggtcttacccctctggaccctgtagttgtagcattgtgaaaatggagcttttggcaaaactttgtattatgctgttgactcacattgtctcatatttttcctttattcttctatattctatgaatatggtgctgtcctgtcatttaattattataatatatgtgaactgctggaggtagactgatgtgagtgcagtttttcaacttaaaaacccttatatatcacattcatggtgtttaagatataagaacagccctacaaagaggggttgattgtattgaagattctttctgctgagcctgccttaattgtgagggtggttgtttgggtatcttagagctaaaagaatggctaagagtccattaatggtcctgtaatattcaccatccctgagcagttagtaaagaatggccgcaaagccacaattaggctactaacaaggaacttatgtagatgtgctaggtccagcctgtgttctggaactatagagatgaataaggtatggtcctttctctctggaggctcacagttgaatagggaatattaatacgtgaatgatagcagtacagtgtggcagatgctaaaatatatgtgtgtagcagctattacaggagaactgattaatagggagagtctggctgggctcagtgactcacccctgtaatcccagcactttgggaggccgaggcgggcagatcacttgaggtcaggagttcgagaccagcctggccaacatggtaaaacctcatctctactaaaaaatacaaagaaaattagcaaggcgtggtggcgggcatctgtaatcccagctactggggaggctgaagcaggagaatcccttgaacccgggaggtgaggttgcagtgagctgagatcatgccactgcactccagcctgggtgacagagtaagactgtctcaaaaacaaaacccaaaatactaaccatatttatagttagtcacctcaccctttttttagttaaaagaagtttatttagcctgatcagtttaccagatgtcttttttagtgacttttgtgtcttccataaatccattctcaaaatttgcaacagttgagcatatttgaccaaaatgtgccacaggtttctgaagcctgttcaagaagaagcatgtcaacattattggagtaggtcttcgcaatgactacttttgggaagatttgagtaaaatttatggatacagaagttttggagtatgttagaatattactaagtctttttatagttgtaatcccaacactgggttatatatatttaataccaacctgagtatatttcctgaataatatctgttttggagacttggacaaagttaacttttttgcttttttaaaagttgctgtttaaattaacttcctgcatttctaatgtagaaaaaatatggcacagtgatttgaattttgtttatggtttattatcttcctaaattatcagctctttaaaatatgggtctctggcctgtataccatctgataaattaggttgggtaaatttttcacctgaaaaaattcattcttttgacccaggttgtttggcttggaaaaaaaaaatcacatactcattgcatgattaaacttgtccatcagattgtgattttgtgcgttatgaggattgtagctggggtaattttaaaatgttggtatttggatagaactgccagcccaggattttgataaagatcaaaatatatactgtatctaaagtttcttttttaaaagttatttcacttataatcaaaaggtttaaataagtttagtgtatattttatgattagtattattttgtatcgattcagagagaggaaaactgcattcccatagacagggagacttggtgcattaatatccaaagcttagtttaagctggtgatgattagaaaagtggctttcatttgtgttctctggaagattctcagtagtcctgtgggcatgtgaacaagagcatgtgtaatcttcataatgtatgtcttgttagcagaaatgtctgaggcattgctgagatgtaggatgagctgaggtactggttttgtctttcatggttccctattatgttttttgagaaactgagcttttcctgacagtgtttagtttttcttggctatttactatgctattaatagtaacagtttccattatggagcctcagtaggttcttgacatacattaacccattgctattatgtaattttctaataaaatgatgtgataaaacatattttctgtaatatactcatagaatatgtgattataagtaaataaatagatgttggggtagtcctcca

SEQ ID NO: 355329 - DNA, 6238 bp, Homo sapiens
  misc_feature (1523)..(1523): n is a, c, g, or t
  misc_feature (2061)..(2061): n is a, c, g, or t
  misc_feature (2064)..(2064): n is a, c, g, or t
  misc_feature (2144)..(2144): n is a, c, g, or t
tcagctcggtaccctctctccacactgggggggaggggtcgtgtacattgtcccaccaggcgcaatgtagccgggcggcgcagaggatttcttttttggtcttgagagcatagagtcccttttcatattcacgtgtactcttaagaaagcgtctgttctccaaactggctttccattctccccgtcctaaatggtgcgtggctgacaccgtagtgttttcaaaactggatatggccaggatgctatagcattgtcagtgcatctccttggaaacaatgccatctttgaatgtgagagataaacctagtttcagcatgtctgcagcagagaccagtacatcaggcttattcccacaggaagcctcctaaagcctgtggcgcggcaaccatttccaggactaaataataatgtgtcagatgcctgtgagtggactgcctggccaaatgactcatgaagatattcacggaagaatagtcaaaaaccaaagaaaaggcatattctagaagcaccttcaattccatcgaggatttttgagcagctgaagaagaaagttctgaaaatatgagtgacaggactccagcacattttttttagttgtttcttacattatctttgttaacccatccgcttttgtgtataatattaagttattttccactactgcaatggctagtaatttacttaggctcagagttttactctgtatggacagagaaataggaggtaacaacagtgggagaacaaataggaacagttcactgggatgttggtccccagaaattggctttcattgaataattcctaaagggtgtcgtgtgctgaattgctttttcatagtgatgtgctgcttcttgttcatactcttatgactttaatttcacctttatctactcccagcctctgtatatgcctacgtttttaaaaataatttttggcactgaagatctgattaccatattttttcagtttaaaaattaaatcctcgcaaatagacctttggtatagttgcattctaccctaggttattttctaggatcaagaatagaacaatttctgttctttccagcattactctttactattcatatgttcttgttcagtgttttgttgttctcatattctaggtggaaatgaagggtaatctctatgttctattttcagttttctaggaaaccagaaaaacatgggtagtagaaatgtatagaaaatgtatgaggtctcttaaccattgtgttaaacttgcattaagcttcttttttagcaatatcgatgtcagtgttacctcttctttcctttttatttattttttttgagacagagtctcattctgtcgcccagactggttggagtgcgatgatgcgatcgcggctaactgcaaccgctgcctcccgggtacaagtgattctcgtgccttgggctcccgagtagctgggatttttagtggagaacaggtttcaccatattggccaggctggtcttgaactcgcaacctcaggtgatccacccacctcagcctccccaangtgttgggattacaggcatgagccaccatacctggccccttttgttgttttgaggggcaggcagtaagaagcagggatttcttcaaatgctagtaagcacaaagagagggagaagtttttgtaagtaacgaacagggccgggcatggtggcgtgagaggccgaggtgggcagatcacgaggtcaggagttcgagaccagcctgaccaacatggtgaaacccccgtctccactagaaatgcaaagattagccgggcatggtggtgcacgcctgtaatccagctagtcgggaggctgaggcaggagaatcgcttgaacctgggaggtggaggttgcagggagctgagatcacgccactgcactccagcctgggcgacagagtaagactcccgtctcaaaaaaaaaaaaaaaaaaaaaagaacagttgatcattaaggccattaatgtgcatggacagtttgttgcccaggttggagtgtgatgacgacgcaatctcggtaaatataaacctactctgtaacctccacctcctgggctcangcngttctcgtgcttcagcctcccgagtagctgggatcacaggcatgcgccactaagcccagctaatttttgtatttttagtngagacggggtttcaccatgttggccaggctggtcttgaactcctggcctcaagtgatgcgcctgcctgggcctcccaaagtgctgggattacaggtgtgagccactgcacctggcccaataggcacatttttttaataagtagtttgttgattagaacgaagagcacttgccgtaagtgcatgtcattgttttcagctgttatggctaagtcagttaacctcatcaacaattttttcttctgtaaattgaggacaatttttgcttttatgaatgaagtcttaaccagcaggaagaaatataaacaaaggaacatatttttaatttaatgaagcaaaattccatacatcattttgaaaatagtgtttctttccctgataggcctgttctgcatcattcttttagcttccttctgccctgtttatcacttggtcccacttttatatttttcctcttcggtccagaatttcttatttagtttcttgtattttgcctactccctcccttctccatgattcagcctagtctttccgtcctctgtggacttgggtgtgccttcctctgggccacctcgtcttttgctgctgttagccctcccgcctgcgcacctgccacttcaccctcgcctgtggtccacttacgttccactcagcccggtcagtcctgctttgttcttctccaccgccttggtctcccgtgtgtcttatctagctctggttccttctcgtctccacatttattttgttttcttcctgtgcttgttagtccttgtgcacttggtccttgagctctttttctattaataggtattactagatggatttgttgtctgcctttacatagaacacacatccttactgtgcatttcctgggtagccaggatgaatcaattattattaacttcccttcgaacattgagcttcctctgttttctgtttctaagaattagattagtattctagaagactaatactactttaaagacagtcaaaacagtcatacgctgccatttcagccctttatttaagagtttgtgacatttatcactcccttgaaagattaaagaacacccaaagcaagtttggggtggaggtggggaaggcaggaagagaaaggtaagtgctataaaaggactcattgttaatttctagaaattggactgagatctgaaagcataagccttaacattttttagataaacggtccctgaaaagaataaaaagtatcagtacttccgttaactagctttagtattgggtcatttgtagtttacattctcctttaagttttaagaccttcagtagttaacaaagcagacagagactggccaggcacagtggctcacacctgtaataccagcactttgggaggctgagttgggtggatcacaaggtcaggagattgaaaccatcctggccaacatggtgaaaccccgtctctactaaaaatacaaaaaaaaaaaaaaattagccaggcgtggtggcaggcacctgtggtcccagctactcgggaggctggggcaggagaatttcttgagcccgggaggccgaggttgcagtgagctgagatcgcgccactgcactccagcctgggtgacagcgagactctgtctcaaaaagaaaaaaaaaaaaaaaagcagagacttaatcttgtaaatactcattttatttttgagaggcttaatgtctccttaaatattaacctgtgtcattttgtaattatactgtaatagtgtcagaatgccattaacaaccaacccttttcgtttcttgtgtgggaaagctcataaattgtgtggtcttacccctctggaccctgtagttgtagcattgtgaaaatggagcttttggcaaaactttgtattatgctgttgactcacattgtctcatatttttcctttattcttctatattctatgaatatggtgctgtcctgtcatttaattattataatatatgtgaactgctggaggtagactgatgtgagtgcagtttttcaacttaaaaacccttatatatcacattcatggtgtttaagatataagaacagccctacaaagaggggttgattgtattgaagattctttctgctgagcctgccttaattgtgagggtggttgtttgggtatcttagagctaaaagaatggctaagagtccattaatggtcctgtaatattcaccatccctgagcagttagtaaagaatggccgcaaagccacaattaggctactaacaaggaacttatgtagatgtgctaggtccagcctgtgttctggaactatagagatgaataaggtatggtcctttctctctggaggctcacagttgaatagggaatattaatacgtgaatgatagcagtacagtgtggcagatgctaaaatatatgtgtgtagcagctattacaggagaactgattaatagggagagtctggctgggctcagtgactcacccctgtaatcccagcactttgggaggccgaggcgggcagatcacttgaggtcaggagttcgagaccagcctggccaacatggtaaaacctcatctctactaaaaaatacaaagaaaattagcaaggcgtggtggcgggcatctgtaatcccagctactggggaggctgaagcaggagaatcccttgaacccgggaggtgaggttgcagtgagctgagatcatgccactgcactccagcctgggtgacagagtaagactgtctcaaaaacaaaacccaaaatactaaccatatttatagttagtcacctcaccctttttttagttaaaagaagtttatttagcctgatcagtttaccagatgtcttttttagtgacttttgtgtcttccataaatccattctcaaaatttgcaacagttgagcatatttgaccaaaatgtgccacaggtttctgaagcctgttcaagaagaagcatgtcaacattattggagtaggtcttcgcaatgactacttttgggaagatttgagtaaaatttatggatacagaagttttggagtatgttagaatattactaagtctttttatagttgtaatcccaacactgggttatatatatttaataccaacctgagtatatttcctgaataatatctgttttggagacttggacaaagttaacttttttgcttttttaaaagttgctgtttaaattaacttcctgcatttctaatgtagaaaaaatatggcacagtgatttgaattttgtttatggtttattatcttcctaaattatcagctctttaaaatatgggtctctggcctgtataccatctgataaattaggttgggtaaatttttcacctgaaaaaattcattcttttgacccaggttgtttggcttggaaaaaaaaaatcacatactcattgcatgattaaacttgtccatcagattgtgattttgtgcgttatgaggattgtagctggggtaattttaaaatgttggtatttggatagaactgccagcccaggattttgataaagatcaaaatatatactgtatctaaagtttcttttttaaaagttatttcacttataatcaaaaggtttaaataagtttagtgtatattttatgattagtattattttgtatcgattcagagagaggaaaactgcattcccatagacagggagacttggtgcattaatatccaaagcttagtttaagctggtgatgattagaaaagtggctttcatttgtgttctctggaagattctcagtagtcctgtgggcatgtgaacaagagcatgtgtaatcttcataatgtatgtcttgttagcagaaatgtctgaggcattgctgagatgtaggatgagctgaggtactggttttgtctttcatggttccctattatgttttttgagaaactgagcttttcctgacagtgtttagtttttcttggctatttactatgctattaatagtaacagtttccattatggagcctcagtaggttcttgacatacattaacccattgctattatgtaattttctaataaaatgatgtgataaaacatattttctgtaatatactcatagaatatgtgattataagtaaataaatagatgttggggtagtcctcca

SEQ ID NO: 355330 - DNA, 6641 bp, Homo sapiens
  misc_feature (1846)..(1846): n is a, c, g, or t
  misc_feature (2384)..(2384): n is a, c, g, or t
  misc_feature (2387)..(2387): n is a, c, g, or t
  misc_feature (2467)..(2467): n is a, c, g, or t
agccggagagacgcagcggcggccccagtgccgcccccgggcgcgtgagtggagccgggctcctttcccctaccgcgccgcgacccccgcccgggctgcgcgcgccgcctcccgcgagcccccggcccgactcccgggctcccgcgggtgggggccagggctggtcggcgccggcggggctcgcggcggcggcgggttgcgtcccccgcgcctgctggcccacgtggacctggccgtcgcttgccgtgcggcgcctttgcgaaaactcgacggaagtggcagggaccgggcattacctgcgagtgccgggcgcctcctgctccgctgtgcgcgcttggggtgggactcggcgggggaggggtcgtgtacattgtcccaccaggcgcaatgtagccgggcggcgcagaggatttcttttttggtcttgagagcatagagtcccttttcatattcacgtgtactcttaagaaagcgtctgttctccaaactggctttccattctccccgtcctaaatggtgcgtggctgacaccgtagtgttttcaaaactggatatggccaggatgctatagcattgtcagtgcatctccttggaaacaatgccatctttgaatgtgagagataaacctagtttcagcatgtctgcagcagagaccagtacatcaggcttattcccacaggaagcctcctaaagcctgtggcgcggcaaccatttccaggactaaataataatgtgtcagatgcctgtgagtggactgcctggccaaatgactcatgaagatattcacggaagaatagtcaaaaaccaaagaaaaggcatattctagaagcaccttcaattccatcgaggatttttgagcagctgaagaagaaagttctgaaaatatgagtgacaggactccagcacattttttttagttgtttcttacattatctttgttaacccatccgcttttgtgtataatattaagttattttccactactgcaatggctagtaatttacttaggctcagagttttactctgtatggacagagaaataggaggtaacaacagtgggagaacaaataggaacagttcactgggatgttggtccccagaaattggctttcattgaataattcctaaagggtgtcgtgtgctgaattgctttttcatagtgatgtgctgcttcttgttcatactcttatgactttaatttcacctttatctactcccagcctctgtatatgcctacgtttttaaaaataatttttggcactgaagatctgattaccatattttttcagtttaaaaattaaatcctcgcaaatagacctttggtatagttgcattctaccctaggttattttctaggatcaagaatagaacaatttctgttctttccagcattactctttactattcatatgttcttgttcagtgttttgttgttctcatattctaggtggaaatgaagggtaatctctatgttctattttcagttttctaggaaaccagaaaaacatgggtagtagaaatgtatagaaaatgtatgaggtctcttaaccattgtgttaaacttgcattaagcttcttttttagcaatatcgatgtcagtgttacctcttctttcctttttatttattttttttgagacagagtctcattctgtcgcccagactggttggagtgcgatgatgcgatcgcggctaactgcaaccgctgcctcccgggtacaagtgattctcgtgccttgggctcccgagtagctgggatttttagtggagaacaggtttcaccatattggccaggctggtcttgaactcgcaacctcaggtgatccacccacctcagcctccccaangtgttgggattacaggcatgagccaccatacctggccccttttgttgttttgaggggcaggcagtaagaagcagggatttcttcaaatgctagtaagcacaaagagagggagaagtttttgtaagtaacgaacagggccgggcatggtggcgtgagaggccgaggtgggcagatcacgaggtcaggagttcgagaccagcctgaccaacatggtgaaacccccgtctccactagaaatgcaaagattagccgggcatggtggtgcacgcctgtaatccagctagtcgggaggctgaggcaggagaatcgcttgaacctgggaggtggaggttgcagggagctgagatcacgccactgcactccagcctgggcgacagagtaagactcccgtctcaaaaaaaaaaaaaaaaaaaaaagaacagttgatcattaaggccattaatgtgcatggacagtttgttgcccaggttggagtgtgatgacgacgcaatctcggtaaatataaacctactctgtaacctccacctcctgggctcangcngttctcgtgcttcagcctcccgagtagctgggatcacaggcatgcgccactaagcccagctaatttttgtatttttagtngagacggggtttcaccatgttggccaggctggtcttgaactcctggcctcaagtgatgcgcctgcctgggcctcccaaagtgctgggattacaggtgtgagccactgcacctggcccaataggcacatttttttaataagtagtttgttgattagaacgaagagcacttgccgtaagtgcatgtcattgttttcagctgttatggctaagtcagttaacctcatcaacaattttttcttctgtaaattgaggacaatttttgcttttatgaatgaagtcttaaccagcaggaagaaatataaacaaaggaacatatttttaatttaatgaagcaaaattccatacatcattttgaaaatagtgtttctttccctgataggcctgttctgcatcattcttttagcttccttctgccctgtttatcacttggtcccacttttatatttttcctcttcggtccagaatttcttatttagtttcttgtattttgcctactccctcccttctccatgattcagcctagtctttccgtcctctgtggacttgggtgtgccttcctctgggccacctcgtcttttgctgctgttagccctcccgcctgcgcacctgccacttcaccctcgcctgtggtccacttacgttccactcagcccggtcagtcctgctttgttcttctccaccgccttggtctcccgtgtgtcttatctagctctggttccttctcgtctccacatttattttgttttcttcctgtgcttgttagtccttgtgcacttggtccttgagctctttttctattaataggtattactagatggatttgttgtctgcctttacatagaacacacatccttactgtgcatttcctgggtagccaggatgaatcaattattattaacttcccttcgaacattgagcttcctctgttttctgtttctaagaattagattagtattctagaagactaatactactttaaagacagtcaaaacagtcatacgctgccatttcagccctttatttaagagtttgtgacatttatcactcccttgaaagattaaagaacacccaaagcaagtttggggtggaggtggggaaggcaggaagagaaaggtaagtgctataaaaggactcattgttaatttctagaaattggactgagatctgaaagcataagccttaacattttttagataaacggtccctgaaaagaataaaaagtatcagtacttccgttaactagctttagtattgggtcatttgtagtttacattctcctttaagttttaagaccttcagtagttaacaaagcagacagagactggccaggcacagtggctcacacctgtaataccagcactttgggaggctgagttgggtggatcacaaggtcaggagattgaaaccatcctggccaacatggtgaaaccccgtctctactaaaaatacaaaaaaaaaaaaaaattagccaggcgtggtggcaggcacctgtggtcccagctactcgggaggctggggcaggagaatttcttgagcccgggaggccgaggttgcagtgagctgagatcgcgccactgcactccagcctgggtgacagcgagactctgtctcaaaaagaaaaaaaaaaaaaaaagcagagacttaatcttgtaaatactcattttatttttgagaggcttaatgtctccttaaatattaacctgtgtcattttgtaattatactgtaatagtgtcagaatgccattaacaaccaacccttttcgtttcttgtgtgggaaagctcataaattgtgtggtcttacccctctggaccctgtagttgtagcattgtgaaaatggagcttttggcaaaactttgtattatgctgttgactcacattgtctcatatttttcctttattcttctatattctatgaatatggtgctgtcctgtcatttaattattataatatatgtgaactgctggaggtagactgatgtgagtgcagtttttcaacttaaaaacccttatatatcacattcatggtgtttaagatataagaacagccctacaaagaggggttgattgtattgaagattctttctgctgagcctgccttaattgtgagggtggttgtttgggtatcttagagctaaaagaatggctaagagtccattaatggtcctgtaatattcaccatccctgagcagttagtaaagaatggccgcaaagccacaattaggctactaacaaggaacttatgtagatgtgctaggtccagcctgtgttctggaactatagagatgaataaggtatggtcctttctctctggaggctcacagttgaatagggaatattaatacgtgaatgatagcagtacagtgtggcagatgctaaaatatatgtgtgtagcagctattacaggagaactgattaatagggagagtctggctgggctcagtgactcacccctgtaatcccagcactttgggaggccgaggcgggcagatcacttgaggtcaggagttcgagaccagcctggccaacatggtaaaacctcatctctactaaaaaatacaaagaaaattagcaaggcgtggtggcgggcatctgtaatcccagctactggggaggctgaagcaggagaatcccttgaacccgggaggtgaggttgcagtgagctgagatcatgccactgcactccagcctgggtgacagagtaagactgtctcaaaaacaaaacccaaaatactaaccatatttatagttagtcacctcaccctttttttagttaaaagaagtttatttagcctgatcagtttaccagatgtcttttttagtgacttttgtgtcttccataaatccattctcaaaatttgcaacagttgagcatatttgaccaaaatgtgccacaggtttctgaagcctgttcaagaagaagcatgtcaacattattggagtaggtcttcgcaatgactacttttgggaagatttgagtaaaatttatggatacagaagttttggagtatgttagaatattactaagtctttttatagttgtaatcccaacactgggttatatatatttaataccaacctgagtatatttcctgaataatatctgttttggagacttggacaaagttaacttttttgcttttttaaaagttgctgtttaaattaacttcctgcatttctaatgtagaaaaaatatggcacagtgatttgaattttgtttatggtttattatcttcctaaattatcagctctttaaaatatgggtctctggcctgtataccatctgataaattaggttgggtaaatttttcacctgaaaaaattcattcttttgacccaggttgtttggcttggaaaaaaaaaatcacatactcattgcatgattaaacttgtccatcagattgtgattttgtgcgttatgaggattgtagctggggtaattttaaaatgttggtatttggatagaactgccagcccaggattttgataaagatcaaaatatatactgtatctaaagtttcttttttaaaagttatttcacttataatcaaaaggtttaaataagtttagtgtatattttatgattagtattattttgtatcgattcagagagaggaaaactgcattcccatagacagggagacttggtgcattaatatccaaagcttagtttaagctggtgatgattagaaaagtggctttcatttgtgttctctggaagattctcagtagtcctgtgggcatgtgaacaagagcatgtgtaatcttcataatgtatgtcttgttagcagaaatgtctgaggcattgctgagatgtaggatgagctgaggtactggttttgtctttcatggttccctattatgttttttgagaaactgagcttttcctgacagtgtttagtttttcttggctatttactatgctattaatagtaacagtttccattatggagcctcagtaggttcttgacatacattaacccattgctattatgtaattttctaataaaatgatgtgataaaacatattttctgtaatatactcatagaatatgtgattataagtaaataaatagatgttggggtagtcctccaaaatggaaactgttactattaatagcatagtaaatagccaagaaaaactaaacactgtcaggaaaagctcagtttctgtc

SEQ ID NO: 355331 - DNA, 4519 bp, Homo sapiens
agccggagagacgcagcggcggccccagtgccgcccccgggcgcgtgagtggagccgggctcctttcccctaccgcgccgcgacccccgcccgggctgcgcgcgccgcctcccgcgagcccccggcccgactcccgggctcccgcgggtgggggccagggctggtcggcgccggcggggctcgcggcggcggcgggttgcgtcccccgcgcctgctggcccacgtggacctggccgtcgcttgccgtgcggcgcctttgcgaaaactcgacggaagtggcagggaccgggcattacctgcgagtgccgggcgcctcctgctccgctgtgcgcgcttggggtgggactcggcgggggaggggtcgtgtacattgtcccaccaggcgcaatgtagccgggcggcgcagaggatttcttttttggtcttgagagcatagagtcccttttcatattcacgtgtactcttaagaaagcgtctgttctccaaactggctttccattctccccgtcctaaatggtgcgtggctgacaccgtagtgttttcaaaactggatatggccaggatgctatagcattgtcagtgcatctccttggaaacaatgccatctttgaatgtgagagataaacctagtttcagcatgtctgcagcagagaccagtacatcaggcttattcccacaggaagcctcctaaagcctgtggcgcggcaaccatttccaggactaaataataatgtgtcagatgcctgtgagtggactgcctggccaaatgactcatgaagatattcacggaagaatagtcaaaaaccaaagaaaaggcatattctagaagcaccttcaattccatcgaggatttttgagcagctgaagaagaaagttctgaaaatatgagtgacaggactccagcacattttttttagttgtttcttacattatctttgttaacccatccgcttttgtgtataatattaagttattttccactactgcaatggctagtaatttacttaggctcagagttttactctgtatggacagagaaataggaggtaacaacagtgggagaacaaataggaacagttcactgggatgttggtccccagaaattggctttcattgaataattcctaaagggtgtcgtgtgctgaattgctttttcatagtgatgtgctgcttcttgttcatactcttatgactttaatttcacctttatctactcccagcctctgtatatgcctacgtttttaaaaataatttttggcactgaagatctgattaccatattttttcagtttaaaaattaaatcctcgcaaatagacctttggtatagttgcattctaccctaggttattttctaggatcaagaatagaacaatttctgttctttccagcattactctttactattcatatgttcttgttcagtgttttgttgttctcatattctaggtggaaatgaagggtaatctctatgttctattttcagttttctaggaaaccagaaaaacatgggtagtagaaatgtatagaaaatgtatgaggtctcttaaccattgtgttaaacttgcattaagcttcttttttagcaatatcgatgtcagtgttacctcttctttcctttttatttattttttttgagacagagtctcattctgtcgcccagactggttggagtgcgatgatgcgatcgcggctaactgcaaccgctgcctcccgggtacaagtgattctcgtgccttgggctcccgagtagctgggatttttagtggagaacaggtttcaccatattggccaggctgagttgggtggatcacaaggtcaggagattgaaaccatcctggccaacatggtgaaaccccgtctctactaaaaatacaaaaaaaaaaaaaaattagccaggcgtggtggcaggcacctgtggtcccagctactcgggaggctggggcaggagaatttcttgagcccgggaggccgaggttgcagtgagctgagatcgcgccactgcactccagcctgggtgacagcgagactctgtctcaaaaagaaaaaaaaaaaaaaaagcagagacttaatcttgtaaatactcattttatttttgagaggcttaatgtctccttaaatattaacctgtgtcattttgtaattatactgtaatagtgtcagaatgccattaacaaccaacccttttcgtttcttgtgtgggaaagctcataaattgtgtggtcttacccctctggaccctgtagttgtagcattgtgaaaatggagcttttggcaaaactttgtattatgctgttgactcacattgtctcatatttttcctttattcttctatattctatgaatatggtgctgtcctgtcatttaattattataatatatgtgaactgctggaggtagactgatgtgagtgcagtttttcaacttaaaaacccttatatatcacattcatggtgtttaagatataagaacagccctacaaagaggggttgattgtattgaagattctttctgctgagcctgccttaattgtgagggtggttgtttgggtatcttagagctaaaagaatggctaagagtccattaatggtcctgtaatattcaccatccctgagcagttagtaaagaatggccgcaaagccacaattaggctactaacaaggaacttatgtagatgtgctaggtccagcctgtgttctggaactatagagatgaataaggtatggtcctttctctctggaggctcacagttgaatagggaatattaatacgtgaatgatagcagtacagtgtggcagatgctaaaatatatgtgtgtagcagctattacaggagaactgattaatagggagagtctggctgggctcagtgactcacccctgtaatcccagcactttgggaggccgaggcgggcagatcacttgaggtcaggagttcgagaccagcctggccaacatggtaaaacctcatctctactaaaaaatacaaagaaaattagcaaggcgtggtggcgggcatctgtaatcccagctactggggaggctgaagcaggagaatcccttgaacccgggaggtgaggttgcagtgagctgagatcatgccactgcactccagcctgggtgacagagtaagactgtctcaaaaacaaaacccaaaatactaaccatatttatagttagtcacctcaccctttttttagttaaaagaagtttatttagcctgatcagtttaccagatgtcttttttagtgacttttgtgtcttccataaatccattctcaaaatttgcaacagttgagcatatttgaccaaaatgtgccacaggtttctgaagcctgttcaagaagaagcatgtcaacattattggagtaggtcttcgcaatgactacttttgggaagatttgagtaaaatttatggatacagaagttttggagtatgttagaatattactaagtctttttatagttgtaatcccaacactgggttatatatatttaataccaacctgagtatatttcctgaataatatctgttttggagacttggacaaagttaacttttttgcttttttaaaagttgctgtttaaattaacttcctgcatttctaatgtagaaaaaatatggcacagtgatttgaattttgtttatggtttattatcttcctaaattatcagctctttaaaatatgggtctctggcctgtataccatctgataaattaggttgggtaaatttttcacctgaaaaaattcattcttttgacccaggttgtttggcttggaaaaaaaaaatcacatactcattgcatgattaaacttgtccatcagattgtgattttgtgcgttatgaggattgtagctggggtaattttaaaatgttggtatttggatagaactgccagcccaggattttgataaagatcaaaatatatactgtatctaaagtttcttttttaaaagttatttcacttataatcaaaaggtttaaataagtttagtgtatattttatgattagtattattttgtatcgattcagagagaggaaaactgcattcccatagacagggagacttggtgcattaatatccaaagcttagtttaagctggtgatgattagaaaagtggctttcatttgtgttctctggaagattctcagtagtcctgtgggcatgtgaacaagagcatgtgtaatcttcataatgtatgtcttgttagcagaaatgtctgaggcattgctgagatgtaggatgagctgaggtactggttttgtctttcatggttccctattatgttttttgagaaactgagcttttcctgacagtgtttagtttttcttggctatttactatgctattaatagtaacagtttccattatggagcctcagtaggttcttgacatacattaacccattgctattatgtaattttctaataaaatgatgtgataaaacatattttctgtaatatactcatagaatatgtgattataagtaaataaatagatgttggggtagtcctcca

SEQ ID NO: 355332 - DNA, 4294 bp, Homo sapiens
agccggagagacgcagcggcggccccagtgccgcccccgggcgcgtgagtggagccgggctcctttcccctaccgcgccgcgacccccgcccgggctgcgcgcgccgcctcccgcgagcccccggcccgactcccgggctcccgcgggtgggggccagggctggtcggcgccggcggggctcgcggcggcggcgggttgcgtcccccgcgcctgctggcccacgtggacctggccgtcgcttgccgtgcggcgcctttgcgaaaactcgacggaagtggcagggaccgggcattacctgcgagtgccgggcgcctcctgctccgctgtgcgcgcttggggtgggactcggcgggggaggggtcgtgtacattgtcccaccaggcgcaatgtagccgggcggcgcagaggatttcttttttggtcttgagagcatagagtcccttttcatattcacgtgtactcttaagaaagcgtctgttctccaaactggctttccattctccccgtcctaaatggtgcgtggctgacaccgtagtgttttcaaaactggatatggccaggatgctatagcattgtcagtgcatctccttggaaacaatgccatctttgaatgtgagagataaacctagtttcagcatgtctgcagcagagaccagtacatcaggcttattcccacaggaagcctcctaaagcctgtggcgcggcaaccatttccaggactaaataataatgtgtcagatgcctgtgagtggactgcctggccaaatgactcatgaagatattcacggaagaatagtcaaaaaccaaagaaaaggcatattctagaagcaccttcaattccatcgaggatttttgagcagctgaagaagaaagttctgaaaatatgagtgacaggactccagcacattttttttagttgtttcttacattatctttgttaacccatccgcttttgtgtataatattaagttattttccactactgcaatggctagtaatttacttaggctcagagttttactctgtatggacagagaaataggaggtaacaacagtgggagaacaaataggaacagttcactgggatgttggtccccagaaattggctttcattgaataattcctaaagggtgtcgtgtgctgaattgctttttcatagtgatgtgctgcttcttgttcatactcttatgactttaatttcacctttatctactcccagcctctgtatatgcctacgtttttaaaaataatttttggcactgaagatctgattaccatattttttcagtttaaaaattaaatcctcgcaaatagacctttggtatagttgcattctaccctaggttattttctaggatcaagaatagaacaatttctgttctttccagcattactctttactattcatatgttcttgttcagtgttttgttgttctcatattctaggtggaaatgaagggtaatctctatgttctattttcagttttctaggaaaccagaaaaacatgggtagtagaaatgtatagaaaatgtatgaggtctcttaaccattgtgttaaacttgcattaagcttcttttttagcaatatcgatgtcagtgttacctcttctttcctttttatttattttttttgagacagagtctcattctgtcgcccagactggttggagtgcgatgatgcgatcgcggctaactgcaaccgctgcctcccgggtacaagagaatttcttgagcccgggaggccgaggttgcagtgagctgagatcgcgccactgcactccagcctgggtgacagcgagactctgtctcaaaaagaaaaaaaaaaaaaaaagcagagacttaatcttgtaaatactcattttatttttgagaggcttaatgtctccttaaatattaacctgtgtcattttgtaattatactgtaatagtgtcagaatgccattaacaaccaacccttttcgtttcttgtgtgggaaagctcataaattgtgtggtcttacccctctggaccctgtagttgtagcattgtgaaaatggagcttttggcaaaactttgtattatgctgttgactcacattgtctcatatttttcctttattcttctatattctatgaatatggtgctgtcctgtcatttaattattataatatatgtgaactgctggaggtagactgatgtgagtgcagtttttcaacttaaaaacccttatatatcacattcatggtgtttaagatataagaacagccctacaaagaggggttgattgtattgaagattctttctgctgagcctgccttaattgtgagggtggttgtttgggtatcttagagctaaaagaatggctaagagtccattaatggtcctgtaatattcaccatccctgagcagttagtaaagaatggccgcaaagccacaattaggctactaacaaggaacttatgtagatgtgctaggtccagcctgtgttctggaactatagagatgaataaggtatggtcctttctctctggaggctcacagttgaatagggaatattaatacgtgaatgatagcagtacagtgtggcagatgctaaaatatatgtgtgtagcagctattacaggagaactgattaatagggagagtctggctgggctcagtgactcacccctgtaatcccagcactttgggaggccgaggcgggcagatcacttgaggtcaggagttcgagaccagcctggccaacatggtaaaacctcatctctactaaaaaatacaaagaaaattagcaaggcgtggtggcgggcatctgtaatcccagctactggggaggctgaagcaggagaatcccttgaacccgggaggtgaggttgcagtgagctgagatcatgccactgcactccagcctgggtgacagagtaagactgtctcaaaaacaaaacccaaaatactaaccatatttatagttagtcacctcaccctttttttagttaaaagaagtttatttagcctgatcagtttaccagatgtcttttttagtgacttttgtgtcttccataaatccattctcaaaatttgcaacagttgagcatatttgaccaaaatgtgccacaggtttctgaagcctgttcaagaagaagcatgtcaacattattggagtaggtcttcgcaatgactacttttgggaagatttgagtaaaatttatggatacagaagttttggagtatgttagaatattactaagtctttttatagttgtaatcccaacactgggttatatatatttaataccaacctgagtatatttcctgaataatatctgttttggagacttggacaaagttaacttttttgcttttttaaaagttgctgtttaaattaacttcctgcatttctaatgtagaaaaaatatggcacagtgatttgaattttgtttatggtttattatcttcctaaattatcagctctttaaaatatgggtctctggcctgtataccatctgataaattaggttgggtaaatttttcacctgaaaaaattcattcttttgacccaggttgtttggcttggaaaaaaaaaatcacatactcattgcatgattaaacttgtccatcagattgtgattttgtgcgttatgaggattgtagctggggtaattttaaaatgttggtatttggatagaactgccagcccaggattttgataaagatcaaaatatatactgtatctaaagtttcttttttaaaagttatttcacttataatcaaaaggtttaaataagtttagtgtatattttatgattagtattattttgtatcgattcagagagaggaaaactgcattcccatagacagggagacttggtgcattaatatccaaagcttagtttaagctggtgatgattagaaaagtggctttcatttgtgttctctggaagattctcagtagtcctgtgggcatgtgaacaagagcatgtgtaatcttcataatgtatgtcttgttagcagaaatgtctgaggcattgctgagatgtaggatgagctgaggtactggttttgtctttcatggttccctattatgttttttgagaaactgagcttttcctgacagtgtttagtttttcttggctatttactatgctattaatagtaacagtttccattatggagcctcagtaggttcttgacatacattaacccattgctattatgtaattttctaataaaatgatgtgataaaacatattttctgtaatatactcatagaatatgtgattataagtaaataaatagatgttggggtagtcctcca

SEQ ID NO: 355333 - DNA, 2675 bp, Homo sapiens
  misc_feature (1846)..(1846): n is a, c, g, or t
  misc_feature (2287)..(2287): n is a, c, g, or t
agccggagagacgcagcggcggccccagtgccgcccccgggcgcgtgagtggagccgggctcctttcccctaccgcgccgcgacccccgcccgggctgcgcgcgccgcctcccgcgagcccccggcccgactcccgggctcccgcgggtgggggccagggctggtcggcgccggcggggctcgcggcggcggcgggttgcgtcccccgcgcctgctggcccacgtggacctggccgtcgcttgccgtgcggcgcctttgcgaaaactcgacggaagtggcagggaccgggcattacctgcgagtgccgggcgcctcctgctccgctgtgcgcgcttggggtgggactcggcgggggaggggtcgtgtacattgtcccaccaggcgcaatgtagccgggcggcgcagaggatttcttttttggtcttgagagcatagagtcccttttcatattcacgtgtactcttaagaaagcgtctgttctccaaactggctttccattctccccgtcctaaatggtgcgtggctgacaccgtagtgttttcaaaactggatatggccaggatgctatagcattgtcagtgcatctccttggaaacaatgccatctttgaatgtgagagataaacctagtttcagcatgtctgcagcagagaccagtacatcaggcttattcccacaggaagcctcctaaagcctgtggcgcggcaaccatttccaggactaaataataatgtgtcagatgcctgtgagtggactgcctggccaaatgactcatgaagatattcacggaagaatagtcaaaaaccaaagaaaaggcatattctagaagcaccttcaattccatcgaggatttttgagcagctgaagaagaaagttctgaaaatatgagtgacaggactccagcacattttttttagttgtttcttacattatctttgttaacccatccgcttttgtgtataatattaagttattttccactactgcaatggctagtaatttacttaggctcagagttttactctgtatggacagagaaataggaggtaacaacagtgggagaacaaataggaacagttcactgggatgttggtccccagaaattggctttcattgaataattcctaaagggtgtcgtgtgctgaattgctttttcatagtgatgtgctgcttcttgttcatactcttatgactttaatttcacctttatctactcccagcctctgtatatgcctacgtttttaaaaataatttttggcactgaagatctgattaccatattttttcagtttaaaaattaaatcctcgcaaatagacctttggtatagttgcattctaccctaggttattttctaggatcaagaatagaacaatttctgttctttccagcattactctttactattcatatgttcttgttcagtgttttgttgttctcatattctaggtggaaatgaagggtaatctctatgttctattttcagttttctaggaaaccagaaaaacatgggtagtagaaatgtatagaaaatgtatgaggtctcttaaccattgtgttaaacttgcattaagcttcttttttagcaatatcgatgtcagtgttacctcttctttcctttttatttattttttttgagacagagtctcattctgtcgcccagactggttggagtgcgatgatgcgatcgcggctaactgcaaccgctgcctcccgggtacaagtgattctcgtgccttgggctcccgagtagctgggatttttagtggagaacaggtttcaccatattggccaggctggtcttgaactcgcaacctcaggtgatccacccacctcagcctccccaangtgttgggattacaggcatgagccaccatacctggccccttttgttgttttgaggggcaggcagtaagaagcagggatttcttcaaatgctagtaagcacaaagagagggagaagtttttgtaagtaacgaacagggccgggcatggtggcgtgagaggccgaggtgggcagatcacgaggtcaggagttcgagaccagcctgaccaacatggtgaaacccccgtctccactagaaatgcaaagattagccgggcatggtggtgcacgcctgtaatccagctagtcgggaggctgaggcaggagaatcgcttgaacctgggaggtggaggttgcagggagctgagatcacgccactgcactccagcctgggcgacagagtaagactcccgtctcaaaaaaaaaaaaaaaaaaaaaaaaaaaaaaaaaaaaaaaaaaaaaanaaaaaaaaaagacaagggggcggcgcgcgcgccgcgacaaatgatcctccgccacgggggaggacaactcatcggcagcccccacccaatattctttagaaaaaggggcgccgccacgaaaaagaggaggatggcattatatcaaaacagcagcgaggcggaccgcggcagcgcccgcaacacaacaggatgcaggtggcgcggggcgggacacataggctgctgctcggaggcgaatcctctgagtgggcgggagggcccctttttcttgtgggggggggggacgtaacatctactgtgggcacgcttcatcatccccatagaaatgtaattatacgcctgcagttgagtgtggattatcaacaacttgcttgtgttgctagtttgc

SEQ ID NO: 355334 - DNA, 2815 bp, Homo sapiens
acctaagcaagcctgggcaatggcgggcgcccctcccccagcctcgctgccgccttgcagtttgatctcagactgctgtgctggcaatcagcgagactccgtgggcgtaggaccctccgagccaggctgctatccatgtccagggccaaacatgaatcctattgctcttgggagccgctggcttgcttatgcagaaaacaagttgattcgatgtcatcagtcccgtggtggagcctgtggagacaacattcagtcttatactgccacagtcattagtgctgctaaaacattgaaaagtggcctgacaatggtagggaaagtggtgactcagctgacaggcacactgccttcaggtgtgacagaagatgatgttgccatccacagtaattcacggcggagtcctttggtcccaggcatcatcacagttattgacaccgaaaccgttggagagggccaggtgcttgtgagtgaggattctgacagtgatggcattgtggcccacttccctgcccatgagaagccagtgtgctgcatggcttttaatacaagtggaatgcttctagtcacaacagacacccttggccatgactttcatgtcttccaaattctgactcatccttggtcagtactctccggggtacttcccacgttttccccatcaacccttatggtggccagccttgtgttcgtacacatatgtcaccacgagtagtgaatcgcatgagccgtttccagaaaagtgctggactggaagagattgaacaagaactgacgtctaagcaaggaggtcgctgtagccctgttccaggtctatcaagcagcccttctgggtcacccttgcatgggaaactgaacagccaagactcctataacaattttaccaacaacaaccctggcaaccctcggctctctcctcttcccagcttgatggtagtgatgcctcttgcacaaatcaagcagccaatgacattggggaccatcaccaaacgaaccggcaaagttaaacctcctccacaaatttcacccagcaaatcgatgggcggagaattttgtgtggctgctatcttcggaacatccaggtcatggtttgcaaataatgcaggtctgaaaagagaaaaagatcagtccaaacaagttgtagttgagtccctgtacattatcagttgctatggcaccttagtggaacacatgatggagccgcgacccctcagcactgcacccaagattagtgacgacacaccactggaaatgatgacatcgcctcgagccagctggactctggttagaacccctcaatggaatgaattgcagccaccgtttaatgcaaaccaccctctgctcctcgctgcagatgcagtacagtattatcagttcctgcttgctggcctggttccccctggaagtcctgggcccattactcgacatgggtcttacgacagtttagcttctgaccatagtggacaggaagatgaagaatggctttcccaggttgaaattgtaacacacactggaccccatagacgtctgtggatgggtccacagttccagttcaaaaccatccatccctcaggccaaaccacagttatctcatccagttcatctgtgttgcagtctcatggtccgagtgacacgccacagcctcttttggattttgatacagatgatcttgatctcaacagtctcaggatccagccagtccgctctgaccccgtcagcatgccagggtcatcccgtccagtctctgatcgaaggggagtttccacagtgattgatgctgcctcaggtacctttgacaggagcgtgaccctgctggaggtgtgcgggagctggcctgagggcttcgggctgcggcacatgtcctccatggagcacacggaggagggcctccgggagcgacttgccgacgccatggccgagtcacctagccgggacgtcgtgggatccggaacagaacttcagcgagagggaagcatcgagactctgagtaacagctcaggctccaccagcggcagcataccaagaaactttgatggctaccgatctccgctgcccaccaatgagagccagcccctcagcctcttcccgactggcttcccgtaggtaccagcaacctgcttctgactggccagccccctcccctgctggaggaggggagaagccccgctctggtcctacccttcagtctctgctcttccttcatcaaccaccttccccaagcttagtgacagcagccgcccatcctacctggatggagaagagacccttctccaagcacctcagcgcacttgccctctgccacacctgtcggtggaggctgtggccaggagagactgtagaagctcggtccctgtgtatgtttgcatatgacatcctgcattggatccgcttttgtattttttaaccatacccacggtggggcgggtggggggagcctggaacagtgaccagatctgggggcctgagtggggacagagttgatcgtccacctggccattttgaccctgagtggacagtcacagcctcagctcatgtctggctgtgacacacactgcccccagcttcccttggtcagccccactccagcacggggtgaacggaggcccagagtactagggaaggaggaagggaggacatgcctcttcttcctcctttctttccccatctgttcctgggaagagtttgtctttcttatctttaagcccctttaccctggtcctgtactgatcagtgaaggaaaccgtggttactgaggccctgttgaaaagtgcacgtcttgtccaataaatcacgctgcagttggtgtccaaaaaaaaat

SEQ ID NO: 355335 - DNA, 2053 bp, Homo sapiens
ccccatgattcaattatctccacctggtccctcccaggacacatggggattatgggaactacaagtcaagatgagatttgggtggagacacagccaaacgatatcagggtgttgtgaggattcatggagcaaatggctgtgaaagcaccttgtaaagggtagagcagtgtgcggcgtgagggattattatcattgttaagacgtctacgcctcgttgctcaccctgtgtgatcctgcagcttctcaacttttccctcctttctccctggtttccacgcctgggctgctgagtcaggcggaccggccaaggctggcgagggctgaacagatgctctgacatgtcaaggcaggaaatgacagttcccaggcagccctctgtttcaggtgtggaacaggctccgaacacactttgtgtgataaattctagtaacgccaggctgagctctacctccacccccttaggctgcaagactaggacatgaggctgaaagtcagagaagtccctgtgagacgagggccctgagcaagcactggccagactgtagcaaggccactcaccaggccaccccgctggttctacttccgcacccacctctggcagccatgatgcttctgcagcatgccagtttgttcactgagaccttcacagaaggtcgcacaaccaccctggacggtgagaaactaaggtgactgaggcaagtcattgaaccaccctgagccttggcttcctcatctatgaaatggagttgacagcatctgtcctgcctgtggtaaaaattgctgtgatcccacaaccaaaaggaaagagagaattatgagaaaaatatgtacttattctgtgaaaatatgtgagattttcatgagagacttcctgttccagtggactcttccaccgcccttgagtggggaacatccaggccttcacactcacgctcagcccatcacccctctgtgcaaggtgcaaggtcctctgcccacctgaagcctcaaggcctgatggaaaccatccacagccactctagtacctttgacaggagcgtgaccctgctggaggtgtgcgggagctggcctgagggcttcgggctgcggcacatgtcctccatggagcacacggaggagggcctccgggagcgacttgccgacgccatggccgagtcacctagccgggacgtcgtgggatccggaacagaacttcagcgagagggaagcatcgagactctgagtaacagctcaggctccaccagcggcagcataccaagaaactttgatggctaccgatctccgctgcccaccaatgagagccagcccctcagcctcttcccgactggcttcccgtaggtaccagcaacctgcttctgactggccagccccctcccctgctggaggaggggagaagccccgctctggtcctacccttcagtctctgctcttccttcatcaaccaccttccccaagcttagtgacagcagccgcccatcctacctggatggagaagagacccttctccaagcacctcagcgcacttgccctctgccacacctgtcggtggaggctgtggccaggagagactgtagaagctcggtccctgtgtatgtttgcatatgacatcctgcattggatccgcttttgtattttttaaccatacccacggtggggcgggtggggggagcctggaacagtgaccagatctgggggcctgagtggggacagagttgatcgtccacctggccattttgaccctgagtggacagtcacagcctcagctcatgtctggctgtgacacacactgcccccagcttcccttggtcagccccactccagcacggggtgaacggaggcccagagtactagggaaggaggaagggaggacatgcctcttcttcctcctttctttccccatctgttcctgggaagagtttgtctttcttatctttaagcccctttaccctggtcctgtactgatcagtgaaggaaaccgtggttactgaggccctgttgaaaagtgcacgtcttgtccaataaatcacgctgcagttggtgtccaaaaaaaaat

SEQ ID NO: 355336 - DNA, 598 bp, Homo sapiens
gttaacaggcggggcggccggttttatgaatgaagctatggctacagattccccaagaagacccagtcgttgtactggtggagttgtggttcgcccccaggctgtcacatggagtctcactctgttgcccaggttggagtgcagtggcgccgtctcggctcgctgcagcctccacctcctcctctgtctcccagattcaagcgattctcctgccttggcctcccaagtagctgggattacaggcgagcgccaccaggcctggccaaattttgtatttttagcaaagacggggttttgccatttggccaggctggtcttgaactcctgacctcaggtgatctgcctgtcttggcctcccaaagtgctagaattacatgtgtgagccactgtgcctggccaaagatatgtatacttgaaggctgacatgggaggattgcttgaaaccaggagtttgacaccagcctgaacaacatcctgagaccctcatgccttaaaaaaatacaaaaattagccaggcattgtggcaggcgcctggagccttagctactcgggaggctgagatgggaggatcacctcggcccaggagcttgaagctgtg

SEQ ID NO: 355337 - DNA, 3483 bp, Homo sapiens
aggaccagtggagaatttaatcctggtttattgcgtagcatgtgaaataatcatgcatatcaaagtagtgattcattttgaaaattggcagtttgctttatttatgtcagtcacaaataaggatatgtctttttcattcctaatggtaaaagtttaagctctctgaagtggacagctaatatacttgtcatagttgatttatgcgtaatttgtaatgcttttccactgacacaattgaaaatataaatatggcaaaatcttttgtctactttttatgttttcttttataatctttgtggaggagttaacaggataaaacatctaatttgttagcatgtcagatatttaagttaggaagtcatgtgtaagtcctttgattacgtttttaaaatttatttgtggaaaggccaccagaccccaatcctaccatttcagagtttatggattcttaaagaccattcttcttgtaatgaaaaccgtagttgagcatgaaactgcctgagtggcaccagtagattataaaaaggggtagaagtgtctcggcaaagcttttagctgtttgtctgaaatacactcatgcaaacattcccacccatcaccatcactgttcacggaaaataagctctatcctgatagcctgtagagttaaacagattaatagaaatgacgttctgcttctctctctctctttttctcagttgattcgatgtcatcagtcccgtggtggagcctgtggagacaacattcagtcttatactgccacagtcattagtgctgctaaaacattgaaaagtggcctgacaatggtagggaaagtggtgactcagctgacaggcacactgccttcaggtgtgacagaagatgatgttgccatccacagtaattcacggcggagtcctttggtcccaggcatcatcacagttattgacaccgaaaccgttggagagggccaggtgcttgtgagtgaggattctgacagtgatggcattgtggcccacttccctgcccatgagaagccagtgtgctgcatggcttttaatacaagtggaatgcttctagtcacaacagacacccttggccatgactttcatgtcttccaaattctgactcatccttggtcctcatcacaatgtgctgtccaccatctgtatactcttcacaggggagaaactgaagccaaagtacaggacatctgcttcagccatgactgtcgctgggttgtggtcagtactctccggggtacttcccacgttttccccatcaacccttatggtggccagccttgtgttcgtacacatatgtcaccacgagtagtgaatcgcatgagccgtttccagaaaagtgctggactggaagagattgaacaagaactgacgtctaagcaaggaggtcgctgtagccctgttccaggtctatcaagcagcccttctgggtcacccttgcatgggaaactgaacagccaagactcctataacaattttaccaacaacaaccctggcaaccctcggctctctcctcttcccagcttgatggtagtgatgcctcttgcacaaatcaagcagccaatgacattggggaccatcaccaaacgaaccggcaaagttaaacctcctccacaaatttcacccagcaaatcgatgggcggagaattttgtgtggctgctatcttcggaacatccaggtcatggtttgcaaataatgcaggtctgaaaagagaaaaagatcagtccaaacaagttgtagttgagtccctgtacattatcagttgctatggcaccttagtggaacacatgatggagccgcgacccctcagcactgcacccaagattagtgacgacacaccactggaaatgatgacatcgcctcgagccagctggactctggttagaacccctcaatggaatgaattgcagccaccgtttaatgcaaaccaccctctgctcctcgctgcagatgcagtacagtattatcagttcctgcttgctggcctggttccccctggaagtcctgggcccattactcgacatgggtcttacgacagtttagcttctgaccatagtggacaggaagatgaagaatggctttcccaggttgaaattgtaacacacactggaccccatagacgtctgtggatgggtccacagttccagttcaaaaccatccatccctcaggccaaaccacagttatctcatccagttcatctgtgttgcagtctcatggtccgagtgacacgccacagcctcttttggattttgatacagatgatcttgatctcaacagtctcaggatccagccagtccgctctgaccccgtcagcatgccagggtcatcccgtccagtctctgatcgaaggggagtttccacagtgattgatgctgcctcaggtacctttgacaggagcgtgaccctgctggaggtgtgcgggagctggcctgagggcttcgggctgcggcacatgtcctccatggagcacacggaggagggcctccgggagcgacttgccgacgccatggccgagtcacctagccgggacgtcgtgggatccggaacagacacagcccttgacgtagcagtaaaaaccttcccccctgagagacacgtggcagtgaagtgttttgaacttcagcgagagggaagcatcgagactctgagtaacagctcaggctccaccagcggcagcataccaagaaactttgatggctaccgatctccgctgcccaccaatgagagccagcccctcagcctcttcccgactggcttcccgtaggtaccagcaacctgcttctgactggccagccccctcccctgctggaggaggggagaagccccgctctggtcctacccttcagtctctgctcttccttcatcaaccaccttccccaagcttagtgacagcagccgcccatcctacctggatggagaagagacccttctccaagcacctcagcgcacttgccctctgccacacctgtcggtggaggctgtggccaggagagactgtagaagctcggtccctgtgtatgtttgcatatgacatcctgcattggatccgcttttgtattttttaaccatacccacggtggggcgggtggggggagcctggaacagtgaccagatctgggggcctgagtggggacagagttgatcgtccacctggccattttgaccctgagtggacagtcacagcctcagctcatgtctggctgtgacacacactgcccccagcttcccttggtcagccccactccagcacggggtgaacggaggcccagagtactagggaaggaggaagggaggacatgcctcttcttcctcctttctttccccatctgttcctgggaagagtttgtctttcttatctttaagcccctttaccctggtcctgtactgatcagtgaaggaaaccgtggttactgaggccctgttgaaaagtgcacgtcttgtccaataaatcacgctgcagttggtgtccaaaaaaaaat

SEQ ID NO: 355338 - DNA, 3728 bp, Homo sapiens
aggaagtggctgccgtcaatcactcggggagactccaaacagtgagcctagagctggagactagcgttaaccggcggggcggccggttttatgaatgaagctatggctacagattccccaagaagacccagtcgttgtactggtggagttgtggttcgcccccaggctgtcacagagcagtcctacatggaaagtgttgtgacttttctgcaggatgttgtgccacaggcttccaggaagcagctgataggttgggtctagaagcttgataagagactaaaaaagtacagtaatactcacaccagtataattgccacaaacacctagcacttaatagttaaaggcttacagtggaacacctctaacagaagaaaaggagaaaatagtctgggtcagatttgaaaatgcagatttaaatgatacatcaagaaatctggaatttcatgaaatacatagtactgggagtgaaccgcctttgttgattatgattggctacagtgatggaatgcaggtctggagcatccctatcagtggcgaagcacaagagctcttctctgttcgacatggcccaattcgagcggctagaatcttgcctgctccacagtttggtgctcaaaaatgtgataactttgctgaaaaaagacccctccttggtgtttgtaagagcattggatcttctggcacaagcccaccgtactgttgtgtggatctgtattcacttcgtactggggagatggtcaagtccattcaatttaagacacctatttatgatctccattgcaataaacggatccttgtcgtagtcttgcaggagaaaattgctgcctttgatagctgtactttcacgaagaaattctttgttacaagctgctatccatgtccagggccaaacatgaatcctattgctcttgggagccgctggcttgcttatgcagaaaacaagttgattcgatgtcatcagtcccgtggtggagcctgtggagacaacattcagtcttatactgccacagtcattagtgctgctaaaacattgaaaagtggcctgacaatggtagggaaagtggtgactcagctgacaggcacactgccttcaggtgtgacagaagatgatgttgccatccacagtaattcacggcggagtcctttggtcccaggcatcatcacagttattgacaccgaaaccgttggagagggccaggtgcttgtgagtgaggattctgacagtgatggcattgtggcccacttccctgcccatgagaagccagtgtgctgcatggcttttaatacaagtggaatgcttctagtcacaacagacacccttggccatgactttcatgtcttccaaattctgactcatccttggtcctcatcacaatgtgctgtccaccatctgtatactcttcacaggggagaaactgaagccaaagtacaggacatctgcttcagccatgactgtcgctgggttgtggtcagtactctccggggtacttcccacgttttccccatcaacccttatggtggccagccttgtgttcgtacacatatgtcaccacgagtagtgaatcgcatgagccgtttccagaaaagtgctggactggaagagattgaacaagaactgacgtctaagcaaggaggtcgctgtagccctgttccaggtctatcaagcagcccttctgggtcacccttgcatgggaaactgaacagccaagactcctataacaattttaccaacaacaaccctggcaaccctcggctctctcctcttcccagcttgatggtagtgatgcctcttgcacaaatcaagcagccaatgacattggggaccatcaccaaacgaaccggcaaagttaaacctcctccacaaatttcacccagcaaatcgatgggcggagaattttgtgtggctgctatcttcggaacatccaggtcatggtttgcaaataatgcaggtctgaaaagagaaaaagatcagtccaaacaagttgtagttgagtccctgtacattatcagttgctatggcaccttagtggaacacatgatggagccgcgacccctcagcactgcacccaagattagtgacgacacaccactggaaatgatgacatcgcctcgagccagctggactctggttagaacccctcaatggaatgaattgcagccaccgtttaatgcaaaccaccctctgctcctcgctgcagatgcagtacagtattatcagttcctgcttgctggcctggttccccctggaagtcctgggcccattactcgacatgggtcttacgacagtttagcttctgaccatagtggacaggaagatgaagaatggctttcccaggttgaaattgtaacacacactggaccccatagacgtctgtggatgggtccacagttccagttcaaaaccatccatccctcaggccaaaccacagttatctcatccagttcatctgtgttgcagtctcatggtccgagtgacacgccacagcctcttttggattttgatacagatgatcttgatctcaacagtctcaggatccagccagtccgctctgaccccgtcagcatgccagggtcatcccgtccagtctctgatcgaaggggagtttccacagtgattgatgctgcctcaggtacctttgacaggagcgtgaccctgctggaggtgtgcgggagctggcctgagggcttcgggctgcggcacatgtcctccatggagcacacggaggagggcctccgggagcgacttgccgacgccatggccgagtcacctagccgggacgtcgtgggatccggaacagacacagcccttgacgtagcagtaaaaaccttcccccctgagagacacgtggcagtgaagtgttttgaacttcagcgagagggaagcatcgagactctgagtaacagctcaggctccaccagcggcagcataccaagaaactttgatggctaccgatctccgctgcccaccaatgagagccagcccctcagcctcttcccgactggcttcccgtaggtaccagcaacctgcttctgactggccagccccctcccctgctggaggaggggagaagccccgctctggtcctacccttcagtctctgctcttccttcatcaaccaccttccccaagcttagtgacagcagccgcccatcctacctggatggagaagagacccttctccaagcacctcagcgcacttgccctctgccacacctgtcggtggaggctgtggccaggagagactgtagaagctcggtccctgtgtatgtttgcatatgacatcctgcattggatccgcttttgtattttttaaccatacccacggtggggcgggtggggggagcctggaacagtgaccagatctgggggcctgagtggggacagagttgatcgtccacctggccattttgaccctgagtggacagtcacagcctcagctcatgtctggctgtgacacacactgcccccagcttcccttggtcagccccactccagcacggggtgaacggaggcccagagtactagggaaggaggaagggaggacatgcctcttcttcctcctttctttccccatctgttcctgggaagagtttgtctttcttatctttaagcccctttaccctggtcctgtactgatcagtgaaggaaaccgtggttactgaggccctgttgaaaagtgcacgtcttgtccaataaatcacgctgcagttggtgtccaaaaaaaaat

SEQ ID NO: 355339 - DNA, 1886 bp, Homo sapiens
ggcatttgctgtgtttttcagcaaaacttcatcccaaatcagacatcttaaggcaccaataatttgcaaagttaaacctcctccacaaatttcacccagcaaatcgatgggcggagaattttgtgtggctgctatcttcggaacatccaggtcatggtttgcaaataatgcaggtctgaaaagagaaaaagatcagtccaaacaagttgtagttgagtccctgtacattatcagttgctatggcaccttagtggaacacatgatggagccgcgacccctcagcactgcacccaagattagtgacgacacaccactggaaatgatgacatcgcctcgagccagctggactctggttagaacccctcaatggaatgaattgcagccaccgtttaatgcaaaccaccctctgctcctcgctgcagatgcagtacagtattatcagttcctgcttgctggcctggttccccctggaagtcctgggcccattactcgacatgggtcttacgacagtttagcttctgaccatagtggacaggaagatgaagaatggctttcccaggttgaaattgtaacacacactggaccccatagacgtctgtggatgggtccacagttccagttcaaaaccatccatccctcaggccaaaccacagttatctcatccagttcatctgtgttgcagtctcatggtccgagtgacacgccacagcctcttttggattttgatacagatgatcttgatctcaacagtctcaggatccagccagtccgctctgaccccgtcagcatgccagggtcatcccgtccagtctctgatcgaaggggagtttccacagtgattgatgctgcctcaggtacctttgacaggagcgtgaccctgctggaggtgtgcgggagctggcctgagggcttcgggctgcggcacatgtcctccatggagcacacggaggagggcctccgggagcgacttgccgacgccatggccgagtcacctagccgggacgtcgtgggatccggaacagaacttcagcgagagggaagcatcgagactctgagtaacagctcaggctccaccagcggcagcataccaagaaactttgatggctaccgatctccgctgcccaccaatgagagccagcccctcagcctcttcccgactggcttcccgtaggtaccagcaacctgcttctgactggccagccccctcccctgctggaggaggggagaagccccgctctggtcctacccttcagtctctgctcttccttcatcaaccaccttccccaagcttagtgacagcagccgcccatcctacctggatggagaagagacccttctccaagcacctcagcgcacttgccctctgccacacctgtcggtggaggctgtggccaggagagactgtagaagctcggtccctgtgtatgtttgcatatgacatcctgcattggatccgcttttgtattttttaaccatacccacggtggggcgggtggggggagcctggaacagtgaccagatctgggggcctgagtggggacagagttgatcgtccacctggccattttgaccctgagtggacagtcacagcctcagctcatgtctggctgtgacacacactgcccccagcttcccttggtcagccccactccagcacggggtgaacggaggcccagagtactagggaaggaggaagggaggacatgcctcttcttcctcctttctttccccatctgttcctgggaagagtttgtctttcttatctttaagcccctttaccctggtcctgtactgatcagtgaaggaaaccgtggttactgaggccctgttgaaaagtgcacgtcttgtccaataaatcacgctgcagttggtgtccaaaaaaaaat

SEQ ID NO: 355340 - DNA, 1176 bp, Homo sapiens
ccccaagaagtagtgagtgaaatgaagaagaaacttgtgagatgatttcaggtgaacatctttctaaatccttttattcatgacttaaaaccatttggtggctgttaaagaagcagagtgcttgacaggcctgcctgggagaaggtacctttgacaggagcgtgaccctgctggaggtgtgcgggagctggcctgagggcttcgggctgcggcacatgtcctccatggagcacacggaggagggcctccgggagcgacttgccgacgccatggccgagtcacctagccgggacgtcgtgggatccggaacagaacttcagcgagagggaagcatcgagactctgagtaacagctcaggctccaccagcggcagcataccaagaaactttgatggctaccgatctccgctgcccaccaatgagagccagcccctcagcctcttcccgactggcttcccgtaggtaccagcaacctgcttctgactggccagccccctcccctgctggaggaggggagaagccccgctctggtcctacccttcagtctctgctcttccttcatcaaccaccttccccaagcttagtgacagcagccgcccatcctacctggatggagaagagacccttctccaagcacctcagcgcacttgccctctgccacacctgtcggtggaggctgtggccaggagagactgtagaagctcggtccctgtgtatgtttgcatatgacatcctgcattggatccgcttttgtattttttaaccatacccacggtggggcgggtggggggagcctggaacagtgaccagatctgggggcctgagtggggacagagttgatcgtccacctggccattttgaccctgagtggacagtcacagcctcagctcatgtctggctgtgacacacactgcccccagcttcccttggtcagccccactccagcacggggtgaacggaggcccagagtactagggaaggaggaagggaggacatgcctcttcttcctcctttctttccccatctgttcctgggaagagtttgtctttcttatctttaagcccctttaccctggtcctgtactgatcagtgaaggaaaccgtggttactgaggccctgttgaaaagtgcacgtcttgtccaataaatcacgctgcagttggtgtccaaaaaaaaat

SEQ ID NO: 355341 - DNA, 1279 bp, Homo sapiens
actaaggcagattttcaaagagctgtaattgtcacagggagagcacaatgacttattgaagtttcacatgttgctctttttggaactaccagagattggaaccaattctccatccacatctctatccgagagttaagttttctcttctctggtgcttgtcaaaagtatttctcccagctaatctcattcccagttgccaaagaaaagatctcaagcataactcctcatctccaggtcacccgacaaggtacctttgacaggagcgtgaccctgctggaggtgtgcgggagctggcctgagggcttcgggctgcggcacatgtcctccatggagcacacggaggagggcctccgggagcgacttgccgacgccatggccgagtcacctagccgggacgtcgtgggatccggaacagaacttcagcgagagggaagcatcgagactctgagtaacagctcaggctccaccagcggcagcataccaagaaactttgatggctaccgatctccgctgcccaccaatgagagccagcccctcagcctcttcccgactggcttcccgtaggtaccagcaacctgcttctgactggccagccccctcccctgctggaggaggggagaagccccgctctggtcctacccttcagtctctgctcttccttcatcaaccaccttccccaagcttagtgacagcagccgcccatcctacctggatggagaagagacccttctccaagcacctcagcgcacttgccctctgccacacctgtcggtggaggctgtggccaggagagactgtagaagctcggtccctgtgtatgtttgcatatgacatcctgcattggatccgcttttgtattttttaaccatacccacggtggggcgggtggggggagcctggaacagtgaccagatctgggggcctgagtggggacagagttgatcgtccacctggccattttgaccctgagtggacagtcacagcctcagctcatgtctggctgtgacacacactgcccccagcttcccttggtcagccccactccagcacggggtgaacggaggcccagagtactagggaaggaggaagggaggacatgcctcttcttcctcctttctttccccatctgttcctgggaagagtttgtctttcttatctttaagcccctttaccctggtcctgtactgatcagtgaaggaaaccgtggttactgaggccctgttgaaaagtgcacgtcttgtccaataaatcacgctgcagttggtgtccaaaaaaaaat

SEQ ID NO: 355342 - DNA, 934 bp, Homo sapiens
aacaatgccaacagcccagcgtccgtgagcaacccaacagtaacaaagcatgcgttcgggatggaggaagaacttcagcgagagggaagcatcgagactctgagtaacagctcaggctccaccagcggcagcataccaagaaactttgatggctaccgatctccgctgcccaccaatgagagccagcccctcagcctcttcccgactggcttcccgtaggtaccagcaacctgcttctgactggccagccccctcccctgctggaggaggggagaagccccgctctggtcctacccttcagtctctgctcttccttcatcaaccaccttccccaagcttagtgacagcagccgcccatcctacctggatggagaagagacccttctccaagcacctcagcgcacttgccctctgccacacctgtcggtggaggctgtggccaggagagactgtagaagctcggtccctgtgtatgtttgcatatgacatcctgcattggatccgcttttgtattttttaaccatacccacggtggggcgggtggggggagcctggaacagtgaccagatctgggggcctgagtggggacagagttgatcgtccacctggccattttgaccctgagtggacagtcacagcctcagctcatgtctggctgtgacacacactgcccccagcttcccttggtcagccccactccagcacggggtgaacggaggcccagagtactagggaaggaggaagggaggacatgcctcttcttcctcctttctttccccatctgttcctgggaagagtttgtctttcttatctttaagcccctttaccctggtcctgtactgatcagtgaaggaaaccgtggttactgaggccctgttgaaaagtgcacgtcttgtccaataaatcacgctgcagttggtgtccaaaaaaaaat

SEQ ID NO: 355343 - DNA, 971 bp, Homo sapiens
  misc_feature (57)..(57): n is a, c, g, or t
  misc_feature (105)..(105): n is a, c, g, or t
agacggcagccgagtcctccatggagcacacggaggagggcctccgggagcgacttnccgacgtacagttgtagctgaaagggagaaatgtggcatggcttcaanaggacagcagggttgattggtcatcgagactctgagtaacagctcaggctccaccagcggcagcataccaagaaactttgatggctaccgatctccgctgcccaccaatgagagccagcccctcagcctcttcccgactggcttcccgtaggtaccagcaacctgcttctgactggccagccccctcccctgctggaggaggggagaagccccgctctggtcctacccttcagtctctgctcttccttcatcaaccaccttccccaagcttagtgacagcagccgcccatcctacctggatggagaagagacccttctccaagcacctcagcgcacttgccctctgccacacctgtcggtggaggctgtggccaggagagactgtagaagctcggtccctgtgtatgtttgcatatgacatcctgcattggatccgcttttgtattttttaaccatacccacggtggggcgggtggggggagcctggaacagtgaccagatctgggggcctgagtggggacagagttgatcgtccacctggccattttgaccctgagtggacagtcacagcctcagctcatgtctggctgtgacacacactgcccccagcttcccttggtcagccccactccagcacggggtgaacggaggcccagagtactagggaaggaggaagggaggacatgcctcttcttcctcctttctttccccatctgttcctgggaagagtttgtctttcttatctttaagcccctttaccctggtcctgtactgatcagtgaaggaaaccgtggttactgaggccctgttgaaaagtgcacgtcttgtccaataaatcacgctgcagttggtgtccaaaaaaaaat

SEQ ID NO: 355344 - DNA, 388 bp, Homo sapiens
gctctttttggaactaccagagattggaaccaattctccatccacatctctatccgagagttaagttttctcttctctggtgcttgtcaaaagtatttctcccagctaatctcattcccagttgccaaagaaaagatctcaagcataactcctcatctccaggtcacccgacaaggtaagaagagagattaaatgaatgtgcccaagtttctttcccttacagcctccagatctccagaatataccttctttagtttccacatcacactttcctacatttcttcttaatttgatgatgtcttgagagtatctcaggaaactggtatgactaccaaggggacagaggcttttgtagcgcatcaatacccctaagtctatccatccttct

SEQ ID NO: 355345 - DNA, 1138 bp, Homo sapiens
ccccatgattcaattatctccacctggtccctcccaggacacatggggattatgggaactacaagtcaagatgagatttgggtggagacacagccaaacgatatcagtacctttgacaggagcgtgaccctgctggaggtgtgcgggagctggcctgagggcttcgggctgcggcacatgtcctccatggagcacacggaggagggcctccgggagcgacttgccgacgccatggccgagtcacctagccgggacgtcgtgggatccggaacagaacttcagcgagagggaagcatcgagactctgagtaacagctcaggctccaccagcggcagcataccaagaaactttgatggctaccgatctccgctgcccaccaatgagagccagcccctcagcctcttcccgactggcttcccgtaggtaccagcaacctgcttctgactggccagccccctcccctgctggaggaggggagaagccccgctctggtcctacccttcagtctctgctcttccttcatcaaccaccttccccaagcttagtgacagcagccgcccatcctacctggatggagaagagacccttctccaagcacctcagcgcacttgccctctgccacacctgtcggtggaggctgtggccaggagagactgtagaagctcggtccctgtgtatgtttgcatatgacatcctgcattggatccgcttttgtattttttaaccatacccacggtggggcgggtggggggagcctggaacagtgaccagatctgggggcctgagtggggacagagttgatcgtccacctggccattttgaccctgagtggacagtcacagcctcagctcatgtctggctgtgacacacactgcccccagcttcccttggtcagccccactccagcacggggtgaacggaggcccagagtactagggaaggaggaagggaggacatgcctcttcttcctcctttctttccccatctgttcctgggaagagtttgtctttcttatctttaagcccctttaccctggtcctgtactgatcagtgaaggaaaccgtggttactgaggccctgttgaaaagtgcacgtcttgtccaataaatcacgctgcagttggtgtccaaaaaaaaat

SEQ ID NO: 355346 - DNA, 3006 bp, Homo sapiens
acctaagcaagcctgggcaatggcgggcgcccctcccccagcctcgctgccgccttgcagtttgatctcagactgctgtgctggcaatcagcgagactccgtgggcgtaggaccctccgagccaggtgtgggatatagtctcgtggtgcgccgttttttaagccggtctgaaaagcgcaatattcgggtgggagtgacccgattttccaggctgctatccatgtccagggccaaacatgaatcctattgctcttgggagccgctggcttgcttatgcagaaaacaagttgattcgatgtcatcagtcccgtggtggagcctgtggagacaacattcagtcttatactgccacagtcattagtgctgctaaaacattgaaaagtggcctgacaatggtagggaaagtggtgactcagctgacaggcacactgccttcaggtgtgacagaagatgatgttgccatccacagtaattcacggcggagtcctttggtcccaggcatcatcacagttattgacaccgaaaccgttggagagggccaggtgcttgtgagtgaggattctgacagtgatggcattgtggcccacttccctgcccatgagaagccagtgtgctgcatggcttttaatacaagtggaatgcttctagtcacaacagacacccttggccatgactttcatgtcttccaaattctgactcatccttggtcctcatcacaatgtgctgtccaccatctgtatactcttcacaggggagaaactgaagccaaagtacaggacatctgcttcagccatgactgtcgctgggttgtggtcagtactctccggggtacttcccacgttttccccatcaacccttatggtggccagccttgtgttcgtacacatatgtcaccacgagtagtgaatcgcatgagccgtttccagaaaagtgctggactggaagagattgaacaagaactgacgtctaagcaaggaggtcgctgtagccctgttccaggtctatcaagcagcccttctgggtcacccttgcatgggaaactgaacagccaagactcctataacaattttaccaacaacaaccctggcaaccctcggctctctcctcttcccagcttgatggtagtgatgcctcttgcacaaatcaagcagccaatgacattggggaccatcaccaaacgaaccggcaaagttaaacctcctccacaaatttcacccagcaaatcgatgggcggagaattttgtgtggctgctatcttcggaacatccaggtcatggtttgcaaataatgcaggtctgaaaagagaaaaagatcagtccaaacaagttgtagttgagtccctgtacattatcagttgctatggcaccttagtggaacacatgatggagccgcgacccctcagcactgcacccaagattagtgacgacacaccactggaaatgatgacatcgcctcgagccagctggactctggttagaacccctcaatggaatgaattgcagccaccgtttaatgcaaaccaccctctgctcctcgctgcagatgcagtacagtattatcagttcctgcttgctggcctggttccccctggaagtcctgggcccattactcgacatgggtcttacgacagtttagcttctgaccatagtggacaggaagatgaagaatggctttcccaggttgaaattgtaacacacactggaccccatagacgtctgtggatgggtccacagttccagttcaaaaccatccatccctcaggccaaaccacagttatctcatccagttcatctgtgttgcagtctcatggtccgagtgacacgccacagcctcttttggattttgatacagatgatcttgatctcaacagtctcaggatccagccagtccgctctgaccccgtcagcatgccagggtcatcccgtccagtctctgatcgaaggggagtttccacagtgattgatgctgcctcaggtacctttgacaggagcgtgaccctgctggaggtgtgcgggagctggcctgagggcttcgggctgcggcacatgtcctccatggagcacacggaggagggcctccgggagcgacttgccgacgccatggccgagtcacctagccgggacgtcgtgggatccggaacagaacttcagcgagagggaagcatcgagactctgagtaacagctcaggctccaccagcggcagcataccaagaaactttgatggctaccgatctccgctgcccaccaatgagagccagcccctcagcctcttcccgactggcttcccgtaggtaccagcaacctgcttctgactggccagccccctcccctgctggaggaggggagaagccccgctctggtcctacccttcagtctctgctcttccttcatcaaccaccttccccaagcttagtgacagcagccgcccatcctacctggatggagaagagacccttctccaagcacctcagcgcacttgccctctgccacacctgtcggtggaggctgtggccaggagagactgtagaagctcggtccctgtgtatgtttgcatatgacatcctgcattggatccgcttttgtattttttaaccatacccacggtggggcgggtggggggagcctggaacagtgaccagatctgggggcctgagtggggacagagttgatcgtccacctggccattttgaccctgagtggacagtcacagcctcagctcatgtctggctgtgacacacactgcccccagcttcccttggtcagccccactccagcacggggtgaacggaggcccagagtactagggaaggaggaagggaggacatgcctcttcttcctcctttctttccccatctgttcctgggaagagtttgtctttcttatctttaagcccctttaccctggtcctgtactgatcagtgaaggaaaccgtggttactgaggccctgttgaaaagtgcacgtcttgtccaataaatcacgctgcagttggtgtccaaaaaaaaat

SEQ ID NO: 355347 - DNA, 3592 bp, Homo sapiens
aggaagtggctgccgtcaatcactcggggagactccaaacagtgagcctagagctggagactagcgttaaccggcggggcggccggttttatgaatgaagctatggctacagattccccaagaagacccagtcgttgtactggtggagttgtggttcgcccccaggctgtcacagagcagtcctacatggaaagtgttgtgacttttctgcaggatgttgtgccacaggcttacagtggaacacctctaacagaagaaaaggagaaaatagtctgggtcagatttgaaaatgcagatttaaatgatacatcaagaaatctggaatttcatgaaatacatagtactgggagtgaaccgcctttgttgattatgattggctacagtgatggaatgcaggtctggagcatccctatcagtggcgaagcacaagagctcttctctgttcgacatggcccaattcgagcggctagaatcttgcctgctccacagtttggtgctcaaaaatgtgataactttgctgaaaaaagacccctccttggtgtttgtaagagcattggatcttctggcacaagcccaccgtactgttgtgtggatctgtattcacttcgtactggggagatggtcaagtccattcaatttaagacacctatttatgatctccattgcaataaacggatccttgtcgtagtcttgcaggagaaaattgctgcctttgatagctgtactttcacgaagaaattctttgttacaagctgctatccatgtccagggccaaacatgaatcctattgctcttgggagccgctggcttgcttatgcagaaaacaagttgattcgatgtcatcagtcccgtggtggagcctgtggagacaacattcagtcttatactgccacagtcattagtgctgctaaaacattgaaaagtggcctgacaatggtagggaaagtggtgactcagctgacaggcacactgccttcaggtgtgacagaagatgatgttgccatccacagtaattcacggcggagtcctttggtcccaggcatcatcacagttattgacaccgaaaccgttggagagggccaggtgcttgtgagtgaggattctgacagtgatggcattgtggcccacttccctgcccatgagaagccagtgtgctgcatggcttttaatacaagtggaatgcttctagtcacaacagacacccttggccatgactttcatgtcttccaaattctgactcatccttggtcctcatcacaatgtgctgtccaccatctgtatactcttcacaggggagaaactgaagccaaagtacaggacatctgcttcagccatgactgtcgctgggttgtggtcagtactctccggggtacttcccacgttttccccatcaacccttatggtggccagccttgtgttcgtacacatatgtcaccacgagtagtgaatcgcatgagccgtttccagaaaagtgctggactggaagagattgaacaagaactgacgtctaagcaaggaggtcgctgtagccctgttccaggtctatcaagcagcccttctgggtcacccttgcatgggaaactgaacagccaagactcctataacaattttaccaacaacaaccctggcaaccctcggctctctcctcttcccagcttgatggtagtgatgcctcttgcacaaatcaagcagccaatgacattggggaccatcaccaaacgaaccgggccttatctctttggagcggggtgtttttccataaaagccccatgcaaagttaaacctcctccacaaatttcacccagcaaatcgatgggcggagaattttgtgtggctgctatcttcggaacatccaggtcatggtttgcaaataatgcaggtctgaaaagagaaaaagatcagtccaaacaagttgtagttgagtccctgtacattatcagttgctatggcaccttagtggaacacatgatggagccgcgacccctcagcactgcacccaagattagtgacgacacaccactggaaatgatgacatcgcctcgagccagctggactctggttagaacccctcaatggaatgaattgcagccaccgtttaatgcaaaccaccctctgctcctcgctgcagatgcagtacagtattatcagttcctgcttgctggcctggttccccctggaagtcctgggcccattactcgacatgggtcttacgacagtttagcttctgaccatagtggacaggaagatgaagaatggctttcccaggttgaaattgtaacacacactggaccccatagacgtctgtggatgggtccacagttccagttcaaaaccatccatccctcaggccaaaccacagttatctcatccagttcatctgtgttgcagtctcatggtccgagtgacacgccacagcctcttttggattttgatacagatgatcttgatctcaacagtctcaggatccagccagtccgctctgaccccgtcagcatgccagggtcatcccgtccagtctctgatcgaaggggagtttccacagtgattgatgctgcctcaggtacctttgacaggagcgtgaccctgctggaggtgtgcgggagctggcctgagggcttcgggctgcggcacatgtcctccatggagcacacggaggagggcctccgggagcgacttgccgacgccatggccgagtcacctagccgggacgtcgtgggatccggaacagaacttcagcgagagggaagcatcgagactctgagtaacagctcaggctccaccagcggcagcataccaagaaactttgatggctaccgatctccgctgcccaccaatgagagccagcccctcagcctcttcccgactggcttcccgtaggtaccagcaacctgcttctgactggccagccccctcccctgctggaggaggggagaagccccgctctggtcctacccttcagtctctgctcttccttcatcaaccaccttccccaagcttagtgacagcagccgcccatcctacctggatggagaagagacccttctccaagcacctcagcgcacttgccctctgccacacctgtcggtggaggctgtggccaggagagactgtagaagctcggtccctgtgtatgtttgcatatgacatcctgcattggatccgcttttgtattttttaaccatacccacggtggggcgggtggggggagcctggaacagtgaccagatctgggggcctgagtggggacagagttgatcgtccacctggccattttgaccctgagtggacagtcacagcctcagctcatgtctggctgtgacacacactgcccccagcttcccttggtcagccccactccagcacggggtgaacggaggcccagagtactagggaaggaggaagggaggacatgcctcttcttcctcctttctttccccatctgttcctgggaagagtttgtctttcttatctttaagcccctttaccctggtcctgtactgatcagtgaaggaaaccgtggttactgaggccctgttgaaaagtgcacgtcttgtccaataaatcacgctgcagttggtgtccaaaaaaaaat

SEQ ID NO: 355348 - DNA, 3613 bp, Homo sapiens
aggaagtggctgccgtcaatcactcggggagactccaaacagtgagcctagagctggagactagcgttaaccggcggggcggccggttttatgaatgaagctatggctacagattccccaagaagacccagtcgttgtactggtggagttgtggttcgcccccaggctgtcacagagcagtcctacatggaaagtgttgtgacttttctgcaggatgttgtgccacaggcttacagtggaacacctctaacagaagaaaaggagaaaatagtctgggtcagatttgaaaatgcagatttaaatgatacatcaagaaatctggaatttcatgaaatacatagtactgggagtgaaccgcctttgttgattatgattggctacagtgatggaatgcaggtctggagcatccctatcagtggcgaagcacaagagctcttctctgttcgacatggcccaattcgagcggctagaatcttgcctgctccacagtttggtgctcaaaaatgtgataactttgctgaaaaaagacccctccttggtgtttgtaagagcattggatcttctggcacaagcccaccgtactgttgtgtggatctgtattcacttcgtactggggagatggtcaagtccattcaatttaagacacctatttatgatctccattgcaataaacggatccttgtcgtagtcttgcaggagaaaattgctgcctttgatagctgtactttcacgaagaaattctttgttacaagctgctatccatgtccagggccaaacatgaatcctattgctcttgggagccgctggcttgcttatgcagaaaacaagttgattcgatgtcatcagtcccgtggtggagcctgtggagacaacattcagtcttatactgccacagtcattagtgctgctaaaacattgaaaagtggcctgacaatggtagggaaagtggtgactcagctgacaggcacactgccttcaggtgtgacagaagatgatgttgccatccacagtaattcacggcggagtcctttggtcccaggcatcatcacagttattgacaccgaaaccgttggagagggccaggtgcttgtgagtgaggattctgacagtgatggcattgtggcccacttccctgcccatgagaagccagtgtgctgcatggcttttaatacaagtggaatgcttctagtcacaacagacacccttggccatgactttcatgtcttccaaattctgactcatccttggtcctcatcacaatgtgctgtccaccatctgtatactcttcacaggggagaaactgaagccaaagtacaggacatctgcttcagccatgactgtcgctgggttgtggtcagtactctccggggtacttcccacgttttccccatcaacccttatggtggccagccttgtgttcgtacacatatgtcaccacgagtagtgaatcgcatgagccgtttccagaaaagtgctggactggaagagattgaacaagaactgacgtctaagcaaggaggtcgctgtagccctgttccaggtctatcaagcagcccttctgggtcacccttgcatgggaaactgaacagccaagactcctataacaattttaccaacaacaaccctggcaaccctcggctctctcctcttcccagcttgatggtagtgatgcctcttgcacaaatcaagcagccaatgacattggggaccatcaccaaacgaaccggcaaagttaaacctcctccacaaatttcacccagcaaatcgatgggcggagaattttgtgtggctgctatcttcggaacatccaggtcatggtttgcaaataatgcaggtctgaaaagagaaaaagatcagtccaaacaagttgtagttgagtccctgtacattatcagttgctatggcaccttagtggaacacatgatggagccgcgacccctcagcactgcacccaagattagtgacgacacaccactggaaatgatgacatcgcctcgagccagctggactctggttagaacccctcaatggaatgaattgcagccaccgtttaatgcaaaccaccctctgctcctcgctgcagatgcagtacagtattatcagttcctgcttgctggcctggttccccctggaagtcctgggcccattactcgacatgggtcttacgacagtttagcttctgaccatagtggacaggaagatgaagaatggctttcccaggttgaaattgtaacacacactggaccccatagacgtctgtggatgggtccacagttccagttcaaaaccatccatccctcaggccaaaccacagttatctcatccagttcatctgtgttgcagtctcatggtccgagtgacacgccacagcctcttttggattttgatacagatgatcttgatctcaacagtctcaggatccagccagtccgctctgaccccgtcagcatgccagggtcatcccgtccagtctctgatcgaaggggagtttccacagtgattgatgctgcctcaggtacctttgacaggagcgtgaccctgctggaggtgtgcgggagctggcctgagggcttcgggctgcggcacatgtcctccatggagcacacggaggagggcctccgggagcgacttgccgacgccatggccgagtcacctagccgggacgtcgtgggatccggaacagacacagcccttgacgtagcagtaaaaaccttcccccctgagagacacgtggcagtgaagtgttttgaacttcagcgagagggaagcatcgagactctgagtaacagctcaggctccaccagcggcagcataccaagaaactttgatggctaccgatctccgctgcccaccaatgagagccagcccctcagcctcttcccgactggcttcccgtaggtaccagcaacctgcttctgactggccagccccctcccctgctggaggaggggagaagccccgctctggtcctacccttcagtctctgctcttccttcatcaaccaccttccccaagcttagtgacagcagccgcccatcctacctggatggagaagagacccttctccaagcacctcagcgcacttgccctctgccacacctgtcggtggaggctgtggccaggagagactgtagaagctcggtccctgtgtatgtttgcatatgacatcctgcattggatccgcttttgtattttttaaccatacccacggtggggcgggtggggggagcctggaacagtgaccagatctgggggcctgagtggggacagagttgatcgtccacctggccattttgaccctgagtggacagtcacagcctcagctcatgtctggctgtgacacacactgcccccagcttcccttggtcagccccactccagcacggggtgaacggaggcccagagtactagggaaggaggaagggaggacatgcctcttcttcctcctttctttccccatctgttcctgggaagagtttgtctttcttatctttaagcccctttaccctggtcctgtactgatcagtgaaggaaaccgtggttactgaggccctgttgaaaagtgcacgtcttgtccaataaatcacgctgcagttggtgtccaaaaaaaaat

SEQ ID NO: 355349 - DNA, 3826 bp, Homo sapiens
aggaagtggctgccgtcaatcactcggggagactccaaacagtgagcctagagctggagactagcgttaaccggcggggcggccggttttatgaatgaagctatggctacagattccccaagaagacccagtcgttgtactggtggagttgtggttcgcccccaggctgtcacagagcagtcctacatggaaagtgttgtgacttttctgcaggatgttgtgccacaggcttacagtggaacacctctaacagaagaaaaggagaaaatagtctgggtcagatttgaaaatgcagatttaaatgatacatcaagaaatctggaatttcatgaaatacatagtactgggagtgaaccgcctttgttgattatgattggctacagtgatggaatgcaggtctggagcatccctatcagtggcgaagcacaagagctcttctctgttcgacatggcccaattcgagcggctagaatcttgcctgctccacagtttggtgctcaaaaatgtgataactttgctgaaaaaagacccctccttggtgtttgtaagagcattggatcttctggcacaagcccaccgtactgttgtgtggatctgtattcacttcgtactggggagatggtcaagtccattcaatttaagacacctatttatgatctccattgcaataaacggatccttgtcgtagtcttgcaggagaaaattgctgcctttgatagctgtactttcacgaagaaattctttgttacaagctgctatccatgtccagggccaaacatgaatcctattgctcttgggagccgctggcttgcttatgcagaaaacaagttgattcgatgtcatcagtcccgtggtggagcctgtggagacaacattcagtcttatactgccacagtcattagtgctgctaaaacattgaaaagtggcctgacaatggtagggaaagtggtgactcagctgacaggcacactgccttcaggtgtgacagaagatgatgttgccatccacagtaattcacggcggagtcctttggtcccaggcatcatcacagttattgacaccgaaaccgttggagagggccaggtgcttgtgagtgaggattctgacagtgatggcattgtggcccacttccctgcccatgagaagccagtgtgctgcatggcttttaatacaagtggaatgcttctagtcacaacagacacccttggccatgactttcatgtcttccaaattctgactcatccttggtcctcatcacaatgtgctgtccaccatctgtatactcttcacaggggagaaactgaagccaaagtacaggacatctgcttcagccatgactgtcgctgggttgtggtcagtactctccggggtacttcccacgttttccccatcaacccttatggtggccagccttgtgttcgtacacatatgtcaccacgagtagtgaatcgcatgagccgtttccagaaaagtgctggactggaagagattgaacaagaactgacgtctaagcaaggaggtcgctgtagccctgttccaggtctatcaagcagcccttctgggtcacccttgcatgggaaactgaacagccaagactcctataacaattttaccaacaacaaccctggcaaccctcggctctctcctcttcccagcttgatggtagtgatgcctcttgcacaaatcaagcagccaatgacattggggaccatcaccaaacgaaccggcaaagttaaacctcctccacaaatttcacccagcaaatcgatgggcggagaattttgtgtggctgctatcttcggaacatccaggtcatggtttgcaaataatgcaggtctgaaaagagaaaaagatcagtccaaacaagttgtagttgagtccctgtacattatcagttgctatggcaccttagtggaacacatgatggagccgcgacccctcagcactgcacccaagattagtgacgacacaccactggaaatgatgacatcgcctcgagccagctggactctggttagaacccctcaatggaatgaattgcagccaccgtttaatgcaaaccaccctctgctcctcgctgcagatgcagtacagtattatcagttcctgcttgctggcctggttccccctggaagtcctgggcccattactcgacatgggtcttacgacagtttagcttctgaccatagtggacaggaagatgaagaatggctttcccaggttgaaattgtaacacacactggaccccatagacgtctgtggatgggtccacagttccagttcaaaaccatccatccctcaggccaaaccacagttatctcatccagttcatctgtgttgcagtctcatggtccgagtgacacgccacagcctcttttggattttgatacagatgatcttgatctcaacagtctcaggatccagccagtccgctctgaccccgtcagcatgccagggtcatcccgtccagtctctgatcgaaggggagtttccacagtgattgatgctgcctcagtggactcttccaccgcccttgagtggggaacatccaggccttcacactcacgctcagcccatcacccctctgtgcaaggtgcaaggtcctctgcccacctgaagcctcaaggcctgatggaaaccatccacagccactctaggatgagtcaacattgcatgcagccagccatggccactgggagaagagtcagacatgggccatggagctgcaggctcacctgcccccggctgagtcaggaccgagcacaggacttgacagaggaggcatcgcagcaaggtacctttgacaggagcgtgaccctgctggaggtgtgcgggagctggcctgagggcttcgggctgcggcacatgtcctccatggagcacacggaggagggcctccgggagcgacttgccgacgccatggccgagtcacctagccgggacgtcgtgggatccggaacagaacttcagcgagagggaagcatcgagactctgagtaacagctcaggctccaccagcggcagcataccaagaaactttgatggctaccgatctccgctgcccaccaatgagagccagcccctcagcctcttcccgactggcttcccgtaggtaccagcaacctgcttctgactggccagccccctcccctgctggaggaggggagaagccccgctctggtcctacccttcagtctctgctcttccttcatcaaccaccttccccaagcttagtgacagcagccgcccatcctacctggatggagaagagacccttctccaagcacctcagcgcacttgccctctgccacacctgtcggtggaggctgtggccaggagagactgtagaagctcggtccctgtgtatgtttgcatatgacatcctgcattggatccgcttttgtattttttaaccatacccacggtggggcgggtggggggagcctggaacagtgaccagatctgggggcctgagtggggacagagttgatcgtccacctggccattttgaccctgagtggacagtcacagcctcagctcatgtctggctgtgacacacactgcccccagcttcccttggtcagccccactccagcacggggtgaacggaggcccagagtactagggaaggaggaagggaggacatgcctcttcttcctcctttctttccccatctgttcctgggaagagtttgtctttcttatctttaagcccctttaccctggtcctgtactgatcagtgaaggaaaccgtggttactgaggccctgttgaaaagtgcacgtcttgtccaataaatcacgctgcagttggtgtccaaaaaaaaat

SEQ ID NO: 355350 - DNA, 1336 bp, Homo sapiens
ctgtggtattgttatagcagcagaaaatgaactaagatagcattcttcataatcttctagttccttatgagttagtatccacaaatgatggataagatacctgttcattcataagcatgttctgtgtaccccagcatggtattcatttcccgattggaccactttcctggtccgttatggaaaggtgaacaaacaaacaaaccccacatggacattcagattgaacagtgatgatccttagttggttctccatgcaggtggctgttaaagaagcagagtgcttgacaggcctgcctgggagaaggtacctttgacaggagcgtgaccctgctggaggtgtgcgggagctggcctgagggcttcgggctgcggcacatgtcctccatggagcacacggaggagggcctccgggagcgacttgccgacgccatggccgagtcacctagccgggacgtcgtgggatccggaacagaacttcagcgagagggaagcatcgagactctgagtaacagctcaggctccaccagcggcagcataccaagaaactttgatggctaccgatctccgctgcccaccaatgagagccagcccctcagcctcttcccgactggcttcccgtaggtaccagcaacctgcttctgactggccagccccctcccctgctggaggaggggagaagccccgctctggtcctacccttcagtctctgctcttccttcatcaaccaccttccccaagcttagtgacagcagccgcccatcctacctggatggagaagagacccttctccaagcacctcagcgcacttgccctctgccacacctgtcggtggaggctgtggccaggagagactgtagaagctcggtccctgtgtatgtttgcatatgacatcctgcattggatccgcttttgtattttttaaccatacccacggtggggcgggtggggggagcctggaacagtgaccagatctgggggcctgagtggggacagagttgatcgtccacctggccattttgaccctgagtggacagtcacagcctcagctcatgtctggctgtgacacacactgcccccagcttcccttggtcagccccactccagcacggggtgaacggaggcccagagtactagggaaggaggaagggaggacatgcctcttcttcctcctttctttccccatctgttcctgggaagagtttgtctttcttatctttaagcccctttaccctggtcctgtactgatcagtgaaggaaaccgtggttactgaggccctgttgaaaagtgcacgtcttgtccaataaatcacgctgcagttggtgtccaaaaaaaaat

SEQ ID NO: 355351 - DNA, 535 bp, Homo sapiens
aacttcggagctgtcgcccgggttaccgggaggcggagccgccgagctcgctgtggcccggatgttcggtgcagctgccagatccgctgatctagtgcttctcgaaaaaaaccttcaggcggcccatgggtgagtggtcgccaagatcccgggaagcgtttctggtagtcccgactactttcctacacggctggcctcgggctcggctctttgtaggcggccttcggttggcggcgcaggctcgccccttgaccccgcccgccctcgggccgggctccgcactcctgcggggttggggtggtctgtccgcaacgggctactaggggaggcgcgctgtctgcggcgaaatgccaggtctttgttgtttggtccgaaatgtctcttcagtcccttagtttaatgtcgagggaacacttgcttgagggttgacttcggaattgaaaacgcgggtgatagtgcagaaaaaacagtaaagcagaagcaagttgctgcataatttgtctactgcttcaacctcaaacgtagatttatagcg

SEQ ID NO: 355352 - DNA, 1730 bp, Homo sapiens
aacttcggagctgtcgcccgggttaccgggaggcggagccgccgagctcgctgtggcccggatgttcggtgcagctgccagatccgctgatctagtgcttctcgaaaaaaaccttcaggcggcccatggatgttactatactggcatttgtttttaaaaagctgtcgatattcaaccagcatgccttggactttattgtgggaagaccctattatttaaaaatggctcaactgaaatatatggagaatgtggggtatgcccaagaggacagagaacgaatgcacagaaatattgtcagccttgcacagaatctcctgaactttatgattggctctatcttggatttatggcaatgcttcctctggttttacattggttcttcattgaatggtactcggggaaaaagagttccagcgcacttttccaacacatcactgcattatttgaatgcagcatggcagctattatcaccttacttgtgagtgatccagttggtgttctttatattcgttcatgtcgagtattgatgctttctgactggtacacgatgctttacaacccaagtccagattacgttaccacagtacactgtactcatgaagccgtctacccactatataccattgtatttatctattacgcattctgcttggtattaatgatgctgctccgacctcttctggtgaagaagattgcatgtgggttagggaaatctgatcgatttaaaagtatttatgctgcactttacttcttcccaattttaaccgtgcttcaggcagttggtggaggccttttatattacgccttcccatacattatattagtgttatctttggttactctggctgtgtacatgtctgcttctgaaatagagaactgctatgatcttctggtcagaaagaaaagacttattgttctcttcagccactggttacttcatgcctatggaataatctccatttccagagtggataaacttgagcaagatttgccccttttggctttggtacctacaccagcccttttttacttgttcactgcaaaatttaccgaaccttcaaggatactctcagaaggagccaatggacactgagtgtagacatgtgaaatgccaaaaacctgagaagtgctcctaataaaaaagtaaatcaatcttaacagtgtatgagaactattctatcatatatgggaacaagattgtcagtatatcttaatgtttgggtttgtctttgttttgtttatggttagacttacagacttggaaaatgcaaaactctgtaatactctgttacacagggtaatattatctgctacactggaaggccgctaggaagcccttgcttctctcaacagttcagctgttctttagggcaaaatcatgtttctgtgtacctagcaatgtgttcccattttattaagaaaagctttaacacgtgtaatctgcagtccttaacagtggcgtaattgtacgtacctgttgtgtttcagtttgtttttcacctataatgaattgtaaaaacaaacatacttgtggggtctgatagcaaacatagaaatgatgtatattgttttttgttatctatttattttcatcaatacagtattttgatgtattgcaaaaatagataataatttatataacaggttttctgtttatagattggttcaagatttgtttggattattgttcctgtaaagaaaacaataataaaaagcttacctacataaaa

SEQ ID NO: 355353 - DNA, 1897 bp, Homo sapiens
gtcattgttcatgttggcattttgatgtctatattattttttaaaacatttaataattttataataatttctaatttatgatttggtaccgtgtcttgtacagtaagttgaacatcatgaatccagaacatttatctgcagttattcttatataatgttaataactaggtttttcattgaatgttagtcaactattttagtaacttagtaaaaggaatcttctaagagcattgtacaaatatagcacatacaatatagatttctttttattttacttatgccctcttttttatttctaaaagctgcacatgtaaacttaaatatttaaactgaaatgggatgtcttatagaatgatttgggggggtgttaatgttgtaaaataatatctgtacacaaaatattggttttatatattataggtatgcccaagaggacagagaacgaatgcacagaaatattgtcagccttgcacagaatctcctgaactttatgattggctctatcttggatttatggcaatgcttcctctggttttacattggttcttcattgaatggtactcggggaaaaagagttccagcgcacttttccaacacatcactgcattatttgaatgcagcatggcagctattatcaccttacttgtgagtgatccagttggtgttctttatattcgttcatgtcgagtattgatgctttctgactggtacacgatgctttacaacccaagtccagattacgttaccacagtacactgtactcatgaagccgtctacccactatataccattgtatttatctattacgcattctgcttggtattaatgatgctgctccgacctcttctggtgaagaagattgcatgtgggttagggaaatctgatcgatttaaaagtatttatgctgcactttacttcttcccaattttaaccgtgcttcaggcagttggtggaggccttttatattacgccttcccatacattatattagtgttatctttggttactctggctgtgtacatgtctgcttctgaaatagagaactgctatgatcttctggtcagaaagaaaagacttattgttctcttcagccactggttacttcatgcctatggaataatctccatttccagagtggataaacttgagcaagatttgccccttttggctttggtacctacaccagcccttttttacttgttcactgcaaaatttaccgaaccttcaaggatactctcagaaggagccaatggacactgagtgtagacatgtgaaatgccaaaaacctgagaagtgctcctaataaaaaagtaaatcaatcttaacagtgtatgagaactattctatcatatatgggaacaagattgtcagtatatcttaatgtttgggtttgtctttgttttgtttatggttagacttacagacttggaaaatgcaaaactctgtaatactctgttacacagggtaatattatctgctacactggaaggccgctaggaagcccttgcttctctcaacagttcagctgttctttagggcaaaatcatgtttctgtgtacctagcaatgtgttcccattttattaagaaaagctttaacacgtgtaatctgcagtccttaacagtggcgtaattgtacgtacctgttgtgtttcagtttgtttttcacctataatgaattgtaaaaacaaacatacttgtggggtctgatagcaaacatagaaatgatgtatattgttttttgttatctatttattttcatcaatacagtattttgatgtattgcaaaaatagataataatttatataacaggttttctgtttatagattggttcaagatttgtttggattattgttcctgtaaagaaaacaataataaaaagcttacctacataaaa

SEQ ID NO: 355354 - DNA, 1657 bp, Homo sapiens
aacttcggagctgtcgcccgggttaccgggaggcggagccgccgagctcgctgtggcccggatgttcggtgcagctgccagatccgctgatctagtgcttctcgaaaaaaaccttcaggcggcccatggctgtcgatattcaaccagcatgccttggactttattgtgggaagaccctattatttaaaaatggctcaactgaaatatatggagaatgtggggtatgcccaagaggacagagaacgaatgcacagaaatattgtcagccttgcacagaatctcctgaactttatgattggctctatcttggatttatggcaatgcttcctctggttttacattggttcttcattgaatggtactcggggaaaaagaggcagcatggcagctattatcaccttacttgtgagtgatccagttggtgttctttatattcgttcatgtcgagtattgatgctttctgactggtacacgatgctttacaacccaagtccagattacgttaccacagtacactgtactcatgaagccgtctacccactatataccattgtatttatctattacgcattctgcttggtattaatgatgctgctccgacctcttctggtgaagaagattgcatgtgggttagggaaatctgatcgatttaaaagtatttatgctgcactttacttcttcccaattttaaccgtgcttcaggcagttggtggaggccttttatattacgccttcccatacattatattagtgttatctttggttactctggctgtgtacatgtctgcttctgaaatagagaactgctatgatcttctggtcagaaagaaaagacttattgttctcttcagccactggttacttcatgcctatggaataatctccatttccagagtggataaacttgagcaagatttgccccttttggctttggtacctacaccagcccttttttacttgttcactgcaaaatttaccgaaccttcaaggatactctcagaaggagccaatggacactgagtgtagacatgtgaaatgccaaaaacctgagaagtgctcctaataaaaaagtaaatcaatcttaacagtgtatgagaactattctatcatatatgggaacaagattgtcagtatatcttaatgtttgggtttgtctttgttttgtttatggttagacttacagacttggaaaatgcaaaactctgtaatactctgttacacagggtaatattatctgctacactggaaggccgctaggaagcccttgcttctctcaacagttcagctgttctttagggcaaaatcatgtttctgtgtacctagcaatgtgttcccattttattaagaaaagctttaacacgtgtaatctgcagtccttaacagtggcgtaattgtacgtacctgttgtgtttcagtttgtttttcacctataatgaattgtaaaaacaaacatacttgtggggtctgatagcaaacatagaaatgatgtatattgttttttgttatctatttattttcatcaatacagtattttgatgtattgcaaaaatagataataatttatataacaggttttctgtttatagattggttcaagatttgtttggattattgttcctgtaaagaaaacaataataaaaagcttacctacataaaa

SEQ ID NO: 355355 - DNA, 1561 bp, Homo sapiens
aacttcggagctgtcgcccgggttaccgggaggcggagccgccgagctcgctgtggcccggatgttcggtgcagctgccagatccgctgatctagtgcttctcgaaaaaaaccttcaggcggcccatggctgtcgatattcaaccagcatgccttggactttattgtgggaagaccctattatttaaaaatggctcaactgaaatatatggagaatgtggggtatgcccaagaggacagagaacgaatgcacagaaatattgtcagccttgcacagaatctcctgaactttatgattggctctatcttggatttatggcaatgcttcctctggttttacattggttcttcattgaatggtactcggggaaaaagagttccagcgcacttttccaacacatcactgcattatttgaatgcagcatggcagctattatcaccttacttatataccattgtatttatctattacgcattctgcttggtattaatgatgctgctccgacctcttctggtgaagaagattgcatgtgggttagggaaatctgatcgatttaaaagtatttatgctgcactttacttcttcccaattttaaccgtgcttcaggcagttggtggaggccttttatattacgccttcccatacattatattagtgttatctttggttactctggctgtgtacatgtctgcttctgaaatagagaactgctatgatcttctggtcagaaagaaaagacttattgttctcttcagccactggttacttcatgcctatggaataatctccatttccagagtggataaacttgagcaagatttgccccttttggctttggtacctacaccagcccttttttacttgttcactgcaaaatttaccgaaccttcaaggatactctcagaaggagccaatggacactgagtgtagacatgtgaaatgccaaaaacctgagaagtgctcctaataaaaaagtaaatcaatcttaacagtgtatgagaactattctatcatatatgggaacaagattgtcagtatatcttaatgtttgggtttgtctttgttttgtttatggttagacttacagacttggaaaatgcaaaactctgtaatactctgttacacagggtaatattatctgctacactggaaggccgctaggaagcccttgcttctctcaacagttcagctgttctttagggcaaaatcatgtttctgtgtacctagcaatgtgttcccattttattaagaaaagctttaacacgtgtaatctgcagtccttaacagtggcgtaattgtacgtacctgttgtgtttcagtttgtttttcacctataatgaattgtaaaaacaaacatacttgtggggtctgatagcaaacatagaaatgatgtatattgttttttgttatctatttattttcatcaatacagtattttgatgtattgcaaaaatagataataatttatataacaggttttctgtttatagattggttcaagatttgtttggattattgttcctgtaaagaaaacaataataaaaagcttacctacataaaa

SEQ ID NO: 355356 - DNA, 668 bp, Homo sapiens
  misc_feature (668)..(668): n is a, c, g, or t
aacttcggagctgtcgcccgggttaccgggaggcggagccgccgagctcgctgtggcccggatgttcggtgcagctgccagatccgctgatctagtgcttctcgaaaaaaaccttcaggcggcccatggctgtcgatattcaaccagcatgccttggactttattgtgggaagaccctattatttaaaaatggctcaactgaaatatatggagaatgtggggtatgcccaagaggacagagaacgaatgcacagaaatattgtcagccttgcacagaatctcctgaactttatgattggctctatcttggatttatggcaatgcttcctctggttttacattggttcttcattgaatggtactcggggaaaaagaggcagcatggcagctattatcaccttacttgtgagtgatccagttggtgttctttatattcgttcatgtcgagtattgatgctttctgactggtacacgatgctttacaacccaagtccagattacgttaccacagtacactgtactcatgaagccgtctacccactatgtaccatcgattttatcctatcatcatcctggtcgctcttacatctgcgtgcccaacctgtcctcggcgacaaacttccatggcgatctggtaaattactgcgcctaacccaatctttcaaacn

SEQ ID NO: 355357 - DNA, 767 bp, Homo sapiens
attatattagtgttatctttggttactctggctgtgtacatgtctgcttctgaaatagaggtaggaagtctttttttcctttgttaaagactttttgataaatttgacaattcaatatcagaatagtccatatgatatgatatagtacaactaattgttttagtaatctttggctgattgatgccacttggtagcttttggcttgttaactttatgaaaagttgtgtactggactatatatttccctgggaaattagcaaaatagtgaagtagtcaggcccaactatccagcatgaaggagaaatgtcatttcacataattttcccatgtagcaaacatataattattgaaatgttgaaacttattaacagtattttgagaaaaaccataaaaatgttttatatttagaactaattttaaactttattttacaatggcaacattaatagtcatcagtaattgtgcattccatatccttctgtgttttatcacaaattttattttcctgattatggatgtttacttttaccccataatgtttgggggatttggagctaacattaatagccacattattctgatactgttactttttcacagtattcattttgtacctctaatattttaatatttcagtggaaggccactattataaagaactccttttaaaaaattgtgtatgtctttattttcagaatatttttggccaaaaaagtatcttttgacacatttgtagtcactgggtagaatagaacatcatatcataa

SEQ ID NO: 355358 - DNA, 1680 bp, Homo sapiens
aacttcggagctgtcgcccgggttaccgggaggcggagccgccgagctcgctgtggcccggatgttcggtgcagctgccagatccgctgatctagtgcttctcgaaaaaaaccttcaggcggcccatggcatgccttggactttattgtgggaagaccctattatttaaaaatggctcaactgaaatatatggagaatgtggggtatgcccaagaggacagagaacgaatgcacagaaatattgtcagccttgcacagaatctcctgaactttatgattggctctatcttggatttatggcaatgcttcctctggttttacattggttcttcattgaatggtactcggggaaaaagagttccagcgcacttttccaacacatcactgcattatttgaatgcagcatggcagctattatcaccttacttgtgagtgatccagttggtgttctttatattcgttcatgtcgagtattgatgctttctgactggtacacgatgctttacaacccaagtccagattacgttaccacagtacactgtactcatgaagccgtctacccactatataccattgtatttatctattacgcattctgcttggtattaatgatgctgctccgacctcttctggtgaagaagattgcatgtgggttagggaaatctgatcgatttaaaagtatttatgctgcactttacttcttcccaattttaaccgtgcttcaggcagttggtggaggccttttatattacgccttcccatacattatattagtgttatctttggttactctggctgtgtacatgtctgcttctgaaatagagaactgctatgatcttctggtcagaaagaaaagacttattgttctcttcagccactggttacttcatgcctatggaataatctccatttccagagtggataaacttgagcaagatttgccccttttggctttggtacctacaccagcccttttttacttgttcactgcaaaatttaccgaaccttcaaggatactctcagaaggagccaatggacactgagtgtagacatgtgaaatgccaaaaacctgagaagtgctcctaataaaaaagtaaatcaatcttaacagtgtatgagaactattctatcatatatgggaacaagattgtcagtatatcttaatgtttgggtttgtctttgttttgtttatggttagacttacagacttggaaaatgcaaaactctgtaatactctgttacacagggtaatattatctgctacactggaaggccgctaggaagcccttgcttctctcaacagttcagctgttctttagggcaaaatcatgtttctgtgtacctagcaatgtgttcccattttattaagaaaagctttaacacgtgtaatctgcagtccttaacagtggcgtaattgtacgtacctgttgtgtttcagtttgtttttcacctataatgaattgtaaaaacaaacatacttgtggggtctgatagcaaacatagaaatgatgtatattgttttttgttatctatttattttcatcaatacagtattttgatgtattgcaaaaatagataataatttatataacaggttttctgtttatagattggttcaagatttgtttggattattgttcctgtaaagaaaacaataataaaaagcttacctacataaaa

SEQ ID NO: 355359 - DNA, 1698 bp, Homo sapiens
aacttcggagctgtcgcccgggttaccgggaggcggagccgccgagctcgctgtggcccggatgttcggtgcagctgccagatccgctgatctagtgcttctcgaaaaaaaccttcaggcggcccatggctgtcgatattcaaccagcatgccttggactttattgtgggaagaccctattatttaaaaatggctcaactgaaatatatggagaatgtggggtatgcccaagaggacagagaacgaatgcacagaaatattgtcagccttgcacagaatctcctgaactttatgattggctctatcttggatttatggcaatgcttcctctggttttacattggttcttcattgaatggtactcggggaaaaagagttccagcgcacttttccaacacatcactgcattatttgaatgcagcatggcagctattatcaccttacttgtgagtgatccagttggtgttctttatattcgttcatgtcgagtattgatgctttctgactggtacacgatgctttacaacccaagtccagattacgttaccacagtacactgtactcatgaagccgtctacccactatataccattgtatttatctattacgcattctgcttggtattaatgatgctgctccgacctcttctggtgaagaagattgcatgtgggttagggaaatctgatcgatttaaaagtatttatgctgcactttacttcttcccaattttaaccgtgcttcaggcagttggtggaggccttttatattacgccttcccatacattatattagtgttatctttggttactctggctgtgtacatgtctgcttctgaaatagagaactgctatgatcttctggtcagaaagaaaagacttattgttctcttcagccactggttacttcatgcctatggaataatctccatttccagagtggataaacttgagcaagatttgccccttttggctttggtacctacaccagcccttttttacttgttcactgcaaaatttaccgaaccttcaaggatactctcagaaggagccaatggacactgagtgtagacatgtgaaatgccaaaaacctgagaagtgctcctaataaaaaagtaaatcaatcttaacagtgtatgagaactattctatcatatatgggaacaagattgtcagtatatcttaatgtttgggtttgtctttgttttgtttatggttagacttacagacttggaaaatgcaaaactctgtaatactctgttacacagggtaatattatctgctacactggaaggccgctaggaagcccttgcttctctcaacagttcagctgttctttagggcaaaatcatgtttctgtgtacctagcaatgtgttcccattttattaagaaaagctttaacacgtgtaatctgcagtccttaacagtggcgtaattgtacgtacctgttgtgtttcagtttgtttttcacctataatgaattgtaaaaacaaacatacttgtggggtctgatagcaaacatagaaatgatgtatattgttttttgttatctatttattttcatcaatacagtattttgatgtattgcaaaaatagataataatttatataacaggttttctgtttatagattggttcaagatttgtttggattattgttcctgtaaagaaaacaataataaaaagcttacctacataaaa

SEQ ID NO: 355360 - DNA, 2179 bp, Homo sapiens
aacttcggagctgtcgcccgggttaccgggaggcggagccgccgagctcgctgtggcccggatgttcggtgcagctgccagatccgctgatctagtgcttctcgaaaaaaaccttcaggcggcccatggctgtcgatattcaaccagcatgccttggactttattgtgggaagaccctattatttaaaaatggctcaactgaaatatatggagaatgtggggtatgcccaagaggacagagaacgaatgcacagaaatattgtcagccttgcacagaatctcctgaactttatgattggctctatcttggatttatggcaatgcttcctctggttttacattggttcttcattgaatggtactcggggaaaaagagttccagcgcacttttccaacacatcactgcattatttgaatgcagcatggcagctattatcaccttacttgtgagtgatccagttggtgttctttatattcgttcatgtcgagtattgatgctttctgactggtacacgatgctttacaacccaagtccagattacgttaccacagtacactgtactcatgaagccgtctacccactatataccattgtatttatctattacgcattctgcttggtattaatgatgctgctccgacctcttctggtgaagaagattgcatgtgggttagggaaatctgatcgatttaaaagtatttatgctgcactttacttcttcccaattttaaccgtgcttcaggcagttggtggaggccttttatattacgccttcccatacattatattagtgttatctttggttactctggctgtgtacatgtctgcttctgaaatagagaactgctatgatcttctggtcagaaagaaaagacttattgttctcttcagccactggttacttcatgcctatggaataatctccatttccagagtggataaacttgagcaagatttgccccttttggctttggtacctacaccagcccttttttacttgttcactgcaaaatttaccgaaccttcaaggatactctcagaaggagccaatggacactgagtgtagacatgtgaaatgccaaaaacctgagaagtgctcctaataaaaaagtaaatcaatcttaacagtgtatgagaactattctatcatatatgggaacaagattgtcagtatatcttaatgtttgggtttgtctttgttttgtttatggttagacttacagacttggaaaatgcaaaactctgtaatactctgttacacagggtaatattatctgctacactggaaggccgctaggaagcccttgcttctctcaacagttcagctgttctttagggcaaaatcatgtttctgtgtacctagcaatgtgttcccattttattaagaaaagctttaacacgtgtaatctgcagtccttaacagtggcgtaattgtacgtacctgttgtgtttcagtttgtttttcacctataatgaattgtaaaaacaaacatacttgtggggtctgatagcaaacatagaaatgatgtatattgttttttgttatctatttattttcatcaatacagtattttgatgtattgcaaaaatagataataatttatataacaggttttctgtttatagattggttcaagatttgtttggattattgttcctgtaaagaaaacaataataaaaagcttacctacataaaaaaaaaaaaaaaaaaaaaaaaaaaaaaaaaaaaaaaaaaaaaaaaaaaaaaaaaaaacaaaaaaaaaagaacgacaaagaaaacaaaaaaaaagaaaaaaaaaaaacaacgacaagaaaccgacaagcaaacaaaaaaagaacacaaagaagagaacaacagcggactactgcaccacagagcacgcggagcgacagtcacgagcgaaaacgcacatgcaagatcacgagaaagacaataacgaacacgcagccgacacgacaaaccaaggcagacgcacaccaacagccaccaggagaaagaaacgaagcaaagacgggacggccactcaccacacaagagagaaagagagggcaggagagagaagaaaccgacaatagacaaatatgccgcctcacatcccagcccaaaagacacacgccacagcactaaaaccgagaagggcacgaaaagacataaatagaagagagcaacaagacaaa

SEQ ID NO: 355361 - DNA, 2355 bp, Homo sapiens
aacttcggagctgtcgcccgggttaccgggaggcggagccgccgagctcgctgtggcccggatgttcggtgcagctgccagatccgctgatctagtgcttctcgaaaaaaaccttcaggcggcccatggctgtcgatattcaaccagcatgccttggactttattgtgggaagaccctattatttaaaaatggctcaactgaaatatatggagaatgtggggtatgcccaagaggacagagaacgaatgcacagaaatattgtcagccttgcacagaatctcctgaactttatgattggctctatcttggatttatggcaatgcttcctctggttttacattggttcttcattgaatggtactcggggaaaaagagttccagcgcacttttccaacacatcactgcattatttgaatgcagcatggcagctattatcaccttacttgtgagtgatccagttggtgttctttatattcgttcatgtcgagtattgatgctttctgactggtacacgatgctttacaacccaagtccagattacgttaccacagtacactgtactcatgaagccgtctacccactatataccattgtatttatctattacgcattctgcttggtattaatgatgctgctccgacctcttctggtgaagaagattgcatgtgggttagggaaatctgatcgatttaaaagtatttatgctgcactttacttcttcccaattttaaccgtgcttcaggcagttggtggaggccttttatattacgccttcccatacattatattagtgttatctttggttactctggctgtgtacatgtctgcttctgaaatagagaactgctatgatcttctggtcagaaagaaaagacttattgttctcttcagccactggttacttcatgcctatggaataatctccatttccagagtggataaacttgagcaagatttgccccttttggctttggtacctacaccagcccttttttacttgttcactgcaaaatttaccgaaccttcaaggatactctcagaaggagccaatggacactgagtgtagacatgtgaaatgccaaaaacctgagaagtgctcctaataaaaaagtaaatcaatcttaacagtgtatgagaactattctatcatatatgggaacaagattgtcagtatatcttaatgtttgggtttgtctttgttttgtttatggttagacttacagacttggaaaatgcaaaactctgtaatactctgttacacagggtaatattatctgctacactggaaggccgctaggaagcccttgcttctctcaacagttcagctgttctttagggcaaaatcatgtttctgtgtacctagcaatgtgttcccattttattaagaaaagctttaacacgtgtaatctgcagtccttaacagtggcgtaattgtacgtacctgttgtgtttcagtttgtttttcacctataatgaattgtaaaaacaaacatacttgtggggtctgatagcaaacatagaaatgatgtatattgttttttgttatctatttattttcatcaatacagtattttgatgtattgcaaaaatagataataatttatataacaggttttctgtttatagattggttcaagatttgtttggattattgttcctgtaaagaaaacaataataaaaagcttacctacataaaatttcaatgttttgacacttaattgttgtttggcacaatagtatggaagtaattcaaactggtaaatagtttcctctcatatctcgggtatatatacataccatattttattgatccagagatacttatttcactttgtgacatctctgaattaggatgcatcttacaactgatggcttattaggtttaatgaaatacagaagatacacagtataaaaagggttttcctgtggttggtttgtggtttgtgataggtgttctgtgatgtttatgctttgaaggccttaagactcatggttgcaaccatggaagcaaaatgaaatttttagctcttaacctaacaacctgaccatgtttatccatttttattgtttagaagtttatttactgatacttggtggaggttgtgtgaattagttaaattttaaatgtttaagacttctattaacagctgcaaaatatgaaagtaagtgcactcacttttcctgtagtagtctgtcttttgaattcacagcagttgtatccttgagttactttgttaatgtatttttctcagtacatttaaccactgggaaatgaacccttgtacgaatgtgtttcttcttctctgtaggaataaaaaataaatataaaaattttatttgtattgcacacattt

SEQ ID NO: 355362 - DNA, 1614 bp, Homo sapiens
tgaaaggagaaattcaacagtcgcttggagcctgggttttgcttactgtcgatattcaaccagcatgccttggactttattgtgggaagaccctattatttaaaaatggctcaactgaaatatatggagaatgtggggtatgcccaagaggacagagaacgaatgcacagaaatattgtcagccttgcacagaatctcctgaactttatgattggctctatcttggatttatggcaatgcttcctctggttttacattggttcttcattgaatggtactcggggaaaaagagttccagcgcacttttccaacacatcactgcattatttgaatgcagcatggcagctattatcaccttacttgtgagtgatccagttggtgttctttatattcgttcatgtcgagtattgatgctttctgactggtacacgatgctttacaacccaagtccagattacgttaccacagtacactgtactcatgaagccgtctacccactatataccattgtatttatctattacgcattctgcttggtattaatgatgctgctccgacctcttctggtgaagaagattgcatgtgggttagggaaatctgatcgatttaaaagtatttatgctgcactttacttcttcccaattttaaccgtgcttcaggcagttggtggaggccttttatattacgccttcccatacattatattagtgttatctttggttactctggctgtgtacatgtctgcttctgaaatagagaactgctatgatcttctggtcagaaagaaaagacttattgttctcttcagccactggttacttcatgcctatggaataatctccatttccagagtggataaacttgagcaagatttgccccttttggctttggtacctacaccagcccttttttacttgttcactgcaaaatttaccgaaccttcaaggatactctcagaaggagccaatggacactgagtgtagacatgtgaaatgccaaaaacctgagaagtgctcctaataaaaaagtaaatcaatcttaacagtgtatgagaactattctatcatatatgggaacaagattgtcagtatatcttaatgtttgggtttgtctttgttttgtttatggttagacttacagacttggaaaatgcaaaactctgtaatactctgttacacagggtaatattatctgctacactggaaggccgctaggaagcccttgcttctctcaacagttcagctgttctttagggcaaaatcatgtttctgtgtacctagcaatgtgttcccattttattaagaaaagctttaacacgtgtaatctgcagtccttaacagtggcgtaattgtacgtacctgttgtgtttcagtttgtttttcacctataatgaattgtaaaaacaaacatacttgtggggtctgatagcaaacatagaaatgatgtatattgttttttgttatctatttattttcatcaatacagtattttgatgtattgcaaaaatagataataatttatataacaggttttctgtttatagattggttcaagatttgtttggattattgttcctgtaaagaaaacaataataaaaagcttacctacataaaa

SEQ ID NO: 355363 - DNA, 1606 bp, Homo sapiens
aacttcggagctgtcgcccgggttaccgggaggcggagccgccgagctcgctgtggcccggatgttcggtgcagctgccagatccgctgatctagtgcttctcgaaaaaaaccttcaggcggcccatgggtatgcccaagaggacagagaacgaatgcacagaaatattgtcagccttgcacagaatctcctgaactttatgattggctctatcttggatttatggcaatgcttcctctggttttacattggttcttcattgaatggtactcggggaaaaagagttccagcgcacttttccaacacatcactgcattatttgaatgcagcatggcagctattatcaccttacttgtgagtgatccagttggtgttctttatattcgttcatgtcgagtattgatgctttctgactggtacacgatgctttacaacccaagtccagattacgttaccacagtacactgtactcatgaagccgtctacccactatataccattgtatttatctattacgcattctgcttggtattaatgatgctgctccgacctcttctggtgaagaagattgcatgtgggttagggaaatctgatcgatttaaaagtatttatgctgcactttacttcttcccaattttaaccgtgcttcaggcagttggtggaggccttttatattacgccttcccatacattatattagtgttatctttggttactctggctgtgtacatgtctgcttctgaaatagagaactgctatgatcttctggtcagaaagaaaagacttattgttctcttcagccactggttacttcatgcctatggaataatctccatttccagagtggataaacttgagcaagatttgccccttttggctttggtacctacaccagcccttttttacttgttcactgcaaaatttaccgaaccttcaaggatactctcagaaggagccaatggacactgagtgtagacatgtgaaatgccaaaaacctgagaagtgctcctaataaaaaagtaaatcaatcttaacagtgtatgagaactattctatcatatatgggaacaagattgtcagtatatcttaatgtttgggtttgtctttgttttgtttatggttagacttacagacttggaaaatgcaaaactctgtaatactctgttacacagggtaatattatctgctacactggaaggccgctaggaagcccttgcttctctcaacagttcagctgttctttagggcaaaatcatgtttctgtgtacctagcaatgtgttcccattttattaagaaaagctttaacacgtgtaatctgcagtccttaacagtggcgtaattgtacgtacctgttgtgtttcagtttgtttttcacctataatgaattgtaaaaacaaacatacttgtggggtctgatagcaaacatagaaatgatgtatattgttttttgttatctatttattttcatcaatacagtattttgatgtattgcaaaaatagataataatttatataacaggttttctgtttatagattggttcaagatttgtttggattattgttcctgtaaagaaaacaataataaaaagcttacctacataaaa

SEQ ID NO: 355364 - DNA, 1057 bp, Homo sapiens
aacttcggagctgtcgcccgggttaccgggaggcggagccgccgagctcgctgtggcccggatgttcggtgcagctgccagatccgctgatctagtgcttctcgaaaaaaaccttcaggcggcccatggctgtcgatattcaaccagcatgccttggactttattgtgggaagaccctattatttaaaaatggctcaactgaaatatatggagaatgtggggtatgcccaagaggacagagaacgaatgcacagaaatattgtcagccttgcacagaatctcctgaactttatgattggctctatcttggatttatggcaatgcttcctctggttttacattggttcttcattgaatggtactcggggaaaaagagttccagcgcacttttccaacacatcactgcattatttgaatgcagcatggcagctattatcaccttacttgtgagtgatccagttggtgttctttatattcgttcatgtcgagtattgatgctttctgactggtacacgatgctttacaacccaagtccagattacgttaccacagtacactgtactcatgaagccgtctacccactatataccattgtatttatctattacgcattctgcttggtattaatgatgctgctccgacctcttctggtgaagaagattgcatgtgggttagggaaatctgatcgatttaaaagtatttatgctgcactttacttcttcccaattttaaccgtgcttcaggcagttggtggaggccttttatatttacggctttccatacatttatatttagtgtgatcttgtggttactcctgggtgtgtaccaatgttctgttttctggagatagagaacgttattgaatctcttgggtcggaaagaaaaagatttattgtctctttaaccagggttacttaaggcctatgggaataattccattcagagggtaaattggacaaatttggcccttgtggtttggacactaacagccttttattgtgcgggaattcggactcaggtatctcaaggccgggtgggttttgtaaggaagaaggta

SEQ ID NO: 355365 - DNA, 469 bp, Homo sapiens
gcctggcccctgagagccacacctagaggagggcctagtttgaggaggtgcccagtcctgaggacacaggtcccccgcactgcacaaggacagagcctgagggcttcttcacggtccaggggcctcggataaatgtccagggttcagccttacccagggcttcatgtgagggcatccacagctcgggcaactgcctcgttcagacctggcccatgtccaggtgggcatggccaacatttcagagcactcagcttacagacctccttttgccaacagtgcctccgtttccctcctcagatcaccagtgccccactgcgtgtgagcctggggaaccaaacctcttccctgacctcagccctggggtgctattaggcatgcatgaggggcagagccctgccctggccggagcttggggtcctggcctggaacatctccctgaagcaccctctgccctggccggagctcaggg

SEQ ID NO: 355366 - DNA, 466 bp, Homo sapiens
  misc_feature (421)..(421): n is a, c, g, or t
ttctgagccaaggtcccacgccacatggccgggcacagcagtgccaagatgttccctccgggtcctcggtgttctgatcccagaaggacatgctcctcccctagcctgctgtgaagggcttatgtgttcctctacctcagaatccccttagttggactccttgggcctcaccagaaagacctctatcctttgccaactcctgactttggcaccttgcatttggtgactgtctagcacaggaggttaggtaggcagagatcctgactggtaggcctgaggccgctctgcctgtggcctgacatgctctctgtcctgctctagatcaatggcattgcactggacaacaagtctctgaatgaatgtgaatctctgctgcggagctgccaggactccctgaccctgtccctcctgaagtcccggntgacctattcacctccaaccgcatcacccgttcgggtacggagct

SEQ ID NO: 355367 - DNA, 5993 bp, Homo sapiens
gagatggaggcgctgcggcagatcaaagacacggtgacaatggatgctgggagagccaacaaggaggttgaaatccttcgaaagcagtgcaaggctctgtgccaggagctgaaggaagccctccaggaggcggatgtggccaagtgccggcgggactgggccttccaggagcgagacaagattgtagcagagcgtgacagcatccggacactgtgtgacaacctgaggcgggagcgggaccgtgcggtgagcgagctggctgaggccctgcgcagcctggatgacacccgcaagcagaagaatgatgtcagccgcgagctgaaggagctcaaggaacagatggaatcccagttggaaaaggaggcccggttccgacagctgatggcccacagctcccacgactcggccattgacacggattccatggagtgggaaacggaagttgtagagttcgagagggagacggaggatattgacttgaaggcactggggtttgatatggcagaaggtgtgaatgagccttgtttcccgggggactgtggcatatttgtcactaaagtggacaaaggaagcattgctgatggccgcttaagggtcaatgactggctgctgagaatcaacgatgtggacctcatcaacaaggacaagaagcaggccatcaaggcgctcctcaatggggagggggccatcaacatggtcgtgcggcggaggaagtccctgggtgggaaggtggtcacgccgctgcacatcaacctcagtggacagaaagacagtggcatcagtctggagaatggagtgtatgctgccgctgtgctgcctggaagccctgccgctaaagaagggtcccttgctgtgggagacaggatcgttgcgatcaatggcattgcactggacaacaagtctctgaatgaatgtgaatctctgctgcggagctgccaggactccctgaccctgtccctcctgaaggtattccctcagagctcctcgtggagtggccagaacatttttgaaaatatcaaagactctgataagatgctgagttttcgagcccatggcccggaggtccaggctcataacaaacggaacttgatacagcacaataactccacgcagacagacatcttctacacggacaggctggaagacaggaaggagccaggccccccaggaggcagcagctcctttctgcataagccattccctgggggacccttgcaggtctgcccccaggcctgtcccagtgcctctgagcgtagcctgagctccttccgctcagatgcctctggggaccgtggctttgggctggtggacgtgcgtggccggcggccactgctgccctttgagaccgaggtgggcccctgtggggttggggaggcctccctggacaaggcagactctgaaggctccaacagcggcgggacctggcccaaggccatgctcagctccacggcagtgcctgagaagctctctgtttataaaaagccaaagcaaagaaagtccatctttgaccctaacactttcaaacgcccccagacaccccccaaaatagactacctgcttccaggtcctgggcctgctcactctccccagccctccaagagggcggggcctctgacacccccaaaacctcccagaaggagcgactccattaagttccagcacaggctggagactagctccgagtcagaagccactctggtgggcagctccccatccactagtcccccgagcgccctgccccctgacgtggaccccggggagcccatgcacgcatcaccccctcgcaaggccagggtccgcattgcttccagctactaccctgaaggagatggggactcctcccacctgccggccaagaaatcctgtgatgaggacctcacctcccagaaggtggatgagctggggcagaagcgtcgccggccaaaatctgctcccagttttcggccgaagcttgctccagtagtgattcctgctcagttcctggaggaacagaagtgtgtcccggccagtggagaactctccccggagctccaggagtgggcaccttactcgcctgggcattccagccggcacagcaaccccccgctataccctagcaggccgtctgtgggcactgttccccggagtttgacccccagcaccactgtgagctccatcctgcggaaccccatctacactgtgcgcagtcacagggtcggcccctgcagctctccacctgcggcccgagatgctggcccccagggtttgcatcccagtgtccagcaccagggacgcctgagcctggacctgagccacaggacctgcagcgactactccgagatgagagccacccatgggtccaactcactgccctccagcgcccgcctgggttcttcgagtaacttgcagttcaaggcggaacgcattaaaatcccatcaacaccaagatatccgcggagtgtcgtgggctccgagagaggttcagtgtcacattctgaatgcagcactcctccacagtcacccctgaacatcgacaccctgtcctcttgtagccagtcccagacctcagcctccacattgcccagaatcgctgtcaaccccgcgtccctcggggagcggagaaaggacaggccttatgtggaggagccacgccacgtgaaggtgcagaagggctcagagccgctgggcatctccatcgtgagtggagagaagggcggcatctacgtctccaaggtgaccgtggggagcatcgctcaccaggctggcctcgagtatggggatcagttactggagttcaacggcataaacctgcggagcgccacggagcagcaggcgcggctcatcatcgggcagcagtgtgataccatcaccatcctggcccagtacaacccccacgtgcaccagctcagcagccactcccggtccagctcacacctggaccctgccggtacccactccactctccagggcagtggcaccaccaccccggagcatccatctgtcatcgacccactgatggagcaggacgaggggcctagcacccccccagccaagcagagcagctccaggattgcgggagatgccaacaagaagaccctggagccacgcgttgtcttcatcaaaaagtcccagctggagcttggggtgcacttgtgtggtgggaacctgcatggggtgtttgtggccgaggtggaggatgacagtcctgccaagggtcctgacggcctcgtgccaggggacctcatcctggagtatggcagcctggacgtgcggaacaagacagtggaggaagtctatgtggagatgctgaagcccagggatggcgtccgcctgaaggtgcagtaccgccctgaggagttcacgaaggccaagggcctgcctggtgacagcttctacatcagggccctgtacgaccggctggcagatgtggagcaagagttgagctttaagaaggacgacatcctctacgtggatgacaccttaccccagggcacgttcgggtcctggatggcttggcagctggacgagaatgcccagaagatccagcgcgggcagattcccagcaaatatgtgatggaccaagaattctccaggaggctcagcatgtctgaagtcaaagatgacaatagcgccacaaagacgctgtcagcggctgcacgccggtccttttttcggaggaaacacaagcacaaacgcagcgggtccaaggacgggaaagacctgctcgccttggatgccttttccagtgactccattccactctttgaagattcggtgagcctggcctatcagcgggtccagaaggtggactgcaccgctctgaggcctgtcctgattctggggcctttgctggacgtggtgaaggagatgctggtgaatgaggctcctggcaagttctgcagatgtccccttgaggtgatgaaggcctcccagcaggccattgagcggggtgtcaaagattgcctgtttgtcgactataagcggagaagcggccatttcgatgtgaccactgtggcgtcaataaaggagatcacagaaaagaaccgacactgcctcctggacattgctccgcacgctattgagcggctccaccacatgcacatctaccccattgtcatcttcatccactacaagagcgccaagcacatcaaggagcagagagaccccatctacctgagggacaaggtgactcagaggcattccaaagagcagtttgaggcggcgcagaagcttgagcaggagtacagcaggtacttcacaggggtcatccagggaggagccctgtcaagcatttgcactcagatcttggcaatggtcaatcaagaacaaaataaagtcctgtggattccagcctgcccgctctaggagaatgctgtgctgtggatgactgcagctggccgcctgaggggacgccagactcagctcttttctagcgactgaaagtagaagtctgtccgtctatgaacatgcgggggaaggatccggaaccaggacccagaagcacctcctttgtagacagagggccacggctgcgtgcgatccaggcccaggcccacacactctgcccgtgtcacacgtgtgctttaacacaaaacagataacactaaagacgggttcagcacccacctttctttagccagctgatcagagatgctgcaaagagaacctttcggatcactcgtttacaagccttttctaagtatttggtggtttatgtttacttgaacggctccatgttgccggtgcccagcccctgtcccctctgtcaaccccctgtcgctttggtgttggtttcgttcccgtcttcagcaaaacgaccttggaacctcaatgggggctgctttgctttgggaggttcttgttggtgggaccagagctttgacaaacctcctgctccttggtggcacctctcctggaaggacgtcacaactccaggtgctcagactgcctgtggcagcagaaccagtgcctttggcattttcctcccacaatggggaaggtgactttggcattcttacaaactcgtctctcggcctttctctcctgccttccacagcctctcgtttctcctccatctgtgcttattacttgaggactgtgtctgctccgtgagagctgcgtgggcagggctgcagtggggtccaggtggtgttcagctgtgctgatgcctgccattgggtcctccttaggctctgtaagtcgtgacagccttcatcagtgcaatgtttgcagggtaattcttaaactttttagagggtggcaggtacatcagttctttttgatatgaaaacattcatgtttcagacattgaattgagagcttttaggggaagcataatggttattgtcactatcaacagtctaaaaagaaaaactgaggtctttttaatcttgattacagcactcacggcatgcaccctactcagtgtgggtgtcttcgtttgggggcttttttttttttggcacttctgaggctagatatgtctggctgaagatttgatgtggttcctccttaagctatgcgtcctgttaataataggtactgtactgggctctgtgtaagtgtcgttggggtaggacctatattttaatactgttcctaacatttcattttactagcgagaaatctttgatttcattttattctttgtaattctagacactagattgtagtttagccataactgatgttttttaaaaagggatatattttcttgcacagttgttcaaaaaagagacaagtttcagtcctcaatgctgtcctttgttttacaggtacaagttttctagctcagacaaactatgaaaaactgtagactattctcaaggtattaactcgcagaccctctgggggtaggggctgttttctaagttacaggcagagtgggactgagatggtacagtgtgcacagacaggtactgagctgacagactgggattttctgtactaaaatgttactttgtatcaaaagttaaacaggctttagtacaacaaataaaggtcaatttctgtaa

SEQ ID NO: 355368 - DNA, 4074 bp, Homo sapiens
tagcagacactcttgcccttgcatctgcaggaacagaagtgtgtcccggccagtggagaactctccccggagctccaggagtgggcaccttactcgcctgggcattccagccggcacagcaaccccccgctataccctagcaggccgtctgtgggcactgttccccggagtttgacccccagcaccactgtgagctccatcctgcggaaccccatctacactgtgcgcagtcacagggtcggcccctgcagctctccacctgcggcccgagatgctggcccccagggtttgcatcccagtgtccagcaccagggacgcctgagcctggacctgagccacaggacctgcagcgactactccgagatgagagccacccatgggtccaactcactgccctccagcgcccgcctgggttcttcgagtaacttgcagttcaaggcggaacgcattaaaatcccatcaacaccaagatatccgcggagtgtcgtgggctccgagagaggttcagtgtcacattctgaatgcagcactcctccacagtcacccctgaacatcgacaccctgtcctcttgtagccagtcccagacctcagcctccacattgcccagaatcgctgtcaaccccgcgtccctcggggagcggagaaaggacaggccttatgtggaggagccacgccacgtgaaggtgcagaagggctcagagccgctgggcatctccatcgtgagtggagagaagggcggcatctacgtctccaaggtgaccgtggggagcatcgctcaccaggctggcctcgagtatggggatcagttactggagttcaacggcataaacctgcggagcgccacggagcagcaggcgcggctcatcatcgggcagcagtgtgataccatcaccatcctggcccagtacaacccccacgtgcaccagctcagcagccactcccggtccagctcacacctggaccctgccggtacccactccactctccagggcagtggcaccaccaccccggagcatccatctgtcatcgacccactgatggagcaggacgaggggcctagcacccccccagccaagcagagcagctccaggattgcgggagatgccaacaagaagaccctggagccacgcgttgtcttcatcaaaaagtcccagctggagcttggggtgcacttgtgtggtgggaacctgcatggggtgtttgtggccgaggtggaggatgacagtcctgccaagggtcctgacggcctcgtgccaggggacctcatcctggagtatggcagcctggacgtgcggaacaagacagtggaggaagtctatgtggagatgctgaagcccagggatggcgtccgcctgaaggtgcagtaccgccctgaggagttcacgaaggccaagggcctgcctggtgacagcttctacatcagggccctgtacgaccggctggcagatgtggagcaagagttgagctttaagaaggacgacatcctctacgtggatgacaccttaccccagggcacgttcgggtcctggatggcttggcagctggacgagaatgcccagaagatccagcgcgggcagattcccagcaaatatgtgatggaccaagaattctccaggaggctcagcatgtctgaagtcaaagatgacaatagcgccacaaagacgctgtcagcggctgcacgccggtccttttttcggaggaaacacaagcacaaacgcagcgggtccaaggacgggaaagacctgctcgccttggatgccttttccagtgactccattccactctttgaagattcggtgagcctggcctatcagcgggtccagaaggtggactgcaccgctctgaggcctgtcctgattctggggcctttgctggacgtggtgaaggagatgctggtgaatgaggctcctggcaagttctgcagatgtccccttgaggtgatgaaggcctcccagcaggccattgagcggggtgtcaaagattgcctgtttgtcgactataagcggagaagcggccatttcgatgtgaccactgtggcgtcaataaaggagatcacagaaaagaaccgacactgcctcctggacattgctccgcacgctattgagcggctccaccacatgcacatctaccccattgtcatcttcatccactacaagagcgccaagcacatcaaggagcagagagaccccatctacctgagggacaaggtgactcagaggcattccaaagagcagtttgaggcggcgcagaagcttgagcaggagtacagcaggtacttcacaggggtcatccagggaggagccctgtcaagcatttgcactcagatcttggcaatggtcaatcaagaacaaaataaagtcctgtggattccagcctgcccgctctaggagaatgctgtgctgtggatgactgcagctggccgcctgaggggacgccagactcagctcttttctagcgactgaaagtagaagtctgtccgtctatgaacatgcgggggaaggatccggaaccaggacccagaagcacctcctttgtagacagagggccacggctgcgtgcgatccaggcccaggcccacacactctgcccgtgtcacacgtgtgctttaacacaaaacagataacactaaagacgggttcagcacccacctttctttagccagctgatcagagatgctgcaaagagaacctttcggatcactcgtttacaagccttttctaagtatttggtggtttatgtttacttgaacggctccatgttgccggtgcccagcccctgtcccctctgtcaaccccctgtcgctttggtgttggtttcgttcccgtcttcagcaaaacgaccttggaacctcaatgggggctgctttgctttgggaggttcttgttggtgggaccagagctttgacaaacctcctgctccttggtggcacctctcctggaaggacgtcacaactccaggtgctcagactgcctgtggcagcagaaccagtgcctttggcattttcctcccacaatggggaaggtgactttggcattcttacaaactcgtctctcggcctttctctcctgccttccacagcctctcgtttctcctccatctgtgcttattacttgaggactgtgtctgctccgtgagagctgcgtgggcagggctgcagtggggtccaggtggtgttcagctgtgctgatgcctgccattgggtcctccttaggctctgtaagtcgtgacagccttcatcagtgcaatgtttgcagggtaattcttaaactttttagagggtggcaggtacatcagttctttttgatatgaaaacattcatgtttcagacattgaattgagagcttttaggggaagcataatggttattgtcactatcaacagtctaaaaagaaaaactgaggtctttttaatcttgattacagcactcacggcatgcaccctactcagtgtgggtgtcttcgtttgggggcttttttttttttggcacttctgaggctagatatgtctggctgaagatttgatgtggttcctccttaagctatgcgtcctgttaataataggtactgtactgggctctgtgtaagtgtcgttggggtaggacctatattttaatactgttcctaacatttcattttactagcgagaaatctttgatttcattttattctttgtaattctagacactagattgtagtttagccataactgatgttttttaaaaagggatatattttcttgcacagttgttcaaaaaagagacaagtttcagtcctcaatgctgtcctttgttttacaggtacaagttttctagctcagacaaactatgaaaaactgtagactattctcaaggtattaactcgcagaccctctgggggtaggggctgttttctaagttacaggcagagtgggactgagatggtacagtgtgcacagacaggtactgagctgacagactgggattttctgtactaaaatgttactttgtatcaaaagttaaacaggctttagtacaacaaataaaggtcaatttctgtaaaaaaaaaaaacaaatttttaaaccaaaacaaaaaagg

SEQ ID NO: 355369 - DNA, 4514 bp, Homo sapiens
  misc_feature (4050)..(4050): n is a, c, g, or t
tagcagacactcttgcccttgcatctgcaggaacagaagtgtgtcccggccagtggagaactctccccggagctccaggagtgggcaccttactcgcctgggcattccagccggcacagcaaccccccgctataccctagcaggccgtctgtgggcactgttccccggagtttgacccccagcaccactgtgagctccatcctgcggaaccccatctacactgtgcgcagtcacagggtcggcccctgcagctctccacctgcggcccgagatgctggcccccagggtttgcatcccagtgtccagcaccagggacgcctgagcctggacctgagccacaggacctgcagcgactactccgagatgagagccacccatgggtccaactcactgccctccagcgcccgcctgggttcttcgagtaacttgcagttcaaggcggaacgcattaaaatcccatcaacaccaagatatccgcggagtgtcgtgggctccgagagaggttcagtgtcacattctgaatgcagcactcctccacagtcacccctgaacatcgacaccctgtcctcttgtagccagtcccagacctcagcctccacattgcccagaatcgctgtcaaccccgcgtccctcggggagcggagaaaggacaggccttatgtggaggagccacgccacgtgaaggtgcagaagggctcagagccgctgggcatctccatcgtgagtggagagaagggcggcatctacgtctccaaggtgaccgtggggagcatcgctcaccaggctggcctcgagtatggggatcagttactggagttcaacggcataaacctgcggagcgccacggagcagcaggcgcggctcatcatcgggcagcagtgtgataccatcaccatcctggcccagtacaacccccacgtgcaccagctcagcagccactcccggtccagctcacacctggaccctgccggtacccactccactctccagggcagtggcaccaccaccccggagcatccatctgtcatcgacccactgatggagcaggacgaggggcctagcacccccccagccaagcagagcagctccaggattgcgggagatgccaacaagaagaccctggagccacgcgttgtcttcatcaaaaagtcccagctggagcttggggtgcacttgtgtggtgggaacctgcatggggtgtttgtggccgaggtggaggatgacagtcctgccaagggtcctgacggcctcgtgccaggggacctcatcctggagtatggcagcctggacgtgcggaacaagacagtggaggaagtctatgtggagatgctgaagcccagggatggcgtccgcctgaaggtgcagtaccgccctgaggagttcacgaaggccaagggcctgcctggtgacagcttctacatcagggccctgtacgaccggctggcagatgtggagcaagagttgagctttaagaaggacgacatcctctacgtggatgacaccttaccccagggcacgttcgggtcctggatggcttggcagctggacgagaatgcccagaagatccagcgcgggcagattcccagcaaatatgtgatggaccaagaattctccaggaggctcagcatgtctgaagtcaaagatgacaatagcgccacaaagacgctgtcagcggctgcacgccggtccttttttcggaggaaacacaagcacaaacgcagcgggtccaaggacgggaaagacctgctcgccttggatgccttttccagtgactccattccactctttgaagattcggtgagcctggcctatcagcgggtccagaaggtggactgcaccgctctgaggcctgtcctgattctggggcctttgctggacgtggtgaaggagatgctggtgaatgaggctcctggcaagttctgcagatgtccccttgaggtgatgaaggcctcccagcaggccattgagcggggtgtcaaagattgcctgtttgtcgactataagcggagaagcggccatttcgatgtgaccactgtggcgtcaataaaggagatcacagaaaagaaccgacactgcctcctggacattgctccgcacgctattgagcggctccaccacatgcacatctaccccattgtcatcttcatccactacaagagcgccaagcacatcaaggagcagagagaccccatctacctgagggacaaggtgactcagaggcattccaaagagcagtttgaggcggcgcagaagcttgagcaggagtacagcaggtacttcacaggggtcatccagggaggagccctgtcaagcatttgcactcagatcttggcaatggtcaatcaagaacaaaataaagtcctgtggattccagcctgcccgctctaggagaatgctgtgctgtggatgactgcagctggccgcctgaggggacgccagactcagctcttttctagcgactgaaagtagaagtctgtccgtctatgaacatgcgggggaaggatccggaaccaggacccagaagcacctcctttgtagacagagggccacggctgcgtgcgatccaggcccaggcccacacactctgcccgtgtcacacgtgtgctttaacacaaaacagataacactaaagacgggttcagcacccacctttctttagccagctgatcagagatgctgcaaagagaacctttcggatcactcgtttacaagccttttctaagtatttggtggtttatgtttacttgaacggctccatgttgccggtgcccagcccctgtcccctctgtcaaccccctgtcgctttggtgttggtttcgttcccgtcttcagcaaaacgaccttggaacctcaatgggggctgctttgctttgggaggttcttgttggtgggaccagagctttgacaaacctcctgctccttggtggcacctctcctggaaggacgtcacaactccaggtgctcagactgcctgtggcagcagaaccagtgcctttggcattttcctcccacaatggggaaggtgactttggcattcttacaaactcgtctctcggcctttctctcctgccttccacagcctctcgtttctcctccatctgtgcttattacttgaggactgtgtctgctccgtgagagctgcgtgggcagggctgcagtggggtccaggtggtgttcagctgtgctgatgcctgccattgggtcctccttaggctctgtaagtcgtgacagccttcatcagtgcaatgtttgcagggtaattcttaaactttttagagggtggcaggtacatcagttctttttgatatgaaaacattcatgtttcagacattgaattgagagcttttaggggaagcataatggttattgtcactatcaacagtctaaaaagaaaaactgaggtctttttaatcttgattacagcactcacggcatgcaccctactcagtgtgggtgtcttcgtttgggggcttttttttttttggcacttctgaggctagatatgtctggctgaagatttgatgtggttcctccttaagctatgcgtcctgttaataataggtactgtactgggctctgtgtaagtgtcgttggggtaggacctatattttaatactgttcctaacatttcattttactagcgagaaatctttgatttcattttattctttgtaattctagacactagattgtagtttagccataactgatgttttttaaaaagggatatattttcttgcacagttgttcaaaaaagagacaagtttcagtcctcaatgctgtcctttgttttacaggtacaagttttctagctcagacaaactatgaaaaactgtagactattctcaaggtattaactcgcagaccctctgggggtaggggctgttttctaagttacaggcagagtgggactgagatggtacagtgtgcacagacaggtactgagctgacagactgggattttctgtactaaaatgttactttgtatcaaaagttaaacaggctttagtacaacaaataaaggtcaatttctgtaaaaaaaaaaaaaanaaaaaaaaaaaaaaaaaaaaaaaaaaaaaaaaaaaaaaaaagaacacaacaagaaccgaaaaaaaacaaacagcaaagcaccagaaaaggacgacagggaagaccacgacaacacagcaacacggcggcgcctcaaacagacacccgcacctcctctgccacccacgccatgcgcctgagcacatgaactaccaaacacccgaatcacacaaaaaaaccatgcgcacgcggtgcacccaacgggcgcagagtggcccccccatcaggcgccgggcacaccatccaaggccaacgcacaacacccgcgggacacgccaccacaagcaaagcaacacacagaagagagagaaacgcaggcgcccgcgaatacgaacagcaccacggccaacatgagcagccacaggacaacaccagcgccaaaatacactggcagatcaaaccaaacatcacaacccaccgcgaac

SEQ ID NO: 355370 - DNA, 4973 bp, Homo sapiens
gagatggaggcgctgcggcagatcaaagacacggtgacaatggatgctgggagagccaacaaggaggttgaaatccttcgaaagcagtgcaaggctctgtgccaggagctgaaggaagccctccaggaggcggatgtggccaagtgccggcgggactgggccttccaggagcgagacaagattgtagcagagcgtgacagcatccggacactgtgtgacaacctgaggcgggagcgggaccgtgcggtgagcgagctggctgaggccctgcgcagcctggatgacacccgcaagcagaagaatgatgtcagccgcgagctgaaggagctcaaggaacagatggaatcccagttggaaaaggaggcccggttccgacagctgatggcccacagctcccacgactcggccattgacacggattccatggagtgggaaacggaagttgtagagttcgagagggagacggaggatattgacttgaaggcactggggtttgatatggcagaaggtgtgaatgagccttgtttcccgggggactgtggcatatttgtcactaaagtggacaaaggaagcattgctgatggccgcttaagggtcaatgactggctgctgagaatcaacgatgtggacctcatcaacaaggacaagaagcaggccatcaaggcgctcctcaatggggagggggccatcaacatggtcgtgcggcggaggaagtccctgggtgggaaggtggtcacgccgctgcacatcaacctcagtggacagaaagacagtggcatcagtctggagaatggagtgtatgctgccgctgtgctgcctggaagccctgccgctaaagaagggtcccttgctgtgggagacaggatcgttgcgatcaatggcattgcactggacaacaagtctctgaatgaatgtgaatctctgctgcggagctgccaggactccctgaccctgtccctcctgaaggaacagaagtgtgtcccggccagtggagaactctccccggagctccaggagtgggcaccttactcgcctgggcattccagccggcacagcaaccccccgctataccctagcaggccgtctgtgggcactgttccccggagtttgacccccagcaccactgtgagctccatcctgcggaaccccatctacactgtgcgcagtcacagggtcggcccctgcagctctccacctgcggcccgagatgctggcccccagggtttgcatcccagtgtccagcaccagggacgcctgagcctggacctgagccacaggacctgcagcgactactccgagatgagagccacccatgggtccaactcactgccctccagcgcccgcctgggttcttcgagtaacttgcagttcaaggcggaacgcattaaaatcccatcaacaccaagatatccgcggagtgtcgtgggctccgagagaggttcagtgtcacattctgaatgcagcactcctccacagtcacccctgaacatcgacaccctgtcctcttgtagccagtcccagacctcagcctccacattgcccagaatcgctgtcaaccccgcgtccctcggggagcggagaaaggacaggccttatgtggaggagccacgccacgtgaaggtgcagaagggctcagagccgctgggcatctccatcgtgagtggagagaagggcggcatctacgtctccaaggtgaccgtggggagcatcgctcaccaggctggcctcgagtatggggatcagttactggagttcaacggcataaacctgcggagcgccacggagcagcaggcgcggctcatcatcgggcagcagtgtgataccatcaccatcctggcccagtacaacccccacgtgcaccagctcagcagccactcccggtccagctcacacctggaccctgccggtacccactccactctccagggcagtggcaccaccaccccggagcatccatctgtcatcgacccactgatggagcaggacgaggggcctagcacccccccagccaagcagagcagctccaggattgcgggagatgccaacaagaagaccctggagccacgcgttgtcttcatcaaaaagtcccagctggagcttggggtgcacttgtgtggtgggaacctgcatggggtgtttgtggccgaggtggaggatgacagtcctgccaagggtcctgacggcctcgtgccaggggacctcatcctggagtatggcagcctggacgtgcggaacaagacagtggaggaagtctatgtggagatgctgaagcccagggatggcgtccgcctgaaggtgcagtaccgccctgaggagttcacgaaggccaagggcctgcctggtgacagcttctacatcagggccctgtacgaccggctggcagatgtggagcaagagttgagctttaagaaggacgacatcctctacgtggatgacaccttaccccagggcacgttcgggtcctggatggcttggcagctggacgagaatgcccagaagatccagcgcgggcagattcccagcaaatatgtgatggaccaagaattctccaggaggctcagcatgtctgaagtcaaagatgacaatagcgccacaaagacgctgtcagcggctgcacgccggtccttttttcggaggaaacacaagcacaaacgcagcgggtccaaggacgggaaagacctgctcgccttggatgccttttccagtgactccattccactctttgaagattcggtgagcctggcctatcagcgggtccagaaggtggactgcaccgctctgaggcctgtcctgattctggggcctttgctggacgtggtgaaggagatgctggtgaatgaggctcctggcaagttctgcagatgtccccttgaggtgatgaaggcctcccagcaggccattgagcggggtgtcaaagattgcctgtttgtcgactataagcggagaagcggccatttcgatgtgaccactgtggcgtcaataaaggagatcacagaaaagaaccgacactgcctcctggacattgctccgcacgctattgagcggctccaccacatgcacatctaccccattgtcatcttcatccactacaagagcgccaagcacatcaaggagcagagagaccccatctacctgagggacaaggtgactcagaggcattccaaagagcagtttgaggcggcgcagaagcttgagcaggagtacagcaggtacttcacaggggtcatccagggaggagccctgtcaagcatttgcactcagatcttggcaatggtcaatcaagaacaaaataaagtcctgtggattccagcctgcccgctctaggagaatgctgtgctgtggatgactgcagctggccgcctgaggggacgccagactcagctcttttctagcgactgaaagtagaagtctgtccgtctatgaacatgcgggggaaggatccggaaccaggacccagaagcacctcctttgtagacagagggccacggctgcgtgcgatccaggcccaggcccacacactctgcccgtgtcacacgtgtgctttaacacaaaacagataacactaaagacgggttcagcacccacctttctttagccagctgatcagagatgctgcaaagagaacctttcggatcactcgtttacaagccttttctaagtatttggtggtttatgtttacttgaacggctccatgttgccggtgcccagcccctgtcccctctgtcaaccccctgtcgctttggtgttggtttcgttcccgtcttcagcaaaacgaccttggaacctcaatgggggctgctttgctttgggaggttcttgttggtgggaccagagctttgacaaacctcctgctccttggtggcacctctcctggaaggacgtcacaactccaggtgctcagactgcctgtggcagcagaaccagtgcctttggcattttcctcccacaatggggaaggtgactttggcattcttacaaactcgtctctcggcctttctctcctgccttccacagcctctcgtttctcctccatctgtgcttattacttgaggactgtgtctgctccgtgagagctgcgtgggcagggctgcagtggggtccaggtggtgttcagctgtgctgatgcctgccattgggtcctccttaggctctgtaagtcgtgacagccttcatcagtgcaatgtttgcagggtaattcttaaactttttagagggtggcaggtacatcagttctttttgatatgaaaacattcatgtttcagacattgaattgagagcttttaggggaagcataatggttattgtcactatcaacagtctaaaaagaaaaactgaggtctttttaatcttgattacagcactcacggcatgcaccctactcagtgtgggtgtcttcgtttgggggcttttttttttttggcacttctgaggctagatatgtctggctgaagatttgatgtggttcctccttaagctatgcgtcctgttaataataggtactgtactgggctctgtgtaagtgtcgttggggtaggacctatattttaatactgttcctaacatttcattttactagcgagaaatctttgatttcattttattctttgtaattctagacactagattgtagtttagccataactgatgttttttaaaaagggatatattttcttgcacagttgttcaaaaaagagacaagtttcagtcctcaatgctgtcctttgttttacaggtacaagttttctagctcagacaaactatgaaaaactgtagactattctcaaggtattaactcgcagaccctctgggggtaggggctgttttctaagttacaggcagagtgggactgagatggtacagtgtgcacagacaggtactgagctgacagactgggattttctgtactaaaatgttactttgtatcaaaagttaaacaggctttagtacaacaaataaaggtcaatttctgtaa

SEQ ID NO: 355371 - DNA, 2933 bp, Homo sapiens
  misc_feature (94)..(94): n is a, c, g, or t
  misc_feature (107)..(107): n is a, c, g, or t
acgcaacagaaatccaatctagagctgctccgcatctccctgctgctcatcgagtcgtggctggagcccgtgcggttcctcaggagtatgttcnccaacaacctgtntatgacacctcggacagcgatgactatcacctcctaaaggacctagaggaaggcatccaaacgctatggcagcctggacgtgcggaacaagacagtggaggaagtctatgtggagatgctgaagcccagggatggcgtccgcctgaaggtgcagtaccgccctgaggagttcacgaaggccaagggcctgcctggtgacagcttctacatcagggccctgtacgaccggctggcagatgtggagcaagagttgagctttaagaaggacgacatcctctacgtggatgacaccttaccccagggcacgttcgggtcctggatggcttggcagctggacgagaatgcccagaagatccagcgcgggcagattcccagcaaatatgtgatggaccaagaattctccaggaggctcagcatgtctgaagtcaaagatgacaatagcgccacaaagacgctgtcagcggctgcacgccggtccttttttcggaggaaacacaagcacaaacgcagcgggtccaaggacgggaaagacctgctcgccttggatgccttttccagtgactccattccactctttgaagattcggtgagcctggcctatcagcgggtccagaaggtggactgcaccgctctgaggcctgtcctgattctggggcctttgctggacgtggtgaaggagatgctggtgaatgaggctcctggcaagttctgcagatgtccccttgaggtgatgaaggcctcccagcaggccattgagcggggtgtcaaagattgcctgtttgtcgactataagcggagaagcggccatttcgatgtgaccactgtggcgtcaataaaggagatcacagaaaagaaccgacactgcctcctggacattgctccgcacgctattgagcggctccaccacatgcacatctaccccattgtcatcttcatccactacaagagcgccaagcacatcaaggagcagagagaccccatctacctgagggacaaggtgactcagaggcattccaaagagcagtttgaggcggcgcagaagcttgagcaggagtacagcaggtacttcacaggggtcatccagggaggagccctgtcaagcatttgcactcagatcttggcaatggtcaatcaagaacaaaataaagtcctgtggattccagcctgcccgctctaggagaatgctgtgctgtggatgactgcagctggccgcctgaggggacgccagactcagctcttttctagcgactgaaagtagaagtctgtccgtctatgaacatgcgggggaaggatccggaaccaggacccagaagcacctcctttgtagacagagggccacggctgcgtgcgatccaggcccaggcccacacactctgcccgtgtcacacgtgtgctttaacacaaaacagataacactaaagacgggttcagcacccacctttctttagccagctgatcagagatgctgcaaagagaacctttcggatcactcgtttacaagccttttctaagtatttggtggtttatgtttacttgaacggctccatgttgccggtgcccagcccctgtcccctctgtcaaccccctgtcgctttggtgttggtttcgttcccgtcttcagcaaaacgaccttggaacctcaatgggggctgctttgctttgggaggttcttgttggtgggaccagagctttgacaaacctcctgctccttggtggcacctctcctggaaggacgtcacaactccaggtgctcagactgcctgtggcagcagaaccagtgcctttggcattttcctcccacaatggggaaggtgactttggcattcttacaaactcgtctctcggcctttctctcctgccttccacagcctctcgtttctcctccatctgtgcttattacttgaggactgtgtctgctccgtgagagctgcgtgggcagggctgcagtggggtccaggtggtgttcagctgtgctgatgcctgccattgggtcctccttaggctctgtaagtcgtgacagccttcatcagtgcaatgtttgcagggtaattcttaaactttttagagggtggcaggtacatcagttctttttgatatgaaaacattcatgtttcagacattgaattgagagcttttaggggaagcataatggttattgtcactatcaacagtctaaaaagaaaaactgaggtctttttaatcttgattacagcactcacggcatgcaccctactcagtgtgggtgtcttcgtttgggggcttttttttttttggcacttctgaggctagatatgtctggctgaagatttgatgtggttcctccttaagctatgcgtcctgttaataataggtactgtactgggctctgtgtaagtgtcgttggggtaggacctatattttaatactgttcctaacatttcattttactagcgagaaatctttgatttcattttattctttgtaattctagacactagattgtagtttagccataactgatgttttttaaaaagggatatattttcttgcacagttgttcaaaaaagagacaagtttcagtcctcaatgctgtcctttgttttacaggtacaagttttctagctcagacaaactatgaaaaactgtagactattctcaaggtattaactcgcagaccctctgggggtaggggctgttttctaagttacaggcagagtgggactgagatggtacagtgtgcacagacaggtactgagctgacagactgggattttctgtactaaaatgttactttgtatcaaaagttaaacaggctttagtacaacaaataaaggtcaatttctgtaa

SEQ ID NO: 355372 - DNA, 2414 bp, Homo sapiens
acttagaggatccgctgatcgcttaggctgatcggctgatcgcttaactgcttagtcagccggtccttttttcggaggaaacacaagcacaaacgcagcgggtccaaggacgggaaagacctgctcgccttggatgccttttccagtgactccattccactctttgaagattcggtgagcctggcctatcagcgggtccagaaggtggactgcaccgctctgaggcctgtcctgattctggggcctttgctggacgtggtgaaggagatgctggtgaatgaggctcctggcaagttctgcagatgtccccttgaggtgatgaaggcctcccagcaggccattgagcggggtgtcaaagattgcctgtttgtcgactataagcggagaagcggccatttcgatgtgaccactgtggcgtcaataaaggagatcacagaaaagaaccgacactgcctcctggacattgctccgcacgctattgagcggctccaccacatgcacatctaccccattgtcatcttcatccactacaagagcgccaagcacatcaaggagcagagagaccccatctacctgagggacaaggtgactcagaggcattccaaagagcagtttgaggcggcgcagaagcttgagcaggagtacagcaggtacttcacaggggtcatccagggaggagccctgtcaagcatttgcactcagatcttggcaatggtcaatcaagaacaaaataaagtcctgtggattccagcctgcccgctctaggagaatgctgtgctgtggatgactgcagctggccgcctgaggggacgccagactcagctcttttctagcgactgaaagtagaagtctgtccgtctatgaacatgcgggggaaggatccggaaccaggacccagaagcacctcctttgtagacagagggccacggctgcgtgcgatccaggcccaggcccacacactctgcccgtgtcacacgtgtgctttaacacaaaacagataacactaaagacgggttcagcacccacctttctttagccagctgatcagagatgctgcaaagagaacctttcggatcactcgtttacaagccttttctaagtatttggtggtttatgtttacttgaacggctccatgttgccggtgcccagcccctgtcccctctgtcaaccccctgtcgctttggtgttggtttcgttcccgtcttcagcaaaacgaccttggaacctcaatgggggctgctttgctttgggaggttcttgttggtgggaccagagctttgacaaacctcctgctccttggtggcacctctcctggaaggacgtcacaactccaggtgctcagactgcctgtggcagcagaaccagtgcctttggcattttcctcccacaatggggaaggtgactttggcattcttacaaactcgtctctcggcctttctctcctgccttccacagcctctcgtttctcctccatctgtgcttattacttgaggactgtgtctgctccgtgagagctgcgtgggcagggctgcagtggggtccaggtggtgttcagctgtgctgatgcctgccattgggtcctccttaggctctgtaagtcgtgacagccttcatcagtgcaatgtttgcagggtaattcttaaactttttagagggtggcaggtacatcagttctttttgatatgaaaacattcatgtttcagacattgaattgagagcttttaggggaagcataatggttattgtcactatcaacagtctaaaaagaaaaactgaggtctttttaatcttgattacagcactcacggcatgcaccctactcagtgtgggtgtcttcgtttgggggcttttttttttttggcacttctgaggctagatatgtctggctgaagatttgatgtggttcctccttaagctatgcgtcctgttaataataggtactgtactgggctctgtgtaagtgtcgttggggtaggacctatattttaatactgttcctaacatttcattttactagcgagaaatctttgatttcattttattctttgtaattctagacactagattgtagtttagccataactgatgttttttaaaaagggatatattttcttgcacagttgttcaaaaaagagacaagtttcagtcctcaatgctgtcctttgttttacaggtacaagttttctagctcagacaaactatgaaaaactgtagactattctcaaggtattaactcgcagaccctctgggggtaggggctgttttctaagttacaggcagagtgggactgagatggtacagtgtgcacagacaggtactgagctgacagactgggattttctgtactaaaatgttactttgtatcaaaagttaaacaggctttagtacaacaaataaaggtcaatttctgtaa

SEQ ID NO: 355373 - DNA, 3068 bp, Homo sapiens
gagatggaggcgctgcggcagatcaaagacacggtgacaatggatgctgggagagccaacaaggaggttgaaatccttcgaaagcagtgcaaggctctgtgccaggagctgaaggaagccctccaggaggcggatgtggccaagtgccggcgggactgggccttccaggagcgagacaagattgtagcagagcgtgacagcatccggacactgtgtgacaacctgaggcgggagcgggaccgtgcggtgagcgagctggctgaggccctgcgcagcctggatgacacccgcaagcagaagaatgatgtcagccgcgagctgaaggagctcaaggaacagatggaatcccagttggaaaaggaggcccggttccgacagctgatggcccacagctcccacgactcggccattgacacggattccatggagtgggaaacggaagttgtagagttcgagagggagacggaggatattgacttgaaggcactggggtttgatatggcagaaggtgtgaatgagccttgtttcccgggggactgtggcatatttgtcactaaagtggacaaaggaagcattgctgatggccgcttaagggtcaatgactggctgctgagaatcaacgatgtggacctcatcaacaaggacaagaagcaggccatcaaggcgctcctcaatggggagggggccatcaacatggtcgtgcggcggaggaagtccctgggtgggaaggtggtcacgccgctgcacatcaacctcagtggacagaaagacagtggcatcagtctggagaatggagtgtatgctgccgctgtgctgcctggaagccctgccgctaaagaagggtcccttgctgtgggagacaggatcgttgcgatcaatggcattgcactggacaacaagtctctgaatgaatgtgaatctctgctgcggagctgccaggactccctgaccctgtccctcctgaaggtattccctcagagctcctcgtggagtggccagaacatttttgaaaatatcaaagactctgataagatgctgagttttcgagcccatggcccggaggtccaggctcataacaaacggaacttgatacagcacaataactccacgcagacagacatcttctacacggacaggctggaagacaggaaggagccaggccccccaggaggcagcagctcctttctgcataagccattccctgggggacccttgcaggtctgcccccaggcctgtcccagtgcctctgagcgtagcctgaagcagtttgaggcggcgcagaagcttgagcaggagtacagcaggtacttcacaggggtcatccagggaggagccctgtcaagcatttgcactcagatcttggcaatggtcaatcaagaacaaaataaagtcctgtggattccagcctgcccgctctaggagaatgctgtgctgtggatgactgcagctggccgcctgaggggacgccagactcagctcttttctagcgactgaaagtagaagtctgtccgtctatgaacatgcgggggaaggatccggaaccaggacccagaagcacctcctttgtagacagagggccacggctgcgtgcgatccaggcccaggcccacacactctgcccgtgtcacacgtgtgctttaacacaaaacagataacactaaagacgggttcagcacccacctttctttagccagctgatcagagatgctgcaaagagaacctttcggatcactcgtttacaagccttttctaagtatttggtggtttatgtttacttgaacggctccatgttgccggtgcccagcccctgtcccctctgtcaaccccctgtcgctttggtgttggtttcgttcccgtcttcagcaaaacgaccttggaacctcaatgggggctgctttgctttgggaggttcttgttggtgggaccagagctttgacaaacctcctgctccttggtggcacctctcctggaaggacgtcacaactccaggtgctcagactgcctgtggcagcagaaccagtgcctttggcattttcctcccacaatggggaaggtgactttggcattcttacaaactcgtctctcggcctttctctcctgccttccacagcctctcgtttctcctccatctgtgcttattacttgaggactgtgtctgctccgtgagagctgcgtgggcagggctgcagtggggtccaggtggtgttcagctgtgctgatgcctgccattgggtcctccttaggctctgtaagtcgtgacagccttcatcagtgcaatgtttgcagggtaattcttaaactttttagagggtggcaggtacatcagttctttttgatatgaaaacattcatgtttcagacattgaattgagagcttttaggggaagcataatggttattgtcactatcaacagtctaaaaagaaaaactgaggtctttttaatcttgattacagcactcacggcatgcaccctactcagtgtgggtgtcttcgtttgggggcttttttttttttggcacttctgaggctagatatgtctggctgaagatttgatgtggttcctccttaagctatgcgtcctgttaataataggtactgtactgggctctgtgtaagtgtcgttggggtaggacctatattttaatactgttcctaacatttcattttactagcgagaaatctttgatttcattttattctttgtaattctagacactagattgtagtttagccataactgatgttttttaaaaagggatatattttcttgcacagttgttcaaaaaagagacaagtttcagtcctcaatgctgtcctttgttttacaggtacaagttttctagctcagacaaactatgaaaaactgtagactattctcaaggtattaactcgcagaccctctgggggtaggggctgttttctaagttacaggcagagtgggactgagatggtacagtgtgcacagacaggtactgagctgacagactgggattttctgtactaaaatgttactttgtatcaaaagttaaacaggctttagtacaacaaataaaggtcaatttctgtaa

SEQ ID NO: 355374 - DNA, 4211 bp, Homo sapiens
  misc_feature (3747)..(3747): n is a, c, g, or t
tagcagacactcttgcccttgcatctgcaggaacagaagtgtgtcccggccagtggagaactctccccggagctccaggagtgggcaccttactcgcctgggcattccagccggcacagcaaccccccgctataccctagcaggccgtctgtgggcactgttccccggagtttgacccccagcaccactgtgagctccatcctgcggaaccccatctacactgtgcgcagtcacagggtcggcccctgcagctctccacctgcggcccgagatgctggcccccagggtttgcatcccagtgtccagcaccagggacgcctgagcctggacctgagccacaggacctgcagcgactactccgagatgagagccacccatgggtccaactcactgccctccagcgcccgcctgggttcttcgagtaacttgcagttcaaggcggaacgcattaaaatcccatcaacaccaagatatccgcggagtgtcgtgggctccgagagaggttcagtgtcacattctgaatgcagcactcctccacagtcacccctgaacatcgacaccctgtcctcttgtagccagtcccagacctcagcctccacattgcccagaatcgctgtcaaccccgcgtccctcggggagcggagaaaggacaggccttatgtggaggagccacgccacgtgaaggtgcagaagggctcagagccgctgggcatctccatcgtgagtggagagaagggcggcatctacgtctccaaggtgaccgtggggagcatcgctcaccaggctggcctcgagtatggggatcagttactggagttcaacggcataaacctgcggagcgccacggagcagcaggcgcggctcatcatcgggcagcagtgtgataccatcaccatcctggcccagtacaacccccacgtgcaccagctcagcagccactcccggtccagctcacacctggaccctgccggtacccactccactctccagggcagtggcaccaccaccccggagcatccatctgtcatcgacccactgatggagcaggacgaggggcctagcacccccccagccaagcagagcagctccaggattgcgggagatgccaacaagaagaccctggagccacgcgttgtcttcatcaaaaagtcccagctggagcttggggtgcacttgtgtggtgggaacctgcatggggtgtttgtggccgaggtggaggatgacagtcctgccaagggtcctgacggcctcgtgccaggggacctcatcctggagtatggcagcctggacgtgcggaacaagacagtggaggaagtctatgtggagatgctgaagcccagggatggcgtccgcctgaaggtgcagtaccgccctgaggagttcacgaaggccaagggcctgcctggtgacagcttctacatcagggccctgtacgaccggctggcagatgtggagcaagagttgagctttaagaaggacgacatcctctacgtggatgacaccttaccccagggcacgttcgggtcctggatggcttggcagctggacgagaatgcccagaagatccagcgcgggcagattcccagcaaatatgtgatggaccaagaattctccaggaggctcagcatgtctgaagtcaaagatgacaatagcgccacaaagacgctgtcagcggctgcacgccggtccttttttcggaggaaacacaagcacaaacgcagcgggtccaaggacgggaaagacctgctcgccttggatgccttttccagtgactccattccactctttgaagattcggtgagcctggcctatcagcgggtccagaaggtggactgcaccgctctgaggcctgtcctgattctggggcctttgctggacgtggtgaaggagatgctggtgaatgaggctcctggcaagttctgcagatgtccccttgaggtgatgaaggcctcccagcaggccattgagcggggtgtcaaagattgcctgtttgtcgactataagcggagaagcggccatttcgatgtgaccactgtggcgtcaataaaggagatcacagaaaagaaccgacactgcctcctggacattgctccgcacgctattgagcggctccaccacatgcacatctaccccattgtcatcttcatccactacaagagcgccaagcacatcaaggagcagagagaccccatctacctgagggacaaggtgactcagaggcattccaaagagcagtttgaggcggcgcagaagcttgagcaggagtacagcaggtacttcacaggggtcatccagggaggagccctgtcaagcatttgcactcagatcttggcaatggtcaatcaagaacaaaataaagtcctgtggattccagcctgcccgctctaggagaatgctgtgctgtggatgactgcagctggccgcctgaggggacgccagactcagctcttttctagcgactgaaagtagaagtctgtccgtctatgaacatgcgggggaaggatccggaaccaggacccagaagcacctcctttgtagacagagggccacggctgcgtgcgatccaggcccaggcccacacactctgcccgtgtcacacgtgtgctttaacacaaaacagataacactaaagacgggttcagcacccacctttctttagccagctgatcagagatgctgcaaagagaacctttcggatcactcgtttacaagccttttctaagtatttggtggtttatgtttacttgaacggctccatgttgccggtgcccagcccctgtcccctctgtcaaccccctgtcgctttggtgttggtttcgttcccgtcttcagcaaaacgaccttggaacctcaatgggggctgctttgctttgggaggttcttgttggtgggaccagagctttgacaaacctcctgctccttggtggcacctctcctggaaggacgtcacaactccaggtgctcagactgcctgtggcagcagaaccagtgcctttggcattttcctcccacaatggggaaggtgactttggcattcttacaaactcgtctctcggcctttctctcctgccttccacagcctctcgtttctcctccatctgtgcttattacttgaggactgtgtctgctccgtgagagctgcgtgggcagggctgcagtggggtccaggtggtgttcagctgtgctgatgcctgccattgggtcctccttaggctctgtaagtcgtgacagccttcatcagtgcaatgtttgcagggtaattcttaaactttttagagggtggcaggtacatcagttctttttgatatgaaaacattcatgtttcagacattgaattgagagcttttaggggaagcataatggttattgtcactatcaacagtctaaaaagaaaaactgaggtctttttaatcttgattacagcactcacggcatgcaccctactcagtgtgggtgtcttcgtttgggggcttttttttttttggcacttctgaggcattgaggcagccagcgcaggggcttctgctgagggggcaggcggagcttgaggaaaccgcagataagttttttctctcttggaaagatagagattaatacaactacttaaaaaatatagtcaataggttactaaaatatggctaaggcgtaaagtttttaaaccgcgtaatttaaatagcctaagaattttaacgagaaacacttttgacagacttagaaagagttagcatgtgaggaaaaaaaaaaaanaaaaaaaaaaaaaaaaaaaaaaaaaaaaaaaaaaaaaaaaagaacacaacaagaaccgaaaaaaaacaaacagcaaagcaccagaaaaggacgacagggaagaccacgacaacacagcaacacggcggcgcctcaaacagacacccgcacctcctctgccacccacgccatgcgcctgagcacatgaactaccaaacacccgaatcacacaaaaaaaccatgcgcacgcggtgcacccaacgggcgcagagtggcccccccatcaggcgccgggcacaccatccaaggccaacgcacaacacccgcgggacacgccaccacaagcaaagcaacacacagaagagagagaaacgcaggcgcccgcgaatacgaacagcaccacggccaacatgagcagccacaggacaacaccagcgccaaaatacactggcagatcaaaccaaacatcacaacccaccgcgaac

SEQ ID NO: 355375 - DNA, 1781 bp, Homo sapiens
  misc_feature (66)..(66): n is a, c, g, or t
  misc_feature (68)..(68): n is a, c, g, or t
  misc_feature (91)..(91): n is a, c, g, or t
cccctcctcagcagacgcagctcttccctccagggatgggacaggatgattttatgatcacgagtntnggggccttgccatctatcaagtncaaaagaccagtataagagatctcagtgctcaggtacgccagtgctcagccttttcaagaaaatcttatactttctcctttctcctcagcagactcagctcttttctagcgactgaaagtagaagtctgtccgtctatgaacatgcgggggaaggatccggaaccaggacccagaagcacctcctttgtagacagagggccacggctgcgtgcgatccaggcccaggcccacacactctgcccgtgtcacacgtgtgctttaacacaaaacagataacactaaagacgggttcagcacccacctttctttagccagctgatcagagatgctgcaaagagaacctttcggatcactcgtttacaagccttttctaagtatttggtggtttatgtttacttgaacggctccatgttgccggtgcccagcccctgtcccctctgtcaaccccctgtcgctttggtgttggtttcgttcccgtcttcagcaaaacgaccttggaacctcaatgggggctgctttgctttgggaggttcttgttggtgggaccagagctttgacaaacctcctgctccttggtggcacctctcctggaaggacgtcacaactccaggtgctcagactgcctgtggcagcagaaccagtgcctttggcattttcctcccacaatggggaaggtgactttggcattcttacaaactcgtctctcggcctttctctcctgccttccacagcctctcgtttctcctccatctgtgcttattacttgaggactgtgtctgctccgtgagagctgcgtgggcagggctgcagtggggtccaggtggtgttcagctgtgctgatgcctgccattgggtcctccttaggctctgtaagtcgtgacagccttcatcagtgcaatgtttgcagggtaattcttaaactttttagagggtggcaggtacatcagttctttttgatatgaaaacattcatgtttcagacattgaattgagagcttttaggggaagcataatggttattgtcactatcaacagtctaaaaagaaaaactgaggtctttttaatcttgattacagcactcacggcatgcaccctactcagtgtgggtgtcttcgtttgggggcttttttttttttggcacttctgaggctagatatgtctggctgaagatttgatgtggttcctccttaagctatgcgtcctgttaataataggtactgtactgggctctgtgtaagtgtcgttggggtaggacctatattttaatactgttcctaacatttcattttactagcgagaaatctttgatttcattttattctttgtaattctagacactagattgtagtttagccataactgatgttttttaaaaagggatatattttcttgcacagttgttcaaaaaagagacaagtttcagtcctcaatgctgtcctttgttttacaggtacaagttttctagctcagacaaactatgaaaaactgtagactattctcaaggtattaactcgcagaccctctgggggtaggggctgttttctaagttacaggcagagtgggactgagatggtacagtgtgcacagacaggtactgagctgacagactgggattttctgtactaaaatgttactttgtatcaaaagttaaacaggctttagtacaacaaataaaggtcaatttctgtaa

SEQ ID NO: 355376 - DNA, 4911 bp, Homo sapiens
  misc_feature (4895)..(4896): n is a, c, g, or t
gagatggaggcgctgcggcagatcaaagacacggtgacaatggatgctgggagagccaacaaggaggttgaaatccttcgaaagcagtgcaaggctctgtgccaggagctgaaggaagccctccaggaggcggatgtggccaagtgccggcgggactgggccttccaggagcgagacaagattgtagcagagcgtgacagcatccggacactgtgtgacaacctgaggcgggagcgggaccgtgcggtgagcgagctggctgaggccctgcgcagcctggatgacacccgcaagcagaagaatgatgtcagccgcgagctgaaggagctcaaggaacagatggaatcccagttggaaaaggaggcccggttccgacagctgatggcccacagctcccacgactcggccattgacacggattccatggagtgggaaacggaagttgtagagttcgagagggagacggaggatattgacttgaaggcactggggtttgatatggcagaaggtgtgaatgagccttgtttcccgggggactgtggcatatttgtcactaaagtggacaaaggaagcattgctgatggccgcttaagggtcaatgactggctgctgagaatcaacgatgtggacctcatcaacaaggacaagaagcaggccatcaaggcgctcctcaatggggagggggccatcaacatggtcgtgcggcggaggaagtccctgggtgggaaggtggtcacgccgctgcacatcaacctcagtggacagaaagacagtggcatcagtctggagaatggagtgtatgctgccgctgtgctgcctggaagccctgccgctaaagaagggtcccttgctgtgggagacaggatcgttgcgatcaatggcattgcactggacaacaagtctctgaatgaatgtgaatctctgctgcggagctgccaggactccctgaccctgtccctcctgaaggtattccctcagagctcctcgtggagtggccagaacatttttgaaaatatcaaagactctgataagatgctgagttttcgagcccatggcccggaggtccaggctcataacaaacggaacttgatacagcacaataactccacgcagacagacatcttctacacggacaggctggaagacaggaaggagccaggccccccaggaggcagcagctcctttctgcataagccattccctgggggacccttgcaggtctgcccccaggcctgtcccagtgcctctgagcgtagcctgagctccttccgctcagatgcctctggggaccgtggctttgggctggtggacgtgcgtggccggcggccactgctgccctttgagaccgaggtgggcccctgtggggttggggaggcctccctggacaaggcagactctgaaggctccaacagcggcgggacctggcccaaggccatgctcagctccacggcagtgcctgagaagctctctgtttataaaaagccaaagcaaagaaagtccatctttgaccctaacactttcaaacgcccccagacaccccccaaaatagactacctgcttccaggtcctgggcctgctcactctccccagccctccaagagggcggggcctctgacacccccaaaacctcccagaaggagcgactccattaagttccagcacaggctggagactagctccgagtcagaagccactctggtgggcagctccccatccactagtcccccgagcgccctgccccctgacgtggaccccggggagcccatgcacgcatcaccccctcgcaaggccagggtccgcattgcttccagctactaccctgaaggagatggggactcctcccacctgccggccaagaaatcctgtgatgaggacctcacctcccagaaggtggatgagctggggcagaagcgtcgccggccaaaatctgctcccagttttcggccgaagcttgctccagtagtgattcctgctcagttcctggaggaacagaagtgtgtcccggccagtggagaactctccccggagctccaggagtgggcaccttactcgcctgggcattccagccggcacagcaaccccccgctataccctagcaggccgtctgtgggcactgttccccggagtttgacccccagcaccactgtgagctccatcctgcggaaccccatctacactgtgcgcagtcacagggtcggcccctgcagctctccacctgcggcccgagatgctggcccccagggtttgcatcccagtgtccagcaccagggacgcctgagcctggacctgagccacaggacctgcagcgactactccgagatgagagccacccatgggtccaactcactgccctccagcgcccgcctgggttcttcgagtaacttgcagttcaaggcggaacgcattaaaatcccatcaacaccaagatatccgcggagtgtcgtgggctccgagagaggttcagtgtcacattctgaatgcagcactcctccacagtcacccctgaacatcgacaccctgtcctcttgtagccagtcccagacctcagcctccacattgcccagaatcgctgtcaaccccgcgtccctcggggagcggagaaaggacaggccttatgtggaggagccacgccacgtgaaggtgcagaagggctcagagccgctgggcatctccatcgtgagtggagagaagggcggcatctacgtctccaaggtgaccgtggggagcatcgctcaccaggctggcctcgagtatggggatcagttactggagttcaacggcataaacctgcggagcgccacggagcagcaggcgcggctcatcatcgggcagcagtgtgataccatcaccatcctggcccagtacaacccccacgtgcaccagctcagcagccactcccggtccagctcacacctggaccctgccggtacccactccactctccagggcagtggcaccaccaccccggagcatccatctgtcatcgacccactgatggagcaggacgaggggcctagcacccccccagccaagcagagcagctccaggattgcgggagatgccaacaagaagaccctggagccacgcgttgtcttcatcaaaaagtcccagctggagcttggggtgcacttgtgtggtgggaacctgcatggggtgtttgtggccgaggtggaggatgacagtcctgccaagggtcctgacggcctcgtgccaggggacctcatcctggagtatggcagcctggacgtgcggaacaagacagtggaggaagtctatgtggagatgctgaagcccagggatggcgtccgcctgaaggtgcagtaccgccctgaggagttcacgaaggccaagggcctgcctggtgacagcttctacatcagggccctgtacgaccggctggcagatgtggagcaagagttgagctttaagaaggacgacatcctctacgtggatgacaccttaccccagggcacgttcgggtcctggatggcttggcagctggacgagaatgcccagaagatccagcgcgggcagattcccagcaaatatgtgatggaccaagaattctccaggaggctcagcatgtctgaagtcaaagatgacaatagcgccacaaagacgctgtcagcggctgcacgccggtccttttttcggaggaaacacaagcacaaacgcagcgggtccaaggacgggaaagacctgctcgccttggatgccttttccagtgactccattccactctttgaagattcggtgagcctggcctatcagcgggtccagaaggtggactgcaccgctctgaggcctgtcctgattctggggcctttgctggacgtggtgaaggagatgctggtgaatgaggctcctggcaagttctgcagatgtccccttgaggtgatgaaggcctcccagcaggccattgagcggggtgtcaaagattgcctgtttgtcgactataagcggagaagcggccatttcgatgtgaccactgtggcgtcaataaaggagatcacagaaaagaaccgacactgcctcctggacattgctccgcacgctattgagcggctccaccacatgcacatctaccccattgtcatcttcatccactacaagagcgccaagcacatcaaggagcagagagaccccatctacctgagggacaaggtgactcagaggcattccaaagagcagtttgaggcggcgcagaagcttgagcaggagtacagcaggtacttcacaggggtcatccagggaggagccctgtcaagcatttgcactcagatcttggcaatggtcaatcaagaacaaaataaagtcctgtggattccagcctgcccgctctaggagaatgctgtgctgtggatgactgcagctggccgcctgaggggacgccagactcagctcttttctagcgactgaaagtagaagtctgtccgtctatgaacatgcgggggaaggatccggaaccaggacccagaagcacctcctttgtagacagagggccacggctgcgtgcgatccaggcccaggcccacacactctgcccgtgtcacacgtgtgctttaacacaaaacagataacactaaagacgggttcagcacccacctttctttagccagctgatcagagatgctgcaaagagaacctttcggatcactcgtttacaagccttttctaagtatttggtggtttatgtttacttgaacggctccatgttgccggtgcccagcccctgtcccctctgtcaaccccctgtcgctttggtgttggtttcgttcccgtcttcagcaaaacgaccttggaacctcaatgggggctgctttgctttgggaggttcttgttggtgggaccagagctttgacaaacctcctgctccttgtcgtggcgattggganntctaggtcactcagc

SEQ ID NO: 355377 - DNA, 4239 bp, Homo sapiens
gagatggaggcgctgcggcagatcaaagacacggtgacaatggatgctgggagagccaacaaggaggttgaaatccttcgaaagcagtgcaaggctctgtgccaggagctgaaggaagccctccaggaggcggatgtggccaagtgccggcgggactgggccttccaggagcgagacaagattgtagcagagcgtgacagcatccggacactgtgtgacaacctgaggcgggagcgggaccgtgcggtgagcgagctggctgaggccctgcgcagcctggatgacacccgcaagcagaagaatgatgtcagccgcgagctgaaggagctcaaggaacagatggaatcccagttggaaaaggaggcccggttccgacagctgatggcccacagctcccacgactcggccattgacacggattccatggagtgggaaacggaagttgtagagttcgagagggagacggaggatattgacttgaaggcactggggtttgatatggcagaaggtgtgaatgagccttgtttcccgggggactgtggcatatttgtcactaaagtggacaaaggaagcattgctgatggccgcttaagggtcaatgactggctgctgagaatcaacgatgtggacctcatcaacaaggacaagaagcaggccatcaaggcgctcctcaatggggagggggccatcaacatggtcgtgcggcggaggaagtccctgggtgggaaggtggtcacgccgctgcacatcaacctcagtggacagaaagacagtggcatcagtctggagaatggagtgtatgctgccgctgtgctgcctggaagccctgccgctaaagaagggtcccttgctgtgggagacaggatcgttgcgatcaatggcattgcactggacaacaagtctctgaatgaatgtgaatctctgctgcggagctgccaggactccctgaccctgtccctcctgaaggtattccctcagagctcctcgtggagtggccagaacatttttgaaaatatcaaagactctgataagatgctgagttttcgagcccatggcccggaggtccaggctcataacaaacggaacttgatacagcacaataactccacgcagacagacatcttctacacggacaggctggaagacaggaaggagccaggccccccaggaggcagcagctcctttctgcataagccattccctgggggacccttgcaggtctgcccccaggcctgtcccagtgcctctgagcgtagcctgagctccttccgctcagatgcctctggggaccgtggctttgggctggtggacgtgcgtggccggcggccactgctgccctttgagaccgaggtgggcccctgtggggttggggaggcctccctggacaaggcagactctgaaggctccaacagcggcgggacctggcccaaggccatgctcagctccacggcagtgcctgagaagctctctgtttataaaaagccaaagcaaagaaagtccatctttgaccctaacactttcaaacgcccccagacaccccccaaaatagactacctgcttccaggtcctgggcctgctcactctccccagccctccaagagggcggggcctctgacacccccaaaacctcccagaaggagcgactccattaagttccagcacaggctggagactagctccgagtcagaagccactctggtgggcagctccccatccactagtcccccgagcgccctgccccctgacgtggaccccggggagcccatgcacgcatcaccccctcgcaaggccagggtccgcattgcttccagctactaccctgaaggagatggggactcctcccacctgccggccaagaaatcctgtgatgaggacctcacctcccagaaggtggatgagctggggcagaagcgtcgccggccaaaatctgctcccagttttcggccgaagcttgctccagtagtgattcctgctcagttcctggaggaacagaagtgtgtcccggccagtggagaactctccccggagctccaggagtgggcaccttactcgcctgggcattccagccggcacagcaaccccccgctataccctagcaggccgtctgtgggcactgttccccggagtttgacccccagcaccactgtgagctccatcctgcggaaccccatctacactgtgcgcagtcacagggtcggcccctgcagctctccacctgcggcccgagatgctggcccccagggtttgcatcccagtgtccagcaccagggacgcctgagcctggacctgagccacaggacctgcagcgactactccgagatgagagccacccatgggtccaactcactgccctccagcgcccgcctgggttcttcgagtaacttgcagttcaaggcggaacgcattaaaatcccatcaacaccaagatatccgcggagtgtcgtgggctccgagagaggttcagtgtcacattctgaatgcagcactcctccacagtcacccctgaacatcgacaccctgtcctcttgtagccagtcccagacctcagcctccacattgcccagaatcgctgtcaaccccgcgtccctcggggagcggagaaaggacaggccttatgtggaggagccacgccacgtgaaggtgcagaagggctcagagccgctgggcatctccatcgtgagtggagagaagggcggcatctacgtctccaaggtgaccgtggggagcatcgctcaccaggctggcctcgagtatggggatcagttactggagttcaacggcataaacctgcggagcgccacggagcagcaggcgcggctcatcatcgggcagcagtgtgataccatcaccatcctggcccagtacaacccccacgtgcaccagctcagcagccactcccggtccagctcacacctggaccctgccggtacccactccactctccagggcagtggcaccaccaccccggagcatccatctgtcatcgacccactgatggagcaggacgaggggcctagcacccccccagccaagcagagcagctccaggattgcgggagatgccaacaagaagaccctggagccacgcgttgtcttcatcaaaaagtcccagctggagcttggggtgcacttgtgtggtgggaacctgcatggggtgtttgtggccgaggtggaggatgacagtcctgccaagggtcctgacggcctcgtgccaggggacctcatcctggagtatggcagcctggacgtgcggaacaagacagtggaggaagtctatgtggagatgctgaagcccagggatggcgtccgcctgaaggtgcagtaccgccctgaggagttcacgaaggccaagggcctgcctggtgacagcttctacatcagggccctgtacgaccggctggcagatgtggagcaagagttgagctttaagaaggacgacatcctctacgtggatgacaccttaccccagggcacgttcgggtcctggatggcttggcagctggacgagaatgcccagaagatccagcgcgggcagattcccagcaaatatgtgatggaccaagaattctccaggaggctcagcatgtctgaagtcaaagatgacaatagcgccacaaagacgctgtcagcggctgcacgccggtccttttttcggaggaaacacaagcacaaacgcagcgggtccaaggacgggaaagacctgctcgccttggatgccttttccagtgactccattccactctttgaagattcggtgagcctggcctatcagcgggtccagaaggtggactgcaccgctctgaggcctgtcctgattctggggcctttgctggacgtggtgaaggagatgctggtgaatgaggctcctggcaagttctgcagatgtccccttgaggtgatgaaggcctcccagcaggccattgagcggggtgtcaaagattgcctgtttgtcgactataagcggagaagcggccatttcgatgtgaccactgtggcgtcaataaaggagatcacagaaaagaaccgacactgcctcctggacattgctccgcacgctattgagcggctccaccacatgcacatctaccccattgtcatcttcatccactacaagagcgccaagcacatcaaggagcaagagaccccaaagagcaaagaccccaaaagagcaaagaccccataagagcaaagaccccaaaagagcaaagaccccaaaagagcaaagaccccaacaaggggt

SEQ ID NO: 355378 - DNA, 3594 bp, Homo sapiens
gagatggaggcgctgcggcagatcaaagacacggtgacaatggatgctgggagagccaacaaggaggttgaaatccttcgaaagcagtgcaaggctctgtgccaggagctgaaggaagccctccaggaggcggatgtggccaagtgccggcgggactgggccttccaggagcgagacaagattgtagcagagcgtgacagcatccggacactgtgtgacaacctgaggcgggagcgggaccgtgcggtgagcgagctggctgaggccctgcgcagcctggatgacacccgcaagcagaagaatgatgtcagccgcgagctgaaggagctcaaggaacagatggaatcccagttggaaaaggaggcccggttccgacagctgatggcccacagctcccacgactcggccattgacacggattccatggagtgggaaacggaagttgtagagttcgagagggagacggaggatattgacttgaaggcactggggtttgatatggcagaaggtgtgaatgagccttgtttcccgggggactgtggcatatttgtcactaaagtggacaaaggaagcattgctgatggccgcttaagggtcaatgactggctgctgagaatcaacgatgtggacctcatcaacaaggacaagaagcaggccatcaaggcgctcctcaatggggagggggccatcaacatggtcgtgcggcggaggaagtccctgggtgggaaggtggtcacgccgctgcacatcaacctcagtggacagaaagacagtggcatcagtctggagaatggagtgtatgctgccgctgtgctgcctggaagccctgccgctaaagaagggtcccttgctgtgggagacaggatcgttgcgatcaatggcattgcactggacaacaagtctctgaatgaatgtgaatctctgctgcggagctgccaggactccctgaccctgtccctcctgaaggtattccctcagagctcctcgtggagtggccagaacatttttgaaaatatcaaagactctgataagatgctgagttttcgagcccatggcccggaggtccaggctcataacaaacggaacttgatacagcacaataactccacgcagacagacatcttctacacggacaggctggaagacaggaaggagccaggccccccaggaggcagcagctcctttctgcataagccattccctgggggacccttgcaggtctgcccccaggcctgtcccagtgcctctgagcgtagcctgagctccttccgctcagatgcctctggggaccgtggctttgggctggtggacgtgcgtggccggcggccactgctgccctttgagaccgaggtgggcccctgtggggttggggaggcctccctggacaaggcagactctgaaggctccaacagcggcgggacctggcccaaggccatgctcagctccacggcagtgcctgagaagctctctgtttataaaaagccaaagcaaagaaagtccatctttgaccctaacactttcaaacgcccccagacaccccccaaaatagactacctgcttccaggtcctgggcctgctcactctccccagccctccaagagggcggggcctctgacacccccaaaacctcccagaaggagcgactccattaagttccagcacaggctggagactagctccgagtcagaagccactctggtgggcagctccccatccactagtcccccgagcgccctgccccctgacgtggaccccggggagcccatgcacgcatcaccccctcgcaaggccagggtccgcattgcttccagctactaccctgaaggagatggggactcctcccacctgccggccaagaaatcctgtgatgaggacctcacctcccagaaggtggatgagctggggcagaagcgtcgccggccaaaatctgctcccagttttcggccgaagcttgctccagtagtgattcctgctcagttcctggaggaacagaagtgtgtcccggccagtggagaactctccccggagctccaggagtgggcaccttactcgcctgggcattccagccggcacagcaaccccccgctataccctagcaggccgtctgtgggcactgttccccggagtttgacccccagcaccactgtgagctccatcctgcggaaccccatctacactgtgcgcagtcacagggtcggcccctgcagctctccacctgcggcccgagatgctggcccccagggtttgcatcccagtgtccagcaccagggacgcctgagcctggacctgagccacaggacctgcagcgactactccgagatgagagccacccatgggtccaactcactgccctccagcgcccgcctgggttcttcgagtaacttgcagttcaaggcggaacgcattaaaatcccatcaacaccaagatatccgcggagtgtcgtgggctccgagagaggttcagtgtcacattctgaatgcagcactcctccacagtcacccctgaacatcgacaccctgtcctcttgtagccagtcccagacctcagcctccacattgcccagaatcgctgtcaaccccgcgtccctcggggagcggagaaaggacaggccttatgtggaggagccacgccacgtgaaggtgcagaagggctcagagccgctgggcatctccatcgtgagtggagagaagggcggcatctacgtctccaaggtgaccgtggggagcatcgctcaccaggctggcctcgagtatggggatcagttactggagttcaacggcataaacctgcggagcgccacggagcagcaggcgcggctcatcatcgggcagcagtgtgataccatcaccatcctggcccagtacaacccccacgtgcaccagctcagcagccactcccggtccagctcacacctggaccctgccggtacccactccactctccagggcagtggcaccaccaccccggagcatccatctgtcatcgacccactgatggagcaggacgaggggcctagcacccccccagccaagcagagcagctccaggattgcgggagatgccaacaagaagaccctggagccacgcgttgtcttcatcaaaaagtcccagctggagcttggggtgcacttgtgtggtgggaacctgcatggggtgtttgtggccgaggtggaggatgacagtcctgccaagggtcctgacggcctcgtgccaggggacctcatcctggagtatggcagcctggacgtgcggaacaagacagtggaggaagtctatgtggagatgctgaagcccagggatggcgtccgcctgaaggtgcagtaccgccctgaggagttcacgaaggccaagggcctgcctggtgacagcttctacatcagggccctgtacgaccggctggcagatgtggagcaagagttgagctttaagaaggacgacatcctctacgtggatgacaccttaccccagggcacgttcgggtcctggatggcttggcagctggacgagaatgcccagaagatccagcgcgggcagattcccagcaaatatgtgatggaccaagaattgtcgacgcggccgcgaatttagtagtag

SEQ ID NO: 355379 - DNA, 2962 bp, Homo sapiens
gagatggaggcgctgcggcagatcaaagacacggtgacaatggatgctgggagagccaacaaggaggttgaaatccttcgaaagcagtgcaaggctctgtgccaggagctgaaggaagccctccaggaggcggatgtggccaagtgccggcgggactgggccttccaggagcgagacaagattgtagcagagcgtgacagcatccggacactgtgtgacaacctgaggcgggagcgggaccgtgcggtgagcgagctggctgaggccctgcgcagcctggatgacacccgcaagcagaagaatgatgtcagccgcgagctgaaggagctcaaggaacagatggaatcccagttggaaaaggaggcccggttccgacagctgatggcccacagctcccacgactcggccattgacacggattccatggagtgggaaacggaagttgtagagttcgagagggagacggaggatattgacttgaaggcactggggtttgatatggcagaaggtgtgaatgagccttgtttcccgggggactgtggcatatttgtcactaaagtggacaaaggaagcattgctgatggccgcttaagggtcaatgactggctgctgagaatcaacgatgtggacctcatcaacaaggacaagaagcaggccatcaaggcgctcctcaatggggagggggccatcaacatggtcgtgcggcggaggaagtccctgggtgggaaggtggtcacgccgctgcacatcaacctcagtggacagaaagacagtggcatcagtctggagaatggagtgtatgctgccgctgtgctgcctggaagccctgccgctaaagaagggtcccttgctgtgggagacaggatcgttgcgatcaatggcattgcactggacaacaagtctctgaatgaatgtgaatctctgctgcggagctgccaggactccctgaccctgtccctcctgaaggtattccctcagagctcctcgtggagtggccagaacatttttgaaaatatcaaagactctgataagatgctgagttttcgagcccatggcccggaggtccaggctcataacaaacggaacttgatacagcacaataactccacgcagacagacatcttctacacggacaggctggaagacaggaaggagccaggccccccaggaggcagcagctcctttctgcataagccattccctgggggacccttgcaggtctgcccccaggcctgtcccagtgcctctgagcgtagcctgagctccttccgctcagatgcctctggggaccgtggctttgggctggtggacgtgcgtggccggcggccactgctgccctttgagaccgaggtgggcccctgtggggttggggaggcctccctggacaaggcagactctgaaggctccaacagcggcgggacctggcccaaggccatgctcagctccacggcagtgcctgagaagctctctgtttataaaaagccaaagcaaagaaagtccatctttgaccctaacactttcaaacgcccccagacaccccccaaaatagactacctgcttccaggtcctgggcctgctcactctccccagccctccaagagggcggggcctctgacacccccaaaacctcccagaaggagcgactccattaagttccagcacaggctggagactagctccgagtcagaagccactctggtgggcagctccccatccactagtcccccgagcgccctgccccctgacgtggaccccggggagcccatgcacgcatcaccccctcgcaaggccagggtccgcattgcttccagctactaccctgaaggagatggggactcctcccacctgccggccaagaaatcctgtgatgaggacctcacctcccagaaggtggatgagctggggcagaagcgtcgccggccaaaatctgctcccagttttcggccgaagcttgctccagtagtgattcctgctcagttcctggaggaacagaagtgtgtcccggccagtggagaactctccccggagctccaggagtgggcaccttactcgcctgggcattccagccggcacagcaaccccccgctataccctagcaggccgtctgtgggcactgttccccggagtttgacccccagcaccactgtgagctccatcctgcggaaccccatctacactgtgcgcagtcacagggtcggcccctgcagctctccacctgcggcccgagatgctggcccccagggtttgcatcccagtgtccagcaccagggacgcctgagcctggacctgagccacaggacctgcagcgactactccgagatgagagccacccatgggtccaactcactgccctccagcgcccgcctgggttcttcgagtaacttgcagttcaaggcggaacgcattaaaatcccatcaacaccaagatatccgcggagtgtcgtgggctccgagagaggttcagtgtcacattctgaatgcagcactcctccacagtcacccctgaacatcgacaccctgtcctcttgtagccagtcccagacctcagcctccacattgcccagaatcgctgtcaaccccgcgtccctcggggagcggagaaaggacagttgaggaaactggatccagacgttggagtgacagacctgtggccacgtggttagcggctggcaccgggactcattcttaccctttgctttttccctctcattcgaagctttctgttgtgaaataaaatatacacaggaagaaagcataaatgtgcagcctagctttttactggtactggttcattttagaatgtaggtccatcttaggtttcaggttgactgtaggcttgctgtctgtccagaggcacctcctccatggaatccgtcacccccgcgcactgtgcacacacatccctctctgttgttcccctagatggaacttactagattgtgtttatatttaacagcttctg

SEQ ID NO: 355380 - DNA, 4037 bp, Homo sapiens
tagcagacactcttgcccttgcatctgcaggaacagaagtgtgtcccggccagtggagaactctccccggagctccaggagtgggcaccttactcgcctgggcattccagccggcacagcaaccccccgctataccctagcaggccgtctgtgggcactgttccccggagtttgacccccagcaccactgtgagctccatcctgcggaaccccatctacactgtgcgcagtcacagggtcggcccctgcagctctccacctgcggcccgagatgctggcccccagggtttgcatcccagtgtccagcaccagggacgcctgagcctggacctgagccacaggacctgcagcgactactccgagatgagagccacccatgggtccaactcactgccctccagcgcccgcctgggttcttcgagtaacttgcagttcaaggcggaacgcattaaaatcccatcaacaccaagatatccgcggagtgtcgtgggctccgagagaggttcagtgtcacattctgaatgcagcactcctccacagtcacccctgaacatcgacaccctgtcctcttgtagccagtcccagacctcagcctccacattgcccagaatcgctgtcaaccccgcgtccctcggggagcggagaaaggacaggccttatgtggaggagccacgccacgtgaaggtgcagaagggctcagagccgctgggcatctccatcgtgagtggagagaagggcggcatctacgtctccaaggtgaccgtggggagcatcgctcaccaggctggcctcgagtatggggatcagttactggagttcaacggcataaacctgcggagcgccacggagcagcaggcgcggctcatcatcgggcagcagtgtgataccatcaccatcctggcccagtacaacccccacgtgcaccagctcagcagccactcccggtccagctcacacctggaccctgccggtacccactccactctccagggcagtggcaccaccaccccggagcatccatctgtcatcgacccactgatggagcaggacgaggggcctagcacccccccagccaagcagagcagctccaggattgcgggagatgccaacaagaagaccctggagccacgcgttgtcttcatcaaaaagtcccagctggagcttggggtgcacttgtgtggtgggaacctgcatggggtgtttgtggccgaggtggaggatgacagtcctgccaagggtcctgacggcctcgtgccaggggacctcatcctggagtatggcagcctggacgtgcggaacaagacagtggaggaagtctatgtggagatgctgaagcccagggatggcgtccgcctgaaggtgcagtaccgccctgaggagttcacgaaggccaagggcctgcctggtgacagcttctacatcagggccctgtacgaccggctggcagatgtggagcaagagttgagctttaagaaggacgacatcctctacgtggatgacaccttaccccagggcacgttcgggtcctggatggcttggcagctggacgagaatgcccagaagatccagcgcgggcagattcccagcaaatatgtgatggaccaagaattctccaggaggctcagcatgtctgaagtcaaagatgacaatagcgccacaaagacgctgtcagcggctgcacgccggtccttttttcggaggaaacacaagcacaaacgcagcgggtccaaggacgggaaagacctgctcgccttggatgccttttccagtgactccattccactctttgaagattcggtgagcctggcctatcagcgggtccagaaggtggactgcaccgctctgaggcctgtcctgattctggggcctttgctggacgtggtgaaggagatgctggtgaatgaggctcctggcaagttctgcagatgtccccttgaggtgatgaaggcctcccagcaggccattgagcggggtgtcaaagattgcctgtttgtcgactataagcggagaagcggccatttcgatgtgaccactgtggcgtcaataaaggagatcacagaaaagaaccgacactgcctcctggacattgctccgcacgctattgagcggctccaccacatgcacatctaccccattgtcatcttcatccactacaagagcgccaagcacatcaaggagcagagagaccccatctacctgagggacaaggtgactcagaggcattccaaagagcagtttgaggcggcgcagaagcttgagcaggagtacagcaggtacttcacaggggtcatccagggaggagccctgtcaagcatttgcactcagatcttggcaatggtcaatcaagaacaaaataaagtcctgtggattccagcctgcccgctctaggagaatgctgtgctgtggatgactgcagctggccgcctgaggggacgccagactcagctcttttctagcgactgaaagtagaagtctgtccgtctatgaacatgcgggggaaggatccggaaccaggacccagaagcacctcctttgtagacagagggccacggctgcgtgcgatccaggcccaggcccacacactctgcccgtgtcacacgtgtgctttaacacaaaacagataacactaaagacgggttcagcacccacctttctttagccagctgatcagagatgctgcaaagagaacctttcggatcactcgtttacaagccttttctaagtatttggtggtttatgtttacttgaacggctccatgttgccggtgcccagcccctgtcccctctgtcaaccccctgtcgctttggtgttggtttcgttcccgtcttcagcaaaacgaccttggaacctcaatgggggctgctttgctttgggaggttcttgttggtgggaccagagctttgacaaacctcctgctccttggtggcacctctcctggaaggacgtcacaactccaggtgctcagactgcctgtggcagcagaaccagtgcctttggcattttcctcccacaatggggaaggtgactttggcattcttacaaactcgtctctcggcctttctctcctgccttccacagcctctcgtttctcctccatctgtgcttattacttgaggactgtgtctgctccgtgagagctgcgtgggcagggctgcagtggggtccaggtggtgttcagctgtgctgatgcctgccattgggtcctccttaggctctgtaagtcgtgacagccttcatcagtgcaatgtttgcagggtaattcttaaactttttagagggtggcaggtacatcagttctttttgatatgaaaacattcatgtttcagacattgaattgagagcttttaggggaagcataatggttattgtcactatcaacagtctaaaaagaaaaactgaggtctttttaatcttgattacagcactcacggcatgcaccctactcagtgtgggtgtcttcgtttgggggcttttttttttttggcacttctgaggctagatatgtctggctgaagatttgatgtggttcctccttaagctatgcgtcctgttaataataggtactgtactgggctctgtgtaagtgtcgttggggtaggacctatattttaatactgttcctaacatttcattttactagcgagaaatctttgatttcattttattctttgtaattctagacactagattgtagtttagccataactgatgttttttaaaaagggatatattttcttgcacagttgttcaaaaaagagacaagtttcagtcctcaatgctgtcctttgttttacaggtacaagttttctagctcagacaaactatgaaaaactgtagactattctcaaggtattaactcgcagaccctctgggggtaggggctgttttctaagttacaggcagagtgggactgagatggtacagtgtgcacagacaggtactgagctgacagactgggattttctgtactaaaatgttactttgtatcaaaagttaaacaggctttagtacaacaaataaaggtcaatttctgtaa

SEQ ID NO: 355381 - DNA, 5441 bp, Homo sapiens
ttctgagccaaggtcccacgccacatggccgggcacagcagtgccaagatgttccctccgggtcctcggtgttctgatcccagaaggacatgctcctcccctagcctgctgtgaagggcttatgtgttcctctacctcagaatccccttagttggactccttgggcctcaccagaaagacctctatcctttgccaactcctgactttggcaccttgcatttggtgactgtctagcacaggaggttaggtaggcagagatcctgactggtaggcctgaggccgctctgcctgtggcctgacatgctctctgtcctgctctagatcaatggcattgcactggacaacaagtctctgaatgaatgtgaatctctgctgcggagctgccaggactccctgaccctgtccctcctgaaggtattccctcagagctcctcgtggagtggccagaacatttttgaaaatatcaaagactctgataagatgctgagttttcgagcccatggcccggaggtccaggctcataacaaacggaacttgatacagcacaataactccacgcagacagacatcttctacacggacaggctggaagacaggaaggagccaggccccccaggaggcagcagctcctttctgcataagccattccctgggggacccttgcaggtctgcccccaggcctgtcccagtgcctctgagcgtagcctgagctccttccgctcagatgcctctggggaccgtggctttgggctggtggacgtgcgtggccggcggccactgctgccctttgagaccgaggtgggcccctgtggggttggggaggcctccctggacaaggcagactctgaaggctccaacagcggcgggacctggcccaaggccatgctcagctccacggcagtgcctgagaagctctctgtttataaaaagccaaagcaaagaaagtccatctttgaccctaacactttcaaacgcccccagacaccccccaaaatagactacctgcttccaggtcctgggcctgctcactctccccagccctccaagagggcggggcctctgacacccccaaaacctcccagaaggagcgactccattaagttccagcacaggctggagactagctccgagtcagaagccactctggtgggcagctccccatccactagtcccccgagcgccctgccccctgacgtggaccccggggagcccatgcacgcatcaccccctcgcaaggccagggtccgcattgcttccagctactaccctgaaggagatggggactcctcccacctgccggccaagaaatcctgtgatgaggacctcacctcccagaaggtggatgagctggggcagaagcgtcgccggccaaaatctgctcccagttttcggccgaagcttgctccagtagtgattcctgctcagttcctggaggaacagaagtgtgtcccggccagtggagaactctccccggagctccaggagtgggcaccttactcgcctgggcattccagccggcacagcaaccccccgctataccctagcaggccgtctgtgggcactgttccccggagtttgacccccagcaccactgtgagctccatcctgcggaaccccatctacactgtgcgcagtcacagggtcggcccctgcagctctccacctgcggcccgagatgctggcccccagggtttgcatcccagtgtccagcaccagggacgcctgagcctggacctgagccacaggacctgcagcgactactccgagatgagagccacccatgggtccaactcactgccctccagcgcccgcctgggttcttcgagtaacttgcagttcaaggcggaacgcattaaaatcccatcaacaccaagatatccgcggagtgtcgtgggctccgagagaggttcagtgtcacattctgaatgcagcactcctccacagtcacccctgaacatcgacaccctgtcctcttgtagccagtcccagacctcagcctccacattgcccagaatcgctgtcaaccccgcgtccctcggggagcggagaaaggacaggccttatgtggaggagccacgccacgtgaaggtgcagaagggctcagagccgctgggcatctccatcgtgagtggagagaagggcggcatctacgtctccaaggtgaccgtggggagcatcgctcaccaggctggcctcgagtatggggatcagttactggagttcaacggcataaacctgcggagcgccacggagcagcaggcgcggctcatcatcgggcagcagtgtgataccatcaccatcctggcccagtacaacccccacgtgcaccagctcagcagccactcccggtccagctcacacctggaccctgccggtacccactccactctccagggcagtggcaccaccaccccggagcatccatctgtcatcgacccactgatggagcaggacgaggggcctagcacccccccagccaagcagagcagctccaggattgcgggagatgccaacaagaagaccctggagccacgcgttgtcttcatcaaaaagtcccagctggagcttggggtgcacttgtgtggtgggaacctgcatggggtgtttgtggccgaggtggaggatgacagtcctgccaagggtcctgacggcctcgtgccaggggacctcatcctggagtatggcagcctggacgtgcggaacaagacagtggaggaagtctatgtggagatgctgaagcccagggatggcgtccgcctgaaggtgcagtaccgccctgaggagttcacgaaggccaagggcctgcctggtgacagcttctacatcagggccctgtacgaccggctggcagatgtggagcaagagttgagctttaagaaggacgacatcctctacgtggatgacaccttaccccagggcacgttcgggtcctggatggcttggcagctggacgagaatgcccagaagatccagcgcgggcagattcccagcaaatatgtgatggaccaagaattctccaggaggctcagcatgtctgaagtcaaagatgacaatagcgccacaaagacgctgtcagcggctgcacgccggtccttttttcggaggaaacacaagcacaaacgcagcgggtccaaggacgggaaagacctgctcgccttggatgccttttccagtgactccattccactctttgaagattcggtgagcctggcctatcagcgggtccagaaggtggactgcaccgctctgaggcctgtcctgattctggggcctttgctggacgtggtgaaggagatgctggtgaatgaggctcctggcaagttctgcagatgtccccttgaggtgatgaaggcctcccagcaggccattgagcggggtgtcaaagattgcctgtttgtcgactataagcggagaagcggccatttcgatgtgaccactgtggcgtcaataaaggagatcacagaaaagaaccgacactgcctcctggacattgctccgcacgctattgagcggctccaccacatgcacatctaccccattgtcatcttcatccactacaagagcgccaagcacatcaaggagcagagagaccccatctacctgagggacaaggtgactcagaggcattccaaagagcagtttgaggcggcgcagaagcttgagcaggagtacagcaggtacttcacaggggtcatccagggaggagccctgtcaagcatttgcactcagatcttggcaatggtcaatcaagaacaaaataaagtcctgtggattccagcctgcccgctctaggagaatgctgtgctgtggatgactgcagctggccgcctgaggggacgccagactcagctcttttctagcgactgaaagtagaagtctgtccgtctatgaacatgcgggggaaggatccggaaccaggacccagaagcacctcctttgtagacagagggccacggctgcgtgcgatccaggcccaggcccacacactctgcccgtgtcacacgtgtgctttaacacaaaacagataacactaaagacgggttcagcacccacctttctttagccagctgatcagagatgctgcaaagagaacctttcggatcactcgtttacaagccttttctaagtatttggtggtttatgtttacttgaacggctccatgttgccggtgcccagcccctgtcccctctgtcaaccccctgtcgctttggtgttggtttcgttcccgtcttcagcaaaacgaccttggaacctcaatgggggctgctttgctttgggaggttcttgttggtgggaccagagctttgacaaacctcctgctccttggtggcacctctcctggaaggacgtcacaactccaggtgctcagactgcctgtggcagcagaaccagtgcctttggcattttcctcccacaatggggaaggtgactttggcattcttacaaactcgtctctcggcctttctctcctgccttccacagcctctcgtttctcctccatctgtgcttattacttgaggactgtgtctgctccgtgagagctgcgtgggcagggctgcagtggggtccaggtggtgttcagctgtgctgatgcctgccattgggtcctccttaggctctgtaagtcgtgacagccttcatcagtgcaatgtttgcagggtaattcttaaactttttagagggtggcaggtacatcagttctttttgatatgaaaacattcatgtttcagacattgaattgagagcttttaggggaagcataatggttattgtcactatcaacagtctaaaaagaaaaactgaggtctttttaatcttgattacagcactcacggcatgcaccctactcagtgtgggtgtcttcgtttgggggcttttttttttttggcacttctgaggctagatatgtctggctgaagatttgatgtggttcctccttaagctatgcgtcctgttaataataggtactgtactgggctctgtgtaagtgtcgttggggtaggacctatattttaatactgttcctaacatttcattttactagcgagaaatctttgatttcattttattctttgtaattctagacactagattgtagtttagccataactgatgttttttaaaaagggatatattttcttgcacagttgttcaaaaaagagacaagtttcagtcctcaatgctgtcctttgttttacaggtacaagttttctagctcagacaaactatgaaaaactgtagactattctcaaggtattaactcgcagaccctctgggggtaggggctgttttctaagttacaggcagagtgggactgagatggtacagtgtgcacagacaggtactgagctgacagactgggattttctgtactaaaatgttactttgtatcaaaagttaaacaggctttagtacaacaaataaaggtcaatttctgtaa

SEQ ID NO: 355382 - DNA, 4495 bp, Homo sapiens
gtacgatctcggctcactgcaagctccgcctgctgggttcacgccattctcctgcctcagcctcccgagtagctgggactacaagcgcatgccaccacgcctagctaattttttgtatttttagtagagatggggtttcaccatgttagccaggatggtctcgatctcctgacctcatgatccgcccacctcggcctcccaaagtgctgggattacaggtatgagccaccgcgcccggcccccctgacgtggaccccggggagcccatgcacgcatcaccccctcgcaaggccagggtccgcattgcttccagctactaccctgaaggagatggggactcctcccacctgccggccaagaaatcctgtgatgaggacctcacctcccagaaggtggatgagctggggcagaagcgtcgccggccaaaatctgctcccagttttcggccgaagcttgctccagtagtgattcctgctcagttcctggaggaacagaagtgtgtcccggccagtggagaactctccccggagctccaggagtgggcaccttactcgcctgggcattccagccggcacagcaaccccccgctataccctagcaggccgtctgtgggcactgttccccggagtttgacccccagcaccactgtgagctccatcctgcggaaccccatctacactgtgcgcagtcacagggtcggcccctgcagctctccacctgcggcccgagatgctggcccccagggtttgcatcccagtgtccagcaccagggacgcctgagcctggacctgagccacaggacctgcagcgactactccgagatgagagccacccatgggtccaactcactgccctccagcgcccgcctgggttcttcgagtaacttgcagttcaaggcggaacgcattaaaatcccatcaacaccaagatatccgcggagtgtcgtgggctccgagagaggttcagtgtcacattctgaatgcagcactcctccacagtcacccctgaacatcgacaccctgtcctcttgtagccagtcccagacctcagcctccacattgcccagaatcgctgtcaaccccgcgtccctcggggagcggagaaaggacaggccttatgtggaggagccacgccacgtgaaggtgcagaagggctcagagccgctgggcatctccatcgtgagtggagagaagggcggcatctacgtctccaaggtgaccgtggggagcatcgctcaccaggctggcctcgagtatggggatcagttactggagttcaacggcataaacctgcggagcgccacggagcagcaggcgcggctcatcatcgggcagcagtgtgataccatcaccatcctggcccagtacaacccccacgtgcaccagctcagcagccactcccggtccagctcacacctggaccctgccggtacccactccactctccagggcagtggcaccaccaccccggagcatccatctgtcatcgacccactgatggagcaggacgaggggcctagcacccccccagccaagcagagcagctccaggattgcgggagatgccaacaagaagaccctggagccacgcgttgtcttcatcaaaaagtcccagctggagcttggggtgcacttgtgtggtgggaacctgcatggggtgtttgtggccgaggtggaggatgacagtcctgccaagggtcctgacggcctcgtgccaggggacctcatcctggagtatggcagcctggacgtgcggaacaagacagtggaggaagtctatgtggagatgctgaagcccagggatggcgtccgcctgaaggtgcagtaccgccctgaggagttcacgaaggccaagggcctgcctggtgacagcttctacatcagggccctgtacgaccggctggcagatgtggagcaagagttgagctttaagaaggacgacatcctctacgtggatgacaccttaccccagggcacgttcgggtcctggatggcttggcagctggacgagaatgcccagaagatccagcgcgggcagattcccagcaaatatgtgatggaccaagaattctccaggaggctcagcatgtctgaagtcaaagatgacaatagcgccacaaagacgctgtcagcggctgcacgccggtccttttttcggaggaaacacaagcacaaacgcagcgggtccaaggacgggaaagacctgctcgccttggatgccttttccagtgactccattccactctttgaagattcggtgagcctggcctatcagcgggtccagaaggtggactgcaccgctctgaggcctgtcctgattctggggcctttgctggacgtggtgaaggagatgctggtgaatgaggctcctggcaagttctgcagatgtccccttgaggtgatgaaggcctcccagcaggccattgagcggggtgtcaaagattgcctgtttgtcgactataagcggagaagcggccatttcgatgtgaccactgtggcgtcaataaaggagatcacagaaaagaaccgacactgcctcctggacattgctccgcacgctattgagcggctccaccacatgcacatctaccccattgtcatcttcatccactacaagagcgccaagcacatcaaggagcagagagaccccatctacctgagggacaaggtgactcagaggcattccaaagagcagtttgaggcggcgcagaagcttgagcaggagtacagcaggtacttcacaggggtcatccagggaggagccctgtcaagcatttgcactcagatcttggcaatggtcaatcaagaacaaaataaagtcctgtggattccagcctgcccgctctaggagaatgctgtgctgtggatgactgcagctggccgcctgaggggacgccagactcagctcttttctagcgactgaaagtagaagtctgtccgtctatgaacatgcgggggaaggatccggaaccaggacccagaagcacctcctttgtagacagagggccacggctgcgtgcgatccaggcccaggcccacacactctgcccgtgtcacacgtgtgctttaacacaaaacagataacactaaagacgggttcagcacccacctttctttagccagctgatcagagatgctgcaaagagaacctttcggatcactcgtttacaagccttttctaagtatttggtggtttatgtttacttgaacggctccatgttgccggtgcccagcccctgtcccctctgtcaaccccctgtcgctttggtgttggtttcgttcccgtcttcagcaaaacgaccttggaacctcaatgggggctgctttgctttgggaggttcttgttggtgggaccagagctttgacaaacctcctgctccttggtggcacctctcctggaaggacgtcacaactccaggtgctcagactgcctgtggcagcagaaccagtgcctttggcattttcctcccacaatggggaaggtgactttggcattcttacaaactcgtctctcggcctttctctcctgccttccacagcctctcgtttctcctccatctgtgcttattacttgaggactgtgtctgctccgtgagagctgcgtgggcagggctgcagtggggtccaggtggtgttcagctgtgctgatgcctgccattgggtcctccttaggctctgtaagtcgtgacagccttcatcagtgcaatgtttgcagggtaattcttaaactttttagagggtggcaggtacatcagttctttttgatatgaaaacattcatgtttcagacattgaattgagagcttttaggggaagcataatggttattgtcactatcaacagtctaaaaagaaaaactgaggtctttttaatcttgattacagcactcacggcatgcaccctactcagtgtgggtgtcttcgtttgggggcttttttttttttggcacttctgaggctagatatgtctggctgaagatttgatgtggttcctccttaagctatgcgtcctgttaataataggtactgtactgggctctgtgtaagtgtcgttggggtaggacctatattttaatactgttcctaacatttcattttactagcgagaaatctttgatttcattttattctttgtaattctagacactagattgtagtttagccataactgatgttttttaaaaagggatatattttcttgcacagttgttcaaaaaagagacaagtttcagtcctcaatgctgtcctttgttttacaggtacaagttttctagctcagacaaactatgaaaaactgtagactattctcaaggtattaactcgcagaccctctgggggtaggggctgttttctaagttacaggcagagtgggactgagatggtacagtgtgcacagacaggtactgagctgacagactgggattttctgtactaaaatgttactttgtatcaaaagttaaacaggctttagtacaacaaataaaggtcaatttctgtaa

SEQ ID NO: 355383 - DNA, 2797 bp, Homo sapiens
ctgccttctgatgcatccacccccatccctggcagtatggcagcctggacgtgcggaacaagacagtggaggaagtctatgtggagatgctgaagcccagggatggcgtccgcctgaaggtgcagtaccgccctgaggagttcacgaaggccaagggcctgcctggtgacagcttctacatcagggccctgtacgaccggctggcagatgtggagcaagagttgagctttaagaaggacgacatcctctacgtggatgacaccttaccccagggcacgttcgggtcctggatggcttggcagctggacgagaatgcccagaagatccagcgcgggcagattcccagcaaatatgtgatggaccaagaattctccaggaggctcagcatgtctgaagtcaaagatgacaatagcgccacaaagacgctgtcagcggctgcacgccggtccttttttcggaggaaacacaagcacaaacgcagcgggtccaaggacgggaaagacctgctcgccttggatgccttttccagtgactccattccactctttgaagattcggtgagcctggcctatcagcgggtccagaaggtggactgcaccgctctgaggcctgtcctgattctggggcctttgctggacgtggtgaaggagatgctggtgaatgaggctcctggcaagttctgcagatgtccccttgaggtgatgaaggcctcccagcaggccattgagcggggtgtcaaagattgcctgtttgtcgactataagcggagaagcggccatttcgatgtgaccactgtggcgtcaataaaggagatcacagaaaagaaccgacactgcctcctggacattgctccgcacgctattgagcggctccaccacatgcacatctaccccattgtcatcttcatccactacaagagcgccaagcacatcaaggagcagagagaccccatctacctgagggacaaggtgactcagaggcattccaaagagcagtttgaggcggcgcagaagcttgagcaggagtacagcaggtacttcacaggggtcatccagggaggagccctgtcaagcatttgcactcagatcttggcaatggtcaatcaagaacaaaataaagtcctgtggattccagcctgcccgctctaggagaatgctgtgctgtggatgactgcagctggccgcctgaggggacgccagactcagctcttttctagcgactgaaagtagaagtctgtccgtctatgaacatgcgggggaaggatccggaaccaggacccagaagcacctcctttgtagacagagggccacggctgcgtgcgatccaggcccaggcccacacactctgcccgtgtcacacgtgtgctttaacacaaaacagataacactaaagacgggttcagcacccacctttctttagccagctgatcagagatgctgcaaagagaacctttcggatcactcgtttacaagccttttctaagtatttggtggtttatgtttacttgaacggctccatgttgccggtgcccagcccctgtcccctctgtcaaccccctgtcgctttggtgttggtttcgttcccgtcttcagcaaaacgaccttggaacctcaatgggggctgctttgctttgggaggttcttgttggtgggaccagagctttgacaaacctcctgctccttggtggcacctctcctggaaggacgtcacaactccaggtgctcagactgcctgtggcagcagaaccagtgcctttggcattttcctcccacaatggggaaggtgactttggcattcttacaaactcgtctctcggcctttctctcctgccttccacagcctctcgtttctcctccatctgtgcttattacttgaggactgtgtctgctccgtgagagctgcgtgggcagggctgcagtggggtccaggtggtgttcagctgtgctgatgcctgccattgggtcctccttaggctctgtaagtcgtgacagccttcatcagtgcaatgtttgcagggtaattcttaaactttttagagggtggcaggtacatcagttctttttgatatgaaaacattcatgtttcagacattgaattgagagcttttaggggaagcataatggttattgtcactatcaacagtctaaaaagaaaaactgaggtctttttaatcttgattacagcactcacggcatgcaccctactcagtgtgggtgtcttcgtttgggggcttttttttttttggcacttctgaggctagatatgtctggctgaagatttgatgtggttcctccttaagctatgcgtcctgttaataataggtactgtactgggctctgtgtaagtgtcgttggggtaggacctatattttaatactgttcctaacatttcattttactagcgagaaatctttgatttcattttattctttgtaattctagacactagattgtagtttagccataactgatgttttttaaaaagggatatattttcttgcacagttgttcaaaaaagagacaagtttcagtcctcaatgctgtcctttgttttacaggtacaagttttctagctcagacaaactatgaaaaactgtagactattctcaaggtattaactcgcagaccctctgggggtaggggctgttttctaagttacaggcagagtgggactgagatggtacagtgtgcacagacaggtactgagctgacagactgggattttctgtactaaaatgttactttgtatcaaaagttaaacaggctttagtacaacaaataaaggtcaatttctgtaa

SEQ ID NO: 355384 - DNA, 3731 bp, Homo sapiens
tagcagacactcttgcccttgcatctgcaggaacagaagtgtgtcccggccagtggagaactctccccggagctccaggagtgggcaccttactcgcctgggcattccagccggcacagcaaccccccgctataccctagcaggccgtctgtgggcactgttccccggagtttgacccccagcaccactgtgagctccatcctgcggaaccccatctacactgtgcgcagtcacagggtcggcccctgcagctctccacctgcggcccgagatgctggcccccagggtttgcatcccagtgtccagcaccagggacgcctgagcctggacctgagccacaggacctgcagcgactactccgagatgagagccacccatgggtccaactcactgccctccagcgcccgcctgggttcttcgagtaacttgcagttcaaggcggaacgcattaaaatcccatcaacaccaagatatccgcggagtgtcgtgggctccgagagaggttcagtgtcacattctgaatgcagcactcctccacagtcacccctgaacatcgacaccctgtcctcttgtagccagtcccagacctcagcctccacattgcccagaatcgctgtcaaccccgcgtccctcggggagcggagaaaggacaggccttatgtggaggagccacgccacgtgaaggtgcagaagggctcagagccgctgggcatctccatcgtgagtggagagaagggcggcatctacgtctccaaggtgaccgtggggagcatcgctcaccaggctggcctcgagtatggggatcagttactggagttcaacggcataaacctgcggagcgccacggagcagcaggcgcggctcatcatcgggcagcagtgtgataccatcaccatcctggcccagtacaacccccacgtgcaccagctcagcagccactcccggtccagctcacacctggaccctgccggtacccactccactctccagggcagtggcaccaccaccccggagcatccatctgtcatcgacccactgatggagcaggacgaggggcctagcacccccccagccaagcagagcagctccaggattgcgggagatgccaacaagaagaccctggagccacgcgttgtcttcatcaaaaagtcccagctggagcttggggtgcacttgtgtggtgggaacctgcatggggtgtttgtggccgaggtggaggatgacagtcctgccaagggtcctgacggcctcgtgccaggggacctcatcctggagtatggcagcctggacgtgcggaacaagacagtggaggaagtctatgtggagatgctgaagcccagggatggcgtccgcctgaaggtgcagtaccgccctgaggagttcacgaaggccaagggcctgcctggtgacagcttctacatcagggccctgtacgaccggctggcagatgtggagcaagagttgagctttaagaaggacgacatcctctacgtggatgacaccttaccccagggcacgttcgggtcctggatggcttggcagctggacgagaatgcccagaagatccagcgcgggcagattcccagcaaatatgtgatggaccaagaattctccaggaggctcagcatgtctgaagtcaaagatgacaatagcgccacaaagacgctgtcagcggctgcacgccggtccttttttcggaggaaacacaagcacaaacgcagcgggtccaaggacgggaaagacctgctcgccttggatgccttttccagtgactccattccactctttgaagattcggtgagcctggcctatcagcgggtccagaaggtggactgcaccgctctgaggcctgtcctgattctggggcctttgctggacgtggtgaaggagatgctggtgaatgaggctcctggcaagttctgcagatgtccccttgaggtgatgaaggcctcccagcaggccattgagcggggtgtcaaagattgcctgtttgtcgactataagcggagaagcggccatttcgatgtgaccactgtggcgtcaataaaggagatcacagaaaagaaccgacactgcctcctggacattgctccgcacgctattgagcggctccaccacatgcacatctaccccattgtcatcttcatccactacaagagcgccaagcacatcaaggagcagagagaccccatctacctgagggacaaggtgactcagaggcattccaaagagcagtttgaggcggcgcagaagcttgagcaggagtacagcaggtacttcacaggggtcatccagggaggagccctgtcaagcatttgcactcagatcttggcaatggtcaatcaagaacaaaataaagtcctgtggattccagcctgcccgctctaggagaatgctgtgctgtggatgactgcagctggccgcctgaggggacgccagactcagctcttttctagcgactgaaagtagaagtctgtccgtctatgaacatgcgggggaaggatccggaaccaggacccagaagcacctcctttgtagacagagggccacggctgcgtgcgatccaggcccaggcccacacactctgcccgtgtcacacgtgtgctttaacacaaaacagataacactaaagacgggttcagcacccacctttctttagccagctgatcagagatgctgcaaagagaacctttcggatcactcgtttacaagccttttctaagtatttggtggtttatgtttacttgaacggctccatgttgccggtgcccagcccctgtcccctctgtcaaccccctgtcgctttggtgttggtttcgttcccgtcttcagcaaaacgaccttggaacctcaatgggggctgctttgctttgggaggttcttgttggtgggaccagagctttgacaaacctcctgctccttggtggcacctctcctggaaggacgtcacaactccaggtgctcagactgcctgtggcagcagaaccagtgcctttggcattttcctcccacaatggggaaggtgactttggcattcttacaaactcgtctctcggcctttctctcctgccttccacagcctctcgtttctcctccatctgtgcttattacttgaggactgtgtctgctccgtgagagctgcgtgggcagggctgcagtggggtccaggtggtgttcagctgtgctgatgcctgccattgggtcctccttaggctctgtaagtcgtgacagccttcatcagtgcaatgtttgcagggtaattcttaaactttttagagggtggcaggtacatcagttctttttgatatgaaaacattcatgtttcagacattgaattgagagcttttaggggaagcataatggttattgtcactatcaacagtctaaaaagaaaaactgaggtctttttaatcttgattacagcactcacggcatgcaccctactcagtgtgggtgtcttcgtttgggggcttttttttttttggcacttctgaggctagatatgtctggctgaagatttgatgtggttcctccttaagctatgcgtcctgttaataataggtactgtactgggctctgtgtaagtgtcgttggggtaggacctatattttaatactgttcctaacatttcattttactagcgagaaatctttgatttcattttattctttgtaattctagacactagattgtagtttagccacgactttgttcggggtcacgagctcgaa

SEQ ID NO: 355385 - DNA, 4680 bp, Homo sapiens
gagatggaggcgctgcggcagatcaaagacacggtgacaatggatgctgggagagccaacaaggaggttgaaatccttcgaaagcagtgcaaggctctgtgccaggagctgaaggaagccctccaggaggcggatgtggccaagtgccggcgggactgggccttccaggagcgagacaagattgtagcagagcgtgacagcatccggacactgtgtgacaacctgaggcgggagcgggaccgtgcggtgagcgagctggctgaggccctgcgcagcctggatgacacccgcaagcagaagaatgatgtcagccgcgagctgaaggagctcaaggaacagatggaatcccagttggaaaaggaggcccggttccgacagctgatggcccacagctcccacgactcggccattgacacggattccatggagtgggaaacggaagttgtagagttcgagagggagacggaggatattgacttgaaggcactggggtttgatatggcagaaggtgtgaatgagccttgtttcccgggggactgtggcatatttgtcactaaagtggacaaaggaagcattgctgatggccgcttaagggtcaatgactggctgctgagaatcaacgatgtggacctcatcaacaaggacaagaagcaggccatcaaggcgctcctcaatggggagggggccatcaacatggtcgtgcggcggaggaagtccctgggtgggaaggtggtcacgccgctgcacatcaacctcagtggacagaaagacagtggcatcagtctggagaatggagtgtatgctgccgctgtgctgcctggaagccctgccgctaaagaagggtcccttgctgtgggagacaggatcgttgcgatcaatggcattgcactggacaacaagtctctgaatgaatgtgaatctctgctgcggagctgccaggactccctgaccctgtccctcctgaaggtattccctcagagctcctcgtggagtggccagaacatttttgaaaatatcaaagactctgataagatgctgagttttcgagcccatggcccggaggtccaggctcataacaaacggaacttgatacagcacaataactccacgcagacagacatcttctacacggacaggctggaagacaggaaggagccaggccccccaggaggcagcagctcctttctgcataagccattccctgggggacccttgcaggtctgcccccaggcctgtcccagtgcctctgagcgtagcctgagctccttccgctcagatgcctctggggaccgtggctttgggctggtggacgtgcgtggccggcggccactgctgccctttgagaccgaggtgggcccctgtggggttggggaggcctccctggacaaggcagactctgaaggctccaacagcggcgggacctggcccaaggccatgctcagctccacggcagtgcctgagaagctctctgtttataaaaagccaaagcaaagaaagtccatctttgaccctaacactttcaaacgcccccagacaccccccaaaatagactacctgcttccaggtcctgggcctgctcactctccccagccctccaagagggcggggcctctgacacccccaaaacctcccagaaggagcgactccattaagttccagcacaggctggagactagctccgagtcagaagccactctggtgggcagctccccatccactagtcccccgagcgccctgccccctgacgtggaccccggggagcccatgcacgcatcaccccctcgcaaggccagggtccgcattgcttccagctactaccctgaaggagatggggactcctcccacctgccggccaagaaatcctgtgatgaggacctcacctcccagaaggtggatgagctggggcagaagcgtcgccggccaaaatctgctcccagttttcggccgaagcttgctccagtagtgattcctgctcagttcctggaggaacagaagtgtgtcccggccagtggagaactctccccggagctccaggagtgggcaccttactcgcctgggcattccagccggcacagcaaccccccgctataccctagcaggccgtctgtgggcactgttccccggagtttgacccccagcaccactgtgagctccatcctgcggaaccccatctacactgtgcgcagtcacagggtcggcccctgcagctctccacctgcggcccgagatgctggcccccagggtttgcatcccagtgtccagcaccagggacgcctgagcctggacctgagccacaggacctgcagcgactactccgagatgagagccacccatgggtccaactcactgccctccagcgcccgcctgggttcttcgagtaacttgcagttcaaggcggaacgcattaaaatcccatcaacaccaagatatccgcggagtgtcgtgggctccgagagaggttcagtgtcacattctgaatgcagcactcctccacagtcacccctgaacatcgacaccctgtcctcttgtagccagtcccagacctcagcctccacattgcccagaatcgctgtcaaccccgcgtccctcggggagcggagaaaggacaggccttatgtggaggagccacgccacgtgaaggtgcagaagggctcagagccgctgggcatctccatcgtgagtggagagaagggcggcatctacgtctccaaggtgaccgtggggagcatcgctcaccaggctggcctcgagtatggggatcagttactggagttcaacggcataaacctgcggagcgccacggagcagcaggcgcggctcatcatcgggcagcagtgtgataccatcaccatcctggcccagtacaacccccacgtgcaccagctcagcagccactcccggtccagctcacacctggaccctgccggtacccactccactctccagggcagtggcaccaccaccccggagcatccatctgtcatcgacccactgatggagcaggacgaggggcctagcacccccccagccaagcagagcagctccaggattgcgggagatgccaacaagaagaccctggagccacgcgttgtcttcatcaaaaagtcccagctggagcttggggtgcacttgtgtggtgggaacctgcatggggtgtttgtggccgaggtggaggatgacagtcctgccaagggtcctgacggcctcgtgccaggggacctcatcctggagtatggcagcctggacgtgcggaacaagacagtggaggaagtctatgtggagatgctgaagcccagggatggcgtccgcctgaaggtgcagtaccgccctgaggagttcacgaaggccaagggcctgcctggtgacagcttctacatcagggccctgtacgaccggctggcagatgtggagcaagagttgagctttaagaaggacgacatcctctacgtggatgacaccttaccccagggcacgttcgggtcctggatggcttggcagctggacgagaatgcccagaagatccagcgcgggcagattcccagcaaatatgtgatggaccaagaattctccaggaggctcagcatgtctgaagtcaaagatgacaatagcgccacaaagacgctgtcagcggctgcacgccggtccttttttcggaggaaacacaagcacaaacgcagcgggtccaaggacgggaaagacctgctcgccttggatgccttttccagtgactccattccactctttgaagattcggtgagcctggcctatcagcgggtccagaaggtggactgcaccgctctgaggcctgtcctgattctggggcctttgctggacgtggtgaaggagatgctggtgaatgaggctcctggcaagttctgcagatgtccccttgaggtgatgaaggcctcccagcaggccattgagcggggtgtcaaagattgcctgtttgtcgactataagcggagaagcggccatttcgatgtgaccactgtggcgtcaataaaggagatcacagaaaagaaccgacactgcctcctggacattgctccgcacgctattgagcggctccaccacatgcacatctaccccattgtcatcttcatccactacaagagcgccaagcacatcaaggagcagagagaccccatctacctgagggacaaggtgactcagaggcattccaaagagcagtttgaggcggcgcagaagcttgagcaggagtacagcaggtacttcacaggtaggtgtgcgtgggcctggagtggggagcaggcagcagggaaggaagcagaggcttcctaaggctgttttcttagccgtggagaagcccgcactttctacatgctcccaagtgctgtcatgagcacgttcctgacaagtcaggtgttcagattgcagtccctggccaacgtcaggattcttacaggttgaatgttaagctcaccgatcttggcctcaggtcctgcctggcttgcctgctcattttcacacgtgcagtggtgggtctgtctcatagcacaggtgcagtttagtgcagccacagtgtccccaggcagggcggggactggagcagcccccagtgtgccagcagtgtgggcagcggaggctaggggcccatctgtccctagcaccctccagggcagtcccgttttgcagcgggatttggcaaacccccctcca

SEQ ID NO: 355386 - DNA, 4596 bp, Homo sapiens
gagatggaggcgctgcggcagatcaaagacacggtgacaatggatgctgggagagccaacaaggaggttgaaatccttcgaaagcagtgcaaggctctgtgccaggagctgaaggaagccctccaggaggcggatgtggccaagtgccggcgggactgggccttccaggagcgagacaagattgtagcagagcgtgacagcatccggacactgtgtgacaacctgaggcgggagcgggaccgtgcggtgagcgagctggctgaggccctgcgcagcctggatgacacccgcaagcagaagaatgatgtcagccgcgagctgaaggagctcaaggaacagatggaatcccagttggaaaaggaggcccggttccgacagctgatggcccacagctcccacgactcggccattgacacggattccatggagtgggaaacggaagttgtagagttcgagagggagacggaggatattgacttgaaggcactggggtttgatatggcagaaggtgtgaatgagccttgtttcccgggggactgtggcatatttgtcactaaagtggacaaaggaagcattgctgatggccgcttaagggtcaatgactggctgctgagaatcaacgatgtggacctcatcaacaaggacaagaagcaggccatcaaggcgctcctcaatggggagggggccatcaacatggtcgtgcggcggaggaagtccctgggtgggaaggtggtcacgccgctgcacatcaacctcagtggacagaaagacagtggcatcagtctggagaatggagtgtatgctgccgctgtgctgcctggaagccctgccgctaaagaagggtcccttgctgtgggagacaggatcgttgcgatcaatggcattgcactggacaacaagtctctgaatgaatgtgaatctctgctgcggagctgccaggactccctgaccctgtccctcctgaaggtattccctcagagctcctcgtggagtggccagaacatttttgaaaatatcaaagactctgataagatgctgagttttcgagcccatggcccggaggtccaggctcataacaaacggaacttgatacagcacaataactccacgcagacagacatcttctacacggacaggctggaagacaggaaggagccaggccccccaggaggcagcagctcctttctgcataagccattccctgggggacccttgcaggtctgcccccaggcctgtcccagtgcctctgagcgtagcctgagctccttccgctcagatgcctctggggaccgtggctttgggctggtggacgtgcgtggccggcggccactgctgccctttgagaccgaggtgggcccctgtggggttggggaggcctccctggacaaggcagactctgaaggctccaacagcggcgggacctggcccaaggccatgctcagctccacggcagtgcctgagaagctctctgtttataaaaagccaaagcaaagaaagtccatctttgaccctaacactttcaaacgcccccagacaccccccaaaatagactacctgcttccaggtcctgggcctgctcactctccccagccctccaagagggcggggcctctgacacccccaaaacctcccagaaggagcgactccattaagttccagcacaggctggagactagctccgagtcagaagccactctggtgggcagctccccatccactagtcccccgagcgccctgccccctgacgtggaccccggggagcccatgcacgcatcaccccctcgcaaggccagggtccgcattgcttccagctactaccctgaaggagatggggactcctcccacctgccggccaagaaatcctgtgatgaggacctcacctcccagaaggtggatgagctggggcagaagcgtcgccggccaaaatctgctcccagttttcggccgaagcttgctccagtagtgattcctgctcagttcctggaggaacagaagtgtgtcccggccagtggagaactctccccggagctccaggagtgggcaccttactcgcctgggcattccagccggcacagcaaccccccgctataccctagcaggccgtctgtgggcactgttccccggagtttgacccccagcaccactgtgagctccatcctgcggaaccccatctacactgtgcgcagtcacagggtcggcccctgcagctctccacctgcggcccgagatgctggcccccagggtttgcatcccagtgtccagcaccagggacgcctgagcctggacctgagccacaggacctgcagcgactactccgagatgagagccacccatgggtccaactcactgccctccagcgcccgcctgggttcttcgagtaacttgcagttcaaggcggaacgcattaaaatcccatcaacaccaagatatccgcggagtgtcgtgggctccgagagaggttcagtgtcacattctgaatgcagcactcctccacagtcacccctgaacatcgacaccctgtcctcttgtagccagtcccagacctcagcctccacattgcccagaatcgctgtcaaccccgcgtccctcggggagcggagaaaggacaggccttatgtggaggagccacgccacgtgaaggtgcagaagggctcagagccgctgggcatctccatcgtgagtggagagaagggcggcatctacgtctccaaggtgaccgtggggagcatcgctcaccaggctggcctcgagtatggggatcagttactggagttcaacggcataaacctgcggagcgccacggagcagcaggcgcggctcatcatcgggcagcagtgtgataccatcaccatcctggcccagtacaacccccacgtgcaccagctcagcagccactcccggtccagctcacacctggaccctgccggtacccactccactctccagggcagtggcaccaccaccccggagcatccatctgtcatcgacccactgatggagcaggacgaggggcctagcacccccccagccaagcagagcagctccaggattgcgggagatgccaacaagaagaccctggagccacgcgttgtcttcatcaaaaagtcccagctggagcttggggtgcacttgtgtggtgggaacctgcatggggtgtttgtggccgaggtggaggatgacagtcctgccaagggtcctgacggcctcgtgccaggggacctcatcctggagtatggcagcctggacgtgcggaacaagacagtggaggaagtctatgtggagatgctgaagcccagggatggcgtccgcctgaaggtgcagtaccgccctgaggagttcacgaaggccaagggcctgcctggtgacagcttctacatcagggccctgtacgaccggctggcagatgtggagcaagagttgagctttaagaaggacgacatcctctacgtggatgacaccttaccccagggcacgttcgggtcctggatggcttggcagctggacgagaatgcccagaagatccagcgcgggcagattcccagcaaatatgtgatggaccaagaattctccaggaggctcagcatgtctgaagtcaaagatgacaatagcgccacaaagacgctgtcagcggctgcacgccggtccttttttcggaggaaacacaagcacaaacgcagcgggtccaaggacgggaaagacctgctcgccttggatgccttttccagtgactccattccactctttgaagattcggtgagcctggcctatcagcgggtccagaaggtggactgcaccgctctgaggcctgtcctgattctggggcctttgctggacgtggtgaaggagatgctggtgaatgaggctcctggcaagttctgcagatgtccccttgaggtgatgaaggcctcccagcaggccattgagcggggtgtcaaagattgcctgtttgtcgactataagcggagaagcggccatttcgatgtgaccactgtggcgtcaataaaggagatcacagaaaagaaccgacactgcctcctggacattgctccgcacgctattgagcggctccaccacatgcacatctaccccattgtcatcttcatccactacaagagcgccaagcacatcaaggagcagagagaccccatctacctgagggacaaggtgactcagaggcattccaaagagcagtttgaggcggcgcagaagcttgagcaggagtacagcaggtacttcacaggggtcatccagggaggagccctgtcaagcatttgcactcagatcttggcaatggtcaatcaagaacaaaataaagtcctgtggattccagcctgcccgctctaggagaatgctgtgctgtggatgactgcagctggccgcctgaggggacgccagactcagctcttttctagcgactgaaagtagaagtctgctcgtgccgaattcggcacgaggcgagcgtggtgtgcaaggtccccctggtcctgctggtccccgaggggccaacggtgctcccggcaacgatggtgctaagggtgatgctggtgcccctggagctcccggtagccagggcgcccctggccttcagggaatgcc

SEQ ID NO: 355387 - DNA, 4328 bp, Homo sapiens
gagatggaggcgctgcggcagatcaaagacacggtgacaatggatgctgggagagccaacaaggaggttgaaatccttcgaaagcagtgcaaggctctgtgccaggagctgaaggaagccctccaggaggcggatgtggccaagtgccggcgggactgggccttccaggagcgagacaagattgtagcagagcgtgacagcatccggacactgtgtgacaacctgaggcgggagcgggaccgtgcggtgagcgagctggctgaggccctgcgcagcctggatgacacccgcaagcagaagaatgatgtcagccgcgagctgaaggagctcaaggaacagatggaatcccagttggaaaaggaggcccggttccgacagctgatggcccacagctcccacgactcggccattgacacggattccatggagtgggaaacggaagttgtagagttcgagagggagacggaggatattgacttgaaggcactggggtttgatatggcagaaggtgtgaatgagccttgtttcccgggggactgtggcatatttgtcactaaagtggacaaaggaagcattgctgatggccgcttaagggtcaatgactggctgctgagaatcaacgatgtggacctcatcaacaaggacaagaagcaggccatcaaggcgctcctcaatggggagggggccatcaacatggtcgtgcggcggaggaagtccctgggtgggaaggtggtcacgccgctgcacatcaacctcagtggacagaaagacagtggcatcagtctggagaatggagtgtatgctgccgctgtgctgcctggaagccctgccgctaaagaagggtcccttgctgtgggagacaggatcgttgcgatcaatggcattgcactggacaacaagtctctgaatgaatgtgaatctctgctgcggagctgccaggactccctgaccctgtccctcctgaaggtattccctcagagctcctcgtggagtggccagaacatttttgaaaatatcaaagactctgataagatgctgagttttcgagcccatggcccggaggtccaggctcataacaaacggaacttgatacagcacaataactccacgcagacagacatcttctacacggacaggctggaagacaggaaggagccaggccccccaggaggcagcagctcctttctgcataagccattccctgggggacccttgcaggtctgcccccaggcctgtcccagtgcctctgagcgtagcctgagctccttccgctcagatgcctctggggaccgtggctttgggctggtggacgtgcgtggccggcggccactgctgccctttgagaccgaggtgggcccctgtggggttggggaggcctccctggacaaggcagactctgaaggctccaacagcggcgggacctggcccaaggccatgctcagctccacggcagtgcctgagaagctctctgtttataaaaagccaaagcaaagaaagtccatctttgaccctaacactttcaaacgcccccagacaccccccaaaatagactacctgcttccaggtcctgggcctgctcactctccccagccctccaagagggcggggcctctgacacccccaaaacctcccagaaggagcgactccattaagttccagcacaggctggagactagctccgagtcagaagccactctggtgggcagctccccatccactagtcccccgagcgccctgccccctgacgtggaccccggggagcccatgcacgcatcaccccctcgcaaggccagggtccgcattgcttccagctactaccctgaaggagatggggactcctcccacctgccggccaagaaatcctgtgatgaggacctcacctcccagaaggtggatgagctggggcagaagcgtcgccggccaaaatctgctcccagttttcggccgaagcttgctccagtagtgattcctgctcagttcctggaggaacagaagtgtgtcccggccagtggagaactctccccggagctccaggagtgggcaccttactcgcctgggcattccagccggcacagcaaccccccgctataccctagcaggccgtctgtgggcactgttccccggagtttgacccccagcaccactgtgagctccatcctgcggaaccccatctacactgtgcgcagtcacagggtcggcccctgcagctctccacctgcggcccgagatgctggcccccagggtttgcatcccagtgtccagcaccagggacgcctgagcctggacctgagccacaggacctgcagcgactactccgagatgagagccacccatgggtccaactcactgccctccagcgcccgcctgggttcttcgagtaacttgcagttcaaggcggaacgcattaaaatcccatcaacaccaagatatccgcggagtgtcgtgggctccgagagaggttcagtgtcacattctgaatgcagcactcctccacagtcacccctgaacatcgacaccctgtcctcttgtagccagtcccagacctcagcctccacattgcccagaatcgctgtcaaccccgcgtccctcggggagcggagaaaggacaggccttatgtggaggagccacgccacgtgaaggtgcagaagggctcagagccgctgggcatctccatcgtgagtggagagaagggcggcatctacgtctccaaggtgaccgtggggagcatcgctcaccaggctggcctcgagtatggggatcagttactggagttcaacggcataaacctgcggagcgccacggagcagcaggcgcggctcatcatcgggcagcagtgtgataccatcaccatcctggcccagtacaacccccacgtgcaccagctcagcagccactcccggtccagctcacacctggaccctgccggtacccactccactctccagggcagtggcaccaccaccccggagcatccatctgtcatcgacccactgatggagcaggacgaggggcctagcacccccccagccaagcagagcagctccaggattgcgggagatgccaacaagaagaccctggagccacgcgttgtcttcatcaaaaagtcccagctggagcttggggtgcacttgtgtggtgggaacctgcatggggtgtttgtggccgaggtggaggatgacagtcctgccaagggtcctgacggcctcgtgccaggggacctcatcctggagtatggcagcctggacgtgcggaacaagacagtggaggaagtctatgtggagatgctgaagcccagggatggcgtccgcctgaaggtgcagtaccgccctgaggagttcacgaaggccaagggcctgcctggtgacagcttctacatcagggccctgtacgaccggctggcagatgtggagcaagagttgagctttaagaaggacgacatcctctacgtggatgacaccttaccccagggcacgttcgggtcctggatggcttggcagctggacgagaatgcccagaagatccagcgcgggcagattcccagcaaatatgtgatggaccaagaattctccaggaggctcagcatgtctgaagtcaaagatgacaatagcgccacaaagacgctgtcagcggctgcacgccggtccttttttcggaggaaacacaagcacaaacgcagcgggtccaaggacgggaaagacctgctcgccttggatgccttttccagtgactccattccactctttgaagattcggtgagcctggcctatcagcgggtccagaaggtggactgcaccgctctgaggcctgtcctgattctggggcctttgctggacgtggtgaaggagatgctggtgaatgaggctcctggcaagttctgcagatgtccccttgaggtgatgaaggcctcccagcaggccattgagcggggtgtcaaagattgcctgtttgtcgactataagcggagaagcggccatttcgatgtgaccactgtggcgtcaataaaggagatcacagaaaagaaccgacactgcctcctggacattgctccgcacgctattgagcggctccaccacatgcacatctaccccattgtcatcttcatccactacaagagcgccaagcacatcaaggagcaaagaccccaaaagcttttggggtctttctttctttttttatttttttgggagacagagttgggctcttacacccaggggggagtgaaggggccattctcaagctcaaagaaacttcaaccccagggtccaggggatcctcgtgcctaagcctccggagaagcggggataatagataccggcacaaggcccac

SEQ ID NO: 355388 - DNA, 195 bp, Homo sapiens
ggggttccccagccccactcaggtcctccactccaagctgggtccgtgacgctgctgctctctctccctcagattcggtgagcctggcctatcagcgggtccagaaggtggactgcaccgctctgaggcctgtcctgattctggggcctttgctggacgtggtgaaggagatgctggtgaatgaggctcctggca

SEQ ID NO: 355389 - DNA, 439 bp, Homo sapiens
cagtctctgtctttgaatatctgaatgttctggcccttcaacaaattctttaaatcatgctaaggaatttcgttttatgtggacacactcaactttgatattcaggagatgtttttacaaaatgactaattgaaaaaagttgaaacaaatgattttaaaagcttgcagtaaaaaataaactcatagattcagcaaatatttgttgactaaaattatagcatttttaatgcagaaaattataaagaatttggagattgagctgccttatttctaatgaacactcctcttcatcttattaagtcttcacagtttttccagtggctataattatggaattggtgacctatgttttatattatcaaggaagccttagattcactctgatctaagaaattattgaaattgaccctttttacacaaatgtctttaaaaaaaaaaa

SEQ ID NO: 355390 - DNA, 257 bp, Homo sapiens
ctgacacatagtaggctgtcaatagatatatgttcaacatatgaatgaatgaatgaaaaagcaatcaggcactttgatttagaatgtgtgtatacacacacacacatcatatatatatttatatataaaacaacagatgtcatacatatacatatatacacgcatgtatgtatatatgtatgcgtaatgatatacatgcatgtatatacatatatacatacatatatgtgtacatgcacacatatatgtgtatatat

SEQ ID NO: 355391 - DNA, 773 bp, Homo sapiens
gtgattgtcctcagtgtaccttctggcggcaggtgcagacacgagtttgcccacattctgcattgatgataaacagtttactgtatgatcatataacctccagtggaatgctgagttggtcacgaccctcaagtctttggctcccaacccttaggtaggaccttaggacactacacacggttcggcctcattgcttcttatttaaatttgttcatactctccagggtgactggtttgtccctgcattctccaaatatacgggatgcagggcctcaaatcctccaccctcataccacagcctaactcttcaagggcttgcagtgaaatctgtgtctgaacatttcacatgagaggaaagcagagaataaccactagacatttgcctgaaaaatcctttctgcctctcctcctcttatctttccgagacacagacaccttatcaggatgtctttgggatgcggttcctttctggaaactgtacagggtgatgtgtcttcagtacaccctcctatcttttcctggttttgggttttagaactgcctcgggctgactcaagttccccacaactgccatgtctcctggagggtctagtgggtatcagtgcctaggggagtggggcctcccaagggagcagctgaatgccttatggtggcagagatgcctggtatacgcttcatctagataaccaattctctgagttctcagcttctccctcccaactccagtttccattaattggagacacatggctggtcagccaattggatgttgc

SEQ ID NO: 355392 - DNA, 523 bp, Homo sapiens
gtctcctcccctctctgggcctttggaagataaggaacctgccatttctcagagggtctgccctgttgctgggattcctcaccagagttcttgcctcctcttcgggcagtggcctgcagcagcccctcccagagcagaaatcctagggttttaggaagcagaggtggggaacagggttggactgcctgggcctcaggtctctggagggaccagggtctctggccttcaaccccctgttaggagctgctacccctccctgtgccctgtgctcaccctctcttctcccccaggggcagctggactctctgtgacatctaaagttatcgggggctttgctgggacagctcttggggcctggctgggttcacccccttccagctgaacaccacactgaggcagggagttggctctcttggtggagatgactttcctgggcctctggatgacaatcttccaaaggacaagtctcctactcccaaaactatttaaggaagcatgaaaaataaagatgctggttatcttc

SEQ ID NO: 355393 - DNA, 531 bp, Homo sapiens
tctgggggactcccgtcccattggcccaaccccaaatctccacttcccgcagttgtggctgtggggactgtgctcgtggcgctcagtgccatgggcttcacctcagtaggaatcgccgcatcctccatagcagccaagatgatgtctacagcagccattgccaacgggggcggagttgctgctggcagtctggtggctattctgcagtcagtgggtgagtgttctggacaggatgaccagagccaggagatgatccagccccgaggctgaaccagggaggcctctcctctccctgcaggggcagctggactctctgtgacatctaaagttatcgggggctttgctgggacagctcttggggcctggctgggttcacccccttccagctgaacaccacactgaggcagggagttggctctcttggtggagatgactttcctgggcctctggatgacaatcttccaaaggacaagtctcctactcccaaaactatttaaggaagcatgaaaaataaagatgctggttatcttc

SEQ ID NO: 355394 - DNA, 1035 bp, Homo sapiens
cggccgccctctctggacccgggaacccaccggcccagagcgacccacgataggaacccaccggcccagagcgacccgcgataggaacccgggttcctggcctcagcccctctccagagtcggctccaaccccgctcgttttggtactcaccgtgtggagacgccaccgcagctccgtcagtcgcgagtgaagaacctcagaaaccgccgctgtacctcagctgcagcagcaactgcagttccggggcgggacctccacgcacgtactcgtgcgcgctggggaggaagtcccgcccctatggcaaactcagctacctgattggctgcctcgcggaccgcagcagtgccggcgggagagctggcttggggcgctggcacctcctcttacagctttactcctgccagcttgggaaaaggccggagaaggtgaaattctgtgtgctccctccggcgagagactttgtcagctcccgcacagtaacctttatccaaaccagatcctgaataaagtcaaaactcaaccaacaggtggaagtccaagaatccgagtggaggctcaccgaggcgaaggggccaaccatgggaaaggagagtggatgggactcaggcagggctgctgtagcagctgtggtcggaggagttgtggctgtggggactgtgctcgtggcgctcagtgccatgggcttcacctcagtaggaatcgccgcatcctccatagcagccaagatgatgtctacagcagccattgccaacgggggcggagttgctgctggcagtctggtggctattctgcagtcagtgggggcagctggactctctgtgacatctaaagttatcgggggctttgctgggacagctcttggggcctggctgggttcacccccttccagctgaacaccacactgaggcagggagttggctctcttggtggagatgactttcctgggcctctggatgacaatcttccaaaggacaagtctcctactcccaaaactatttaaggaagcatgaaaaataaagatgctggttatcttc

SEQ ID NO: 355395 - DNA, 989 bp, Homo sapiens
cggccgccctctctggacccgggaacccaccggcccagagcgacccacgataggaacccaccggcccagagcgacccgcgataggaacccgggttcctggcctcagcccctctccagagtcggctccaaccccgctcgttttggtactcaccgtgtggagacgccaccgcagctccgtcagtcgcgagtgaagaacctcagaaaccgccgctgtacctcagctgcagcagcaactgcagttccggggcgggacctccacgcacgtactcgtgcgcgctggggaggaagtcccgcccctatggcaaactcagctacctgattggctgcctcgcggaccgcagcagtgccggcgggagagctggcttggggcgctggcacctcctcttacagctttactcctgccagcttgggaaaaggccggagaaggtgaaattctgtgtgctccctccggcgagagactttgtcagctcccgcacagtaacgtggaagtccaagaatccgagtggaggctcaccgaggcgaaggggccaaccatgggaaaggagagtggatgggactcaggcagggctgctgtagcagctgtggtcggaggagttgtggctgtggggactgtgctcgtggcgctcagtgccatgggcttcacctcagtaggaatcgccgcatcctccatagcagccaagatgatgtctacagcagccattgccaacgggggcggagttgctgctggcagtctggtggctattctgcagtcagtgggggcagctggactctctgtgacatctaaagttatcgggggctttgctgggacagctcttggggcctggctgggttcacccccttccagctgaacaccacactgaggcagggagttggctctcttggtggagatgactttcctgggcctctggatgacaatcttccaaaggacaagtctcctactcccaaaactatttaaggaagcatgaaaaataaagatgctggttatcttc

SEQ ID NO: 355396 - DNA, 827 bp, Homo sapiens
cggccgccctctctggacccgggaacccaccggcccagagcgacccacgataggaacccaccggcccagagcgacccgcgataggaacccgggttcctggcctcagcccctctccagagtcggctccaaccccgctcgttttggtactcaccgtgtggagacgccaccgcagctccgtcagtcgcgagtgaagaacctcagaaaccgccgctgtacctcagctgcagcagcaactgcagttccggggcgggacctccacgcacgtactcgtgcgcgctggggaggaagtcccgcccctatggcaaactcagctacctgattggctgcctcgcggaccgcagcagtgccggcgggagagctggcttggggcgctggcacctcctcttacagctttactcctgccagcttgggaaaaggccggagaaggtgaaattctgtgtgctccctccggcgagagactttgtcagctcccgcacagtaacgtggaagtccaagaatccgagtggaggctcaccgaggcgaaggggccaaccatgggaaaggagagtggatgggactcaggcagggctgctgtagcagctgtggtcggaggaggggcagctggactctctgtgacatctaaagttatcgggggctttgctgggacagctcttggggcctggctgggttcacccccttccagctgaacaccacactgaggcagggagttggctctcttggtggagatgactttcctgggcctctggatgacaatcttccaaaggacaagtctcctactcccaaaactatttaaggaagcatgaaaaataaagatgctggttatcttc

SEQ ID NO: 355397 - DNA, 1209 bp, Homo sapiens
  misc_feature (1136)..(1136): n is a, c, g, or t
cggccgccctctctggacccgggaacccaccggcccagagcgacccacgataggaacccaccggcccagagcgacccgcgataggaacccgggttcctggcctcagcccctctccagagtcggctccaaccccgctcgttttggtactcaccgtgtggagacgccaccgcagctccgtcagtcgcgagtgaagaacctcagaaaccgccgctgtacctcagctgcagcagcaactgcagttccggggcgggacctccacgcacgtactcgtgcgcgctggggaggaagtcccgcccctatggcaaactcagctacctgattggctgcctcgcggaccgcagcagtgccggcgggagagctggcttggggcgctggcacctcctcttacagctttactcctgccagcttgggaaaaggccggagaaggtgaaattctgtgtgctccctccggcgagagactttgtcagctcccgcacagtaacgtggaagtccaagaatccgagtggaggctcaccgaggcgaaggggccaaccatgggaaaggagagtggatgggactcaggcagggctgctgtagcagctgtggtcggaggagttgtggctgtggggactgtgctcgtggcgctcagtgccatgggcttcacctcagtaggaatcgccgcatcctccatagcagccaagatgatgtctacagcagccattgccaacgggggcggagttgctgctggcagtctggtggctattctgcagtcagtgggggcagctggactctctgtgacatctaaagttatcgggggctttgctgggacagctcttggggcctggctgggttcacccccttccagctgaacaccacactgaggcagggagttggctctcttggtggagatgactttcctgggcctctggatgacaatcttccaaaggacaagtctcctactcccaaaactatttaaggaagcatgaaaaataaagatgctggttatcttcaaaagaacaaacatgccacaatgacctggcctaatacgttacgtcgatggaaccgcgttccctatgctgggcacccttcgcggtattcagcagctccaggggagaggaggggtttatgtttattcttggctaccgtgtatattcttngctttctacgccatgccgactagttacgagcgcacacgcagtacggcacacagcagcaccacgacatacggct

SEQ ID NO: 355398 - DNA, 993 bp, Homo sapiens
cggccgccctctctggacccgggaacccaccggcccagagcgacccacgataggaacccaccggcccagagcgacccgcgataggaacccgggttcctggcctcagcccctctccagagtcggctccaaccccgctcgttttggtactcaccgtgtggagacgccaccgcagctccgtcagtcgcgagtgaagaacctcagaaaccgccgctgtacctcagctgcagcagcaactgcagttccggggcgggacctccacgcacgtactcgtgcgcgctggggaggaagtcccgcccctatggcaaactcagctacctgattggctgcctcgcggaccgcagcagtgccggcgggagagctggcttggggcgctggcacctcctcttacagctttactcctgccagcttgggaaaaggccggagaaggtgaaattctgtgtgctccctccggcgagagactttgtcagctcccgcacagtaacgtggaagtccaagaatccgagtggaggctcaccgaggcgaaggggccaaccatgggaaaggagagtggatgggactcaggcagggctgctgtagcagctgtggtcggaggagttgtggctgtggggactgtgctcgtggcgctcagtgccatgggcttcacctcagtaggaatcgccgcatcctccatagcagccaagatgatgtctacagcagccattgccaacgggggcggagttgctgctggcagtctggtggctattctgcagtcagtgggggcagctggactctctgtgacatctaaagttatcgggggctttgctgggacagctcttggggcctggctgggttcacccccttccagctgaacaccacactgaggcagggagttggctctcttggtgcaccaccccaccccactcccatgtaggaaactaaaatccagtgtggtttgtattttttcccccatctttttaatctagtatcttcaatgaacctgctcagaaagtccgg

SEQ ID NO: 355399 - DNA, 511 bp, Homo sapiens
ctgggccacagtgctcagatatgtggctgaacattattttggatattctatgagggtgatttttggagaagattaacatttaatggttggactttgagtaaagcagattaccctccacaatgtggatgggcccccatccagttagttgaaggacttaatataaaacactgacctcacacaagcaagaagttctgccagatgactgcttttgaactcaaactgcaaggtgtatgtatataatagaaacatatattttgtttctcccattttatccaaatgaaaacataccatacctacttttctgcatcttgctttttgtacttaaccctttaaatatgtaagttcttgaagaactttccatattcgctcataaataatttttcttcctttttttccttaacagccacatatttttccattgtatggctatacagtcattattattttttttttttgcatgaatgtaagtgcattgtctttgtagggtaaattcctagaggtggaaccacta

SEQ ID NO: 355400 - DNA, 289 bp, Homo sapiens
ccatcctggctaagacggtgaaatcccatctctactaaaaatacacaaaattagctgggcgtggtggcacacgcctgtagtcccagctattcaggaggctgaggcagcagaattgcttgaacctaggaggcagaggttgcagtgagccaagatcatgccactgcactccagcctgggcgacagagcaagaccctgtctcaaaaaataaataaataaataaatagaaatgttgtaaactaatgtcaagaaaatttctcagaatgggaaaaaagatcaagatggaaagtaa

SEQ ID NO: 355401 - DNA, 1737 bp, Homo sapiens
  misc_feature (1737)..(1737): n is a, c, g, or t
cgctgattggctgtggccgcggcgggggcgggacctggcggagagcggcggattcaagatggcggcggccaggaggcggcttccagcggagccggcgggaaaaagcgagacctccgcggcggcttccgccggaccgcgtcctctcctggcagggggcggtggcgggcaccggagccgcccttaggacttcacgccagagcagctagagaagaagcccctaatgtttaccttcgtcctcccggcctccacctttctgcgccgctgctcttgctcaacttccatctccctcagactccgcgcgggccgcccggcggtgacggggctgacacagagcagccttcgctctatttacactccctcccccgcgcttgggctcgccctccccccgcgacaactgtcacgcagccgcggccccgcccccgacacgcgccgccaatcagggggctgcgtttccggtctcgcgcacgcgcgctctgggcggtgcagcctgggcggagccccgccctttacgctcgccggccacagattggtgcgctcacgtacccgcctcctacggcaggaccagtaagcggaaagcggaggcctggcgcccgctgtgattggccgattttaaaatcccctgccaggctggccgagcggcaaaaagttcgcgctgctggtcccagcgcgggcggcccctgggctttgtgtccaccaggacagcgggccgggctccctgcaggcgcgggcggcgccgaacggtgctcagcaaccacccggacagggccaggccgttttctcccgctcaggcattagtcgttggctgtgggccgccgcgggaagttgaggcctaccacggaggaggctgctgaggtggatctcaggggatccgcaagggctccctcacccttgccgggaccctgggaacccgaaacaaaatcctacgccaccagcccgccgaatgcgccccctcggccgggggtcctgggtcttcagagaagaactcggccgaatgcggtcagaaagcccgcgaaccgcctggacctgcaggccccgccgcttggagctcccgcctttcccgaccgagcccgtgtctgctcgtgtgtctcactgatgtcttaggtctcaaaaaaaaaagaaaagaaaaaaaaaaaaaaaaaaaaaaaaaaaaaaaaaaaaaaaaaaccaacggaacatatatgttgtgggggggggaaacaagagggacagaaaagaggcacaacgagggcaaaaaatgaggaacaagacaccacagtattctgtgacaaaagggggagaaaactgcggggcacccaaatagagaggaccgctataatagacgacgaacaaacgcgcggtaaacacggctttatattctcgcgcaaagaggagacgaaagacaggacgggagaacaacgaggacgagaagcagcggagacgagcacgaagacgagaacagagagagagagagaagaacagacagaaatgaacgacgacaaggacagagaagaaggacagaacagagtggacggaggacacaagagaaagagaacagaaagagacgacagccgaagcacaacggaagcacaaagggagggagagagagcaagagaagaaaaaaagcaaaaaaaagaaaaaagaaaacaaagggaggaagacagaaagagaagagagcaaagaaaggagaaaaagaggaagacagagaggaggaggaagagaagagaaagagaaagaggaaagagagaagaggagagcaan

SEQ ID NO: 355402 - DNA, 3190 bp, Homo sapiens
cgctgattggctgtggccgcggcgggggcgggacctggcggagagcggcggattcaagatggcggcggccaggaggcggcttccagcggagccggcgggaaaaagcgagacctccgcggcggcttccgccggaccgcgtcctctcctggcagggggcggtggcgggcaccggagccgcccttaggacttcacgccagagcagctagagaagaagcccctaatgtttaccttcgtcctcccggcctccacctttctgcgccgctgctcttgctcaacttccatctccctcagactccgcgcgggccgcccggcggtgacggggctgacacagagcagccttcgctctatttacactccctcccccgcgcttgggctcgccctccccccgcgacaactgtcacgcagccgcggccccgcccccgacacgcgccgccaatcagggggctgcgtttccggtctcgcgcacgcgcgctctgggcggtgcagcctgggcggagccccgccctttacgctcgccggccacagattggtgcgctcacgtacccgcctcctacggcaggaccagtaagcggaaagcggaggcctggcgcccgctgtgattggccgattttaaaatcccctgccaggctggccgagcggcaaaaagttcgcgctgctggtcccagcgcgggcggcccctgggctttgtgtccaccaggacagcgggccgggctccctgcaggcgcgggcggcgccgaacggtgctcagcaaccacccggacagggccaggccgttttctcccgctcaggcattagtcgttggctgtgggccgccgcgggaagttgaggcctaccacggaggaggctgctgaggtggatctcaggggatccgcaagggctccctcacccttgccgggaccctgggaacccgaaacaaaatcctacgccaccagcccgccgaatgcgccccctcggccgggggtcctgggtcttcagagaagaactcggccgaatgcggtcagaaagcccgcgaaccgcctggacctgcaggccccgccgcttggagctcccgcctttcccgaccgagcccgtgtctgctcgtgtgtctcactgatgtcttaggtctcaaaaaaaaaagaaaagaaaaggtttttagtagacagaagagaaatggggccgtgggttcgtggtcccagggggaaactgacgtcgcatgaggtcgtcgtccctcagcttgagctcagcggaacataagcttgcagaggtggaaaccacggaaggtttgggtgtcttggagctctctggacaccgaaggcccggacacagtcccggggtccgcaccgcctgtgacctgtggcgggaccgccggggtgggcgttttctcagctggcgcgcgcgctggtctccaggaggtaaggcccgccctgcaggcaacaccggtgcttgggctcctgctgagcagttctttcctgcgagtaacagaaccagggagggaggtgggctgtggcctcccctgcccctacagtcgtctcctgcagctcccaccatgctggactcatcagcagcagagcaagtgacccgactgacgctgaagctcttgggacagaaagcctcttagtcattcctggagcacacagggcctttgcgtggagccaccgtctctgtcacggtctctcttcctcacagaagctggagcaagaacggcagaacgtggaagggggacctgagggcctccacctcgagccaggaaatgaggaccggccggacgatgccctgcagactgctctgaagagaaggagggaccttctgcagagactccgggaacaacacctcctggacgagctctctcgggcccaggcctggagcgggccaagcagaggagccctcgggtcagccctgcccccagagctgccccccacgggcatcctacccactgcctccccatccccgctggccccagacccgccaaggatcatcctgcctacggtcccccagcctcctgccaccatcattcagcagctccctcagcgagccactcatagcacagattcctcctccccaggccttccctactcaacggtcaggaagtattaaggaagacatggtggagctgctgctgctgcagaacgcacaggtgcaccagttggtcctgcagaactggatgctcaaggccctgcccccagccctgcaggacccgccacatgtgcccccgagggtcccacgagctgccaggccaaggctgcctgccgtgcaccaccaccaccaccaccaccatgctgtgtggccacctggggctgccactgtcctccagcccgcccccagcctgtggacgcctggcccaccctgagtgtgagtcacagagaccctggccggggcaccctccacccccaggcttcctcagggctgtgggctgtggcgggactatggaagggagcagggagagaccctgccaccacccggagtggctacgcgagtgtggactgcaggctcctcctggggaagctgggcaggctcgctttctggtcacggggccattccagggggcatcccttgctccgggtcccctgcagtgaggggcctgtgaaccccaccagggcaacagcccctcccagggacccctcctttcctgtagggcggcgccggcccacctgggagcctcagatccccctcttccatcacggaggtaaagttgaggccgtggacgccaccagcctgatgaaataaagatttcatccagaaagagtttaagaaaatctcagctcaggagccagaacagaaaagatcaatagctttagccacatggaagtgtgaacatcctgatggggaaaataccacaaagtctaatttaataactagggacacctgtgtgccacagctgtggcacagactcccactaaagaagtaggggtgcatggctcatgcctgtaatcccagcactttaagaggctgaggcaggaggatcacttgagctcaggaattcgagaccagcctgggtcacatagcaagaccccgtctctacaaaaaataaatttaaaaaactagccaggtgtggtgatatgcgcctgttatctcagcagctctgggggctgaggtgggaggattgcttgagcccaggagttagaagctgcagtgagctctgatggaaccactgcactatagcctggaccacagagcaggcccctgtctcaaaaataaaataaaaaagtgaaag

SEQ ID NO: 355403 - DNA, 2587 bp, Homo sapiens
cgctgattggctgtggccgcggcgggggcgggacctggcggagagcggcggattcaagatggcggcggccaggaggcggcttccagcggagccggcgggaaaaagcgagacctccgcggcggcttccgccggaccgcgtcctctcctggcagggggcggtggcgggcaccggagccgcccttaggacttcacgccagagcagctagagaagaagcccctaatgtttaccttcgtcctcccggcctccacctttctgcgccgctgctcttgctcaacttccatctccctcagactccgcgcgggccgcccggcggtgacggggctgacacagagcagccttcgctctatttacactccctcccccgcgcttgggctcgccctccccccgcgacaactgtcacgcagccgcggccccgcccccgacacgcgccgccaatcagggggctgcgtttccggtctcgcgcacgcgcgctctgggcggtgcagcctgggcggagccccgccctttacgctcgccggccacagattggtgcgctcacgtacccgcctcctacggcaggaccagtaagcggaaagcggaggcctggcgcccgctgtgattggccgattttaaaatcccctgccaggctggccgagcggcaaaaagttcgcgctgctggtcccagcgcgggcggcccctgggctttgtgtccaccaggacagcgggccgggctccctgcaggcgcgggcggcgccgaacggtgctcagcaaccacccggacagggccaggccgttttctcccgctcaggcattagtcgttggctgtgggccgccgcgggaagttgaggcctaccacggaggaggctgctgaggtggatctcaggggatccgcaagggctccctcacccttgccgggaccctgggaacccgaaacaaaatcctacgccaccagcccgccgaatgcgccccctcggccgggggtcctgggtcttcagagaagaactcggccgaatgcggtcagaaagcccgcgaaccgcctggacctgcaggccccgccgcttggagctcccgcctttcccgaccgagcccgtgtctgctcgtgtgtctcactgatgtcttaggtctcaaaaaaaaaagaaaagaaaaggtttttagtagacagaagagaaatggggccgtgggttcgtggtcccagggggaaactgacgtcgcatgaggtcgtcgtccctcagcttgagctcagcggaacataagcttgcagaggtggaaaccacggaaggtttgggtgtcttggagctctctggacaccgaaggcccggacacagtcccggggtccgcaccgcctgtgacctgtggcgggaccgccggggtgggcgttttctcagctggcgcgcgcgctggtctccaggaggtaaggcccgccctgcaggcaacaccggtgcttgggctcctgctgagcagttctttcctgcgagtaacagaaccagggagggaggtgggctgtggcctcccctgcccctacagtcgtctcctgcagctcccaccatgctggactcatcagcagcagagcaagtgacccgactgacgctgaagctcttgggacagaagctggagcaagaacggcagaacgtggaagggggacctgagggcctccacctcgagccaggaaatgaggaccggccggacgatgccctgcagactgctctgaagagaaggagggaccttctgcagagactccgggaacaacacctcctggacgagctctctcgggcccaggcctggagcgggccaagcagaggagccctcgggtcagccctgcccccagagctgccccccacgggcatcctacccactgcctccccatccccgctggccccagacccgccaaggatcatcctgcctacggtcccccagcctcctgccaccatcattcagcagctccctcagcgagccactcatagcacagattcctcctccccaggccttccctactcaacggtcaggaagtattaaggaagacatggtggagctgctgctgctgcagaacgcacaggtgcaccagttggtcctgcagaactggatgctcaaggccctgcccccagccctgcaggacagattctttcattcctgaagttccgcacaaggaggaaccctgtcccagtgcttccatctttgaaagtttgcaggtaggagacaggatgaccagagagttgccactgagctgcagagctccccagggacagccacctggtgctgacatggacgggcaggtgtgaacaccgaagggcccagcgcagctactggcagtaacactcacttctctcagaaccatcttttcgtgcctcttgaaggtgattccagagactctgtgctctcgttaaaagctcaaaccaaagctcagactccatttcctcttttcaaggtgactttccagcatggcatttctttctttctattaaaaatgtttttttttgagacagagttttgctcttgtcgcccaggctggagtgcaatggagcgatctcggctcactgcaagctccgcctcccaggatggtcttgatttcctgacctcgtgatccacctgcctcggcctcccaaagtgctg

SEQ ID NO: 355404 - DNA, 2134 bp, Homo sapiens
cgctgattggctgtggccgcggcgggggcgggacctggcggagagcggcggattcaagatggcggcggccaggaggcggcttccagcggagccggcgggaaaaagcgagacctccgcggcggcttccgccggaccgcgtcctctcctggcagggggcggtggcgggcaccggagccgcccttaggacttcacgccagagcagctagagaagaagcccctaatgtttaccttcgtcctcccggcctccacctttctgcgccgctgctcttgctcaacttccatctccctcagactccgcgcgggccgcccggcggtgacggggctgacacagagcagccttcgctctatttacactccctcccccgcgcttgggctcgccctccccccgcgacaactgtcacgcagccgcggccccgcccccgacacgcgccgccaatcagggggctgcgtttccggtctcgcgcacgcgcgctctgggcggtgcagcctgggcggagccccgccctttacgctcgccggccacagattggtgcgctcacgtacccgcctcctacggcaggaccagtaagcggaaagcggaggcctggcgcccgctgtgattggccgattttaaaatcccctgccaggctggccgagcggcaaaaagttcgcgctgctggtcccagcgcgggcggcccctgggctttgtgtccaccaggacagcgggccgggctccctgcaggcgcgggcggcgccgaacggtgctcagcaaccacccggacagggccaggccgttttctcccgctcaggcattagtcgttggctgtgggccgccgcgggaagttgaggcctaccacggaggaggctgctgaggtggatctcaggggatccgcaagggctccctcacccttgccgggaccctgggaacccgaaacaaaatcctacgccaccagcccgccgaatgcgccccctcggccgggggtcctgggtcttcagagaagaactcggccgaatgcggtcagaaagcccgcgaaccgcctggacctgcaggccccgccgcttggagctcccgcctttcccgaccgagcccgtgtctgctcgtgtgtctcactgatgtcttaggtctcaaaaaaaaaagaaaagaaaaggtttttagtagacagaagagaaatggggccgtgggttcgtggtcccagggggaaactgacgtcgcatgaggtcgtcgtccctcagcttgagctcagcggaacataagcttgcagaggtggaaaccacggaaggtttgggtgtcttggagctctctggacaccgaaggcccggacacagtcccggggtccgcaccgcctgtgacctgtggcgggaccgccggggtgggcgttttctcagctggcgcgcgcgtaggtggaacttgggaaactaactggagcgaagtggcaaaaaaccaagacagggccggtgacctcgcgcaggccgtccttaactgtggagtattccttcagctaacccctttatttcatgtgtccaagtctggtttctgggtttctttgtagtccctccgggcctgttcgtgcgccttcacttgcaaaaggttcgtcgtggagggccgtgtgcttgtttgcagcagtaacgatgcccttcccgagcgtgctggagtggctcctcgctgacgcaagctcaccttgcagcctcctcagcaactgcaacttaaacgcgccctcaggaagccctggaatctcgctcagtctgtcacacaggctagagtgcagtggtgagaccaccgctcattgcagcctcaacttccccgggctcaggtgattctccatgtcagcctcctgagcagctggaattacaggcacaccaccatgcccagctaatttttgtatttttagtagacacagggtctcactgtgttgcccaggaattcgagaccagcctgggtcacatagcaagaccccgtctctacaaaaaataaatttaaaaaactagccaggtgtggtgatatgcgcctgttatctcagcagctctgggggctgaggtgggaggattgcttgagcccaggagttagaagctgcagtgagctctgatggaaccactgcactatagcctggaccacagagcaggcccctgtctcaaaaataaaataaaaaagtgaaag

SEQ ID NO: 355405 - DNA, 1879 bp, Homo sapiens
cgctgattggctgtggccgcggcgggggcgggacctggcggagagcggcggattcaagatggcggcggccaggaggcggcttccagcggagccggcgggaaaaagcgagacctccgcggcggcttccgccggaccgcgtcctctcctggcagggggcggtggcgggcaccggagccgcccttaggacttcacgccagagcagctagagaagaagcccctaatgtttaccttcgtcctcccggcctccacctttctgcgccgctgctcttgctcaacttccatctccctcagactccgcgcgggccgcccggcggtgacggggctgacacagagcagccttcgctctatttacactccctcccccgcgcttgggctcgccctccccccgcgacaactgtcacgcagccgcggccccgcccccgacacgcgccgccaatcagggggctgcgtttccggtctcgcgcacgcgcgctctgggcggtgcagcctgggcggagccccgccctttacgctcgccggccacagattggtgcgctcacgtacccgcctcctacggcaggaccagtaagcggaaagcggaggcctggcgcccgctgtgattggccgattttaaaatcccctgccaggctggccgagcggcaaaaagttcgcgctgctggtcccagcgcgggcggcccctgggctttgtgtccaccaggacagcgggccgggctccctgcaggcgcgggcggcgccgaacggtgctcagcaaccacccggacagggccaggccgttttctcccgctcaggcattagtcgttggctgtgggccgccgcgggaagttgaggcctaccacggaggaggctgctgaggtggatctcaggggatccgcaagggctccctcacccttgccgggaccctgggaacccgaaacaaaatcctacgccaccagcccgccgaatgcgccccctcggccgggggtcctgggtcttcagagaagaactcggccgaatgcggtcagaaagcccgcgaaccgcctggacctgcaggccccgccgcttggagctcccgcctttcccgaccgagcccgtgtctgctcgtgtgtctcactgatgtcttaggtctcaaaaaaaaaagaaaagaaaaggtttttagtagacagaagagaaatggggccgtgggttcgtggtcccagggggaaactgacgtcgcatgaggtcgtcgtccctcagcttgagctcagcggaacataagcttgcagaggtggaaaccacggaaggtttgggtgtcttggagctctctggacaccgaaggcccggacacagtcccggggtccgcaccgcctgtgacctgtggcgggaccgccggggtgggcgttttctcagctggcgcgcgcgtaggtggaacttgggaaactaactggagcgaagtggcaaaaaaccaagacagggccggtgacctcgcgcaggccgtccttaactgtggagtattccttcagctaacccctttatttcatgtgtccaagtctggtttctgggtttctttgtagtccctccgggcctgttcgtgcgccttcacttgcaaaaggttcgtcgtggagggccgtgtgcttgtttgcagcagtaacgatgcccttcccgagcgtgctggagtggctcctcgctgacgcaagctcaccttgcagcctcctcagcaactgcaacttaaacgcgccctcaggaagccctggaatctcgctcagaattttttttctttttttgagacagtctcgctgcgacgcccaggctatagcgcaatggcgcgatctcggctccctgcaacctccctcaggaagccgtggaagctcgaccgccagaaacttccttctcctgactcaggccacagtcttctgtgtggtga

SEQ ID NO: 355406 - DNA, 2057 bp, Homo sapiens
cgctgattggctgtggccgcggcgggggcgggacctggcggagagcggcggattcaagatggcggcggccaggaggcggcttccagcggagccggcgggaaaaagcgagacctccgcggcggcttccgccggaccgcgtcctctcctggcagggggcggtggcgggcaccggagccgcccttaggacttcacgccagagcagctagagaagaagcccctaatgtttaccttcgtcctcccggcctccacctttctgcgccgctgctcttgctcaacttccatctccctcagactccgcgcgggccgcccggcggtgacggggctgacacagagcagccttcgctctatttacactccctcccccgcgcttgggctcgccctccccccgcgacaactgtcacgcagccgcggccccgcccccgacacgcgccgccaatcagggggctgcgtttccggtctcgcgcacgcgcgctctgggcggtgcagcctgggcggagccccgccctttacgctcgccggccacagattggtgcgctcacgtacccgcctcctacggcaggaccagtaagcggaaagcggaggcctggcgcccgctgtgattggccgattttaaaatcccctgccaggctggccgagcggcaaaaagttcgcgctgctggtcccagcgcgggcggcccctgggctttgtgtccaccaggacagcgggccgggctccctgcaggcgcgggcggcgccgaacggtgctcagcaaccacccggacagggccaggccgttttctcccgctcaggcattagtcgttggctgtgggccgccgcgggaagttgaggcctaccacggaggaggctgctgaggtggatctcaggggatccgcaagggctccctcacccttgccgggaccctgggaacccgaaacaaaatcctacgccaccagcccgccgaatgcgccccctcggccgggggtcctgggtcttcagagaagaactcggccgaatgcggtcagaaagcccgcgaaccgcctggacctgcaggccccgccgcttggagctcccgcctttcccgaccgagcccgtgtctgctcgtgtgtctcactgatgtcttaggtctcaaaaaaaaaagaaaagaaaaggtttttagtagacagaagagaaatggggccgtgggttcgtggtcccagggggaaactgacgtcgcatgaggtcgtcgtccctcagcttgagctcagcggaacataagcttgcagaggtggaaaccacggaaggtttgggtgtcttggagctctctggacaccgaaggcccggacacagtcccggggtccgcaccgcctgtgacctgtggcgggaccgccggggtgggcgttttctcagctggcgcgcgcgtaggtggaacttgggaaactaactggagcgaagtggcaaaaaaccaagacagggccggtgacctcgcgcaggccgtccttaactgtggagtattccttcagctaacccctttatttcatgtgtccaagtctggtttctgggtttctttgtagtccctccgggcctgttcgtgcgccttcacttgcaaaaggttcgtcgtggagggccgtgtgcttgtttgcagcagtaacgatgcccttcccgagcgtgctggagtggctcctcgctgacgcaagctcaccttgcagcctcctcagcaactgcaacttaaacgcgccctcaggaagccctggaatctcgctcagtctgtcacacaggctagagtgcagtggtgagaccaccgctcattgcagcctcaacttccccgggctcaggtgattctccatgtcagcctcctgagcagctggaattacaggcacaccaccatgcccagctaatttttgtatttttagtagacacagggtctcactgtgttgcccaggctggtcttgaactcctgggctcaagtgatccacctgccttggcctctcaaagtgctggagttacaggcatgagcaacctcgcccagcctcaattcattttaaactattaaaaagctgtcaaggccaggcaaccactgcactccaacctgggtgacagac

SEQ ID NO: 355407 - DNA, 2963 bp, Homo sapiens
ggagggaaacgtaactcccctctccttaagtgtagaccacacatagccacttcctcccaaagagtgcaataaagaaaaggagggaaagagccactttattgtggagaaaactggcagactccacctcagccaagtgacgcaggtcagcctcacagttatagtcgaggtgacagtgtgtgtccctgatgtgatggggtgacagtggcacttcacccctagatgcttcctttctgtaacctgcagtcccagtctaaccaggagataatagacacattttaattgagggacattcttcaaaatatctgcccagtactcttcgaaactgtcaaggtcatcaaaaacgaggaaagtctgagaaggagcctaaagacacataactcaatgtaatggggtgttctgatggataccacattagggacatgaggcaaacctaaggaaactgtcaaagtgtggacttcagttacttgtgtctcaatattggttcattaatcataacaaatgggccaggtgcactggctttcactcaaaaattagctgggcatgatggcacgtacctgtagtcccagctactcgagaggctgaggcagaagaatcgcttgaaactgggaagcagaggttgcagtgagccaagattgcaccattgcactctagcctgggcgtcgcagcgagactctgtctcaaaaaaaatatatatatatataacatatgtagcacactaaggtaagatgttaataagaggggaagccacacatgtggtatgtgggatctccatgtactatcttctcaattactctaaatctaaaactgttcttaaaaaccctatttaaaaaaaaagtctgacaaatccatgccctctggagcatgttatgtatactactagagatcccgaggaggcaattcttagtgcttcccattcacttggcagtcacagctgtgggcacacaggctcaagtctctccttaagtcagtcagtattacaaaccatacataatagtatacttgaccactgcataaatgttataaacattccacatcaagagaaagaggagaggaaaaaaagttaaccagttcaacgaaaaggagaatctggcaaggaagcatctctgatgtgggcagagcctgcagcagcagatgtggagggcttctcacaagtgacagcaagactgtctgtaaaacggccactttgacctggtggtgttctgctcttttcatggccatagagtactctggctggtctccaggaggtaaggcccgccctgcaggcaacaccggtgcttgggctcctgctgagcagttctttcctgcgagtaacagaaccagggagggaggtgggctgtggcctcccctgcccctacagtcgtctcctgcagctcccaccatgctggactcatcagcagcagagcaagtgacccgactgacgctgaagctcttgggacagaagctggagcaagaacggcagaacgtggaagggggacctgagggcctccacctcgagccaggaaatgaggaccggccggacgatgccctgcagactgctctgaagagaaggagggaccttctgcagagactccgggaacaacacctcctggacgagctctctcgggcccaggcctggagcgggccaagcagaggagccctcgggtcagccctgcccccagagctgccccccacgggcatcctacccactgcctccccatccccgctggccccagacccgccaaggatcatcctgcctacggtcccccagcctcctgccaccatcattcagcagctccctcagcgagccactcatagcacagattcctcctccccaggccttccctactcaacggtcaggaagtattaaggaagacatggtggagctgctgctgctgcagaacgcacaggtgcaccagttggtcctgcagaactggatgctcaaggccctgcccccagccctgcaggacccgccacatgtgcccccgagggtcccacgagctgccaggccaaggctgcctgccgtgcaccaccaccaccaccaccaccatgctgtgtggccacctggggctgccactgtcctccagcccgcccccagcctgtggacgcctggcccaccctgagtgtgagtcacagagaccctggccggggcaccctccacccccaggcttcctcagggctgtgggctgtggcgggactatggaagggagcagggagagaccctgccaccacccggagtggctacgcgagtgtggactgcaggctcctcctggggaagctgggcaggctcgctttctggtcacggggccattccagggggcatcccttgctccgggtcccctgcagtgaggggcctgtgaaccccaccagggcaacagcccctcccagggacccctcctttcctgtagggcggcgccggcccacctgggagcctcagatccccctcttccatcacggaggtaaagttgaggccgtggacgccaccagcctgatgaaataaagatttcatccagaaagagtttaagaaaatctcagctcaggagccagaacagaaaagatcaatagctttagccacatggaagtgtgaacatcctgatggggaaaataccacaaagtctaatttaataactagggacacctgtgtgccacagctgtggcacagactcccactaaagaagtaggggtgcatggctcatgcctgtaatcccagcactttaagaggctgaggcaggaggatcacttgagctcaggaattcgagaccagcctgggtcacatagcaagaccccgtctctacaaaaaataaatttaaaaaactagccaggtgtggtgatatgcgcctgttatctcagcagctctgggggctgaggtgggaggattgcttgagcccaggagttagaagctgcagtgagctctgatggaaccactgcactatagcctggaccacagagcaggcccctgtctcaaaaataaaataaaaaagtgaaag

SEQ ID NO: 355408 - DNA, 3043 bp, Homo sapiens
ggagggaaacgtaactcccctctccttaagtgtagaccacacatagccacttcctcccaaagagtgcaataaagaaaaggagggaaagagccactttattgtggagaaaactggcagactccacctcagccaagtgacgcaggtcagcctcacagttatagtcgaggtgacagtgtgtgtccctgatgtgatggggtgacagtggcacttcacccctagatgcttcctttctgtaacctgcagtcccagtctaaccaggagataatagacacattttaattgagggacattcttcaaaatatctgcccagtactcttcgaaactgtcaaggtcatcaaaaacgaggaaagtctgagaaggagcctaaagacacataactcaatgtaatggggtgttctgatggataccacattagggacatgaggcaaacctaaggaaactgtcaaagtgtggacttcagttacttgtgtctcaatattggttcattaatcataacaaatgggccaggtgcactggctttcactcaaaaattagctgggcatgatggcacgtacctgtagtcccagctactcgagaggctgaggcagaagaatcgcttgaaactgggaagcagaggttgcagtgagccaagattgcaccattgcactctagcctgggcgtcgcagcgagactctgtctcaaaaaaaatatatatatatataacatatgtagcacactaaggtaagatgttaataagaggggaagccacacatgtggtatgtgggatctccatgtactatcttctcaattactctaaatctaaaactgttcttaaaaaccctatttaaaaaaaaagtctgacaaatccatgccctctggagcatgttatgtatactactagagatcccgaggaggcaattcttagtgcttcccattcacttggcagtcacagctgtgggcacacaggctcaagtctctccttaagtcagtcagtattacaaaccatacataatagtatacttgaccactgcataaatgttataaacattccacatcaagagaaagaggagaggaaaaaaagttaaccagttcaacgaaaaggagaatctggcaaggaagcatctctgatgtgggcagagcctgcagcagcagatgtggagggcttctcacaagtgacagcaagactgtctgtaaaacggccactttgacctggtggtgttctgctcttttcatggccatagagtactctggctggtctccaggaggtaaggcccgccctgcaggcaacaccggtgcttgggctcctgctgagcagttctttcctgcgagtaacagaaccagggagggaggtgggctgtggcctcccctgcccctacagtcgtctcctgcagctcccaccatgctggactcatcagcagcagagcaagtgacccgactgacgctgaagctcttgggacagaaagcctcttagtcattcctggagcacacagggcctttgcgtggagccaccgtctctgtcacggtctctcttcctcacagaagctggagcaagaacggcagaacgtggaagggggacctgagggcctccacctcgagccaggaaatgaggaccggccggacgatgccctgcagactgctctgaagagaaggagggaccttctgcagagactccgggaacaacacctcctggacgagctctctcgggcccaggcctggagcgggccaagcagaggagccctcgggtcagccctgcccccagagctgccccccacgggcatcctacccactgcctccccatccccgctggccccagacccgccaaggatcatcctgcctacggtcccccagcctcctgccaccatcattcagcagctccctcagcgagccactcatagcacagattcctcctccccaggccttccctactcaacggtcaggaagtattaaggaagacatggtggagctgctgctgctgcagaacgcacaggtgcaccagttggtcctgcagaactggatgctcaaggccctgcccccagccctgcaggacccgccacatgtgcccccgagggtcccacgagctgccaggccaaggctgcctgccgtgcaccaccaccaccaccaccaccatgctgtgtggccacctggggctgccactgtcctccagcccgcccccagcctgtggacgcctggcccaccctgagtgtgagtcacagagaccctggccggggcaccctccacccccaggcttcctcagggctgtgggctgtggcgggactatggaagggagcagggagagaccctgccaccacccggagtggctacgcgagtgtggactgcaggctcctcctggggaagctgggcaggctcgctttctggtcacggggccattccagggggcatcccttgctccgggtcccctgcagtgaggggcctgtgaaccccaccagggcaacagcccctcccagggacccctcctttcctgtagggcggcgccggcccacctgggagcctcagatccccctcttccatcacggaggtaaagttgaggccgtggacgccaccagcctgatgaaataaagatttcatccagaaagagtttaagaaaatctcagctcaggagccagaacagaaaagatcaatagctttagccacatggaagtgtgaacatcctgatggggaaaataccacaaagtctaatttaataactagggacacctgtgtgccacagctgtggcacagactcccactaaagaagtaggggtgcatggctcatgcctgtaatcccagcactttaagaggctgaggcaggaggatcacttgagctcaggaattcgagaccagcctgggtcacatagcaagaccccgtctctacaaaaaataaatttaaaaaactagccaggtgtggtgatatgcgcctgttatctcagcagctctgggggctgaggtgggaggattgcttgagcccaggagttagaagctgcagtgagctctgatggaaccactgcactatagcctggaccacagagcaggcccctgtctcaaaaataaaataaaaaagtgaaag

SEQ ID NO: 355409 - DNA, 2454 bp, Homo sapiens
ggagggaaacgtaactcccctctccttaagtgtagaccacacatagccacttcctcccaaagagtgcaataaagaaaaggagggaaagagccactttattgtggagaaaactggcagactccacctcagccaagtgacgcaggtcagcctcacagttatagtcgaggtgacagtgtgtgtccctgatgtgatggggtgacagtggcacttcacccctagatgcttcctttctgtaacctgcagtcccagtctaaccaggagataatagacacattttaattgagggacattcttcaaaatatctgcccagtactcttcgaaactgtcaaggtcatcaaaaacgaggaaagtctgagaaggagcctaaagacacataactcaatgtaatggggtgttctgatggataccacattagggacatgaggcaaacctaaggaaactgtcaaagtgtggacttcagttacttgtgtctcaatattggttcattaatcataacaaatgggccaggtgcactggctttcactcaaaaattagctgggcatgatggcacgtacctgtagtcccagctactcgagaggctgaggcagaagaatcgcttgaaactgggaagcagaggttgcagtgagccaagattgcaccattgcactctagcctgggcgtcgcagcgagactctgtctcaaaaaaaatatatatatatataacatatgtagcacactaaggctggtctccaggaggtaaggcccgccctgcaggcaacaccggtgcttgggctcctgctgagcagttctttcctgcgagtaacagaaccagggagggaggtgggctgtggcctcccctgcccctacagtcgtctcctgcagctcccaccatgctggactcatcagcagcagagcaagtgacccgactgacgctgaagctcttgggacagaagctggagcaagaacggcagaacgtggaagggggacctgagggcctccacctcgagccaggaaatgaggaccggccggacgatgccctgcagactgctctgaagagaaggagggaccttctgcagagactccgggaacaacacctcctggacgagctctctcgggcccaggcctggagcgggccaagcagaggagccctcgggtcagccctgcccccagagctgccccccacgggcatcctacccactgcctccccatccccgctggccccagacccgccaaggatcatcctgcctacggtcccccagcctcctgccaccatcattcagcagctccctcagcgagccactcatagcacagattcctcctccccaggccttccctactcaacggtcaggaagtattaaggaagacatggtggagctgctgctgctgcagaacgcacaggtgcaccagttggtcctgcagaactggatgctcaaggccctgcccccagccctgcaggacccgccacatgtgcccccgagggtcccacgagctgccaggccaaggctgcctgccgtgcaccaccaccaccaccaccaccatgctgtgtggccacctggggctgccactgtcctccagcccgcccccagcctgtggacgcctggcccaccctgagtgtgagtcacagagaccctggccggggcaccctccacccccaggcttcctcagggctgtgggctgtggcgggactatggaagggagcagggagagaccctgccaccacccggagtggctacgcgagtgtggactgcaggctcctcctggggaagctgggcaggctcgctttctggtcacggggccattccagggggcatcccttgctccgggtcccctgcagtgaggggcctgtgaaccccaccagggcaacagcccctcccagggacccctcctttcctgtagggcggcgccggcccacctgggagcctcagatccccctcttccatcacggaggtaaagttgaggccgtggacgccaccagcctgatgaaataaagatttcatccagaaagagtttaagaaaatctcagctcaggagccagaacagaaaagatcaatagctttagccacatggaagtgtgaacatcctgatggggaaaataccacaaagtctaatttaataactagggacacctgtgtgccacagctgtggcacagactcccactaaagaagtaggggtgcatggctcatgcctgtaatcccagcactttaagaggctgaggcaggaggatcacttgagctcaggaattcgagaccagcctgggtcacatagcaagaccccgtctctacaaaaaataaatttaaaaaactagccaggtgtggtgatatgcgcctgttatctcagcagctctgggggctgaggtgggaggattgcttgagcccaggagttagaagctgcagtgagctctgatggaaccactgcactatagcctggaccacagagcaggcccctgtctcaaaaataaaataaaaaagtgaaag

SEQ ID NO: 355410 - DNA, 424 bp, Homo sapiens
gtcccccagcctcctgccaccatcattcagcagctccctcagcgagccactcatagcacagattcctcctccccaggccttccctactcaacggtcaggaagtattaaggaaggtaagtgttccatattcatattgttgtgggttgaggaaattatctactgaaagggaaaatgttcctggaagcaggacagtcacttagggccagcttttggctgttcaacatgaaaataattttaactttaagaaatccttatataaatgatatctcacagggaaggaaacaagaggtataagaaagataactaggaggtaaaataattgggctccaattccaactcatccaatcatcatccattcaaaaaccattattaagatgcttcttttaaaataatttttagggcccggctcggtggctcacgcttg

SEQ ID NO: 355411 - DNA, 3110 bp, Homo sapiens
cgctgattggctgtggccgcggcgggggcgggacctggcggagagcggcggattcaagatggcggcggccaggaggcggcttccagcggagccggcgggaaaaagcgagacctccgcggcggcttccgccggaccgcgtcctctcctggcagggggcggtggcgggcaccggagccgcccttaggacttcacgccagagcagctagagaagaagcccctaatgtttaccttcgtcctcccggcctccacctttctgcgccgctgctcttgctcaacttccatctccctcagactccgcgcgggccgcccggcggtgacggggctgacacagagcagccttcgctctatttacactccctcccccgcgcttgggctcgccctccccccgcgacaactgtcacgcagccgcggccccgcccccgacacgcgccgccaatcagggggctgcgtttccggtctcgcgcacgcgcgctctgggcggtgcagcctgggcggagccccgccctttacgctcgccggccacagattggtgcgctcacgtacccgcctcctacggcaggaccagtaagcggaaagcggaggcctggcgcccgctgtgattggccgattttaaaatcccctgccaggctggccgagcggcaaaaagttcgcgctgctggtcccagcgcgggcggcccctgggctttgtgtccaccaggacagcgggccgggctccctgcaggcgcgggcggcgccgaacggtgctcagcaaccacccggacagggccaggccgttttctcccgctcaggcattagtcgttggctgtgggccgccgcgggaagttgaggcctaccacggaggaggctgctgaggtggatctcaggggatccgcaagggctccctcacccttgccgggaccctgggaacccgaaacaaaatcctacgccaccagcccgccgaatgcgccccctcggccgggggtcctgggtcttcagagaagaactcggccgaatgcggtcagaaagcccgcgaaccgcctggacctgcaggccccgccgcttggagctcccgcctttcccgaccgagcccgtgtctgctcgtgtgtctcactgatgtcttaggtctcaaaaaaaaaagaaaagaaaaggtttttagtagacagaagagaaatggggccgtgggttcgtggtcccagggggaaactgacgtcgcatgaggtcgtcgtccctcagcttgagctcagcggaacataagcttgcagaggtggaaaccacggaaggtttgggtgtcttggagctctctggacaccgaaggcccggacacagtcccggggtccgcaccgcctgtgacctgtggcgggaccgccggggtgggcgttttctcagctggcgcgcgcgctggtctccaggaggtaaggcccgccctgcaggcaacaccggtgcttgggctcctgctgagcagttctttcctgcgagtaacagaaccagggagggaggtgggctgtggcctcccctgcccctacagtcgtctcctgcagctcccaccatgctggactcatcagcagcagagcaagtgacccgactgacgctgaagctcttgggacagaagctggagcaagaacggcagaacgtggaagggggacctgagggcctccacctcgagccaggaaatgaggaccggccggacgatgccctgcagactgctctgaagagaaggagggaccttctgcagagactccgggaacaacacctcctggacgagctctctcgggcccaggcctggagcgggccaagcagaggagccctcgggtcagccctgcccccagagctgccccccacgggcatcctacccactgcctccccatccccgctggccccagacccgccaaggatcatcctgcctacggtcccccagcctcctgccaccatcattcagcagctccctcagcgagccactcatagcacagattcctcctccccaggccttccctactcaacggtcaggaagtattaaggaagacatggtggagctgctgctgctgcagaacgcacaggtgcaccagttggtcctgcagaactggatgctcaaggccctgcccccagccctgcaggacccgccacatgtgcccccgagggtcccacgagctgccaggccaaggctgcctgccgtgcaccaccaccaccaccaccaccatgctgtgtggccacctggggctgccactgtcctccagcccgcccccagcctgtggacgcctggcccaccctgagtgtgagtcacagagaccctggccggggcaccctccacccccaggcttcctcagggctgtgggctgtggcgggactatggaagggagcagggagagaccctgccaccacccggagtggctacgcgagtgtggactgcaggctcctcctggggaagctgggcaggctcgctttctggtcacggggccattccagggggcatcccttgctccgggtcccctgcagtgaggggcctgtgaaccccaccagggcaacagcccctcccagggacccctcctttcctgtagggcggcgccggcccacctgggagcctcagatccccctcttccatcacggaggtaaagttgaggccgtggacgccaccagcctgatgaaataaagatttcatccagaaagagtttaagaaaatctcagctcaggagccagaacagaaaagatcaatagctttagccacatggaagtgtgaacatcctgatggggaaaataccacaaagtctaatttaataactagggacacctgtgtgccacagctgtggcacagactcccactaaagaagtaggggtgcatggctcatgcctgtaatcccagcactttaagaggctgaggcaggaggatcacttgagctcaggaattcgagaccagcctgggtcacatagcaagaccccgtctctacaaaaaataaatttaaaaaactagccaggtgtggtgatatgcgcctgttatctcagcagctctgggggctgaggtgggaggattgcttgagcccaggagttagaagctgcagtgagctctgatggaaccactgcactatagcctggaccacagagcaggcccctgtctcaaaaataaaataaaaaagtgaaag

SEQ ID NO: 355412 - DNA, 2676 bp, Homo sapiens
cgctgattggctgtggccgcggcgggggcgggacctggcggagagcggcggattcaagatggcggcggccaggaggcggcttccagcggagccggcgggaaaaagcgagacctccgcggcggcttccgccggaccgcgtcctctcctggcagggggcggtggcgggcaccggagccgcccttaggacttcacgccagagcagctagagaagaagcccctaatgtttaccttcgtcctcccggcctccacctttctgcgccgctgctcttgctcaacttccatctccctcagactccgcgcgggccgcccggcggtgacggggctgacacagagcagccttcgctctatttacactccctcccccgcgcttgggctcgccctccccccgcgacaactgtcacgcagccgcggccccgcccccgacacgcgccgccaatcagggggctgcgtttccggtctcgcgcacgcgcgctctgggcggtgcagcctgggcggagccccgccctttacgctcgccggccacagattggtgcgctcacgtacccgcctcctacggcaggaccagtaagcggaaagcggaggcctggcgcccgctgtgattggccgattttaaaatcccctgccaggctggccgagcggcaaaaagttcgcgctgctggtcccagcgcgggcggcccctgggctttgtgtccaccaggacagcgggccgggctccctgcaggcgcgggcggcgccgaacggtgctcagcaaccacccggacagggccaggccgttttctcccgctcaggcattagtcgttggctgtgggccgccgcgggaagttgaggcctaccacggaggaggctgctgaggtggatctcaggggatccgcaagggctccctcacccttgccgggaccctgggaacccgaaacaaaatcctacgccaccagcccgccgaatgcgccccctcggccgggggtcctgggtcttcagagaagaactcggccgaatgcggtcagaaagcccgcgaaccgcctggacctgcaggccccgccgcttggagctcccgcctttcccgaccgagcccgtgtctgctcgtgtgtctcactgatgtcttaggtctcaaaaaaaaaagaaaagaaaaggtttttagtagacagaagagaaatggggccgtgggttcgtggtcccagggggaaactgacgtcgcatgaggtcgtcgtccctcagcttgagctcagcggaacataagcttgcagaggtggaaaccacggaaggtttgggtgtcttggagctctctggacaccgaaggcccggacacagtcccggggtccgcaccgcctgtgacctgtggcgggaccgccggggtgggcgttttctcagctggcgcgcgcgctggtctccaggaggtaaggcccgccctgcaggcaacaccggtgcttgggctcctgctgagcagttctttcctgcgagtaacagaaccagggagggaggtgggctgtggcctcccctgcccctacagtcgtctcctgcagctcccaccatgctggactcatcagcagcagagcaagtgacccgactgacgctgaagctcttgggacagaagctggagcaagaacggcagaacgtggaagggggacctgagggcctccacctcgagccaggaaatgaggaccggccggacgatgccctgcagactgctctgaagagaaggagggaccttctgcagagactccgggaacaacacctcctggacgagctctctcgggcccaggcctggagcgggccaagcagaggagccctcgggtcagccctgcccccagagctgccccccacgggcatcctacccactgcctccccatccccgctggccccagacccgccaaggatcatcctgcctacggtcccccagcctcctgccaccatcattcagcagctccctcagcgagccactcatagcacagattcctcctccccaggccttccctactcaacggtcaggaagtattaaggaagacatggtggagctgctgctgctgcagaacgcacaggtgcaccagttggtcctgcagaactggatgctcaaggccctgcccccagccctgcaggacccgccacatgtgcccccgagggtcccacgagctgccaggccaaggctgcctgccgtgcaccaccaccaccaccaccaccatgctgtgtggccacctggggctgccactgtcctccagcccgcccccagcctgtggacgcctggcccaccctgagttttgcaggtaggagacaggatgaccagagagttgccactgagctgcagagctccccagggacagccacctggtgctgacatggacgggcaggtgtgaacaccgaagggcccagcgcagctactggcagtaacactcacttctctcagaaccatcttttcgtgcctcttgaaggtgattccagagactctgtgctctcgttaaaagctcaaaccaaagctcagactccatttcctcttttcaaggtgactttccagcatggcatttctttctttctattaaaaatgtttttttttgagacagagttttgctcttgtcgcccaggctggagtgcaatggagcgatctcggctcactgcaagctccgcctcccaggatggtcttgatttcctgacctcgtgatccacctgcctcggcctcccaaagtgctg

SEQ ID NO: 355413 - DNA, 1289 bp, Homo sapiens
gtagatactggagacactttcttcaaggacatatgcagatagctaatcacctggctgttcctaggtcccccagcctcctgccaccatcattcagcagctccctcagcgagccactcatagcacagattcctcctccccaggccttccctactcaacggtcaggaagtattaaggaagacatggtggagctgctgctgctgcagaacgcacaggtgcaccagttggtcctgcagaactggatgctcaaggccctgcccccagccctgcaggacccgccacatgtgcccccgagggtcccacgagctgccaggccaaggctgcctgccgtgcaccaccaccaccaccaccaccatgctgtgtggccacctggggctgccactgtcctccagcccgcccccagcctgtggacgcctggcccaccctgagtgtgagtcacagagaccctggccggggcaccctccacccccaggcttcctcagggctgtgggctgtggcgggactatggaagggagcagggagagaccctgccaccacccggagtggctacgcgagtgtggactgcaggctcctcctggggaagctgggcaggctcgctttctggtcacggggccattccagggggcatcccttgctccgggtcccctgcagtgaggggcctgtgaaccccaccagggcaacagcccctcccagggacccctcctttcctgtagggcggcgccggcccacctgggagcctcagatccccctcttccatcacggaggtaaagttgaggccgtggacgccaccagcctgatgaaataaagatttcatccagaaagagtttaagaaaatctcagctcaggagccagaacagaaaagatcaatagctttagccacatggaagtgtgaacatcctgatggggaaaataccacaaagtctaatttaataactagggacacctgtgtgccacagctgtggcacagactcccactaaagaagtaggggtgcatggctcatgcctgtaatcccagcactttaagaggctgaggcaggaggatcacttgagctcaggaattcgagaccagcctgggtcacatagcaagaccccgtctctacaaaaaataaatttaaaaaactagccaggtgtggtgatatgcgcctgttatctcagcagctctgggggctgaggtgggaggattgcttgagcccaggagttagaagctgcagtgagctctgatggaaccactgcactatagcctggaccacagagcaggcccctgtctcaaaaataaaataaaaaagtgaaag

SEQ ID NO: 355414 - DNA, 524 bp, Homo sapiens
tcagtttgtgtacttttttttttaaggtcatggaagctgaagattggaaaagcaaatagaagaaaataaattcttcagcttggagataagcaggaaacccaaagaacatgttcttaagtataagacctcagtaataatattgaatagaaattcaactaaatggagctgacagaagcccagacaggcaaccaggagattcttgtggcctgcccctgtttcatcttctgccatgagtaaaagctccctgaggcctcctgaagccgagcaaatgctgacactgttttctgtacagcctgcagagctatgaacgtgtctctgctgcaaggcaccgggccctttcgctctgcagaactgcacttgcaagaccattatcaactcctaatcccagctcagaaagggagcctctgcgactcattcatcgccctccagactttctccagtcaatccttggcatcctacagagatggtcttcctcagtcttcagtctctgtaacgataccagcccttgtttagagacccagagt

SEQ ID NO: 355415 - DNA, 750 bp, Homo sapiens
aacctgaaaaccttctttgtaatgttttggggagctcagaggcttttgtgaaacaggcagatattcaaatttgtttagaaatgtttcattttaactatatttacttagtttaaggaagtatttgttgaatatttgctacatgtttagcatcatactagaagttctaagtgtcatattaacaaagatgcacaaaaggtaatgcctgcctccaagaaacttccaaatatcatccaaataatacatttattcctcacagtcatctcaaattataaatcacattaaggtttattgcatcaccattagccctttgattatcaaaattatataatcctttagataatttaattgaccattattacttagagccagtatttggattaaaaagataacccaattttttattactattacagggcataatttcattggcttggcaggtatataagaattaaaatattacagtggataaactgctttgggtgttacatatacaaactcattgacattccgttggtttgtgttacaaatgtgaaggctttcttaccaaaaaaaagtgtatgtatgtgtatgtatatatatatgtattcatacacataatatatacatatatatatatttatttgttttccaatagcggaatgtcacaatcaaaggagtagaaaattcaagttatcttgttgctctggacaagttaaatccatacactctatatacttttcggattcgttgttctactgaaactttctggaa

SEQ ID NO: 355416 - DNA, 5268 bp, Homo sapiens
agatcttggaacgagacgacctgctctctctcccagaacgtgtctctgctgcaaggcaccgggccctttcgctctgcagaactgcacttgcaagaccattatcaactcctaatcccagctcagaaagggagcctctgcgactcattcatcgccctccaggactgactgcattgcacagatgatggatatttacgtatgtttgaaacgaccatcctggatggtggacaataaaagaatgaggactgcttcaaatttccagtggctgttatcaacatttattcttctatatctaatgaatcaagtaaatagccagaaaaagggggctcctcatgatttgaagtgtgtaactaacaatttgcaagtgtggaactgttcttggaaagcaccctctggaacaggccgtggtactgattatgaagtttgcattgaaaacaggtcccgttcttgttatcagttggagaaaaccagtattaaaattccagctctttcacatggtgattatgaaataacaataaattctctacatgattttggaagttctacaagtaaattcacactaaatgaacaaaacgtttccttaattccagatactccagagatcttgaatttgtctgctgatttctcaacctctacattatacctaaagtggaacgacaggggttcagtttttccacaccgctcaaatgttatctgggaaattaaagttctacgtaaagagagtatggagctcgtaaaattagtgacccacaacacaactctgaatggcaaagatacacttcatcactggagttgggcctcagatatgcccttggaatgtgccattcattttgtggaaattagatgctacattgacaatcttcatttttctggtctcgaagagtggagtgactggagccctgtgaagaacatttcttggatacctgattctcagactaaggtttttcctcaagataaagtgatacttgtaggctcagacataacattttgttgtgtgagtcaagaaaaagtgttatcagcactgattggccatacaaactgccccttgatccatcttgatggggaaaatgttgcaatcaagattcgtaatatttctgtttctgcaagtagtggaacaaatgtagtttttacaaccgaagataacatatttggaaccgttatttttgctggatatccaccagatactcctcaacaactgaattgtgagacacatgatttaaaagaaattatatgtagttggaatccaggaagggtgacagcgttggtgggcccacgtgctacaagctacactttagttgaaagtttttcaggaaaatatgttagacttaaaagagctgaagcacctacaaacgaaagctatcaattattatttcaaatgcttccaaatcaagaaatatataattttactttgaatgctcacaatccgctgggtcgatcacaatcaacaattttagttaatataactgaaaaagtttatccccatactcctacttcattcaaagtgaaggatattaattcaacagctgttaaactttcttggcatttaccaggcaactttgcaaagattaattttttatgtgaaattgaaattaagaaatctaattcagtacaagagcagcggaatgtcacaatcaaaggagtagaaaattcaagttatcttgttgctctggacaagttaaatccatacactctatatacttttcggattcgttgttctactgaaactttctggaaatggagcaaatggagcaataaaaaacaacatttaacaacagaagccagtccttcaaaggggcctgatacttggagagagtggagttctgatggaaaaaatttaataatctattggaagcctttacccattaatgaagctaatggaaaaatactttcctacaatgtatcgtgttcatcagatgaggaaacacagtccctttctgaaatccctgatcctcagcacaaagcagagatacgacttgataagaatgactacatcatcagcgtagtggctaaaaattctgtgggctcatcaccaccttccaaaatagcgagtatggaaattccaaatgatgatctcaaaatagaacaagttgttgggatgggaaaggggattctcctcacctggcattacgaccccaacatgacttgcgactacgtcattaagtggtgtaactcgtctcggtcggaaccatgccttatggactggagaaaagttccctcaaacagcactgaaactgtaatagaatctgatgagtttcgaccaggtataagatataattttttcctgtatggatgcagaaatcaaggatatcaattattacgctccatgattggatatatagaagaattggctcccattgttgcaccaaattttactgttgaggatacttctgcagattcgatattagtaaaatgggaagacattcctgtggaagaacttagaggctttttaagaggatatttgttttactttggaaaaggagaaagagacacatctaagatgagggttttagaatcaggtcgttctgacataaaagttaagaatattactgacatatcccagaagacactgagaattgctgatcttcaaggtaaaacaagttaccacctggtcttgcgagcctatacagatggtggagtgggcccggagaagagtatgtatgtggtgacaaaggaaaattctgtgggattaattattgccattctcatcccagtggcagtggctgtcattgttggagtggtgacaagtatcctttgctatcggaaacgagaatggattaaagaaaccttctaccctgatattccaaatccagaaaactgtaaagcattacagtttcaaaagagtgtctgtgagggaagcagtgctcttaaaacattggaaatgaatccttgtaccccaaataatgttgaggttctggaaactcgatcagcatttcctaaaatagaagatacagaaataatttccccagtagctgagcgtcctgaagatcgctctgatgcagagcctgaaaaccatgtggttgtgtcctattgtccacccatcattgaggaagaaataccaaacccagccgcagatgaagctggagggactgcacaggttatttacattgatgttcagtcgatgtatcagcctcaagcaaaaccagaagaagaacaagaaaatgaccctgtaggaggggcaggctataagccacagatgcacctccccattaattctactgtggaagatatagctgcagaagaggacttagataaaactgcgggttacagacctcaggccaatgtaaatacatggaatttagtgtctccagactctcctagatccatagacagcaacagtgagattgtctcatttggaagtccatgctccattaattcccgacaatttttgattcctcctaaagatgaagactctcctaaatctaatggaggagggtggtcctttacaaacttttttcagaacaaaccaaacgattaacagtgtcaccgtgtcacttcagtcagccatctcaataagctcttactgctagtgttgctacatcagcactgggcattcttggagggatcctgtgaagtattgttaggaggtgaacttcactacatgttaagttacactgaaagtgttcatgtgcttttaatgtagtctaaaagccaaagtatagtgactcagaatcctcaatccacaaaactcaagattgggagctctttgtgatcaagccaaagaattctcatgtactctaccttcaagaagcatttcaaggctaatacctacttgtacgtacatgtaaaacaaatcccgccgcaactgttttctgttctgttgtttgtggttttctcatatgtatacttggtggaattgtaagtggatttgcaggccagggagaaaatgtccaagtaacaggtgaagtttatttgcctgacgtttactcctttctagatgaaaaccaagcacagattttaaaacttctaagattattctcctctatccacagcattcacaaaaattaatataatttttaatgtagtgacagcgatttagtgttttgtttgataaagtatgcttatttctgtgcctactgtataatggttatcaaacagttgtctcaggggtacaaactttgaaaacaagtgtgacactgaccagcccaaatcataatcatgttttcttgctgtgataggttttgcttgccttttcattattttttagcttttatgcttgcttccattatttcagttggttgccctaatatttaaaatttacacttctaagactagagacccacattttttaaaaatcattttattttgtgatacagtgacagctttatatgagcaaattcaatattattcataagcatgtaattccagtgacttactatgtgagatgactactaagcaatatctagcagcgttagttccatatagttctgattggatttcgttcctcctgaggagaccatgccgttgagcttggctacccaggcagtggtgatctttgacaccttctggtggatgttcctcccactcatgagtcttttcatcatgccacattatctgatccagtcctcacatttttaaatataaaactaaagagagaatgcttcttacaggaacagttacccaagggctgtttcttagtaactgtcataaactgatctgaatccatgggcatacctgtgttgcaggtgcagcaattgcttggtgagctgtgcagaattgattgccttcagcacagcatcctctgcccacccttgtttctcataagcgatgtctggagtgattgtggttcttggaaaagcagaaggaaaaactaaaaagtgtatcttgtattttccctgccctcaggttgcctatgtattttaccttttcatatttaaggcaaaagtacttgaaaattttaagtgtccgaataagatatgtcttttttgtttgttttttttggttgtttgtttgttttttatcatctgagattctgtaatgtatttgcaaataatggatcaattaattttttttgaagctcatattgtatctttttaaaaaccatgttgtggaaaaaagccagagtgacaagtgacaaaatctatttaggttctctgtgtatgaatcctgattttaactgctaggattcagctaaatttctgagctttatgatctgtggaaatttggaatgaaatgcaattcattttgtacatacatagtatattaaaactatataatagttcatagaaatgttcagtaatgaaaaatatatccaatcagagccatccctaaaga

SEQ ID NO: 355417 - DNA, 2056 bp, Homo sapiens
  misc_feature (2001)..(2001): n is a, c, g, or t
  misc_feature (2015)..(2015): n is a, c, g, or t
  misc_feature (2048)..(2048): n is a, c, g, or t
agatcttggaacgagacgacctgctctctctcccagaacgtgtctctgctgcaaggcaccgggccctttcgctctgcagaactgcacttgcaagaccattatcaactcctaatcccagctcagaaagggagcctctgcgactcattcatcgccctccaggactgactgcattgcacagatgatggatatttacgtatgtttgaaacgaccatcctggatggtggacaataaaagaatgaggactgcttcaaatttccagtggctgttatcaacatttattcttctatatctaatgaatcaagtaaatagccagaaaaagggggctcctcatgatttgaagtgtgtaactaacaatttgcaagtgtggaactgttcttggaaagcaccctctggaacaggccgtggtactgattatgaagtttgcattgaaaacaggtcccgttcttgttatcagttggagaaaaccagtattaaaattccagctctttcacatggtgattatgaaataacaataaattctctacatgattttggaagttctacaagtaaattcacactaaatgaacaaaacgtttccttaattccagatactccagagatcttgaatttgtctgctgatttctcaacctctacattatacctaaagtggaacgacaggggttcagtttttccacaccgctcaaatgttatctgggaaattaaagttctacgtaaagagagtatggagctcgtaaaattagtgacccacaacacaactctgaatggcaaagatacacttcatcactggagttgggcctcagatatgcccttggaatgtgccattcattttgtggaaattagatgctacattgacaatcttcatttttctggtctcgaagagtggagtgactggagccctgtgaagaacatttcttggatacctgattctcagactaaggtttttcctcaagataaagtgatacttgtaggctcagacataacattttgttgtgtgagtcaagaaaaagtgttatcagcactgattggccatacaaactgccccttgatccatcttgatggggaaaatgttgcaatcaagattcgtaatatttctgtttctgcaagtagtggaacaaatgtagtttttacaaccgaagataacatatttggaaccgttatttttgctggatatccaccagatactcctcaacaactgaattgtgagacacatgatttaaaagaaattatatgtagttggaatccaggaagggtgacagcgttggtgggcccacgtgctacaagctacactttagttgaaagtttttcaggaaaatatgttagacttaaaagagctgaagcacctacaaacgaaagctatcaattattatttcaaatgcttccaaatcaagaaatatataattttactttgaatgctcacaatccgctgggtcgatcacaatcaacaattttagttaatataactgaaaaagtttatccccatactcctacttcattcaaagtgaaggatattaattcaacagctgttaaactttcttggcatttaccaggcaactttgcaaagattaattttttatgtgaaattgaaattaagaaatctaattcagtacaagagcagcggaatgtcacaatcaaaggagtagaaaattcaagttatcttgttgctctggacaagttaaatccatacactctatatacttttcggattcgttgttctactgaaactttctggaaatggagcaaatggagcaataaaaaacaacatttaacaacagaagccagtccttcaaaggggcctgatacttggagagagtggagttctgatggaaaaaatttaataatctattggaagcctttacccattaatgaagctaatggaaaaatactttcctacaatgtatcgtgttcatcagatgaggaaacacagtccctttctgaaatccctgatcctcagcacaaagcagagatacgacttgataaggaaatggcctaccttcattcaancgtaatggggcttnaaaaaattctgggggggccttcaattaacccanccttttcc

SEQ ID NO: 355418 - DNA, 678 bp, Homo sapiens
actacatagagatataaattccatcttcaaaatagcaataaaaatatctgattttttacagtaaagaaatactttataaatgaatgtgtgtattatccaaagagcttctaactttttggtgcacaaattactgtagctaactttattattggctatatgtaaactatttttaaattaaaatctgaggtttcagtggtcatatgaatttgaattttttcaaatatctttctcaaaatttgtaaaatcaagaaggaacgtaaatgaaatcatacatgtttcacattttcagcgttaataaaaaagaaaaaaactcataaactttaaattacatgtaaatagagtaatgcttcaattctgaaaatgctagggctaggactaggtagaagtgaatgagacactactcttgaggtgaaatttaggtatgccccagaaccttagtaatcaagataaataggctgggcatggtggctcatgcctgtaatcccagcactttgggaggccgaggcggggggatcacctgagatcgggagtttgagaccagcctagctaacatggtggaaccccgtctctactaaaaacacaaaaattagtgggacgtggtggcgtaagcctgtaattccagctacttaggaggctgaggcaggagaattgtttgaaccccccaaaaaaaagaaaaaa

SEQ ID NO: 355419 - DNA, 451 bp, Homo sapiens
gtgtgtttcttgtccgtctccctccagtggaatggatgctctttgagggcagggttatttgcctctttgctctgtaaattatccagggcaaaaaaaatgctggcacttagtagatgctcaaaatatacttgtcaaatatattgaaagatttttttaataatgaaagcttttagcaagcctgggactgattcatgccatagctttctatatgggagacaccatctaacaaaatctaaagacttttactagaaaaacaaacaaatgtgtgggactaaatgcaaagcacaagtaaaagcaagaaaactgttctctcccagcccatagctctagccctgtatgtattggagaagaaaaaggattagctgttagaacctcaactaagctttgccagaggaagagggaaacagcagatgggaagaaaatattggaggcatactccagtgttgcagag

SEQ ID NO: 355420 - DNA, 4976 bp, Homo sapiens
gcggtacgggggtggtgccgcgctcctggccccgcgcgggcggacggcggaggcgcctcccagcctgctatgggatggatgaagaagagaaccactatgtctcgcagctcagggaagtctacagcagctgcgacaccacggggactggctttctggaccgccaggagctgacccagctctgccttaagcttcacctggagcagcagctgcccgtcctcctgcagacgcttctcggaaacgaccatttcgccagggttaactttgaggaatttaaggaaggttttgtggctgtgttgtcttcaaatgctggtgttcgcccctcagatgaagacagtagttctttggaatcagctgcctccagtgccatccctccaaagtatgtgaatggttctaagtggtatggccgtcggagccggcctgagctatgtgacgctgccacagaagccagacgcgtgccggagcagcaaacccaggccagcctgaaaagtcacctctggcgctcagcgtctctggagagcgtggagagtcccaagtcagatgaagaggccgagagcactaaagaagctcagaatgaattatttgaagcacaaggacagctgcagacctgggattctgaggactttgggagcccccagaagtcctgcagcccctcctttgacaccccagagagccagatccggggcgtgtgggaagagctgggggtgggcagcagcggacacctgagcgagcaggagctggctgtggtctgccagagcgtcgggctccagggactcgagaaagaggaactcgaagacctgtttaacaaactggatcaagacggagacggcaaagtgagtcttgaggaattccagcttggcctcttcagtcatgagcccgcgctacttctagagtcttccactcgggttaaaccgagcaaggcttggtctcattaccaggtcccagaggagagcggctgccacaccaccacaacctcatccctcgtgtccctgtgctccagcctgcgcctcttctccagcattgacgatggttctggcttcgcttttcctgatcaggtcctggccatgtggacccaggaggggattcagaatggcagggagatcttgcagagcctggacttcagcgtggacgagaaggtgaaccttctggagctgacctgggcccttgacaacgagctcatgacagtggacagtgccgtccagcaggcagccctggcctgctaccaccaggagctgagctaccagcaagggcaggtggagcagctggcaagggagcgtgacaaggcaaggcaggacctggagagggccgagaagaggaacctggagtttgtgaaagagatggacgactgccactccaccctggagcagctcacggagaagaaaatcaagcatctggagcaggggtaccgggaaaggctgagcctcctgcggtctgaggtggaggcggagcgagagctgttctgggagcaggcccacaggcagagggccgcgctggagtgggacgtggggcgcctgcaggctgaggaggctggcctccgcgagaagctgaccctggccctgaaggaaaacagtcgcctacagaaggagattgtggaagtggtggaaaagctttcggattcggagaggctggccctgaagctgcagaaggacctggagtttgtgctgaaggacaagctggagccacagagtgcagagctcctggcccaggaggagcggttcgcagcagtcctgaaggaatacgagctcaagtgccgggacctgcaggaccgcaacgatgagctgcaagctgagctggaaggcctgtgggcgcggctgcccaagaaccggcacagcccctcatggagcccggatgggcgcagacggcagctccctggactcggcccagcaggcatttcattcctgggtaattctgctccagtgagtatagaaacggagctgatgatggagcaggtaaaggagcattaccaagacctcaggacccagctggagaccaaggtaaattactacgaaagggaaattgcggcactgaaaaggaactttgagaaggagaggaaggacatggagcaggctcgcaggcgcgaggtcagcgtgctggagggtcagaaggccgacctggaggagctccacgagaagtctcaggaggtcatctggggcctgcaggagcagctgcaggacacagcccgcggccccgagcctgagcagatgggcctggcaccctgctgcacccaggcactgtgtggcctggccctgcggcatcacagccacctgcagcagatcaggagagaggctgaggcggagctgagtggagagctgtcggggctgggagccctgcccgctcgcagagacctgaccttggagctggaggagccgccgcagggacccctgccacgcgggagccagaggtcggagcagctggagctggagagggcactgaagctgcagccctgtgcgagcgagaagcgcgcccagatgtgcgtatcgttggccctcgaggaggaggagttggagcttgcccgcgggaagcgagtggacgggccctccctggaagcagagatgcaggccctgccgaaagatgggctggtggcaggaagtggccaggagggcacacgtggcctcctaccactgcgtccgggctgtggggagcggccactggcctggctggccccaggtgatggcagagagtctgaggaggcggcaggagccgggcctcgccgcaggcaagcccaggacacagaagctacgcagagcccggcccccgcccctgccccggcatcccacggcccctcagagaggtggtcacgcatgcagccctgtggagtggatggggatattgtcccaaaggagccagagcctttcggcgcgagcgcagcggggctggagcagcctggagcccgggagctgcctctgctgggaacagagagagacgcctcgcaaacccagccacggatgccacccctgaggccggccgcttcgtgcaggggacaggctgagaggctacaggccattcaggaagagcgagcacgaagctggagcaggggcacccaggagcaggcctcggagcagcaggcccgggccgagggcgccctggagcctgggtgtcacaagcacagtgtggaggttgccaggagagggtccttgccatcccacctccagctcgcagacccgcagggttcctggcaggagcagcttgctgccccagaagagggggagaccaaaatagcgctggagagagagaaggatgacatggaaaccaaacttctacatctggaagacgtcgtccgggctctggagaaacatgtagatttgagagagaacgacagactggagttccatagactttctgaagaaaacactttgttgaaaaacgatctgggaagggttcggcaagagcttgaagctgcagaaagtactcacgatgcacagaggaaggaaattgaggttttaaagaaagacaaggaaaaggcctgctctgagatggaggtgctcaacagacagaatcagaactacaaggatcaattatcccagctcaatgtcagggttcttcaactgggacaggaggcttctacccaccaggcccaaaacgaggagcatcgtgtgaccattcagatgttaacacagagcctggaggaggtggttcgcagtgggcagcagcaggagtgaccaaatccaaaaacttagagttgaacttgaatgcctgaatcaggaacatcagagcctgcagctgccatggtcagagctgacccagacccttgaggaaagtcaagaccaggtgcagggagctcacctgaggctgaggcaggcccaggcccagcacttgcaggaggtccggctggtgccccaggaccgtgtggccgagctgcatcgcctgctcagccttcagggagagcaggccaggaggcgcctggatgcacagcgggaagaacatgagaaacagctgaaagccacagaagagcgggtggaagaggcggagatgattctgaagaatatggaaatgctcctccaagagaaagtggataagctgaaggagcagtttgaaaagaacacgaagtccgacctgctgctgaaggagctgtacgtggagaacgcccacctggtgagagcacttcaggccaccgaggagaagcagcgaggcgccgagaaacaaagccgcctcttggaagaaaaagttcgcgctctcaacaaactcgtcagtaggattgcccccgcagccctctctgtgtaaagacagattattttctaggattcattcgaaagcacatcttttaaattaagccactgtgctgccttagattccgtgggtcatgagccatgagtcctgggacatctgaggattgggattctttgttcaccccgcagatagttaatgaatggtctgccctgggcaagatggaggtgggggctgggggaatatgcatgttgcagaagccggcgtttttattagcggtcctgagtaatttcccttggcaaaattcccagttttgccactctctggagccagatcctgggagctgtcagcaaggagcaggtaagtgagcagttatggacagcactttccatgtggtgcttccgaccctggctgtcagagtgaaatgtaaagtcagggctctgtacagttttgccatttcactgttctgctttaagcttagcttattagaactcttggtggagggtgcgtacacacattccagaaaaggcttcactcgctgggaacgtcaacccagcgagaaaggaggggaagccccttctccggggaccttatctgtggactcaggaatgatggtgtttattgcaaatgcacaatctttttcccattgaaatgtcatcacactggaaattgtactatatgtaaaaaaaaaaaaaaagtatagttttatatttgaaatgtatgcaaattatggccatatggctgattggaatgtactactgtaatataaaaagtcactgtatttgcaataaattcttttctattaaaattgaaat

SEQ ID NO: 355421 - DNA, 1658 bp, Homo sapiens
ttccagccctggccccaccttcccttcagcagtccgtgttgtctgggtagtctgtggccagtgtagccctgttgcagagtgaggtctccgctgaaaggagaactggcgtggtcgttgtttgaaaagaatcaggccccagcaaggttcactggaagctaacactggacgcagcagagtctgggtctgacaggaggtcagcgtcaccattttgagggtgatggacatgttttctgcactctagcactgtgtggaagcgctggctgacagcagcctggctgtccgaattccaaagaaatgggctccttctaaatattcaggtgctgctgcatactcgggagcacacgctttccttgcccttgcaggtgggggtgtccttggatggagagggtgctcctctgtgccgcgtctcagcagccccaccagagctgcctccccttccccatgcaggtgcagggagctcacctgaggctgaggcaggcccaggcccagcacttgcaggaggtccggctggtgccccaggaccgtgtggccgagctgcatcgcctgctcagccttcagggagagcaggccaggaggcgcctggatgcacagcgggaagaacatgagaaacagctgaaagccacagaagagcgggtggaagaggcggagatgattctgaagaatatggaaatgctcctccaagagaaagtggataagctgaaggagcagtttgaaaagaacacgaagtccgacctgctgctgaaggagctgtacgtggagaacgcccacctggtgagagcacttcaggccaccgaggagaagcagcgaggcgccgagaaacaaagccgcctcttggaagaaaaagttcgcgctctcaacaaactcgtcagtaggattgcccccgcagccctctctgtgtaaagacagattattttctaggattcattcgaaagcacatcttttaaattaagccactgtgctgccttagattccgtgggtcatgagccatgagtcctgggacatctgaggattgggattctttgttcaccccgcagatagttaatgaatggtctgccctgggcaagatggaggtgggggctgggggaatatgcatgttgcagaagccggcgtttttattagcggtcctgagtaatttcccttggcaaaattcccagttttgccactctctggagccagatcctgggagctgtcagcaaggagcaggtaagtgagcagttatggacagcactttccatgtggtgcttccgaccctggctgtcagagtgaaatgtaaagtcagggctctgtacagttttgccatttcactgttctgctttaagcttagcttattagaactcttggtggagggtgcgtacacacattccagaaaaggcttcactcgctgggaacgtcaacccagcgagaaaggaggggaagccccttctccggggaccttatctgtggactcaggaatgatggtgtttattgcaaatgcacaatctttttcccattgaaatgtcatcacactggaaattgtactatatgtaaaaaaaaaaaaaaagtatagttttatatttgaaatgtatgcaaattatggccatatggctgattggaatgtactactgtaatataaaaagtcactgtatttgcaataaattcttttctattaaaattgaaat

SEQ ID NO: 355422 - DNA, 4644 bp, Homo sapiens
gcggtacgggggtggtgccgcgctcctggccccgcgcgggcggacggcggaggcgcctcccagcctgctatgggatggatgaagaagagaaccactatgtctcgcagctcagggaagtctacagcagctgcgacaccacggggactggctttctggaccgccaggagctgacccagctctgccttaagcttcacctggagcagcagctgcccgtcctcctgcagacgcttctcggaaacgaccatttcgccagggttaactttgaggaatttaaggaaggttttgtggctgtgttgtcttcaaatgctggtgttcgcccctcagatgaagacagtagttctttggaatcagctgcctccagtgccatccctccaaagtatgtgaatggttctaagtggtatggccgtcggagccggcctgagctatgtgacgctgccacagaagccagacgcgtgccggagcagcaaacccaggccagcctgaaaagtcacctctggcgctcagcgtctctggagagcgtggagagtcccaagtcagatgaagaggccgagagcactaaagaagctcagaatgaattatttgaagcacaaggacagctgcagacctgggattctgaggactttgggagcccccagaagtcctgcagcccctcctttgacaccccagagagccagatccggggcgtgtgggaagagctgggggtgggcagcagcggacacctgagcgagcaggagctggctgtggtctgccagagcgtcgggctccagggactcgagaaagaggaactcgaagacctgtttaacaaactggatcaagacggagacggcaaagtgagtcttgaggaattccagcttggcctcttcagtcatgagcccgcgctacttctagagtcttccactcgggttaaaccgagcaaggcttggtctcattaccaggtcccagaggagagcggctgccacaccaccacaacctcatccctcgtgtccctgtgctccagcctgcgcctcttctccagcattgacgatggttctggcttcgcttttcctgatcaggcatctggagcaggggtaccgggaaaggctgagcctcctgcggtctgaggtggaggcggagcgagagctgttctgggagcaggcccacaggcagagggccgcgctggagtgggacgtggggcgcctgcaggctgaggaggctggcctccgcgagaagctgaccctggccctgaaggaaaacagtcgcctacagaaggagattgtggaagtggtggaaaagctttcggattcggagaggctggccctgaagctgcagaaggacctggagtttgtgctgaaggacaagctggagccacagagtgcagagctcctggcccaggaggagcggttcgcagcagtcctgaaggaatacgagctcaagtgccgggacctgcaggaccgcaacgatgagctgcaagctgagctggaaggcctgtgggcgcggctgcccaagaaccggcacagcccctcatggagcccggatgggcgcagacggcagctccctggactcggcccagcaggcatttcattcctgggtaattctgctccagtgagtatagaaacggagctgatgatggagcaggtaaaggagcattaccaagacctcaggacccagctggagaccaaggtaaattactacgaaagggaaattgcggcactgaaaaggaactttgagaaggagaggaaggacatggagcaggctcgcaggcgcgaggtcagcgtgctggagggtcagaaggccgacctggaggagctccacgagaagtctcaggaggtcatctggggcctgcaggagcagctgcaggacacagcccgcggccccgagcctgagcagatgggcctggcaccctgctgcacccaggcactgtgtggcctggccctgcggcatcacagccacctgcagcagatcaggagagaggctgaggcggagctgagtggagagctgtcggggctgggagccctgcccgctcgcagagacctgaccttggagctggaggagccgccgcagggacccctgccacgcgggagccagaggtcggagcagctggagctggagagggcactgaagctgcagccctgtgcgagcgagaagcgcgcccagatgtgcgtatcgttggccctcgaggaggaggagttggagcttgcccgcgggaagcgagtggacgggccctccctggaagcagagatgcaggccctgccgaaagatgggctggtggcaggaagtggccaggagggcacacgtggcctcctaccactgcgtccgggctgtggggagcggccactggcctggctggccccaggtgatggcagagagtctgaggaggcggcaggagccgggcctcgccgcaggcaagcccaggacacagaagctacgcagagcccggcccccgcccctgccccggcatcccacggcccctcagagaggtggtcacgcatgcagccctgtggagtggatggggatattgtcccaaaggagccagagcctttcggcgcgagcgcagcggggctggagcagcctggagcccgggagctgcctctgctgggaacagagagagacgcctcgcaaacccagccacggatgccacccctgaggccggccgcttcgtgcaggggacaggctgagaggctacaggccattcaggaagagcgagcacgaagctggagcaggggcacccaggagcaggcctcggagcagcaggcccgggccgagggcgccctggagcctgggtgtcacaagcacagtgtggaggttgccaggagagggtccttgccatcccacctccagctcgcagacccgcagggttcctggcaggagcagcttgctgccccagaagagggggagaccaaaatagcgctggagagagagaaggatgacatggaaaccaaacttctacatctggaagacgtcgtccgggctctggagaaacatgtagatttgagagagaacgacagactggagttccatagactttctgaagaaaacactttgttgaaaaacgatctgggaagggttcggcaagagcttgaagctgcagaaagtactcacgatgcacagaggaaggaaattgaggttttaaagaaagacaaggaaaaggcctgctctgagatggaggtgctcaacagacagaatcagaactacaaggatcaattatcccagctcaatgtcagggttcttcaactgggacaggaggcttctacccaccaggcccaaaacgaggagcatcgtgtgaccattcagatgttaacacagagcctggaggaggtggttcgcagtgggcagcagcaggagtgaccaaatccaaaaacttagagttgaacttgaatgcctgaatcaggaacatcagagcctgcagctgccatggtcagagctgacccagacccttgaggaaagtcaagaccaggtgcagggagctcacctgaggctgaggcaggcccaggcccagcacttgcaggaggtccggctggtgccccaggaccgtgtggccgagctgcatcgcctgctcagccttcagggagagcaggccaggaggcgcctggatgcacagcgggaagaacatgagaaacagctgaaagccacagaagagcgggtggaagaggcggagatgattctgaagaatatggaaatgctcctccaagagaaagtggataagctgaaggagcagtttgaaaagaacacgaagtccgacctgctgctgaaggagctgtacgtggagaacgcccacctggtgagagcacttcaggccaccgaggagaagcagcgaggcgccgagaaacaaagccgcctcttggaagaaaaagttcgcgctctcaacaaactcgtcagtaggattgcccccgcagccctctctgtgtaaagacagattattttctaggattcattcgaaagcacatcttttaaattaagccactgtgctgccttagattccgtgggtcatgagccatgagtcctgggacatctgaggattgggattctttgttcaccccgcagatagttaatgaatggtctgccctgggcaagatggaggtgggggctgggggaatatgcatgttgcagaagccggcgtttttattagcggtcctgagtaatttcccttggcaaaattcccagttttgccactctctggagccagatcctgggagctgtcagcaaggagcaggtaagtgagcagttatggacagcactttccatgtggtgcttccgaccctggctgtcagagtgaaatgtaaagtcagggctctgtacagttttgccatttcactgttctgctttaagcttagcttattagaactcttggtggagggtgcgtacacacattccagaaaaggcttcactcgctgggaacgtcaacccagcgagaaaggaggggaagccccttctccggggaccttatctgtggactcaggaatgatggtgtttattgcaaatgcacaatctttttcccattgaaatgtcatcacactggaaattgtactatatgtaaaaaaaaaaaaaaagtatagttttatatttgaaatgtatgcaaattatggccatatggctgattggaatgtactactgtaatataaaaagtcactgtatttgcaataaattcttttctattaaaattgaaat

SEQ ID NO: 355423 - DNA, 3968 bp, Homo sapiens
gcggtacgggggtggtgccgcgctcctggccccgcgcgggcggacggcggaggcgcctcccagcctgctatgggatggatgaagaagagaaccactatgtctcgcagctcagggaagtctacagcagctgcgacaccacggggactggctttctggaccgccaggagctgacccagctctgccttaagcttcacctggagcagcagctgcccgtcctcctgcagacgcttctcggaaacgaccatttcgccagggttaactttgaggaatttaaggaaggttttgtggctgtgttgtcttcaaatgctggtgttcgcccctcagatgaagacagtagttctttggaatcagctgcctccagtgccatccctccaaagtatgtgaatggttctaagtggtatggccgtcggagccggcctgagctatgtgacgctgccacagaagccagacgcgtgccggagcagcaaacccaggccagcctgaaaagtcacctctggcgctcagcgtctctggagagcgtggagagtcccaagtcagatgaagaggccgagagcactaaagaagctcagaatgaattatttgaagcacaaggacagctgcagacctgggattctgaggactttgggagcccccagaagtcctgcagcccctcctttgacaccccagagagccagatccggggcgtgtgggaagagctgggggtgggcagcagcggacacctgagcgagcaggagctggctgtggtctgccagagcgtcgggctccagggactcgagaaagaggaactcgaagacctgtttaacaaactggatcaagacggagacggcaaagtgagtcttgaggaattccagcttggcctcttcagtcatgagcccgcgctacttctagagtcttccactcgggttaaaccgagcaaggcttggtctcattaccaggtcccagaggagagcggctgccacaccaccacaacctcatccctcgtgtccctgtgctccagcctgcgcctcttctccagcattgacgatggttctggcttcgcttttcctgatcaggtcctggccatgtggacccaggaggggattcagaatggcagggagatcttgcagagcctggacttcagcgtggacgagaaggtgaaccttctggagctgacctgggcccttgacaacgagctcatgacagtggacagtgccgtccagcaggcagccctggcctgctaccaccaggagctgagctaccagcaagggcaggtggagcagctggcaagggagcgtgacaaggcaaggcaggacctggagagggccgagaagaggaacctggagtttgtgaaagagatggacgactgccactccaccctggagcagctcacggagaagaaaatcaagcatctggagcaggggtaccgggaaaggctgagcctcctgcggtctgaggtggaggcggagcgagagctgttctgggagcaggcccacaggcagagggccgcgctggagtgggacgtggggcgcctgcaggctgaggaggctggcctccgcgagaagctgaccctggccctgaaggagcctgatgagccactggcctgtgtctcctaggaaaacagtcgcctacagaaggagattgtggaagtggtggaaaagctttcggattcggagaggctggccctgaagctgcagaaggacctggagtttgtgctgaaggacaagctggagccacagagtgcagagctcctggcccaggaggagcggttcgcagcagtcctgaaggaatacgagctcaagtgccgggacctgcaggaccgcaacgatgagctgcaagctgagctggaaggcctgtgggcgcggctgcccaagaaccggcacagcccctcatggagcccggatgggcgcagacggcagctccctggactcggcccagcaggcatttcattcctgggtaattctgctccagtgagtatagaaacggagctgatgatggagcaggtaaaggagcattaccaagacctcaggacccagctggagaccaaggtaaattactacgaaagggaaattgcggcactgaaaaggaactttgagaaggagaggaaggacatggagcaggctcgcaggcgcgaggtcagcgtgctggagggtcagaaggccgacctggaggagctccacgagaagtctcaggaggtcatctggggcctgcaggagcagctgcaggacacagcccgcggccccgagcctgagcagatgggcctggcaccctgctgcacccaggcactgtgtggcctggccctgcggcatcacagccacctgcagcagatcagactggagttccatagactttctgaagaaaacactttgttgaaaaacgatctgggaagggttcggcaagagcttgaagctgcagaaagtactcacgatgcacagaggaaggaaattgaggttttaaagaaagacaaggaaaaggcctgctctgagatggaggtgctcaacagacagaatcagaactacaaggatcaattatcccagctcaatgtcagggttcttcaactgggacaggaggcttctacccaccaggcccaaaacgaggagcatcgtgtgaccattcagatgttaacacagagcctggaggaggtggttcgcagtgggcagcagcaggagtgaccaaatccaaaaacttagagttgaacttgaatgcctgaatcaggaacatcagagcctgcagctgccatggtcagagctgacccagacccttgaggaaagtcaagaccaggtgcagggagctcacctgaggctgaggcaggcccaggcccagcacttgcaggaggtccggctggtgccccaggaccgtgtggccgagctgcatcgcctgctcagccttcagggagagcaggccaggaggcgcctggatgcacagcgggaagaacatgagaaacagctgaaagccacagaagagcgggtggaagaggcggagatgattctgaagaatatggaaatgctcctccaagagaaagtggataagctgaaggagcagtttgaaaagaacacgaagtccgacctgctgctgaaggagctgtacgtggagaacgcccacctggtgagagcacttcaggccaccgaggagaagcagcgaggcgccgagaaacaaagccgcctcttggaagaaaaagttcgcgctctcaacaaactcgtcagtaggattgcccccgcagccctctctgtgtaaagacagattattttctaggattcattcgaaagcacatcttttaaattaagccactgtgctgccttagattccgtgggtcatgagccatgagtcctgggacatctgaggattgggattctttgttcaccccgcagatagttaatgaatggtctgccctgggcaagatggaggtgggggctgggggaatatgcatgttgcagaagccggcgtttttattagcggtcctgagtaatttcccttggcaaaattcccagttttgccactctctggagccagatcctgggagctgtcagcaaggagcaggtaagtgagcagttatggacagcactttccatgtggtgcttccgaccctggctgtcagagtgaaatgtaaagtcagggctctgtacagttttgccatttcactgttctgctttaagcttagcttattagaactcttggtggagggtgcgtacacacattccagaaaaggcttcactcgctgggaacgtcaacccagcgagaaaggaggggaagccccttctccggggaccttatctgtggactcaggaatgatggtgtttattgcaaatgcacaatctttttcccattgaaatgtcatcacactggaaattgtactatatgtaaaaaaaaaaaaaaagtatagttttatatttgaaatgtatgcaaattatggccatatggctgattggaatgtactactgtaatataaaaagtcactgtatttgcaataaattcttttctattaaaattgaaat

SEQ ID NO: 355424 - DNA, 1689 bp, Homo sapiens
ttctcagcgtgacaactcagtgtccctagtgggactgagctcagctgccacggtggcaatcgctcattaatgcactcttcattggcttttctccccttccttgaagccgcagaaagtactcacgatgcacagaggaaggaaattgaggttttaaagaaagacaaggaaaaggcctgctctgagatggaggtgctcaacagacagaatcagaactacaaggatcaattatcccagctcaatgtcagggttcttcaactgggacaggaggcttctacccaccaggcccaaaacgaggagcatcgtgtgaccattcagatgttaacacagagcctggaggaggtggttcgcagtgggcagcagcaggagtgaccaaatccaaaaacttagagttgaacttgaatgcctgaatcaggaacatcagagcctgcagctgccatggtcagagctgacccagacccttgaggaaagtcaagaccaggtgcagggagctcacctgaggctgaggcaggcccaggcccagcacttgcaggaggtccggctggtgccccaggaccgtgtggccgagctgcatcgcctgctcagccttcagggagagcaggccaggaggcgcctggatgcacagcgggaagaacatgagaaacagctgaaagccacagaagagcgggtggaagaggcggagatgattctgaagaatatggaaatgctcctccaagagaaagtggataagctgaaggagcagtttgaaaagaacacgaagtccgacctgctgctgaaggagctgtacgtggagaacgcccacctggtgagagcacttcaggccaccgaggagaagcagcgaggcgccgagaaacaaagccgcctcttggaagaaaaagttcgcgctctcaacaaactcgtcagtaggattgcccccgcagccctctctgtgtaaagacagattattttctaggattcattcgaaagcacatcttttaaattaagccactgtgctgccttagattccgtgggtcatgagccatgagtcctgggacatctgaggattgggattctttgttcaccccgcagatagttaatgaatggtctgccctgggcaagatggaggtgggggctgggggaatatgcatgttgcagaagccggcgtttttattagcggtcctgagtaatttcccttggcaaaattcccagttttgccactctctggagccagatcctgggagctgtcagcaaggagcaggtaagtgagcagttatggacagcactttccatgtggtgcttccgaccctggctgtcagagtgaaatgtaaagtcagggctctgtacagttttgccatttcactgttctgctttaagcttagcttattagaactcttggtggagggtgcgtacacacattccagaaaaggcttcactcgctgggaacgtcaacccagcgagaaaggaggggaagccccttctccggggaccttatctgtggactcaggaatgatggtgtttattgcaaatgcacaatctttttcccattgaaatgtcatcacactggaaattgtactatatgtaaaaaaaaaaaaaaagtatagttttatatttgaaatgtatgcaaattatggccatatggctgattggaatgtactactgtaatataaaaagtcactgtatttgcaataaattcttttctattaaaattgaaat

SEQ ID NO: 355425 - DNA, 1686 bp, Homo sapiens
gtcacggctgcagtgaaccatgaatgtgccaccgcactccagccagggcaacagagcgagagcctgtcttgaaaaacaaaacaaaacaaaacaaaacaaatgactacttaataaaaatatagccaatgatgggcaaatgtatatataacatgaaaattaaaaacatttttttcttatgtatttaaaaactttttcccccagaatcagaactacaaggatcaattatcccagctcaatgtcagggttcttcaactgggacaggaggcttctacccaccaggcccaaaacgaggagcatcgtgtgaccattcagatgttaacacagagcctggaggaggtggttcgcagtgggcagcagcaggagtgaccaaatccaaaaacttagagttgaacttgaatgcctgaatcaggaacatcagagcctgcagctgccatggtcagagctgacccagacccttgaggaaagtcaagaccaggtgcagggagctcacctgaggctgaggcaggcccaggcccagcacttgcaggaggtccggctggtgccccaggaccgtgtggccgagctgcatcgcctgctcagccttcagggagagcaggccaggaggcgcctggatgcacagcgggaagaacatgagaaacagctgaaagccacagaagagcgggtggaagaggcggagatgattctgaagaatatggaaatgctcctccaagagaaagtggataagctgaaggagcagtttgaaaagaacacgaagtccgacctgctgctgaaggagctgtacgtggagaacgcccacctggtgagagcacttcaggccaccgaggagaagcagcgaggcgccgagaaacaaagccgcctcttggaagaaaaagttcgcgctctcaacaaactcgtcagtaggattgcccccgcagccctctctgtgtaaagacagattattttctaggattcattcgaaagcacatcttttaaattaagccactgtgctgccttagattccgtgggtcatgagccatgagtcctgggacatctgaggattgggattctttgttcaccccgcagatagttaatgaatggtctgccctgggcaagatggaggtgggggctgggggaatatgcatgttgcagaagccggcgtttttattagcggtcctgagtaatttcccttggcaaaattcccagttttgccactctctggagccagatcctgggagctgtcagcaaggagcaggtaagtgagcagttatggacagcactttccatgtggtgcttccgaccctggctgtcagagtgaaatgtaaagtcagggctctgtacagttttgccatttcactgttctgctttaagcttagcttattagaactcttggtggagggtgcgtacacacattccagaaaaggcttcactcgctgggaacgtcaacccagcgagaaaggaggggaagccccttctccggggaccttatctgtggactcaggaatgatggtgtttattgcaaatgcacaatctttttcccattgaaatgtcatcacactggaaattgtactatatgtaaaaaaaaaaaaaaagtatagttttatatttgaaatgtatgcaaattatggccatatggctgattggaatgtactactgtaatataaaaagtcactgtatttgcaataaattcttttctattaaaattgaaat

SEQ ID NO: 355426 - DNA, 2014 bp, Homo sapiens
gcggtacgggggtggtgccgcgctcctggccccgcgcgggcggacggcggaggcgcctcccagcctgctatgggatggatgaagaagagaaccactatgtctcgcagctcagggaagtctacagcagctgcgacaccacggggactggctttctggaccgccaggagctgacccagctctgccttaagcttcacctggagcagcagctgcccgtcctcctgcagacgcttctcggaaacgaccatttcgccagggttaactttgaggaatttaaggaaggttttgtggctgtgttgtcttcaaatgctggtgttcgcccctcagatgaagacagtagttctttggaatcagctgcctccagtgccatccctccaaagtatgtgaatggttctaagtggtatggccgtcggagccggcctgagctatgtgacgctgccacagaagccagacgcgtgccggagcagcaaacccaggccagcctgaaaagtcacctctggcgctcagcgtctctggagagcgtggagagtcccaagtcagatgaagaggccgagagcactaaagaagctcagaatgaattatttgaagcacaaggacagctgcagacctgggattctgaggactttgggagcccccagaagtcctgcagcccctcctttgacaccccagagagccagatccggggcgtgtgggaagagctgggggtgggcagcagcggacacctgagcgagcaggagctggctgtggtctgccagagcgtcgggctccagggactcgagaaagaggaactcgaagacctgtttaacaaactggatcaagacggagacggcaaagtgagtcttgaggaattccagcttggcctcttcagtcatgagcccgcgctacttctagagtcttccactcgggttaaaccgagcaaggcttggtctcattaccaggtcccagaggagagcggctgccacaccaccacaacctcatccctcgtgtccctgtgctccagcctgcgcctcttctccagcattgacgatggttctggcttcgcttttcctgatcaggtcctggccatgtggacccaggaggggattcagaatggcagggagatcttgcagagcctggacttcagcgtggacgagaaggtgaaccttctggagctgacctgggcccttgacaacgagctcatgacagtggacagtgccgtccagcaggcagccctggcctgctaccaccaggagctgagctaccagcaagggcaggtggagcagctggcaagggagcgtgacaaggcaaggcaggacctggagagggccgagaagaggaacctggagtttgtgaaagagatggacgactgccactccaccctggagcagctcacggagaagaaaatcaagcatctggagcaggggtaccgggaaaggctgagcctcctgcggtctgaggtggaggcggagcgagagctgttctgggagcaggcccacaggcagagggccgcgctggagtgggacgtggggcgcctgcaggctgaggaggctggcctccgcgagaagctgaccctggccctgaaggaaaacagtcgcctacagaaggagattgtggaagtggtggaaaagctttcggattcggagaggctggccctgaagctgcagaaggacctggagtttgtgctgaaggacaagctggagccacagagtgcagagctcctggcccaggaggagcggttcgcagcagtcctgaaggaatacgagctcaagtgccgggacctgcaggaccgcaacgatgagctgcaagctgagctggaaggcctgtgggcgcggctgcccaagaaccggcacagcccctcatggagcccggatgggcgcagacggcagctccctggactcggcccagcaggtaggagcccgtccctgggagggggctgacccaaggcctgctgttgacaacaaggcccagagccaggaaaagagagtggagatgatgaagatgatgatgttgctgtgacctgaagggaggtggtctgctc

SEQ ID NO: 355427 - DNA, 1802 bp, Homo sapiens
gcggtacgggggtggtgccgcgctcctggccccgcgcgggcggacggcggaggcgcctcccagcctgctatgggatggatgaagaagagaaccactatgtctcgcagctcagggaagtctacagcagctgcgacaccacggggactggctttctggaccgccaggagctgacccagctctgccttaagcttcacctggagcagcagctgcccgtcctcctgcagacgcttctcggaaacgaccatttcgccagggttaactttgaggaatttaaggaaggttttgtggctgtgttgtcttcaaatgctggtgttcgcccctcagatgaagacagtagttctttggaatcagctgcctccagtgccatccctccaaagtatgtgaatggttctaagtggtatggccgtcggagccggcctgagctatgtgacgctgccacagaagccagacgcgtgccggagcagcaaacccaggccagcctgaaaagtcacctctggcgctcagcgtctctggagagcgtggagagtcccaagtcagatgaagaggccgagagcactaaagaagctcagaatgaattatttgaagcacaaggacagctgcagacctgggattctgaggactttgggagcccccagaagtcctgcagcccctcctttgacaccccagagagccagatccggggcgtgtgggaagagctgggggtgggcagcagcggacacctgagcgagcaggagctggctgtggtctgccagagcgtcgggctccagggactcgagaaagaggaactcgaagacctgtttaacaaactggatcaagacggagacggcaaagtgagtcttgaggaattccagcttggcctcttcagtcatgagcccgcgctacttctagagtcttccactcgggttaaaccgagcaaggcttggtctcattaccaggtcccagaggagagcggctgccacaccaccacaacctcatccctcgtgtccctgtgctccagcctgcgcctcttctccagcattgacgatggttctggcttcgcttttcctgatcaggtcctggccatgtggacccaggaggggattcagaatggcagggagatcttgcagagcctggacttcagcgtggacgagaaggtgaaccttctggagctgacctgggcccttgacaacgagctcatgacagtggacagtgccgtccagcaggcagccctggcctgctaccaccaggagctgagctaccagcaagggcaggtggagcagctggcaagggagcgtgacaaggcaaggcaggacctggagagggccgagaagaggaacctggagtttgtgaaagagatggacgactgccactccaccctggagcagctcacggagaagaaaatcaagaaaacagtcgcctacagaaggagattgtggaagtggtggaaaagctttcggattcggagaggctggccctgaagctgcagaaggacctggagtttgtgctgaaggacaagctggagccacagagtgcagagctcctggcccaggaggagcggttcgcagcagtcctgaaggaatacgagctcaagtgccgggtacgtgcctgctctgtctgccttttagtctcatgtccaggctctgggtctccacacgcaggtggtccacagtaacgcaggagtgtctgctccagggagagcctctgcttgcggccatgcttgaccatggccttgccacactcctagacttagggttccctggctctcgttgccacctatcctgaaggccgcctctgtgtgtccagggaccatgcagggcattgtt

SEQ ID NO: 355428 - DNA, 5009 bp, Homo sapiens
gcggtacgggggtggtgccgcgctcctggccccgcgcgggcggacggcggaggcgcctcccagcctgctatgggatggatgaagaagagaaccactatgtctcgcagctcagggaagtctacagcagctgcgacaccacggggactggctttctggaccgccaggagctgacccagctctgccttaagcttcacctggagcagcagctgcccgtcctcctgcagacgcttctcggaaacgaccatttcgccagggttaactttgaggaatttaaggaaggttttgtggctgtgttgtcttcaaatgctggtgttcgcccctcagatgaagacagtagttctttggaatcagctgcctccagtgccatccctccaaagtatgtgaatggttctaagtggtatggccgtcggagccggcctgagctatgtgacgctgccacagaagccagacgcgtgccggagcagcaaacccaggccagcctgaaaagtcacctctggcgctcagcgtctctggagagcgtggagagtcccaagtcagatgaagaggccgagagcactaaagaagctcagaatgaattatttgaagcacaaggacagctgcagacctgggattctgaggactttgggagcccccagaagtcctgcagcccctcctttgacaccccagagagccagatccggggcgtgtgggaagagctgggggtgggcagcagcggacacctgagcgagcaggagctggctgtggtctgccagagcgtcgggctccagggactcgagaaagaggaactcgaagacctgtttaacaaactggatcaagacggagacggcaaagtgagtcttgaggaattccagcttggcctcttcagtcatgagcccgcgctacttctagagtcttccactcgggttaaaccgagcaaggcttggtctcattaccaggtcccagaggagagcggctgccacaccaccacaacctcatccctcgtgtccctgtgctccagcctgcgcctcttctccagcattgacgatggttctggcttcgcttttcctgatcaggtcctggccatgtggacccaggaggggattcagaatggcagggagatcttgcagagcctggacttcagcgtggacgagaaggtgaaccttctggagctgacctgggcccttgacaacgagctcatgacagtggacagtgccgtccagcaggcagccctggcctgctaccaccaggagctgagctaccagcaagggcaggtggagcagctggcaagggagcgtgacaaggcaaggcaggacctggagagggccgagaagaggaacctggagtttgtgaaagagatggacgactgccactccaccctggagcagctcacggagaagaaaatcaagcatctggagcaggggtaccgggaaaggctgagcctcctgcggtctgaggtggaggcggagcgagagctgttctgggagcaggcccacaggcagagggccgcgctggagtgggacgtggggcgcctgcaggctgaggaggctggcctccgcgagaagctgaccctggccctgaaggagcctgatgagccactggcctgtgtctcctaggaaaacagtcgcctacagaaggagattgtggaagtggtggaaaagctttcggattcggagaggctggccctgaagctgcagaaggacctggagtttgtgctgaaggacaagctggagccacagagtgcagagctcctggcccaggaggagcggttcgcagcagtcctgaaggaatacgagctcaagtgccgggacctgcaggaccgcaacgatgagctgcaagctgagctggaaggcctgtgggcgcggctgcccaagaaccggcacagcccctcatggagcccggatgggcgcagacggcagctccctggactcggcccagcaggcatttcattcctgggtaattctgctccagtgagtatagaaacggagctgatgatggagcaggtaaaggagcattaccaagacctcaggacccagctggagaccaaggtaaattactacgaaagggaaattgcggcactgaaaaggaactttgagaaggagaggaaggacatggagcaggctcgcaggcgcgaggtcagcgtgctggagggtcagaaggccgacctggaggagctccacgagaagtctcaggaggtcatctggggcctgcaggagcagctgcaggacacagcccgcggccccgagcctgagcagatgggcctggcaccctgctgcacccaggcactgtgtggcctggccctgcggcatcacagccacctgcagcagatcaggagagaggctgaggcggagctgagtggagagctgtcggggctgggagccctgcccgctcgcagagacctgaccttggagctggaggagccgccgcagggacccctgccacgcgggagccagaggtcggagcagctggagctggagagggcactgaagctgcagccctgtgcgagcgagaagcgcgcccagatgtgcgtatcgttggccctcgaggaggaggagttggagcttgcccgcgggaagcgagtggacgggccctccctggaagcagagatgcaggccctgccgaaagatgggctggtggcaggaagtggccaggagggcacacgtggcctcctaccactgcgtccgggctgtggggagcggccactggcctggctggccccaggtgatggcagagagtctgaggaggcggcaggagccgggcctcgccgcaggcaagcccaggacacagaagctacgcagagcccggcccccgcccctgccccggcatcccacggcccctcagagaggtggtcacgcatgcagccctgtggagtggatggggatattgtcccaaaggagccagagcctttcggcgcgagcgcagcggggctggagcagcctggagcccgggagctgcctctgctgggaacagagagagacgcctcgcaaacccagccacggatgccacccctgaggccggccgcttcgtgcaggggacaggctgagaggctacaggccattcaggaagagcgagcacgaagctggagcaggggcacccaggagcaggcctcggagcagcaggcccgggccgagggcgccctggagcctgggtgtcacaagcacagtgtggaggttgccaggagagggtccttgccatcccacctccagctcgcagacccgcagggttcctggcaggagcagcttgctgccccagaagagggggagaccaaaatagcgctggagagagagaaggatgacatggaaaccaaacttctacatctggaagacgtcgtccgggctctggagaaacatgtagatttgagagagaacgacagactggagttccatagactttctgaagaaaacactttgttgaaaaacgatctgggaagggttcggcaagagcttgaagctgcagaaagtactcacgatgcacagaggaaggaaattgaggttttaaagaaagacaaggaaaaggcctgctctgagatggaggtgctcaacagacagaatcagaactacaaggatcaattatcccagctcaatgtcagggttcttcaactgggacaggaggcttctacccaccaggcccaaaacgaggagcatcgtgtgaccattcagatgttaacacagagcctggaggaggtggttcgcagtgggcagcagcaggagtgaccaaatccaaaaacttagagttgaacttgaatgcctgaatcaggaacatcagagcctgcagctgccatggtcagagctgacccagacccttgaggaaagtcaagaccaggtgcagggagctcacctgaggctgaggcaggcccaggcccagcacttgcaggaggtccggctggtgccccaggaccgtgtggccgagctgcatcgcctgctcagccttcagggagagcaggccaggaggcgcctggatgcacagcgggaagaacatgagaaacagctgaaagccacagaagagcgggtggaagaggcggagatgattctgaagaatatggaaatgctcctccaagagaaagtggataagctgaaggagcagtttgaaaagaacacgaagtccgacctgctgctgaaggagctgtacgtggagaacgcccacctggtgagagcacttcaggccaccgaggagaagcagcgaggcgccgagaaacaaagccgcctcttggaagaaaaagttcgcgctctcaacaaactcgtcagtaggattgcccccgcagccctctctgtgtaaagacagattattttctaggattcattcgaaagcacatcttttaaattaagccactgtgctgccttagattccgtgggtcatgagccatgagtcctgggacatctgaggattgggattctttgttcaccccgcagatagttaatgaatggtctgccctgggcaagatggaggtgggggctgggggaatatgcatgttgcagaagccggcgtttttattagcggtcctgagtaatttcccttggcaaaattcccagttttgccactctctggagccagatcctgggagctgtcagcaaggagcaggtaagtgagcagttatggacagcactttccatgtggtgcttccgaccctggctgtcagagtgaaatgtaaagtcagggctctgtacagttttgccatttcactgttctgctttaagcttagcttattagaactcttggtggagggtgcgtacacacattccagaaaaggcttcactcgctgggaacgtcaacccagcgagaaaggaggggaagccccttctccggggaccttatctgtggactcaggaatgatggtgtttattgcaaatgcacaatctttttcccattgaaatgtcatcacactggaaattgtactatatgtaaaaaaaaaaaaaaagtatagttttatatttgaaatgtatgcaaattatggccatatggctgattggaatgtactactgtaatataaaaagtcactgtatttgcaataaattcttttctattaaaattgaaat

SEQ ID NO: 355429 - DNA, 3440 bp, Homo sapiens
agtgggaacagaggggcaggcacaagcagcccctctcctctcagcatccaggcccttgtgcacctggcccccacccggagctgtctctagcagcctgctcctggggagctgctgtccccgctctgcagggctcccgatctgccaatgcttggaggtggaggccctccaaccacttccttgctccccttgccctggccaggcatggaccacataccccttctggtgctgtggtcttgccagctctcacttcacttccactggactctcctgcgggccaccagaggtcccaaggcccagcagcttcagggaattaggggacagttttggctctgggtctccagcgctatcgtgtagaacccactgcagtgtgggccacgtcgtatgtctgccctgtccagttgggagccttgagggcttggaacgtggcctgcacggccgaggggctgcaaccaggtcctgcatggtggcggccatcttccatgtgaacactccacatggaaagggttcgtgcttgggcttccatgtgcagaacctcgctccgtggggcggatcctcgtctggactctgaagtagggcccagggtataggttgaagccagggctgagggaggcgaggagggataaagaaagccaaccacagagaggaggtcgcagccgttgcaacagctgggcagacttcaaacccgagagaggggctgggggcggcagggctgtggtgtgtgacggttctacttccacaggagagaggctgaggcggagctgagtggagagctgtcggggctgggagccctgcccgctcgcagagacctgaccttggagctggaggagccgccgcagggacccctgccacgcgggagccagaggtcggagcagctggagctggagagggcactgaagctgcagccctgtgcgagcgagaagcgcgcccagatgtgcgtatcgttggccctcgaggaggaggagttggagcttgcccgcgggaagcgagtggacgggccctccctggaagcagagatgcaggccctgccgaaagatgggctggtggcaggaagtggccaggagggcacacgtggcctcctaccactgcgtccgggctgtggggagcggccactggcctggctggccccaggtgatggcagagagtctgaggaggcggcaggagccgggcctcgccgcaggcaagcccaggacacagaagctacgcagagcccggcccccgcccctgccccggcatcccacggcccctcagagaggtggtcacgcatgcagccctgtggagtggatggggatattgtcccaaaggagccagagcctttcggcgcgagcgcagcggggctggagcagcctggagcccgggagctgcctctgctgggaacagagagagacgcctcgcaaacccagccacggatgccacccctgaggccggccgcttcgtgcaggggacaggctgagaggctacaggccattcaggaagagcgagcacgaagctggagcaggggcacccaggagcaggcctcggagcagcaggcccgggccgagggcgccctggagcctgggtgtcacaagcacagtgtggaggttgccaggagagggtccttgccatcccacctccagctcgcagacccgcagggttcctggcaggagcagcttgctgccccagaagagggggagaccaaaatagcgctggagagagagaaggatgacatggaaaccaaacttctacatctggaagacgtcgtccgggctctggagaaacatgtagatttgagagagaacgacagactggagttccatagactttctgaagaaaacactttgttgaaaaacgatctgggaagggttcggcaagagcttgaagctgcagaaagtactcacgatgcacagaggaaggaaattgaggttttaaagaaagacaaggaaaaggcctgctctgagatggaggtgctcaacagacagaatcagaactacaaggatcaattatcccagctcaatgtcagggttcttcaactgggacaggaggcttctacccaccaggcccaaaacgaggagcatcgtgtgaccattcagatgttaacacagagcctggaggaggtggttcgcagtgggcagcagcaggagtgaccaaatccaaaaacttagagttgaacttgaatgcctgaatcaggaacatcagagcctgcagctgccatggtcagagctgacccagacccttgaggaaagtcaagaccaggtgcagggagctcacctgaggctgaggcaggcccaggcccagcacttgcaggaggtccggctggtgccccaggaccgtgtggccgagctgcatcgcctgctcagccttcagggagagcaggccaggaggcgcctggatgcacagcgggaagaacatgagaaacagctgaaagccacagaagagcgggtggaagaggcggagatgattctgaagaatatggaaatgctcctccaagagaaagtggataagctgaaggagcagtttgaaaagaacacgaagtccgacctgctgctgaaggagctgtacgtggagaacgcccacctggtgagagcacttcaggccaccgaggagaagcagcgaggcgccgagaaacaaagccgcctcttggaagaaaaagttcgcgctctcaacaaactcgtcagtaggattgcccccgcagccctctctgtgtaaagacagattattttctaggattcattcgaaagcacatcttttaaattaagccactgtgctgccttagattccgtgggtcatgagccatgagtcctgggacatctgaggattgggattctttgttcaccccgcagatagttaatgaatggtctgccctgggcaagatggaggtgggggctgggggaatatgcatgttgcagaagccggcgtttttattagcggtcctgagtaatttcccttggcaaaattcccagttttgccactctctggagccagatcctgggagctgtcagcaaggagcaggtaagtgagcagttatggacagcactttccatgtggtgcttccgaccctggctgtcagagtgaaatgtaaagtcagggctctgtacagttttgccatttcactgttctgctttaagcttagcttattagaactcttggtggagggtgcgtacacacattccagaaaaggcttcactcgctgggaacgtcaacccagcgagaaaggaggggaagccccttctccggggaccttatctgtggactcaggaatgatggtgtttattgcaaatgcacaatctttttcccattgaaatgtcatcacactggaaattgtactatatgtaaaaaaaaaaaaaaagtatagttttatatttgaaatgtatgcaaattatggccatatggctgattggaatgtactactgtaatataaaaagtcactgtatttgcaataaattcttttctattaaaattgaaat

SEQ ID NO: 355430 - DNA, 1627 bp, Homo sapiens
gtcacggctgcagtgaaccatgaatgtgccaccgcactccagccagggcaacagagcgagagcctgtcttgaaaaacaaaacaaaacaaaacaaaacaaatgactacttaataaaaatatagccaatgatgggcaaatgtatatataacatgaaaattaaaaacatttttttcttatgtatttaaaaactttttcccccagaatcagaactacaaggatcaattatcccagctcaatgtcagggttcttcaactgggacaggaggcttctacccaccaggcccaaaacgaggagcatcgtgtgaccattcagatgttaacacagagcctggaggaggtggttcgcagtgggcagcagcaggcctgcagctgccatggtcagagctgacccagacccttgaggaaagtcaagaccaggtgcagggagctcacctgaggctgaggcaggcccaggcccagcacttgcaggaggtccggctggtgccccaggaccgtgtggccgagctgcatcgcctgctcagccttcagggagagcaggccaggaggcgcctggatgcacagcgggaagaacatgagaaacagctgaaagccacagaagagcgggtggaagaggcggagatgattctgaagaatatggaaatgctcctccaagagaaagtggataagctgaaggagcagtttgaaaagaacacgaagtccgacctgctgctgaaggagctgtacgtggagaacgcccacctggtgagagcacttcaggccaccgaggagaagcagcgaggcgccgagaaacaaagccgcctcttggaagaaaaagttcgcgctctcaacaaactcgtcagtaggattgcccccgcagccctctctgtgtaaagacagattattttctaggattcattcgaaagcacatcttttaaattaagccactgtgctgccttagattccgtgggtcatgagccatgagtcctgggacatctgaggattgggattctttgttcaccccgcagatagttaatgaatggtctgccctgggcaagatggaggtgggggctgggggaatatgcatgttgcagaagccggcgtttttattagcggtcctgagtaatttcccttggcaaaattcccagttttgccactctctggagccagatcctgggagctgtcagcaaggagcaggtaagtgagcagttatggacagcactttccatgtggtgcttccgaccctggctgtcagagtgaaatgtaaagtcagggctctgtacagttttgccatttcactgttctgctttaagcttagcttattagaactcttggtggagggtgcgtacacacattccagaaaaggcttcactcgctgggaacgtcaacccagcgagaaaggaggggaagccccttctccggggaccttatctgtggactcaggaatgatggtgtttattgcaaatgcacaatctttttcccattgaaatgtcatcacactggaaattgtactatatgtaaaaaaaaaaaaaaagtatagttttatatttgaaatgtatgcaaattatggccatatggctgattggaatgtactactgtaatataaaaagtcactgtatttgcaataaattcttttctattaaaattgaaat

SEQ ID NO: 355431 - DNA, 4955 bp, Homo sapiens
gcggtacgggggtggtgccgcgctcctggccccgcgcgggcggacggcggaggcgcctcccagcctgctatgggatggatgaagaagagaaccactatgtctcgcagctcagggaagtctacagcagctgcgacaccacggggactggctttctggaccgccaggagctgacccagctctgccttaagcttcacctggagcagcagctgcccgtcctcctgcagacgcttctcggaaacgaccatttcgccagggttaactttgaggaatttaaggaaggttttgtggctgtgttgtcttcaaatgctggtgttcgcccctcagatgaagacagtagttctttggaatcagctgcctccagtgccatccctccaaagtatgtgaatggttctaagtggtatggccgtcggagccggcctgagctatgtgacgctgccacagaagccagacgcgtgccggagcagcaaacccaggccagcctgaaaagtcacctctggcgctcagcgtctctggagagcgtggagagtcccaagtcagatgaagaggccgagagcactaaagaagctcagaatgaattatttgaagcacaaggacagctgcagacctgggattctgaggactttgggagcccccagaagtcctgcagcccctcctttgacaccccagagagccagatccggggcgtgtgggaagagctgggggtgggcagcagcggacacctgagcgagcaggagctggctgtggtctgccagagcgtcgggctccagggactcgagaaagaggaactcgaagacctgtttaacaaactggatcaagacggagacggcaaagtgagtcttgaggaattccagcttggcctcttcagtcatgagcccgcgctacttctagagtcttccactcgggttaaaccgagcaaggcttggtctcattaccaggtcccagaggagagcggctgccacaccaccacaacctcatccctcgtgtccctgtgctccagcctgcgcctcttctccagcattgacgatggttctggcttcgcttttcctgatcaggtcctggccatgtggacccaggaggggattcagaatggcagggagatcttgcagagcctggacttcagcgtggacgagaaggtgaaccttctggagctgacctgggcccttgacaacgagctcatgacagtggacagtgccgtccagcaggcagccctggcctgctaccaccaggagctgagctaccagcaagggcaggtggagcagctggcaagggagcgtgacaaggcaaggcaggacctggagagggccgagaagaggaacctggagtttgtgaaagagatggacgactgccactccaccctggagcagctcacggagaagaaaatcaagcatctggagcaggggtaccgggaaaggctgagcctcctgcggtctgaggtggaggcggagcgagagctgttctgggagcaggcccacaggcagagggccgcgctggagtgggacgtggggcgcctgcaggctgaggaggctggcctccgcgagaagctgaccctggccctgaaggagcctgatgagccactggcctgtgtctcctaggaaaacagtcgcctacagaaggagattgtggaagtggtggaaaagctttcggattcggagaggctggccctgaagctgcagaaggacctggagtttgtgctgaaggacaagctggagccacagagtgcagagctcctggcccaggaggagcggttcgcagcagtcctgaaggaatacgagctcaagtgccgggacctgcaggaccgcaacgatgagctgcaagctgagctggaaggcctgtgggcgcggctgcccaagaaccggcacagcccctcatggagcccggatgggcgcagacggcagctccctggactcggcccagcaggcatttcattcctgggtaattctgctccagtgagtatagaaacggagctgatgatggagcaggtaaaggagcattaccaagacctcaggacccagctggagaccaaggtaaattactacgaaagggaaattgcggcactgaaaaggaactttgagaaggagaggaaggacatggagcaggctcgcaggcgcgaggtcagcgtgctggagggtcagaaggccgacctggaggagctccacgagaagtctcaggaggtcatctggggcctgcaggagcagctgcaggacacagcccgcggccccgagcctgagcagatgggcctggcaccctgctgcacccaggcactgtgtggcctggccctgcggcatcacagccacctgcagcagatcaggagagaggctgaggcggagctgagtggagagctgtcggggctgggagccctgcccgctcgcagagacctgaccttggagctggaggagccgccgcagggacccctgccacgcgggagccagaggtcggagcagctggagctggagagggcactgaagctgcagccctgtgcgagcgagaagcgcgcccagatgtgcgtatcgttggccctcgaggaggaggagttggagcttgcccgcgggaagcgagtggacgggccctccctggaagcagagatgcaggccctgccgaaagatgggctggtggcaggaagtggccaggagggcacacgtggcctcctaccactgcgtccgggctgtggggagcggccactggcctggctggccccaggtgatggcagagagtctgaggaggcggcaggagccgggcctcgccgcaggcaagcccaggacacagaagctacgcagagcccggcccccgcccctgccccggcatcccacggcccctcagagaggtggtcacgcatgcagccctgtggagtggatggggatattgtcccaaaggagccagagcctttcggcgcgagcgcagcggggctggagcagcctggagcccgggagctgcctctgctgggaacagagagagacgcctcgcaaacccagccacggatgccacccctgaggccggccgcttcgtgcaggggacaggctgagaggctacaggccattcaggaagagcgagcacgaagctggagcaggggcacccaggagcaggcctcggagcagcaggcccgggccgagggcgccctggagcctgggtgtcacaagcacagtgtggaggttgccaggagagggtccttgccatcccacctccagctcgcagacccgcagggttcctggcaggagcagcttgctgccccagaagagggggagaccaaaatagcgctggagagagagaaggatgacatggaaaccaaacttctacatctggaagacgtcgtccgggctctggagaaacatgtagatttgagagagaacgacagactggagttccatagactttctgaagaaaacactttgttgaaaaacgatctgggaagggttcggcaagagcttgaagctgcagaaagtactcacgatgcacagaggaaggaaattgaggttttaaagaaagacaaggaaaaggcctgctctgagatggaggtgctcaacagacagaatcagaactacaaggatcaattatcccagctcaatgtcagggttcttcaactgggacaggaggcttctacccaccaggcccaaaacgaggagcatcgtgtgaccattcagatgttaacacagagcctggaggaggtggttcgcagtgggcagcagcaggagtgaccaaatccaaaaacttagagttgaacttgaatgcctgaatcaggaacatcagagcctgcagctgccatggtcagagctgacccagacccttgaggaaagtcaagaccaggtgcagggagctcacctgaggctgaggcaggcccaggcccagcacttgcaggaggtccggctggtgccccaggaccgtgtggccgagctgcatcgcctgctcagccttcagggagagcaggccaggaggcgcctggatgcacagcgggaagaacatgagaaacagctgaaagccacagaagagcgggtggaagaggcggagatgattctgaagaatatggaaatgctcctccaagagaaagtggataagctgaaggagcagtttgaaaagaacacgaagtccgacctgctgctgaaggagctgtacgtggagaacgcccacctggtgagagcacttcaggccaccgaggagaagcagcgaggcgccgagaaacaaagccgcctcttggaagatgtgtaaagacagattattttctaggattcattcgaaagcacatcttttaaattaagccactgtgctgccttagattccgtgggtcatgagccatgagtcctgggacatctgaggattgggattctttgttcaccccgcagatagttaatgaatggtctgccctgggcaagatggaggtgggggctgggggaatatgcatgttgcagaagccggcgtttttattagcggtcctgagtaatttcccttggcaaaattcccagttttgccactctctggagccagatcctgggagctgtcagcaaggagcaggtaagtgagcagttatggacagcactttccatgtggtgcttccgaccctggctgtcagagtgaaatgtaaagtcagggctctgtacagttttgccatttcactgttctgctttaagcttagcttattagaactcttggtggagggtgcgtacacacattccagaaaaggcttcactcgctgggaacgtcaacccagcgagaaaggaggggaagccccttctccggggaccttatctgtggactcaggaatgatggtgtttattgcaaatgcacaatctttttcccattgaaatgtcatcacactggaaattgtactatatgtaaaaaaaaaaaaaaagtatagttttatatttgaaatgtatgcaaattatggccatatggctgattggaatgtactactgtaatataaaaagtcactgtatttgcaataaattcttttctattaaaattgaaat

SEQ ID NO: 355432 - DNA, 802 bp, Homo sapiens
gagacaaagtctcactctgttgcccaggctggagtgcagtggtgcagtcttggctcactgcagcctccacttcccggttcaggcaattctcctgcctcagccacctaagtagctgggattacaggcgtgcgccagccaagcctggtgtttttagtagagactgggtttcaccatgttggccaggctggtttcgaactcctgtcctcaagtgatcgcccgcgttggcgtcccaaagtgctgggattacaggcctgagccaccacgcctggcctttagaattctttcctagacttcaagggttctctgatgttttgttttctcacccatactttaaaaacaaaatgagtaataattaggaaagctattttcctcctctgaaaaataggatctttccattgtgccacaacactcttacagtttactttctgataaaacacagagaaactttgctttcttaccacgtggtccaaggaaggaccataaaccactggagtcagccctctgggtcctccctgctcctatcctgctgctcacaggctggatggccttgagaaagacccattaatctttgtgcctgcagttttgtcaactgtcaaatagggacctgtattttataacctgaagattagtcagtctctgttctttagctttactaattgtatgttgttgctactgctctttagttctgtgtcttagaggtttatagacatctttcctgcagtcttttagttcagcaaacattttagttcaaacaattactgagagcctaagaagataaagatgagcaaggcctggtcctctg

SEQ ID NO: 355433 - DNA, 1077 bp, Homo sapiens
cgcggccaggaccggagcggaagtggcgatcggagcggaagtggagctaccgccaccgccgccgccgattccggagccggggtagtcgccgccgccgccgccgctgcagccactgcaggcaccgctgccgccgcctgagtagtgggcttaggaaggaagaggtcatctcgctcggagcttcgctcggaagggtctttgttccctgcagccctcccacgggaatgacaatggataaaagtgagctggtacagaaagccaaactcgctgagcaggctgagcgatatgatgatatggctgcagccatgaaggcagtcacagaacaggggcatgaactctccaacgaagagagaaatctgctctctgttgcctacaagaatgtggtaggcgcccgccgctcttcctggcgtgtcatctccagcattgagcagaaaacagagaggaatgagaagaagcagcagatgggcaaagagtaccgtgagaagatagaggcagaactgcaggacatctgcaatgatgttctggagctgttggacaaatatcttattcccaatgctacacaaccagaaagtaaggtgttctacttgaaaatgaaaggagattattttaggtatctttctgaagtggcatctggagacaacaaacaaaccactgtgtcgaactcccagcaggcttaccaggaagcatttgaaattagtaagaaagaaatgcagcctacacacccaattcgtcttggtctggcactaaatttctcagtcttttactatgagattctaaactctcctgaaaaggcctgtagcctggcaaaaacgggtgagaaagaccctttgtgatatctaaccatagcaaaacagtgcttgtgttattaacttcattttattcctgaacatactcattgtcttggactttttttgaaagattttctgggggtgggagtgtatcttttatgagataaatacagatctgttacttttttaattcattctcaataccttctgctgactttgtttgattactgttttttgcgggtggttgtagaaagttccaggtgaatgtagttagttgtttcttaccaagctt

SEQ ID NO: 355434 - DNA, 677 bp, Homo sapiens
cggtacgggtgtatcgatgccacatcttgctgaagatggcatatggagacaacaacaaaccactgtgtcgaactcccagcaggcttaccaggaagcatttgaaattagtaagaaagaaatgcagcctacacacccaattcgtcttggtctggcactaaatttctcagtcttttactatgagattctaaactctcctgaaaaggcctgtagcctggcaaaaacggcatttgatgaagcaattgctgaattggatacgctgaatgaagagtcttataaagacagcactctgatcatgcagttacttagggacaatctcactctgtggacatcggaaaaccagggagacgaaggagacgctggggagggagagaactaatgtttctcgtgctttgtgatctgttcagtgtcactctgtaccctcaacatatatcccttgtgcgataaaaaaaaaaaaaaaaaaaaaaggagaatcgtacgtcgactttcgatttttcaaagcctcagcctaggaaaaatggtccaggggataaacagctggtatttgtatctaaaactcagattggtcacataaatgccacggcattccgaagttttgattttgattaacattgacaggattactgtgtgtttaattttttaaaaactgaacactgtgattatggggttttgtaatttag

SEQ ID NO: 355435 - DNA, 1592 bp, Homo sapiens
cgcggccaggaccggagcggaagtggcgatcggagcggaagtggagctaccgccaccgccgccgccgattccggagccggggtagtcgccgccgccgccgccgctgcagccactgcaggcaccgctgccgccgcctgagtagtgggcttaggaaggaagaggtcatctcgctcggagcttcgctcggaagggtctttgttccctgcagccctcccacgggaatgacaatggataaaagtgagctggtacagaaagccaaactcgctgagcaggctgagcgatatgatgatatggctgcagccatgaaggcagtcacagaacaggggcatgaactctccaacgaagagagaaatctgctctctgttgcctacaagaatgtggtaggcgcccgccgctcttcctggcgtgtcatctccagcattgagcagaaaacagagaggaatgagaagaagcagcagatgggcaaagagtaccgtgagaagatagaggcagaactgcaggacatctgcaatgatgttctggagctgttggacaaatatcttattcccaatgctacacaaccagaaagtaaggtgttctacttgaaaatgaaaggagattattttaggtatctttctgaagtggcatctggagacaacaaacaaaccactgtgtcgaactcccagcaggcttaccaggaagcatttgaaattagtaagaaagaaatgcagcctacacacccaattcgtcttggtctggcactaaatttctcagtcttttactatgagattctaaactctcctgaaaaggcctgtagcctggcaaaaacggcatttgatgaagcaattgctgaattggatacgctgaatgaagagtcttataaagacagcactctgatcatgcagttacttagggacaatctcactctgtggacatcggaaaaccagggagacgaaggagacgctggggagggagagaactaatgtttctcgtgctttgtgatctgttcagtgtcactctgtaccctcaacatatatcccttgtgcgataaaaaaaaaaaaaaaaaaaaaaggaaattggacgtgaatttggattttaaaagttaagttgggaaaaggggtcccggggcgatataaaccaccgggggatattgtggtattttaaaccttcagattggcgtcaaaataattgccacggagattcccaagaaggttagattatggattaactactttggcacggagttgagcgggtttgtcacattttttaaaaccttgaacctgggcatcttatggggggcttggaaagtgagcaagacttttcgtgggtgagaaaaattttaagcctggaattttatggttgtacctttgggaagagggttactgtggtttttccaaagataattctttgggaaatacaattcctgtggtaactgttgtacagaaaggtatacagagttaattgtgggggggggaatgtgggtgggagacccactttttgggatttgactgaagcggaacttcaccagaaagtcgaggggccggattaaagaacttgctggtgggggttgcttaagtttgaccatgtgcgttctcggaaacagatctgaggac

SEQ ID NO: 355436 - DNA, 1258 bp, Homo sapiens
  misc_feature (9)..(9): n is a, c, g, or t
ggggggcancaaatacggctaggtacgaggctgggtggtagctaccgccaccgccgccgccgattccggagccggggtagtcgccgccgccgccgccgctgcagccactgcaggcaccgctgccgccgcctgagtagtgggcttaggaaggaagaggtcatctcgctcggagcttcgctcggaagggtctttgttccctgcagccctcccacgggaatgacaatggataaaagtgagctggtacagaaagccaaactcgctgagcaggctgagcgatatgatgatatggctgcagccatgaaggcagtcacagaacaggggcatgaactctccaacgaagagagaaatctgctctctgttgcctacaagaatgtggtaggcgcccgccgctcttcctggcgtgtcatctccagcattgagcagaaaacagagaggaatgagaagaagcagcagatgggcaaagagtaccgtgagaagatagaggcagaactgcaggacatctgcaatgatgttctggagctgttggacaaatatcttattcccaatgctacacaaccagaaagtaaggtgttctacttgaaaatgaaaggagattattttaggtatctttctgaagtggcatctggagacaacaaacaaaccactgtgtcgaactcccagcaggcttaccaggaagcatttgaaattagtaagaaagaaatgcagcctacacacccaattcgtcttggtctggcactaaatttctcagtcttttactatgagattctaaactctcctgaaaaggcctgtagcctggcaaaaacggcatttgatgaagcaattgctgaattggatacgctgaatgaagagtcttataaagacagcactctgatcatgcagttacttagggacaatctcactctgtggacatcggaaaaccagggagacgaaggagacgctggggagggagagaactaatgtttctcgtgctttgtgatctgttcagtgtcactctgtaccctcaacatatatcccttgtgcgataaaaaaaaaaaaaaaaaaaaaaggagaatcgtacgtcgactttcgatttttcaaagcctcagcctaggaaaaatggtccaggggataaacagctggtatttgtatctaaaactcagattggtcacataaatgccacggcattccgaagttttgattttgattaacattgacaggattactgtgtgtttaattttttaaaaactgaacactgtgattatggggttttgtaatttag

SEQ ID NO: 355437 - DNA, 993 bp, Homo sapiens
cgcggccaggaccggagcggaagtggcgatcggagcggaagtggagctaccgccaccgccgccgccgattccggagccggggtagtcgccgccgccgccgccgctgcagccactgcaggcaccgctgccgccgcctgagtagtgggcttaggaaggaagaggtcatctcgctcggagcttcgctcggaagggtctttgttccctgcagccctcccacgggaatgacaatggataaaagtgagctggtacagaaagccaaactcgctgagcaggctgagcgatatgatgatatggctgcagccatgaaggcagtcacagaacaggggcatgaactctccaacgaagagagaaatctgctctctgttgcctacaagaatgtggtaggcgcccgccgctcttcctggcgtgtcatctccagcattgagcagaaaacagagaggaatgagaagaagcagcagatgggcaaagagtaccgtgagaagatagaggcagaactgcaggacatctgcaatgatgttctggagctgttggacaaatatcttattcccaatgctacacaaccagaaagtaaggtgttctacttgaaaatgaaaggagattattttaggtatctttctgaagtggcatctggagacaacaaacaaaccactgtgtcgaactcccagcaggcttaccaggaagcatttgaaattagtaagaaagaaatgcagcctacacacccaattcgtcttggtctggcactaaatttctcagtcttttactatgagattctaaactctcctgaaaaggcctgtagcctggcaaaaacggcatttgatgaagcaattgctgaattggatacgctgaatgaagagtcttataaagacagcactctgatcatgcagttacttagggacaatctcactctgtgggacatcggaaaacagggagacgaagaaaccctgtggaggagagaactatgtttttgtgcttgggaactgtcaggacactcta

SEQ ID NO: 355438 - DNA, 1163 bp, Homo sapiens
cgcggccaggaccggagcggaagtggcgatcggagcggaagtggagctaccgccaccgccgccgccgattccggagccggggtagtcgccgccgccgccgccgctgcagccactgcaggcaccgctgccgccgcctgagtagtgggcttaggaaggaagaggtcatctcgctcggagcttcgctcggaagggtctttgttccctgcagccctcccacgggaatgacaatggataaaagtgagctggtacagaaagccaaactcgctgagcaggctgagcgatatgatgatatggctgcagccatgaaggcagtcacagaacaggggcatgaactctccaacgaagagagaaatctgctctctgttgcctacaagaatgtggtaggcgcccgccgctcttcctggcgtgtcatctccagcattgagcagaaaacagagaggaatgagaagaagcagcagatgggcaaagagtaccgtgagaagatagaggcagaactgcaggacatctgcaatgatgttctggagctgttggacaaatatcttattcccaatgctacacaaccagaaagtaaggtgttctacttgaaaatgaaaggagattattttaggtatctttctgaagtggcatctggagacaacaaacaaaccactgtgtcgaactcccagcaggcttaccaggaagcatttgaaattagtaagaaagaaatgcagcctacacacccaattcgtcttggtctggcactaaatttctcagtcttttactatgagattctaaactctcctgaaaaggcctgtagcctggcaaaaacggcatttgatgaagcaattgctgaattggatacgctgaatgaagagtcttataaagacagcactctgatcatgcagttacttagggacaatctcactctgtggcatcgataatcaccggtgtttatcgatgccacataatctggttccttgttggatttgaacagattatgtggctcgtcggggcaaaccgagggtttttatttacttggaaagaatcatcacagcccgcgaattcacaagctggatttagccattttcccttagattctgcgccatgagcctataggctgttgaatacgagagaagtgttttctaaacgagttctaaatttaccagcagtgtcaggaagaggcc

SEQ ID NO: 355439 - DNA, 1414 bp, Homo sapiens
taccgccaccgccgccgccgattccggagccggggtagtcgccgccgccgccgccgccgctgcagccactgcaggcaccgctgccgccgcctgagtagtgagctaccgccaccgccgccgccgattccggagccggggtagtcgccgccgccgccgccgctgcagccactgcaggcaccgctgccgccgcctgagtagtgggcttaggaaggaagaggtcatctcgctcggagcttcgctcggaagggtctttgttccctgcagccctcccacggcagagtctccagagatttgggccgctacaaaaagtgcattttgcccattcggctgtggatagagaagcaggaagagcactggacttggagtcagggaatgacaatggataaaagtgagctggtacagaaagccaaactcgctgagcaggctgagcgatatgatgatatggctgcagccatgaaggcagtcacagaacaggggcatgaactctccaacgaagagagaaatctgctctctgttgcctacaagaatgtggtaggcgcccgccgctcttcctggcgtgtcatctccagcattgagcagaaaacagagaggaatgagaagaagcagcagatgggcaaagagtaccgtgagaagatagaggcagaactgcaggacatctgcaatgatgttctggagctgttggacaaatatcttattcccaatgctacacaaccagaaagtaaggtgttctacttgaaaatgaaaggagattattttaggtatctttctgaagtggcatctggagacaacaaacaaaccactgtgtcgaactcccagcaggcttaccaggaagcatttgaaattagtaagaaagaaatgcagcctacacacccaattcgtcttggtctggcactaaatttctcagtcttttactatgagattctaaactctcctgaaaaggcctgtagcctggcaaaaacggcatttgatgaagcaattgctgaattggatacgctgaatgaagagtcttataaagacagcactctgatcatgcagttacttagggacaatctcactctgtggacatcggaaaaccagggagacgaaggagacgctggggagggagagaactaatgtttctcgtgctttgtgatctgttcagtgtcactctgtaccctcaacatatatcccttgtgcgataaaaaaaaaaaaaaaaaaaaaaggagaatcgtacgtcgactttcgatttttcaaagcctcagcctaggaaaaatggtccaggggataaacagctggtatttgtatctaaaactcagattggtcacataaatgccacggcattccgaagttttgattttgattaacattgacaggattactgtgtgtttaattttttaaaaactgaacactgtgattatggggttttgtaatttag

SEQ ID NO: 355440 - DNA, 1238 bp, Homo sapiens
ggtggcggcggcggcggcggcggctgctgctgctgctgctgcccgcgtcgaggctcgcgggcggcgggcccgggtgagctgcagccactgcaggcaccgctgccgccgcctgagtagtgggcttaggaaggaagaggtcatctcgctcggagcttcgctcggaagggtctttgttccctgcagccctcccacgggaatgacaatggataaaagtgagctggtacagaaagccaaactcgctgagcaggctgagcgatatgatgatatggctgcagccatgaaggcagtcacagaacaggggcatgaactctccaacgaagagagaaatctgctctctgttgcctacaagaatgtggtaggcgcccgccgctcttcctggcgtgtcatctccagcattgagcagaaaacagagaggaatgagaagaagcagcagatgggcaaagagtaccgtgagaagatagaggcagaactgcaggacatctgcaatgatgttctggagctgttggacaaatatcttattcccaatgctacacaaccagaaagtaaggtgttctacttgaaaatgaaaggagattattttaggtatctttctgaagtggcatctggagacaacaaacaaaccactgtgtcgaactcccagcaggcttaccaggaagcatttgaaattagtaagaaagaaatgcagcctacacacccaattcgtcttggtctggcactaaatttctcagtcttttactatgagattctaaactctcctgaaaaggcctgtagcctggcaaaaacggcatttgatgaagcaattgctgaattggatacgctgaatgaagagtcttataaagacagcactctgatcatgcagttacttagggacaatctcactctgtggacatcggaaaaccagggagacgaaggagacgctggggagggagagaactaatgtttctcgtgctttgtgatctgttcagtgtcactctgtaccctcaacatatatcccttgtgcgataaaaaaaaaaaaaaaaaaaaaaggagaatcgtacgtcgactttcgatttttcaaagcctcagcctaggaaaaatggtccaggggataaacagctggtatttgtatctaaaactcagattggtcacataaatgccacggcattccgaagttttgattttgattaacattgacaggattactgtgtgtttaattttttaaaaactgaacactgtgattatggggttttgtaatttag

SEQ ID NO: 355441 - DNA, 1103 bp, Homo sapiens
tctttttgtcactagcgcgccattgtgttggtcccgcgattcggccattatggccgggggaatgacaatggataaaagtgagctggtacagaaagccaaactcgctgagcaggctgagcgatatgatgatatggctgcagccatgaaggcagtcacagaacaggggcatgaactctccaacgaagagagaaatctgctctctgttgcctacaagaatgtggtaggcgcccgccgctcttcctggcgtgtcatctccagcattgagcagaaaacagagaggaatgagaagaagcagcagatgggcaaagagtaccgtgagaagatagaggcagaactgcaggacatctgcaatgatgttctggagctgttggacaaatatcttattcccaatgctacacaaccagaaagtaaggtgttctacttgaaaatgaaaggagattattttaggtatctttctgaagtggcatctggagacaacaaacaaaccactgtgtcgaactcccagcaggcttaccaggaagcatttgaaattagtaagaaagaaatgcagcctacacacccaattcgtcttggtctggcactaaatttctcagtcttttactatgagattctaaactctcctgaaaaggcctgtagcctggcaaaaacggcatttgatgaagcaattgctgaattggatacgctgaatgaagagtcttataaagacagcactctgatcatgcagttacttagggacaatctcactctgtggacatcggaaaaccagggagacgaaggagacgctggggagggagagaactaatgtttctcgtgctttgtgatctgttcagtgtcactctgtaccctcaacatatatcccttgtgcgataaaaaaaaaaaaaaaaaaaaaaggagaatcgtacgtcgactttcgatttttcaaagcctcagcctaggaaaaatggtccaggggataaacagctggtatttgtatctaaaactcagattggtcacataaatgccacggcattccgaagttttgattttgattaacattgacaggattactgtgtgtttaattttttaaaaactgaacactgtgattatggggttttgtaatttag

SEQ ID NO: 355442 - DNA, 1043 bp, Homo sapiens
cgcggccaggaccggagcggaagtggcgatcggagcggaagtggagctaccgccaccgccgccgccgattccggagccggggtagtcgccgccgccgccgccgctgcagccactgcaggcaccgctgccgccgcctgagtagtgggcttaggaaggaagaggtcatctcgctcggagcttcgctcggaagggtctttgttccctgcagccctcccacgggaatgacaatggataaaagtgagctggtacagaaagccaaactcgctgagcaggctgagcgatatgatgatatggctgcagccatgaaggcagtcacagaacaggggcatgaactctccaacgaagagagaaatctgctctctgttgcctacaagaatgtggtaggcgcccgccgctcttcctggcgtgtcatctccagcattgagcagaaaacagagaggaatgagaagaagcagcagatgggcaaagagtaccgtgagaagatagaggcagaactgcaggacatctgcaatgatgttctggagctgttggacaaatatcttattcccaatgctacacaaccagaaagtaaggtgttctacttgaaaatgaaaggagattattttaggtatctttctgaagtggcatctggagacaacaaacaaaccactgtgtcgaactcccagcaggcttaccaggaagcatttgaaattagtaagaaagaaatgcagcctacacacccaattcgtcttggtctggcactaaatttctcagtcttttactatgagattctaaactctcctgaaaaggcctgtagcctggcaaaaacgcgcatttgtgaagcatgctgaatggtactcgatgagagttttagacgccctgatatgccgttctaggggcaccccccggggctcgaaacccggacacggaccgggggagaacaagtttgtgtgtggcgagggcgtccccattccttgaaaaaaggggcgagtccggccgagcccacttttaggcaagtaaaaggcggaagaaatgtgcgggtcaacaatgtggtttatgttcgg

SEQ ID NO: 355443 - DNA, 1349 bp, Homo sapiens
cgcggccaggaccggagcggaagtggcgatcggagcggaagtggagctaccgccaccgccgccgccgattccggagccggggtagtcgccgccgccgccgccgctgcagccactgcaggcaccgctgccgccgcctgagtagtgggcttaggaaggaagaggtcatctcgctcggagcttcgctcggaagggtctttgttccctgcagccctcccacgggaatgacaatggataaaagtgagctggtacagaaagccaaactcgctgagcaggctgagcgatatgatgatatggctgcagccatgaaggcagtcacagaacaggggcatgaactctccaacgaagagagaaatctgctctctgttgcctacaagaatgtggtaggcgcccgccgctcttcctggcgtgtcatctccagcattgagcagaaaacagagaggaatgagaagaagcagcagatgggcaaagagtaccgtgagaagatagaggcagaactgcaggacatctgcaatgatgttctgtttttcaggatgccacattctaaaacaactcttcgaaaatattgctctgtatacgaagcttggactccttcagaactacttttgttgagctgttggacaaatatcttattcccaatgctacacaaccagaaagtaaggtgttctacttgaaaatgaaaggagattattttaggtatctttctgaagtggcatctggagacaacaaacaaaccactgtgtcgaactcccagcaggcttaccaggaagcatttgaaattagtaagaaagaaatgcagcctacacacccaattcgtcttggtctggcactaaatttctcagtcttttactatgagattctaaactctcctgaaaaggcctgtagcctggcaaaaacggcatttgatgaagcaattgctgaattggatacgctgaatgaagagtcttataaagacagcactctgatcatgcagttacttagggacaatctcactctgtggacatcggaaaaccagggagacgaaggagacgctggggagggagagaactaatgtttctcgtgctttgtgatctgttcagtgtcactctgtaccctcaacatatatcccttgtgcgataaaaaaaaaaaaaaaaaaaaaaggagaatcgtacgtcgactttcgatttttcaaagcctcagcctaggaaaaatggtccaggggataaacagctggtatttgtatctaaaactcagattggtcacataaatgccacggcattccgaagttttgattttgattaacattgacaggattactgtgtgtttaattttttaaaaactgaacactgtgattatggggttttgtaatttag

SEQ ID NO: 355444 - DNA, 1377 bp, Homo sapiens
ggatttctacccaggtcagattgactttaaacttagttcttggcagttttgctctattatcacctttttcctcctaaggaaagatattttttcccctttaattatagaagtaataccagtttgtgggtttaaaaatggtggggggaacaagtcagaagaatataaataagaaagtaaaaatcacttctaatcttaccacccagagaaccattattaacatactccttccaggcttttcccttatatatttgtgagcatgtacacaaatgtatcttaatgttaaaataggattcttgtggtatttataatctgctttttttccactcagatttcttttgagagcctttccattatctgtttagctctgcatcattttaaaggcctacaaaacatttcattatatggctatactttaattatcccctatggatggtcaaagtgatttttaacagaagaatacaggcatctgctgttatgacctgggctaaacaacatttagtagcttggatgaaaaattggtgtttttttaatcttccaaaaaattatttagaagcagtagtgtatatcttgaatctcaaacatagttttaacatctcgtgaataattctaaattcttaacaatgttcattttttaggagctgttggacaaatatcttattcccaatgctacacaaccagaaagtaaggtgttctacttgaaaatgaaaggagattattttaggtatctttctgaagtggcatctggagacaacaaacaaaccactgtgtcgaactcccagcaggcttaccaggaagcatttgaaattagtaagaaagaaatgcagcctacacacccaattcgtcttggtctggcactaaatttctcagtcttttactatgagattctaaactctcctgaaaaggcctgtagcctggcaaaaacggcatttgatgaagcaattgctgaattggatacgctgaatgaagagtcttataaagacagcactctgatcatgcagttacttagggacaatctcactctgtggacatcggaaaaccagggagacgaaggagacgctggggagggagagaactaatgtttctcgtgctttgtgatctgttcagtgtcactctgtaccctcaacatatatcccttgtgcgataaaaaaaaaaaaaaaaaaaaaaggagaatcgtacgtcgactttcgatttttcaaagcctcagcctaggaaaaatggtccaggggataaacagctggtatttgtatctaaaactcagattggtcacataaatgccacggcattccgaagttttgattttgattaacattgacaggattactgtgtgtttaattttttaaaaactgaacactgtgattatggggttttgtaatttag

SEQ ID NO: 355445 - DNA, 1006 bp, Homo sapiens
cggtacgggtgtatcgatgccacatcttgctgaagatggcatatggagacaacaacaaaccactgtgtcgaactcccagcaggcttaccaggaagcatttgaaattagtaagaaagaaatgcagcctacacacccaattcgtcttggtctggcactaaatttctcagtcttttactatgagattctaaactctcctgaaaaggcctgtagcctggcaaaaacggcatttgatgaagcaattgctgaattggatacgctgaatgaagagtcttataaagacagcactctgatcatgcagttacttagggacaatctcactctgtggacatcggaaaaccagggagacgaaggagacgctggggagggagagaactaatgtttctcgtgctttgtgatctgttcagtgtcactctgtaccctcaacatatatcccttgtgcgataaaaaaaaaaaaaaaaaaaaaaggaaattggacgtgaatttggattttaaaagttaagttgggaaaaggggtcccggggcgatataaaccaccgggggatattgtggtattttaaaccttcagattggcgtcaaaataattgccacggagattcccaagaaggttagattatggattaactactttggcacggagttgagcgggtttgtcacattttttaaaaccttgaacctgggcatcttatggggggcttggaaagtgagcaagacttttcgtgggtgagaaaaattttaagcctggaattttatggttgtacctttgggaagagggttactgtggtttttccaaagataattctttgggaaatacaattcctgtggtaactgttgtacagaaaggtatacagagttaattgtgggggggggaatgtgggtgggagacccactttttgggatttgactgaagcggaacttcaccagaaagtcgaggggccggattaaagaacttgctggtgggggttgcttaagtttgaccatgtgcgttctcggaaacagatctgaggac

SEQ ID NO: 355446 - DNA, 916 bp, Homo sapiens
aataatagcctatcgtgttgcaccccaaagtactgtacaagaagataagttatattcacctagcgggaaaaaaagtgggctaaactagctccagagaacttgtgaattctttgctaaaggctctttgttttaggcatttgatgaagcaattgctgaattggatacgctgaatgaagagtcttataaagacagcactctgatcatgcagttacttagggacaatctcactctgtggacatcggaaaaccagggagacgaaggagacgctggggagggagagaactaatgtttctcgtgctttgtgatctgttcagtgtcactctgtaccctcaacatatatcccttgtgcgataaaaaaaaaaaaaaaaaaaaaaggaaattggacgtgaatttggattttaaaagttaagttgggaaaaggggtcccggggcgatataaaccaccgggggatattgtggtattttaaaccttcagattggcgtcaaaataattgccacggagattcccaagaaggttagattatggattaactactttggcacggagttgagcgggtttgtcacattttttaaaaccttgaacctgggcatcttatggggggcttggaaagtgagcaagacttttcgtgggtgagaaaaattttaagcctggaattttatggttgtacctttgggaagagggttactgtggtttttccaaagataattctttgggaaatacaattcctgtggtaactgttgtacagaaaggtatacagagttaattgtgggggggggaatgtgggtgggagacccactttttgggatttgactgaagcggaacttcaccagaaagtcgaggggccggattaaagaacttgctggtgggggttgcttaagtttgaccatgtgcgttctcggaaacagatctgaggac

SEQ ID NO: 355447 - DNA, 842 bp, Homo sapiens
gcacgagtttcaggagagtttagaatttcatagtaaaagactgtagcctggcaaaaacggcatttgatgaagcaattgctgaattggatacgctgaatgaagagtcttataaagacagcactctgatcatgcagttacttagggacaatctcactctgtggacatcggaaaaccagggagacgaaggagacgctggggagggagagaactaatgtttctcgtgctttgtgatctgttcagtgtcactctgtaccctcaacatatatcccttgtgcgataaaaaaaaaaaaaaaaaaaaaaggaaattggacgtgaatttggattttaaaagttaagttgggaaaaggggtcccggggcgatataaaccaccgggggatattgtggtattttaaaccttcagattggcgtcaaaataattgccacggagattcccaagaaggttagattatggattaactactttggcacggagttgagcgggtttgtcacattttttaaaaccttgaacctgggcatcttatggggggcttggaaagtgagcaagacttttcgtgggtgagaaaaattttaagcctggaattttatggttgtacctttgggaagagggttactgtggtttttccaaagataattctttgggaaatacaattcctgtggtaactgttgtacagaaaggtatacagagttaattgtgggggggggaatgtgggtgggagacccactttttgggatttgactgaagcggaacttcaccagaaagtcgaggggccggattaaagaacttgctggtgggggttgcttaagtttgaccatgtgcgttctcggaaacagatctgaggac

SEQ ID NO: 355448 - DNA, 872 bp, Homo sapiens
aataatagcctatcgtgttgcaccccaaagtactgtacaagaagataagttatattcacctagcgggaaaaaaagtgggctaaactagctccagagaacttgtgaattctttgctaaaggctctttgttttaggcatttgatgaagcaattgctgaattggatacgctgaatgaagagtcttataaagacagcactctgatcatgcagttacttagggacaatctcactgtaagtactacttccacagggtttatagtctctttcctattcacctacttaataattcactgttatcttcaagaggggatttgtaccattaaatgtagttacagttttaagttgttaaatttgttataaatgactgctgaagttttgacctttgcaatcatccctgtctgcagtgacacaggaataattttaaactgtcgagtgagataagattatacatactgggccacttacctagggaacttttagtagccctgctttgattatacttcctttctcttgcagctgtggacatcggaaaaccagggagacgaaggagacgctggggagggagagaactaatgtttctcgtgctttgtgatctgttcagtgtcactctgtaccctcaacatatatcccttgtgcgataaaaaaaaaaaaaaaaaaaaaaggagaatcgtacgtcgactttcgatttttcaaagcctcagcctaggaaaaatggtccaggggataaacagctggtatttgtatctaaaactcagattggtcacataaatgccacggcattccgaagttttgattttgattaacattgacaggattactgtgtgtttaattttttaaaaactgaacactgtgattatggggttttgtaatttag

SEQ ID NO: 355449 - DNA, 773 bp, Homo sapiens
  misc_feature (12)..(12): n is a, c, g, or t
  misc_feature (21)..(21): n is a, c, g, or t
cgcggcaaaacntacggctangtcgaggccgggggttcagaaagtaaggtgttctacttgaaaatgaaaggagattattttaggtatctttctgaagtggcatctggagacaacaaacaaaccactgtgtcgaactcccagcaggcttaccaggaagcatttgaaattagtaagaaagaaatgcagcctacacacccaattcgtcttggtctggcactaaatttctcagtcttttactatgagattctaaactctcctgaaaaggcctgtagcctggcaaaaacggcatttgatgaagcaattgctgaattggatacgctgaatgaagagtcttataaagacagcactctgatcatgcagttacttagggacaatctcactctgtggacatcggaaaaccagggagacgaaggagacgctggggagggagagaactaatgtttctcgtgctttgtgatctgttcagtgtcactctgtaccctcaacatatatcccttgtgcgataaaaaaaaaaaaaaaaaaaaaagaaaaaactccggggcttttttttcgggggggggaaaaaagggttttgaattgggacatatgggtatatagtgtggttccctggaccccatgtttttttttttacaagtgggggaaaattcgcgcaggggcccccctaatagggaagcgcggtattataatttcacagataaacgccgctttacccttgttgagtctctctctctcacacaaaaccgcagaaaagaaacaaaaaaaaaaacaaatga

SEQ ID NO: 355450 - DNA, 1263 bp, Homo sapiens
cgcggccaggaccggagcggaagtggcgatcggagcggaagtggagctaccgccaccgccgccgccgattccggagccggggtagtcgccgccgccgccgccgctgcagccactgcaggcaccgctgccgccgcctgagtagtgggcttaggaaggaagaggtcatctcgctcggagcttcgctcggaagggtctttgttccctgcagccctcccacgggaatgacaatggataaaagtgagctggtacagaaagccaaactcgctgagcaggctgagcgatatgatgatatggctgcagccatgaaggcagtcacagaacaggggcatgaactctccaacgaagagagaaatctgctctctgttgcctacaagaatgtggtaggcgcccgccgctcttcctggcgtgtcatctccagcattgagcagaaaacagagaggaatgagaagaagcagcagatgggcaaagagtaccgtgagaagatagaggcagaactgcaggacatctgcaatgatgttctggagctgttggacaaatatcttattcccaatgctacacaaccagaaagtaaggtgttctacttgaaaatgaaaggagattattttaggtatctttctgaagtggcatctggagacaacaaacaaaccactgtgtcgaactcccagcaggcttaccaggaagcatttgaaattagtaagaaagaaatgcagcctacacacccaattcgtcttggtctggcactaaatttctcagtcttttactatgagattctaaactctcctgaaaaggcctgtagcctggcaaaaacggcatttgatgaagcaattgctgaattggatacgctgaatgaagagtcttataaagacagcactctgatcatgcagttacttagggacaatctcactctgtggacatcggaaaaccagggagacgaaggagacgctggggagggagagaactaatgtttctcgtgctttgtgatctgttcagtgtcactctgtaccctcaacatatatcccttgtgcgataaaaaaaaaaaaaaaaaaaaaaggagaatcgtacgtcgactttcgatttttcaaagcctcagcctaggaaaaatggtccaggggataaacagctggtatttgtatctaaaactcagattggtcacataaatgccacggcattccgaagttttgattttgattaacattgacaggattactgtgtgtttaattttttaaaaactgaacactgtgattatggggttttgtaatttag

SEQ ID NO: 355451 - DNA, 1118 bp, Homo sapiens
cgcggccaggaccggagcggaagtggcgatcggagcggaagtggagctaccgccaccgccgccgccgattccggagccggggtagtcgccgccgccgccgccgctgcagccactgcaggcaccgctgccgccgcctgagtagtgggcttaggaaggaagaggtcatctcgctcggagcttcgctcggaagggtctttgttccctgcagccctcccacgggaatgacaatggataaaagtgagctggtacagaaagccaaactcgctgagcaggctgagcgatatgatgatatggctgcagccatgaaggcagtcacagaacaggggcatgaactctccaacgaagagagaaatctgctctctgttgcctacaagaatgtggtaggcgcccgccgctcttcctggcgtgtcatctccagcattgagcagaaaacagagaggaatgagaagaagcagcagatgggcaaagagtaccgtgagaagatagaggcagaactgcaggacatctgcaatgatgttctggagctgttggacaaatatcttattcccaatgctacacaaccagaaagtaaggtgttctacttgaaaatgaaaggagattattttaggtatctttctgaagtggcatctggagacaacaaacaaaccactgtgtcgaactcccagcaggcttaccaggaagcatttgaaattagtaagaaagaaatgcagcctacacacccaattcgtcttggtctggcactaaatttctcagtcttttactatgagattctaaactctcctgaaaaggcctgtagcctggcaaaaacggcatttgatgaagcaattgctgaattggatacgctgaatgaagagtcttataaagacagcactctgatcatgcagttacttagggacaatctcactctgtggacatcggaaaaccagggagacgaaggagacgctggggagggagagaactaatgtttctcgtgctttgtgatctgttcagtgtcactctgtaccctccctgaaataagaaacaggttgacgaaaaaaaagaacaataaaaacaaaagggggggggaaaattccggggggccattgccaccctttttggaaggggccccaaggaggata

SEQ ID NO: 355452 - DNA, 1548 bp, Homo sapiens
cgcggccaggaccggagcggaagtggcgatcggagcggaagtggagctaccgccaccgccgccgccgattccggagccggggtagtcgccgccgccgccgccgctgcagccactgcaggcaccgctgccgccgcctgagtagtgggcttaggaaggaagaggtcatctcgctcggagcttcgctcggaagggtctttgttccctgcagccctcccacgggaatgacaatggataaaagtgagctggtacagaaagccaaactcgctgagcaggctgagcgatatgatgatatggctgcagccatgaaggcagtcacagaacaggggcatgaactctccaacgaagagagaaatctgctctctgttgcctacaagaatgtggtaggcgcccgccgctcttcctggcgtgtcatctccagcattgagcagaaaacagagaggaatgagaagaagcagcagatgggcaaagagtaccgtgagaagatagaggcagaactgcaggacatctgcaatgatgttctggagctgttggacaaatatcttattcccaatgctacacaaccagaaagtaaggtgttctacttgaaaatgaaaggagattattttaggtatctttctgaagtggcatctggagacaacaaacaaaccactgtgtcgaactcccagcaggcttaccaggaagcatttgaaattagtaagaaagaaatgcagcctacacacccaattcgtcttggtctggcactaaatttctcagtcttttactatgagattctaaactctcctgaaaaggcctgtagcctggcaaaaacggcatttgatgaagcaattgctgaattggatacgctgaatgaagagtcttataaagacagcactctgatcatgcagttacttagggacaatctcactgtaagtactacttccacagggtttatagtctctttcctattcacctacttaataattcactgttatcttcaagaggggatttgtaccattaaatgtagttacagttttaagttgttaaatttgttataaatgactgctgaagttttgacctttgcaatcatccctgtctgcagtgacacaggaataattttaaactgtcgagtgagataagattatacatactgggccacttacctagggaacttttagtagccctgctttgattatacttcctttctcttgcagctgtggacatcggaaaaccagggagacgaaggagacgctggggagggagagaactaatgtttctcgtgctttgtgatctgttcagtgtcactctgtaccctcaacatatatcccttgtgcgataaaaaaaaaaaaaaaaaaaaaaggagaatcgtacgtcgactttcgatttttcaaagcctcagcctaggaaaaatggtccaggggataaacagctggtatttgtatctaaaactcagattggtcacataaatgccacggcattccgaagttttgattttgattaacattgacaggattactgtgtgtttaattttttaaaaactgaacactgtgattatggggttttgtaatttag

SEQ ID NO: 355453 - DNA, 1101 bp, Homo sapiens
cgcggccaggaccggagcggaagtggcgatcggagcggaagtggagctaccgccaccgccgccgccgattccggagccggggtagtcgccgccgccgccgccgctgcagccactgcaggcaccgctgccgccgcctgagtagtgggcttaggaaggaagaggtcatctcgctcggagcttcgctcggaagggtctttgttccctgcagccctcccacgggaatgacaatggataaaagtgagctggtacagaaagccaaactcgctgagcaggctgagcgatatgatgatatggctgcagccatgaaggcagtcacagaacaggggcatgaactctccaacgaagagagaaatctgctctctgttgcctacaagaatgtggtaggcgcccgccgctcttcctggcgtgtcatctccagcattgagcagaaaacagagaggaatgagaagaagcagcagatgggcaaagagtaccgtgagaagatagaggcagaactgcaggacatctgcaatgatgttctggagctgttggacaaatatcttattcccaatgctacacaaccagaaagtaaggtgttctacttgaaaatgaaaggagattattttaggtatctttctgaagtggcatctggagacaacaaacaaaccactgtgtcgaactcccagcaggcttaccaggaagcatttgaaattagtaagaaagaaatgcagcctacacacccaattcgtcttggtctggcactaaatttctcagtcttttactatgagattctaaactctcctgaaaaggcctgtagcctggcaaaaacggcatttgatgaagcaattgctgaattggatacgctgaatgaagagtcttataaagacagcactctgatcatgcagttacttagggacaatctcacttcgtgggcagcgctgcccacgaagtggaataagccttcgaaaagaaattgtccttgaagcttgtatctgatatcagcactggattgtagaacttgttgctgattttgaccttgtattgaagttaactgttccccttggtatttgtttaatagcctgtacatatctttgagttcaaccttcgtacggtggtttcaca

SEQ ID NO: 355454 - DNA, 1461 bp, Homo sapiens
cgcggccaggaccggagcggaagtggcgatcggagcggaagtggagctaccgccaccgccgccgccgattccggagccggggtagtcgccgccgccgccgccgctgcagccactgcaggcaccgctgccgccgcctgagtagtgggcttaggaaggaagaggtcatctcgctcggagcttcgctcggaagggtctttgttccctgcagccctcccacgtgcttgttatattgaagccattttagaattggagcgctatagatcagggaggcagcctctataaaaccaggctgagcaaattcccatgatgctggttctctaggcagagtctccagagatttgggccgctacaaaaagtgcattttgcccattcggctgtggatagagaagcaggaagagcactggacttggagtcagggaatgacaatggataaaagtgagctggtacagaaagccaaactcgctgagcaggctgagcgatatgatgatatggctgcagccatgaaggcagtcacagaacaggggcatgaactctccaacgaagagagaaatctgctctctgttgcctacaagaatgtggtaggcgcccgccgctcttcctggcgtgtcatctccagcattgagcagaaaacagagaggaatgagaagaagcagcagatgggcaaagagtaccgtgagaagatagaggcagaactgcaggacatctgcaatgatgttctggagctgttggacaaatatcttattcccaatgctacacaaccagaaagtaaggtgttctacttgaaaatgaaaggagattattttaggtatctttctgaagtggcatctggagacaacaaacaaaccactgtgtcgaactcccagcaggcttaccaggaagcatttgaaattagtaagaaagaaatgcagcctacacacccaattcgtcttggtctggcactaaatttctcagtcttttactatgagattctaaactctcctgaaaaggcctgtagcctggcaaaaacggcatttgatgaagcaattgctgaattggatacgctgaatgaagagtcttataaagacagcactctgatcatgcagttacttagggacaatctcactctgtggacatcggaaaaccagggagacgaaggagacgctggggagggagagaactaatgtttctcgtgctttgtgatctgttcagtgtcactctgtaccctcaacatatatcccttgtgcgataaaaaaaaaaaaaaaaaaaaaaggagaatcgtacgtcgactttcgatttttcaaagcctcagcctaggaaaaatggtccaggggataaacagctggtatttgtatctaaaactcagattggtcacataaatgccacggcattccgaagttttgattttgattaacattgacaggattactgtgtgtttaattttttaaaaactgaacactgtgattatggggttttgtaatttag

SEQ ID NO: 355455 - DNA, 1139 bp, Homo sapiens
  misc_feature (30)..(30): n is a, c, g, or t
  misc_feature (35)..(35): n is a, c, g, or t
cttattcccaatgctacagaacatcattcnagatntcctgcagttttccctctatcttctcacggtactctttgttccctgcagccctcccacgggaatgacaatggataaaagtgagctggtacagaaagccaaactcgctgagcaggctgagcgatatgatgatatggctgcagccatgaaggcagtcacagaacaggggcatgaactctccaacgaagagagaaatctgctctctgttgcctacaagaatgtggtaggcgcccgccgctcttcctggcgtgtcatctccagcattgagcagaaaacagagaggaatgagaagaagcagcagatgggcaaagagtaccgtgagaagatagaggcagaactgcaggacatctgcaatgatgttctggagctgttggacaaatatcttattcccaatgctacacaaccagaaagtaaggtgttctacttgaaaatgaaaggagattattttaggtatctttctgaagtggcatctggagacaacaaacaaaccactgtgtcgaactcccagcaggcttaccaggaagcatttgaaattagtaagaaagaaatgcagcctacacacccaattcgtcttggtctggcactaaatttctcagtcttttactatgagattctaaactctcctgaaaaggcctgtagcctggcaaaaacggcatttgatgaagcaattgctgaattggatacgctgaatgaagagtcttataaagacagcactctgatcatgcagttacttagggacaatctcactctgtggacatcggaaaaccagggagacgaaggagacgctggggagggagagaactaatgtttctcgtgctttgtgatctgttcagtgtcactctgtaccctcaacatatatcccttgtgcgataaaaaaaaaaaaaaaaaaaaaaggagaatcgtacgtcgactttcgatttttcaaagcctcagcctaggaaaaatggtccaggggataaacagctggtatttgtatctaaaactcagattggtcacataaatgccacggcattccgaagttttgattttgattaacattgacaggattactgtgtgtttaattttttaaaaactgaacactgtgattatggggttttgtaatttag

SEQ ID NO: 355456 - DNA, 938 bp, Homo sapiens
cgcggccaggaccggagcggaagtggcgatcggagcggaagtggagctaccgccaccgccgccgccgattccggagccggggtagtcgccgccgccgccgccgctgcagccactgcaggcaccgctgccgccgcctgagtagtgggcttaggaaggaagaggtcatctcgctcggagcttcgctcggaagggtctttgttccctgcagccctcccacgggaatgacaatggataaaagtgagctggtacagaaagccaaactcgctgagcaggctgagcgatatgatgatatggctgcagccatgaaggcagtcacagaacaggggcatgaactctccaacgaagagagaaatctgctctctgttgcctacaagaatgtggtaggcgcccgccgctcttcctggcgtgtcatctccagcattgagcagaaaacagagaggaatgagaagaagcagcagatgggcaaagagtaccgtgagaagatagaggcagaactgcaggacatctgcaatgatgttctggagctgttggacaaatatcttattcccaatgctacacaaccagaaagtaaggtgttctacttgaaaatgaaaggagattattttaggtatctttctgaagtggcatctggagacaacaaacaaaccactgtgtcgaactcccagcaggcttaccaggaagcatttgaaattagtaagaaagaaatgcagcctacacacccaattcgtcttggtctggcactaaatttctcagtcttttactatgagattctaaactctcctgaaaaggcctgtagcctggcaaaaacgacagcactctgatcatgcagttacttagggacaatctcactctgtgggacatcggaaaacagggagacgaagaaaccctgtggaggagagaactatgtttttgtgcttgggaactgtcaggacactcta

SEQ ID NO: 355457 - DNA, 1182 bp, Homo sapiens
aagtctgtgtttgcagctgtcccagcaccctaccataatattaggagatatgaagggtatttttgaacaggtcttgtcagcaacaaccgatcccttcaggtgctcttgtatctgctcccaggactatgccatccttataggccccccccgcgatggtcgtgccaattttccgggcctttggaagcttgtatccccttgttgtgcaaaatcgggttccaagacggcaattcctgcggcagttatccaaagagaagcctccacactggtggggcatacaccgagcacagccgagaaatgcagcctacacacccaattcgtcttggtctggcactaaatttctcagtcttttactatgagattctaaactctcctgaaaaggcctgtagcctggcaaaaacggcatttgatgaagcaattgctgaattggatacgctgaatgaagagtcttataaagacagcactctgatcatgcagttacttagggacaatctcactctgtggacatcggaaaaccagggagacgaaggagacgctggggagggagagaactaatgtttctcgtgctttgtgatctgttcagtgtcactctgtaccctcaacatatatcccttgtgcgataaaaaaaaaaaaaaaaaaaaaaggaaattggacgtgaatttggattttaaaagttaagttgggaaaaggggtcccggggcgatataaaccaccgggggatattgtggtattttaaaccttcagattggcgtcaaaataattgccacggagattcccaagaaggttagattatggattaactactttggcacggagttgagcgggtttgtcacattttttaaaaccttgaacctgggcatcttatggggggcttggaaagtgagcaagacttttcgtgggtgagaaaaattttaagcctggaattttatggttgtacctttgggaagagggttactgtggtttttccaaagataattctttgggaaatacaattcctgtggtaactgttgtacagaaaggtatacagagttaattgtgggggggggaatgtgggtgggagacccactttttgggatttgactgaagcggaacttcaccagaaagtcgaggggccggattaaagaacttgctggtgggggttgcttaagtttgaccatgtgcgttctcggaaacagatctgaggac

SEQ ID NO: 355458 - DNA, 316 bp, Homo sapiens
gtgcactttgatttttaccggtcctcacagtgaccctttgctcattacaatagtaaaaaacacacccctggatggagatttaagatgccagtgagacatgtgacgtatgaacagggatgcacagccactgtgcatgagcacccagaacatgcttcccagcaacccccttgcccacctgctcatgaataatcaggtaagactcctaaaaagggatcctccctccagccggtctttgctctctcatcctcacaggcagcctaccctgactcccctcttggggcgtcctgcctattctgcacctaactttcagggtatt

SEQ ID NO: 355459 - DNA, 458 bp, Homo sapiens
ggacaatagaaacctagaagtcagggcaagctgcatcccccaaggctcaggaaagctgcccagggcagatggaatcttatctgcatgtgccctacttgcactgcagcagagggaccgcagaaggcatcctgttcagggctttaaggaactaaagcattggaaggcatcccatttctacgggagattggaatagagccctggctgttctggccagtccctgtctcagatgttgcacttccagcacattctacagttattctagagagctacaagcaagaaagaggggagtctgtgttggtacaaggccacctggggagctgtccctcagagctatcccagtactcaggagaagttacaaatgtggataagtccagagtttgaatcaagatagacctccaagataatgtctttttgtgaggatttgaagatagtctgaaacaaataagttctttttaaaa

SEQ ID NO: 355460 - DNA, 3585 bp, Homo sapiens
agccgtaaaggcgcgcgggaacatggggctgtacgctgcggtggcaggcgtgctggccggcgtggagagccgccaggctctatcaaggggctggtgtactccagcaacttccagaacgtgaagcagctgtacgcgctggtgtgcgaaacgcagcgctactccgccgtgctggatgccgtgatctccagcgccggcctcctcagtgcgaagaagctgcagccgcacctggccaagggtaggggcggggcggggaagtgaaccccgacggtcagcgctttgtcatctggtttcagccccgctgccgtgcacggcgggactggagcaagtcgctcacctgaaatgagtatgagcagaccttccctgggttacgaattgagatgggatgaaaatgctttaacttcgagtgttttgaaggattaaataaccgaagtacaaagtagtagtagcggagacagtaaggaagtcgggcgtggcggcgcgcacctgtggtcccagctactcggaaggctgaggggggaggatcacttgagcccaggagttcgaagctgcagtgagctgttatgtggccactgcacttcagcctgggcgacagatctagaccccattctaaaaaaaaacaaaaaccccaaacccacgaaagggtaatgttggcaagaagttgggtgcagaggtctactggtgaacatctgtggggaaagggtctaaggctgggaagcgagacgccaggttccgatcctgttgtgtagttaatttctggtgtggtcttgagtaaggtaccccacctttatctgtaaccatctagtcaggtgatctctttagccattccagtgcccgggctctattagagttagttctaaggcattcatacttcttgcttagggcgtttctgtctttgatccctcatccccaggtgctagtgtatgagttgttgggaaagggctttcgagggggtgggggccaatggaaggctctgttgggacggcaccaggcgaggtgttgagttggctcggctcaaggttcttcggggtgtgagctggcatgaggacctgttggaagtgggatccaggcctggtccaggtgagctggaaggagttgaggggcgggggaggtggggaactttgctcctgcctactcactgctcattgcgtcctacctacctcccagctgcctcgatttgtgcgtgtgaacactctcaagacctgctccgtttatgtagttatttcaagagacaaggtttctcctatcagggtcgggcttccaggctggatggagtgccctggcgcgatctcggctcaccgcaacctctgcctcctgggttcaagcgattctcctgcttcagccttctgagcagctgggattatgaaggggtggcctgcccctccacatctgtgggatatctcatcaggtgggacaagagactgagaaaagaaataagacacagagacaaagtatagagaaacaacaagtggctggtctctgccccgtgcctcctccactgggctcacacctgtcttattttgtcctttggtggctctgagaagcagcctctgcccctctccctttcccttactctttgtaagatcctcttccttctgccctaccatgttgcttggacaccagggtggaatagcagagaacggctgcttgtgtttgaattccagctctgccacttcgatagatttctgaactgagacatgtgactctctaggcctatttctgcatgggtcggagagtgggcgggactgctttactgagttatagtgaatgtagttttaacctaagcgcctcacatgactaactcctcatccatcaagaatgagctcagctctcacttccccactcctcacccccctgtaaagtaacctttctccaaggttatgcttcaacaggaatagctaacatttattaaattgtggcacgtaagtatcttggatatattggctcattgaatcctcacacctactattttacagagatgccagtggggcttgagattgaatcacttgcccaggctcccactgctggtaaacagtagagggggctcctgacccatcagtctggcttgacaacccattccctcaactgcggatcccggattcccttatcaccctgttgatttctccatagctgtggtaacatttgttgcatgaatggaccgttgaaatagggcctggcagggagaaattcaggaaatgaatgaatggttcttccctggcagccttgatgacttacaagccctcaaggggaagcattttctcctggactccttgatgccggagctgctggtgtttcccgcccagacagatctgcatgaacacccactgtaccgggccggacacctcattctgcaggacagggccagctgtctcccagccatgctgctggacccccgccaggctcccatgtcatcgatgcctgtgccgccccaggcaataagaccagtcacttggctgctcttctgaagaaccaagggaagatctttgcctttgacctggatgccaagcggctggcatccatggccacgctgctggcctgggttggcgtctcctgctgtgagctggctgaggaggacttcctggcggtctcccccttagatccgcgctatcgtgaggtccactatgtcctgctggatccttcctgcagtggctcgggtgagatggtgagaaggcgtggctgagggactcggaggtccacagcagcttagacctggagtcatctgttttggtcttagttctgacactttaatgggcttgggaccctggagcaaaagttctcctctgtgaggcaaggatttcaggagcgaggatttcaggactgaggcagcctgtgaagctgtgtaaccgagacacgcttttccttaggtatgccgagcagacagctggaggatcccggggcagggacacctagcccggtgcgtctgcatgccctggcagggttccagcagcgagccctgtgccacgcgctcactttcccttccctgcagcggctcgtctactccatgtgctccctctgccaggaggagaatgaagacatggtaccagatgcgctgcagcagaacccgggcgccttcaggctagctcccgccctgcctgcccggccccaccgaggcctgagcacgttcccgggtgccgagcactgcctccgggcttcccccaagaccacgcttagcggtggcttcttcgttgctgtaattgaacgggtcgagatgccgacgtgagtgagtgggggcatgcttgggaggcgcaggatggtactggcacatctaacatctacacttctctagctcagcctcacaggccaaagcatcagcaccagaacgcacacccagcccagccccaaagagaaagaagagacagcaaagagccgcagccggtgcttgcacaccgccttgcacatagcagaggctccaggctgactccttcctggtgggaaaggaagatgcctgtcctctccgtggaggaccctgggccctcaccgcaggcagcagtttgcattttgaaaggttattgggtcccttcctcgggctgtgttcttgctggtgagcaaaagtgttgcctgcagaaataaaatgcagaacgtactcta

SEQ ID NO: 355461 - DNA, 2772 bp, Homo sapiens
agccgtaaaggcgcgcgggaacatggggctgtacgctgcggtggcaggcgtgctggccggcgtggagagccgccaggctctatcaaggggctggtgtactccagcaacttccagaacgtgaagcagctgtacgcgctggtgtgcgaaacgcagcgctactccgccgtgctggatgccgtgatctccagcgccggcctcctcagtgcgaagaagctgcagccgcacctggccaagggtaggggcggggcggggaagtgaaccccgacggtcagcgctttgtcatctggtttcagccccgctgccgtgcacggcgggactggagcaagtcgctcacctgaaatgagtatgagcagaccttccctgggttacgaattgagatgggatgaaaatgctttaacttcgagtgttttgaaggattaaataaccgaagtacaaagtagtagtagcggagacagtaaggaagtcgggcgtggcggcgcgcacctgtggtcccagctactcggaaggctgaggggggaggatcacttgagcccaggagttcgaagctgcagtgagctgttatgtggccactgcacttcagcctgggcgacagatctagaccccattctaaaaaaaaacaaaaaccccaaacccacgaaagggtaatgttggcaagaagttgggtgcagaggtctactggtgaacatctgtggggaaagggtctaaggctgggaagcgagacgccaggttccgatcctgttgtgtagttaatttctggtgtggtcttgagtaaggtaccccacctttatctgtaaccatctagtcaggtgatctctttagccattccagtgcccgggctctattagagttagttctaaggcattcatacttcttgcttagggcgtttctgtctttgatccctcatccccaggtgctagtgtatgagttgttgggaaagggctttcgagggggtgggggccaatggaaggctctgttgggacggcaccaggcgaggtgttgagttggctcggctcaaggttcttcggggtgtgagctggcatgaggacctgttggaagtgggatccaggcctggtccaggtgagctggaaggagttgaggggcgggggaggtggggaactttgctcctgcctactcactgctcattgcgtcctacctacctcccagctgcctcgatttgtgcgtgtgaacactctcaagacctgctccgtttatgtagttatttcaagagacaaggtttctcctatcagggtcgggcttccaggctggatggagtgccctggcgcgatctcggctcaccgcaacctctgcctcctgggttcaagcgattctcctgcttcagccttctgagcagctgggattatgaaggggtggcctgcccctccacatctgtgggatatctcatcagccttgatgacttacaagccctcaaggggaagcattttctcctggactccttgatgccggagctgctggtgtttcccgcccagacagatctgcatgaacacccactgtaccgggccggacacctcattctgcaggacagggccagctgtctcccagccatgctgctggacccccgccaggctcccatgtcatcgatgcctgtgccgccccaggcaataagaccagtcacttggctgctcttctgaagaaccaagggaagatctttgcctttgacctggatgccaagcggctggcatccatggccacgctgctggcctgggttggcgtctcctgctgtgagctggctgaggaggacttcctggcggtctcccccttagatccgcgctatcgtgaggtccactatgtcctgctggatccttcctgcagtggctcgggtgagatggtgagaaggcgtggctgagggactcggaggtccacagcagcttagacctggagtcatctgttttggtcttagttctgacactttaatgggcttgggaccctggagcaaaagttctcctctgtgaggcaaggatttcaggagcgaggatttcaggactgaggcagcctgtgaagctgtgtaaccgagacacgcttttccttaggtatgccgagcagacagctggaggatcccggggcagggacacctagcccggtgcgtctgcatgccctggcagggttccagcagcgagccctgtgccacgcgctcactttcccttccctgcagcggctcgtctactccatgtgctccctctgccaggaggagaatgaagacatggtaccagatgcgctgcagcagaacccgggcgccttcaggctagctcccgccctgcctgcccggccccaccgaggcctgagcacgttcccgggtgccgagcactgcctccgggcttcccccaagaccacgcttagcggtggcttcttcgttgctgtaattgaacgggtcgagatgccgacgtgagtgagtgggggcatgcttgggaggcgcaggatggtactggcacatctaacatctacacttctctagctcagcctcacaggccaaagcatcagcaccagaacgcacacccagcccagccccaaagagaaagaagagacagcaaagagccgcagccggtgcttgcacaccgccttgcacatagcagaggctccaggctgactccttcctggtgggaaaggaagatgcctgtcctctccgtggaggaccctgggccctcaccgcaggcagcagtttgcattttgaaaggttattgggtcccttcctcgggctgtgttcttgctggtgagcaaaagtgttgcctgcagaaataaaatgcagaacgtactcta

SEQ ID NO: 355462 - DNA, 2939 bp, Homo sapiens
agccgtaaaggcgcgcgggaacatggggctgtacgctgcggtggcaggcgtgctggccggcgtggagagccgccaggctctatcaaggggctggtgtactccagcaacttccagaacgtgaagcagctgtacgcgctggtgtgcgaaacgcagcgctactccgccgtgctggatgccgtgatctccagcgccggcctcctcagtgcgaagaagctgcagccgcacctggccaagggtaggggcggggcggggaagtgaaccccgacggtcagcgctttgtcatctggtttcagccccgctgccgtgcacggcgggactggagcaagtcgctcacctgaaatgagtgctagtgtatgagttgttgggaaagggctttcgagggggtgggggccaatggaaggctctgttgggacggcaccaggcgaggtgttgagttggctcggctcaaggttcttcggggtgtgagctggcatgaggacctgttggaagtgggatccaggcctggtccagcctcccagctgcctcgatttgtgcgtgtgaacactctcaagacctgctccgtttatgtagttatttcaagagacaaggtttctcctatcagggtcgggcttccaggctggatggagtgccctggcgcgatctcggctcaccgcaacctctgcctcctgggttcaagcgattctcctgcttcagccttctgagcagctgggattatgaaggggtggcctgcccctccacatctgtgggatatctcatcaggtgggacaagagactgagaaaagaaataagacacagagacaaagtatagagaaacaacaagtggctggtctctgccccgtgcctcctccactgggctcacacctgtcttattttgtcctttggtggctctgagaagcagcctctgcccctctccctttcccttactctttgtaagatcctcttccttctgccctaccatgttgcttggacaccagggtggaatagcagagaacggctgcttgtgtttgaattccagctctgccacttcgatagatttctgaactgagacatgtgactctctaggcctatttctgcatgggtcggagagtgggcgggactgctttactgagttatagtgaatgtagttttaacctaagcgcctcacatgactaactcctcatccatcaagaatgagctcagctctcacttccccactcctcacccccctgtaaagtaacctttctccaaggttatgcttcaacaggaatagctaacatttattaaattgtggcacgtaagtatcttggatatattggctcattgaatcctcacacctactattttacagagatgccagtggggcttgagattgaatcacttgcccaggctcccactgctggtaaacagtagagggggctcctgacccatcagtctggcttgacaacccattccctcaactgcggatcccggattcccttatcaccctgttgatttctccatagctgtggtaacatttgttgcatgaatggaccgttgaaatagggcctggcagggagaaattcaggaaatgaatgaatggttcttccctggcagccttgatgacttacaagccctcaaggggaagcattttctcctggactccttgatgccggagctgctggtgtttcccgcccagacagatctgcatgaacacccactgtaccgggccggacacctcattctgcaggacagggccagctgtctcccagccatgctgctggacccccgccaggctcccatgtcatcgatgcctgtgccgccccaggcaataagaccagtcacttggctgctcttctgaagaaccaagggaagatctttgcctttgacctggatgccaagcggctggcatccatggccacgctgctggcctgggttggcgtctcctgctgtgagctggctgaggaggacttcctggcggtctcccccttagatccgcgctatcgtgaggtccactatgtcctgctggatccttcctgcagtggctcgggtgagatggtgagaaggcgtggctgagggactcggaggtccacagcagcttagacctggagtcatctgttttggtcttagttctgacactttaatgggcttgggaccctggagcaaaagttctcctctgtgaggcaaggatttcaggagcgaggatttcaggactgaggcagcctgtgaagctgtgtaaccgagacacgcttttccttaggtatgccgagcagacagctggaggatcccggggcagggacacctagcccggtgcgtctgcatgccctggcagggttccagcagcgagccctgtgccacgcgctcactttcccttccctgcagcggctcgtctactccatgtgctccctctgccaggaggagaatgaagacatggtaccagatgcgctgcagcagaacccgggcgccttcaggctagctcccgccctgcctgcccggccccaccgaggcctgagcacgttcccgggtgccgagcactgcctccgggcttcccccaagaccacgcttagcggtggcttcttcgttgctgtaattgaacgggtcgagatgccgacgtgagtgagtgggggcatgcttgggaggcgcaggatggtactggcacatctaacatctacacttctctagctcagcctcacaggccaaagcatcagcaccagaacgcacacccagcccagccccaaagagaaagaagagacagcaaagagccgcagccggtgcttgcacaccgccttgcacatagcagaggctccaggctgactccttcctggtgggaaaggaagatgcctgtcctctccgtggaggaccctgggccctcaccgcaggcagcagtttgcattttgaaaggttattgggtcccttcctcgggctgtgttcttgctggtgagcaaaagtgttgcctgcagaaataaaatgcagaacgtactcta

SEQ ID NO: 355463 - DNA, 2740 bp, Homo sapiens
agactatcacatggggagaaccttggacaatacctggctttccagggcagaggtccctgcagcttttcacagtacattgtgcctctggtttattgagactagagaacggcgaagacttttaccaagcatactgcttgtaaacgttttattaacaaggcatgtcctgcacagccctagatcctttaaaccttgattccatacaacacatgtttttgtgagctcaaatttggggcaaagtcacaaattaacagcatctcagccaaccaattgttcaaggtacaggtcaaaatggaatttcttatgtcttccctttctacacagacacagtaacagtctgatctctctttcttttccctacaggattgcaggcatgcagcaccatgcctggctaattttgtatttttagtagagacgggatttctccatgttggccaggctggtctcaaactcctgacctcaggtgatctgcccaccttggcctcccaaaatgctgggattacaggcatgaaccaccgcgcccggccatgctaagtcctttcttggctccattgtgctgtccctcctgcttcctctccaggtccatctgccacagtgctacgtgcaccagcgtgccagcaacagtggctggtctctgccccgtgcctcctccactgggctcacacctgtcttattttgtcctttggtggctctgagaagcagcctctgcccctctccctttcccttactctttgtaagatcctcttccttctgccctaccatgttgcttggacaccagggtggaatagcagagaacggctgcttgtgtttgaattccagctctgccacttcgatagatttctgaactgagacatgtgactctctaggcctatttctgcatgggtcggagagtgggcgggactgctttactgagttatagtgaatgtagttttaacctaagcgcctcacatgactaactcctcatccatcaagaatgagctcagctctcacttccccactcctcacccccctgtaaagtaacctttctccaaggttatgcttcaacaggaatagctaacatttattaaattgtggcacgtaagtatcttggatatattggctcattgaatcctcacacctactattttacagagatgccagtggggcttgagattgaatcacttgcccaggctcccactgctggtaaacagtagagggggctcctgacccatcagtctggcttgacaacccattccctcaactgcggatcccggattcccttatcaccctgttgatttctccatagctgtggtaacatttgttgcatgaatggaccgttgaaatagggcctggcagggagaaattcaggaaatgaatgaatggttcttccctggcagccttgatgacttacaagccctcaaggggaagcattttctcctggactccttgatgccggagctgctggtgtttcccgcccagacagatctgcatgaacacccactgtaccgggccggacacctcattctgcaggacagggccagctgtctcccagccatgctgctggacccccgccaggctcccatgtcatcgatgcctgtgccgccccaggcaataagaccagtcacttggctgctcttctgaagaaccaagggaagatctttgcctttgacctggatgccaagcggctggcatccatggccacgctgctggcctgggttggcgtctcctgctgtgagctggctgaggaggacttcctggcggtctcccccttagatccgcgctatcgtgaggtccactatgtcctgctggatccttcctgcagtggctcgggtgagatggtgagaaggcgtggctgagggactcggaggtccacagcagcttagacctggagtcatctgttttggtcttagttctgacactttaatgggcttgggaccctggagcaaaagttctcctctgtgaggcaaggatttcaggagcgaggatttcaggactgaggcagcctgtgaagctgtgtaaccgagacacgcttttccttaggtatgccgagcagacagctggaggatcccggggcagggacacctagcccggtgcgtctgcatgccctggcagggttccagcagcgagccctgtgccacgcgctcactttcccttccctgcagcggctcgtctactccatgtgctccctctgccaggaggagaatgaagacatggtaccagatgcgctgcagcagaacccgggcgccttcaggctagctcccgccctgcctgcccggccccaccgaggcctgagcacgttcccgggtgccgagcactgcctccgggcttcccccaagaccacgcttagcggtggcttcttcgttgctgtaattgaacgggtcgagatgccgacgtgagtgagtgggggcatgcttgggaggcgcaggatggtactggcacatctaacatctacacttctctagctcagcctcacaggccaaagcatcagcaccagaacgcacacccagcccagccccaaagagaaagaagagacagcaaagagccgcagccggtgcttgcacaccgccttgcacatagcagaggctccaggctgactccttcctggtgggaaaggaagatgcctgtcctctccgtggaggaccctgggccctcaccgcaggcagcagtttgcattttgaaaggttattgggtcccttcctcgggctgtgttcttgctggtgagcaaaagtgttgcctgcagaaataaaatgcagaacgtactcta

SEQ ID NO: 355464 - DNA, 2785 bp, Homo sapiens
tgtccaatcccccttcgtgagacctgtcctccgtgttgcaggtgtctacctcgccacaaggaacatgcatttagttggctgcctttgcagacttcttttttacagattgacttttccaagagtcggggacatttaggcaatccgcaagagtggaagttactttcctttaacccctgccttttgaagtctccatgtgtgcttgctgtggtcgctgagactcaaagtttaggacccccttcatgtatctctcatttttgggttcagttgcctcctgttttccaactgcattttgtgtgtgtgtgtgcccagccccagtgttcttcttccccattttgcccagatccacccacccccaccctcccagctgcctcgatttgtgcgtgtgaacactctcaagacctgctccgtttatgtagttatttcaagagacaaggtttctcctatcagggtcgggcttccaggctggatggagtgccctggcgcgatctcggctcaccgcaacctctgcctcctgggttcaagcgattctcctgcttcagccttctgagcagctgggattatgaaggggtggcctgcccctccacatctgtgggatatctcatcaggtgggacaagagactgagaaaagaaataagacacagagacaaagtatagagaaacaacaagtggctggtctctgccccgtgcctcctccactgggctcacacctgtcttattttgtcctttggtggctctgagaagcagcctctgcccctctccctttcccttactctttgtaagatcctcttccttctgccctaccatgttgcttggacaccagggtggaatagcagagaacggctgcttgtgtttgaattccagctctgccacttcgatagatttctgaactgagacatgtgactctctaggcctatttctgcatgggtcggagagtgggcgggactgctttactgagttatagtgaatgtagttttaacctaagcgcctcacatgactaactcctcatccatcaagaatgagctcagctctcacttccccactcctcacccccctgtaaagtaacctttctccaaggttatgcttcaacaggaatagctaacatttattaaattgtggcacgtaagtatcttggatatattggctcattgaatcctcacacctactattttacagagatgccagtggggcttgagattgaatcacttgcccaggctcccactgctggtaaacagtagagggggctcctgacccatcagtctggcttgacaacccattccctcaactgcggatcccggattcccttatcaccctgttgatttctccatagctgtggtaacatttgttgcatgaatggaccgttgaaatagggcctggcagggagaaattcaggaaatgaatgaatggttcttccctggcagccttgatgacttacaagccctcaaggggaagcattttctcctggactccttgatgccggagctgctggtgtttcccgcccagacagatctgcatgaacacccactgtaccgggccggacacctcattctgcaggacagggccagctgtctcccagccatgctgctggacccccgccaggctcccatgtcatcgatgcctgtgccgccccaggcaataagaccagtcacttggctgctcttctgaagaaccaagggaagatctttgcctttgacctggatgccaagcggctggcatccatggccacgctgctggcctgggttggcgtctcctgctgtgagctggctgaggaggacttcctggcggtctcccccttagatccgcgctatcgtgaggtccactatgtcctgctggatccttcctgcagtggctcgggtgagatggtgagaaggcgtggctgagggactcggaggtccacagcagcttagacctggagtcatctgttttggtcttagttctgacactttaatgggcttgggaccctggagcaaaagttctcctctgtgaggcaaggatttcaggagcgaggatttcaggactgaggcagcctgtgaagctgtgtaaccgagacacgcttttccttaggtatgccgagcagacagctggaggatcccggggcagggacacctagcccggtgcgtctgcatgccctggcagggttccagcagcgagccctgtgccacgcgctcactttcccttccctgcagcggctcgtctactccatgtgctccctctgccaggaggagaatgaagacatggtaccagatgcgctgcagcagaacccgggcgccttcaggctagctcccgccctgcctgcccggccccaccgaggcctgagcacgttcccgggtgccgagcactgcctccgggcttcccccaagaccacgcttagcggtggcttcttcgttgctgtaattgaacgggtcgagatgccgacgtgagtgagtgggggcatgcttgggaggcgcaggatggtactggcacatctaacatctacacttctctagctcagcctcacaggccaaagcatcagcaccagaacgcacacccagcccagccccaaagagaaagaagagacagcaaagagccgcagccggtgcttgcacaccgccttgcacatagcagaggctccaggctgactccttcctggtgggaaaggaagatgcctgtcctctccgtggaggaccctgggccctcaccgcaggcagcagtttgcattttgaaaggttattgggtcccttcctcgggctgtgttcttgctggtgagcaaaagtgttgcctgcagaaataaaatgcagaacgtactcta

SEQ ID NO: 355465 - DNA, 2201 bp, Homo sapiens
acccaggggaggaggcacggggcagagaccagccactgttgctggcacgctggtgcacgtagcactgtggcagatggacctggagaggaagcaggagggacagcacaatggagccaagaaaggacttagcatggccgggcgcggtggctctgagaagcagcctctgcccctctccctttcccttactctttgtaagatcctcttccttctgccctaccatgttgcttggacaccagggtggaatagcagagaacggctgcttgtgtttgaattccagctctgccacttcgatagatttctgaactgagacatgtgactctctaggcctatttctgcatgggtcggagagtgggcgggactgctttactgagttatagtgaatgtagttttaacctaagcgcctcacatgactaactcctcatccatcaagaatgagctcagctctcacttccccactcctcacccccctgtaaagtaacctttctccaaggttatgcttcaacaggaatagctaacatttattaaattgtggcacgtaagtatcttggatatattggctcattgaatcctcacacctactattttacagagatgccagtggggcttgagattgaatcacttgcccaggctcccactgctggtaaacagtagagggggctcctgacccatcagtctggcttgacaacccattccctcaactgcggatcccggattcccttatcaccctgttgatttctccatagctgtggtaacatttgttgcatgaatggaccgttgaaatagggcctggcagggagaaattcaggaaatgaatgaatggttcttccctggcagccttgatgacttacaagccctcaaggggaagcattttctcctggactccttgatgccggagctgctggtgtttcccgcccagacagatctgcatgaacacccactgtaccgggccggacacctcattctgcaggacagggccagctgtctcccagccatgctgctggacccccgccaggctcccatgtcatcgatgcctgtgccgccccaggcaataagaccagtcacttggctgctcttctgaagaaccaagggaagatctttgcctttgacctggatgccaagcggctggcatccatggccacgctgctggcctgggttggcgtctcctgctgtgagctggctgaggaggacttcctggcggtctcccccttagatccgcgctatcgtgaggtccactatgtcctgctggatccttcctgcagtggctcgggtgagatggtgagaaggcgtggctgagggactcggaggtccacagcagcttagacctggagtcatctgttttggtcttagttctgacactttaatgggcttgggaccctggagcaaaagttctcctctgtgaggcaaggatttcaggagcgaggatttcaggactgaggcagcctgtgaagctgtgtaaccgagacacgcttttccttaggtatgccgagcagacagctggaggatcccggggcagggacacctagcccggtgcgtctgcatgccctggcagggttccagcagcgagccctgtgccacgcgctcactttcccttccctgcagcggctcgtctactccatgtgctccctctgccaggaggagaatgaagacatggtaccagatgcgctgcagcagaacccgggcgccttcaggctagctcccgccctgcctgcccggccccaccgaggcctgagcacgttcccgggtgccgagcactgcctccgggcttcccccaagaccacgcttagcggtggcttcttcgttgctgtaattgaacgggtcgagatgccgacgtgagtgagtgggggcatgcttgggaggcgcaggatggtactggcacatctaacatctacacttctctagctcagcctcacaggccaaagcatcagcaccagaacgcacacccagcccagccccaaagagaaagaagagacagcaaagagccgcagccggtgcttgcacaccgccttgcacatagcagaggctccaggctgactccttcctggtgggaaaggaagatgcctgtcctctccgtggaggaccctgggccctcaccgcaggcagcagtttgcattttgaaaggttattgggtcccttcctcgggctgtgttcttgctggtgagcaaaagtgttgcctgcagaaataaaatgcagaacgtactcta

SEQ ID NO: 355466 - DNA, 1851 bp, Homo sapiens
agccgtaaaggcgcgcgggaacatggggctgtacgctgcggtggcaggcgtgctggccggcgtggagagccgccaggctctatcaaggggctggtgtactccagcaacttccagaacgtgaagcagctgtacgcgctggtgtgcgaaacgcagcgctactccgccgtgctggatgccgtgatctccagcgccggcctcctcagtgcgaagaagctgcagccgcacctggccaaggcctcccagctgcctcgatttgtgcgtgtgaacactctcaagacctgctccgtttatgtagttatttcaagagacaaggtttctcctatcagggtcgggcttccaggctggatggagtgccctggcgcgatctcggctcaccgcaacctctgcctcctgggttcaagcgattctcctgcttcagccttctgagcagctgggattatgaaggggtggcctgcccctccacatctgtgggatatctcatcagccttgatgacttacaagccctcaaggggaagcattttctcctggactccttgatgccggagctgctggtgtttcccgcccagacagatctgcatgaacacccactgtaccgggccggacacctcattctgcaggacagggccagctgtctcccagccatgctgctggacccccgccaggctcccatgtcatcgatgcctgtgccgccccaggcaataagaccagtcacttggctgctcttctgaagaaccaagggaagatctttgcctttgacctggatgccaagcggctggcatccatggccacgctgctggcctgggttggcgtctcctgctgtgagctggctgaggaggacttcctggcggtctcccccttagatccgcgctatcgtgaggtccactatgtcctgctggatccttcctgcagtggctcgggtgagatggtgagaaggcgtggctgagggactcggaggtccacagcagcttagacctggagtcatctgttttggtcttagttctgacactttaatgggcttgggaccctggagcaaaagttctcctctgtgaggcaaggatttcaggagcgaggatttcaggactgaggcagcctgtgaagctgtgtaaccgagacacgcttttccttaggtatgccgagcagacagctggaggatcccggggcagggacacctagcccggtgcgtctgcatgccctggcagggttccagcagcgagccctgtgccacgcgctcactttcccttccctgcagcggctcgtctactccatgtgctccctctgccaggaggagaatgaagacatggtaccagatgcgctgcagcagaacccgggcgccttcaggctagctcccgccctgcctgcccggccccaccgaggcctgagcacgttcccgggtgccgagcactgcctccgggcttcccccaagaccacgcttagcggtggcttcttcgttgctgtaattgaacgggtcgagatgccgacgtgagtgagtgggggcatgcttgggaggcgcaggatggtactggcacatctaacatctacacttctctagctcagcctcacaggccaaagcatcagcaccagaacgcacacccagcccagccccaaagagaaagaagagacagcaaagagccgcagccggtgcttgcacaccgccttgcacatagcagaggctccaggctgactccttcctggtgggaaaggaagatgcctgtcctctccgtggaggaccctgggccctcaccgcaggcagcagtttgcattttgaaaggttattgggtcccttcctcgggctgtgttcttgctggtgagcaaaagtgttgcctgcagaaataaaatgcagaacgtactcta

SEQ ID NO: 355467 - DNA, 1946 bp, Homo sapiens
agccgtaaaggcgcgcgggaacatggggctgtacgctgcggtggcaggcgtgctggccggcgtggagagccgccaggctctatcaaggggctggtgtactccagcaacttccagaacgtgaagcagctgtacgcgctggtgtgcgaaacgcagcgctactccgccgtgctggatgccgtgatctccagcgccggcctcctcagtgcgaagaagctgcagccgcacctggccaagggttatgcttcaacaggaatagctaacatttattaaattgtggcacgtaagtatcttggatatattggctcattgaatcctcacacctactattttacagagatgccagtggggcttgagattgaatcacttgcccaggctcccactgctggtaaacagtagagggggctcctgacccatcagtctggcttgacaacccattccctcaactgcggatcccggattcccttatcaccctgttgatttctccatagctgtggtaacatttgttgcatgaatggaccgttgaaatagggcctggcagggagaaattcaggaaatgaatgaatggttcttccctggcagccttgatgacttacaagccctcaaggggaagcattttctcctggactccttgatgccggagctgctggtgtttcccgcccagacagatctgcatgaacacccactgtaccgggccggacacctcattctgcaggacagggccagctgtctcccagccatgctgctggacccccgccaggctcccatgtcatcgatgcctgtgccgccccaggcaataagaccagtcacttggctgctcttctgaagaaccaagggaagatctttgcctttgacctggatgccaagcggctggcatccatggccacgctgctggcctgggttggcgtctcctgctgtgagctggctgaggaggacttcctggcggtctcccccttagatccgcgctatcgtgaggtccactatgtcctgctggatccttcctgcagtggctcgggtgagatggtgagaaggcgtggctgagggactcggaggtccacagcagcttagacctggagtcatctgttttggtcttagttctgacactttaatgggcttgggaccctggagcaaaagttctcctctgtgaggcaaggatttcaggagcgaggatttcaggactgaggcagcctgtgaagctgtgtaaccgagacacgcttttccttaggtatgccgagcagacagctggaggatcccggggcagggacacctagcccggtgcgtctgcatgccctggcagggttccagcagcgagccctgtgccacgcgctcactttcccttccctgcagcggctcgtctactccatgtgctccctctgccaggaggagaatgaagacatggtaccagatgcgctgcagcagaacccgggcgccttcaggctagctcccgccctgcctgcccggccccaccgaggcctgagcacgttcccgggtgccgagcactgcctccgggcttcccccaagaccacgcttagcggtggcttcttcgttgctgtaattgaacgggtcgagatgccgacgtgagtgagtgggggcatgcttgggaggcgcaggatggtactggcacatctaacatctacacttctctagctcagcctcacaggccaaagcatcagcaccagaacgcacacccagcccagccccaaagagaaagaagagacagcaaagagccgcagccggtgcttgcacaccgccttgcacatagcagaggctccaggctgactccttcctggtgggaaaggaagatgcctgtcctctccgtggaggaccctgggccctcaccgcaggcagcagtttgcattttgaaaggttattgggtcccttcctcgggctgtgttcttgctggtgagcaaaagtgttgcctgcagaaataaaatgcagaacgtactcta

SEQ ID NO: 355468 - DNA, 1366 bp, Homo sapiens
tgtaccaaagtagttcacggtatttgccccaagctaagctttccccactgcaggtgtgagatgtggatcccttagcccttggggcagagaccccaggccagttacctctgaccctgggccctttaaatataggccgtttcaatattgtgtgtcctggcttaacctgcatgttctggttgtctgtgtcagctgtgacaggcccttagctgctccgtgcatgctcagctcacccctgctctgccctctgccctaggaagatctttgcctttgacctggatgccaagcggctggcatccatggccacgctgctggcctgggttggcgtctcctgctgtgagctggctgaggaggacttcctggcggtctcccccttagatccgcgctatcgtgaggtccactatgtcctgctggatccttcctgcagtggctcgggtgagatggtgagaaggcgtggctgagggactcggaggtccacagcagcttagacctggagtcatctgttttggtcttagttctgacactttaatgggcttgggaccctggagcaaaagttctcctctgtgaggcaaggatttcaggagcgaggatttcaggactgaggcagcctgtgaagctgtgtaaccgagacacgcttttccttaggtatgccgagcagacagctggaggatcccggggcagggacacctagcccggtgcgtctgcatgccctggcagggttccagcagcgagccctgtgccacgcgctcactttcccttccctgcagcggctcgtctactccatgtgctccctctgccaggaggagaatgaagacatggtaccagatgcgctgcagcagaacccgggcgccttcaggctagctcccgccctgcctgcccggccccaccgaggcctgagcacgttcccgggtgccgagcactgcctccgggcttcccccaagaccacgcttagcggtggcttcttcgttgctgtaattgaacgggtcgagatgccgacgtgagtgagtgggggcatgcttgggaggcgcaggatggtactggcacatctaacatctacacttctctagctcagcctcacaggccaaagcatcagcaccagaacgcacacccagcccagccccaaagagaaagaagagacagcaaagagccgcagccggtgcttgcacaccgccttgcacatagcagaggctccaggctgactccttcctggtgggaaaggaagatgcctgtcctctccgtggaggaccctgggccctcaccgcaggcagcagtttgcattttgaaaggttattgggtcccttcctcgggctgtgttcttgctggtgagcaaaagtgttgcctgcagaaataaaatgcagaacgtactcta

SEQ ID NO: 355469 - DNA, 3515 bp, Homo sapiens
agccgtaaaggcgcgcgggaacatggggctgtacgctgcggtggcaggcgtgctggccggcgtggagagccgccaggctctatcaaggggctggtgtactccagcaacttccagaacgtgaagcagctgtacgcgctggtgtgcgaaacgcagcgctactccgccgtgctggatgccgtgatctccagcgccggcctcctcagtgcgaagaagctgcagccgcacctggccaagggtaggggcggggcggggaagtgaaccccgacggtcagcgctttgtcatctggtttcagccccgctgccgtgcacggcgggactggagcaagtcgctcacctgaaatgagtatgagcagaccttccctgggttacgaattgagatgggatgaaaatgctttaacttcgagtgttttgaaggattaaataaccgaagtacaaagtagtagtagcggagacagtaaggaagtcgggcgtggcggcgcgcacctgtggtcccagctactcggaaggctgaggggggaggatcacttgagcccaggagttcgaagctgcagtgagctgttatgtggccactgcacttcagcctgggcgacagatctagaccccattctaaaaaaaaacaaaaaccccaaacccacgaaagggtaatgttggcaagaagttgggtgcagaggtctactggtgaacatctgtggggaaagggtctaaggctgggaagcgagacgccaggttccgatcctgttgtgtagttaatttctggtgtggtcttgagtaaggtaccccacctttatctgtaaccatctagtcaggtgatctctttagccattccagtgcccgggctctattagagttagttctaaggcattcatacttcttgcttagggcgtttctgtctttgatccctcatccccaggtgctagtgtatgagttgttgggaaagggctttcgagggggtgggggccaatggaaggctctgttgggacggcaccaggcgaggtgttgagttggctcggctcaaggttcttcggggtgtgagctggcatgaggacctgttggaagtgggatccaggcctggtccaggtgagctggaaggagttgaggggcgggggaggtggggaactttgctcctgcctactcactgctcattgcgtcctacctacctcccagctgcctcgatttgtgcgtgtgaacactctcaagacctgctccgtttatgtagttatttcaagagacaaggtttctcctatcagggtcgggcttccaggctggatggagtgccctggcgcgatctcggctcaccgcaacctctgcctcctgggttcaagcgattctcctgcttcagccttctgagcagctgggattatgaaggggtggcctgcccctccacatctgtgggatatctcatcaggtgggacaagagactgagaaaagaaataagacacagagacaaagtatagagaaacaacaagtggctggtctctgccccgtgcctcctccactgggctcacacctgtcttattttgtcctttggtggctctgagaagcagcctctgcccctctccctttcccttactctttgtaagatcctcttccttctgccctaccatgttgcttggacaccagggtggaatagcagagaacggctgcttgtgtttgaattccagctctgccacttcgatagatttctgaactgagacatgtgactctctaggcctatttctgcatgggtcggagagtgggcgggactgctttactgagttatagtgaatgtagttttaacctaagcgcctcacatgactaactcctcatccatcaagaatgagctcagctctcacttccccactcctcacccccctgtaaagtaacctttctccaaggttatgcttcaacaggaatagctaacatttattaaattgtggcacgtaagtatcttggatatattggctcattgaatcctcacacctactattttacagagatgccagtggggcttgagattgaatcacttgcccaggctcccactgctggtaaacagtagagggggctcctgacccatcagtctggcttgacaacccattccctcaactgcggatcccggattcccttatcaccctgttgatttctccatagctgtggtaacatttgttgcatgaatggaccgttgaaatagggcctggcagggagaaattcaggaaatgaatgaatggttcttccctggcagccttgatgacttacaagccctcaaggggaagcattttctcctggactccttgatgccggagctgctggtgtttcccgcccagacagatctgcatgaacacccactgtaccgggccggacacctcattctgcaggacagggccagctgtctcccagccatgctgctggacccccgccaggctcccatgtcatcgatgcctgtgccgccccaggcaataagaccagtcacttggctgctcttctgaagaaccaagggaagatctttgcctttgacctggatgccaagcggctggcatccatggccacgctgctggcctgggttggcgtctcctgctgtgagctggctgaggaggacttcctggcggtctcccccttagatccgcgctatcgtgaggtccactatgtcctgctggatccttcctgcagtggctcgggtgagatggtgagaaggcgtggctgagggactcggaggtccacagcagcttagacctggagtcatctgttttggtcttagttctgacactttaatgggcttgggaccctggagcaaaagttctcctctgtgaggcaaggatttcaggagcgaggatttcaggactgaggcagcctgtgaagctgtgtaaccgagacacgcttttccttaggtatgccgagcagacagctggaggatcccggggcagggacacctagcccggtgcgtctgcatgccctggcagggttccagcagcgagccctgtgccacgcgctcactttcccttccctgcagcggctcgtctactccatgtgctccctctgccaggaggagaatgaagacatggtaccagatgcgctgcagcagaacccgggcgccttcaggctagctcccgccctgcctgcccggccccaccgaggcctgagcacgttcccgggtgccgagcactgcctccgggcttcccccaagaccacgcttagcggtggcttcttcgttgctgtaattgaacgggtcgagatgccgacctcagcctcacaggccaaagcatcagcaccagaacgcacacccagcccagccccaaagagaaagaagagacagcaaagagccgcagccggtgcttgcacaccgccttgcacatagcagaggctccaggctgactccttcctggtgggaaaggaagatgcctgtcctctccgtggaggaccctgggccctcaccgcaggcagcagtttgcattttgaaaggttattgggtcccttcctcgggctgtgttcttgctggtgagcaaaagtgttgcctgcagaaataaaatgcagaacgtactcta

SEQ ID NO: 355470 - DNA, 1279 bp, Homo sapiens
agccgtaaaggcgcgcgggaacatggggctgtacgctgcggtggcaggcgtgctggccggcgtggagagccgccaggctctatcaaggggctggtgtactccagcaacttccagccttgatgacttacaagccctcaaggggaagcattttctcctggactccttgatgccggagctgctggtgtttcccgcccagacagatctgcatgaacacccactgtaccgggccggacacctcattctgcaggacagggccagctgtctcccagccatgctgctggacccccgccaggctcccatgtcatcgatgcctgtgccgccccaggcaataagaccagtcacttggctgctcttctgaagaaccaagggaagatctttgcctttgacctggatgccaagcggctggcatccatggccacgctgctggcctgggttggcgtctcctgctgtgagctggctgaggaggacttcctggcggtctcccccttagatccgcgctatcgtgaggtccactatgtcctgctggatccttcctgcagtggctcgggtgagatggtatgccgagcagacagctggaggatcccggggcagggacacctagcccggtgcgtctgcatgccctggcagggttccagcagcgagccctgtgccacgcgctcactttcccttccctgcagcggctcgtctactccatgtgctccctctgccaggaggagaatgaagacatggtaccagatgcgctgcagcagaacccgggcgccttcaggctagctcccgccctgcctgcccggccccaccgaggcctgagcacgttcccgggtgccgagcactgcctccgggcttcccccaagaccacgcttagcggtggcttcttcgttgctgtaattgaacgggtcgagatgccgacgtgagtgagtgggggcatgcttgggaggcgcaggatggtactggcacatctaacatctacacttctctagctcagcctcacaggccaaagcatcagcaccagaacgcacacccagcccagccccaaagagaaagaagagacagcaaagagccgcagccggtgcttgcacaccgccttgcacatagcagaggctccaggctgactccttcctggtgggaaaggaagatgcctgtcctctccgtggaggaccctgggccctcaccgcaggcagcagtttgcattttgaaaggttattgggtcccttcctcgggctgtgttcttgctggtgagcaaaagtgttgcctgcagaaataaaatgcagaacgtactcta

SEQ ID NO: 355471 - DNA, 1328 bp, Homo sapiens
agccgtaaaggcgcgcgggaacatggggctgtacgctgcggtggcaggcgtgctggccggcgtggagagccgccaggctctatcaaggggctggtgtactccagcaacttccagaacgtgaagcagctgtacgcgctggtgtgcgaaacgcagcgctactccgccgtgctggatgccgtgatctccagcgccggcctcctcagtgcgaagaagctgcagccgcacctggccaaggccttgatgacttacaagccctcaaggggaagcattttctcctggactccttgatgccggagctgctggtgtttcccgcccagacagatctgcatgaacacccactgtaccgggccggacacctcattctgcaggacagggccagctgtctcccagccatgctgctggacccccgccaggctcccatgtcatcgatgcctgtgccgccccaggcaataagaccagtcacttggctgctcttctgaagaaccaagggaagatctttgcctttgacctggatgccaagcggctggcatccatggccacgctgctggcctgggttggcgtctcctgctgtgagctggctgaggaggacttcctggcggtctcccccttagatccgcgctatcgtgaggtccactatgtcctgctggatccttcctgcagtggctcgggtgagatggtatgccgagcagacagctggaggatcccggggcagggacacctagcccgcggctcgtctactccatgtgctccctctgccaggaggagaatgaagacatggtaccagatgcgctgcagcagaacccgggcgccttcaggctagctcccgccctgcctgcccggccccaccgaggcctgagcacgttcccgggtgccgagcactgcctccgggcttcccccaagaccacgcttagcggtggcttcttcgttgctgtaattgaacgggtcgagatgccgacgtgagtgagtgggggcatgcttgggaggcgcaggatggtactggcacatctaacatctacacttctctagctcagcctcacaggccaaagcatcagcaccagaacgcacacccagcccagccccaaagagaaagaagagacagcaaagagccgcagccggtgcttgcacaccgccttgcacatagcagaggctccaggctgactccttcctggtgggaaaggaagatgcctgtcctctccgtggaggaccctgggccctcaccgcaggcagcagtttgcattttgaaaggttattgggtcccttcctcgggctgtgttcttgctggtgagcaaaagtgttgcctgcagaaataaaatgcagaacgtactcta

SEQ ID NO: 355472 - DNA, 1624 bp, Homo sapiens
agccgtaaaggcgcgcgggaacatggggctgtacgctgcggtggcaggcgtgctggccggcgtggagagccgccaggctctatcaaggggctggtgtactccagcaacttccagaacgtgaagcagctgtacgcgctggtgtgcgaaacgcagcgctactccgccgtgctggatgccgtgatctccagcgccggcctcctcagtgcgaagaagctgcagccgcacctggccaagggtaggggcggggcggggaagtgaaccccgacggtcagcgctttgtcatctggtttcagccccgctgccgtgcacggcgggactggagcaagtcgctcacctgaaatgagtatgagcagaccttccctgggttacgaattgagatgggatgaaaatgctttaacttcgagtgttttgaaggattaaataaccgaagtacaaagtagtagtagcggagacagtaaggaagtcgggcgtggcggcgcgcacctgtggtcccagctactcggaaggctgaggggggaggatcacttgagcccaggagttcgaagctgcagtgagctgttatgtggccactgcacttcagcctgggcgacagatctagaccccattctaaaaaaaaacaaaaaccccaaacccacgaaagggtaatgttggcaagaagttgggtgcagaggtctactggtgaacatctgtggggaaagggtctaaggctgggaagcgagacgccaggttccgatcctgttgtgtagttaatttctggtgtggtcttgagtaaggtaccccacctttatctgtaaccatctagtcaggtgatctctttagccattccagtgcccgggctctattagagttagttctaaggcattcatacttcttgcttagggcgtttctgtctttgatccctcatccccaggtgctagtgtatgagttgttgggaaagggctttcgagggggtgggggccaatggaaggctctgttgggacggcaccaggcgaggtgttgagttggctcggctcaaggttcttcggggtgtgagctggcatgaggacctgttggaagtgggatccaggcctggtccaggtgagctggaaggagttgaggggcgggggaggtggggaactttgctcctgcctactcactgctcattgcgtcctacctacctcccagctgcctcgatttgtgcgtgtgaacactctcaagacctgctccgtttatgtagttatttcaagagacaaggtttctcctatcagggtcgggcttccaggctggatggagtgccctggcgcgatctcggctcaccgcaacctctgcctcctgggttcaagcgattctcctgcttcagccttctgagcagctgggattatgaaggggtggcctgcccctccacatctgtgggatatctcatcaggtgggacaagagactgagaaaagaaataagacacagagacaaagtatagagaaacaacagtgggcccaggagactggcacttagcataccaaggacctgcaccagcactggtctccgagttccctcagtttttattgattattattttcattatctcagcacaaggaatgcggtaggagagcagggtgataataaggagaaggtcagcaaaaaaacctg

SEQ ID NO: 355473 - DNA, 603 bp, Homo sapiens
ctgcctactcactgctcattgcgtcctacctacctcccagctgcctcgatttgtgcgtgtgaacactctcaagacctgctccgtttatgtagttatttcaagagacaaggtttctcctatcagggtcgggcttccaggtgagagcttagagccctggctgtcctcatctagggaggtgtctggggtactgggaagagaagtggttggatagttgtgactttgctctctgggctttgttcctacctttccagcagtttctccatctccaaggtttgttttcctcgcatcccttaaacatcgaactcctaggagccccatcctacattcttccggagctctccgttttttctctaactttagctcctgcctcccacctggtgattctcaccgcccagtgtagacttcccttttgcattcttccctccttaggttcacatgaatgcaccacagatgccacagtcgctgcattcatctttcctctcagactttacacttagtacatccccagtttaatctaacagatgtcaccgttttccacccatttggtcaagccagaaaccgagtcatcctaggtgcttccttcccctccctccaatcatttac

SEQ ID NO: 355474 - DNA, 830 bp, Homo sapiens
atcacttgcccaggctcccactgctggtaaacagtagagggggctcctgacccatcagtctggcttgacaacccattccctcaactgcggatcccggattcccttatcaccctgttgatttctccatagctgtggtaacatttgttgcatgaatggaccgttgaaatagggcctggcagggagaaattcaggaaatgaatgaatggttcttccctggcagccttgatgacttacaagccctcaaggggaagcattttctcctggactccttgatgccggagctgctggtgtttcccgcccagacagatctgcatgaacacccactgtaccgggccggacacctcattctgcaggacagggtaggcaagaggaatagaaaagggaagaatgtgtaggcacgggaagggcctagcctggggtctctgtttacccggcccctgtgctctgcctgccaggccagctgtctcccagccatgctgctggacccccgccaggctcccatgtcatcgatgcctgtgccgccccaggcaataagaccagtcacttggctgctcttctgaagaaccaagggtgagtgccacaggaggaggaggaggaggacatggggtttgattttgtgcctttcagtgggtaataaaggctgaaaggatgactttcgcttaactctttcctgctgtaccaaagtagttcacggtatttgccccaagctaagctttccccactgcaggtgtgagatgtggatcccttagcccttggggcagagaccccaggccagttacctctgaccctgggccctttaaatataggccgtttcaatattgtgtgtcctg

SEQ ID NO: 355475 - DNA, 424 bp, Homo sapiens
gaagtggttggatagttgtgactttgctctctgggctttgttcctacctttccagcagtttctccatctccaaggtttgttttcctcgcatcccttaaacatcgaactcctaggagccccatcctacattcttccggagctctccgttttttctctaactttagctcctgcctcccacctggtgattctcaccgcccagtgtagacttcccttttgcattcttccctccttaggttcacatgaatgcaccacagatgccacagtcgctgcattcatctttcctctcagactttacacttagtacatccccagtttaatctaacagatgtcaccgttttccacccatttggtcaagccacggtcaacccacaagccacggtcaacccacaagccacggtcaacccacaagccacggtcaacccac

SEQ ID NO: 355476 - DNA, 2980 bp, Homo sapiens
gctggacgcaaaggccgaccatacacccacgaaagggtaatgttggcaagaagttgggtgcagaggtctactggtgaacatctgtggggaaagggtctaaggctgggaagcgagacgccaggttccgatcctgttgtgtagttaatttctggtgtggtcttgagtaaggtaccccacctttatctgtaaccatctagtcaggtgatctctttagccattccagtgcccgggctctattagagttagttctaaggcattcatacttcttgcttagggcgtttctgtctttgatccctcatccccaggtgctagtgtatgagttgttgggaaagggctttcgagggggtgggggccaatggaaggctctgttgggacggcaccaggcgaggtgttgagttggctcggctcaaggttcttcggggtgtgagctggcatgaggacctgttggaagtgggatccaggcctggtccaggtgagctggaaggagttgaggggcgggggaggtggggaactttgctcctgcctactcactgctcattgcgtcctacctacctcccagctgcctcgatttgtgcgtgtgaacactctcaagacctgctccgtttatgtagttatttcaagagacaaggtttctcctatcagggtcgggcttccaggctggatggagtgccctggcgcgatctcggctcaccgcaacctctgcctcctgggttcaagcgattctcctgcttcagccttctgagcagctgggattatgaaggggtggcctgcccctccacatctgtgggatatctcatcaggtgggacaagagactgagaaaagaaataagacacagagacaaagtatagagaaacaacaagtggctggtctctgccccgtgcctcctccactgggctcacacctgtcttattttgtcctttggtggctctgagaagcagcctctgcccctctccctttcccttactctttgtaagatcctcttccttctgccctaccatgttgcttggacaccagggtggaatagcagagaacggctgcttgtgtttgaattccagctctgccacttcgatagatttctgaactgagacatgtgactctctaggcctatttctgcatgggtcggagagtgggcgggactgctttactgagttatagtgaatgtagttttaacctaagcgcctcacatgactaactcctcatccatcaagaatgagctcagctctcacttccccactcctcacccccctgtaaagtaacctttctccaaggttatgcttcaacaggaatagctaacatttattaaattgtggcacgtaagtatcttggatatattggctcattgaatcctcacacctactattttacagagatgccagtggggcttgagattgaatcacttgcccaggctcccactgctggtaaacagtagagggggctcctgacccatcagtctggcttgacaacccattccctcaactgcggatcccggattcccttatcaccctgttgatttctccatagctgtggtaacatttgttgcatgaatggaccgttgaaatagggcctggcagggagaaattcaggaaatgaatgaatggttcttccctggcagccttgatgacttacaagccctcaaggggaagcattttctcctggactccttgatgccggagctgctggtgtttcccgcccagacagatctgcatgaacacccactgtaccgggccggacacctcattctgcaggacagggccagctgtctcccagccatgctgctggacccccgccaggctcccatgtcatcgatgcctgtgccgccccaggcaataagaccagtcacttggctgctcttctgaagaaccaagggaagatctttgcctttgacctggatgccaagcggctggcatccatggccacgctgctggcctgggttggcgtctcctgctgtgagctggctgaggaggacttcctggcggtctcccccttagatccgcgctatcgtgaggtccactatgtcctgctggatccttcctgcagtggctcgggtgagatggtgagaaggcgtggctgagggactcggaggtccacagcagcttagacctggagtcatctgttttggtcttagttctgacactttaatgggcttgggaccctggagcaaaagttctcctctgtgaggcaaggatttcaggagcgaggatttcaggactgaggcagcctgtgaagctgtgtaaccgagacacgcttttccttaggtatgccgagcagacagctggaggatcccggggcagggacacctagcccggtgcgtctgcatgccctggcagggttccagcagcgagccctgtgccacgcgctcactttcccttccctgcagcggctcgtctactccatgtgctccctctgccaggaggagaatgaagacatggtaccagatgcgctgcagcagaacccgggcgccttcaggctagctcccgccctgcctgcccggccccaccgaggcctgagcacgttcccgggtgccgagcactgcctccgggcttcccccaagaccacgcttagcggtggcttcttcgttgctgtaattgaacgggtcgagatgccgacgtgagtgagtgggggcatgcttgggaggcgcaggatggtactggcacatctaacatctacacttctctagctcagcctcacaggccaaagcatcagcaccagaacgcacacccagcccagccccaaagagaaagaagagacagcaaagagccgcagccggtgcttgcacaccgccttgcacatagcagaggctccaggctgactccttcctggtgggaaaggaagatgcctgtcctctccgtggaggaccctgggccctcaccgcaggcagcagtttgcattttgaaaggttattgggtcccttcctcgggctgtgttcttgctggtgagcaaaagtgttgcctgcagaaataaaatgcagaacgtactcta

SEQ ID NO: 355477 - DNA, 3383 bp, Homo sapiens
agccgtaaaggcgcgcgggaacatggggctgtacgctgcggtggcaggcgtgctggccggcgtggagagccgccaggctctatcaaggggctggtgtactccagcaacttccagaacgtgaagcagctgtacgcgctggtgtgcgaaacgcagcgctactccgccgtgctggatgccgtgatctccagcgccggcctcctcagtgcgaagaagctgcagccgcacctggccaagggtaggggcggggcggggaagtgaaccccgacggtcagcgctttgtcatctggtttcagccccgctgccgtgcacggcgggactggagcaagtcgctcacctgaaatgagtatgagcagaccttccctgggttacgaattgagatgggatgaaaatgctttaacttcgagtgttttgaaggattaaataaccgaagtacaaagtagtagtagcggagacagtaaggaagtcgggcgtggcggcgcgcacctgtggtcccagctactcggaaggctgaggggggaggatcacttgagcccaggagttcgaagctgcagtgagctgttatgtggccactgcacttcagcctgggcgacagatctagaccccattctaaaaaaaaacaaaaaccccaaacccacgaaagggtaatgttggcaagaagttgggtgcagaggtctactggtgaacatctgtggggaaagggtctaaggctgggaagcgagacgccaggttccgatcctgttgtgtagttaatttctggtgtggtcttgagtaaggtaccccacctttatctgtaaccatctagtcaggtgatctctttagccattccagtgcccgggctctattagagttagttctaaggcattcatacttcttgcttagggcgtttctgtctttgatccctcatccccaggtgctagtgtatgagttgttgggaaagggctttcgagggggtgggggccaatggaaggctctgttgggacggcaccaggcgaggtgttgagttggctcggctcaaggttcttcggggtgtgagctggcatgaggacctgttggaagtgggatccaggcctggtccaggtgagctggaaggagttgaggggcgggggaggtggggaactttgctcctgcctactcactgctcattgcgtcctacctacctcccagctgcctcgatttgtgcgtgtgaacactctcaagacctgctccgtttatgtagttatttcaagagacaaggtttctcctatcagggtcgggcttccaggctggatggagtgccctggcgcgatctcggctcaccgcaacctctgcctcctgggttcaagcgattctcctgcttcagccttctgagcagctgggattatgaaggggtggcctgcccctccacatctgtgggatatctcatcaggtgggacaagagactgagaaaagaaataagacacagagacaaagtatagagaaacaacaagtggctggtctctgccccgtgcctcctccactgggctcacacctgtcttattttgtcctttggtggctctgagaagcagcctctgcccctctccctttcccttactctttgtaagatcctcttccttctgccctaccatgttgcttggacaccagggtggaatagcagagaacggctgcttgtgtttgaattccagctctgccacttcgatagatttctgaactgagacatgtgactctctaggcctatttctgcatgggtcggagagtgggcgggactgctttactgagttatagtgaatgtagttttaacctaagcgcctcacatgactaactcctcatccatcaagaatgagctcagctctcacttccccactcctcacccccctgtaaagtaacctttctccaaggttatgcttcaacaggaatagctaacatttattaaattgtggcacgtaagtatcttggatatattggctcattgaatcctcacacctactattttacagagatgccagtggggcttgagattgaatcacttgcccaggctcccactgctggtaaacagtagagggggctcctgacccatcagtctggcttgacaacccattccctcaactgcggatcccggattcccttatcaccctgttgatttctccatagctgtggtaacatttgttgcatgaatggaccgttgaaatagggcctggcagggagaaattcaggaaatgaatgaatggttcttccctggcagccttgatgacttacaagccctcaaggggaagcattttctcctggactccttgatgccggagctgctggtgtttcccgcccagacagatctgcatgaacacccactgtaccgggccggacacctcattctgcaggacagggccagctgtctcccagccatgctgctggacccccgccaggctcccatgtcatcgatgcctgtgccgccccaggcaataagaccagtcacttggctgctcttctgaagaaccaagggaagatctttgcctttgacctggatgccaagcggctggcatccatggccacgctgctggcctgggttggcgtctcctgctgtgagctggctgaggaggacttcctggcggtctcccccttagatccgcgctatcgtgaggtccactatgtcctgctggatccttcctgcagtggctcgggtgagatggtatgccgagcagacagctggaggatcccggggcagggacacctagcccggtgcgtctgcatgccctggcagggttccagcagcgagccctgtgccacgcgctcactttcccttccctgcagcggctcgtctactccatgtgctccctctgccaggaggagaatgaagacatggtaccagatgcgctgcagcagaacccgggcgccttcaggctagctcccgccctgcctgcccggccccaccgaggcctgagcacgttcccgggtgccgagcactgcctccgggcttcccccaagaccacgcttagcggtggcttcttcgttgctgtaattgaacgggtcgagatgccgacgtgagtgagtgggggcatgcttgggaggcgcaggatggtactggcacatctaacatctacacttctctagctcagcctcacaggccaaagcatcagcaccagaacgcacacccagcccagccccaaagagaaagaagagacagcaaagagccgcagccggtgcttgcacaccgccttgcacatagcagaggctccaggctgactccttcctggtgggaaaggaagatgcctgtcctctccgtggaggaccctgggccctcaccgcaggcagcagtttgcattttgaaaggttattgggtcccttcctcgggctgtgttcttgctggtgagcaaaagtgttgcctgcagaaataaaatgcagaacgtactcta

SEQ ID NO: 355478 - DNA, 2570 bp, Homo sapiens
agccgtaaaggcgcgcgggaacatggggctgtacgctgcggtggcaggcgtgctggccggcgtggagagccgccaggctctatcaaggggctggtgtactccagcaacttccagaacgtgaagcagctgtacgcgctggtgtgcgaaacgcagcgctactccgccgtgctggatgccgtgatctccagcgccggcctcctcagtgcgaagaagctgcagccgcacctggccaagggtaggggcggggcggggaagtgaaccccgacggtcagcgctttgtcatctggtttcagccccgctgccgtgcacggcgggactggagcaagtcgctcacctgaaatgagtatgagcagaccttccctgggttacgaattgagatgggatgaaaatgctttaacttcgagtgttttgaaggattaaataaccgaagtacaaagtagtagtagcggagacagtaaggaagtcgggcgtggcggcgcgcacctgtggtcccagctactcggaaggctgaggggggaggatcacttgagcccaggagttcgaagctgcagtgagctgttatgtggccactgcacttcagcctgggcgacagatctagaccccattctaaaaaaaaacaaaaaccccaaacccacgaaagggtaatgttggcaagaagttgggtgcagaggtctactggtgaacatctgtggggaaagggtctaaggctgggaagcgagacgccaggttccgatcctgttgtgtagttaatttctggtgtggtcttgagtaaggtaccccacctttatctgtaaccatctagtcaggtgatctctttagccattccagtgcccgggctctattagagttagttctaaggcattcatacttcttgcttagggcgtttctgtctttgatccctcatccccaggtgctagtgtatgagttgttgggaaagggctttcgagggggtgggggccaatggaaggctctgttgggacggcaccaggcgaggtgttgagttggctcggctcaaggttcttcggggtgtgagctggcatgaggacctgttggaagtgggatccaggcctggtccaggtgagctggaaggagttgaggggcgggggaggtggggaactttgctcctgcctactcactgctcattgcgtcctacctacctcccagctgcctcgatttgtgcgtgtgaacactctcaagacctgctccgtttatgtagttatttcaagagacaaggtttctcctatcagggtcgggcttccaggctggatggagtgccctggcgcgatctcggctcaccgcaacctctgcctcctgggttcaagcgattctcctgcttcagccttctgagcagctgggattatgaaggggtggcctgcccctccacatctgtgggatatctcatcagccttgatgacttacaagccctcaaggggaagcattttctcctggactccttgatgccggagctgctggtgtttcccgcccagacagatctgcatgaacacccactgtaccgggccggacacctcattctgcaggacagggccagctgtctcccagccatgctgctggacccccgccaggctcccatgtcatcgatgcctgtgccgccccaggcaataagaccagtcacttggctgctcttctgaagaaccaagggaagatctttgcctttgacctggatgccaagcggctggcatccatggccacgctgctggcctgggttggcgtctcctgctgtgagctggctgaggaggacttcctggcggtctcccccttagatccgcgctatcgtgaggtccactatgtcctgctggatccttcctgcagtggctcgggtgagatggtatgccgagcagacagctggaggatcccggggcagggacacctagcccggtgcgtctgcatgccctggcagggttccagcagcgagccctgtgccacgcgctcactttcccttccctgcagcggctcgtctactccatgtgctccctctgccaggaggagaatgaagacatggtaccagatgcgctgcagcagaacccgggcgccttcaggctagctcccgccctgcctgcccggccccaccgaggcctgagcacgttcccgggtgccgagcactgcctccgggcttcccccaagaccacgcttagcggtggcttcttcgttgctgtaattgaacgggtcgagatgccgacgtgagtgagtgggggcatgcttgggaggcgcaggatggtactggcacatctaacatctacacttctctagctcagcctcacaggccaaagcatcagcaccagaacgcacacccagcccagccccaaagagaaagaagagacagcaaagagccgcagccggtgcttgcacaccgccttgcacatagcagaggctccaggctgactccttcctggtgggaaaggaagatgcctgtcctctccgtggaggaccctgggccctcaccgcaggcagcagtttgcattttgaaaggttattgggtcccttcctcgggctgtgttcttgctggtgagcaaaagtgttgcctgcagaaataaaatgcagaacgtactcta

SEQ ID NO: 355479 - DNA, 2831 bp, Homo sapiens
agccgtaaaggcgcgcgggaacatggggctgtacgctgcggtggcaggcgtgctggccggcgtggagagccgccaggctctatcaaggggctggtgtactccagcaacttccagaacgtgaagcagctgtacgcgctggtgtgcgaaacgcagcgctactccgccgtgctggatgccgtgatctccagcgccggcctcctcagtgcgaagaagctgcagccgcacctggccaagggtgctagtgtatgagttgttgggaaagggctttcgagggggtgggggccaatggaaggctctgttgggacggcaccaggcgaggtgttgagttggctcggctcaaggttcttcggggtgtgagctggcatgaggacctgttggaagtgggatccaggcctggtccagcctcccagctgcctcgatttgtgcgtgtgaacactctcaagacctgctccgtttatgtagttatttcaagagacaaggtttctcctatcagggtcgggcttccaggctggatggagtgccctggcgcgatctcggctcaccgcaacctctgcctcctgggttcaagcgattctcctgcttcagccttctgagcagctgggattatgaaggggtggcctgcccctccacatctgtgggatatctcatcaggtgggacaagagactgagaaaagaaataagacacagagacaaagtatagagaaacaacaagtggctggtctctgccccgtgcctcctccactgggctcacacctgtcttattttgtcctttggtggctctgagaagcagcctctgcccctctccctttcccttactctttgtaagatcctcttccttctgccctaccatgttgcttggacaccagggtggaatagcagagaacggctgcttgtgtttgaattccagctctgccacttcgatagatttctgaactgagacatgtgactctctaggcctatttctgcatgggtcggagagtgggcgggactgctttactgagttatagtgaatgtagttttaacctaagcgcctcacatgactaactcctcatccatcaagaatgagctcagctctcacttccccactcctcacccccctgtaaagtaacctttctccaaggttatgcttcaacaggaatagctaacatttattaaattgtggcacgtaagtatcttggatatattggctcattgaatcctcacacctactattttacagagatgccagtggggcttgagattgaatcacttgcccaggctcccactgctggtaaacagtagagggggctcctgacccatcagtctggcttgacaacccattccctcaactgcggatcccggattcccttatcaccctgttgatttctccatagctgtggtaacatttgttgcatgaatggaccgttgaaatagggcctggcagggagaaattcaggaaatgaatgaatggttcttccctggcagccttgatgacttacaagccctcaaggggaagcattttctcctggactccttgatgccggagctgctggtgtttcccgcccagacagatctgcatgaacacccactgtaccgggccggacacctcattctgcaggacagggccagctgtctcccagccatgctgctggacccccgccaggctcccatgtcatcgatgcctgtgccgccccaggcaataagaccagtcacttggctgctcttctgaagaaccaagggaagatctttgcctttgacctggatgccaagcggctggcatccatggccacgctgctggcctgggttggcgtctcctgctgtgagctggctgaggaggacttcctggcggtctcccccttagatccgcgctatcgtgaggtccactatgtcctgctggatccttcctgcagtggctcgggtgagatggtgagaaggcgtggctgagggactcggaggtccacagcagcttagacctggagtcatctgttttggtcttagttctgacactttaatgggcttgggaccctggagcaaaagttctcctctgtgaggcaaggatttcaggagcgaggatttcaggactgaggcagcctgtgaagctgtgtaaccgagacacgcttttccttaggtatgccgagcagacagctggaggatcccggggcagggacacctagcccggtgcgtctgcatgccctggcagggttccagcagcgagccctgtgccacgcgctcactttcccttccctgcagcggctcgtctactccatgtgctccctctgccaggaggagaatgaagacatggtaccagatgcgctgcagcagaacccgggcgccttcaggctagctcccgccctgcctgcccggccccaccgaggcctgagcacgttcccgggtgccgagcactgcctccgggcttcccccaagaccacgcttagcggtggcttcttcgttgctgtaattgaacgggtcgagatgccgacgtgagtgagtgggggcatgcttgggaggcgcaggatggtactggcacatctaacatctacacttctctagctcagcctcacaggccaaagcatcagcaccagaacgcacacccagcccagccccaaagagaaagaagagacagcaaagagccgcagccggtgcttgcacaccgccttgcacatagcagaggctccaggctgactccttcctggtgggaaaggaagatgcctgtcctctccgtggaggaccctgggccctcaccgcaggcagcagtttgcattttgaaaggttattgggtcccttcctcgggctgtgttcttgctggtgagcaaaagtgttgcctgcagaaataaaatgcagaacgtactcta

SEQ ID NO: 355480 - DNA, 2018 bp, Homo sapiens
agccgtaaaggcgcgcgggaacatggggctgtacgctgcggtggcaggcgtgctggccggcgtggagagccgccaggctctatcaaggggctggtgtactccagcaacttccagaacgtgaagcagctgtacgcgctggtgtgcgaaacgcagcgctactccgccgtgctggatgccgtgatctccagcgccggcctcctcagtgcgaagaagctgcagccgcacctggccaagggtgctagtgtatgagttgttgggaaagggctttcgagggggtgggggccaatggaaggctctgttgggacggcaccaggcgaggtgttgagttggctcggctcaaggttcttcggggtgtgagctggcatgaggacctgttggaagtgggatccaggcctggtccagcctcccagctgcctcgatttgtgcgtgtgaacactctcaagacctgctccgtttatgtagttatttcaagagacaaggtttctcctatcagggtcgggcttccaggctggatggagtgccctggcgcgatctcggctcaccgcaacctctgcctcctgggttcaagcgattctcctgcttcagccttctgagcagctgggattatgaaggggtggcctgcccctccacatctgtgggatatctcatcagccttgatgacttacaagccctcaaggggaagcattttctcctggactccttgatgccggagctgctggtgtttcccgcccagacagatctgcatgaacacccactgtaccgggccggacacctcattctgcaggacagggccagctgtctcccagccatgctgctggacccccgccaggctcccatgtcatcgatgcctgtgccgccccaggcaataagaccagtcacttggctgctcttctgaagaaccaagggaagatctttgcctttgacctggatgccaagcggctggcatccatggccacgctgctggcctgggttggcgtctcctgctgtgagctggctgaggaggacttcctggcggtctcccccttagatccgcgctatcgtgaggtccactatgtcctgctggatccttcctgcagtggctcgggtgagatggtgagaaggcgtggctgagggactcggaggtccacagcagcttagacctggagtcatctgttttggtcttagttctgacactttaatgggcttgggaccctggagcaaaagttctcctctgtgaggcaaggatttcaggagcgaggatttcaggactgaggcagcctgtgaagctgtgtaaccgagacacgcttttccttaggtatgccgagcagacagctggaggatcccggggcagggacacctagcccggtgcgtctgcatgccctggcagggttccagcagcgagccctgtgccacgcgctcactttcccttccctgcagcggctcgtctactccatgtgctccctctgccaggaggagaatgaagacatggtaccagatgcgctgcagcagaacccgggcgccttcaggctagctcccgccctgcctgcccggccccaccgaggcctgagcacgttcccgggtgccgagcactgcctccgggcttcccccaagaccacgcttagcggtggcttcttcgttgctgtaattgaacgggtcgagatgccgacgtgagtgagtgggggcatgcttgggaggcgcaggatggtactggcacatctaacatctacacttctctagctcagcctcacaggccaaagcatcagcaccagaacgcacacccagcccagccccaaagagaaagaagagacagcaaagagccgcagccggtgcttgcacaccgccttgcacatagcagaggctccaggctgactccttcctggtgggaaaggaagatgcctgtcctctccgtggaggaccctgggccctcaccgcaggcagcagtttgcattttgaaaggttattgggtcccttcctcgggctgtgttcttgctggtgagcaaaagtgttgcctgcagaaataaaatgcagaacgtactcta

SEQ ID NO: 355481 - DNA, 2177 bp, Homo sapiens
agccgtaaaggcgcgcgggaacatggggctgtacgctgcggtggcaggcgtgctggccggcgtggagagccgccaggctctatcaaggggctggtgtactccagcaacttccagaacgtgaagcagctgtacgcgctggtgtgcgaaacgcagcgctactccgccgtgctggatgccgtgatctccagcgccggcctcctcagtgcgaagaagctgcagccgcacctggccaagggtgctagtgtatgagttgttgggaaagggctttcgagggggtgggggccaatggaaggctctgttgggacggcaccaggcgaggtgttgagttggctcggctcaaggttcttcggggtgtgagctggcatgaggacctgttggaagtgggatccaggcctggtccagcctcccagctgcctcgatttgtgcgtgtgaacactctcaagacctgctccgtttatgtagttatttcaagagacaaggtttctcctatcagggtcgggcttccaggctggatggagtgccctggcgcgatctcggctcaccgcaacctctgcctcctgggttcaagcgattctcctgcttcagccttctgagcagctgggattatgaaggggtggcctgcccctccacatctgtgggatatctcatcagagatgccagtggggcttgagattgaatcacttgcccaggctcccactgctggtaaacagtagagggggctcctgacccatcagtctggcttgacaacccattccctcaactgcggatcccggattcccttatcaccctgttgatttctccatagctgtgccttgatgacttacaagccctcaaggggaagcattttctcctggactccttgatgccggagctgctggtgtttcccgcccagacagatctgcatgaacacccactgtaccgggccggacacctcattctgcaggacagggccagctgtctcccagccatgctgctggacccccgccaggctcccatgtcatcgatgcctgtgccgccccaggcaataagaccagtcacttggctgctcttctgaagaaccaagggaagatctttgcctttgacctggatgccaagcggctggcatccatggccacgctgctggcctgggttggcgtctcctgctgtgagctggctgaggaggacttcctggcggtctcccccttagatccgcgctatcgtgaggtccactatgtcctgctggatccttcctgcagtggctcgggtgagatggtgagaaggcgtggctgagggactcggaggtccacagcagcttagacctggagtcatctgttttggtcttagttctgacactttaatgggcttgggaccctggagcaaaagttctcctctgtgaggcaaggatttcaggagcgaggatttcaggactgaggcagcctgtgaagctgtgtaaccgagacacgcttttccttaggtatgccgagcagacagctggaggatcccggggcagggacacctagcccggtgcgtctgcatgccctggcagggttccagcagcgagccctgtgccacgcgctcactttcccttccctgcagcggctcgtctactccatgtgctccctctgccaggaggagaatgaagacatggtaccagatgcgctgcagcagaacccgggcgccttcaggctagctcccgccctgcctgcccggccccaccgaggcctgagcacgttcccgggtgccgagcactgcctccgggcttcccccaagaccacgcttagcggtggcttcttcgttgctgtaattgaacgggtcgagatgccgacgtgagtgagtgggggcatgcttgggaggcgcaggatggtactggcacatctaacatctacacttctctagctcagcctcacaggccaaagcatcagcaccagaacgcacacccagcccagccccaaagagaaagaagagacagcaaagagccgcagccggtgcttgcacaccgccttgcacatagcagaggctccaggctgactccttcctggtgggaaaggaagatgcctgtcctctccgtggaggaccctgggccctcaccgcaggcagcagtttgcattttgaaaggttattgggtcccttcctcgggctgtgttcttgctggtgagcaaaagtgttgcctgcagaaataaaatgcagaacgtactcta

SEQ ID NO: 355482 - DNA, 1400 bp, Homo sapiens
agccgtaaaggcgcgcgggaacatggggctgtacgctgcggtggcaggcgtgctggccggcgtggagagccgccaggctctatcaaggggctggtgtactccagcaacttccagaacgtgaagcagctgtacgcgctggtgtgcgaaacgcagcgctactccgccgtgctggatgccgtgatctccagcgccggcctcctcagtgcgaagaagctgcagccgcacctggccaaggccttgatgacttacaagccctcaaggggaagcattttctcctggactccttgatgccggagctgctggtgtttcccgcccagacagatctgcatgaacacccactgtaccgggccggacacctcattctgcaggacagggccagctgtctcccagccatgctgctggacccccgccaggctcccatgtcatcgatgcctgtgccgccccaggcaataagaccagtcacttggctgctcttctgaagaaccaagggaagatctttgcctttgacctggatgccaagcggctggcatccatggccacgctgctggcctgggttggcgtctcctgctgtgagctggctgaggaggacttcctggcggtctcccccttagatccgcgctatcgtgaggtccactatgtcctgctggatccttcctgcagtggctcgggtgagatggtatgccgagcagacagctggaggatcccggggcagggacacctagcccggtgcgtctgcatgccctggcagggttccagcagcgagccctgtgccacgcgctcactttcccttccctgcagcggctcgtctactccatgtgctccctctgccaggaggagaatgaagacatggtaccagatgcgctgcagcagaacccgggcgccttcaggctagctcccgccctgcctgcccggccccaccgaggcctgagcacgttcccgggtgccgagcactgcctccgggcttcccccaagaccacgcttagcggtggcttcttcgttgctgtaattgaacgggtcgagatgccgacgtgagtgagtgggggcatgcttgggaggcgcaggatggtactggcacatctaacatctacacttctctagctcagcctcacaggccaaagcatcagcaccagaacgcacacccagcccagccccaaagagaaagaagagacagcaaagagccgcagccggtgcttgcacaccgccttgcacatagcagaggctccaggctgactccttcctggtgggaaaggaagatgcctgtcctctccgtggaggaccctgggccctcaccgcaggcagcagtttgcattttgaaaggttattgggtcccttcctcgggctgtgttcttgctggtgagcaaaagtgttgcctgcagaaataaaatgcagaacgtactcta

SEQ ID NO: 355483 - DNA, 1544 bp, Homo sapiens
agccgtaaaggcgcgcgggaacatggggctgtacgctgcggtggcaggcgtgctggccggcgtggagagccgccaggctctatcaaggggctggtgtactccagcaacttccagaacgtgaagcagctgtacgcgctggtgtgcgaaacgcagcgctactccgccgtgctggatgccgtgatctccagcgccggcctcctcagtgcgaagaagctgcagccgcacctggccaagggctggatggagtgccctggcgcgatctcggctcaccgcaacctctgcctcctgggttcaagcgattctcctgcttcagccttctgagcagctgggattatgaaggggtggcctgcccctccacatctgtgggatatctcatcagccttgatgacttacaagccctcaaggggaagcattttctcctggactccttgatgccggagctgctggtgtttcccgcccagacagatctgcatgaacacccactgtaccgggccggacacctcattctgcaggacagggccagctgtctcccagccatgctgctggacccccgccaggctcccatgtcatcgatgcctgtgccgccccaggcaataagaccagtcacttggctgctcttctgaagaaccaagggaagatctttgcctttgacctggatgccaagcggctggcatccatggccacgctgctggcctgggttggcgtctcctgctgtgagctggctgaggaggacttcctggcggtctcccccttagatccgcgctatcgtgaggtccactatgtcctgctggatccttcctgcagtggctcgggtgagatggtatgccgagcagacagctggaggatcccggggcagggacacctagcccggtgcgtctgcatgccctggcagggttccagcagcgagccctgtgccacgcgctcactttcccttccctgcagcggctcgtctactccatgtgctccctctgccaggaggagaatgaagacatggtaccagatgcgctgcagcagaacccgggcgccttcaggctagctcccgccctgcctgcccggccccaccgaggcctgagcacgttcccgggtgccgagcactgcctccgggcttcccccaagaccacgcttagcggtggcttcttcgttgctgtaattgaacgggtcgagatgccgacgtgagtgagtgggggcatgcttgggaggcgcaggatggtactggcacatctaacatctacacttctctagctcagcctcacaggccaaagcatcagcaccagaacgcacacccagcccagccccaaagagaaagaagagacagcaaagagccgcagccggtgcttgcacaccgccttgcacatagcagaggctccaggctgactccttcctggtgggaaaggaagatgcctgtcctctccgtggaggaccctgggccctcaccgcaggcagcagtttgcattttgaaaggttattgggtcccttcctcgggctgtgttcttgctggtgagcaaaagtgttgcctgcagaaataaaatgcagaacgtactcta

SEQ ID NO: 355484 - DNA, 4031 bp, Homo sapiens
agccgtaaaggcgcgcgggaacatggggctgtacgctgcggtggcaggcgtgctggccggcgtggagagccgccaggctctatcaaggggctggtgtactccagcaacttccagaacgtgaagcagctgtacgcgctggtgtgcgaaacgcagcgctactccgccgtgctggatgccgtgatctccagcgccggcctcctcagtgcgaagaagctgcagccgcacctggccaagggtaggggcggggcggggaagtgaaccccgacggtcagcgctttgtcatctggtttcagccccgctgccgtgcacggcgggactggagcaagtcgctcacctgaaatgagtatgagcagaccttccctgggttacgaattgagatgggatgaaaatgctttaacttcgagtgttttgaaggattaaataaccgaagtacaaagtagtagtagcggagacagtaaggaagtcgggcgtggcggcgcgcacctgtggtcccagctactcggaaggctgaggggggaggatcacttgagcccaggagttcgaagctgcagtgagctgttatgtggccactgcacttcagcctgggcgacagatctagaccccattctaaaaaaaaacaaaaaccccaaacccacgaaagggtaatgttggcaagaagttgggtgcagaggtctactggtgaacatctgtggggaaagggtctaaggctgggaagcgagacgccaggttccgatcctgttgtgtagttaatttctggtgtggtcttgagtaaggtaccccacctttatctgtaaccatctagtcaggtgatctctttagccattccagtgcccgggctctattagagttagttctaaggcattcatacttcttgcttagggcgtttctgtctttgatccctcatccccaggtgctagtgtatgagttgttgggaaagggctttcgagggggtgggggccaatggaaggctctgttgggacggcaccaggcgaggtgttgagttggctcggctcaaggttcttcggggtgtgagctggcatgaggacctgttggaagtgggatccaggcctggtccaggtgagctggaaggagttgaggggcgggggaggtggggaactttgctcctgcctactcactgctcattgcgtcctacctacctcccagctgcctcgatttgtgcgtgtgaacactctcaagacctgctccgtttatgtagttatttcaagagacaaggtttctcctatcagggtcgggcttccaggctggatggagtgccctggcgcgatctcggctcaccgcaacctctgcctcctgggttcaagcgattctcctgcttcagccttctgagcagctgggattatgaaggggtggcctgcccctccacatctgtgggatatctcatcaggtgggacaagagactgagaaaagaaataagacacagagacaaagtatagagaaacaacaagtggctggtctctgccccgtgcctcctccactgggctcacacctgtcttattttgtcctttggtggctctgagaagcagcctctgcccctctccctttcccttactctttgtaagatcctcttccttctgccctaccatgttgcttggacaccagggtggaatagcagagaacggctgcttgtgtttgaattccagctctgccacttcgatagatttctgaactgagacatgtgactctctaggcctatttctgcatgggtcggagagtgggcgggactgctttactgagttatagtgaatgtagttttaacctaagcgcctcacatgactaactcctcatccatcaagaatgagctcagctctcacttccccactcctcacccccctgtaaagtaacctttctccaaggttatgcttcaacaggaatagctaacatttattaaattgtggcacgtaagtatcttggatatattggctcattgaatcctcacacctactattttacagagatgccagtggggcttgagattgaatcacttgcccaggctcccactgctggtaaacagtagagggggctcctgacccatcagtctggcttgacaacccattccctcaactgcggatcccggattcccttatcaccctgttgatttctccatagctgtggtaacatttgttgcatgaatggaccgttgaaatagggcctggcagggagaaattcaggaaatgaatgaatggttcttccctggcagccttgatgacttacaagccctcaaggggaagcattttctcctggactccttgatgccggagctgctggtgtttcccgcccagacagatctgcatgaacacccactgtaccgggccggacacctcattctgcaggacagggccagctgtctcccagccatgctgctggacccccgccaggctcccatgtcatcgatgcctgtgccgccccaggcaataagaccagtcacttggctgctcttctgaagaaccaagggaagatctttgcctttgacctggatgccaagcggctggcatccatggccacgctgctggcctgggttggcgtctcctgctgtgagctggctgaggaggacttcctggcggtctcccccttagatccgcgctatcgtgaggtccactatgtcctgctggatccttcctgcagtggctcgggtgagatggtgagaaggcgtggctgagggactcggaggtccacagcagcttagacctggagtcatctgttttggtcttagttctgacactttaatgggcttgggaccctggagcaaaagttctcctctgtgaggcaaggatttcaggagcgaggatttcaggactgaggcagcctgtgaagctgtgtaaccgagacacgcttttccttaggtatgccgagcagacagctggaggatcccggggcagggacacctagcccggtgcgtctgcatgccctggcagggttccagcagcgagccctgtgccacgcgctcactttcccttccctgcagcggctcgtctactccatgtgctccctctgccaggaggagaatgaagacatggtaccagatgcgctgcagcagaacccgggcgccttcaggctagctcccgccctgcctgcccggccccaccgaggcctgagcacgttcccgggtgccgagcactgcctccgggcttcccccaagaccacgcttagcggtggcttcttcgttgctgtaattgaacgggtcgagatgccgacctcagcctcacaggccaaagcatcagcaccagaacgcacacccagcccagccccaaagagaaagaagagacagcaaagagccgcagccggtgcttgcacaccgccttgcacatagcagaggctccaggctgactccttcctggtgggaaaggaagatgcctgtcctctccgtggaggaccctgggccctcaccgcaggcagcagtttgcattttgaaaggttattgggtcccttcctcgggctgtgttcttgctggtgagcaaaagtgttgcctgcagaaataaaatgcagaacgtactctaaaaaaaaaaaaaaaaacaacaaagaaaaaaaaaaaggggcgcggcgccgaccaagaaagtacaccccacagagggcgcccaaggacacagacgggtacccacaggttccttggacacacaagggggccccaaaaaggggacgccggaaatcaataacgcctagggccaccgtgtgaccgcagcgtttgtaccaaagcgttgcgcggagaccgtgtggcaaaacatcggcaaagactgtggagacaccctgggtaaagagggaccttattaaatactcgctcagtggtgatcggaccctaactgcgagcaccaaagctcaacccaccacagagagaaatataaaaagagccctccaaagggggaacaacatttacacaagttgtgaagcagcggggtaaaacagcagcggcttcaaacaagcatagacaggcaccaaacggcaaacacgacgcactgacaaaaaacgactatccggcgacccggaaacctacaaggcgcgagcacaaacattgcacg

SEQ ID NO: 355485 - DNA, 2163 bp, Homo sapiens
agctcgttcgccgcactttggaggcttcggctgcccctccgacccacgtagggcccggacccgggcctccttgtgaacagcgtgccggcttcgccccacgggttcaccggctggctgggcttcaagcgccgaggccgccgcagtgaccccgcccccgggccgaggatgtgaggcgggccgggcgtccccacaccgggcccgggcgccgggagtgggcgtctgggcagcgccaggcgatggccctgctgctggtgctcctcgcctcttggggcctggggcagtgagggggccggcgggcgtgggccgagtggccgcgggcgccatggagggggtgctgtacaagtggaccaactatctgagcggttggcagcctcgatggttccttctctgtgggggaatattgtcctattatgattctcctgaagatgcctggaaaggttgcaaagggagcatacaaatggcagtctgtgaaattcaagttcattctgtagataatacacgcatggacctgataatccctggggaacagtatttctacctgaaggccagaagtgtggctgaaagacagcggtggctggtggccctgggatcagccaaggcttgcctgactgacagtaggacccagaaggagaaagagtttgctgaaaacactgaaaacttgaaaaccaaaatgtcagaactaagactctactgtgacctccttgttcagcaagtagataaaacaaaagaagtgaccacaactggtgtgtccaattctgaggagggaattgatgtgggaactttgctgaaatcaacctgtaatacttttctgaagaccttggaagaatgcatgcagatcgcaaatgcagccttcacctctgagctgctctaccgcactccaccaggatcacctcagctggccatgctcaagtccagcaagatgaaacatcctattataccaattcataattcattggaaaggcaaatggagttgagcacttgtgaaaatggatctttaaatatggaaataaatggtgaggaagaaatcctaatgaaaaataagaattccttatatttgaaatctgcagagatagactgcagcatatcaagtgaggaaaatacagatgataatataacagtccaaggtgaaataaggaaggaagatggaatggaaaacctgaaaaatcatgacaataacttgactcagtctggatcagactcaagttgctctccggaatgcctctgggaggaaggcaaagaagttatcccaactttctttagtaccatgaacacaagctttagtgacattgaacttctggaagacagtggcattcccacagaagcattcttggcatcatgttatgctgtggttccagtattagacaaacttggccctacagtgtttgctcctgttaagatggatcttgttggaaatattaagaaagtaaatcagaagtatataaccaacaaagaagagtttaccactctccagaagatagtgctgcacgaagtggaggcggatgtagcccaggttaggaactcagcgactgaagccctcttgtggctgaagagaggtctcaaatttttgaagggatttttgacagaagtgaaaaatggggagaaggatatccagacagccctaaataatgcatatggtaaaacattgcggcaacaccatggctgggtagttcgaggggtttttgcgttagctttaagggcagctccatcctatgaagattttgtggccgcgttaaccgtaaaggaaggtgaccaccagaaagaagctttcagtattgggatgcagagggacctcagcctttacctccctgccatggagaagcagctggccatactggacactttatatgaggtccacgggctggaatctgatgaggtggtatgatggctgctgggcagcacctcctaacttcagggaataagtgctaaagtgttttgttgccctacttaatttccagcaacagcctcaaccctctccaaccccttcacctggggggatggacaggaggtggcaaaacccagtgcttttataatttttaaaatgcatatgtgttttgtttaaagatcaaggtgctatatatttcagttcagcaggcctactggaaaccaaatgataagctgctgtagacttgaacagcaagttataagagcagatttaacaaacaa

SEQ ID NO: 355486 - DNA, 1533 bp, Homo sapiens
gggaggccaaggcaggaggatcgcttgagccaaggagtttgagaccagcttgggcaacagagcaagaccccttctctacaaaaaaatctttaaaaattagccaggcgtgatggtgcatgcctgtagttccaactactcaggagagtgaggtgggaagatcgcttgagcccaggagttcaaggctgcaggccactgccctccagtccgggcaatacagcaagaccctatctctaaatatatatttcctctatctctctatctctgtagagacaaatcaagaattatattcacctaaagtggattacgattatttttaggtgtaggaatgtgggtgtagacggaactccagaaaccatcatggaccatgaggcaactctgaggatggaagccacacactaaggacggtaaagcagaaagaagagctgaaaccctgatgataaagaagcagccaattccgtcctgcactgcccacctccagatctcattcatgtgaaacaaagagaaactttatcttgttcaagtcactttagtcaagatttttattatcagatgaatgcaatttctaattgatacaccttaaaattttcaacatgtacacctgatttaacaaaatctagaattaagtcaatacttctacatgcattatagaccaaaggtcactgctataagaactttgggtatatagtcaaattcctcacatttttagaaacttgtttattcattgcatccctcccccatctcactctctcacacactcacatatttattttctcagatccttataagttcataagacatatgtccttattccatttttacagatgagaaaactggggtttgcaggggttaagtaacttatccaagatcacacaattaattagtggcgaagtcataatttgaagtctttctaatgcccaaatgtttccattgtgtcacatatcggagctgtgctctttccatcagccagtttcccattatcatagctgatgacatgcacacccaccatctggggcaggctttagtacagcactctgtgccatcatccagatcaccaaatcttagtaaatggacgtgtcataagagataaggctgccatagaatcacagcagcttctggcttagtaaattacctggatacacaccttttcctagaggaaatcccacatcttcgtaggagatctggtgtaatgctcttgggacctctctctagaggatgagctagtatcactgggtcctagtaagtttcagcaaatataatagagacagaactgtcatcattatcagaaaagaaacagagaaaaatgttaaaacaatggttttgtgaccttaaagtctgtgttagtcccttagcaccaccgctgagattttgctgaaagggacgttttgtgtgttgggcttcactgaaggaagcccctgaaagtgttcagaaatagggaaaatgagaaactgttccagctgaaaatacgggcaagggggaatcattgaagaagacagaatattgaagtgttcaaatgaataaagaagctaaaaacta

SEQ ID NO: 355487 - DNA, 1480 bp, Homo sapiens
gggaggccaaggcaggaggatcgcttgagccaaggagtttgagaccagcttgggcaacagagcaagaccccttctctacaaaaaaatctttatgaggtgggaagatcgcttgagcccaggagttcaaggctgcaggccactgccctccagtccgggcaatacagcaagaccctatctctaaatatatatttcctctatctctctatctctgtagagacaaatcaagaattatattcacctaaagtggattacgattatttttaggtgtaggaatgtgggtgtagacggaactccagaaaccatcatggaccatgaggcaactctgaggatggaagccacacactaaggacggtaaagcagaaagaagagctgaaaccctgatgataaagaagcagccaattccgtcctgcactgcccacctccagatctcattcatgtgaaacaaagagaaactttatcttgttcaagtcactttagtcaagatttttattatcagatgaatgcaatttctaattgatacaccttaaaattttcaacatgtacacctgatttaacaaaatctagaattaagtcaatacttctacatgcattatagaccaaaggtcactgctataagaactttgggtatatagtcaaattcctcacatttttagaaacttgtttattcattgcatccctcccccatctcactctctcacacactcacatatttattttctcagatccttataagttcataagacatatgtccttattccatttttacagatgagaaaactggggtttgcaggggttaagtaacttatccaagatcacacaattaattagtggcgaagtcataatttgaagtctttctaatgcccaaatgtttccattgtgtcacatatcggagctgtgctctttccatcagccagtttcccattatcatagctgatgacatgcacacccaccatctggggcaggctttagtacagcactctgtgccatcatccagatcaccaaatcttagtaaatggacgtgtcataagagataaggctgccatagaatcacagcagcttctggcttagtaaattacctggatacacaccttttcctagaggaaatcccacatcttcgtaggagatctggtgtaatgctcttgggacctctctctagaggatgagctagtatcactgggtcctagtaagtttcagcaaatataatagagacagaactgtcatcattatcagaaaagaaacagagaaaaatgttaaaacaatggttttgtgaccttaaagtctgtgttagtcccttagcaccaccgctgagattttgctgaaagggacgttttgtgtgttgggcttcactgaaggaagcccctgaaagtgttcagaaatagggaaaatgagaaactgttccagctgaaaatacgggcaagggggaatcattgaagaagacagaatattgaagtgttcaaatgaataaagaagctaaaaacta

SEQ ID NO: 355488 - DNA, 2067 bp, Homo sapiens
agctcgttcgccgcactttggaggcttcggctgcccctccgacccacgtagggcccggacccgggcctccttgtgaacagcgtgccggcttcgccccacgggttcaccggctggctgggcttcaagcgccgaggccgccgcagtgaccccgcccccgggccgaggatgtgaggcgggccgggcgtccccacaccgggcccgggcgccgggagtgggcgtctgggcagcgccaggcgatggccctgctgctggtgctcctcgcctcttggggcctggggcagtgagggggccggcgggcgtgggccgagtggccgcgggcgccatggagggggtgctgtacaagtggaccaactatctgagcggttggcagcctcgatggttccttctctgtgggggaatattgtcctattatgattctcctgaagatgcctggaaaggttgcaaagggagcatacaaatggcagtctgtgaaattcaagttcattctgtagataatacacgcatggacctgataatccctggggaacagtatttctacctgaaggccagaagtgtggctgaaagacagcggtggctggtggccctgggatcagccaaggcttgcctgactgacagtaggacccagaaggagaaagagtttgctgaaaacactgaaaacttgaaaaccaaaatgtcagaactaagactctactgtgacctccttgttcagcaagtagataaaacaaaagaagtgaccacaactggtgtgtccaattctgaggagggaattgatgtgggaactttgctgaaatcaacctgtaatacttttctgaagaccttggaagaatgcatgcagatcgcaaatgcagccttcacctctgagctgctctaccgcactccaccaggatcacctcagctggccatgctcaagtccagcaagatgaaacatcctattataccaattcataattcattggaaaggcaaatggagttgagcacttgtgaaaatggatctttaaatatggaaataaatggtgaggaagaaatcctaatgaaaaataagaattccttatatttgaaatctgcagagatagactgcagcatatcaagtgaggaaaatacagatgataatataacagtccaaggtgaaataaggaaggaagatggaatggaaaacctgaaaaatcatgacaataacttgactcagtctggatcagactcaagttgctctccggaatgcctctgggaggaaggcaaagaagttatcccaactttctttagtaccatgaacacaagctttagtgacattgaacttctggaagacagtggcattcccacagaagcattcttggcatcatgttatgctgtggttccagtattagacaaacttggccctacagtgtttgctcctgttaagatggatcttgttggaaatattaagaaagtaaatcagaagtatataaccaacaaagaagagtttaccactctccagaagatagtgctgcacgaagtggaggcggatgtagcccaggttaggaactcagcgactgaagccctcttgtggctgaagagaggtctcaaatttttgaagggatttttgacagaagtgaaaaatggggagaaggatatccagacagccctaaataatgcatatggtaaaacattgcggcaacaccatggctgggtagttcgaggggtttttgcgggacacacaaatgtctgatggtggcccaggagggctgtcactcagaatcaggcgggtgcagagtggcctgcaggacatgatgacccagcatgagacaggatgcatcacatctgggtgacgcctctctccaggggatcagcctggactaaatgcctctcctgggccaggatgcccagcaagccccgagatgcctcctggagagaaggaagtatgtgagagtatcctgagttaagtgagatctaaaatgcctgagaaaaccctgaaatgactgagtctatctggaacttatttgattgtttttctgccatcagatagaatgaggtctcaaaagagaaattaaattatattacaagaaaataaagctcaattgcttgcctatttga

SEQ ID NO: 355489 - DNA, 2900 bp, Homo sapiens
agctcgttcgccgcactttggaggcttcggctgcccctccgacccacgtagggcccggacccgggcctccttgtgaacagcgtgccggcttcgccccacgggttcaccggctggctgggcttcaagcgccgaggccgccgcagtgaccccgcccccgggccgaggatgtgaggcgggccgggcgtccccacaccgggcccgggcgccgggagtgggcgtctgggcagcgccaggcgatggccctgctgctggtgctcctcgcctcttggggcctggggcagtgagggggccggcgggcgtgggccgagtggccgcgggcgccatggagggggtgctgtacaagtggaccaactatctgagcggttggcagcctcgatggttccttctctgtgggggaatattgtcctattatgattctcctgaagatgcctggaaaggttgcaaagggagcatacaaatggcagtctgtgaaattcaagttcattctgtagataatacacgcatggacctgataatccctggggaacagtatttctacctgaaggccagaagtgtggctgaaagacagcggtggctggtggccctgggatcagccaaggcttgcctgactgacagtaggacccagaaggagaaagagtttgctgaaaacactgaaaacttgaaaaccaaaatgtcagaactaagactctactgtgacctccttgttcagcaagtagataaaacaaaagaagtgaccacaactggtgtgtccaattctgaggagggaattgatgtgggaactttgctgaaatcaacctgtaatacttttctgaagaccttggaagaatgcatgcagatcgcaaatgcagccttcacctctgagctgctctaccgcactccaccaggatcacctcagctggccatgctcaagtccagcaagatgaaacatcctattataccaattcataattcattggaaaggcaaatggagttgagcacttgtgaaaatggatctttaaatatggaaataaatggtgaggaagaaatcctaatgaaaaataagaattccttatatttgaaatctgcagagatagactgcagcatatcaagtgaggaaaatacagatgataatataacagtccaaggtgaaataaggaaggaagatggaatggaaaacctgaaaaatcatgacaataacttgactcagtctggatcagactcaagttgctctccggaatgcctctgggaggaaggcaaagaagttatcccaactttctttagtaccatgaacacaagctttagtgacattgaacttctggaagacagtggcattcccacagaagcattcttggcatcatgttatgctgtggttccagtattagacaaacttggccctacagtgtttgctcctgttaagatggatcttgttggaaatattaagaaagtaaatcagaagtatataaccaacaaagaagagtttaccactctccagaagatagtgctgcacgaagtggaggcggatgtagcccaggttaggaactcagcgactgaagccctcttgtggctgaagagaggtctcaaatttttgaagggatttttgacagaagtgaaaaatggggagaaggatatccagacagccctaaataatgcatatggtaaaacattgcggcaacaccatggctgggtagttcgaggggtttttgcggtgtaggaatgtgggtgtagacggaactccagaaaccatcatggaccatgaggcaactctgaggatggaagccacacactaaggacggtaaagcagaaagaagagctgaaaccctgatgataaagaagcagccaattccgtcctgcactgcccacctccagatctcattcatgtgaaacaaagagaaactttatcttgttcaagtcactttagtcaagatttttattatcagatgaatgcaatttctaattgatacaccttaaaattttcaacatgtacacctgatttaacaaaatctagaattaagtcaatacttctacatgcattatagaccaaaggtcactgctataagaactttgggtatatagtcaaattcctcacatttttagaaacttgtttattcattgcatccctcccccatctcactctctcacacactcacatatttattttctcagatccttataagttcataagacatatgtccttattccatttttacagatgagaaaactggggtttgcaggggttaagtaacttatccaagatcacacaattaattagtggcgaagtcataatttgaagtctttctaatgcccaaatgtttccattgtgtcacatatcggagctgtgctctttccatcagccagtttcccattatcatagctgatgacatgcacacccaccatctggggcaggctttagtacagcactctgtgccatcatccagatcaccaaatcttagtaaatggacgtgtcataagagataaggctgccatagaatcacagcagcttctggcttagtaaattacctggatacacaccttttcctagaggaaatcccacatcttcgtaggagatctggtgtaatgctcttgggacctctctctagaggatgagctagtatcactgggtcctagtaagtttcagcaaatataatagagacagaactgtcatcattatcagaaaagaaacagagaaaaatgttaaaacaatggttttgtgaccttaaagtctgtgttagtcccttagcaccaccgctgagattttgctgaaagggacgttttgtgtgttgggcttcactgaaggaagcccctgaaagtgttcagaaatagggaaaatgagaaactgttccagctgaaaatacgggcaagggggaatcattgaagaagacagaatattgaagtgttcaaatgaataaagaagctaaaaacta

SEQ ID NO: 355490 - DNA, 2205 bp, Homo sapiens
agctcgttcgccgcactttggaggcttcggctgcccctccgacccacgtagggcccggacccgggcctccttgtgaacagcgtgccggcttcgccccacgggttcaccggctggctgggcttcaagcgccgaggccgccgcagtgaccccgcccccgggccgaggatgtgaggcgggccgggcgtccccacaccgggcccgggcgccgggagtgggcgtctgggcagcgccaggcgatggccctgctgctggtgctcctcgcctcttggggcctggggcagtgagggggccggcgggcgtgggccgagtggccgcgggcgccatggagggggtgctgtacaagtggaccaactatctgagcggttggcagcctcgatggttccttctctgtgggggaatattgtcctattatgattctcctgaagatgcctggaaaggttgcaaagggagcatacaaatggcagtctgtgaaattcaagttcattctgtagataatacacgcatggacctgataatccctggggaacagtatttctacctgaaggccagaagtgtggctgaaagacagcggtggctggtggccctgggatcagccaaggcttgcctgactgacagtaggacccagaaggagaaagagtttgctgaaaacactgaaaacttgaaaaccaaaatgtcagaactaagactctactgtgacctccttgttcagcaagtagataaaacaaaagaagtgaccacaactggtgtgtccaattctgaggagggaattgatgtgggaactttgctgaaatcaacctgtaatacttttctgaagaccttggaagaatgcatgcagatcgcaaatgcagccttcacctctgagctgctctaccgcactccaccaggatcacctcagctggccatgctcaagtccagcaagatgaaacatcctattataccaattcataattcattggaaaggcaaatggagttgagcacttgtgaaaatggatctttaaatatggaaataaatggtgaggaagaaatcctaatgaaaaataagaattccttatatttgaaatctgcagagatagactgcagcatatcaagtgaggaaaatacagatgataatataacagtccaaggtgaaataaggaaggaagatggaatggaaaacctgaaaaatcatgacaataacttgactcagtctggatcagactcaagttgctctccggaatgcctctgggaggaaggcaaagaagttatcccaactttctttagtaccatgaacacaagctttagtgacattgaacttctggaagacagtggcattcccacagaagcattcttggcatcatgttatgctgtggttccagtattagacaaacttggccctacagtgtttgctcctgttaagatggatcttgttggaaatattaagaaagtaaatcagaagtatataaccaacaaagaagagtttaccactctccagaagatagtgctgcacgaagtggaggcggatgtagcccaggttaggaactcagcgactgaagccctcttgtggctgaagagaggtctcaaatttttgaagggatttttgacagaagtgaaaaatggggagaaggatatccagacagccctaagaaatccaacagaaaacacttgacaccaaaacataccctgatgaagatcctgaacttcaagaatgaagaaagaattcctcaccattcaggcagaaaaagcaagtcaccaagggacctcaaacttcctttccacaagattctgtgacgggaaacaatgggggagtatttccgaagttctgagtaggaaaaaagaatgactcaaatgtattattgccaaccaagtcgtcaaatctaatgtcaagttctcttaagcaggtaagaactcagaacataatacctgagtgccttcttaaggaaaccatttgataggaaagatgaaccaaataactcaatgatggatgagctggtagaaaaaaagctggtggtgaaccaaggtcaaactggaaattatagtcacagtatagatatagattataaatattacaaaccctaagatagctaataaattgggaatgggagaagggaggatataagagcactaatgccctcttattttcatagcagagacttgatactgtctcaacttttttcaaaaacacaatttcttaaattttttggtaatcttttaaataaacagatttct

SEQ ID NO: 355491 - DNA, 2838 bp, Homo sapiens
agctcgttcgccgcactttggaggcttcggctgcccctccgacccacgtagggcccggacccgggcctccttgtgaacagcgtgccggcttcgccccacgggttcaccggctggctgggcttcaagcgccgaggccgccgcagtgaccccgcccccgggccgaggatgtgaggcgggccgggcgtccccacaccgggcccgggcgccgggagtgggcgtctgggcagcgccaggcgatggccctgctgctggtgctcctcgcctcttggggcctggggcagtgagggggccggcgggcgtgggccgagtggccgcgggcgccatggagggggtgctgtacaagtggaccaactatctgagcggttggcagcctcgatggttccttctctgtgggggaatattgtcctattatgattctcctgaagatgcctggaaaggttgcaaagggagcatacaaatggcagtctgtgaaattcaagttcattctgtagataatacacgcatggacctgataatccctggggaacagtatttctacctgaaggccagaagtgtggctgaaagacagcggtggctggtggccctgggatcagccaaggcttgcctgactgacagtaggacccagaaggagaaagagtttgctgaaaacactgaaaacttgaaaaccaaaatgtcagaactaagactctactgtgacctccttgttcagcaagtagataaaacaaaagaagtgaccacaactggtgtgtccaattctgaggagggaattgatgtgggaactttgctgaaatcaacctgtaatacttttctgaagaccttggaagaatgcatgcagatcgcaaatgcagccttcacctctgagctgctctaccgcactccaccaggatcacctcagctggccatgctcaagtccagcaagatgaaacatcctattataccaattcataattcattggaaaggcaaatggagttgagcacttgtgaaaatggatctttaaatatggaaataaatggtgaggaagaaatcctaatgaaaaataagaattccttatatttgaaatctgcagagatagactgcagcatatcaagtgaggaaaatacagatgataatataacagtccaaggtgaaataaggaaggaagatggaatggaaaacctgaaaaatcatgacaataacttgactcagtctggatcagactcaagttgctctccggaatgcctctgggaggaaggcaaagaagttatcccaactttctttagtaccatgaacacaagctttagtgacattgaacttctggaagacagtggcattcccacagaagcattcttggcatcatgttatgctgtggttccagtattagacaaacttggccctacagtgtttgctcctgttaagatggatcttgttggaaatattaagaaagtaaatcagaagtatataaccaacaaagaagagtttaccactctccagaagatagtgctgcacgaagtggaggcggatgtagcccaggttaggaactcagcgactgaagccctcttgtggctgaagagaggtctcaaatttttgaagggatttttgacagaagtgaaaaatggggagaaggatatccagacagccctaagtgtaggaatgtgggtgtagacggaactccagaaaccatcatggaccatgaggcaactctgaggatggaagccacacactaaggacggtaaagcagaaagaagagctgaaaccctgatgataaagaagcagccaattccgtcctgcactgcccacctccagatctcattcatgtgaaacaaagagaaactttatcttgttcaagtcactttagtcaagatttttattatcagatgaatgcaatttctaattgatacaccttaaaattttcaacatgtacacctgatttaacaaaatctagaattaagtcaatacttctacatgcattatagaccaaaggtcactgctataagaactttgggtatatagtcaaattcctcacatttttagaaacttgtttattcattgcatccctcccccatctcactctctcacacactcacatatttattttctcagatccttataagttcataagacatatgtccttattccatttttacagatgagaaaactggggtttgcaggggttaagtaacttatccaagatcacacaattaattagtggcgaagtcataatttgaagtctttctaatgcccaaatgtttccattgtgtcacatatcggagctgtgctctttccatcagccagtttcccattatcatagctgatgacatgcacacccaccatctggggcaggctttagtacagcactctgtgccatcatccagatcaccaaatcttagtaaatggacgtgtcataagagataaggctgccatagaatcacagcagcttctggcttagtaaattacctggatacacaccttttcctagaggaaatcccacatcttcgtaggagatctggtgtaatgctcttgggacctctctctagaggatgagctagtatcactgggtcctagtaagtttcagcaaatataatagagacagaactgtcatcattatcagaaaagaaacagagaaaaatgttaaaacaatggttttgtgaccttaaagtctgtgttagtcccttagcaccaccgctgagattttgctgaaagggacgttttgtgtgttgggcttcactgaaggaagcccctgaaagtgttcagaaatagggaaaatgagaaactgttccagctgaaaatacgggcaagggggaatcattgaagaagacagaatattgaagtgttcaaatgaataaagaagctaaaaacta

SEQ ID NO: 355492 - DNA, 543 bp, Homo sapiens
catttccacgagtcaccactttatgaatctgtatcccatatgccggtgactcgtggaaatgtccacacatttccacgagtcacaccgtgcccaggtacactttcaagacactgtaaccacaagatgttatttattgagctggcgccgggacttgggcggggcctgccctacagtgagcagcccacacaggaacgctcctctcgcgagcggcccgggcagggaccctgtcccaacaccaacacctcctctccagcccaatcttctgggtccagacctgcttgtcccttttttagaaaacacttttaaactttttaaaaattttaaaccttttttcagcagatatggagagagctgacaatcaattcacattttttaagccattttagctaaactgtcattgtgcatctctgaggttccctcatggagctccacagatccatttttagggaagggattttggctcaaaacgatctgaccacctctgccctgtccaccaggataagtgacacctaggacccaggaaataaatgccgatgatttgtg

SEQ ID NO: 355493 - DNA, 1177 bp, Homo sapiens
aacacccactaaaacctcaaagtgcttttcatttaggagacacggggaagagacagagaggagggtaaagtgagaatcctgcccgcaccacaggtctggactgctaaccttgaatcctggtttcttaaattctgcctccgcttctgactgaggaccactggattttgaggaaactttggtcttaattcccgtactgattagtcaacagtggaaaatctgaagagatgcaagcaggaaaaagaaattaaaccaggcctgaggagcgatgcgacaggcatgatggaggtcgagtcctcctactcggacttcatctcctgtgaccggacaggccgtcggaatgcggtccctgacatccagggagactcagaggctgtgagcgtgaggaagctggctggagacatgggcgagctggcactcgagggggcagaaggacaggtggagggaagcgccccagacaaggaagctggcaaccagccccagagcagcgatgggaccacctcgtcttgaatctgaccttgtccaagaaggctggacgagagaccttctgtcccctcccagagggggaaccctggcactggcccagcagcctcttctctgagctccatgtcccagataaaccaggccagactgagaaggctccccagaggcctctgtggcctccactccgggaaagccctctgcccacacccacaggcttcacattcccaccaccttcgcaccgtgcccaggtacactttcaagacactgtaaccacaagatgttatttattgagctggcgccgggacttgggcggggcctgccctacagtgagcagcccacacaggaacgctcctctcgcgagcggcccgggcagggaccctgtcccaacaccaacacctcctctccagcccaatcttctgggtccagacctgcttgtcccttttttagaaaacacttttaaactttttaaaaattttaaaccttttttcagcagatatggagagagctgacaatcaattcacattttttaagccattttagctaaactgtcattgtgcatctctgaggttccctcatggagctccacagatccatttttagggaagggattttggctcaaaacgatctgaccacctctgccctgtccaccaggataagtgacacctaggacccaggaaataaatgccgatgatttgtg

SEQ ID NO: 355494 - DNA, 1336 bp, Homo sapiens
tccgcggctgcggaaggggacgcgaaccgtcctggtcccatccgagccgccgtagcgcgagtgccgcgggagttcggcagcccaggtcgccaaggcaacgggctccgctgcgggttgcgggctgcgggcgctaggctgccccggggaggcgctgcggaccggcggcccaggcacggagaggcggcgagaccgcaggagacacggggaagagacagagaggagggtaaagtgagaatcctgcccgcaccacaggtctggactgctaaccttgaatcctggtttcttaaattctgcctccgcttctgactgaggaccactggattttgaggaaactttggtcttaattcccgtactgattagtcaacagtggaaaatctgaagagatgcaagcaggaaaaagaaattaaaccaggcctgaggagcgatgcgacaggcatgatggaggtcgagtcctcctactcggacttcatctcctgtgaccggacaggccgtcggaatgcggtccctgacatccagggagactcagaggctgtgagcgtgaggaagctggctggagacatgggcgagctggcactcgagggggcagaaggacaggtggagggaagcgccccagacaaggaagctggcaaccagccccagagcagcgatgggaccacctcgtcttgaatctgaccttgtccaagaaggctggacgagagaccttctgtcccctcccagagggggaaccctggcactggcccagcagcctcttctctgagctccatgtcccagataaaccaggccagactgagaaggctccccagaggcctctgtggcctccactccgggaaagccctctgcccacacccacaggcttcacattcccaccaccttcgcaccgtgcccaggtacactttcaagacactgtaaccacaagatgttatttattgagctggcgccgggacttgggcggggcctgccctacagtgagcagcccacacaggaacgctcctctcgcgagcggcccgggcagggaccctgtcccaacaccaacacctcctctccagcccaatcttctgggtccagacctgcttgtcccttttttagaaaacacttttaaactttttaaaaattttaaaccttttttcagcagatatggagagagctgacaatcaattcacattttttaagccattttagctaaactgtcattgtgcatctctgaggttccctcatggagctccacagatccatttttagggaagggattttggctcaaaacgatctgaccacctctgccctgtccaccaggataagtgacacctaggacccaggaaataaatgccgatgatttgtg

SEQ ID NO: 355495 - DNA, 1339 bp, Homo sapiens
tgagccgccggggatcccggggagggaggctgcggcccgatctttgtccctcagccgcgccggggacggcgcccccgacgccctttgaccccgccccgcgttcagggagagtccgttttcggctgtttattatatttgtagccattggtcgacctcattcgaaagtttcttaaaaaaaaaatcccttcttgtttgggggccagaaaataactcaaaactgtgcagaaaatttatttgtgtgtgtgactcttctggggccagagaggattgacttctttgtgcgtcagttttatcgtctgcaaaatgggaatcatggtagcacctgtctgatgacgttattacaagaattcccgtactgattagtcaacagtggaaaatctgaagagatgcaagcaggaaaaagaaattaaaccaggcctgaggagcgatgcgacaggcatgatggaggtcgagtcctcctactcggacttcatctcctgtgaccggacaggccgtcggaatgcggtccctgacatccagggagactcagaggctgtgagcgtgaggaagctggctggagacatgggcgagctggcactcgagggggcagaaggacaggtggagggaagcgccccagacaaggaagctggcaaccagccccagagcagcgatgggaccacctcgtcttgaatctgaccttgtccaagaaggctggacgagagaccttctgtcccctcccagagggggaaccctggcactggcccagcagcctcttctctgagctccatgtcccagataaaccaggccagactgagaaggctccccagaggcctctgtggcctccactccgggaaagccctctgcccacacccacaggcttcacattcccaccaccttcgcaccgtgcccaggtacactttcaagacactgtaaccacaagatgttatttattgagctggcgccgggacttgggcggggcctgccctacagtgagcagcccacacaggaacgctcctctcgcgagcggcccgggcagggaccctgtcccaacaccaacacctcctctccagcccaatcttctgggtccagacctgcttgtcccttttttagaaaacacttttaaactttttaaaaattttaaaccttttttcagcagatatggagagagctgacaatcaattcacattttttaagccattttagctaaactgtcattgtgcatctctgaggttccctcatggagctccacagatccatttttagggaagggattttggctcaaaacgatctgaccacctctgccctgtccaccaggataagtgacacctaggacccaggaaataaatgccgatgatttgtg

SEQ ID NO: 355496 - DNA, 1611 bp, Homo sapiens
tccgcggctgcggaaggggacgcgaaccgtcctggtcccatccgagccgccgtagcgcgagtgccgcgggagttcggcagcccaggtcgccaaggcaacgggctccgctgcgggttgcgggctgcgggcgctaggctgccccggggaggcgctgcggaccggcggcccaggcacggagaggcggcgagaccgcaggagacacggggaagagacagagaggagggtaaagtgagaatcctgcccgcaccacaggtctggactgctaaccttgaatcctggtttcttaaattctgcctccgcttctgactgaggaccactggattttgaggaaactttggtcttaattcccgtactgattagtcaacagtggaaaatctgaagagatgcaagcaggaaaaagaaattaaaccagtaagatagagactgccactctctgggaaccttgctgtgtagctgagcctcagcaagtttgataatacagacacagcaggaggcctggggaggacccagcatgcccggccaccaagcagtgatgcagctggactgttccgcagctttccagagacctccatggaagcacagacttccatgggttgaagagagtttgtgtcacaattccagtccctagccctggccctgtgtgaagtagtaacaccgccctgccagtaggatatagctgctgaggaggcctgaggagcgatgcgacaggcatgatggaggtcgagtcctcctactcggacttcatctcctgtgaccggacaggccgtcggaatgcggtccctgacatccagggagactcagaggctgtgagcgtgaggaagctggctggagacatgggcgagctggcactcgagggggcagaaggacaggtggagggaagcgccccagacaaggaagctggcaaccagccccagagcagcgatgggaccacctcgtcttgaatctgaccttgtccaagaaggctggacgagagaccttctgtcccctcccagagggggaaccctggcactggcccagcagcctcttctctgagctccatgtcccagataaaccaggccagactgagaaggctccccagaggcctctgtggcctccactccgggaaagccctctgcccacacccacaggcttcacattcccaccaccttcgcaccgtgcccaggtacactttcaagacactgtaaccacaagatgttatttattgagctggcgccgggacttgggcggggcctgccctacagtgagcagcccacacaggaacgctcctctcgcgagcggcccgggcagggaccctgtcccaacaccaacacctcctctccagcccaatcttctgggtccagacctgcttgtcccttttttagaaaacacttttaaactttttaaaaattttaaaccttttttcagcagatatggagagagctgacaatcaattcacattttttaagccattttagctaaactgtcattgtgcatctctgaggttccctcatggagctccacagatccatttttagggaagggattttggctcaaaacgatctgaccacctctgccctgtccaccaggataagtgacacctaggacccaggaaataaatgccgatgatttgtg

SEQ ID NO: 355497 - DNA, 1084 bp, Homo sapiens
acaagaattcacagtgattccggttatgattttggacatacaggggggctgtgaatgcacagagaaaacagttaacctggatttctggagaattcccgtactgattagtcaacagtggaaaatctgaagagatgcaagcaggaaaaagaaattaaaccaggcctgaggagcgatgcgacaggcatgatggaggtcgagtcctcctactcggacttcatctcctgtgaccggacaggccgtcggaatgcggtccctgacatccagggagactcagaggctgtgagcgtgaggaagctggctggagacatgggcgagctggcactcgagggggcagaaggacaggtggagggaagcgccccagacaaggaagctggcaaccagccccagagcagcgatgggaccacctcgtcttgaatctgaccttgtccaagaaggctggacgagagaccttctgtcccctcccagagggggaaccctggcactggcccagcagcctcttctctgagctccatgtcccagataaaccaggccagactgagaaggctccccagaggcctctgtggcctccactccgggaaagccctctgcccacacccacaggcttcacattcccaccaccttcgcaccgtgcccaggtacactttcaagacactgtaaccacaagatgttatttattgagctggcgccgggacttgggcggggcctgccctacagtgagcagcccacacaggaacgctcctctcgcgagcggcccgggcagggaccctgtcccaacaccaacacctcctctccagcccaatcttctgggtccagacctgcttgtcccttttttagaaaacacttttaaactttttaaaaattttaaaccttttttcagcagatatggagagagctgacaatcaattcacattttttaagccattttagctaaactgtcattgtgcatctctgaggttccctcatggagctccacagatccatttttagggaagggattttggctcaaaacgatctgaccacctctgccctgtccaccaggataagtgacacctaggacccaggaaataaatgccgatgatttgtg

SEQ ID NO: 355498 - DNA, 1149 bp, Homo sapiens
aaaagtctgagcccatgttctttaaaatgttgatggtggttgtctgggtgtggaattatgagtgacttgttttgttctttgtacttttctgtgctttttgctttgttttcaataagaggcaataactgtcattttgacagaagccactgtgctggggaactggagctgtcctctctgcagaatgcatctggacttacctctgcccccttgccttctgtccccacagcctgaggagcgatgcgacaggcatgatggaggtcgagtcctcctactcggacttcatctcctgtgaccggacaggccgtcggaatgcggtccctgacatccagggagactcagaggctgtgagcgtgaggaagctggctggagacatgggcgagctggcactcgagggggcagaaggacaggtggagggaagcgccccagacaaggaagctggcaaccagccccagagcagcgatgggaccacctcgtcttgaatctgaccttgtccaagaaggctggacgagagaccttctgtcccctcccagagggggaaccctggcactggcccagcagcctcttctctgagctccatgtcccagataaaccaggccagactgagaaggctccccagaggcctctgtggcctccactccgggaaagccctctgcccacacccacaggcttcacattcccaccaccttcgcaccgtgcccaggtacactttcaagacactgtaaccacaagatgttatttattgagctggcgccgggacttgggcggggcctgccctacagtgagcagcccacacaggaacgctcctctcgcgagcggcccgggcagggaccctgtcccaacaccaacacctcctctccagcccaatcttctgggtccagacctgcttgtcccttttttagaaaacacttttaaactttttaaaaattttaaaccttttttcagcagatatggagagagctgacaatcaattcacattttttaagccattttagctaaactgtcattgtgcatctctgaggttccctcatggagctccacagatccatttttagggaagggattttggctcaaaacgatctgaccacctctgccctgtccaccaggataagtgacacctaggacccaggaaataaatgccgatgatttgtg

SEQ ID NO: 355499 - DNA, 1091 bp, Homo sapiens
gtgacacactggggacttaacatctggcctctccctctggggaacctgcacaaacaaagcaaccttcaagagcccttcacttgatgctttaagcacccatccataatggcccttaattgactcttaattatactaacaaacactatgtgtatttccatgtaaaaagatgttacagaccaggctaaagtccataggccaccaccacctcagtccagctccagctcgtcttgctccccagggcatatccactgctatcagtttggctgggccctttcacacctccttctgtgcattactttgtgtatatgtgcccaagaaaaacctctttctctcctctccagaaggacaggtggagggaagcgccccagacaaggaagctggcaaccagccccagagcagcgatgggaccacctcgtcttgaatctgaccttgtccaagaaggctggacgagagaccttctgtcccctcccagagggggaaccctggcactggcccagcagcctcttctctgagctccatgtcccagataaaccaggccagactgagaaggctccccagaggcctctgtggcctccactccgggaaagccctctgcccacacccacaggcttcacattcccaccaccttcgcaccgtgcccaggtacactttcaagacactgtaaccacaagatgttatttattgagctggcgccgggacttgggcggggcctgccctacagtgagcagcccacacaggaacgctcctctcgcgagcggcccgggcagggaccctgtcccaacaccaacacctcctctccagcccaatcttctgggtccagacctgcttgtcccttttttagaaaacacttttaaactttttaaaaattttaaaccttttttcagcagatatggagagagctgacaatcaattcacattttttaagccattttagctaaactgtcattgtgcatctctgaggttccctcatggagctccacagatccatttttagggaagggattttggctcaaaacgatctgaccacctctgccctgtccaccaggataagtgacacctaggacccaggaaataaatgccgatgatttgtg

SEQ ID NO: 355500 - DNA, 1685 bp, Homo sapiens
aacacccactaaaacctcaaagtgcttttcatttaggagacacggggaagagacagagaggagggtaaagtgagaatcctgcccgcaccacaggtctggactgctaaccttgaatcctggtttcttaaattctgcctccgcttctgactgaggaccactggattttgaggaaactttggtcttaattcccgtactgattagtcaacagtggaaaatctgaagagatgcaagcaggaaaaagaaattaaaccaggcctgaggagcgatgcgacaggcatgatggaggtcgagtcctcctactcggacttcatctcctgtgaccggacaggccgtcggaatgcggtccctgacatccagggagactcagaggctgtgagcgtgaggaagctggctggagacatgggcgagctggcactcgagggggcagaaggacaggtggagggaagcgccccagacaaggaagctggcaaccagccccagagcagcgatgggaccacctcgtcttgaatctgaccttgtccaagaaggctggacgagagaccttctgtcccctcccagagggggaaccctggcactggcccagcagcctcttctctgagctccatgtcccagataaaccaggccagactgagaaggctccccagaggcctctgtggcctccactccgggaaagccctctgcccacacccacaggcttcacattcccaccaccttcgcaccgtgcccaggtacactttcaagacactgtaaccacaagatgttatttattgagctggcgccgggacttgggcggggcctgccctacagtgagcagcccacacaggaacgctcctctcgcgagcggcccgggcagggaccctgtcccaacaccaacacctcctctccagcccaatcttctgggtccagacctgcttgtcccttttttagaaaacacttttaaactttttaaaaattttaaaccttttttcagcagatatggagagagctgacaatcaattcacattttttaagccattttagctaaactgtcattgtgcatctctgaggttccctcatggagctccacagatccatttttagggaagggattttggctcaaaacgatctgaccacctctgccctgtccaccaggataagtgacacctaggacccaggaaataaatgccgatgatttgtgaaaaaaaaaaaacaaaacacacacagaacaccacccacgcaacacaccacgcagcaaccaaacaacaccaacaaaaacaacgacacaacacaaaaaaacaagcgcgcgcggcacaaaaaaataacgcaccagaggggccacccacaaacgagcaccaaacacaagagcaatggatgaaaaaagaggggcccccacaaacacgagagcgcgctacataaagacagcaaacgagagcgagcgcattacaaacacgcgaaatcgacaggaaacaacagacaacagcaagaacgaacctgcgcggaagaaccaagacaaccaccagaccgagggggaaaaaaacagagaaagagacaacaaacaccacaccaaaagcagaaaaacagcacgccacgagaaaaacaacaacacaatagaacgaacaacagaggaaccacaacaaagagacagcacagagcccgaccagaagcaaaacatcgacacacgagaaaataggacaaacacaatacag

SEQ ID NO: 355501 - DNA, 1329 bp, Homo sapiens
  misc_feature (1322)..(1323): n is a, c, g, or t
aacacccactaaaacctcaaagtgcttttcatttaggagacacggggaagagacagagaggagggtaaagtgagaatcctgcccgcaccacaggtctggactgctaaccttgaatcctggtttcttaaattctgcctccgcttctgactgaggaccactggattttgaggaaactttggtcttaattcccgtactgattagtcaacagtggaaaatctgaagagatgcaagcaggaaaaagaaattaaaccaggcctgaggagcgatgcgacaggcatgatggaggtcgagtcctcctactcggacttcatctcctgtgaccggacaggccgtcggaatgcggtccctgacatccagggagactcagaggctgtgagcgtgaggaagctggctggagacatgggcgagctggcactcgagggggcagaaggacaggtggagggaagcgccccagacaaggaagctggcaaccagccccagagcagcgatgggaccacctcgtcttgaatctgaccttgtccaagaaggctggacgagagaccttctgtcccctcccagagggggaaccctggcactggcccagcagcctcttctctgagctccatgtcccagataaaccaggccagactgagaaggctccccagaggcctctgtggcctccactccgggaaagccctctgcccacacccacaggcttcacattcccaccaccttcgcaccgtgcccaggtacactttcaagacactgtaaccacaagatgttatttattgagctggcgccgggacttgggcggggcctgccctacagtgagcagcccacacaggaacgctcctctcgcgagcggcccgggcagggaccctgtcccaacaccaacacctcctctccagcccaatcttctgggtccagacctgcttgtcccttttttagaaaacacttttaaactttttaaaaattttaaaccttttttcagcagatatggagagagctgacaatcaattcacattttttaagccattttagctaaactgtcattgtgcatctctgaggttccctcatggagctccacagatccatttttagggaagggattttggctcaaaacgatctgaccacctctgccctgtccaccaggataagtgacacctagcagaataatgcgtattggtgacaaaaaaacaaccgcggcttttcgggtggaaaaggtataaggctgcttgtgtcggccgctttcagggatcggccctggcgtatgacggtctcccagcagcagaagtgaaaaaaaaggcccctcccttgctatattagcgtactcgggcttgggnnaaagaa

SEQ ID NO: 355502 - DNA, 1909 bp, Homo sapiens
aacacccactaaaacctcaaagtgcttttcatttaggagacacggggaagagacagagaggagggtaaagtgagaatcctgcccgcaccacaggtctggactgctaaccttgaatcctggtttcttaaattctgcctccgcttctgactgaggaccactggattttgaggaaactttggtcttaattcccgtactgattagtcaacagtggaaaatctgaagagatgcaagcaggaaaaagaaattaaaccaggcctgaggagcgatgcgacaggcatgatggaggtcgagtcctcctactcggacttcatctcctgtgaccggacaggccgtcggaatgcggtccctgacatccagggagactcagaggctgtgagcgtgaggaagctggctggagacatgggcgagctggcactcgagggggcagaaggacaggtggagggaagcgccccagacaaggaagctggcaaccagccccagagcagcgatgggaccacctcgtcttgaatctgaccttgtccaagaaggctggacgagagaccttctgtcccctcccagagggggaaccctggcactggcccagcagcctcttctctgagctccatgtcccagataaaccaggccagactgagaaggctccccagaggcctctgtggcctccactccgggaaagccctctgcccacacccacaggcttcacattcccaccaccttcgcaccgtgcccaggtacactttcaagacactgtaaccacaagatgttatttattgagctggcgccgggacttgggcggggcctgccctacagtgagcagcccacacaggaacgctcctctcgcgagcggcccgggcagggaccctgtcccaacaccaacacctcctctccagcccaatcttctgggtccagacctgcttgtcccttttttagaaaacacttttaaactttttaaaaattttaaaccttttttcagcagatatggagagagctgacaatcaattcacattttttaagccattttagctaaactgtcattgtgcatctctgaggttccctcatggagctccacagatccatttttagggaagggattttggctcaaaacgatctgaccacctctgccctgtccaccaggataagtgacacctaggacccaggaaataaatgccgatgatttgtgaaaaaaaaaaaaaaaaaaaaaaaaaaaaaaaaaaaaaaaaaaaaaaaaaaaaaaaaaaaaaaaagagggggggcggcggcaaaaaaaaaccccgggggggcccaaaaagcccacccttttgtgaaaaaggggggccccaagggggggtattaataacgaccagcggagcggaccaggccggccgactataaaacaaagcgcgcgggcgagaggaacaaaaggtgtgtacttgggtcgcaatctggagggagacgaaccccttatctcgtggggggggggaccaactaatgggcaacacacccacccacgcaaagattaatcagcggctcggagagaaaaattaacaaattgagggctccttgtcggtctggccaacccacgacggcttaatagacgcagcaaaacaaattggtccaaccaaggaaggaaacaaacttcggaaaacatttcttcccggcggcgcctgtctgtagcaaaatcaacgcggggcgcgaagagaagaacgagagaacaagaagacgacgagaacaaacaacgaggacgaaggagagagaagaaagaagaaaaagacagaagggaagagagagagaagcgaatcagaacaaatcaaagagagggaacgacacaaggagagaggagacaggagacgcggaggcaaggcagcggacaaaaagaaagaagacgacacggcgtccgagcaacaagtgaaacaggggagcagcgaggaaaaga

SEQ ID NO: 355503 - DNA, 1260 bp, Homo sapiens
aacacccactaaaacctcaaagtgcttttcatttaggagacacggggaagagacagagaggagggtaaagtgagaatcctgcccgcaccacaggtctggactgctaaccttgaatcctggtttcttaaattctgcctccgcttctgactgaggaccactggattttgaggaaactttggtcttaattcccgtactgattagtcaacagtggaaaatctgaagagatgcaagcaggaaaaagaaattaaaccaggcctgaggagcgatgcgacaggcatgatggaggtcgagtcctcctactcggacttcatctcctgtgaccggacaggccgtcggaatgcggtccctgacatccagggagactcagaggctgtgagcgtgaggaagctggctggagacatgggcgagctggcactcgagggggcagaaggacaggtggagggaagcgccccagacaaggaagctggcaaccagccccagagcagcgatgggaccacctcgtcttgaatctgaccttgtccaagaaggctggacgagagaccttctgtcccctcccagagggggaaccctggcactggcccagcagcctcttctctgagctccatgtcccagataaaccaggccagactgagaaggctccccagaggcctctgtggcctccactccgggaaagccctctgcccacacccacaggcttcacattcccaccaccttcgcaccgtgcccaggtacactttcaagacactgtaaccacaagatgttatttattgagctggcgccgggacttgggcggggcctgccctacagtgagcagcccacacaggaacgctcctctcgcgagcggcccgggcagggaccctgtcccaacaccaacacctcctctccagcccaatcttctgggtccagacctgcttgtcccttttttagaaaacacttttaaactttttaaaaattttaaaccttttttcagcagatatggagagagctgacaatcaattcacattttttaagccattttagctaaactgtcattgtgcatctctgaggttccctcatggagctccacagatccatttttagggaagggattttggctcaaaacgatctgaccacctctgccctgtccaccaggataagtgacacctaggacccaggaaataaatgccgatgatttgtgcagtttagctaaaatggcttaaaaaatgtgaattgattgtcagctctctccatatcgtcgacgcggccgcgaatttagtagta

SEQ ID NO: 355504 - DNA, 942 bp, Homo sapiens
aacacccactaaaacctcaaagtgcttttcatttaggagacacggggaagagacagagaggagggtaaagtgagaatcctgcccgcaccacaggtctggactgctaaccttgaatcctggtttcttaaattctgcctccgcttctgactgaggaccactggattttgaggaaactttggtcttaattcccgtactgattagtcaacagtggaaaatctgaagagatgcaagcaggaaaaagaaattaaaccaggcctgaggagcgatgcgacaggcatgatggaggtcgagtcctcctactcggacttcatctcctgtgaccggacaggccgtcggaatgcggtccctgacatccagggagactcagaggctgtgagcgtgaggaagctggctggagacatgggcgagctggcactcgagggggcagaaggacaggtggagggaagcgccccagacaaggaagctggcaaccagccccagagcagcgatgggaccacctcgtcttgaatctgaccttgtccaagaaggctggacgagagaccttctgtcccctcccagagggggaaccctggcactggcccagcagcctcttctctgagctccatgtcccagataaaccaggccagactgagaaggctccccagaggcctctgtggcctccactccgggaaagccctctgcccacacccacaggcttcacattcccaccaccttcgcaccgtgcccaggtacactttcaagacactgtaaccacaagatgttatttattgagctggcgccgggacttgggcggggcctgccctacagtgagcagcccacacaggaacgctcctctcgcgagcggcccgggcagggaccctgtcccaacaccaacacctcctctccgggaaagccctctgcccacacccacaggctttacattcccaccacctttactcgaaa

SEQ ID NO: 355505 - DNA, 1760 bp, Homo sapiens
aacacccactaaaacctcaaagtgcttttcatttaggagacacggggaagagacagagaggagggtaaagtgagaatcctgcccgcaccacaggtctggactgctaaccttgaatcctggtttcttaaattctgcctccgcttctgactgaggaccactggattttgaggaaactttggtcttaattcccgtactgattagtcaacagtggaaaatctgaagagatgcaagcaggaaaaagaaattaaaccaggcctgaggagcgatgcgacaggcatgatggaggtcgagtcctcctactcggacttcatctcctgtgaccggacaggccgtcggaatgcggtccctgacatccagggagactcagaggctgtgagcgtgaggaagctggctggagacatgggcgagctggcactcgagggggcagaaggacaggtggagggaagcgccccagacaaggaagctggcaaccagccccagagcagcgatgggaccacctcgtcttgaatctgaccttgtccaagaaggctggacgagagaccttctgtcccctcccagagggggaaccctggcactggcccagcagcctcttctctgagctccatgtcccagataaaccaggccagactgagaaggctccccagaggcctctgtggcctccactccgggaaagccctctgcccacacccacaggcttcacattcccaccaccttcgcaccgtgcccaggtacactttcaagacactgtaaccacaagatctgcttgtcccttttttagaaaacacttttaaactttttaaaaattttaaaccttttttcagcagatatggagagagctgacaatcaattcacattttttaagccattttagctaaactgtcattgtgcatctctgaggttccctcatggagctccacagatccatttttagggaagggattttggctcaaaacgatctgaccacctctgccctgtccaccaggataagtgacacctaggacccaggaaataaatgccgatgatttgtgaaaaaaaaaaaaaaaaaaaaaaaaaaaaaaaaaaaaaaaaaaaaaaaaaaaaaaaaaaaaaaaagagggggggcggcggcaaaaaaaaaccccgggggggcccaaaaagcccacccttttgtgaaaaaggggggccccaagggggggtattaataacgaccagcggagcggaccaggccggccgactataaaacaaagcgcgcgggcgagaggaacaaaaggtgtgtacttgggtcgcaatctggagggagacgaaccccttatctcgtggggggggggaccaactaatgggcaacacacccacccacgcaaagattaatcagcggctcggagagaaaaattaacaaattgagggctccttgtcggtctggccaacccacgacggcttaatagacgcagcaaaacaaattggtccaaccaaggaaggaaacaaacttcggaaaacatttcttcccggcggcgcctgtctgtagcaaaatcaacgcggggcgcgaagagaagaacgagagaacaagaagacgacgagaacaaacaacgaggacgaaggagagagaagaaagaagaaaaagacagaagggaagagagagagaagcgaatcagaacaaatcaaagagagggaacgacacaaggagagaggagacaggagacgcggaggcaaggcagcggacaaaaagaaagaagacgacacggcgtccgagcaacaagtgaaacaggggagcagcgaggaaaaga

SEQ ID NO: 355506 - DNA, 899 bp, Homo sapiens
tgagccgccggggatcccggggagggaggctgcggcccgatctttgtccctcagccgcgccggggacggcgcccccgacgccctttgaccccgccccgcgttcagggagagtccgttttcggctgtttattatatttgtagccattggtcgacctcattcgaaagtttcttaaaaaaaaaatcccttcttgtttgggggccagaaaataactcaaaactgtgcagaaaatttatttgtgtgtgtgactcttctggggccagagaggattgacttctttgtgcgtcagttttatcgtctgcaaaatgggaatcatggtagcacctgtctgatgacgttattacaagaattcccgtactgattagtcaacagtggaaaatctgaagagatgcaagcaggaaaaagaaattaaaccagtaagatagagactgccactctctgggaaccttgctgtgtagctgagcctcagcaagtttgataatacagacacagcaggaggcctggggaggacccagcatgcccggccaccaagcagtgatgcagctggactgttccgcagctttccagagacctccatggaagcacagacttccatgggttgaagagagtttgtgtcacaattccagtccctagccctggccctgtgtgaagtagtaacaccgccctgccagtaggatatagctgctgaggaggtaagagttttaaaaaattcataccccaaaataattatttttactcttgctgtgaagttagataccaaagagtagaatgtggtggtagaatcaagagagtcaacccaacatcactgaaaagattctgaaggtttgtatccagctgaatatccaaaacaggatgttgcttaagcatgggtaaaatgcatctggtgtatgttttagacagc

SEQ ID NO: 355507 - DNA, 1189 bp, Homo sapiens
tccgcggctgcggaaggggacgcgaaccgtcctggtcccatccgagccgccgtagcgcgagtgccgcgggagttcggcagcccaggtcgccaaggcaacgggctccgctgcgggttgcgggctgcgggcgctaggctgccccggggaggcgctgcggaccggcggcccaggcacggagaggcggcgagaccgcagaattcccgtactgattagtcaacagtggaaaatctgaagagatgcaagcaggaaaaagaaattaaaccaggcctgaggagcgatgcgacaggcatgatggaggtcgagtcctcctactcggacttcatctcctgtgaccggacaggccgtcggaatgcggtccctgacatccagggagactcagaggctgtgagcgtgaggaagctggctggagacatgggcgagctggcactcgagggggcagaaggacaggtggagggaagcgccccagacaaggaagctggcaaccagccccagagcagcgatgggaccacctcgtcttgaatctgaccttgtccaagaaggctggacgagagaccttctgtcccctcccagagggggaaccctggcactggcccagcagcctcttctctgagctccatgtcccagataaaccaggccagactgagaaggctccccagaggcctctgtggcctccactccgggaaagccctctgcccacacccacaggcttcacattcccaccaccttcgcaccgtgcccaggtacactttcaagacactgtaaccacaagatgttatttattgagctggcgccgggacttgggcggggcctgccctacagtgagcagcccacacaggaacgctcctctcgcgagcggcccgggcagggaccctgtcccaacaccaacacctcctctccagcccaatcttctgggtccagacctgcttgtcccttttttagaaaacacttttaaactttttaaaaattttaaaccttttttcagcagatatggagagagctgacaatcaattcacattttttaagccattttagctaaactgtcattgtgcatctctgaggttccctcatggagctccacagatccatttttagggaagggattttggctcaaaacgatctgaccacctctgccctgtccaccaggataagtgacacctaggacccaggaaataaatgccgatgatttgtg

SEQ ID NO: 355508 - DNA, 901 bp, Homo sapiens
tccgcggctgcggaaggggacgcgaaccgtcctggtcccatccgagccgccgtagcgcgagtgccgcgggagttcggcagcccaggtcgccaaggcaacgggctccgctgcgggttgcgggctgcgggcgctaggctgccccggggaggcgctgcggaccggcggcccaggcacggagaggcggcgagaccgcaggagacacggggaagagacagagaggagggtaaagtgagaatcctgcccgcaccacaggtctggactgctaaccttgaatcctggtttcttaaattctgcctccgcttctgactgaggaccactggattttgaggaaactttggtcttaattcccgtactgattagtcaacagtggaaaatctgaagagatgcaagcaggaaaaagaaattaaaccaggcctgaggagcgatgcgacaggcatgatggaggtcgagtcctcctactcggacttcatctcctgtgaccggacaggccgtcggaatgcggtccctgacatccagggagactcagaggctgtgagcgtgaggaagctggctggagacatgggcgagctggcactcgagggggcagagatggatctcactatgttgccctggctggtctcaaactcctaggctcaagcaatcctcctgcctcgcctcccaaagtgctgggatcacaggcatgaaccaccacgcctggcccagggggattccagttccaagccttaagacccaacaaagacacacttcagaactcaggagacaccatggtccctggttcttgtgatttctcccaactatgggtgggagacaagctcacccagggccagcctctccattccttctcacaggacccacctggtaggcctggacatgtccaggcaagaggctgcttcctgggatg

SEQ ID NO: 355509 - DNA, 1441 bp, Homo sapiens
tccgcggctgcggaaggggacgcgaaccgtcctggtcccatccgagccgccgtagcgcgagtgccgcgggagttcggcagcccaggtcgccaaggcaacgggctccgctgcgggttgcgggctgcgggcgctaggctgccccggggaggcgctgcggaccggcggcccaggcacggagaggcggcgagaccgcaggagacacggggaagagacagagaggagggtaaagtgagaatcctgcccgcaccacaggtctggactgctaaccttgaatcctggtttcttaaattctgcctccgcttctgactgaggaccactggattttgaggaaactttggtcttgtggtggtgaggaggtgatgttctggaaggaaggtacctagactttgtggtccctgccaggaagtggagagtggaaatgtggaatgcctcacactcctcaactagaattcccgtactgattagtcaacagtggaaaatctgaagagatgcaagcaggaaaaagaaattaaaccaggcctgaggagcgatgcgacaggcatgatggaggtcgagtcctcctactcggacttcatctcctgtgaccggacaggccgtcggaatgcggtccctgacatccagggagactcagaggctgtgagcgtgaggaagctggctggagacatgggcgagctggcactcgagggggcagaaggacaggtggagggaagcgccccagacaaggaagctggcaaccagccccagagcagcgatgggaccacctcgtcttgaatctgaccttgtccaagaaggctggacgagagaccttctgtcccctcccagagggggaaccctggcactggcccagcagcctcttctctgagctccatgtcccagataaaccaggccagactgagaaggctccccagaggcctctgtggcctccactccgggaaagccctctgcccacacccacaggcttcacattcccaccaccttcgcaccgtgcccaggtacactttcaagacactgtaaccacaagatgttatttattgagctggcgccgggacttgggcggggcctgccctacagtgagcagcccacacaggaacgctcctctcgcgagcggcccgggcagggaccctgtcccaacaccaacacctcctctccagcccaatcttctgggtccagacctgcttgtcccttttttagaaaacacttttaaactttttaaaaattttaaaccttttttcagcagatatggagagagctgacaatcaattcacattttttaagccattttagctaaactgtcattgtgcatctctgaggttccctcatggagctccacagatccatttttagggaagggattttggctcaaaacgatctgaccacctctgccctgtccaccaggataagtgacacctaggacccaggaaataaatgccgatgatttgtg

SEQ ID NO: 355510 - DNA, 1397 bp, Homo sapiens
tccgcggctgcggaaggggacgcgaaccgtcctggtcccatccgagccgccgtagcgcgagtgccgcgggagttcggcagcccaggtcgccaaggcaacgggctccgctgcgggttgcgggctgcgggcgctaggctgccccggggaggcgctgcggaccggcggcccaggcacggagaggcggcgagaccgcaggagacacggggaagagacagagaggagggtaaagtgagaatcctgcccgcaccacaggtctggactgctaaccttgaatcctggtttcttaaattctgcctccgcttctgactgaggaccactggattttgaggaaactttggtcttaattcccgtactgattagtcaacagtggaaaatctgaagagatgcaagcaggaaaaagaaattaaaccaggcctgaggagcgatgcgacaggcatgatggaggtcgagtcctcctactcggacttcatctcctgtgaccggacaggccgtcggaatgcggtccctgacatccagggagactcagaggctgtgagcgtgaggaagctggctggagacatgggcgagctggcactcgagggggcaggttagagccagcaggtccttggcactactgcatgccagaggccctctgccgggccccgggctagcctccaagtcctagactgcccatactttcttagagaagaaaccacatttaagtcaggcctgccccatggtcagtggcagagtccagcaatctctaggttggaagatgtttgagtctcaggccccaaggactcctctggacaggcatccgggactcttcctgtccccctgccccctagcccaggtccctccacttctcgctatccccacagctatacctggctctggccactcacagctctcacctggctgactttagcggccggcttccctgggctccctacacccatctccgcccttcctgttcagctctatgcagcagccagcagaccccatttaaaccattctgtccatcatgcttctgccaaaaaaaaaatcccccagtggcttcactgagtgaagctaagcttgtcacattgccctggggcagtcctgctgtaggccgggccctgcccaagtctcacccggtgccactcctctccctgacaccctccagctacatctacctttggtctgtttctcagtcaagcctctccaaggggccttctctgagtgctagatcagccttccccaatcacatgaccctcatcactctctgacaaggtctcaggggtctaaatgtgagcgccgggagggcagaggccttgcattctgtttggcacacagcaggtgcttggtaaccacagaccgaatgacaaaaggaaacagcatccacccacccaagtcctggctggaacacccccaccccc

SEQ ID NO: 355511 - DNA, 333 bp, Homo sapiens
gttttaggattatccatgcattgtcatttcccattaccacagataattgaaagttgactgtactggatagcactacctcagttagctgcccatcagtgtgggaaaacatctgcaatcaaacagttacagtggattaacccaactaaattgggtgtttttaaatatgtctcaattttttttattagtaagctaatgtttcaaataaacatttaaattacaattatgcttcaaattatgtatcattcataaaacaaattagttactaacagagtaattttcagtttttttatataaagtgatataaaaactacataggaaattaattgggaagta

SEQ ID NO: 355512 - DNA, 426 bp, Homo sapiens
atcttgcccaactctgaaggccccaacaacagacatcaagatggacatctctaatcttaggagtttggcgttttgagtgttcttcactctggcttgatattgtgagaatttgcatctccagtaggatggagctggtctaattttatgtgggaaaggcattggtctcattatatacataactgacatactaaacaagcacaaattgtgatgtaatcaaacacaagtgcattttttttgtctcccacttcacctttaaagtatatattttggaggaatcttttataatgttcctggatgaaaactttgcaagttcctggactttttcagtcattcttagataatagacatccctctagtaactttgagtcatgaaaatgatctcagtccagtaaccagaatgtctaggagaagacattaatgtaaact

SEQ ID NO: 355513 - DNA, 360 bp, Homo sapiens
caacttttgcttcctatctaatcaacatccaatggacggatgtttgtgtccccccaaaattcatattgttgaaatcctaacccacaaggtgaaggtattaaagtgtggggccttaaagaagcaattaggtaatcaggtcactagagtggagtcctcatgaatgtgattagtacccttagaaaaaggcgggagaaaacttgctttctatctctctgctctctgccatgtgaagatacgaggagaagactgctctctgtcaaccaagatgagggccttccccaagaacccagtcgtgttggcaccctgatcttaaacttcagcctccagagttgtaagaaataaatgtttttttgtttaagc

SEQ ID NO: 355514 - DNA, 457 bp, Homo sapiens
catactacaatcaaccaaacatcagccttcaagagatgcaccatatgactacatccacagagcatttgatgaatttctgtccataaaaaccctctgagagaagtcatgaaaacaaataagtctgttgagctttacatatgccggtcttagccaaatttgtctgaccacaagatcctttgatctccccataaaacattttctatcactgggggagctcaagtcctgtagagctcaccatgggatacactgctccatgacgactgtgtctctgcctcgtctacttccattgctcatccaggaattgagaagactttatcatttaagccatgagatggctgaggaagaaaaaaccagatgcctgtttaagtcacctttagatttccacttcttcttccactgaattgtccttgaaatttcctttggaaataaattccaaggtaataaaaggcctcagtgc

SEQ ID NO: 355515 - DNA, 685 bp, Homo sapiens
gcactttattgctagtacaggcaaaggcaaatatggtggatacatgccattgagcattatgctccttttaaaagagagaagaattagtgaaccatatacttctataaatggatctcatagagcagttatgattggaggtaaaaaccagaatgagatctagaatacaacctcaatatgtaagctgaaaatacacatgaacgacaaaagattttgtaagaaatgtatgatgaaaagctacacattaaacatatcagaatggttgctatggaaagggtgagagtgggaaatggggagagaaaggactaaaaagacccaatcaattataggaaagagaggctttgtgaagtaaatagtgataacgtattatgaacggagggatttgattccctcaatcctctgaaattatgttcttaataaaacaaaacatacacagccattgtatttttaggtgactacatacagtctccaagagggaaatgattttcccaaattacacagtgaagttaaagaagtccaggatcaattcagaggcacaatgacgtcatgatttttcattggcaactctggttcccctggtcttatggttgcaaagtggctgccacatcatgtcactttaaaatgtcttacttttaatttacataactgtattttaaaaggaagatttgaattgatacatatgtgggca

SEQ ID NO: 355516 - DNA, 2928 bp, Homo sapiens
  misc_feature (1)..(3): n is a, c, g, or t
  misc_feature (6)..(6): n is a, c, g, or t
nnnttnttttgtttttaattaatagactttatgttttttgagcaactttaggtttctaggaaaattgagcagaaagtacagcaagttcccttgtgcccccatggcctcagtttcccatgaccttagttccgctgccctcagtttcccctgctgctcctgtcttgccttggcgtgtctgtccctactgcagccaggctgatctgtcccagcgcacctcactcttgcctccagccatgggcacggcctcatcgcgtctgcgttccccgctggaggccttgtggaggccctcacccatggcagcttttgccttccctctagagtttaaagaaacccattatccccaaagagtttgggggcaaagtccccaccgtcatccgccagcgctatctcaacctgttcatcgaggagtgtctcaagttctgtacctccaaccaggaggccatagagaaggtgaggtcctggagttcctatctggccggtcgggtggggactaggggtccagggtggtccccagacatcccccggcctctcagccgcagctgtgacccggagctgcctgggagagatgcaagtccccgaccccatggcgaccccaccgctggggctccccggcaccaggcaggcatggcctcagctgggcaccgcctgtcccccaggcactgaacgaggagaaggtggcctatgaccgcagccccagcaagaacatctacctgaatgtggccgtgaacaccctcaagaagctcaggggcctggcccccagcgctgtgcccggcctcagcagtgagtcctggcgggtgggcgggggaggctcagggttgctcttggggtggcagctgggctgggaccctcgctgggaccttcacagccctgagctcagccacagtctcagacaaaaggaaagcgcggtgctgtgggggggctgcctgctgcctggttcccaggcttctgtgtaggacggacctggccctggtgtcctcgctgtcagccgccttcctccgctgagtggggtctccaagccgagccgaggggccgcctgctaatggagctgcggcagcttcttcaaagcaggaggcccagggctgggcgagctccatgcattaagctctggggaggaagaaagcggagacctgggcgtttcattgcagcctctccaggctgcattaagctatcaccggcccctgcccccgtccccgcctgcattagcactcggaggggccctgggttggcgtcgcaggctgggtggcccatgaaggctcaaagccctcgaaagccattagatcccccgtgctgttctccccgcccttcccccttcgcttgaggggaggggacgaagactttgggtgtggggcctccgtgcagctctggggcctgcagagctggcggctgccctgcgtccctggctcaccgcatgtctgcctctcctgttcgggtcaggctggaacccggggtcagtggggtgctgtcccagaaagggggagttgaggcagaggtctgaggagggcagggtgggtgggagagcaggcggggcaggggtctgagccagctacttcacaccctcctcccctccctcccttccttccagaaaccagtggccgcagggttgtgtcccacgaggtggtgttggggggcaggttggccgccaagaccagcttctcgctcagccgtccaagcagcccccgggtggaggacctgaaaggtaaggccctgcccctgctctgccacacggtgcttcgtgggcctctgccggcccagcccctgctgtgccacacggtgcttcgtgggcccctgccggcccagccgcctttcccggtggtgtctaccgccccgtgggccatcccaggcaggggctgaccactgtgcctgtccacaggggctgccctgtacagccgcctcagggagtacctgctcacccaggaccagctcaaggagaacggctaccccttcccgcacccagagcggcccgggggcgcaatcatcttcacagctgaggagaagaggcccaaggactgtgagtcgctggcctgcgacggcctaggtgggcaggtgcgggatgtgggcaaggccgggcatgcgggccccagcgtgagcctcagcttccacctgggtccccacccacagcttcctgcaggacctgctgccgctgtggcaccgagtacctcgtgtcctcttcaggccgctgcatccgggacgaggagtgttattaccactggggacggctgcgccggaaccggggtaaggccttacccgggtccttccccttcccacccatggcccccggaacctgggccctcccttgaggcccccagaactggggtaaggctttacccaggccctccatcccactcagggtccctgggctgcaccgtctttggcagagccggggctagcccttggcctcattttctctccacctgttctttatgcaaaagtaagacaagagctttcccatgacaaggttcaaatgccaccacctgaaaggccctgtgtccctgccttcctgtgcccttggtccatggaaatgtggaggttgctggccccaggagcggaggggcttgtcccacccttggcctggtggttctattcaatcccccaggcaaccacgcagccacgctcagggcacatggccagccttgcacagccctgtggcggcccctaaagccatcgcctcagggatacctggagggtgctgcccggggcagcgctgccaagaggcctctgcagagggcactggtctccctggatccaggcctgggcgtcctggctgccacacgactgccggggcctggtctgcttccagctccaccaagaggctgaggcctcctgtcctcagtcctcactccctagtagggctcggtagatgcaggtggtcagtgccccgggggctgtggagtgggcctggccgggccctgactgtgtgtctgtgtcccc

SEQ ID NO: 355517 - DNA, 4761 bp, Homo sapiens
ggagcaagatggcggcggcggggtccgtgaggcgcgggcggcggcgaccgcggcgccagtgagggggccctggggcccgggcggctccgggccggggccccgccgcgggacggaccatgctacgctccactggcttcttccgggccattgactgcccctattggtctggggcgcccggggggccctgccggcggccctactgccacttccggcaccgcggggcccggggccccggcgcgcccggtgacggcggagaggcgccccccgcagcagtgaaggctgcaccagacgcatctgtacctgccctgtgcggtctgtctgtggcacgggttctgaggattccgagtctgaaggtggtggtgttgaagctgcatgggatggttgcgaaactgctctgcaagatctcggcctgtccatggccccctcagtgacggggctgggttacgacccctacaaccctgagctgcccaagccccccgcgcagagggagaatggcaccctgggcctgggggaggagccgcgcccggatgtgctggagttggagctggtcaaccaggccatcgaggccgtgcgcagtgaggtggagctggagcagcggcgctaccgggagctgctggagacgacccgtgagcaccgctccgccgaggcccccgccctggcgccccgcggccccaacgccagccccactgtgggcccggacgaggatgccttcccactggccttcgactacagccccggcagccacggcctattaagccctgatgccggctaccagcccaccccactggccgcccctgccgagccgggcagcaagtactcgctggcgtccctggacaggggtcagggcagaggtggagggggtggcggtgccctggaatacgtccccaaggctgtgagccagccccggcggcacagccgccccgttcccagtggcaagtacgtggtggacaactccaggccacccacagacctggagtatgaccctctctccaactactcggcccggcacctcagcagggccagctcccgggatgagcgggccgccaagcggccccggggctcccgcggcagtgagccctacacacctgctcccaagaagctctgtgacccctttggcagttgcgatgcaaggttctcagactcagaagatgaggccgccacggtcccaggtaacgagcccaccacggccagcacccccaaagccagggccgaccctgagatcaaggccaccgggcagccaccctccaaagagggcctggaggccgaggggggcggcctgcgggagaccaaggagacggccgtgcagtgcgacgtgggggacctccagccgcccccagccaagcccgcctccccagcccaggtccagtcctcacaggatgggggctgccccaaggagggaaaacccaagaagaaaaaaaccggggccccacctgcccccagctgcaaagacggggcccaggggaaggacaagaccaaggacaagggccgagggcggcctgtggagaagccccgtgcggacaagaagggcccgcaggccagcagcccccggcgcaaggcagagcggccggaagggaccaagaagaagccatcttcggccactcctgtggccacctcagggaaagggaggcctgaccggccagcgcggcggccgagccccacaagcggggactcccgaccggcggccggcagaggcccaccccgccccctccagctgcccgacaggaagagcaccaaggccccgtcggggaagctagtggagcggaaagcccgctcactagacgagggcgcctcccaggacgcccccaagctgaagaagcgggccctgagccacgccgacctctttggggacgagagtgaggacgaggccgcagggccaggggtgccgagcgtgtggccctctgccctccccagcctcagctcggactcagactccgactcagactccagcctgggcttcccggaggcgcaggggccgcccaagcggctcaaggcctccccgcccccctcccccgccccatcctcctcctcctcctcctcctcctccacctccagcgcgggggcggatgtggactactcggccctggagaaggaggtggactttgactccgaccccatggaggagtgcctgcggatcttcaacgagtccaccagcgtcaagacggaggacagaggccggctggcccggcagccccccaaggaagagaagagtgaggagaaggggctttcgggtctgaccactctgttccccgggcagaagaggaggatctcccacctttccaagcaaggccaggaggtggagcccccgaggaggggtcccgcggtgcccccggcccggcccccgacggcgcaggaggtgtgctacctgcgggcccagcaggcgcagagggcatcggcgagcttgctgcaggcccccgccaggctggcagagaagtcgccctccgtccacatttccgcccctggcgagaagaggaggatcgcccacatccccaacccccgcctggctgcagcccccacaggtgccaagaggacccttgcggccagcggcagccagtcctccaacggccctgagccaggtggccagcagctgaaaacacgcacattgtcggggatggcgtccaagactaccaccaccatcatccctaagcgaatcgcccacagtccatccttacagagtttaaagaaacccattatccccaaagagtttgggggcaaagtccccaccgtcatccgccagcgctatctcaacctgttcatcgaggagtgtctcaagttctgtacctccaaccaggaggccatagagaaggcactgaacgaggagaaggtggcctatgaccgcagccccagcaagaacatctacctgaatgtggccgtgaacaccctcaagaagctcaggggcctggcccccagcgctgtgcccggcctcagcaaaaccagtggccgcagggttgtgtcccacgaggtggtgttggggggcaggttggccgccaagaccagcttctcgctcagccgtccaagcagcccccgggtggaggacctgaaaggggctgccctgtacagccgcctcagggagtacctgctcacccaggaccagctcaaggagaacggctaccccttcccgcacccagagcggcccgggggcgcaatcatcttcacagctgaggagaagaggcccaaggactcttcctgcaggacctgctgccgctgtggcaccgagtacctcgtgtcctcttcaggccgctgcatccgggacgaggagtgttattaccactggggacggctgcgccggaaccgggtggccggaggctgggagacccagtacatgtgctgctcggctgccgccggctctgtcggctgccaagtcgcaaagcaacacgtgcaggatggccggaaggagcgccttgagggcttcgtgaagacctttgagaaagagctctcaggagacacccacccggggatctacgccctggactgcgagatgtcctacaccacatatggcctggagctgacgcgcgtcacggtggtcgacacggacgtgcacgtggtttatgacaccttcgtgaagcctgacaacgagatcgtggactacaacaccaggttttcgggggtgacggaggctgaccttgccgacacaagtgtcacgctgcgtgacgtccaggccgttctgctgagcatgttcagcgctgacaccatcctcatcggacacagcctggagagcgacctcctggccctgaaggtcatccacagcaccgtggtggacacgtctgtgctcttcccccaccgcctgggcctcccctacaagcggtccctgcggaacctcatggccgactacctcagacagatcatccaggacaatgtggatgggcacagctccagcgaggacgccggcgcctgcatgcacctggtgatctggaaggttcgagaagacgccaagaccaagcgatgacgcctgcccgcctcccacccgcctctcctgccgtcccgctggtccttagccccatgcctcttccaaaacagtgcaataaatctccggtaacccgtccacctggccgaggcagcccagagcagcgggatgagctggcggccagagaacgcccagcccagcccacccccgctcacgtcctgccgcacccctccgccggtccccaccctctgccccccagccctctggcgtctctagaaactgctgctgatggagaccaggacagagcccgcccccacccggcccgcagcccctcctgcccctcctgccaggccctccctcccgggtggtggccggcacctctgctcctcacgtgggtcgcggggcgggcttgtcccaggtttgtttgagacagtctttttttattttgtattgttatttttattatttttaatttaaacctgatgacttgcacagcatctttcccaccgggaagagcgggcctgctgccttccctcctgcggggtgggggtgggacagaccccagtgggggccagggccacactcagcgcagtgtgggctggacccgcctctgtgctccaggggctggccggtcttcgggggcgccggcttccaccactcgccgccccacccctgcactccgtgacctctgagaacccagctggcccctcgttagccccagggtctgccgtctagagggagcccaccggcctccggacactgtcttcccgctagagccccgtcctcctctgcggggctctccggacccccttccccctcacctccaggcagggacagaataaatgtttgtatggatttta

SEQ ID NO: 355518 - DNA, 4618 bp, Homo sapiens
ggagcaagatggcggcggcggggtccgtgaggcgcgggcggcggcgaccgcggcgccagtgagggggccctggggcccgggcggctccgggccggggccccgccgcgggacggaccatgctacgctccactggcttcttccgggccattgactgcccctattggtctggggcgcccggggggccctgccggcggccctactgccacttccggcaccgcggggcccggggccccggcgcgcccggtgacggcggagaggcgccccccgcagcagggctgggttacgacccctacaaccctgagctgcccaagccccccgcgcagagggagaatggcaccctgggcctgggggaggagccgcgcccggatgtgctggagttggagctggtcaaccaggccatcgaggccgtgcgcagtgaggtggagctggagcagcggcgctaccgggagctgctggagacgacccgtgagcaccgctccgccgaggcccccgccctggcgccccgcggccccaacgccagccccactgtgggcccggacgaggatgccttcccactggccttcgactacagccccggcagccacggcctattaagccctgatgccggctaccagcccaccccactggccgcccctgccgagccgggcagcaagtactcgctggcgtccctggacaggggtcagggcagaggtggagggggtggcggtgccctggaatacgtccccaaggctgtgagccagccccggcggcacagccgccccgttcccagtggcaagtacgtggtggacaactccaggccacccacagacctggagtatgaccctctctccaactactcggcccggcacctcagcagggccagctcccgggatgagcgggccgccaagcggccccggggctcccgcggcagtgagccctacacacctgctcccaagaagctctgtgacccctttggcagttgcgatgcaaggttctcagactcagaagatgaggccgccacggtcccaggtaacgagcccaccacggccagcacccccaaagccagggccgaccctgagatcaaggccaccgggcagccaccctccaaagagggcctggaggccgaggggggcggcctgcgggagaccaaggagacggccgtgcagtgcgacgtgggggacctccagccgcccccagccaagcccgcctccccagcccaggtccagtcctcacaggatgggggctgccccaaggagggaaaacccaagaagaaaaaaaccggggccccacctgcccccagctgcaaagacggggcccaggggaaggacaagaccaaggacaagggccgagggcggcctgtggagaagccccgtgcggacaagaagggcccgcaggccagcagcccccggcgcaaggcagagcggccggaagggaccaagaagaagccatcttcggccactcctgtggccacctcagggaaagggaggcctgaccggccagcgcggcggccgagccccacaagcggggactcccgaccggcggccggcagaggcccaccccgccccctccagctgcccgacaggaagagcaccaaggccccgtcggggaagctagtggagcggaaagcccgctcactagacgagggcgcctcccaggacgcccccaagctgaagaagcgggccctgagccacgccgacctctttggggacgagagtgaggacgaggccgcagggccaggggtgccgagcgtgtggccctctgccctccccagcctcagctcggactcagactccgactcagactccagcctgggcttcccggaggcgcaggggccgcccaagcggctcaaggcctccccgcccccctcccccgccccatcctcctcctcctcctcctcctcctccacctccagcgcgggggcggatgtggactactcggccctggagaaggaggtggactttgactccgaccccatggaggagtgcctgcggatcttcaacgagtccaccagcgtcaagacggaggacagaggccggctggcccggcagccccccaaggaagagaagagtgaggagaaggggctttcgggtctgaccactctgttccccgggcagaagaggaggatctcccacctttccaagcaaggccaggaggtggagcccccgaggaggggtcccgcggtgcccccggcccggcccccgacggcgcaggaggtgtgctacctgcgggcccagcaggcgcagagggcatcggcgagcttgctgcaggcccccgccaggctggcagagaagtcgccctccgtccacatttccgcccctggcgagaagaggaggatcgcccacatccccaacccccgcctggctgcagcccccacaggtgccaagaggacccttgcggccagcggcagccagtcctccaacggccctgagccaggtggccagcagctgaaaacacgcacattgtcggggatggcgtccaagactaccaccaccatcatccctaagcgaatcgcccacagtccatccttacagcttttgccttccctctagagtttaaagaaacccattatccccaaagagtttgggggcaaagtccccaccgtcatccgccagcgctatctcaacctgttcatcgaggagtgtctcaagttctgtacctccaaccaggaggccatagagaaggcactgaacgaggagaaggtggcctatgaccgcagccccagcaagaacatctacctgaatgtggccgtgaacaccctcaagaagctcaggggcctggcccccagcgctgtgcccggcctcagcaaaaccagtggccgcagggttgtgtcccacgaggtggtgttggggggcaggttggccgccaagaccagcttctcgctcagccgtccaagcagcccccgggtggaggacctgaaaggggctgccctgtacagccgcctcagggagtacctgctcacccaggaccagctcaaggagaacggctaccccttcccgcacccagagcggcccgggggcgcaatcatcttcacagctgaggagaagaggcccaaggactcttcctgcaggacctgctgccgctgtggcaccgagtacctcgtgtcctcttcaggccgctgcatccgggacgaggagtgttattaccactggggacggctgcgccggaaccgggtggccggaggctgggagacccagtacatgtgctgctcggctgccgccggctctgtcggctgccaagtcgcaaagcaacacgtgcaggatggccggaaggagcgccttgagggcttcgtgaagacctttgagaaagagctctcaggagacacccacccggggatctacgccctggactgcgagatgtcctacaccacatatggcctggagctgacgcgcgtcacggtggtcgacacggacgtgcacgtggtttatgacaccttcgtgaagcctgacaacgagatcgtggactacaacaccaggttttcgggggtgacggaggctgaccttgccgacacaagtgtcacgctgcgtgacgtccaggccgttctgctgagcatgttcagcgctgacaccatcctcatcggacacagcctggagagcgacctcctggccctgaaggtcatccacagcaccgtggtggacacgtctgtgctcttcccccaccgcctgggcctcccctacaagcggtccctgcggaacctcatggccgactacctcagacagatcatccaggacaatgtggatgggcacagctccagcgaggacgccggcgcctgcatgcacctggtgatctggaaggttcgagaagacgccaagaccaagcgatgacgcctgcccgcctcccacccgcctctcctgccgtcccgctggtccttagccccatgcctcttccaaaacagtgcaataaatctccggtaacccgtccacctggccgaggcagcccagagcagcgggatgagctggcggccagagaacgcccagcccagcccacccccgctcacgtcctgccgcacccctccgccggtccccaccctctgccccccagccctctggcgtctctagaaactgctgctgatggagaccaggacagagcccgcccccacccggcccgcagcccctcctgcccctcctgccaggccctccctcccgggtggtggccggcacctctgctcctcacgtgggtcgcggggcgggcttgtcccaggtttgtttgagacagtctttttttattttgtattgttatttttattatttttaatttaaacctgatgacttgcacagcatctttcccaccgggaagagcgggcctgctgccttccctcctgcggggtgggggtgggacagaccccagtgggggccagggccacactcagcgcagtgtgggctggacccgcctctgtgctccaggggctggccggtcttcgggggcgccggcttccaccactcgccgccccacccctgcactccgtgacctctgagaacccagctggcccctcgttagccccagggtctgccgtctagagggagcccaccggcctccggacactgtcttcccgctagagccccgtcctcctctgcggggctctccggacccccttccccctcacctccaggcagggacagaataaatgtttgtatggatttta

SEQ ID NO: 355519 - DNA, 4755 bp, Homo sapiens
ggagcaagatggcggcggcggggtccgtgaggcgcgggcggcggcgaccgcggcgccagtgagggggccctggggcccgggcggctccgggccggggccccgccgcgggacggaccatgctacgctccactggcttcttccgggccattgactgcccctattggtctggggcgcccggggggccctgccggcggccctactgccacttccggcaccgcggggcccggggccccggcgcgcccggtgacggcggagaggcgccccccgcagcagggctgggttacgacccctacaaccctgagctgcccaagccccccgcgcagagggagaatggcaccctgggcctgggggaggagccgcgcccggatgtgctggagttggagctggtcaaccaggccatcgaggccgtgcgcagtgaggtggagctggagcagcggcgctaccgggagctgctggagacgacccgtgagcaccgctccgccgaggcccccgccctggcgccccgcggccccaacgccagccccactgtgggcccggacgaggatgccttcccactggccttcgactacagccccggcagccacggcctattaagccctgatgccggctaccagcccaccccactggccgcccctgccgagccgggcagcaagtactcgctggcgtccctggacaggggtcagggcagaggtggagggggtggcggtgccctggaatacgtccccaaggctgtgagccagccccggcggcacagccgccccgttcccagtggcaagtacgtggtggacaactccaggccacccacagacctggagtatgaccctctctccaactactcggcccggcacctcagcagggccagctcccgggatgagcgggccgccaagcggccccggggctcccgcggcagtgagccctacacacctgctcccaagaagctctgtgacccctttggcagttgcgatgcaaggttctcagactcagaagatgaggccgccacggtcccaggtaacgagcccaccacggccagcacccccaaagccagggccgaccctgagatcaaggccaccgggcagccaccctccaaagagggcctggaggccgaggggggcggcctgcgggagaccaaggagacggccgtgcagtgcgacgtgggggacctccagccgcccccagccaagcccgcctccccagcccaggtccagtcctcacaggatgggggctgccccaaggagggaaaacccaagaagaaaaaaaccggggccccacctgcccccagctgcaaagacggggcccaggggaaggacaagaccaaggacaagggccgagggcggcctgtggagaagccccgtgcggacaagaagggcccgcaggccagcagcccccggcgcaaggcagagcggccggaagggaccaagaagaagccatcttcggccactcctgtggccacctcagggaaagggaggcctgaccggccagcgcggcggccgagccccacaagcggggactcccgaccggcggccggcagaggcccaccccgccccctccagctgcccgacaggaagagcaccaaggccccgtcggggaagctagtggagcggaaagcccgctcactagacgagggcgcctcccaggacgcccccaagctgaagaagcgggccctgagccacgccgacctctttggggacgagagtgaggacgaggccgcagggccaggggtgccgagcgtgtggccctctgccctccccagcctcagctcggactcagactccgactcagactccagcctgggcttcccggaggcgcaggggccgcccaagcggctcaaggcctccccgcccccctcccccgccccatcctcctcctcctcctcctcctcctccacctccagcgcgggggcggatgtggactactcggccctggagaaggaggtggactttgactccgaccccatggaggagtgcctgcggatcttcaacgagtccaccagcgtcaagacggaggacagaggccggctggcccggcagccccccaaggaagagaagagtgaggagaaggggctttcgggtctgaccactctgttccccgggcagaagaggaggatctcccacctttccaagcaaggccaggaggtggagcccccgaggaggggtcccgcggtgcccccggcccggcccccgacggcgcaggaggtgtgctacctgcgggcccagcaggcgcagagggcatcggcgagcttgctgcaggcccccgccaggctggcagagaagtcgccctccgtccacatttccgcccctggcgagaagaggaggatcgcccacatccccaacccccgcctggctgcagcccccacaggtgccaagaggacccttgcggccagcggcagccagtcctccaacggccctgagccaggtggccagcagctgaaaacacgcacattgtcggggatggcgtccaagactaccaccaccatcatccctaagcgaatcgcccacagtccatccttacagagtttaaagaaacccattatccccaaagagtttgggggcaaagtccccaccgtcatccgccagcgctatctcaacctgttcatcgaggagtgtctcaagttctgtacctccaaccaggaggccatagagaaggcactgaacgaggagaaggtggcctatgaccgcagccccagcaagaacatctacctgaatgtggccgtgaacaccctcaagaagctcaggggcctggcccccagcgctgtgcccggcctcagcaaaaccagtggccgcagggttgtgtcccacgaggtggtgttggggggcaggttggccgccaagaccagcttctcgctcagccgtccaagcagcccccgggtggaggacctgaaaggggctgccctgtacagccgcctcagggagtacctgctcacccaggaccagctcaaggagaacggctaccccttcccgcacccagagcggcccgggggcgcaatcatcttcacagctgaggagaagaggcccaaggactcttcctgcaggacctgctgccgctgtggcaccgagtacctcgtgtcctcttcaggccgctgcatccgggacgaggagtgttattaccactggggacggctgcgccggaaccgggtggccggaggctgggagacccagtacatgtgctgctcggctgccgccggctctgtcggctgccaagtcgcaaagcaacacgtgcaggatggccggaaggagcgccttgagggcttcgtgaagacctttgagaaagagctctcaggagacacccacccggggatctacgccctggactgcgagatgtcctacaccacatatggcctggagctgacgcgcgtcacggtggtcgacacggacgtgcacgtggtttatgacaccttcgtgaagcctgacaacgagatcgtggactacaacaccaggttttcgggggtgacggaggctgaccttgccgacacaagtgtcacgctgcgtgacgtccaggccgttctgctgagcatgttcagcgctgacaccatcctcatcggacacagcctggagagcgacctcctggccctgaaggtgccctgccggcccgggtcccgcgcggttctccagcaggacctgcgcaggccccacgtgcgctgatctctgccgctgcccacaggtcatccacagcaccgtggtggacacgtctgtgctcttcccccaccgcctgggcctcccctacaagcggtccctgcggaacctcatggccgactacctcagacagatcatccaggacaatggtgagtgccggtgcctgccctggggccgtccctgcgcaggggccgggtgctcaccgcatctgccccgcagtggatgggcacagctccagcgaggacgccggcgcctgcatgcacctggtgatctggaaggttcgagaagacgccaagaccaagcgatgacgcctgcccgcctcccacccgcctctcctgccgtcccgctggtccttagccccatgcctcttccaaaacagtgcaataaatctccggtaacccgtccacctggccgaggcagcccagagcagcgggatgagctggcggccagagaacgcccagcccagcccacccccgctcacgtcctgccgcacccctccgccggtccccaccctctgccccccagccctctggcgtctctagaaactgctgctgatggagaccaggacagagcccgcccccacccggcccgcagcccctcctgcccctcctgccaggccctccctcccgggtggtggccggcacctctgctcctcacgtgggtcgcggggcgggcttgtcccaggtttgtttgagacagtctttttttattttgtattgttatttttattatttttaatttaaacctgatgacttgcacagcatctttcccaccgggaagagcgggcctgctgccttccctcctgcggggtgggggtgggacagaccccagtgggggccagggccacactcagcgcagtgtgggctggacccgcctctgtgctccaggggctggccggtcttcgggggcgccggcttccaccactcgccgccccacccctgcactccgtgacctctgagaacccagctggcccctcgttagccccagggtctgccgtctagagggagcccaccggcctccggacactgtcttcccgctagagccccgtcctcctctgcggggctctccggacccccttccccctcacctccaggcagggacagaataaatgtttgtatggatttta

SEQ ID NO: 355520 - DNA, 4685 bp, Homo sapiens
ggagcaagatggcggcggcggggtccgtgaggcgcgggcggcggcgaccgcggcgccagtgagggggccctggggcccgggcggctccgggccggggccccgccgcgggacggaccatgctacgctccactggcttcttccgggccattgactgcccctattggtctggggcgcccggggggccctgccggcggccctactgccacttccggcaccgcggggcccggggccccggcgcgcccggtgacggcggagaggcgccccccgcagcagggctgggttacgacccctacaaccctgagctgcccaagccccccgcgcagagggagaatggcaccctgggcctgggggaggagccgcgcccggatgtgctggagttggagctggtcaaccaggccatcgaggccgtgcgcagtgaggtggagctggagcagcggcgctaccgggagctgctggagacgacccgtgagcaccgctccgccgaggcccccgccctggcgccccgcggccccaacgccagccccactgtgggcccggacgaggatgccttcccactggccttcgactacagccccggcagccacggcctattaagccctgatgccggctaccagcccaccccactggccgcccctgccgagccgggcagcaagtactcgctggcgtccctggacaggggtcagggcagaggtggagggggtggcggtgccctggaatacgtccccaaggctgtgagccagccccggcggcacagccgccccgttcccagtggcaagtacgtggtggacaactccaggccacccacagacctggagtatgaccctctctccaactactcggcccggcacctcagcagggccagctcccgggatgagcgggccgccaagcggccccggggctcccgcggcagtgagccctacacacctgctcccaagaagctctgtgacccctttggcagttgcgatgcaaggttctcagactcagaagatgaggccgccacggtcccaggtaacgagcccaccacggccagcacccccaaagccagggccgaccctgagatcaaggccaccgggcagccaccctccaaagagggcctggaggccgaggggggcggcctgcgggagaccaaggagacggccgtgcagtgcgacgtgggggacctccagccgcccccagccaagcccgcctccccagcccaggtccagtcctcacaggatgggggctgccccaaggagggaaaacccaagaagaaaaaaaccggggccccacctgcccccagctgcaaagacggggcccaggggaaggacaagaccaaggacaagggccgagggcggcctgtggagaagccccgtgcggacaagaagggcccgcaggccagcagcccccggcgcaaggcagagcggccggaagggaccaagaagaagccatcttcggccactcctgtggccacctcagggaaagggaggcctgaccggccagcgcggcggccgagccccacaagcggggactcccgaccggcggccggcagaggcccaccccgccccctccagctgcccgacaggaagagcaccaaggccccgtcggggaagctagtggagcggaaagcccgctcactagacgagggcgcctcccaggacgcccccaagctgaagaagcgggccctgagccacgccgacctctttggggacgagagtgaggacgaggccgcagggccaggggtgccgagcgtgtggccctctgccctccccagcctcagctcggactcagactccgactcagactccagcctgggcttcccggaggcgcaggggccgcccaagcggctcaaggcctccccgcccccctcccccgccccatcctcctcctcctcctcctcctcctccacctccagcgcgggggcggatgtggactactcggccctggagaaggaggtggactttgactccgaccccatggaggagtgcctgcggatcttcaacgagtccaccagcgtcaagacggaggacagaggccggctggcccggcagccccccaaggaagagaagagtgaggagaaggggctttcgggtctgaccactctgttccccgggcagaagaggaggatctcccacctttccaagcaaggccaggaggtggagcccccgaggaggggtcccgcggtgcccccggcccggcccccgacggcgcaggaggtgtgctacctgcgggcccagcaggcgcagagggcatcggcgagcttgctgcaggcccccgccaggctggcagagaagtcgccctccgtccacatttccgcccctggcgagaagaggaggatcgcccacatccccaacccccgcctggctgcagcccccacaggtgccaagaggacccttgcggccagcggcagccagtcctccaacggccctgagccaggtggccagcagctgaaaacacgcacattgtcggggatggcgtccaagactaccaccaccatcatccctaagcgaatcgcccacagtccatccttacagagtttaaagaaacccattatccccaaagagtttgggggcaaagtccccaccgtcatccgccagcgctatctcaacctgttcatcgaggagtgtctcaagttctgtacctccaaccaggaggccatagagaaggcactgaacgaggagaaggtggcctatgaccgcagccccagcaagaacatctacctgaatgtggccgtgaacaccctcaagaagctcaggggcctggcccccagcgctgtgcccggcctcagcaaaaccagtggccgcagggttgtgtcccacgaggtggtgttggggggcaggttggccgccaagaccagcttctcgctcagccgtccaagcagcccccgggtggaggacctgaaaggggctgccctgtacagccgcctcagggagtacctgctcacccaggaccagctcaaggagaacggctaccccttcccgcacccagagcggcccgggggcgcaatcatcttcacagctgaggagaagaggcccaaggactcttcctgcaggacctgctgccgctgtggcaccgagtacctcgtgtcctcttcaggccgctgcatccgggacgaggagtgttattaccactggggacggctgcgccggaaccgggtggccggaggctgggagacccagtacatgtgctgctcggctgccgccggctctgtcggctgccaagtcgcaaagcaacacgtgcaggatggccggaaggagcgccttgagggcttcgtgaagacctttgagaaagagctctcaggagacacccacccggggatctacgccctggactgcgagatgtcctacaccacatatggcctggagctgacgcgcgtcacggtggtcgacacggacgtgcacgtggtttatgacaccttcgtgaagcctgacaacgagatcgtggactacaacaccaggttttcgggggtgacggaggctgaccttgccgacacaagtgtcacgctgcgtgacgtccaggccgttctgctgagcatgttcagcgctgacaccatcctcatcggacacagcctggagagcgacctcctggccctgaaggtgccctgccggcccgggtcccgcgcggttctccagcaggacctgcgcaggccccacgtgcgctgatctctgccgctgcccacaggtcatccacagcaccgtggtggacacgtctgtgctcttcccccaccgcctgggcctcccctacaagcggtccctgcggaacctcatggccgactacctcagacagatcatccaggacaatgtggatgggcacagctccagcgaggacgccggcgcctgcatgcacctggtgatctggaaggttcgagaagacgccaagaccaagcgatgacgcctgcccgcctcccacccgcctctcctgccgtcccgctggtccttagccccatgcctcttccaaaacagtgcaataaatctccggtaacccgtccacctggccgaggcagcccagagcagcgggatgagctggcggccagagaacgcccagcccagcccacccccgctcacgtcctgccgcacccctccgccggtccccaccctctgccccccagccctctggcgtctctagaaactgctgctgatggagaccaggacagagcccgcccccacccggcccgcagcccctcctgcccctcctgccaggccctccctcccgggtggtggccggcacctctgctcctcacgtgggtcgcggggcgggcttgtcccaggtttgtttgagacagtctttttttattttgtattgttatttttattatttttaatttaaacctgatgacttgcacagcatctttcccaccgggaagagcgggcctgctgccttccctcctgcggggtgggggtgggacagaccccagtgggggccagggccacactcagcgcagtgtgggctggacccgcctctgtgctccaggggctggccggtcttcgggggcgccggcttccaccactcgccgccccacccctgcactccgtgacctctgagaacccagctggcccctcgttagccccagggtctgccgtctagagggagcccaccggcctccggacactgtcttcccgctagagccccgtcctcctctgcggggctctccggacccccttccccctcacctccaggcagggacagaataaatgtttgtatggatttta

SEQ ID NO: 355521 - DNA, 4003 bp, Homo sapiens
ggagcaagatggcggcggcggggtccgtgaggcgcgggcggcggcgaccgcggcgccagtgagggggccctggggcccgggcggctccgggccggggccccgccgcgggacggaccatgctacgctccactggcttcttccgggccattgactgcccctattggtctggggcgcccggggggccctgccggcggccctactgccacttccggcaccgcggggcccggggccccggcgcgcccggtgacggcggagaggcgccccccgcagcagggctgggttacgacccctacaaccctgagctgcccaagccccccgcgcagagggagaatggcaccctgggcctgggggaggagccgcgcccggatgtgctggagttggagctggtcaaccaggccatcgaggccgtgcgcagtgaggtggagctggagcagcggcgctaccgggagctgctggagacgacccgtgagcaccgctccgccgaggcccccgccctggcgccccgcggccccaacgccagccccactgtgggcccggacgaggatgccttcccactggccttcgactacagccccggcagccacggcctattaagccctgatgccggctaccagcccaccccactggccgcccctgccgagccgggcagcaagtactcgctggcgtccctggacaggggtcagggcagaggtggagggggtggcggtgccctggaatacgtccccaaggctgtgagccagccccggcggcacagccgccccgttcccagtggcaagtacgtggtggacaactccaggccacccacagacctggagtatgaccctctctccaactactcggcccggcacctcagcagggccagctcccgggatgagcgggccgccaagcggccccggggctcccgcggcagtgagccctacacacctgctcccaagaagctctgtgacccctttggcagttgcgatgcaaggttctcagactcagaagatgaggccgccacggtcccaggtaacgagcccaccacggccagcacccccaaagccagggccgaccctgagatcaaggccaccgggcagccaccctccaaagagggcctggaggccgaggggggcggcctgcgggagaccaaggagacggccgtgcagtgcgacgtgggggacctccagccgcccccagccaagcccgcctccccagcccaggtccagtcctcacaggatgggggctgccccaaggagggaaaacccaagaagaaaaaaaccggggccccacctgcccccagctgcaaagacggggcccaggggaaggacaagaccaaggacaagggccgagggcggcctgtggagaagccccgtgcggacaagaagggcccgcaggccagcagcccccggcgcaaggcagagcggccggaagggaccaagaagaagccatcttcggccactcctgtggccacctcagggaaagggaggcctgaccggccagcgcggcggccgagccccacaagcggggactcccgaccggcggccggcagaggcccaccccgccccctccagctgcccgacaggaagagcaccaaggccccgtcggggaagctagtggagcggaaagcccgctcactagacgagggcgcctcccaggacgcccccaagctgaagaagcgggccctgagccacgccgacctctttggggacgagagtgaggacgaggccgcagggccaggggtgccgagcgtgtggccctctgccctccccagcctcagctcggactcagactccgactcagactccagcctgggcttcccggaggcgcaggggccgcccaagcggctcaaggcctccccgcccccctcccccgccccatcctcctcctcctcctcctcctcctccacctccagcgcgggggcggatgtggactactcggccctggagaaggaggtggactttgactccgaccccatggaggagtgcctgcggatcttcaacgagtccaccagcgtcaagacggaggacagaggccggctggcccggcagccccccaaggaagagaagagtgaggagaaggggctttcgggtctgaccactctgttccccgggcagaagaggaggatctcccacctttccaagcaaggccaggaggtggagcccccgaggaggggtcccgcggtgcccccggcccggcccccgacggcgcaggaggtgtgctacctgcgggcccagcaggcgcagagggcatcggcgagcttgctgcaggcccccgccaggctggcagagaagtcgccctccgtccacatttccgcccctggcgagaagaggaggatcgcccacatccccaacccccgcctggctgcagcccccacaggtgccaagaggacccttgcggccagcggcagccagtcctccaacggccctgagccaggtggccagcagctgaaaacacgcacattgtcggggatggcgtccaagactaccaccaccatcatccctaagcgaatcgcccacagtccatccttacagagtttaaagaaacccattatccccaaagagtttgggggcaaagtccccaccgtcatccgccagcgctatctcaacctgttcatcgaggagtgtctcaagttctgtacctccaaccaggaggccatagagaaggcactgaacgaggagaaggtggcctatgaccgcagccccagcaagaacatctacctgaatgtggccgtgaacaccctcaagaagctcaggggcctggcccccagcgctgtgcccggcctcagcaaaaccagtggccgcagggttgtgtcccacgaggtggtgttggggggcaggttggccgccaagaccagcttctcgctcagccgtccaagcagcccccgggtggaggacctgaaaggggctgccctgtacagccgcctcagggagtacctgctcacccaggaccagctcaaggagaacggctaccccttcccgcacccagagcggcccgggggcgcaatcatcttcacagctgaggagaagaggcccaaggactcttcctgcaggacctgctgccgctgtggcaccgagtacctcgtgtcctcttcaggccgctgcatccgggacgaggagtgttattaccactggggacggctgcgccggaaccgggtggccggaggctgggagacccagtacatgtgctgctcggctgccgccggctctgtcggctgccaagtcgcaaagcaacacgtgcaggatggccggaaggagcgccttgagggcttcgtgaagacctttgagaaagagctctcaggagacacccacccggggatctacgccctggactgcgagatgtcctacaccacatatggcctggagctgacgcgcgtcacggtggtcgacacggacgtgcacgtggtttatgacaccttcgtgaagcctgacaacgagatcgtggactacaacaccaggttttcgggggtgacggaggctgaccttgccgacacaagtgtcacgctgcgtgacgtccaggccgttctgctgagcatgttcagcgctgacaccatcctcatcggacacagcctggagagcgacctcctggccctgaaggtcatccacagcaccgtggtggacacgtctgtgctcttcccccaccgcctgggcctcccctacaagcggtccctgcggaacctcatggccgactacctcagacagatcatccaggacaatgtggatgggcacagctccagcgaggacgccggcgcctgcatgcacctggtgatctggaaggttcgagaagacgccaagaccaagcgatgacgcctgcccgcctcccacccgcctctcctgccgtcccgctggtccttagccccatgcctcttccaaaacagtgcaataaatctccggtaacccgtccacctggccgaggcagcccagagcagcgggatgagctggcggccagagaacgagtcagcgggagagtctgggggggggagcgaagcgggccgcacggagcggaaaggacccacggacaaccggac

SEQ ID NO: 355522 - DNA, 3357 bp, Homo sapiens
ggagcaagatggcggcggcggggtccgtgaggcgcgggcggcggcgaccgcggcgccagtgagggggccctggggcccgggcggctccgggccggggccccgccgcgggacggaccatgctacgctccactggcttcttccgggccattgactgcccctattggtctggggcgcccggggggccctgccggcggccctactgccacttccggcaccgcggggcccggggccccggcgcgcccggtgacggcggagaggcgccccccgcagcagggctgggttacgacccctacaaccctgagctgcccaagccccccgcgcagagggagaatggcaccctgggcctgggggaggagccgcgcccggatgtgctggagttggagctggtcaaccaggccatcgaggccgtgcgcagtgaggtggagctggagcagcggcgctaccgggagctgctggagacgacccgtgagcaccgctccgccgaggcccccgccctggcgccccgcggccccaacgccagccccactgtgggcccggacgaggatgccttcccactggccttcgactacagccccggcagccacggcctattaagccctgatgccggctaccagcccaccccactggccgcccctgccgagccgggcagcaagtactcgctggcgtccctggacaggggtcagggcagaggtggagggggtggcggtgccctggaatacgtccccaaggctgtgagccagccccggcggcacagccgccccgttcccagtggcaagtacgtggtggacaactccaggccacccacagacctggagtatgaccctctctccaactactcggcccggcacctcagcagggccagctcccgggatgagcgggccgccaagcggccccggggctcccgcggcagtgagccctacacacctgctcccaagaagctctgtgacccctttggcagttgcgatgcaaggttctcagactcagaagatgaggccgccacggtcccaggtaacgagcccaccacggccagcacccccaaagccagggccgaccctgagatcaaggccaccgggcagccaccctccaaagagggcctggaggccgaggggggcggcctgcgggagaccaaggagacggccgtgcagtgcgacgtgggggacctccagccgcccccagccaagcccgcctccccagcccaggtccagtcctcacaggatgggggctgccccaaggagggaaaacccaagaagaaaaaaaccggggccccacctgcccccagctgcaaagacggggcccaggggaaggacaagaccaaggacaagggccgagggcggcctgtggagaagccccgtgcggacaagaagggcccgcaggccagcagcccccggcgcaaggcagagcggccggaagggaccaagaagaagccatcttcggccactcctgtggccacctcagggaaagggaggcctgaccggccagcgcggcggccgagccccacaagcggggactcccgaccggcggccggcagaggcccaccccgccccctccagctgcccgacaggaagagcaccaaggccccgtcggggaagctagtggagcggaaagcccgctcactagacgagggcgcctcccaggacgcccccaagctgaagaagcgggccctgagccacgccgacctctttggggacgagagtgaggacgaggccgcagggccaggggtgccgagcgtgtggccctctgccctccccagcctcagctcggactcagactccgactcagactccagcctgggcttcccggaggcgcaggggccgcccaagcggctcaaggcctccccgcccccctcccccgccccatcctcctcctcctcctcctcctcctccacctccagcgcgggggcggatgtggactactcggccctggagaaggaggtggactttgactccgaccccatggaggagtgcctgcggatcttcaacgagtccaccagcgtcaagacggaggacagaggccggctggcccggcagccccccaaggaagagaagagtgaggagaaggggctttcgggtctgaccactctgttccccgggcagaagaggaggatctcccacctttccaagcaaggccaggaggtggagcccccgaggaggggtcccgcggtgcccccggcccggcccccgacggcgcaggaggtgtgctacctgcgggcccagcaggcgcagagggcatcggcgagcttgctgcaggcccccgccaggctggcagagaagtcgccctccgtccacatttccgcccctggcgagaagaggaggatcgcccacatccccaacccccgcctggctgcagcccccacaggtgccaagaggacccttgcggccagcggcagccagtcctccaacggccctgagccaggtggccagcagctgaaaacacgcacattgtcggggatggcgtccaagactaccaccaccatcatccctaagcgaatcgcccacagtccatccttacagagtttaaagaaacccattatccccaaagagtttgggggcaaagtccccaccgtcatccgccagcgctatctcaacctgttcatcgaggagtgtctcaagttctgtacctccaaccaggaggccatagagaaggcactgaacgaggagaaggtggcctatgaccgcagccccagcaagaacatctacctgaatgtggccgtgaacaccctcaagaagctcaggggcctggcccccagcgctgtgcccggcctcagcaaaaccagtggccgcagggttgtgtcccacgaggtggtgttggggggcaggttggccgccaagaccagcttctcgctcagccgtccaagcagcccccgggtggaggacctgaaaggggctgccctgtacagccgcctcagggagtacctgctcacccaggaccagctcaaggagaacggctaccccttcccgcacccagagcggcccgggggcgcaatcatcttcacagctgaggagaagaggcccaaggactcttcctgcaggacctgctgccgctgtggcaccgagtacctcgtgtcctcttcaggccgctgcatccgggacgaggagtgttattaccactggggacggctgcgccggaaccgggtggccggaggctgggagacccagtacatgtgctgctcggctgccgccggctctgtcggctgccaagtcgcaaagcaacacgtgcaggatggccggaaggagcgccttgagggcttcgtgaagacctttgagaaagagctctcaggagacacccacccggggatctacgccctggactgcgagatggtgaggctgttctctgcccagcgtcgggttcaggattggg

SEQ ID NO: 355523 - DNA, 464 bp, Homo sapiens
gcggccgcggctgcctggtgctccgccacgtggtgatgggcagccactcgccctgtgcccacaccccctgtgccccgccagcccccacaggtgccaagaggacccttgcggccagcggcagccagtcctccaacggccctgagccaggtggccagcagctgaaaacacgcacattgtcggggatggcgtccaagactaccaccaccatcatccctaagcgaatcgcccacagtccatccttacaggtagcccctcccatctcggccaggaccaccacccccaagaccacgccctgaggcccggccacatgggacctgcggagggccagcctcgcccctgccctgcgggccttcgtgctccacaccgcagtacagccttcaccttccctccccatgccttggtgttttttttttttttttgagatggagtctcgctctgtcgcccaggctggagtgcagtggcac

SEQ ID NO: 355524 - DNA, 4600 bp, Homo sapiens
ggagcaagatggcggcggcggggtccgtgaggcgcgggcggcggcgaccgcggcgccagtgagggggccctggggcccgggcggctccgggccggggccccgccgcgggacggaccatgctacgctccactggcttcttccgggccattgactgcccctattggtctggggcgcccggggggccctgccggcggccctactgccacttccggcaccgcggggcccggggccccggcgcgcccggtgacggcggagaggcgccccccgcagcagggctgggttacgacccctacaaccctgagctgcccaagccccccgcgcagagggagaatggcaccctgggcctgggggaggagccgcgcccggatgtgctggagttggagctggtcaaccaggccatcgaggccgtgcgcagtgaggtggagctggagcagcggcgctaccgggagctgctggagacgacccgtgagcaccgctccgccgaggcccccgccctggcgccccgcggccccaacgccagccccactgtgggcccggacgaggatgccttcccactggccttcgactacagccccggcagccacggcctattaagccctgatgccggctaccagcccaccccactggccgcccctgccgagccgggcagcaagtactcgctggcgtccctggacaggggtcagggcagaggtggagggggtggcggtgccctggaatacgtccccaaggctgtgagccagccccggcggcacagccgccccgttcccagtggcaagtacgtggtggacaactccaggccacccacagacctggagtatgaccctctctccaactactcggcccggcacctcagcagggccagctcccgggatgagcgggccgccaagcggccccggggctcccgcggcagtgagccctacacacctgctcccaagaagctctgtgacccctttggcagttgcgatgcaaggttctcagactcagaagatgaggccgccacggtcccaggtaacgagcccaccacggccagcacccccaaagccagggccgaccctgagatcaaggccaccgggcagccaccctccaaagagggcctggaggccgaggggggcggcctgcgggagaccaaggagacggccgtgcagtgcgacgtgggggacctccagccgcccccagccaagcccgcctccccagcccaggtccagtcctcacaggatgggggctgccccaaggagggaaaacccaagaagaaaaaaaccggggccccacctgcccccagctgcaaagacggggcccaggggaaggacaagaccaaggacaagggccgagggcggcctgtggagaagccccgtgcggacaagaagggcccgcaggccagcagcccccggcgcaaggcagagcggccggaagggaccaagaagaagccatcttcggccactcctgtggccacctcagggaaagggaggcctgaccggccagcgcggcggccgagccccacaagcggggactcccgaccggcggccggcagaggcccaccccgccccctccagctgcccgacaggaagagcaccaaggccccgtcggggaagctagtggagcggaaagcccgctcactagacgagggcgcctcccaggacgcccccaagctgaagaagcgggccctgagccacgccgacctctttggggacgagagtgaggacgaggccgcagggccaggggtgccgagcgtgtggccctctgccctccccagcctcagctcggactcagactccgactcagactccagcctgggcttcccggaggcgcaggggccgcccaagcggctcaaggcctccccgcccccctcccccgccccatcctcctcctcctcctcctcctcctccacctccagcgcgggggcggatgtggactactcggccctggagaaggaggtggactttgactccgaccccatggaggagtgcctgcggatcttcaacgagtccaccagcgtcaagacggaggacagaggccggctggcccggcagccccccaaggaagagaagagtgaggagaaggggctttcgggtctgaccactctgttccccgggcagaagaggaggatctcccacctttccaagcaaggccaggaggtggagcccccgaggaggggtcccgcggtgcccccggcccggcccccgacggcgcaggaggtgtgctacctgcgggcccagcaggcgcagagggcatcggcgagcttgctgcaggcccccgccaggctggcagagaagtcgccctccgtccacatttccgcccctggcgagaagaggaggatcgcccacatccccaacccccgcctggctgcagcccccacaggtgccaagaggacccttgcggccagcggcagccagtcctccaacggccctgagccaggtggccagcagctgaaaacacgcacattgtcggggatggcgtccaagactaccaccaccatcatccctaagcgaatcgcccacagtccatccttacagagtttaaagaaacccattatccccaaagagtttgggggcaaagtccccaccgtcatccgccagcgctatctcaacctgttcatcgaggagtgtctcaagttctgtacctccaaccaggaggccatagagaaggcactgaacgaggagaaggtggcctatgaccgcagccccagcaagaacatctacctgaatgtggccgtgaacaccctcaagaagctcaggggcctggcccccagcgctgtgcccggcctcagcaaaaccagtggccgcagggttgtgtcccacgaggtggtgttggggggcaggttggccgccaagaccagcttctcgctcagccgtccaagcagcccccgggtggaggacctgaaaggggctgccctgtacagccgcctcagggagtacctgctcacccaggaccagctcaaggagaacggctaccccttcccgcacccagagcggcccgggggcgcaatcatcttcacagctgaggagaagaggcccaaggactcttcctgcaggacctgctgccgctgtggcaccgagtacctcgtgtcctcttcaggccgctgcatccgggacgaggagtgttattaccactggggacggctgcgccggaaccgggtggccggaggctgggagacccagtacatgtgctgctcggctgccgccggctctgtcggctgccaagtcgcaaagcaacacgtgcaggatggccggaaggagcgccttgagggcttcgtgaagacctttgagaaagagctctcaggagacacccacccggggatctacgccctggactgcgagatgtcctacaccacatatggcctggagctgacgcgcgtcacggtggtcgacacggacgtgcacgtggtttatgacaccttcgtgaagcctgacaacgagatcgtggactacaacaccaggttttcgggggtgacggaggctgaccttgccgacacaagtgtcacgctgcgtgacgtccaggccgttctgctgagcatgttcagcgctgacaccatcctcatcggacacagcctggagagcgacctcctggccctgaaggtcatccacagcaccgtggtggacacgtctgtgctcttcccccaccgcctgggcctcccctacaagcggtccctgcggaacctcatggccgactacctcagacagatcatccaggacaatgtggatgggcacagctccagcgaggacgccggcgcctgcatgcacctggtgatctggaaggttcgagaagacgccaagaccaagcgatgacgcctgcccgcctcccacccgcctctcctgccgtcccgctggtccttagccccatgcctcttccaaaacagtgcaataaatctccggtaacccgtccacctggccgaggcagcccagagcagcgggatgagctggcggccagagaacgcccagcccagcccacccccgctcacgtcctgccgcacccctccgccggtccccaccctctgccccccagccctctggcgtctctagaaactgctgctgatggagaccaggacagagcccgcccccacccggcccgcagcccctcctgcccctcctgccaggccctccctcccgggtggtggccggcacctctgctcctcacgtgggtcgcggggcgggcttgtcccaggtttgtttgagacagtctttttttattttgtattgttatttttattatttttaatttaaacctgatgacttgcacagcatctttcccaccgggaagagcgggcctgctgccttccctcctgcggggtgggggtgggacagaccccagtgggggccagggccacactcagcgcagtgtgggctggacccgcctctgtgctccaggggctggccggtcttcgggggcgccggcttccaccactcgccgccccacccctgcactccgtgacctctgagaacccagctggcccctcgttagccccagggtctgccgtctagagggagcccaccggcctccggacactgtcttcccgctagagccccgtcctcctctgcggggctctccggacccccttccccctcacctccaggcagggacagaataaatgtttgtatggatttta

SEQ ID NO: 355525 - DNA, 292 bp, Homo sapiens
  misc_feature (33)..(33): n is a, c, g, or t
ccgtattggtggtgctccggggaggcgtgcgcnctggagggacctccagtcacactgctatggggaagaagaggggcaaggaatgttgcacactctcacctttgaaaagcagctccacaaacccagtgagatcagattccaacaaaggcgcacgggttctgaggattccgagtctgaaggtggtggtgttgaagctgcatgggatggttgcgaaactgctctgcaagatctcggcctgtccatggccccctcagtgacgggcaagggagatttcaccccatctagagcccca

SEQ ID NO: 355526 - DNA, 2408 bp, Homo sapiens
  misc_feature (1)..(3): n is a, c, g, or t
  misc_feature (6)..(6): n is a, c, g, or t
nnnttnttttgtttttaattaatagactttatgttttttgagcaactttaggtttctaggaaaattgagcagaaagtacagcaagttcccttgtgcccccatggcctcagtttcccatgaccttagttccgctgccctcagtttcccctgctgctcctgtcttgccttggcgtgtctgtccctactgcagccaggctgatctgtcccagcgcacctcactcttgcctccagccatgggcacggcctcatcgcgtctgcgttccccgctggaggccttgtggaggccctcacccatggcagcttttgccttccctctagagtttaaagaaacccattatccccaaagagtttgggggcaaagtccccaccgtcatccgccagcgctatctcaacctgttcatcgaggagtgtctcaagttctgtacctccaaccaggaggccatagagaaggcactgaacgaggagaaggtggcctatgaccgcagccccagcaagaacatctacctgaatgtggccgtgaacaccctcaagaagctcaggggcctggcccccagcgctgtgcccggcctcagcaaaaccagtggccgcagggttgtgtcccacgaggtggtgttggggggcaggttggccgccaagaccagcttctcgctcagccgtccaagcagcccccgggtggaggacctgaaaggggctgccctgtacagccgcctcagggagtacctgctcacccaggaccagctcaaggagaacggctaccccttcccgcacccagagcggcccgggggcgcaatcatcttcacagctgaggagaagaggcccaaggactcttcctgcaggacctgctgccgctgtggcaccgagtacctcgtgtcctcttcaggccgctgcatccgggacgaggagtgttattaccactggggacggctgcgccggaaccgggtggccggaggctgggagacccagtacatgtgctgctcggctgccgccggctctgtcggctgccaagtcgcaaagcaacacgtgcaggatggccggaaggagcgccttgagggcttcgtgaagacctttgagaaagagctctcaggagacacccacccggggatctacgccctggactgcgagatgtcctacaccacatatggcctggagctgacgcgcgtcacggtggtcgacacggacgtgcacgtggtttatgacaccttcgtgaagcctgacaacgagatcgtggactacaacaccaggttttcgggggtgacggaggctgaccttgccgacacaagtgtcacgctgcgtgacgtccaggccgttctgctgagcatgttcagcgctgacaccatcctcatcggacacagcctggagagcgacctcctggccctgaaggtcatccacagcaccgtggtggacacgtctgtgctcttcccccaccgcctgggcctcccctacaagcggtccctgcggaacctcatggccgactacctcagacagatcatccaggacaatgtggatgggcacagctccagcgaggacgccggcgcctgcatgcacctggtgatctggaaggttcgagaagacgccaagaccaagcgatgacgcctgcccgcctcccacccgcctctcctgccgtcccgctggtccttagccccatgcctcttccaaaacagtgcaataaatctccggtaacccgtccacctggccgaggcagcccagagcagcgggatgagctggcggccagagaacgcccagcccagcccacccccgctcacgtcctgccgcacccctccgccggtccccaccctctgccccccagccctctggcgtctctagaaactgctgctgatggagaccaggacagagcccgcccccacccggcccgcagcccctcctgcccctcctgccaggccctccctcccgggtggtggccggcacctctgctcctcacgtgggtcgcggggcgggcttgtcccaggtttgtttgagacagtctttttttattttgtattgttatttttattatttttaatttaaacctgatgacttgcacagcatctttcccaccgggaagagcgggcctgctgccttccctcctgcggggtgggggtgggacagaccccagtgggggccagggccacactcagcgcagtgtgggctggacccgcctctgtgctccaggggctggccggtcttcgggggcgccggcttccaccactcgccgccccacccctgcactccgtgacctctgagaacccagctggcccctcgttagccccagggtctgccgtctagagggagcccaccggcctccggacactgtcttcccgctagagccccgtcctcctctgcggggctctccggacccccttccccctcacctccaggcagggacagaataaatgtttgtatggatttta

SEQ ID NO: 355527 - DNA, 4621 bp, Homo sapiens
ggagcaagatggcggcggcggggtccgtgaggcgcgggcggcggcgaccgcggcgccagtgagggggccctggggcccgggcggctccgggccggggccccgccgcgggacggaccatgctacgctccactggcttcttccgggccattgactgcccctattggtctggggcgcccggggggccctgccggcggccctactgccacttccggcaccgcggggcccggggccccggcgcgcccggtgacggcggagaggcgccccccgcagcagggctgggttacgacccctacaaccctgagctgcccaagccccccgcgcagagggagaatggcaccctgggcctgggggaggagccgcgcccggatgtgctggagttggagctggtcaaccaggccatcgaggccgtgcgcagtgaggtggagctggagcagcggcgctaccgggagctgctggagacgacccgtgagcaccgctccgccgaggcccccgccctggcgccccgcggccccaacgccagccccactgtgggcccggacgaggatgccttcccactggccttcgactacagccccggcagccacggcctattaagccctgatgccggctaccagcccaccccactggccgcccctgccgagccgggcagcaagtactcgctggcgtccctggacaggggtcagggcagaggtggagggggtggcggtgccctggaatacgtccccaaggctgtgagccagccccggcggcacagccgccccgttcccagtggcaagtacgtggtggacaactccaggccacccacagacctggagtatgaccctctctccaactactcggcccggcacctcagcagggccagctcccgggatgagcgggccgccaagcggccccggggctcccgcggcagtgagccctacacacctgctcccaagaagctctgtgacccctttggcagttgcgatgcaaggttctcagactcagaagatgaggccgccacggtcccaggtaacgagcccaccacggccagcacccccaaagccagggccgaccctgagatcaaggccaccgggcagccaccctccaaagagggcctggaggccgaggggggcggcctgcgggagaccaaggagacggccgtgcagtgcgacgtgggggacctccagccgcccccagccaagcccgcctccccagcccaggtccagtcctcacaggatgggggctgccccaaggagggaaaacccaagaagaaaaaaaccggggccccacctgcccccagctgcaaagacggggcccaggggaaggacaagaccaaggacaagggccgagggcggcctgtggagaagccccgtgcggacaagaagggcccgcaggccagcagcccccggcgcaaggcagagcggccggaagggaccaagaagaagccatcttcggccactcctgtggccacctcagggaaagggaggcctgaccggccagcgcggcggccgagccccacaagcggggactcccgaccggcggccggcagaggcccaccccgccccctccagctgcccgacaggaagagcaccaaggccccgtcggggaagctagtggagcggaaagcccgctcactagacgagggcgcctcccaggacgcccccaagctgaagaagcgggccctgagccacgccgacctctttggggacgagagtgaggacgaggccgcagggccaggggtgccgagcgtgtggccctctgccctccccagcctcagctcggactcagactccgactcagactccagcctgggcttcccggaggcgcaggggccgcccaagcggctcaaggcctccccgcccccctcccccgccccatcctcctcctcctcctcctcctcctccacctccagcgcgggggcggatgtggactactcggccctggagaaggaggtggactttgactccgaccccatggaggagtgcctgcggatcttcaacgagtccaccagcgtcaagacggaggacagaggccggctggcccggcagccccccaaggaagagaagagtgaggagaaggggctttcgggtctgaccactctgttccccgggcagaagaggaggatctcccacctttccaagcaaggccaggaggtggagcccccgaggaggggtcccgcggtgcccccggcccggcccccgacggcgcaggaggtgtgctacctgcgggcccagcaggcgcagagggcatcggcgagcttgctgcaggcccccgccaggctggcagagaagtcgccctccgtccacatttccgcccctggcgagaagaggaggatcgcccacatccccaacccccgcctggctgcagcccccacaggtgccaagaggacccttgcggccagcggcagccagtcctccaacggccctgagccaggtggccagcagctgaaaacacgcacattgtcggggatggcgtccaagactaccaccaccatcatccctaagcgaatcgcccacagtccatccttacagagtttaaagaaacccattatccccaaagagtttgggggcaaagtccccaccgtcatccgccagcgctatctcaacctgttcatcgaggagtgtctcaagttctgtacctccaaccaggaggccatagagaaggcactgaacgaggagaaggtggcctatgaccgcagccccagcaagaacatctacctgaatgtggccgtgaacaccctcaagaagctcaggggcctggcccccagcgctgtgcccggcctcagcaaaaccagtggccgcagggttgtgtcccacgaggtggtgttggggggcaggttggccgccaagaccagcttctcgctcagccgtccaagcagcccccgggtggaggacctgaaaggggctgccctgtacagccgcctcagggagtacctgctcacccaggaccagctcaaggagaacggctaccccttcccgcacccagagcggcccgggggcgcaatcatcttcacagctgaggagaagaggcccaaggactcttcctgcaggacctgctgccgctgtggcaccgagtacctcgtgtcctcttcaggccgctgcatccgggacgaggagtgttattaccactggggacggctgcgccggaaccgggtggccggaggctgggagacccagtacatgtgctgctcggctgccgccggctctgtcggctgccaagtcgcaaagcaacacgtgcaggatggccggaaggagcgccttgagggcttcgtgaagacctttgagaaagagctctcaggagacacccacccggggatctacgccctggactgcgagatgtcctacaccacatatggcctggagctgacgcgcgtcacggtggtcgacacggacgtgcacgtggtttatgacaccttcgtgaagcctgacaacgagatcgtggactacaacaccaggttttcgggggtgacggaggctgaccttgccgacacaagtgtcacgctgcgtgacgtccaggccgttctgctgagcatgttcagcgctgacaccatcctcatcggacacagcctggagagcgacctcctggccctgaaggtcatccacagcaccgtggtggacacgtctgtgctcttcccccaccgcctgggcctcccctacaagcggtccctgcggaacctcatggccgactacctcagacagatcatccaggacaatgtggatgggcacagctccagcgaggacgccggcgcctgcatgcacctggtgatctggaaggttcgagaagacgccaagaccaagcgatgacgcctgcccgcctcccacccgcctctcctgccgtcccgctggtccttagccccatgcctcttccaaaacagtgcaataaatctccggtaacccgtccacctggccgaggcagcccagagcagcgggatgagctggcggccagagaacgcccagcccagcccacccccgctcacgtcctgccgcacccctccgccggtccccaccctctgccccccagccctctggcgtctctagaaactgctgctgatggagaccaggacagagcccgcccccacccggcccgcagcccctcctgcccctcctgccaggccctccctcccgggtggtggccggcacctctgctcctcacgtgggtcgcggggcgggcttgtcccaggtttgtttgagacagtctttttttattttgtattgttatttttattatttttaatttaaacctgatgacttgcacagcatctttcccaccgggaagagcgggcctgctgccttccctcctgcggggtgggggtgggacagaccccagtgggggccagggccacactcagcgcagtgtgggctggacccgcctctgtgctccaggggctggccggtcttcgggggcgccggcttccaccactcgccgccccacccctgcactccgtgacctctgagaacccagctggcccctcgttagccccagggtctgccgtctagagggagcccaccggcctccggacactgtcttcccgctagagccccgtcctcctctgcggggctctccggacccccttccccctcacctccaggcagggacagaataaatgtttgtatggattttaaaaagaaccacaacaacaaac

SEQ ID NO: 355528 - DNA, 2614 bp, Homo sapiens
  misc_feature (1)..(3): n is a, c, g, or t
  misc_feature (6)..(6): n is a, c, g, or t
nnnttnttttgtttttaattaatagactttatgttttttgagcaactttaggtttctaggaaaattgagcagaaagtacagcaagttcccttgtgcccccatggcctcagtttcccatgaccttagttccgctgccctcagtttcccctgctgctcctgtcttgccttggcgtgtctgtccctactgcagccaggctgatctgtcccagcgcacctcactcttgcctccagccatgggcacggcctcatcgcgtctgcgttccccgctggaggccttgtggaggccctcacccatggcagcttttgccttccctctagagtttaaagaaacccattatccccaaagagtttgggggcaaagtccccaccgtcatccgccagcgctatctcaacctgttcatcgaggagtgtctcaagttctgtacctccaaccaggaggccatagagaaggtgaggtcctggagttcctatctggccggtcgggtggggactaggggtccagggtggtccccagacatcccccggcctctcagccgcagctgtgacccggagctgcctgggagagatgcaagtccccgaccccatggcgaccccaccgctggggctccccggcaccaggcaggcatggcctcagctgggcaccgcctgtcccccaggcactgaacgaggagaaggtggcctatgaccgcagccccagcaagaacatctacctgaatgtggccgtgaacaccctcaagaagctcaggggcctggcccccagcgctgtgcccggcctcagcaaaaccagtggccgcagggttgtgtcccacgaggtggtgttggggggcaggttggccgccaagaccagcttctcgctcagccgtccaagcagcccccgggtggaggacctgaaaggggctgccctgtacagccgcctcagggagtacctgctcacccaggaccagctcaaggagaacggctaccccttcccgcacccagagcggcccgggggcgcaatcatcttcacagctgaggagaagaggcccaaggactcttcctgcaggacctgctgccgctgtggcaccgagtacctcgtgtcctcttcaggccgctgcatccgggacgaggagtgttattaccactggggacggctgcgccggaaccgggtggccggaggctgggagacccagtacatgtgctgctcggctgccgccggctctgtcggctgccaagtcgcaaagcaacacgtgcaggatggccggaaggagcgccttgagggcttcgtgaagacctttgagaaagagctctcaggagacacccacccggggatctacgccctggactgcgagatgtcctacaccacatatggcctggagctgacgcgcgtcacggtggtcgacacggacgtgcacgtggtttatgacaccttcgtgaagcctgacaacgagatcgtggactacaacaccaggttttcgggggtgacggaggctgaccttgccgacacaagtgtcacgctgcgtgacgtccaggccgttctgctgagcatgttcagcgctgacaccatcctcatcggacacagcctggagagcgacctcctggccctgaaggtcatccacagcaccgtggtggacacgtctgtgctcttcccccaccgcctgggcctcccctacaagcggtccctgcggaacctcatggccgactacctcagacagatcatccaggacaatgtggatgggcacagctccagcgaggacgccggcgcctgcatgcacctggtgatctggaaggttcgagaagacgccaagaccaagcgatgacgcctgcccgcctcccacccgcctctcctgccgtcccgctggtccttagccccatgcctcttccaaaacagtgcaataaatctccggtaacccgtccacctggccgaggcagcccagagcagcgggatgagctggcggccagagaacgcccagcccagcccacccccgctcacgtcctgccgcacccctccgccggtccccaccctctgccccccagccctctggcgtctctagaaactgctgctgatggagaccaggacagagcccgcccccacccggcccgcagcccctcctgcccctcctgccaggccctccctcccgggtggtggccggcacctctgctcctcacgtgggtcgcggggcgggcttgtcccaggtttgtttgagacagtctttttttattttgtattgttatttttattatttttaatttaaacctgatgacttgcacagcatctttcccaccgggaagagcgggcctgctgccttccctcctgcggggtgggggtgggacagaccccagtgggggccagggccacactcagcgcagtgtgggctggacccgcctctgtgctccaggggctggccggtcttcgggggcgccggcttccaccactcgccgccccacccctgcactccgtgacctctgagaacccagctggcccctcgttagccccagggtctgccgtctagagggagcccaccggcctccggacactgtcttcccgctagagccccgtcctcctctgcggggctctccggacccccttccccctcacctccaggcagggacagaataaatgtttgtatggatttta

SEQ ID NO: 355529 - DNA, 3332 bp, Homo sapiens
ggagcaagatggcggcggcggggtccgtgaggcgcgggcggcggcgaccgcggcgccagtgagggggccctggggcccgggcggctccgggccggggccccgccgcgggacggaccatgctacgctccactggcttcttccgggccattgactgcccctattggtctggggcgcccggggggccctgccggcggccctactgccacttccggcaccgcggggcccggggccccggcgcgcccggtgacggcggagaggcgccccccgcagcagggctgggttacgacccctacaaccctgagctgcccaagccccccgcgcagagggagaatggcaccctgggcctgggggaggagccgcgcccggatgtgctggagttggagctggtcaaccaggccatcgaggccgtgcgcagtgaggtggagctggagcagcggcgctaccgggagctgctggagacgacccgtgagcaccgctccgccgaggcccccgccctggcgccccgcggccccaacgccagccccactgtgggcccggacgaggatgccttcccactggccttcgactacagccccggcagccacggcctattaagccctgatgccggctaccagcccaccccactggccgcccctgccgagccgggcagcaagtactcgctggcgtccctggacaggggtcagggcagaggtggagggggtggcggtgccctggaatacgtccccaaggctgtgagccagccccggcggcacagccgccccgttcccagtggcaagtacgtggtggacaactccaggccacccacagacctggagtatgaccctctctccaactactcggcccggcacctcagcagggccagctcccgggatgagcgggccgccaagcggccccggggctcccgcggcagtgagccctacacacctgctcccaagaagctctgtgacccctttggcagttgcgatgcaaggttctcagactcagaagatgaggccgccacggtcccaggtaacgagcccaccacggccagcacccccaaagccagggccgaccctgagatcaaggccaccgggcagccaccctccaaagagggcctggaggccgaggggggcggcctgcgggagaccaaggagacggccgtgcagtgcgacgtgggggacctccagccgcccccagccaagcccgcctccccagcccaggtccagtcctcacaggatgggggctgccccaaggagggaaaacccaagaagaaaaaaaccggggccccacctgcccccagctgcaaagacggggcccaggggaaggacaagaccaaggacaagggccgagggcggcctgtggagaagccccgtgcggacaagaagggcccgcaggccagcagcccccggcgcaaggcagagcggccggaagggaccaagaagaagccatcttcggccactcctgtggccacctcagggaaagggaggcctgaccggccagcgcggcggccgagccccacaagcggggactcccgaccggcggccggcagaggcccaccccgccccctccagctgcccgacaggaagagcaccaaggccccgtcggggaagctagtggagcggaaagcccgctcactagacgagggcgcctcccaggacgcccccaagctgaagaagcgggccctgagccacgccgacctctttggggacgagagtgaggacgaggccgcagggccaggggtgccgagcgtgtggccctctgccctccccagcctcagctcggactcagactccgactcagactccagcctgggcttcccggaggcgcaggggccgcccaagcggctcaaggcctccccgcccccctcccccgccccatcctcctcctcctcctcctcctcctccacctccagcgcgggggcggatgtggactactcggccctggagaaggaggtggactttgactccgaccccatggaggagtgcctgcggatcttcaacgagtccaccagcgtcaagacggaggacagaggccggctggcccggcagccccccaaggaagagaagagtgaggagaaggggctttcgggtctgaccactctgttccccgggcagaagaggaggatctcccacctttccaagcaaggccaggaggtggagcccccgaggaggggtcccgcggtgcccccggcccggcccccgacggcgcaggaggtgtgctacctgcgggcccagcaggcgcagagggcatcggcgagcttgctgcaggcccccgccaggctggcagagaagtcgccctccgtccacatttccgcccctggcgagaagaggaggatcgcccacatccccaacccccgcctggctgcagcccccacaggtgccaagaggacccttgcggccagcggcagccagtcctccaacggccctgagccaggtggccagcagctgaaaacacgcacattgtcggggatggcgtccaagactaccaccaccatcatccctaagcgaatcgcccacagtccatccttacagagtttaaagaaacccattatccccaaagagtttgggggcaaagtccccaccgtcatccgccagcgctatctcaacctgttcatcgaggagtgtctcaagttctgtacctccaaccaggaggccatagagaaggcactgaacgaggagaaggtggcctatgaccgcagccccagcaagaacatctacctgaatgtggccgtgaacaccctcaagaagctcaggggcctggcccccagcgctgtgcccggcctcagcaaaaccagtggccgcagggttgtgtcccacgaggtggtgttggggggcaggttggccgccaagaccagcttctcgctcagccgtccaagcagcccccgggtggaggacctgaaaggggctgccctgtacagccgcctcagggagtacctgctcacccaggaccagctcaaggagaacggctaccccttcccgcacccagagcggcccgggggcgcaatcatcttcacagctgaggagaagaggcccaaggactcttcctgcaggacctgctgccgctgtggcaccgagtacctcgtgtcctcttcaggccgctgcatccgggacgaggagtgttattaccactggggacggctgcgccggaaccgggtggccggaggctgggagacccagtacatgtgctgctcggctgccgccggctctgtcggctgccaagtcgcaaagggtcccaaccagtgaatgggcgtgatggatggataggatggtcccgaagggctcagagatgtgctgctgctgccacccccgcccccactgcaccccgaagctgccctcacctgccttctccacccc

SEQ ID NO: 355530 - DNA, 370 bp, Homo sapiens
aggacaacaggcatctggaagtgctctctcgccactctgggtgctttactgtctctggcttgttccgacagaggatgatgcagatgtacagacacaagcgggccaacaaatagttccagggtcacccccgagaggacaacaggcatctggaagtgctctctcgccactctgggtgctttactgtctctggcttgtttccatcactggaaatcacttagagaattgtagtgtttttggtccttgataaagcctagaagacatttgtgatgttacaaaatggaagttttcttttgtttctgttttttaagatctaagaagttgtgaatgttgttaatcatttagccgttgcaataaatgtagaggaaatgca

SEQ ID NO: 355531 - DNA, 252 bp, Homo sapiens
cgcgcaggcgctgtggcgcccctaggcttggcctcccagagactcgcggacgctcacgataaccaaggacgaccgcgaaccaaggtaaagccaacgaggccacctcgtgcgcgacggaggcgtctttgccgccccttccgggacgctcacggtggtcgccgcccccagcagggaaatgttttgcctccagagcgtccgcccagaagaagcggacagcgcgcttgcgcaagagagccgggccgcggcggcccg

SEQ ID NO: 355532 - DNA, 523 bp, Homo sapiens
agggcaaggctacagggaggggacatgcaggccatctttataatcagcctccacaaccctgcagtgtttacacggggagcagcagctcaggagtcatgcctgacaggtgctttatgttttgtagttgacatgaagacaatggagactgcagagaaactggctagatttgttgctcaggtgggaccagagatcgaacaattcagcatagaaaacagcaccgataaccctgacctgtgcgcctggccaaaaatatatatattttttagagacaaggtcttactctgtcacccaggcgcagtggctcgtgcctgtaatcccagcttagcgggactgaggcaagaggatcgcttgagcccgggagcttgagaccagcctgggcaagatggccagacctaatctttacaagaaaaaaaaattaatgtaaaaaaaatgaagtaaataattaaacttgtcacggatggcaggtagtgtatcagagtgcttgttatgtatgctcttcttggggggaggtggagttttttat

SEQ ID NO: 355533 - DNA, 465 bp, Homo sapiens
catctgttgcataaattgtgtttccaaagcttacaatagagcagccaggtctcagcactgctgggcacccaggttggctacttactttattattgcagactgtcctttaacattaaatgcacaacattcgtaccacttaaaactggggtcaggtggaagtctcacagagaccacgtctgtaccgcggttgccctgaaacagttaataggcttttaaagcctctcagatataacaaggttttaaaacatacttcatggaatgttcttcatgtatcatagcagctcatacctgtgatagaacaagctttcagtttttcctttctttcctttacattcactattcacagtgaaacaggtgcatgttttttttttcttttttttttcttttgtttctgttttttaagatctaagaagttgtgaatgttgttaatcatttagccgttgcaataaatgtagaggaaatgca

SEQ ID NO: 355534 - DNA, 7221 bp, Homo sapiens
agcggctgtgcggcgcggcgctgcggagaccgttggttcatttgcatgtccccgcctcgcgcggcggcggcggcgggtgaggagcctgaggcggcggcgggggtggctccgcgcgcggtggtctcgggggcaaaataacatggcagccagacgaattacacaggagacttttgatgctgtattacaagaaaaagccaaacgatatcacatggatgccagtggtgaggctgtaagcgaaactcttcagtttaaagctcaagatctcttaagggcagtcccaagatccagagcagagatgtatgatgacgtccacagcgatggcagatactccctcagtggatctgtagctcactctagagatgccggaagagaaggcctgagaagtgacgtatttccagggccttccttcagatcaagcaacccttccatcagtgatgacagctactttcgcaaagaatgtggccgggatctggaattttctcactctgattctcgggaccaggtcattggccaccggaaattggggcatttccgttctcaggactggaaatttgcgctccgtggttcttgggaacaagactttggccatccagtttctcaagagtcctcttggtcacaggagtatagttttggtccctctgcagttttgggggactttggatcttccaggctgattgagaaagagtgtttggagaaggagagtcgggattatgacgtggaccatcctggggaggctgactctgtgcttaggggcagcagtcaagtccaggccagaggtcgagctctaaacatcgttgaccaggaaggttccctcctaggaaagggggagactcagggcctgctcacagctaaggggggtgttgggaaacttgtcacattgagaaatgtgagcacaaaaaaaatacccaccgtgaatcgtattactcccaaaactcagggcactaaccaaatccagaaaaacactccaagtcctgatgtgaccctggggacaaacccagggacagaagatatccagttccccattcagaagatccctctggggctggatctgaagaatcttcggctccccagaagaaagatgagctttgacatcatagataagtctgatgttttttcaagatttgggatagaaataatcaaatgggcaggattccacaccataaaagatgatattaaattttcccaacttttccagactctctttgaacttgaaacagaaacctgtgctaaaatgcttgcctcattcaaatgttccttaaaaccagagcacagagatttttgcttttttactatcaaatttttaaagcactctgctttgaaaacacccagagttgataatgagtttttaaacatgcttttagacaaaggtgctgtgaagaccaaaaattgcttttttgaaatcataaagccttttgacaagtacataatgagacttcaagaccggcttctgaagagtgtcacacctttgcttatggcctgcaatgcctacgagctaagtgtcaagatgaagaccctcagtaaccccctggacttggctcttgccctagaaaccaccaactctctctgccggaagtctttggcccttttgggacagacattttccttggcctcttctttccggcaggagaaaatcttagaagctgtcggcctgcaagatatagctccctcacctgctgcgtttccaaacttcgaagactccactttgtttgggcgagagtacatagaccacctgaaggcctggctagtcagcagcggatgtcccctccaggttaagaaagccgaaccagagccgatgcgagaggaggagaaaatgattcctcctacgaaacctgaaattcaggccaaggctccaagtagtctgagtgatgctgtcccccagcgagcagatcacagggtagtgggcaccatcgaccagcttgtgaaacgtgtcatcgaaggcagcctgtctcccaaagagagaactcttctcaaagaggaccctgcttactggtttttgtctgatgaaaatagtctggagtataaatattacaagctgaagttggcagaaatgcagcggatgagcgagaacttgcgaggagccgaccagaagccgacctcagcagactgtgcagtgagggccatgctgtactcccgggctgtccgcaacctcaagaagaaactccttccgtggcagcggcgggggctcctccgtgctcaagggctccggggctggaaggcgaggagagcgaccaccgggacccagaccctcctatcctcaggcaccaggctgaaacaccacggccggcaggctccaggcctctcacaggcaaaaccatccctgccagacagaaatgatgctgccaaggactgcccgccagacccagttggaccttctcctcaggaccccagcttagaagcctcaggcccatcccccaagccagcaggagtggacatctctgaagcacctcagacctcttctccctgcccatctgctgacattgacatgaagacaatggagactgcagagaaactggctagatttgttgctcaggtgggaccagagatcgaacaattcagcatagaaaacagcaccgataaccctgacctgtggtttctacatgaccaaaatagttctgctttcaaattctatcgaaagaaagtgtttgaactatgtccatcaatttgtttcacgtcatctccgcacaaccttcacactggtggtggtgacaccacgggttctcaggagagccccgtggacctcatggaaggggaagcagagtttgaagacgagccccctccgcgggaggctgagctggagagcccagaggtgatgcctgaggaggaggacgaggacgatgaggatgggggagaggaggcccccgctcctggaggggcgggcaagtctgagggcagcacccctgccgacggccttcccggcgaggctgccgaggacgacctggctggagcacctgccttgtcacaggcctcctcaggtacctgcttccctcggaagaggatcagcagcaagtcattgaaggttggcatgattccagctcccaagagagtgtgtctcatccaggagccaaaagtccatgaaccagttcgaattgcctatgacaggcctcggggtcgtcccatgtccaaaaagaagaaacccaaggacttggacttcgcccagcagaagctgaccgataagaacctgggcttccagatgctgcagaagatgggctggaaggagggccatggcctgggctccctcggaaagggcatcagggagccggtcagcgtgtacgcagcaggcagcctggggtgggagtgggtggggcctcagtccttccacctgcagcctgccgcttggctccttcacagccaagatggcttacagctggcagttgatttttgttttttaaacagaaggcatcttcagatgagaagctgatcatttacatgtgcaggtgtttacagggctcctttctgtcctggtgtagattttttaaccagcttgttggccctggtcattttggccacatttgtgaccatcataaaagctaagtggtatttctgtgtagtttccgtctggaactgctttcccattcccgggaacccatagccgggccagccagggtcccgaacacaggcccaaagtttattaaaccccgatcataacctccagcaggcatttcatttaatactgagcttagttcctgctgggtaaggcattccgaggtaaccagggccctctgggcaccccctcaaaagccagctcttcgagggtgagtactccttgtttctactgtgagtcgcgtcttgattttccctttctttgatgtctcagtgtgtgtcccaaacacctgcatctcatggactgtttgtgcccatgcccagttcctggcatgccaggccctgggctcaggtgcacaactgactctctttttcactccctaggggaaccccctcggaaggggaagggttgggtgctgacgggcaggagcacaaagaagacacattcgatgtgttccgacagaggatgatgcagatgtacagacacaagcgggccaacaaatagggtatgttcacaggccagtgtgtaaggccgtctgccctcgctggcgtgctggtatgcagagaaatttcccccaacaaagttgatgttccctgctcccccaaaaatgccacacacaaaaaaaatcacaaaattctgtgagggaaacaaaagggtctatggatgtggatatgccccattcttaccttccaggtttgctgaaggagcaaacctcacactggccaagggcagatgcgcatggcctgcctggtgccccggctgtgagcccctcaaggcctccaggccagcctccgtggatgtgcgtgtggaaataggccacgcctgtctcttctcttgctcaagttttctctcacagatgacagccacctaccacataacatgaccagcaaacggactgttcctagtccagagggccttgccatcatgcaagtggaagggcgactgtgacagccactgccacagaggatggcagttggctgtgtccctttgtgagggtcttcaaatccttttccttctgcagggccttgggcctgtaaatatcctcatctttctattcttttttttttttagttgccccctcacctaatttccacctcagttttgaacaaaatcgttctcttcctgaatagatcaaaaccactgatgtgaaagataagccttgaagcagcaattgcccttaaaacatcatccctgccctggatcggcctggagccagtgcccaagtacggtttggtgtgtacatgaaaacaaacgtctctgcagtctctggggcggaggtttcgctggcttttctttctctcaaagaaaaaaacatgcaccattttcaatgtgcttttgcctctcctctctgttcacatgcttttagcagcaagtcccctccaaatctgtcttggttccccttcagaaggtggcgctgcccccgaaaggcacctcagcctgtgagtgctgaggaaccagctcctctggctgattttccagttggactggccattgctctccagaagtgctctgttagcaaacgtgatgtggaaacgatcacagatggtgttttctcgttgttcgccagaatttatacgggggagacaaattcccggtaattaccaagtctgcactcgggtaccaaagctctgaagctctctgaacagttgccatacttgagttgatgaatgtgttattcatggtgtctcatctcatcaatgcatcttgagagacttaatgaaattttagcaacagtatagaatagctctatcgggtggggagtaatcattaaacagatgaaatcggccccagatttacatgtctctttagaatccacagtgtaagcaaactacagttacaaagggatgggggttgtaaaccctctgagactctgcacttttcgcacgtatggcatcgtcaagtgctgtcttattacagcctttgtaaggagaggcaggctcctcctggggtgggctctgcagctgctctatttccaggcatgtgatcgcccccgctctccagattccccagcactctgctgcgtgtaactccactcaattctccactcatccttccttgtgaagcaggatcgttgaagttttaagtatgggcaaaaatctggaaaacttaggatccctctgacaccccaggattaggggacacagcagtggctagggcatcagccacagaactgagcgggaaatgccacttgtattggctgtaaagaaatcctggctttgggccaggcacagtggctcaagcctgtaatcccagcactttaggaggttgaggcggatggatcacctgaggtcaggagtttgagaccagcctggccaacatggtgtaaccccgtctctactaaaaatacaaaaaaattagccaggcgtggtagcgggcacctgtaatcccagctactcaggaggctgaggcaggagaatcacttgaaccggggaggcagaggttgcagtgagctgagatcatgccactccactccagcctgggcgacagagcaagactctgtctcaaaaaaaaaaaaggaaatcctggctttctttaagccacagacttcctaggctgtggtcccagctccttgtctgcctggtccctgtcaccttgcagtgccaccacccccaggggctctgcttgcttccagtggcttctgtagctttggcaactggcagatctttatggcagtagaggtgccagcatggaggatggagtttgggtttataacccaaccctcgaacgaaccagcctgtgggggcctggagtggagctggttttggggagtcacaggtgcggggggttcatcatctcctttctccttctcctttcctgacccctccgacagcttccatgttggccatgggtcaggtgaatggatggagctccaagcggggctcagcccattgacccgagcgaggcgcacacacctgcagcgtggatcaagcgcactctctccagcatcgccctgaccattccatgtgctttgtcctagcatgttcattcttgactttctccacttcattttattaaaaagttaaatgctttaggaatctgtggcgtgtggccactgaccgccccccacctcctgccgctcctccaagtttgagctgagatggttctgtgagtccttggcaggggtcaaagggcacatctccttgaacctagaaagccccctacactctcagaggacacctctcctgtggattcagcgctggggcagtgaaggtgtcgggagccagcagagcatggtgcgtgctgccagctgccggccagccgggatagaggagatgccactggccctccgtgcccccagcccctccctcttaaccgaggctgtccttgctctctgcagaggccgctctgcaggatcctcgtgtcgcgcgtgatgtgtggtggcacagccgtgtcaaagtcacagtgtcttttctgtcgttctagttccagggtcacccccgagaggacaacaggcatctggaagtgctctctcgccactctgggtgctttactgtctctggcttgtttccatcactggaaatcacttagagaattgtagtgtttttggtccttgataaagcctagaagacatttgtgatgttacaaaatggaagttttcttttgtttctgttttttaagatctaagaagttgtgaatgttgttaatcatttagccgttgcaataaatgtagaggaaatgca

SEQ ID NO: 355535 - DNA, 7089 bp, Homo sapiens
agcggctgtgcggcgcggcgctgcggagaccgttggttcatttgcatgtccccgcctcgcgcggcggcggcggcgggtgaggagcctgaggcggcggcgggggtggctccgcgcgcggtggtctcgggatctcttaagggcagtcccaagatccagagcagagatgtatgatgacgtccacagcgatggcagatactccctcagtggatctgtagctcactctagagatgccggaagagaaggcctgagaagtgacgtatttccagggccttccttcagatcaagcaacccttccatcagtgatgacagctactttcgcaaagaatgtggccgggatctggaattttctcactctgattctcgggaccaggtcattggccaccggaaattggggcatttccgttctcaggactggaaatttgcgctccgtggttcttgggaacaagactttggccatccagtttctcaagagtcctcttggtcacaggagtatagttttggtccctctgcagttttgggggactttggatcttccaggctgattgagaaagagtgtttggagaaggagagtcgggattatgacgtggaccatcctggggaggctgactctgtgcttaggggcagcagtcaagtccaggccagaggtcgagctctaaacatcgttgaccaggaaggttccctcctaggaaagggggagactcagggcctgctcacagctaaggggggtgttgggaaacttgtcacattgagaaatgtgagcacaaaaaaaatacccaccgtgaatcgtattactcccaaaactcagggcactaaccaaatccagaaaaacactccaagtcctgatgtgaccctggggacaaacccagggacagaagatatccagttccccattcagaagatccctctggggctggatctgaagaatcttcggctccccagaagaaagatgagctttgacatcatagataagtctgatgttttttcaagatttgggatagaaataatcaaatgggcaggattccacaccataaaagatgatattaaattttcccaacttttccagactctctttgaacttgaaacagaaacctgtgctaaaatgcttgcctcattcaaatgttccttaaaaccagagcacagagatttttgcttttttactatcaaatttttaaagcactctgctttgaaaacacccagagttgataatgagtttttaaacatgcttttagacaaaggtgctgtgaagaccaaaaattgcttttttgaaatcataaagccttttgacaagtacataatgagacttcaagaccggcttctgaagagtgtcacacctttgcttatggcctgcaatgcctacgagctaagtgtcaagatgaagaccctcagtaaccccctggacttggctcttgccctagaaaccaccaactctctctgccggaagtctttggcccttttgggacagacattttccttggcctcttctttccggcaggagaaaatcttagaagctgtcggcctgcaagatatagctccctcacctgctgcgtttccaaacttcgaagactccactttgtttgggcgagagtacatagaccacctgaaggcctggctagtcagcagcggatgtcccctccaggttaagaaagccgaaccagagccgatgcgagaggaggagaaaatgattcctcctacgaaacctgaaattcaggccaaggctccaagtagtctgagtgatgctgtcccccagcgagcagatcacagggtagtgggcaccatcgaccagcttgtgaaacgtgtcatcgaaggcagcctgtctcccaaagagagaactcttctcaaagaggaccctgcttactggtttttgtctgatgaaaatagtctggagtataaatattacaagctgaagttggcagaaatgcagcggatgagcgagaacttgcgaggagccgaccagaagccgacctcagcagactgtgcagtgagggccatgctgtactcccgggctgtccgcaacctcaagaagaaactccttccgtggcagcggcgggggctcctccgtgctcaagggctccggggctggaaggcgaggagagcgaccaccgggacccagaccctcctatcctcaggcaccaggctgaaacaccacggccggcaggctccaggcctctcacaggcaaaaccatccctgccagacagaaatgatgctgccaaggactgcccgccagacccagttggaccttctcctcaggaccccagcttagaagcctcaggcccatcccccaagccagcaggagtggacatctctgaagcacctcagacctcttctccctgcccatctgctgacattgacatgaagacaatggagactgcagagaaactggctagatttgttgctcaggtgggaccagagatcgaacaattcagcatagaaaacagcaccgataaccctgacctgtggtttctacatgaccaaaatagttctgctttcaaattctatcgaaagaaagtgtttgaactatgtccatcaatttgtttcacgtcatctccgcacaaccttcacactggtggtggtgacaccacgggttctcaggagagccccgtggacctcatggaaggggaagcagagtttgaagacgagccccctccgcgggaggctgagctggagagcccagaggtgatgcctgaggaggaggacgaggacgatgaggatgggggagaggaggcccccgctcctggaggggcgggcaagtctgagggcagcacccctgccgacggccttcccggcgaggctgccgaggacgacctggctggagcacctgccttgtcacaggcctcctcaggtacctgcttccctcggaagaggatcagcagcaagtcattgaaggttggcatgattccagctcccaagagagtgtgtctcatccaggagccaaaagtccatgaaccagttcgaattgcctatgacaggcctcggggtcgtcccatgtccaaaaagaagaaacccaaggacttggacttcgcccagcagaagctgaccgataagaacctgggcttccagatgctgcagaagatgggctggaaggagggccatggcctgggctccctcggaaagggcatcagggagccggtcagcgtgtacgcagcaggcagcctggggtgggagtgggtggggcctcagtccttccacctgcagcctgccgcttggctccttcacagccaagatggcttacagctggcagttgatttttgttttttaaacagaaggcatcttcagatgagaagctgatcatttacatgtgcaggtgtttacagggctcctttctgtcctggtgtagattttttaaccagcttgttggccctggtcattttggccacatttgtgaccatcataaaagctaagtggtatttctgtgtagtttccgtctggaactgctttcccattcccgggaacccatagccgggccagccagggtcccgaacacaggcccaaagtttattaaaccccgatcataacctccagcaggcatttcatttaatactgagcttagttcctgctgggtaaggcattccgaggtaaccagggccctctgggcaccccctcaaaagccagctcttcgagggtgagtactccttgtttctactgtgagtcgcgtcttgattttccctttctttgatgtctcagtgtgtgtcccaaacacctgcatctcatggactgtttgtgcccatgcccagttcctggcatgccaggccctgggctcaggtgcacaactgactctctttttcactccctaggggaaccccctcggaaggggaagggttgggtgctgacgggcaggagcacaaagaagacacattcgatgtgttccgacagaggatgatgcagatgtacagacacaagcgggccaacaaatagggtatgttcacaggccagtgtgtaaggccgtctgccctcgctggcgtgctggtatgcagagaaatttcccccaacaaagttgatgttccctgctcccccaaaaatgccacacacaaaaaaaatcacaaaattctgtgagggaaacaaaagggtctatggatgtggatatgccccattcttaccttccaggtttgctgaaggagcaaacctcacactggccaagggcagatgcgcatggcctgcctggtgccccggctgtgagcccctcaaggcctccaggccagcctccgtggatgtgcgtgtggaaataggccacgcctgtctcttctcttgctcaagttttctctcacagatgacagccacctaccacataacatgaccagcaaacggactgttcctagtccagagggccttgccatcatgcaagtggaagggcgactgtgacagccactgccacagaggatggcagttggctgtgtccctttgtgagggtcttcaaatccttttccttctgcagggccttgggcctgtaaatatcctcatctttctattcttttttttttttagttgccccctcacctaatttccacctcagttttgaacaaaatcgttctcttcctgaatagatcaaaaccactgatgtgaaagataagccttgaagcagcaattgcccttaaaacatcatccctgccctggatcggcctggagccagtgcccaagtacggtttggtgtgtacatgaaaacaaacgtctctgcagtctctggggcggaggtttcgctggcttttctttctctcaaagaaaaaaacatgcaccattttcaatgtgcttttgcctctcctctctgttcacatgcttttagcagcaagtcccctccaaatctgtcttggttccccttcagaaggtggcgctgcccccgaaaggcacctcagcctgtgagtgctgaggaaccagctcctctggctgattttccagttggactggccattgctctccagaagtgctctgttagcaaacgtgatgtggaaacgatcacagatggtgttttctcgttgttcgccagaatttatacgggggagacaaattcccggtaattaccaagtctgcactcgggtaccaaagctctgaagctctctgaacagttgccatacttgagttgatgaatgtgttattcatggtgtctcatctcatcaatgcatcttgagagacttaatgaaattttagcaacagtatagaatagctctatcgggtggggagtaatcattaaacagatgaaatcggccccagatttacatgtctctttagaatccacagtgtaagcaaactacagttacaaagggatgggggttgtaaaccctctgagactctgcacttttcgcacgtatggcatcgtcaagtgctgtcttattacagcctttgtaaggagaggcaggctcctcctggggtgggctctgcagctgctctatttccaggcatgtgatcgcccccgctctccagattccccagcactctgctgcgtgtaactccactcaattctccactcatccttccttgtgaagcaggatcgttgaagttttaagtatgggcaaaaatctggaaaacttaggatccctctgacaccccaggattaggggacacagcagtggctagggcatcagccacagaactgagcgggaaatgccacttgtattggctgtaaagaaatcctggctttgggccaggcacagtggctcaagcctgtaatcccagcactttaggaggttgaggcggatggatcacctgaggtcaggagtttgagaccagcctggccaacatggtgtaaccccgtctctactaaaaatacaaaaaaattagccaggcgtggtagcgggcacctgtaatcccagctactcaggaggctgaggcaggagaatcacttgaaccggggaggcagaggttgcagtgagctgagatcatgccactccactccagcctgggcgacagagcaagactctgtctcaaaaaaaaaaaaggaaatcctggctttctttaagccacagacttcctaggctgtggtcccagctccttgtctgcctggtccctgtcaccttgcagtgccaccacccccaggggctctgcttgcttccagtggcttctgtagctttggcaactggcagatctttatggcagtagaggtgccagcatggaggatggagtttgggtttataacccaaccctcgaacgaaccagcctgtgggggcctggagtggagctggttttggggagtcacaggtgcggggggttcatcatctcctttctccttctcctttcctgacccctccgacagcttccatgttggccatgggtcaggtgaatggatggagctccaagcggggctcagcccattgacccgagcgaggcgcacacacctgcagcgtggatcaagcgcactctctccagcatcgccctgaccattccatgtgctttgtcctagcatgttcattcttgactttctccacttcattttattaaaaagttaaatgctttaggaatctgtggcgtgtggccactgaccgccccccacctcctgccgctcctccaagtttgagctgagatggttctgtgagtccttggcaggggtcaaagggcacatctccttgaacctagaaagccccctacactctcagaggacacctctcctgtggattcagcgctggggcagtgaaggtgtcgggagccagcagagcatggtgcgtgctgccagctgccggccagccgggatagaggagatgccactggccctccgtgcccccagcccctccctcttaaccgaggctgtccttgctctctgcagaggccgctctgcaggatcctcgtgtcgcgcgtgatgtgtggtggcacagccgtgtcaaagtcacagtgtcttttctgtcgttctagttccagggtcacccccgagaggacaacaggcatctggaagtgctctctcgccactctgggtgctttactgtctctggcttgtttccatcactggaaatcacttagagaattgtagtgtttttggtccttgataaagcctagaagacatttgtgatgttacaaaatggaagttttcttttgtttctgttttttaagatctaagaagttgtgaatgttgttaatcatttagccgttgcaataaatgtagaggaaatgca

SEQ ID NO: 355536 - DNA, 7169 bp, Homo sapiens
agcggctgtgcggcgcggcgctgcggagaccgttggttcatttgcatgtccccgcctcgcgcggcggcggcggcggggcaaaataacatggcagccagacgaattacacaggagacttttgatgctgtattacaagaaaaagccaaacgatatcacatggatgccagtggtgaggctgtaagcgaaactcttcagtttaaagctcaagatctcttaagggcagtcccaagatccagagcagagatgtatgatgacgtccacagcgatggcagatactccctcagtggatctgtagctcactctagagatgccggaagagaaggcctgagaagtgacgtatttccagggccttccttcagatcaagcaacccttccatcagtgatgacagctactttcgcaaagaatgtggccgggatctggaattttctcactctgattctcgggaccaggtcattggccaccggaaattggggcatttccgttctcaggactggaaatttgcgctccgtggttcttgggaacaagactttggccatccagtttctcaagagtcctcttggtcacaggagtatagttttggtccctctgcagttttgggggactttggatcttccaggctgattgagaaagagtgtttggagaaggagagtcgggattatgacgtggaccatcctggggaggctgactctgtgcttaggggcagcagtcaagtccaggccagaggtcgagctctaaacatcgttgaccaggaaggttccctcctaggaaagggggagactcagggcctgctcacagctaaggggggtgttgggaaacttgtcacattgagaaatgtgagcacaaaaaaaatacccaccgtgaatcgtattactcccaaaactcagggcactaaccaaatccagaaaaacactccaagtcctgatgtgaccctggggacaaacccagggacagaagatatccagttccccattcagaagatccctctggggctggatctgaagaatcttcggctccccagaagaaagatgagctttgacatcatagataagtctgatgttttttcaagatttgggatagaaataatcaaatgggcaggattccacaccataaaagatgatattaaattttcccaacttttccagactctctttgaacttgaaacagaaacctgtgctaaaatgcttgcctcattcaaatgttccttaaaaccagagcacagagatttttgcttttttactatcaaatttttaaagcactctgctttgaaaacacccagagttgataatgagtttttaaacatgcttttagacaaaggtgctgtgaagaccaaaaattgcttttttgaaatcataaagccttttgacaagtacataatgagacttcaagaccggcttctgaagagtgtcacacctttgcttatggcctgcaatgcctacgagctaagtgtcaagatgaagaccctcagtaaccccctggacttggctcttgccctagaaaccaccaactctctctgccggaagtctttggcccttttgggacagacattttccttggcctcttctttccggcaggagaaaatcttagaagctgtcggcctgcaagatatagctccctcacctgctgcgtttccaaacttcgaagactccactttgtttgggcgagagtacatagaccacctgaaggcctggctagtcagcagcggatgtcccctccaggttaagaaagccgaaccagagccgatgcgagaggaggagaaaatgattcctcctacgaaacctgaaattcaggccaaggctccaagtagtctgagtgatgctgtcccccagcgagcagatcacagggtagtgggcaccatcgaccagcttgtgaaacgtgtcatcgaaggcagcctgtctcccaaagagagaactcttctcaaagaggaccctgcttactggtttttgtctgatgaaaatagtctggagtataaatattacaagctgaagttggcagaaatgcagcggatgagcgagaacttgcgaggagccgaccagaagccgacctcagcagactgtgcagtgagggccatgctgtactcccgggctgtccgcaacctcaagaagaaactccttccgtggcagcggcgggggctcctccgtgctcaagggctccggggctggaaggcgaggagagcgaccaccgggacccagaccctcctatcctcaggcaccaggctgaaacaccacggccggcaggctccaggcctctcacaggcaaaaccatccctgccagacagaaatgatgctgccaaggactgcccgccagacccagttggaccttctcctcaggaccccagcttagaagcctcaggcccatcccccaagccagcaggagtggacatctctgaagcacctcagacctcttctccctgcccatctgctgacattgacatgaagacaatggagactgcagagaaactggctagatttgttgctcaggtgggaccagagatcgaacaattcagcatagaaaacagcaccgataaccctgacctgtggtttctacatgaccaaaatagttctgctttcaaattctatcgaaagaaagtgtttgaactatgtccatcaatttgtttcacgtcatctccgcacaaccttcacactggtggtggtgacaccacgggttctcaggagagccccgtggacctcatggaaggggaagcagagtttgaagacgagccccctccgcgggaggctgagctggagagcccagaggtgatgcctgaggaggaggacgaggacgatgaggatgggggagaggaggcccccgctcctggaggggcgggcaagtctgagggcagcacccctgccgacggccttcccggcgaggctgccgaggacgacctggctggagcacctgccttgtcacaggcctcctcaggtacctgcttccctcggaagaggatcagcagcaagtcattgaaggttggcatgattccagctcccaagagagtgtgtctcatccaggagccaaaagtccatgaaccagttcgaattgcctatgacaggcctcggggtcgtcccatgtccaaaaagaagaaacccaaggacttggacttcgcccagcagaagctgaccgataagaacctgggcttccagatgctgcagaagatgggctggaaggagggccatggcctgggctccctcggaaagggcatcagggagccggtcagcgtgtacgcagcaggcagcctggggtgggagtgggtggggcctcagtccttccacctgcagcctgccgcttggctccttcacagccaagatggcttacagctggcagttgatttttgttttttaaacagaaggcatcttcagatgagaagctgatcatttacatgtgcaggtgtttacagggctcctttctgtcctggtgtagattttttaaccagcttgttggccctggtcattttggccacatttgtgaccatcataaaagctaagtggtatttctgtgtagtttccgtctggaactgctttcccattcccgggaacccatagccgggccagccagggtcccgaacacaggcccaaagtttattaaaccccgatcataacctccagcaggcatttcatttaatactgagcttagttcctgctgggtaaggcattccgaggtaaccagggccctctgggcaccccctcaaaagccagctcttcgagggtgagtactccttgtttctactgtgagtcgcgtcttgattttccctttctttgatgtctcagtgtgtgtcccaaacacctgcatctcatggactgtttgtgcccatgcccagttcctggcatgccaggccctgggctcaggtgcacaactgactctctttttcactccctaggggaaccccctcggaaggggaagggttgggtgctgacgggcaggagcacaaagaagacacattcgatgtgttccgacagaggatgatgcagatgtacagacacaagcgggccaacaaatagggtatgttcacaggccagtgtgtaaggccgtctgccctcgctggcgtgctggtatgcagagaaatttcccccaacaaagttgatgttccctgctcccccaaaaatgccacacacaaaaaaaatcacaaaattctgtgagggaaacaaaagggtctatggatgtggatatgccccattcttaccttccaggtttgctgaaggagcaaacctcacactggccaagggcagatgcgcatggcctgcctggtgccccggctgtgagcccctcaaggcctccaggccagcctccgtggatgtgcgtgtggaaataggccacgcctgtctcttctcttgctcaagttttctctcacagatgacagccacctaccacataacatgaccagcaaacggactgttcctagtccagagggccttgccatcatgcaagtggaagggcgactgtgacagccactgccacagaggatggcagttggctgtgtccctttgtgagggtcttcaaatccttttccttctgcagggccttgggcctgtaaatatcctcatctttctattcttttttttttttagttgccccctcacctaatttccacctcagttttgaacaaaatcgttctcttcctgaatagatcaaaaccactgatgtgaaagataagccttgaagcagcaattgcccttaaaacatcatccctgccctggatcggcctggagccagtgcccaagtacggtttggtgtgtacatgaaaacaaacgtctctgcagtctctggggcggaggtttcgctggcttttctttctctcaaagaaaaaaacatgcaccattttcaatgtgcttttgcctctcctctctgttcacatgcttttagcagcaagtcccctccaaatctgtcttggttccccttcagaaggtggcgctgcccccgaaaggcacctcagcctgtgagtgctgaggaaccagctcctctggctgattttccagttggactggccattgctctccagaagtgctctgttagcaaacgtgatgtggaaacgatcacagatggtgttttctcgttgttcgccagaatttatacgggggagacaaattcccggtaattaccaagtctgcactcgggtaccaaagctctgaagctctctgaacagttgccatacttgagttgatgaatgtgttattcatggtgtctcatctcatcaatgcatcttgagagacttaatgaaattttagcaacagtatagaatagctctatcgggtggggagtaatcattaaacagatgaaatcggccccagatttacatgtctctttagaatccacagtgtaagcaaactacagttacaaagggatgggggttgtaaaccctctgagactctgcacttttcgcacgtatggcatcgtcaagtgctgtcttattacagcctttgtaaggagaggcaggctcctcctggggtgggctctgcagctgctctatttccaggcatgtgatcgcccccgctctccagattccccagcactctgctgcgtgtaactccactcaattctccactcatccttccttgtgaagcaggatcgttgaagttttaagtatgggcaaaaatctggaaaacttaggatccctctgacaccccaggattaggggacacagcagtggctagggcatcagccacagaactgagcgggaaatgccacttgtattggctgtaaagaaatcctggctttgggccaggcacagtggctcaagcctgtaatcccagcactttaggaggttgaggcggatggatcacctgaggtcaggagtttgagaccagcctggccaacatggtgtaaccccgtctctactaaaaatacaaaaaaattagccaggcgtggtagcgggcacctgtaatcccagctactcaggaggctgaggcaggagaatcacttgaaccggggaggcagaggttgcagtgagctgagatcatgccactccactccagcctgggcgacagagcaagactctgtctcaaaaaaaaaaaaggaaatcctggctttctttaagccacagacttcctaggctgtggtcccagctccttgtctgcctggtccctgtcaccttgcagtgccaccacccccaggggctctgcttgcttccagtggcttctgtagctttggcaactggcagatctttatggcagtagaggtgccagcatggaggatggagtttgggtttataacccaaccctcgaacgaaccagcctgtgggggcctggagtggagctggttttggggagtcacaggtgcggggggttcatcatctcctttctccttctcctttcctgacccctccgacagcttccatgttggccatgggtcaggtgaatggatggagctccaagcggggctcagcccattgacccgagcgaggcgcacacacctgcagcgtggatcaagcgcactctctccagcatcgccctgaccattccatgtgctttgtcctagcatgttcattcttgactttctccacttcattttattaaaaagttaaatgctttaggaatctgtggcgtgtggccactgaccgccccccacctcctgccgctcctccaagtttgagctgagatggttctgtgagtccttggcaggggtcaaagggcacatctccttgaacctagaaagccccctacactctcagaggacacctctcctgtggattcagcgctggggcagtgaaggtgtcgggagccagcagagcatggtgcgtgctgccagctgccggccagccgggatagaggagatgccactggccctccgtgcccccagcccctccctcttaaccgaggctgtccttgctctctgcagaggccgctctgcaggatcctcgtgtcgcgcgtgatgtgtggtggcacagccgtgtcaaagtcacagtgtcttttctgtcgttctagttccagggtcacccccgagaggacaacaggcatctggaagtgctctctcgccactctgggtgctttactgtctctggcttgtttccatcactggaaatcacttagagaattgtagtgtttttggtccttgataaagcctagaagacatttgtgatgttacaaaatggaagttttcttttgtttctgttttttaagatctaagaagttgtgaatgttgttaatcatttagccgttgcaataaatgtagaggaaatgca

SEQ ID NO: 355537 - DNA, 7168 bp, Homo sapiens
agcggctgtgcggcgcggcgctgcggagaccgttggttcatttgcatgtccccgcctcgcgcggcggcggcggcgggtgaggagcctgaggcggcggcgggggtggctccgcgcgcggtggtctcgggggcaaaataacatggcagccagacgaattacacaggagacttttgatgctgtattacaagaaaaagccaaacgatatcacatggatgccagtggtgaggctgtaagcgaaactcttcagtttaaagctcaagatctcttaagggcagtcccaagatccagagcagagatgtatgatgacgtccacagcgatggcagatactccctcagtggatctgtagctcactctagagatgccggaagagaaggcctgagaagtgacgtatttccagggccttccttcagatcaagcaacccttccatcagtgatgacagctactttcgcaaagaatgtggccgggatctggaattttctcactctgattctcgggaccaggtcattggccaccggaaattggggcatttccgttctcaggactggaaatttgcgctccgtggttcttgggaacaagactttggccatccagtttctcaagagtcctcttggtcacaggagtatagttttggtccctctgcagttttgggggactttggatcttccaggctgattgagaaagagtgtttggagaaggagagtcgggattatgacgtggaccatcctggggaggctgactctgtgcttaggggcagcagtcaagtccaggccagaggtcgagctctaaacatcgttgaccaggaaggttccctcctaggaaagggggagactcagggcctgctcacagctaaggggggtgttgggaaacttgtcacattgagaaatgtgagcacaaaaaaaatacccaccgtgaatcgtattactcccaaaactcagggcactaaccaaatccagaaaaacactccaagtcctgatgtgaccctggggacaaacccagggacagaagatatccagttccccattcagaagatccctctggggctggatctgaagaatcttcggctccccagaagaaagatgagctttgacatcatagataagtctgatgttttttcaagatttgggatagaaataatcaaatgggcaggattccacaccataaaagatgatattaaattttcccaacttttccagactctctttgaacttgaaacagaaacctgtgctaaaatgcttgcctcattcaaatgttccttaaaaccagagcacagagatttttgcttttttactatcaaatttttaaagcactctgctttgaaaacacccagagttgataatgagtttttaaacatgcttttagacaaaggtgctgtgaagaccaaaaattgcttttttgaaatcataaagccttttgacaagtacataatgagacttcaagaccggcttctgaagagtgtcacacctttgcttatggcctgcaatgcctacgagctaagtgtcaagatgaagaccctcagtaaccccctggacttggctcttgccctagaaaccaccaactctctctgccggaagtctttggcccttttgggacagacattttccttggcctcttctttccggcaggagaaaatcttagaagctgtcggcctgcaagatatagctccctcacctgctgcgtttccaaacttcgaagactccactttgtttgggcgagagtacatagaccacctgaaggcctggctagtcagcagcggatgtcccctccaggttaagaaagccgaaccagagccgatgcgagaggaggagaaaatgattcctcctacgaaacctgaaattcaggccaaggctccaagtagtctgagtgatgctgtcccccagcgagcagatcacagggtagtgggcaccatcgaccagcttgtgaaacgtgtcatcgaaggcagcctgtctcccaaagagagaactcttctcaaagaggaccctgcttactggtttttgtctgatgaaaatagtctggagtataaatattacaagctgaagttggcagaaatgcagcggatgagcgagaacttgcgaggagccgaccagaagccgacctcagcagactgtgcagtgagggccatgctgtactcccgggctgtccgcaacctcaagaagaaactccttccgtggcagcggcgggggctcctccgtgctcaagggctccggggctggaaggcgaggagagcgaccaccgggacccagaccctcctatcctcaggcaccaggctgaaacaccacggccggcaggctccaggcctctcacaggcaaaaccatccctgccagacagaaatgatgctgccaaggactgcccgccagacccagttggaccttctcctcaggaccccagcttagaagcctcaggcccatcccccaagccagcaggagtggacatctctgaagcacctcagacctcttctccctgcccatctgctgacattgacatgaagacaatggagactgcagagaaactggctagatttgttgctcaggtgggaccagagatcgaacaattcagcatagaaaacagcaccgataaccctgacctgtggtttctacatgaccaaaatagttctgctttcaaattctatcgaaagaaagtgtttgaactatgtccatcaatttgtttcacgtcatctccgcacaaccttcacactggtggtggtgacaccacgggttctcaggagagccccgtggacctcatggaaggggaagcagagtttgaagacgagccccctccgcgggaggctgagctggagagcccagaggtgatgcctgaggaggaggacgaggacgatgaggatgggggagaggaggcccccgctcctggaggggcgggcaagtctgagggcagcacccctgccgacggccttcccggcgaggctgccgaggacgacctggctggagcacctgccttgtcacaggcctcctcaggtacctgcttccctcggaagaggatcagcagcaagtcattgaaggttggcatgattccagctcccaagagagtgtgtctcatccaggagccaaaagtccatgaaccagttcgaattgcctatgacaggcctcggggtcgtcccatgtccaaaaagaagaaacccaaggacttggacttcgcccagcagaagctgaccgataagaacctgggcttccagatgctgcagaagatgggctggaaggagggccatggcctgggctccctcggaaagggcatcagggagccggtcagcgtgtacgcagcaggcagcctggggtgggagtgggtggggcctcagtccttccacctgcagcctgccgcttggctccttcacagccaagatggcttacagctggcagttgatttttgttttttaaacagaaggcatcttcagatgagaagctgatcatttacatgtgcaggtgtttacagggctcctttctgtcctggtgtagattttttaaccagcttgttggccctggtcattttggccacatttgtgaccatcataaaagctaagtggtatttctgtgtagtttccgtctggaactgctttcccattcccgggaacccatagccgggccagccagggtcccgaacacaggcccaaagtttattaaaccccgatcataacctccagcaggcatttcatttaatactgagcttagttcctgctgggtaaggcattccgaggtaaccagggccctctgggcaccccctcaaaagccagctcttcgagggtgagtactccttgtttctactgtgagtcgcgtcttgattttccctttctttgatgtctcagtgtgtgtcccaaacacctgcatctcatggactgtttgtgcccatgcccagttcctggcatgccaggccctgggctcaggtgcacaactgactctctttttcactccctaggggaaccccctcggaaggggaagggttgggtgctgacgggcaggagcacaaagaagacacattcgatgtgttccgacagaggatgatgcagatgtacagacacaagcgggccaacaaatagggtatgttcacaggccagtgtgtaaggccgtctgccctcgctggcgtgctggtatgcagagaaatttcccccaacaaagttgatgttccctgctcccccaaaaatgccacacacaaaaaaaatcacaaaattctgtgagggaaacaaaagggtctatggatgtggatatgccccattcttaccttccaggtttgctgaaggagcaaacctcacactggccaagggcagatgcgcatggcctgcctggtgccccggctgtgagcccctcaaggcctccaggccagcctccgtggatgtgcgtgtggaaataggccacgcctgtctcttctcttgctcaagttttctctcacagatgacagccacctaccacataacatgaccagcaaacggactgttcctagtccagagggccttgccatcatgcaagtggaagggcgactgtgacagccactgccacagaggatggcagttggctgtgtccctttgtgagggtcttcaaatccttttccttctgcagggccttgggcctgtaaatatcctcatctttctattcttttttttttttagttgccccctcacctaatttccacctcagttttgaacaaaatcgttctcttcctgaatagatcaaaaccactgatgtgaaagataagccttgaagcagcaattgcccttaaaacatcatccctgccctggatcggcctggagccagtgcccaagtacggtttggtgtgtacatgaaaacaaacgtctctgcagtctctggggcggaggtttcgctggcttttctttctctcaaagaaaaaaacatgcaccattttcaatgtgcttttgcctctcctctctgttcacatgcttttagcagcaagtcccctccaaatctgtcttggttccccttcagaaggtggcgctgcccccgaaaggcacctcagcctgtgagtgctgaggaaccagctcctctggctgattttccagttggactggccattgctctccagaagtgctctgttagcaaacgtgatgtggaaacgatcacagatggtgttttctcgttgttcgccagaatttatacgggggagacaaattcccggtaattaccaagtctgcactcgggtaccaaagctctgaagctctctgaacagttgccatacttgagttgatgaatgtgttattcatggtgtctcatctcatcaatgcatcttgagagacttaatgaaattttagcaacagtatagaatagctctatcgggtggggagtaatcattaaacagatgaaatcggccccagatttacatgtctctttagaatccacagtgtaagcaaactacagttacaaagggatgggggttgtaaaccctctgagactctgcacttttcgcacgtatggcatcgtcaagtgctgtcttattacagcctttgtaaggagaggcaggctcctcctggggtgggctctgcagctgctctatttccaggcatgtgatcgcccccgctctccagattccccagcactctgctgcgtgtaactccactcaattctccactcatccttccttgtgaagcaggatcgttgaagttttaagtatgggcaaaaatctggaaaacttaggatccctctgacaccccaggattaggggacacagcagtggctagggcatcagccacagaactgagcgggaaatgccacttgtattggctgtaaagaaatcctggctttgggccaggcacagtggctcaagcctgtaatcccagcactttaggaggttgaggcggatggatcacctgaggtcaggagtttgagaccagcctggccaacatggtgtaaccccgtctctactaaaaatacaaaaaaattagccaggcgtggtagcgggcacctgtaatcccagctactcaggaggctgaggcaggagaatcacttgaaccggggaggcagaggttgcagtgagctgagatcatgccactccactccagcctgggcgacagagcaagactctgtctcaaaaaaaaaaaaggaaatcctggctttctttaagccacagacttcctaggctgtggtcccagctccttgtctgcctggtccctgtcaccttgcagtgccaccacccccaggggctctgcttgcttccagtggcttctgtagctttggcaactggcagatctttatggcagtagaggtgccagcatggaggatggagtttgggtttataacccaaccctcgaacgaaccagcctgtgggggcctggagtggagctggttttggggagtcacaggtgcggggggttcatcatctcctttctccttctcctttcctgacccctccgacagcttccatgttggccatgggtcaggtgaatggatggagctccaagcggggctcagcccattgacccgagcgaggcgcacacacctgcagcgtggatcaagcgcactctctccagcatcgccctgaccattccatgtgctttgtcctagcatgttcattcttgactttctccacttcattttattactcctgccgctcctccaagtttgagctgagatggttctgtgagtccttggcaggggtcaaagggcacatctccttgaacctagaaagccccctacactctcagaggacacctctcctgtggattcagcgctggggcagtgaaggtgtcgggagccagcagagcatggtgcgtgctgccagctgccggccagccgggatagaggagatgccactggccctccgtgcccccagcccctccctcttaaccgaggctgtccttgctctctgcagaggccgctctgcaggatcctcgtgtcgcgcgtgatgtgtggtggcacagccgtgtcaaagtcacagtgtcttttctgtcgttctagttccagggtcacccccgagaggacaacaggcatctggaagtgctctctcgccactctgggtgctttactgtctctggcttgtttccatcactggaaatcacttagagaattgtagtgtttttggtccttgataaagcctagaagacatttgtgatgttacaaaatggaagttttcttttgtttctgttttttaagatctaagaagttgtgaatgttgttaatcatttagccgttgcaataaatgtagaggaaatgca

SEQ ID NO: 355538 - DNA, 6051 bp, Homo sapiens
agcggctgtgcggcgcggcgctgcggagaccgttggttcatttgcatgtccccgcctcgcgcggcggcggcggcgggtgaggagcctgaggcggcggcgggggtggctccgcgcgcggtggtctcgggggcaaaataacatggcagccagacgaattacacaggagacttttgatgctgtattacaagaaaaagccaaacgatatcacatggatgccagtggtgaggctgtaagcgaaactcttcagtttaaagctcaagatctcttaagggcagtcccaagatccagagcagagatgtatgatgacgtccacagcgatggcagatactccctcagtggatctgtagctcactctagagatgccggaagagaaggcctgagaagtgacgtatttccagggccttccttcagatcaagcaacccttccatcagtgatgacagctactttcgcaaagaatgtggccgggatctggaattttctcactctgattctcgggaccaggtcattggccaccggaaattggggcatttccgttctcaggactggaaatttgcgctccgtggttcttgggaacaagactttggccatccagtttctcaagagtcctcttggtcacaggagtatagttttggtccctctgcagttttgggggactttggatcttccaggctgattgagaaagagtgtttggagaaggagagtcgggattatgacgtggaccatcctggggaggctgactctgtgcttaggggcagcagtcaagtccaggccagaggtcgagctctaaacatcgttgaccaggaaggttccctcctaggaaagggggagactcagggcctgctcacagctaaggggggtgttgggaaacttgtcacattgagaaatgtgagcacaaaaaaaatacccaccgtgaatcgtattactcccaaaactcagggcactaaccaaatccagaaaaacactccaagtcctgatgtgaccctggggacaaacccagggacagaagatatccagttccccattcagaagatccctctggggctggatctgaagaatcttcggctccccagaagaaagatgagctttgacatcatagataagtctgatgttttttcaagatttgggatagaaataatcaaatgggcaggattccacaccataaaagatgatattaaattttcccaacttttccagactctctttgaacttgaaacagaaacctgtgctaaaatgcttgcctcattcaaatgttccttaaaaccagagcacagagatttttgcttttttactatcaaatttttaaagcactctgctttgaaaacacccagagttgataatgagtttttaaacatgcttttagacaaaggtgctgtgaagaccaaaaattgcttttttgaaatcataaagccttttgacaagtacataatgagacttcaagaccggcttctgaagagtgtcacacctttgcttatggcctgcaatgcctacgagctaagtgtcaagatgaagaccctcagtaaccccctggacttggctcttgccctagaaaccaccaactctctctgccggaagtctttggcccttttgggacagacattttccttggcctcttctttccggcaggagaaaatcttagaagctgtcggcctgcaagatatagctccctcacctgctgcgtttccaaacttcgaagactccactttgtttgggcgagagtacatagaccacctgaaggcctggctagtcagcagcggatgtcccctccaggttaagaaagccgaaccagagccgatgcgagaggaggagaaaatgattcctcctacgaaacctgaaattcaggccaaggctccaagtagtctgagtgatgctgtcccccagcgagcagatcacagggtagtgggcaccatcgaccagcttgtgaaacgtgtcatcgaaggcagcctgtctcccaaagagagaactcttctcaaagaggaccctgcttactggtttttgtctgatgaaaatagtctggagtataaatattacaagctgaagttggcagaaatgcagcggatgagcgagaacttgcgaggagccgaccagaagccgacctcagcagactgtgcagtgagggccatgctgtactcccgggctgtccgcaacctcaagaagaaactccttccgtggcagcggcgggggctcctccgtgctcaagggctccggggctggaaggcgaggagagcgaccaccgggacccagaccctcctatcctcaggcaccaggctgaaacaccacggccggcaggctccaggcctctcacaggcaaaaccatccctgccagacagaaatgatgctgccaaggactgcccgccagacccagttggaccttctcctcaggaccccagcttagaagcctcaggcccatcccccaagccagcaggagtggacatctctgaagcacctcagacctcttctccctgcccatctgctgacattgacatgaagacaatggagactgcagagaaactggctagatttgttgctcaggtgggaccagagatcgaacaattcagcatagaaaacagcaccgataaccctgacctgtggtttctacatgaccaaaatagttctgctttcaaattctatcgaaagaaagtgtttgaactatgtccatcaatttgtttcacgtcatctccgcacaaccttcacactggtggtggtgacaccacgggttctcaggagagccccgtggacctcatggaaggggaagcagagtttgaagacgagccccctccgcgggaggctgagctggagagcccagaggtgatgcctgaggaggaggacgaggacgatgaggatgggggagaggaggcccccgctcctggaggggcgggcaagtctgagggcagcacccctgccgacggccttcccggcgaggctgccgaggacgacctggctggagcacctgccttgtcacaggcctcctcaggtacctgcttccctcggaagaggatcagcagcaagtcattgaaggttggcatgattccagctcccaagagagtgtgtctcatccaggagccaaaagaggcgagaacccaccagtacagcagagctgaagcctgttcccagaacgggtctcttgtcccattgcagtcccctgcccgattcagcaaccactgactgttttccaagccccagtccatgaaccagttcgaattgcctatgacaggcctcggggtcgtcccatgtccaaaaagaagaaacccaaggacttggacttcgcccagcagaagctgaccgataagaacctgggcttccagatgctgcagaagatgggctggaaggagggccatggcctgggctccctcggaaagggcatcagggagccggtcagcgtgggaaccccctcggaaggggaagggttgggtgctgacgggcaggagcacaaagaagacacattcgatgtgttccgacagaggatgatgcagatgtacagacacaagcgggccaacaaatagatcaaaaccactgatgtgaaagataagccttgaagcagcaattgcccttaaaacatcatccctgccctggatcggcctggagccagtgcccaagtacggtttggtgtgtacatgaaaacaaacgtctctgcagtctctggggcggaggtttcgctggcttttctttctctcaaagaaaaaaacatgcaccattttcaatgtgcttttgcctctcctctctgttcacatgcttttagcagcaagtcccctccaaatctgtcttggttccccttcagaaggtggcgctgcccccgaaaggcacctcagcctgtgagtgctgaggaaccagctcctctggctgattttccagttggactggccattgctctccagaagtgctctgttagcaaacgtgatgtggaaacgatcacagatggtgttttctcgttgttcgccagaatttatacgggggagacaaattcccggtaattaccaagtctgcactcgggtaccaaagctctgaagctctctgaacagttgccatacttgagttgatgaatgtgttattcatggtgtctcatctcatcaatgcatcttgagagacttaatgaaattttagcaacagtatagaatagctctatcgggtggggagtaatcattaaacagatgaaatcggccccagatttacatgtctctttagaatccacagtgtaagcaaactacagttacaaagggatgggggttgtaaaccctctgagactctgcacttttcgcacgtatggcatcgtcaagtgctgtcttattacagcctttgtaaggagaggcaggctcctcctggggtgggctctgcagctgctctatttccaggcatgtgatcgcccccgctctccagattccccagcactctgctgcgtgtaactccactcaattctccactcatccttccttgtgaagcaggatcgttgaagttttaagtatgggcaaaaatctggaaaacttaggatccctctgacaccccaggattaggggacacagcagtggctagggcatcagccacagaactgagcgggaaatgccacttgtattggctgtaaagaaatcctggctttgggccaggcacagtggctcaagcctgtaatcccagcactttaggaggttgaggcggatggatcacctgaggtcaggagtttgagaccagcctggccaacatggtgtaaccccgtctctactaaaaatacaaaaaaattagccaggcgtggtagcgggcacctgtaatcccagctactcaggaggctgaggcaggagaatcacttgaaccggggaggcagaggttgcagtgagctgagatcatgccactccactccagcctgggcgacagagcaagactctgtctcaaaaaaaaaaaaggaaatcctggctttctttaagccacagacttcctaggctgtggtcccagctccttgtctgcctggtccctgtcaccttgcagtgccaccacccccaggggctctgcttgcttccagtggcttctgtagctttggcaactggcagatctttatggcagtagaggtgccagcatggaggatggagtttgggtttataacccaaccctcgaacgaaccagcctgtgggggcctggagtggagctggttttggggagtcacaggtgcggggggttcatcatctcctttctccttctcctttcctgacccctccgacagcttccatgttggccatgggtcaggtgaatggatggagctccaagcggggctcagcccattgacccgagcgaggcgcacacacctgcagcgtggatcaagcgcactctctccagcatcgccctgaccattccatgtgctttgtcctagcatgttcattcttgactttctccacttcattttattaaaaagttaaatgctttaggaatctgtggcgtgtggccactgaccgccccccacctcctgccgctcctccaagtttgagctgagatggttctgtgagtccttggcaggggtcaaagggcacatctccttgaacctagaaagccccctacactctcagaggacacctctcctgtggattcagcgctggggcagtgaaggtgtcgggagccagcagagcatggtgcgtgctgccagctgccggccagccgggatagaggagatgccactggccctccgtgcccccagcccctccctcttaaccgaggctgtccttgctctctgcagaggccgctctgcaggatcctcgtgtcgcgcgtgatgtgtggtggcacagccgtgtcaaagtcacagtgtcttttctgtcgttctagttccagggtcacccccgagaggacaacaggcatctggaagtgctctctcgccactctgggtgctttactgtctctggcttgtttccatcactggaaatcacttagagaattgtagtgtttttggtccttgataaagcctagaagacatttgtgatgttacaaaatggaagttttcttttgtttctgttttttaagatctaagaagttgtgaatgttgttaatcatttagccgttgcaataaatgtagaggaaatgca

SEQ ID NO: 355539 - DNA, 7519 bp, Homo sapiens
agcggctgtgcggcgcggcgctgcggagaccgttggttcatttgcatgtccccgcctcgcgcggcggcggcggcgggtgaggagcctgaggcggcggcgggggtggctccgcgcgcggtggtctcgggggcaaaataacatggcagccagacgaattacacaggagacttttgatgctgtattacaagaaaaagccaaacgatatcacatggatgccagtggtgaggctgtaagcgaaactcttcagtttaaagctcaagatctcttaagggcagtcccaagatccagagcagagatgtatgatgacgtccacagcgatggcagatactccctcagtggatctgtagctcactctagagatgccggaagagaaggcctgagaagtgacgtatttccagggccttccttcagatcaagcaacccttccatcagtgatgacagctactttcgcaaagaatgtggccgggatctggaattttctcactctgattctcgggaccaggtcattggccaccggaaattggggcatttccgttctcaggactggaaatttgcgctccgtggttcttgggaacaagactttggccatccagtttctcaagagtcctcttggtcacaggagtatagttttggtccctctgcagttttgggggactttggatcttccaggctgattgagaaagagtgtttggagaaggagagtcgggattatgacgtggaccatcctggggaggctgactctgtgcttaggggcagcagtcaagtccaggccagaggtcgagctctaaacatcgttgaccaggaaggttccctcctaggaaagggggagactcagggcctgctcacagctaaggggggtgttgggaaacttgtcacattgagaaatgtgagcacaaaaaaaatacccaccgtgaatcgtattactcccaaaactcagggcactaaccaaatccagaaaaacactccaagtcctgatgtgaccctggggacaaacccagggacagaagatatccagttccccattcagaagatccctctggggctggatctgaagaatcttcggctccccagaagaaagatgagctttgacatcatagataagtctgatgttttttcaagatttgggatagaaataatcaaatgggcaggattccacaccataaaagatgatattaaattttcccaacttttccagactctctttgaacttgaaacagaaacctgtgctaaaatgcttgcctcattcaaatgttccttaaaaccagagcacagagatttttgcttttttactatcaaatttttaaagcactctgctttgaaaacacccagagttgataatgagtttttaaacatgcttttagacaaaggtgctgtgaagaccaaaaattgcttttttgaaatcataaagccttttgacaagtacataatgagacttcaagaccggcttctgaagagtgtcacacctttgcttatggcctgcaatgcctacgagctaagtgtcaagatgaagaccctcagtaaccccctggacttggctcttgccctagaaaccaccaactctctctgccggaagtctttggcccttttgggacagacattttccttggcctcttctttccggcaggagaaaatcttagaagctgtcggcctgcaagatatagctccctcacctgctgcgtttccaaacttcgaagactccactttgtttgggcgagagtacatagaccacctgaaggcctggctagtcagcagcggatgtcccctccaggttaagaaagccgaaccagagccgatgcgagaggaggagaaaatgattcctcctacgaaacctgaaattcaggccaaggctccaagtagtctgagtgatgctgtcccccagcgagcagatcacagggtagtgggcaccatcgaccagcttgtgaaacgtgtcatcgaaggcagcctgtctcccaaagagagaactcttctcaaagaggaccctgcttactggtttttgtctgatgaaaatagtctggagtataaatattacaagctgaagttggcagaaatgcagcggatgagcgagaacttgcgaggagccgaccagaagccgacctcagcagactgtgcagtgagggccatgctgtactcccgggctgtccgcaacctcaagaagaaactccttccgtggcagcggcgggggctcctccgtgctcaagggctccggggctggaaggcgaggagagcgaccaccgggacccagaccctcctatcctcaggcaccaggctgaaacaccacggccggcaggctccaggcctctcacaggcaaaaccatccctgccagacagaaatgatgctgccaaggactgcccgccagacccagttggaccttctcctcaggaccccagcttagaagcctcaggcccatcccccaagccagcaggagtggacatctctgaagcacctcagacctcttctccctgcccatctgctgacattgacatgaagacaatggagactgcagagaaactggctagatttgttgctcaggtgggaccagagatcgaacaattcagcatagaaaacagcaccgataaccctgacctgtggtttctacatgaccaaaatagttctgctttcaaattctatcgaaagaaagtgtttgaactatgtccatcaatttgtttcacgtcatctccgcacaaccttcacactggtggtggtgacaccacgggttctcaggagagccccgtggacctcatggaaggggaagcagagtttgaagacgagccccctccgcgggaggctgagctggagagcccagaggtgatgcctgaggaggaggacgaggacgatgaggatgggggagaggaggcccccgctcctggaggggcgggcaagtctgagggcagcacccctgccgacggccttcccggcgaggctgccgaggacgacctggctggagcacctgccttgtcacaggcctcctcaggtacctgcttccctcggaagaggatcagcagcaagtcattgaaggttggcatgattccagctcccaagagagtgtgtctcatccaggagccaaaagtccatgaaccagttcgaattgcctatgacaggcctcggggtcgtcccatgtccaaaaagaagaaacccaaggacttggacttcgcccagcagaagctgaccgataagaacctgggcttccagatgctgcagaagatgggctggaaggagggccatggcctgggctccctcggaaagggcatcagggagccggtcagcgtgtacgcagcaggcagcctggggtgggagtgggtggggcctcagtccttccacctgcagcctgccgcttggctccttcacagccaagatggcttacagctggcagttgatttttgttttttaaacagaaggcatcttcagatgagaagctgatcatttacatgtgcaggtgtttacagggctcctttctgtcctggtgtagattttttaaccagcttgttggccctggtcattttggccacatttgtgaccatcataaaagctaagtggtatttctgtgtagtttccgtctggaactgctttcccattcccgggaacccatagccgggccagccagggtcccgaacacaggcccaaagtttattaaaccccgatcataacctccagcaggcatttcatttaatactgagcttagttcctgctgggtaaggcattccgaggtaaccagggccctctgggcaccccctcaaaagccagctcttcgagggtgagtactccttgtttctactgtgagtcgcgtcttgattttccctttctttgatgtctcagtgtgtgtcccaaacacctgcatctcatggactgtttgtgcccatgcccagttcctggcatgccaggccctgggctcaggtgcacaactgactctctttttcactccctaggggaaccccctcggaaggggaagggttgggtgctgacgggcaggagcacaaagaagacacattcgatgtgttccgacagaggatgatgcagatgtacagacacaagcgggccaacaaatagggtatgttcacaggccagtgtgtaaggccgtctgccctcgctggcgtgctggtatgcagagaaatttcccccaacaaagttgatgttccctgctcccccaaaaatgccacacacaaaaaaaatcacaaaattctgtgagggaaacaaaagggtctatggatgtggatatgccccattcttaccttccaggtttgctgaaggagcaaacctcacactggccaagggcagatgcgcatggcctgcctggtgccccggctgtgagcccctcaaggcctccaggccagcctccgtggatgtgcgtgtggaaataggccacgcctgtctcttctcttgctcaagttttctctcacagatgacagccacctaccacataacatgaccagcaaacggactgttcctagtccagagggccttgccatcatgcaagtggaagggcgactgtgacagccactgccacagaggatggcagttggctgtgtccctttgtgagggtcttcaaatccttttccttctgcagggccttgggcctgtaaatatcctcatctttctattcttttttttttttagttgccccctcacctaatttccacctcagttttgaacaaaatcgttctcttcctgaatagatcaaaaccactgatgtgaaagataagccttgaagcagcaattgcccttaaaacatcatccctgccctggatcggcctggagccagtgcccaagtacggtttggtgtgtacatgaaaacaaacgtctctgcagtctctggggcggaggtttcgctggcttttctttctctcaaagaaaaaaacatgcaccattttcaatgtgcttttgcctctcctctctgttcacatgcttttagcagcaagtcccctccaaatctgtcttggttccccttcagaaggtggcgctgcccccgaaaggcacctcagcctgtgagtgctgaggaaccagctcctctggctgattttccagttggactggccattgctctccagaagtgctctgttagcaaacgtgatgtggaaacgatcacagatggtgttttctcgttgttcgccagaatttatacgggggagacaaattcccggtaattaccaagtctgcactcgggtaccaaagctctgaagctctctgaacagttgccatacttgagttgatgaatgtgttattcatggtgtctcatctcatcaatgcatcttgagagacttaatgaaattttagcaacagtatagaatagctctatcgggtggggagtaatcattaaacagatgaaatcggccccagatttacatgtctctttagaatccacagtgtaagcaaactacagttacaaagggatgggggttgtaaaccctctgagactctgcacttttcgcacgtatggcatcgtcaagtgctgtcttattacagcctttgtaaggagaggcaggctcctcctggggtgggctctgcagctgctctatttccaggcatgtgatcgcccccgctctccagattccccagcactctgctgcgtgtaactccactcaattctccactcatccttccttgtgaagcaggatcgttgaagttttaagtatgggcaaaaatctggaaaacttaggatccctctgacaccccaggattaggggacacagcagtggctagggcatcagccacagaactgagcgggaaatgccacttgtattggctgtaaagaaatcctggctttgggccaggcacagtggctcaagcctgtaatcccagcactttaggaggttgaggcggatggatcacctgaggtcaggagtttgagaccagcctggccaacatggtgtaaccccgtctctactaaaaatacaaaaaaattagccaggcgtggtagcgggcacctgtaatcccagctactcaggaggctgaggcaggagaatcacttgaaccggggaggcagaggttgcagtgagctgagatcatgccactccactccagcctgggcgacagagcaagctccatctccaaaaaaaaaaaaaaaaaaggccggcacggtgactcacgcctataattccaggcactttgggaggccgaggcaggtggatcacgaggtcaagagatcgagaccatcctggccaacatggtgaaaccctgtctctactaaaaatgcaaaaaattagctgggcgtggtggcgggcgcttgtagtcccagctactcaggaggctgaggcaggagaatcacttgaacccgggaggcggaggttgcagtgagccgagattgtgccaccgcactccagcctggcaacagagcgagactctgtctcaaaaaaaaaaaaggaaatcctggctttctttaagccacagacttcctaggctgtggtcccagctccttgtctgcctggtccctgtcaccttgcagtgccaccacccccaggggctctgcttgcttccagtggcttctgtagctttggcaactggcagatctttatggcagtagaggtgccagcatggaggatggagtttgggtttataacccaaccctcgaacgaaccagcctgtgggggcctggagtggagctggttttggggagtcacaggtgcggggggttcatcatctcctttctccttctcctttcctgacccctccgacagcttccatgttggccatgggtcaggtgaatggatggagctccaagcggggctcagcccattgacccgagcgaggcgcacacacctgcagcgtggatcaagcgcactctctccagcatcgccctgaccattccatgtgctttgtcctagcatgttcattcttgactttctccacttcattttattaaaaagttaaatgctttaggaatctgtggcgtgtggccactgaccgccccccacctcctgccgctcctccaagtttgagctgagatggttctgtgagtccttggcaggggtcaaagggcacatctccttgaacctagaaagccccctacactctcagaggacacctctcctgtggattcagcgctggggcagtgaaggtgtcgggagccagcagagcatggtgcgtgctgccagctgccggccagccgggatagaggagatgccactggccctccgtgcccccagcccctccctcttaaccgaggctgtccttgctctctgcagaggccgctctgcaggatcctcgtgtcgcgcgtgatgtgtggtggcacagccgtgtcaaagtcacagtgtcttttctgtcgttctagttccagggtcacccccgagaggacaacaggcatctggaagtgctctctcgccactctgggtgctttactgtctctggcttgtttccatcactggaaatcacttagagaattgtagtgtttttggtccttgataaagcctagaagacatttgtgatgttacaaaatggaagttttcttttgtttctgttttttaagatctaagaagttgtgaatgttgttaatcatttagccgttgcaataaatgtagaggaaatgca

SEQ ID NO: 355540 - DNA, 6370 bp, Homo sapiens
tggggtgattgcacacattagtacttccatacagagactcattctttatatatcccaccgtgaatcgtattactcccaaaactcagggcactaaccaaatccagaaaaacactccaagtcctgatgtgaccctggggacaaacccagggacagaagatatccagttccccattcagaagatccctctggggctggatctgaagaatcttcggctccccagaagaaagatgagctttgacatcatagataagtctgatgttttttcaagatttgggatagaaataatcaaatgggcaggattccacaccataaaagatgatattaaattttcccaacttttccagactctctttgaacttgaaacagaaacctgtgctaaaatgcttgcctcattcaaatgttccttaaaaccagagcacagagatttttgcttttttactatcaaatttttaaagcactctgctttgaaaacacccagagttgataatgagtttttaaacatgcttttagacaaaggtgctgtgaagaccaaaaattgcttttttgaaatcataaagccttttgacaagtacataatgagacttcaagaccggcttctgaagagtgtcacacctttgcttatggcctgcaatgcctacgagctaagtgtcaagatgaagaccctcagtaaccccctggacttggctcttgccctagaaaccaccaactctctctgccggaagtctttggcccttttgggacagacattttccttggcctcttctttccggcaggagaaaatcttagaagctgtcggcctgcaagatatagctccctcacctgctgcgtttccaaacttcgaagactccactttgtttgggcgagagtacatagaccacctgaaggcctggctagtcagcagcggatgtcccctccaggttaagaaagccgaaccagagccgatgcgagaggaggagaaaatgattcctcctacgaaacctgaaattcaggccaaggctccaagtagtctgagtgatgctgtcccccagcgagcagatcacagggtagtgggcaccatcgaccagcttgtgaaacgtgtcatcgaaggcagcctgtctcccaaagagagaactcttctcaaagaggaccctgcttactggtttttgtctgatgaaaatagtctggagtataaatattacaagctgaagttggcagaaatgcagcggatgagcgagaacttgcgaggagccgaccagaagccgacctcagcagactgtgcagtgagggccatgctgtactcccgggctgtccgcaacctcaagaagaaactccttccgtggcagcggcgggggctcctccgtgctcaagggctccggggctggaaggcgaggagagcgaccaccgggacccagaccctcctatcctcaggcaccaggctgaaacaccacggccggcaggctccaggcctctcacaggcaaaaccatccctgccagacagaaatgatgctgccaaggactgcccgccagacccagttggaccttctcctcaggaccccagcttagaagcctcaggcccatcccccaagccagcaggagtggacatctctgaagcacctcagacctcttctccctgcccatctgctgacattgacatgaagacaatggagactgcagagaaactggctagatttgttgctcaggtgggaccagagatcgaacaattcagcatagaaaacagcaccgataaccctgacctgtggtttctacatgaccaaaatagttctgctttcaaattctatcgaaagaaagtgtttgaactatgtccatcaatttgtttcacgtcatctccgcacaaccttcacactggtggtggtgacaccacgggttctcaggagagccccgtggacctcatggaaggggaagcagagtttgaagacgagccccctccgcgggaggctgagctggagagcccagaggtgatgcctgaggaggaggacgaggacgatgaggatgggggagaggaggcccccgctcctggaggggcgggcaagtctgagggcagcacccctgccgacggccttcccggcgaggctgccgaggacgacctggctggagcacctgccttgtcacaggcctcctcaggtacctgcttccctcggaagaggatcagcagcaagtcattgaaggttggcatgattccagctcccaagagagtgtgtctcatccaggagccaaaagtccatgaaccagttcgaattgcctatgacaggcctcggggtcgtcccatgtccaaaaagaagaaacccaaggacttggacttcgcccagcagaagctgaccgataagaacctgggcttccagatgctgcagaagatgggctggaaggagggccatggcctgggctccctcggaaagggcatcagggagccggtcagcgtgtacgcagcaggcagcctggggtgggagtgggtggggcctcagtccttccacctgcagcctgccgcttggctccttcacagccaagatggcttacagctggcagttgatttttgttttttaaacagaaggcatcttcagatgagaagctgatcatttacatgtgcaggtgtttacagggctcctttctgtcctggtgtagattttttaaccagcttgttggccctggtcattttggccacatttgtgaccatcataaaagctaagtggtatttctgtgtagtttccgtctggaactgctttcccattcccgggaacccatagccgggccagccagggtcccgaacacaggcccaaagtttattaaaccccgatcataacctccagcaggcatttcatttaatactgagcttagttcctgctgggtaaggcattccgaggtaaccagggccctctgggcaccccctcaaaagccagctcttcgagggtgagtactccttgtttctactgtgagtcgcgtcttgattttccctttctttgatgtctcagtgtgtgtcccaaacacctgcatctcatggactgtttgtgcccatgcccagttcctggcatgccaggccctgggctcaggtgcacaactgactctctttttcactccctaggggaaccccctcggaaggggaagggttgggtgctgacgggcaggagcacaaagaagacacattcgatgtgttccgacagaggatgatgcagatgtacagacacaagcgggccaacaaatagggtatgttcacaggccagtgtgtaaggccgtctgccctcgctggcgtgctggtatgcagagaaatttcccccaacaaagttgatgttccctgctcccccaaaaatgccacacacaaaaaaaatcacaaaattctgtgagggaaacaaaagggtctatggatgtggatatgccccattcttaccttccaggtttgctgaaggagcaaacctcacactggccaagggcagatgcgcatggcctgcctggtgccccggctgtgagcccctcaaggcctccaggccagcctccgtggatgtgcgtgtggaaataggccacgcctgtctcttctcttgctcaagttttctctcacagatgacagccacctaccacataacatgaccagcaaacggactgttcctagtccagagggccttgccatcatgcaagtggaagggcgactgtgacagccactgccacagaggatggcagttggctgtgtccctttgtgagggtcttcaaatccttttccttctgcagggccttgggcctgtaaatatcctcatctttctattcttttttttttttagttgccccctcacctaatttccacctcagttttgaacaaaatcgttctcttcctgaatagatcaaaaccactgatgtgaaagataagccttgaagcagcaattgcccttaaaacatcatccctgccctggatcggcctggagccagtgcccaagtacggtttggtgtgtacatgaaaacaaacgtctctgcagtctctggggcggaggtttcgctggcttttctttctctcaaagaaaaaaacatgcaccattttcaatgtgcttttgcctctcctctctgttcacatgcttttagcagcaagtcccctccaaatctgtcttggttccccttcagaaggtggcgctgcccccgaaaggcacctcagcctgtgagtgctgaggaaccagctcctctggctgattttccagttggactggccattgctctccagaagtgctctgttagcaaacgtgatgtggaaacgatcacagatggtgttttctcgttgttcgccagaatttatacgggggagacaaattcccggtaattaccaagtctgcactcgggtaccaaagctctgaagctctctgaacagttgccatacttgagttgatgaatgtgttattcatggtgtctcatctcatcaatgcatcttgagagacttaatgaaattttagcaacagtatagaatagctctatcgggtggggagtaatcattaaacagatgaaatcggccccagatttacatgtctctttagaatccacagtgtaagcaaactacagttacaaagggatgggggttgtaaaccctctgagactctgcacttttcgcacgtatggcatcgtcaagtgctgtcttattacagcctttgtaaggagaggcaggctcctcctggggtgggctctgcagctgctctatttccaggcatgtgatcgcccccgctctccagattccccagcactctgctgcgtgtaactccactcaattctccactcatccttccttgtgaagcaggatcgttgaagttttaagtatgggcaaaaatctggaaaacttaggatccctctgacaccccaggattaggggacacagcagtggctagggcatcagccacagaactgagcgggaaatgccacttgtattggctgtaaagaaatcctggctttgggccaggcacagtggctcaagcctgtaatcccagcactttaggaggttgaggcggatggatcacctgaggtcaggagtttgagaccagcctggccaacatggtgtaaccccgtctctactaaaaatacaaaaaaattagccaggcgtggtagcgggcacctgtaatcccagctactcaggaggctgaggcaggagaatcacttgaaccggggaggcagaggttgcagtgagctgagatcatgccactccactccagcctgggcgacagagcaagactctgtctcaaaaaaaaaaaaggaaatcctggctttctttaagccacagacttcctaggctgtggtcccagctccttgtctgcctggtccctgtcaccttgcagtgccaccacccccaggggctctgcttgcttccagtggcttctgtagctttggcaactggcagatctttatggcagtagaggtgccagcatggaggatggagtttgggtttataacccaaccctcgaacgaaccagcctgtgggggcctggagtggagctggttttggggagtcacaggtgcggggggttcatcatctcctttctccttctcctttcctgacccctccgacagcttccatgttggccatgggtcaggtgaatggatggagctccaagcggggctcagcccattgacccgagcgaggcgcacacacctgcagcgtggatcaagcgcactctctccagcatcgccctgaccattccatgtgctttgtcctagcatgttcattcttgactttctccacttcattttattaaaaagttaaatgctttaggaatctgtggcgtgtggccactgaccgccccccacctcctgccgctcctccaagtttgagctgagatggttctgtgagtccttggcaggggtcaaagggcacatctccttgaacctagaaagccccctacactctcagaggacacctctcctgtggattcagcgctggggcagtgaaggtgtcgggagccagcagagcatggtgcgtgctgccagctgccggccagccgggatagaggagatgccactggccctccgtgcccccagcccctccctcttaaccgaggctgtccttgctctctgcagaggccgctctgcaggatcctcgtgtcgcgcgtgatgtgtggtggcacagccgtgtcaaagtcacagtgtcttttctgtcgttctagttccagggtcacccccgagaggacaacaggcatctggaagtgctctctcgccactctgggtgctttactgtctctggcttgtttccatcactggaaatcacttagagaattgtagtgtttttggtccttgataaagcctagaagacatttgtgatgttacaaaatggaagttttcttttgtttctgttttttaagatctaagaagttgtgaatgttgttaatcatttagccgttgcaataaatgtagaggaaatgca

SEQ ID NO: 355541 - DNA, 5626 bp, Homo sapiens
agcggctgtgcggcgcggcgctgcggagaccgttggttcatttgcatgtccccgcctcgcgcggcggcggcggcgggtgaggagcctgaggcggcggcgggggtggctccgcgcgcggtggtctcgggggcaaaataacatggcagccagacgaattacacaggagacttttgatgctgtattacaagaaaaagccaaacgatatcacatggatgccagtggtgaggctgtaagcgaaactcttcagtttaaagctcaagatctcttaagggcagtcccaagatccagagcagagatgtatgatgacgtccacagcgatggcagatactccctcagtggatctgtagctcactctagagatgccggaagagaaggcctgagaagtgacgtatttccagggccttccttcagatcaagcaacccttccatcagtgatgacagctactttcgcaaagaatgtggccgggatctggaattttctcactctgattctcgggaccaggtcattggccaccggaaattggggcatttccgttctcaggactggaaatttgcgctccgtggttcttgggaacaagactttggccatccagtttctcaagagtcctcttggtcacaggagtatagttttggtccctctgcagttttgggggactttggatcttccaggctgattgagaaagagtgtttggagaaggagagtcgggattatgacgtggaccatcctggggaggctgactctgtgcttaggggcagcagtcaagtccaggccagaggtcgagctctaaacatcgttgaccaggaaggttccctcctaggaaagggggagactcagggcctgctcacagctaaggggggtgttgggaaacttgtcacattgagaaatgtgagcacaaaaaaaatacccaccgtgaatcgtattactcccaaaactcagggcactaaccaaatccagaaaaacactccaagtcctgatgtgaccctggggacaaacccagggacagaagatatccagttccccattcagaagatccctctggggctggatctgaagaatcttcggctccccagaagaaagatgagctttgacatcatagataagtctgatgttttttcaagatttgggatagaaataatcaaatgggcaggattccacaccataaaagatgatattaaattttcccaacttttccagactctctttgaacttgaaacagaaacctgtgctaaaatgcttgcctcattcaaatgttccttaaaaccagagcacagagatttttgcttttttactatcaaatttttaaagcactctgctttgaaaacacccagagttgataatgagtttttaaacatgcttttagacaaaggtgctgtgaagaccaaaaattgcttttttgaaatcataaagccttttgacaagtacataatgagacttcaagaccggcttctgaagagtgtcacacctttgcttatggcctgcaatgcctacgagctaagtgtcaagatgaagaccctcagtaaccccctggacttggctcttgccctagaaaccaccaactctctctgccggaagtctttggcccttttgggacagacattttccttggcctcttctttccggcaggagaaaatcttagaagctgtcggcctgcaagatatagctccctcacctgctgcgtttccaaacttcgaagactccactttgtttgggcgagagtacatagaccacctgaaggcctggctagtcagcagcggatgtcccctccaggttaagaaagccgaaccagagccgatgcgagaggaggagaaaatgattcctcctacgaaacctgaaattcaggccaaggctccaagtagtctgagtgatgctgtcccccagcgagcagatcacagggtagtgggcaccatcgaccagcttgtgaaacgtgtcatcgaaggcagcctgtctcccaaagagagaactcttctcaaagaggaccctgcttactggtttttgtctgatgaaaatagtctggagtataaatattacaagctgaagttggcagaaatgcagcggatgagcgagaacttgcgaggagccgaccagaagccgacctcagcagactgtgcagtgagggccatgctgtactcccgggctgtccgcaacctcaagaagaaactccttccgtggcagcggcgggggctcctccgtgctcaagggctccggggctggaaggcgaggagagcgaccaccgggacccagaccctcctatcctcaggcaccaggctgaaacaccacggccggcaggctccaggcctctcacaggcaaaaccatccctgccagacagaaatgatgctgccaaggactgcccgccagacccagttggaccttctcctcaggaccccagcttagaagcctcaggcccatcccccaagccagcaggagtggacatctctgaagcacctcagacctcttctccctgcccatctgctgacattgacatgaagacaatggagactgcagagaaactggctagatttgttgctcaggtgggaccagagatcgaacaattcagcatagaaaacagcaccgataaccctgacctgtggtttctacatgaccaaaatagttctgctttcaaattctatcgaaagaaagtgtttgaactatgtccatcaatttgtttcacgtcatctccgcacaaccttcacactggtggtggtgacaccacgggttctcaggagagccccgtggacctcatggaaggggaagcagagtttgaagacgagccccctccgcgggaggctgagctggagagcccagaggtgatgcctgaggaggaggacgaggacgatgaggatgggggagaggaggcccccgctcctggaggggcgggcaagtctgagggcagcacccctgccgacggccttcccggcgaggctgccgaggacgacctggctggagcacctgccttgtcacaggcctcctcaggtacctgcttccctcggaagaggatcagcagcaagtcattgaaggttggcatgattccagctcccaagagagtgtgtctcatccaggagccaaaagtccatgaaccagttcgaattgcctatgacaggcctcggggtcgtcccatgtccaaaaagaagaaacccaaggacttggacttcgcccagcagaagctgaccgataagaacctgggcttccagatgctgcagaagatgggctggaaggagggccatggcctgggctccctcggaaagggcatcagggagccggtcagcgtgtacgcagcaggcagcctggggtgggagtgggtggggcctcagtccttccacctgcagcctgccgcttggctccttcacagccaagatggcttacagctggcagttgatttttgttttttaaacagaaggcatcttcagatgagaagctgatcatttacatgtgcaggtgtttacagggctcctttctgtcctggtgtagattttttaaccagcttgttggccctggtcattttggccacatttgtgaccatcataaaagctaagtggtatttctgtgtagtttccgtctggaactgctttcccattcccgggaacccatagccgggccagccagggtcccgaacacaggcccaaagtttattaaaccccgatcataacctccagcaggcatttcatttaatactgagcttagttcctgctgggtaaggcattccgaggtaaccagggccctctgggcaccccctcaaaagccagctcttcgagggtgagtactccttgtttctactgtgagtcgcgtcttgattttccctttctttgatgtctcagtgtgtgtcccaaacacctgcatctcatggactgtttgtgcccatgcccagttcctggcatgccaggccctgggctcaggtgcacaactgactctctttttcactccctaggggaaccccctcggaaggggaagggttgggtgctgacgggcaggagcacaaagaagacacattcgatgtgttccgacagaggatgatgcagatgtacagacacaagcgggccaacaaatagggtatgttcacaggccagtgtgtaaggccgtctgccctcgctggcgtgctggtatgcagagaaatttcccccaacaaagttgatgttccctgctcccccaaaaatgccacacacaaaaaaaatcacaaaattctgtgagggaaacaaaagggtctatggatgtggatatgccccattcttaccttccaggtttgctgaaggagcaaacctcacactggccaagggcagatgcgcatggcctgcctggtgccccggctgtgagcccctcaaggcctccaggccagcctccgtggatgtgcgtgtggaaataggccacgcctgtctcttctcttgctcaagttttctctcacagatgacagccacctaccacataacatgaccagcaaacggactgttcctagtccagagggccttgccatcatgcaagtggaagggcgactgtgacagccactgccacagaggatggcagttggctgtgtccctttgtgagggtcttcaaatccttttccttctgcagggccttgggcctgtaaatatcctcatctttctattcttttttttttttagttgccccctcacctaatttccacctcagttttgaacaaaatcgttctcttcctgaatagatcaaaaccactgatgtgaaagataagccttgaagcagcaattgcccttaaaacatcatccctgccctggatcggcctggagccagtgcccaagtacggtgacagcttccatgttggccatgggtcaggtgaatggatggagctccaagcggggctcagcccattgacccgagcgaggcgcacacacctgcagcgtggatcaagcgcactctctccagcatcgccctgaccattccatgtgctttgtcctagcatgttcattcttgactttctccacttcattttattaaaaagttaaatgctttaggaatctgtggcgtgtggccactgaccgccccccacctcctgccgctcctccaagtttgagctgagatggttctgtgagtccttggcaggggtcaaagggcacatctccttgaacctagaaagccccctacactctcagaggacacctctcctgtggattcagcgctggggcagtgaaggtgtcgggagccagcagagcatggtgcgtgctgccagctgccggccagccgggatagaggagatgccactggccctccgtgcccccagcccctccctcttaaccgaggctgtccttgctctctgcagaggccgctctgcaggatcctcgtgtcgcgcgtgatgtgtggtggcacagccgtgtcaaagtcacagtgtcttttctgtcgttctagttccagggtcacccccgagaggacaacaggcatctggaagtgctctctcgccactctgggtgctttactgtctctggcttgtttccatcactggaaatcacttagagaattgtagtgtttttggtccttgataaagcctagaagacatttgtgatgttacaaaatggaagttttcttttgtttctgttttttaagatctaagaagttgtgaatgttgttaatcatttagccgttgcaataaatgtagaggaaatgca

SEQ ID NO: 355542 - DNA, 5130 bp, Homo sapiens
ccagagcgggaagtgctaggggtgaggagcctcctcggggggcaccttacggttccatggtgcacatgttccagcagtaactgtgcagctcctcctggcatcgctccatgcttctcatacctgggaggaaccagagtcaaaatgggcacatggaggcccagagaggccagtgatgtaaccagaaagggtgagatgggtctcaagccagatctctattccagcattttcccaagccctgcataccttgttcgtccgcctctgtcccctggaaagcagttaggcttcttgaattctagctccttattaagttactagtactcctcaaattttctatcattgagaggctgcaccatcaagccatagccgcgtagagactggtcaggttattctttcccttgtcccacctccaccttccttggatcaatcccagcagtttcagcaaataaaaatgttgagagattccatctggttacccaatgtatttcctctgtgccccaggtttctacatgaccaaaatagttctgctttcaaattctatcgaaagaaagtgtttgaactatgtccatcaatttgtttcacgtcatctccgcacaaccttcacactggtggtggtgacaccacgggttctcaggagagccccgtggacctcatggaaggggaagcagagtttgaagacgagccccctccgcgggaggctgagctggagagcccagaggtgatgcctgaggaggaggacgaggacgatgaggatgggggagaggaggcccccgctcctggaggggcgggcaagtctgagggcagcacccctgccgacggccttcccggcgaggctgccgaggacgacctggctggagcacctgccttgtcacaggcctcctcaggtacctgcttccctcggaagaggatcagcagcaagtcattgaaggttggcatgattccagctcccaagagagtgtgtctcatccaggagccaaaagtccatgaaccagttcgaattgcctatgacaggcctcggggtcgtcccatgtccaaaaagaagaaacccaaggacttggacttcgcccagcagaagctgaccgataagaacctgggcttccagatgctgcagaagatgggctggaaggagggccatggcctgggctccctcggaaagggcatcagggagccggtcagcgtgtacgcagcaggcagcctggggtgggagtgggtggggcctcagtccttccacctgcagcctgccgcttggctccttcacagccaagatggcttacagctggcagttgatttttgttttttaaacagaaggcatcttcagatgagaagctgatcatttacatgtgcaggtgtttacagggctcctttctgtcctggtgtagattttttaaccagcttgttggccctggtcattttggccacatttgtgaccatcataaaagctaagtggtatttctgtgtagtttccgtctggaactgctttcccattcccgggaacccatagccgggccagccagggtcccgaacacaggcccaaagtttattaaaccccgatcataacctccagcaggcatttcatttaatactgagcttagttcctgctgggtaaggcattccgaggtaaccagggccctctgggcaccccctcaaaagccagctcttcgagggtgagtactccttgtttctactgtgagtcgcgtcttgattttccctttctttgatgtctcagtgtgtgtcccaaacacctgcatctcatggactgtttgtgcccatgcccagttcctggcatgccaggccctgggctcaggtgcacaactgactctctttttcactccctaggggaaccccctcggaaggggaagggttgggtgctgacgggcaggagcacaaagaagacacattcgatgtgttccgacagaggatgatgcagatgtacagacacaagcgggccaacaaatagggtatgttcacaggccagtgtgtaaggccgtctgccctcgctggcgtgctggtatgcagagaaatttcccccaacaaagttgatgttccctgctcccccaaaaatgccacacacaaaaaaaatcacaaaattctgtgagggaaacaaaagggtctatggatgtggatatgccccattcttaccttccaggtttgctgaaggagcaaacctcacactggccaagggcagatgcgcatggcctgcctggtgccccggctgtgagcccctcaaggcctccaggccagcctccgtggatgtgcgtgtggaaataggccacgcctgtctcttctcttgctcaagttttctctcacagatgacagccacctaccacataacatgaccagcaaacggactgttcctagtccagagggccttgccatcatgcaagtggaagggcgactgtgacagccactgccacagaggatggcagttggctgtgtccctttgtgagggtcttcaaatccttttccttctgcagggccttgggcctgtaaatatcctcatctttctattcttttttttttttagttgccccctcacctaatttccacctcagttttgaacaaaatcgttctcttcctgaatagatcaaaaccactgatgtgaaagataagccttgaagcagcaattgcccttaaaacatcatccctgccctggatcggcctggagccagtgcccaagtacggtttggtgtgtacatgaaaacaaacgtctctgcagtctctggggcggaggtttcgctggcttttctttctctcaaagaaaaaaacatgcaccattttcaatgtgcttttgcctctcctctctgttcacatgcttttagcagcaagtcccctccaaatctgtcttggttccccttcagaaggtggcgctgcccccgaaaggcacctcagcctgtgagtgctgaggaaccagctcctctggctgattttccagttggactggccattgctctccagaagtgctctgttagcaaacgtgatgtggaaacgatcacagatggtgttttctcgttgttcgccagaatttatacgggggagacaaattcccggtaattaccaagtctgcactcgggtaccaaagctctgaagctctctgaacagttgccatacttgagttgatgaatgtgttattcatggtgtctcatctcatcaatgcatcttgagagacttaatgaaattttagcaacagtatagaatagctctatcgggtggggagtaatcattaaacagatgaaatcggccccagatttacatgtctctttagaatccacagtgtaagcaaactacagttacaaagggatgggggttgtaaaccctctgagactctgcacttttcgcacgtatggcatcgtcaagtgctgtcttattacagcctttgtaaggagaggcaggctcctcctggggtgggctctgcagctgctctatttccaggcatgtgatcgcccccgctctccagattccccagcactctgctgcgtgtaactccactcaattctccactcatccttccttgtgaagcaggatcgttgaagttttaagtatgggcaaaaatctggaaaacttaggatccctctgacaccccaggattaggggacacagcagtggctagggcatcagccacagaactgagcgggaaatgccacttgtattggctgtaaagaaatcctggctttgggccaggcacagtggctcaagcctgtaatcccagcactttaggaggttgaggcggatggatcacctgaggtcaggagtttgagaccagcctggccaacatggtgtaaccccgtctctactaaaaatacaaaaaaattagccaggcgtggtagcgggcacctgtaatcccagctactcaggaggctgaggcaggagaatcacttgaaccggggaggcagaggttgcagtgagctgagatcatgccactccactccagcctgggcgacagagcaagactctgtctcaaaaaaaaaaaaggaaatcctggctttctttaagccacagacttcctaggctgtggtcccagctccttgtctgcctggtccctgtcaccttgcagtgccaccacccccaggggctctgcttgcttccagtggcttctgtagctttggcaactggcagatctttatggcagtagaggtgccagcatggaggatggagtttgggtttataacccaaccctcgaacgaaccagcctgtgggggcctggagtggagctggttttggggagtcacaggtgcggggggttcatcatctcctttctccttctcctttcctgacccctccgacagcttccatgttggccatgggtcaggtgaatggatggagctccaagcggggctcagcccattgacccgagcgaggcgcacacacctgcagcgtggatcaagcgcactctctccagcatcgccctgaccattccatgtgctttgtcctagcatgttcattcttgactttctccacttcattttattaaaaagttaaatgctttaggaatctgtggcgtgtggccactgaccgccccccacctcctgccgctcctccaagtttgagctgagatggttctgtgagtccttggcaggggtcaaagggcacatctccttgaacctagaaagccccctacactctcagaggacacctctcctgtggattcagcgctggggcagtgaaggtgtcgggagccagcagagcatggtgcgtgctgccagctgccggccagccgggatagaggagatgccactggccctccgtgcccccagcccctccctcttaaccgaggctgtccttgctctctgcagaggccgctctgcaggatcctcgtgtcgcgcgtgatgtgtggtggcacagccgtgtcaaagtcacagtgtcttttctgtcgttctagttccagggtcacccccgagaggacaacaggcatctggaagtgctctctcgccactctgggtgctttactgtctctggcttgtttccatcactggaaatcacttagagaattgtagtgtttttggtccttgataaagcctagaagacatttgtgatgttacaaaatggaagttttcttttgtttctgttttttaagatctaagaagttgtgaatgttgttaatcatttagccgttgcaataaatgtagaggaaatgca

SEQ ID NO: 355543 - DNA, 4466 bp, Homo sapiens
ataagctgcttcatgtcatgacagtgagatgggaacagagcaggggtggtcccaggcagtggtcagtgggacactgcctcggccatgagaggccatctcctgctctcctgtggggaggttccgggttcttgaggtataatttaccagcagtgaaacgcacccttttcaagtggaccatttgaattttgttgactgtgcagaggcgagaacccaccagtacagcagagctgaagcctgttcccagaacgggtctcttgtcccattgcagtcccctgcccgattcagcaaccactgactgttttccaagccccagtccatgaaccagttcgaattgcctatgacaggcctcggggtcgtcccatgtccaaaaagaagaaacccaaggacttggacttcgcccagcagaagctgaccgataagaacctgggcttccagatgctgcagaagatgggctggaaggagggccatggcctgggctccctcggaaagggcatcagggagccggtcagcgtgtacgcagcaggcagcctggggtgggagtgggtggggcctcagtccttccacctgcagcctgccgcttggctccttcacagccaagatggcttacagctggcagttgatttttgttttttaaacagaaggcatcttcagatgagaagctgatcatttacatgtgcaggtgtttacagggctcctttctgtcctggtgtagattttttaaccagcttgttggccctggtcattttggccacatttgtgaccatcataaaagctaagtggtatttctgtgtagtttccgtctggaactgctttcccattcccgggaacccatagccgggccagccagggtcccgaacacaggcccaaagtttattaaaccccgatcataacctccagcaggcatttcatttaatactgagcttagttcctgctgggtaaggcattccgaggtaaccagggccctctgggcaccccctcaaaagccagctcttcgagggtgagtactccttgtttctactgtgagtcgcgtcttgattttccctttctttgatgtctcagtgtgtgtcccaaacacctgcatctcatggactgtttgtgcccatgcccagttcctggcatgccaggccctgggctcaggtgcacaactgactctctttttcactccctaggggaaccccctcggaaggggaagggttgggtgctgacgggcaggagcacaaagaagacacattcgatgtgttccgacagaggatgatgcagatgtacagacacaagcgggccaacaaatagggtatgttcacaggccagtgtgtaaggccgtctgccctcgctggcgtgctggtatgcagagaaatttcccccaacaaagttgatgttccctgctcccccaaaaatgccacacacaaaaaaaatcacaaaattctgtgagggaaacaaaagggtctatggatgtggatatgccccattcttaccttccaggtttgctgaaggagcaaacctcacactggccaagggcagatgcgcatggcctgcctggtgccccggctgtgagcccctcaaggcctccaggccagcctccgtggatgtgcgtgtggaaataggccacgcctgtctcttctcttgctcaagttttctctcacagatgacagccacctaccacataacatgaccagcaaacggactgttcctagtccagagggccttgccatcatgcaagtggaagggcgactgtgacagccactgccacagaggatggcagttggctgtgtccctttgtgagggtcttcaaatccttttccttctgcagggccttgggcctgtaaatatcctcatctttctattcttttttttttttagttgccccctcacctaatttccacctcagttttgaacaaaatcgttctcttcctgaatagatcaaaaccactgatgtgaaagataagccttgaagcagcaattgcccttaaaacatcatccctgccctggatcggcctggagccagtgcccaagtacggtttggtgtgtacatgaaaacaaacgtctctgcagtctctggggcggaggtttcgctggcttttctttctctcaaagaaaaaaacatgcaccattttcaatgtgcttttgcctctcctctctgttcacatgcttttagcagcaagtcccctccaaatctgtcttggttccccttcagaaggtggcgctgcccccgaaaggcacctcagcctgtgagtgctgaggaaccagctcctctggctgattttccagttggactggccattgctctccagaagtgctctgttagcaaacgtgatgtggaaacgatcacagatggtgttttctcgttgttcgccagaatttatacgggggagacaaattcccggtaattaccaagtctgcactcgggtaccaaagctctgaagctctctgaacagttgccatacttgagttgatgaatgtgttattcatggtgtctcatctcatcaatgcatcttgagagacttaatgaaattttagcaacagtatagaatagctctatcgggtggggagtaatcattaaacagatgaaatcggccccagatttacatgtctctttagaatccacagtgtaagcaaactacagttacaaagggatgggggttgtaaaccctctgagactctgcacttttcgcacgtatggcatcgtcaagtgctgtcttattacagcctttgtaaggagaggcaggctcctcctggggtgggctctgcagctgctctatttccaggcatgtgatcgcccccgctctccagattccccagcactctgctgcgtgtaactccactcaattctccactcatccttccttgtgaagcaggatcgttgaagttttaagtatgggcaaaaatctggaaaacttaggatccctctgacaccccaggattaggggacacagcagtggctagggcatcagccacagaactgagcgggaaatgccacttgtattggctgtaaagaaatcctggctttgggccaggcacagtggctcaagcctgtaatcccagcactttaggaggttgaggcggatggatcacctgaggtcaggagtttgagaccagcctggccaacatggtgtaaccccgtctctactaaaaatacaaaaaaattagccaggcgtggtagcgggcacctgtaatcccagctactcaggaggctgaggcaggagaatcacttgaaccggggaggcagaggttgcagtgagctgagatcatgccactccactccagcctgggcgacagagcaagactctgtctcaaaaaaaaaaaaggaaatcctggctttctttaagccacagacttcctaggctgtggtcccagctccttgtctgcctggtccctgtcaccttgcagtgccaccacccccaggggctctgcttgcttccagtggcttctgtagctttggcaactggcagatctttatggcagtagaggtgccagcatggaggatggagtttgggtttataacccaaccctcgaacgaaccagcctgtgggggcctggagtggagctggttttggggagtcacaggtgcggggggttcatcatctcctttctccttctcctttcctgacccctccgacagcttccatgttggccatgggtcaggtgaatggatggagctccaagcggggctcagcccattgacccgagcgaggcgcacacacctgcagcgtggatcaagcgcactctctccagcatcgccctgaccattccatgtgctttgtcctagcatgttcattcttgactttctccacttcattttattaaaaagttaaatgctttaggaatctgtggcgtgtggccactgaccgccccccacctcctgccgctcctccaagtttgagctgagatggttctgtgagtccttggcaggggtcaaagggcacatctccttgaacctagaaagccccctacactctcagaggacacctctcctgtggattcagcgctggggcagtgaaggtgtcgggagccagcagagcatggtgcgtgctgccagctgccggccagccgggatagaggagatgccactggccctccgtgcccccagcccctccctcttaaccgaggctgtccttgctctctgcagaggccgctctgcaggatcctcgtgtcgcgcgtgatgtgtggtggcacagccgtgtcaaagtcacagtgtcttttctgtcgttctagttccagggtcacccccgagaggacaacaggcatctggaagtgctctctcgccactctgggtgctttactgtctctggcttgtttccatcactggaaatcacttagagaattgtagtgtttttggtccttgataaagcctagaagacatttgtgatgttacaaaatggaagttttcttttgtttctgttttttaagatctaagaagttgtgaatgttgttaatcatttagccgttgcaataaatgtagaggaaatgca

SEQ ID NO: 355544 - DNA, 5618 bp, Homo sapiens
  misc_feature (5433)..(5433): n is a, c, g, or t
  misc_feature (5437)..(5437): n is a, c, g, or t
  misc_feature (5444)..(5444): n is a, c, g, or t
  misc_feature (5446)..(5447): n is a, c, g, or t
  misc_feature (5451)..(5451): n is a, c, g, or t
  misc_feature (5454)..(5454): n is a, c, g, or t
  misc_feature (5462)..(5462): n is a, c, g, or t
  misc_feature (5617)..(5617): n is a, c, g, or t
agcggctgtgcggcgcggcgctgcggagaccgttggttcatttgcatgtccccgcctcgcgcggcggcggcggcgggtgaggagcctgaggcggcggcgggggtggctccgcgcgcggtggtctcgggggcaaaataacatggcagccagacgaattacacaggagacttttgatgctgtattacaagaaaaagccaaacgatatcacatggatgccagtggtgaggctgtaagcgaaactcttcagtttaaagctcaagatctcttaagggcagtcccaagatccagagcagagatgtatgatgacgtccacagcgatggcagatactccctcagtggatctgtagctcactctagagatgccggaagagaaggcctgagaagtgacgtatttccagggccttccttcagatcaagcaacccttccatcagtgatgacagctactttcgcaaagaatgtggccgggatctggaattttctcactctgattctcgggaccaggtcattggccaccggaaattggggcatttccgttctcaggactggaaatttgcgctccgtggttcttgggaacaagactttggccatccagtttctcaagagtcctcttggtcacaggagtatagttttggtccctctgcagttttgggggactttggatcttccaggctgattgagaaagagtgtttggagaaggagagtcgggattatgacgtggaccatcctggggaggctgactctgtgcttaggggcagcagtcaagtccaggccagaggtcgagctctaaacatcgttgaccaggaaggttccctcctaggaaagggggagactcagggcctgctcacagctaaggggggtgttgggaaacttgtcacattgagaaatgtgagcacaaaaaaaatacccaccgtgaatcgtattactcccaaaactcagggcactaaccaaatccagaaaaacactccaagtcctgatgtgaccctggggacaaacccagggacagaagatatccagttccccattcagaagatccctctggggctggatctgaagaatcttcggctccccagaagaaagatgagctttgacatcatagataagtctgatgttttttcaagatttgggatagaaataatcaaatgggcaggattccacaccataaaagatgatattaaattttcccaacttttccagactctctttgaacttgaaacagaaacctgtgctaaaatgcttgcctcattcaaatgttccttaaaaccagagcacagagatttttgcttttttactatcaaatttttaaagcactctgctttgaaaacacccagagttgataatgagtttttaaacatgcttttagacaaaggtgctgtgaagaccaaaaattgcttttttgaaatcataaagccttttgacaagtacataatgagacttcaagaccggcttctgaagagtgtcacacctttgcttatggcctgcaatgcctacgagctaagtgtcaagatgaagaccctcagtaaccccctggacttggctcttgccctagaaaccaccaactctctctgccggaagtctttggcccttttgggacagacattttccttggcctcttctttccggcaggagaaaatcttagaagctgtcggcctgcaagatatagctccctcacctgctgcgtttccaaacttcgaagactccactttgtttgggcgagagtacatagaccacctgaaggcctggctagtcagcagcggatgtcccctccaggttaagaaagccgaaccagagccgatgcgagaggaggagaaaatgattcctcctacgaaacctgaaattcaggccaaggctccaagtagtctgagtgatgctgtcccccagcgagcagatcacagggtagtgggcaccatcgaccagcttgtgaaacgtgtcatcgaaggcagcctgtctcccaaagagagaactcttctcaaagaggaccctgcttactggtttttgtctgatgaaaatagtctggagtataaatattacaagctgaagttggcagaaatgcagcggatgagcgagaacttgcgaggagccgaccagaagccgacctcagcagactgtgcagtgagggccatgctgtactcccgggctgtccgcaacctcaagaagaaactccttccgtggcagcggcgggggctcctccgtgctcaagggctccggggctggaaggcgaggagagcgaccaccgggacccagaccctcctatcctcaggcaccaggctgaaacaccacggccggcaggctccaggcctctcacaggcaaaaccatccctgccagacagaaatgatgctgccaaggactgcccgccagacccagttggaccttctcctcaggaccccagcttagaagcctcaggcccatcccccaagccagcaggagtggacatctctgaagcacctcagacctcttctccctgcccatctgctgacattgacatgaagacaatggagactgcagagaaactggctagatttgttgctcaggtgggaccagagatcgaacaattcagcatagaaaacagcaccgataaccctgacctgtggtttctacatgaccaaaatagttctgctttcaaattctatcgaaagaaagtgtttgaactatgtccatcaatttgtttcacgtcatctccgcacaaccttcacactggtggtggtgacaccacgggttctcaggagagccccgtggacctcatggaaggggaagcagagtttgaagacgagccccctccgcgggaggctgagctggagagcccagaggtgatgcctgaggaggaggacgaggacgatgaggatgggggagaggaggcccccgctcctggaggggcgggcaagtctgagggcagcacccctgccgacggccttcccggcgaggctgccgaggacgacctggctggagcacctgccttgtcacaggcctcctcaggtacctgcttccctcggaagaggatcagcagcaagtcattgaaggttggcatgattccagctcccaagagagtgtgtctcatccaggagccaaaagtccatgaaccagttcgaattgcctatgacaggcctcggggtcgtcccatgtccaaaaagaagaaacccaaggacttggacttcgcccagcagaagctgaccgataagaacctgggcttccagatgctgcagaagatgggctggaaggagggccatggcctgggctccctcggaaagggcatcagggagccggtcagcgtgtacgcagcaggcagcctggggtgggagtgggtggggcctcagtccttccacctgcagcctgccgcttggctccttcacagccaagatggcttacagctggcagttgatttttgttttttaaacagaaggcatcttcagatgagaagctgatcatttacatgtgcaggtgtttacagggctcctttctgtcctggtgtagattttttaaccagcttgttggccctggtcattttggccacatttgtgaccatcataaaagctaagtggtatttctgtgtagtttccgtctggaactgctttcccattcccgggaacccatagccgggccagccagggtcccgaacacaggcccaaagtttattaaaccccgatcataacctccagcaggcatttcatttaatactgagcttagttcctgctgggtaaggcattccgaggtaaccagggccctctgggcaccccctcaaaagccagctcttcgagggtgagtactccttgtttctactgtgagtcgcgtcttgattttccctttctttgatgtctcagtgtgtgtcccaaacacctgcatctcatggactgtttgtgcccatgcccagttcctggcatgccaggccctgggctcaggtgcacaactgactctctttttcactccctaggggaaccccctcggaaggggaagggttgggtgctgacgggcaggagcacaaagaagacacattcgatgtgttccgacagaggatgatgcagatgtacagacacaagcgggccaacaaatagggtatgttcacaggccagtgtgtaaggccgtctgccctcgctggcgtgctggtatgcagagaaatttcccccaacaaagttgatgttccctgctcccccaaaaatgccacacacaaaaaaaatcacaaaattctgtgagggaaacaaaagggtctatggatgtggatatgccccattcttaccttccaggtttgctgaaggagcaaacctcacactggccaagggcagatgcgcatggcctgcctggtgccccggctgtgagcccctcaaggcctccaggccagcctccgtggatgtgcgtgtggaaataggccacgcctgtctcttctcttgctcaagttttctctcacagatgacagccacctaccacataacatgaccagcaaacggactgttcctagtccagagggccttgccatcatgcaagtggaagggcgactgtgacagccactgccacagaggatggcagttggctgtgtccctttgtgagggtcttcaaatccttttccttctgcagggccttgggcctgtaaatatcctcatctttctattcttttttttttttagttgccccctcacctaatttccacctcagttttgaacaaaatcgttctcttcctgaatagatcaaaaccactgatgtgaaagataagccttgaagcagcaattgcccttaaaacatcatccctgccctggatcggcctggagccagtgcccaagtacggtttggtgtgtacatgaaaacaaacgtctctgcagtctctggggcggaggtttcgctggcttttctttctctcaaagaaaaaaacatgcaccattttcaatgtgcttttgcctctcctctctgttcacatgcttttagcagcaagtcccctccaaatctgtcttggttccccttcagaaggtggcgctgcccccgaaaggcacctcagcctgtgagtgctgaggaaccagctcctctggctgattttccagttggactggccattgctctccagaagtgctctgttagcaaacgtgatgtggaaacgatcacagatggtgttttctcgttgttcgccagaatttatacgggggagacaaattcccggtaattaccaagtctgcactcgggtaccaaagctctgaagctctctgaacagttgccatacttgagttgatgaatgtgttattcatggtgtctcatctcatcaatgcatcttgagagacttaatgaaattttagcaacagtatagaatagctctatcgggtggggagtaatcattaaacagatgaaatcggccccagatttacatgtctctttagaatccacagtgtaagcaaactacagttacaaagggatgggggttgtaaaccctctgagactctgcacttttcgcacgtatggncgcnaggcgtntnnagcntgnaggagagncccggggggctggagtctattcggattgagcccgtctcgattccaactttgggttccaattcatctcggaagaacggtatggcaatgataatctcccagggctcgctcaacccacttaaatggggcacaaccggagggtaataagcgagcaagcna

SEQ ID NO: 355545 - DNA, 5392 bp, Homo sapiens
agcggctgtgcggcgcggcgctgcggagaccgttggttcatttgcatgtccccgcctcgcgcggcggcggcggcgggtgaggagcctgaggcggcggcgggggtggctccgcgcgcggtggtctcgggggcaaaataacatggcagccagacgaattacacaggagacttttgatgctgtattacaagaaaaagccaaacgatatcacatggatgccagtggtgaggctgtaagcgaaactcttcagtttaaagctcaagatctcttaagggcagtcccaagatccagagcagagatgtatgatgacgtccacagcgatggcagatactccctcagtggatctgtagctcactctagagatgccggaagagaaggcctgagaagtgacgtatttccagggccttccttcagatcaagcaacccttccatcagtgatgacagctactttcgcaaagaatgtggccgggatctggaattttctcactctgattctcgggaccaggtcattggccaccggaaattggggcatttccgttctcaggactggaaatttgcgctccgtggttcttgggaacaagactttggccatccagtttctcaagagtcctcttggtcacaggagtatagttttggtccctctgcagttttgggggactttggatcttccaggctgattgagaaagagtgtttggagaaggagagtcgggattatgacgtggaccatcctggggaggctgactctgtgcttaggggcagcagtcaagtccaggccagaggtcgagctctaaacatcgttgaccaggaaggttccctcctaggaaagggggagactcagggcctgctcacagctaaggggggtgttgggaaacttgtcacattgagaaatgtgagcacaaaaaaaatacccaccgtgaatcgtattactcccaaaactcagggcactaaccaaatccagaaaaacactccaagtcctgatgtgaccctggggacaaacccagggacagaagatatccagttccccattcagaagatccctctggggctggatctgaagaatcttcggctccccagaagaaagatgagctttgacatcatagataagtctgatgttttttcaagatttgggatagaaataatcaaatgggcaggattccacaccataaaagatgatattaaattttcccaacttttccagactctctttgaacttgaaacagaaacctgtgctaaaatgcttgcctcattcaaatgttccttaaaaccagagcacagagatttttgcttttttactatcaaatttttaaagcactctgctttgaaaacacccagagttgataatgagtttttaaacatgcttttagacaaaggtgctgtgaagaccaaaaattgcttttttgaaatcataaagccttttgacaagtacataatgagacttcaagaccggcttctgaagagtgtcacacctttgcttatggcctgcaatgcctacgagctaagtgtcaagatgaagaccctcagtaaccccctggacttggctcttgccctagaaaccaccaactctctctgccggaagtctttggcccttttgggacagacattttccttggcctcttctttccggcaggagaaaatcttagaagctgtcggcctgcaagatatagctccctcacctgctgcgtttccaaacttcgaagactccactttgtttgggcgagagtacatagaccacctgaaggcctggctagtcagcagcggatgtcccctccaggttaagaaagccgaaccagagccgatgcgagaggaggagaaaatgattcctcctacgaaacctgaaattcaggccaaggctccaagtagtctgagtgatgctgtcccccagcgagcagatcacagggtagtgggcaccatcgaccagcttgtgaaacgtgtcatcgaaggcagcctgtctcccaaagagagaactcttctcaaagaggaccctgcttactggtttttgtctgatgaaaatagtctggagtataaatattacaagctgaagttggcagaaatgcagcggatgagcgagaacttgcgaggagccgaccagaagccgacctcagcagactgtgcagtgagggccatgctgtactcccgggctgtccgcaacctcaagaagaaactccttccgtggcagcggcgggggctcctccgtgctcaagggctccggggctggaaggcgaggagagcgaccaccgggacccagaccctcctatcctcaggcaccaggctgaaacaccacggccggcaggctccaggcctctcacaggcaaaaccatccctgccagacagaaatgatgctgccaaggactgcccgccagacccagttggaccttctcctcaggaccccagcttagaagcctcaggcccatcccccaagccagcaggagtggacatctctgaagcacctcagacctcttctccctgcccatctgctgacattgacatgaagacaatggagactgcagagaaactggctagatttgttgctcaggtgggaccagagatcgaacaattcagcatagaaaacagcaccgataaccctgacctgtggtttctacatgaccaaaatagttctgctttcaaattctatcgaaagaaagtgtttgaactatgtccatcaatttgtttcacgtcatctccgcacaaccttcacactggtggtggtgacaccacgggttctcaggagagccccgtggacctcatggaaggggaagcagagtttgaagacgagccccctccgcgggaggctgagctggagagcccagaggtgatgcctgaggaggaggacgaggacgatgaggatgggggagaggaggcccccgctcctggaggggcgggcaagtctgagggcagcacccctgccgacggccttcccggcgaggctgccgaggacgacctggctggagcacctgccttgtcacaggcctcctcaggtacctgcttccctcggaagaggatcagcagcaagtcattgaaggttggcatgattccagctcccaagagagtgtgtctcatccaggagccaaaagtccatgaaccagttcgaattgcctatgacaggcctcggggtcgtcccatgtccaaaaagaagaaacccaaggacttggacttcgcccagcagaagctgaccgataagaacctgggcttccagatgctgcagaagatgggctggaaggagggccatggcctgggctccctcggaaagggcatcagggagccggtcagcgtgtacgcagcaggcagcctggggtgggagtgggtggggcctcagtccttccacctgcagcctgccgcttggctccttcacagccaagatggcttacagctggcagttgatttttgttttttaaacagaaggcatcttcagatgagaagctgatcatttacatgtgcaggtgtttacagggctcctttctgtcctggtgtagattttttaaccagcttgttggccctggtcattttggccacatttgtgaccatcataaaagctaagtggtatttctgtgtagtttccgtctggaactgctttcccattcccgggaacccatagccgggccagccagggtcccgaacacaggcccaaagtttattaaaccccgatcataacctccagcaggcatttcatttaatactgagcttagttcctgctgggtaaggcattccgaggtaaccagggccctctgggcaccccctcaaaagccagctcttcgagggtgagtactccttgtttctactgtgagtcgcgtcttgattttccctttctttgatgtctcagtgtgtgtcccaaacacctgcatctcatggactgtttgtgcccatgcccagttcctggcatgccaggccctgggctcaggtgcacaactgactctctttttcactccctaggggaaccccctcggaaggggaagggttgggtgctgacgggcaggagcacaaagaagacacattcgatgtgttccgacagaggatgatgcagatgtacagacacaagcgggccaacaaatagggtatgttcacaggccagtgtgtaaggccgtctgccctcgctggcgtgctggtatgcagagaaatttcccccaacaaagttgatgttccctgctcccccaaaaatgccacacacaaaaaaaatcacaaaattctgtgagggaaacaaaagggtctatggatgtggatatgccccattcttaccttccaggtttgctgaaggagcaaacctcacactggccaagggcagatgcgcatggcctgcctggtgccccggctgtgagcccctcaaggcctccaggccagcctccgtggatgtgcgtgtggaaataggccacgcctgtctcttctcttgctcaagttttctctcacagatgacagccacctaccacataacatgaccagcaaacggactgttcctagtccagagggccttgccatcatgcaagtggaagggcgactgtgacagccactgccacagaggatggcagttggctgtgtccctttgtgagggtcttcaaatccttttccttctgcagggccttgggcctgtaaatatcctcatctttctattcttttttttttttagttgccccctcacctaatttccacctcagttttgaacaaaatcgttctcttcctgaatagatcaaaaccactgatgtgaaagataagccttgaagcagcaattgcccttaaaacatcatccctgccctggatcggcctggagccagtgcccaagtacggtttggtgtgtacatgaaaacaaacgtctctgcagtctctggggcggaggtttcgctggcttttctttctctcaaagaaaaaaacatgcaccattttcaatgtgcttttgcctctcctctctgttcacatgcttttagcagcaagtcccctccaaatctgtcttggttccccttcagaaggtggcgctgcccccgaaaggcacctcagcctgtgagtgctgaggaaccagctcctctggctgattttccagttggactggccattgctctccagaagtgctctgttagcaaacgtgatgtggaaacgatcacagatggtgttttctcgttgttcgccagaatttatacgggggagacaaattcccgttccagggtcacccccgagaggacaacaggcatctggaagtgctctctcgccactctgggtgctttactgtctctggcttgtttccatcactggaaatcacttagagaattgtagtgtttttggtccttgataaagcctagaagacatttgtgatgttacaaaatggaagttttcttttgtttctgttttttaagatctaagaagttgtgaatgttgttaatcatttagccgttgcaataaatgtagaggaaatgca

SEQ ID NO: 355546 - DNA, 4402 bp, Homo sapiens
agcggctgtgcggcgcggcgctgcggagaccgttggttcatttgcatgtccccgcctcgcgcggcggcggcggcgggtgaggagcctgaggcggcggcgggggtggctccgcgcgcggtggtctcgggggcaaaataacatggcagccagacgaattacacaggagacttttgatgctgtattacaagaaaaagccaaacgatatcacatggatgccagtggtgaggctgtaagcgaaactcttcagtttaaagctcaagatctcttaagggcagtcccaagatccagagcagagatgtatgatgacgtccacagcgatggcagatactccctcagtggatctgtagctcactctagagatgccggaagagaaggcctgagaagtgacgtatttccagggccttccttcagatcaagcaacccttccatcagtgatgacagctactttcgcaaagaatgtggccgggatctggaattttctcactctgattctcgggaccaggtcattggccaccggaaattggggcatttccgttctcaggactggaaatttgcgctccgtggttcttgggaacaagactttggccatccagtttctcaagagtcctcttggtcacaggagtatagttttggtccctctgcagttttgggggactttggatcttccaggctgattgagaaagagtgtttggagaaggagagtcgggattatgacgtggaccatcctggggaggctgactctgtgcttaggggcagcagtcaagtccaggccagaggtcgagctctaaacatcgttgaccaggaaggttccctcctaggaaagggggagactcagggcctgctcacagctaaggggggtgttgggaaacttgtcacattgagaaatgtgagcacaaaaaaaatacccaccgtgaatcgtattactcccaaaactcagggcactaaccaaatccagaaaaacactccaagtcctgatgtgaccctggggacaaacccagggacagaagatatccagttccccattcagaagatccctctggggctggatctgaagaatcttcggctccccagaagaaagatgagctttgacatcatagataagtctgatgttttttcaagatttgggatagaaataatcaaatgggcaggattccacaccataaaagatgatattaaattttcccaacttttccagactctctttgaacttgaaacagaaacctgtgctaaaatgcttgcctcattcaaatgttccttaaaaccagagcacagagatttttgcttttttactatcaaatttttaaagcactctgctttgaaaacacccagagttgataatgagtttttaaacatgcttttagacaaaggtgctgtgaagaccaaaaattgcttttttgaaatcataaagccttttgacaagtacataatgagacttcaagaccggcttctgaagagtgtcacacctttgcttatggcctgcaatgcctacgagctaagtgtcaagatgaagaccctcagtaaccccctggacttggctcttgccctagaaaccaccaactctctctgccggaagtctttggcccttttgggacagacattttccttggcctcttctttccggcaggagaaaatcttagaagctgtcggcctgcaagatatagctccctcacctgctgcgtttccaaacttcgaagactccactttgtttgggcgagagtacatagaccacctgaaggcctggctagtcagcagcggatgtcccctccaggttaagaaagccgaaccagagccgatgcgagaggaggagaaaatgattcctcctacgaaacctgaaattcaggccaaggctccaagtagtctgagtgatgctgtcccccagcgagcagatcacagggtagtgggcaccatcgaccagcttgtgaaacgtgtcatcgaaggcagcctgtctcccaaagagagaactcttctcaaagaggaccctgcttactggtttttgtctgatgaaaatagtctggagtataaatattacaagctgaagttggcagaaatgcagcggatgagcgagaacttgcgaggagccgaccagaagccgacctcagcagactgtgcagtgagggccatgctgtactcccgggctgtccgcaacctcaagaagaaactccttccgtggcagcggcgggggctcctccgtgctcaagggctccggggctggaaggcgaggagagcgaccaccgggacccagaccctcctatcctcaggcaccaggctgaaacaccacggccggcaggctccaggcctctcacaggcaaaaccatccctgccagacagaaatgatgctgccaaggactgcccgccagacccagttggaccttctcctcaggaccccagcttagaagcctcaggcccatcccccaagccagcaggagtggacatctctgaagcacctcagacctcttctccctgcccatctgctgacattgacatgaagacaatggagactgcagagaaactggctagatttgttgctcaggtgggaccagagatcgaacaattcagcatagaaaacagcaccgataaccctgacctgtggtttctacatgaccaaaatagttctgctttcaaattctatcgaaagaaagtgtttgaactatgtccatcaatttgtttcacgtcatctccgcacaaccttcacactggtggtggtgacaccacgggttctcaggagagccccgtggacctcatggaaggggaagcagagtttgaagacgagccccctccgcgggaggctgagctggagagcccagaggtgatgcctgaggaggaggacgaggacgatgaggatgggggagaggaggcccccgctcctggaggggcgggcaagtctgagggcagcacccctgccgacggccttcccggcgaggctgccgaggacgacctggctggagcacctgccttgtcacaggcctcctcaggtacctgcttccctcggaagaggatcagcagcaagtcattgaaggttggcatgattccagctcccaagagagtgtgtctcatccaggagccaaaagtccatgaaccagttcgaattgcctatgacaggcctcggggtcgtcccatgtccaaaaagaagaaacccaaggacttggacttcgcccagcagaagctgaccgataagaacctgggcttccagatgctgcagaagatgggctggaaggagggccatggcctgggctccctcggaaagggcatcagggagccggtcagcgtgtacgcagcaggcagcctggggtgggagtgggtggggcctcagtccttccacctgcagcctgccgcttggctccttcacagccaagatggcttacagctggcagttgatttttgttttttaaacagaaggcatcttcagatgagaagctgatcatttacatgtgcaggtgtttacagggctcctttctgtcctggtgtagattttttaaccagcttgttggccctggtcattttggccacatttgtgaccatcataaaagctaagtggtatttctgtgtagtttccgtctggaactgctttcccattcccgggaacccatagccgggccagccagggtcccgaacacaggcccaaagtttattaaaccccgatcataacctccagcaggcatttcatttaatactgagcttagttcctgctgggtaaggcattccgaggtaaccagggccctctgggcaccccctcaaaagccagctcttcgagggtgagtactccttgtttctactgtgagtcgcgtcttgattttccctttctttgatgtctcagtgtgtgtcccaaacacctgcatctcatggactgtttgtgcccatgcccagttcctggcatgccaggccctgggctcaggtgcacaactgactctctttttcactccctaggggaaccccctcggaaggggaagggttgggtgctgacgggcaggagcacaaagaagacacattcgatgtgttccgacagaggatgatgcagatgtacagacacaagcgggccaacaaatagatcaaaaccactgatgtgaaagataagccttgaagcagcaattgcccttaaaacatcatccctgccctggatcggcctggagccagtgcccaagtacggtttccagggtcacccccgagaggacaacaggcatctggaagtgctctctcgccactctgggtgctttactgtctctggcttgtttccatcactggaaatcacttagagaattgtagtgtttttggtccttgataaagcctagaagacatttgtgatgttacaaaatggaagttttcttttgtttctgttttttaagatctaagaagttgtgaatgttgttaatcatttagccgttgcaataaatgtagaggaaatgca

SEQ ID NO: 355547 - DNA, 4381 bp, Homo sapiens
agcggctgtgcggcgcggcgctgcggagaccgttggttcatttgcatgtccccgcctcgcgcggcggcggcggcgggtgaggagcctgaggcggcggcgggggtggctccgcgcgcggtggtctcgggggcaaaataacatggcagccagacgaattacacaggagacttttgatgctgtattacaagaaaaagccaaacgatatcacatggatgccagtggtgaggctgtaagcgaaactcttcagtttaaagctcaagatctcttaagggcagtcccaagatccagagcagagatgtatgatgacgtccacagcgatggcagatactccctcagtggatctgtagctcactctagagatgccggaagagaaggcctgagaagtgacgtatttccagggccttccttcagatcaagcaacccttccatcagtgatgacagctactttcgcaaagaatgtggccgggatctggaattttctcactctgattctcgggaccaggtcattggccaccggaaattggggcatttccgttctcaggactggaaatttgcgctccgtggttcttgggaacaagactttggccatccagtttctcaagagtcctcttggtcacaggagtatagttttggtccctctgcagttttgggggactttggatcttccaggctgattgagaaagagtgtttggagaaggagagtcgggattatgacgtggaccatcctggggaggctgactctgtgcttaggggcagcagtcaagtccaggccagaggtcgagctctaaacatcgttgaccaggaaggttccctcctaggaaagggggagactcagggcctgctcacagctaaggggggtgttgggaaacttgtcacattgagaaatgtgagcacaaaaaaaatacccaccgtgaatcgtattactcccaaaactcagggcactaaccaaatccagaaaaacactccaagtcctgatgtgaccctggggacaaacccagggacagaagatatccagttccccattcagaagatccctctggggctggatctgaagaatcttcggctccccagaagaaagatgagctttgacatcatagataagtctgatgttttttcaagatttgggatagaaataatcaaatgggcaggattccacaccataaaagatgatattaaattttcccaacttttccagactctctttgaacttgaaacagaaacctgtgctaaaatgcttgcctcattcaaatgttccttaaaaccagagcacagagatttttgcttttttactatcaaatttttaaagcactctgctttgaaaacacccagagttgataatgagtttttaaacatgcttttagacaaaggtgctgtgaagaccaaaaattgcttttttgaaatcataaagccttttgacaagtacataatgagacttcaagaccggcttctgaagagtgtcacacctttgcttatggcctgcaatgcctacgagctaagtgtcaagatgaagaccctcagtaaccccctggacttggctcttgccctagaaaccaccaactctctctgccggaagtctttggcccttttgggacagacattttccttggcctcttctttccggcaggagaaaatcttagaagctgtcggcctgcaagatatagctccctcacctgctgcgtttccaaacttcgaagactccactttgtttgggcgagagtacatagaccacctgaaggcctggctagtcagcagcggatgtcccctccaggttaagaaagccgaaccagagccgatgcgagaggaggagaaaatgattcctcctacgaaacctgaaattcaggccaaggctccaagtagtctgagtgatgctgtcccccagcgagcagatcacagggtagtgggcaccatcgaccagcttgtgaaacgtgtcatcgaaggcagcctgtctcccaaagagagaactcttctcaaagaggaccctgcttactggtttttgtctgatgaaaatagtctggagtataaatattacaagctgaagttggcagaaatgcagcggatgagcgagaacttgcgaggagccgaccagaagccgacctcagcagactgtgcagtgagggccatgctgtactcccgggctgtccgcaacctcaagaagaaactccttccgtggcagcggcgggggctcctccgtgctcaagggctccggggctggaaggcgaggagagcgaccaccgggacccagaccctcctatcctcaggcaccaggctgaaacaccacggccggcaggctccaggcctctcacaggcaaaaccatccctgccagacagaaatgatgctgccaaggactgcccgccagacccagttggaccttctcctcaggaccccagcttagaagcctcaggcccatcccccaagccagcaggagtggacatctctgaagcacctcagacctcttctccctgcccatctgctgacattgacatgaagacaatggagactgcagagaaactggctagatttgttgctcaggtgggaccagagatcgaacaattcagcatagaaaacagcaccgataaccctgacctgtggtttctacatgaccaaaatagttctgctttcaaattctatcgaaagaaagtgtttgaactatgtccatcaatttgtttcacgtcatctccgcacaaccttcacactggtggtggtgacaccacgggttctcaggagagccccgtggacctcatggaaggggaagcagagtttgaagacgagccccctccgcgggaggctgagctggagagcccagaggtgatgcctgaggaggaggacgaggacgatgaggatgggggagaggaggcccccgctcctggaggggcgggcaagtctgagggcagcacccctgccgacggccttcccggcgaggctgccgaggacgacctggctggagcacctgccttgtcacaggcctcctcaggtacctgcttccctcggaagaggatcagcagcaagtcattgaaggttggcatgattccagctcccaagagagtgtgtctcatccaggagccaaaagtccatgaaccagttcgaattgcctatgacaggcctcggggtcgtcccatgtccaaaaagaagaaacccaaggacttggacttcgcccagcagaagctgaccgataagaacctgggcttccagatgctgcagaagatgggctggaaggagggccatggcctgggctccctcggaaagggcatcagggagccggtcagcgtgtacgcagcaggcagcctggggtgggagtgggtggggcctcagtccttccacctgcagcctgccgcttggctccttcacagccaagatggcttacagctggcagttgatttttgttttttaaacagaaggcatcttcagatgagaagctgatcatttacatgtgcaggtgtttacagggctcctttctgtcctggtgtagattttttaaccagcttgttggccctggtcattttggccacatttgtgaccatcataaaagctaagtggtatttctgtgtagtttccgtctggaactgctttcccattcccgggaacccatagccgggccagccagggtcccgaacacaggcccaaagtttattaaaccccgatcataacctccagcaggcatttcatttaatactgagcttagttcctgctgggtaaggcattccgaggtaaccagggccctctgggcaccccctcaaaagccagctcttcgagggtgagtactccttgtttctactgtgagtcgcgtcttgattttccctttctttgatgtctcagtgtgtgtcccaaacacctgcatctcatggactgtttgtgcccatgcccagttcctggcatgccaggccctgggctcaggtgcacaactgactctctttttcactccctaggggaaccccctcggaaggggaagggttgggtgctgacgggcaggagcacaaagaagacacattcgatgtgttccgacagaggatgatgcagatgtacagacacaagcgggccaacaaatagagtccatgaaccagttcgaattgcctatgacaggcctcggggtcgtcccatgtccaaaaagaagaaacccaaggacttggacttcgcccagcagaagctgaccgataagcatctggaagtgctctctcgccactctgggtgctttactgtctctggcttgtttccatcactggaaatcacttagagaattgtagtgtttttggtccttgataaagcctagaagacatttgtgatgttacaaaatggaagttttcttttgtttctgttttttaagatctaagaagttgtgaatgttgttaatcatttagccgttgcaataaatgtagaggaaatgca

SEQ ID NO: 355548 - DNA, 1693 bp, Homo sapiens
agcggctgtgcggcgcggcgctgcggagaccgttggttcatttgcatgtccccgcctcgcgcggcggcggcggcgggtgaggagcctgaggcggcggcgggggtggctccgcgcgcggtggtctcgggggcaaaataacatggcagccagacgaattacacaggagacttttgatgctgtattacaagaaaaagccaaacgatatcacatggatgccagtggtgaggctgtaagcgaaactcttcagtttaaagctcaagatctcttaagggcagtcccaagatccagagcagagatgtatgatgacgtccacagcgatggcagatactccctcagtggatctgtagctcactctagagatgccggaagagaaggcctgagaagtgacgtatttccagggccttccttcagatcaagcaacccttccatcagtgatgacagctactttcgcaaagaatgtggccgggatctggaattttctcactctgattctcgggaccaggtcattggccaccggaaattggggcatttccgttctcaggactggaaatttgcgctccgtggttcttgggaacaagactttggccatccagtttctcaagagtcctcttggtcacaggagtatagttttggtccctctgcagttttgggggactttggatcttccaggctgattgagaaagagtgtttggagaaggagagtcgggattatgacgtggaccatcctggggaggctgactctgtgcttaggggcagcagtcaagtccaggccagaggtcgagctctaaacatcgttgaccaggaaggttccctcctaggaaagggggagactcagggcgacagcttccatgttggccatgggtcaggtgaatggatggagctccaagcggggctcagcccattgacccgagcgaggcgcacacacctgcagcgtggatcaagcgcactctctccagcatcgccctgaccattccatgtgctttgtcctagcatgttcattcttgactttctccacttcattttattaaaaagttaaatgctttaggaatctgtggcgtgtggccactgaccgccccccacctcctgccgctcctccaagtttgagctgagatggttctgtgagtccttggcaggggtcaaagggcacatctccttgaacctagaaagccccctacactctcagaggacacctctcctgtggattcagcgctggggcagtgaaggtgtcgggagccagcagagcatggtgcgtgctgccagctgccggccagccgggatagaggagatgccactggccctccgtgcccccagcccctccctcttaaccgaggctgtccttgctctctgcagaggccgctctgcaggatcctcgtgtcgcgcgtgatgtgtggtggcacagccgtgtcaaagtcacagtgtcttttctgtcgttctagttccagggtcacccccgagaggacaacaggcatctggaagtgctctctcgccactctgggtgctttactgtctctggcttgtttccatcactggaaatcacttagagaattgtagtgtttttggtccttgataaagcctagaagacatttgtgatgttacaaaatggaagttttcttttgtttctgttttttaagatctaagaagttgtgaatgttgttaatcatttagccgttgcaataaatgtagaggaaatgca

SEQ ID NO: 355549 - DNA, 1150 bp, Homo sapiens
gggtagtacgaggctggtggtgaatcggcgaggcgctccttgtctgcctggtccctgtcaccttgcagtgccaccacccccaggggctctgcttgcttccagtggcttctgtagctttggcaactggcagatctttatggcagtagaggtgccagcatggaggatggagtttgggtttataacccaaccctcgaacgaaccagcctgtgggggcctggagtggagctggttttggggagtcacaggtgcggggggttcatcatctcctttctccttctcctttcctgacccctccgacagcttccatgttggccatgggtcaggtgaatggatggagctccaagcggggctcagcccattgacccgagcgaggcgcacacacctgcagcgtggatcaagcgcactctctccagcatcgccctgaccattccatgtgctttgtcctagcatgttcattcttgactttctccacttcattttattaaaaagttaaatgctttaggaatctgtggcgtgtggccactgaccgccccccacctcctgccgctcctccaagtttgagctgagatggttctgtgagtccttggcaggggtcaaagggcacatctccttgaacctagaaagccccctacactctcagaggacacctctcctgtggattcagcgctggggcagtgaaggtgtcgggagccagcagagcatggtgcgtgctgccagctgccggccagccgggatagaggagatgccactggccctccgtgcccccagcccctccctcttaaccgaggctgtccttgctctctgcagaggccgctctgcaggatcctcgtgtcgcgcgtgatgtgtggtggcacagccgtgtcaaagtcacagtgtcttttctgtcgttctagttccagggtcacccccgagaggacaacaggcatctggaagtgctctctcgccactctgggtgctttactgtctctggcttgtttccatcactggaaatcacttagagaattgtagtgtttttggtccttgataaagcctagaagacatttgtgatgttacaaaatggaagttttcttttgtttctgttttttaagatctaagaagttgtgaatgttgttaatcatttagccgttgcaataaatgtagaggaaatgca

SEQ ID NO: 355550 - DNA, 2257 bp, Homo sapiens
agcggctgtgcggcgcggcgctgcggagaccgttggttcatttgcatgtccccgcctcgcgcggcggcggcggcgggtgaggagcctgaggcggcggcgggggtggctccgcgcgcggtggtctcgggggcaaaataacatggcagccagacgaattacacaggagacttttgatgctgtattacaagaaaaagccaaacgatatcacatggatgccagtggtgaggctgtaagcgaaactcttcagtttaaagctcaagatctcttaagggcagtcccaagatccagagcagagatgtatgatgacgtccacagcgatggcagatactccctcagtggatctgtagctcactctagagatgccggaagagaaggcctgagaagtgacgtatttccagggccttccttcagatcaagcaacccttccatcagtgatgacagctactttcgcaaagaatgtggccgggatctggaattttctcactctgattctcgggaccaggtcattggccaccggaaattggggcatttccgttctcaggactggaaatttgcgctccgtggttcttgggaacaagactttggccatccagtttctcaagagtcctcttggtcacaggagtatagttttggtccctctgcagttttgggggactttggatcttccaggctgattgagaaagagtgtttggagaaggagagtcgggattatgacgtggaccatcctggggaggctgactctgtgcttaggggcagcagtcaagtccaggccagaggtcgagctctaaacatcgttgaccaggaaggttccctcctaggaaagggggagactcagggcctgctcacagctaaggggggtgttgggaaacttgtcacattgagaaatgtgagcacaaaaaaaatacccaccgtgaatcgtattactcccaaaactcagggcactaaccaaatccagaaaaacactccaagtcctgatgtgaccctggggacaaacccagggacagaagatatccagttccccattcagaagatccctctggggctggatctgaagaatcttcggctccccagaagaaagatgagctttgacatcatagataagtctgatgttttttcaagatttgggatagaaataatcaaatgggcaggattccacaccataaaagatgatattaaattttcccaacttttccagactctctttgaacttgaaacagaaacctgtgctaaaatgcttgcctcattcaaatgttccttaaaaccagagcacagagatttttgcttttttactatcaaatttttaaagcactctgctttgaaaacacccagagttgataatgagtttttaaacatgcttttagacaaaggtgctgtgaagaccaaaaattgcttttttgaaatcataaagccttttgacaagtacataatgagacttcaagaccggcttctgaagagtgtcacacctttgcttatggcctgcaatgcctacgagctaagtgtcaagatgaagaccctcagtaaccccctggacttggctcttgccctagaaaccaccaactctctctgccggaagtctttggcccttttgggacagacattttccttggcctcttctttccggcaggagaaaatcttagaagctgtcggcctgcaagatatagctccctcacctgctgcgtttccaaacttcgaagactccactttgtttgggcgagagtacatagaccacctgaaggcctggctagtcagcagcggatgtcccctccaggttaagaaagccgaaccagagccgatgcgagaggaggagaaaatgattcctcctacgaaacctgaaattcaggccaaggctccaagtagtctgagtgatgctgtcccccagcgagcagatcacagggtagtgggcaccatcgaccagcttgtgaaacgtgtcatcgaaggcagcctgtctcccaaagagagaactcttctcaaagaggaccctgcttactggtttttgtctgatgaaaatagtctggagtataaatattacaagctgaagttggcagaaatgccactctgggtgctttactgtctctggcttgtttccatcactggaaatcacttagagaattgtagtgtttttggtccttgataaagcctagaagacatttgtgatgttacaaaatggaagttttcttttgtttctgttttttaagatctaagaagttgtgaatgttgttaatcatttagccgttgcaataaatgtagaggaaatgca

SEQ ID NO: 355551 - DNA, 941 bp, Homo sapiens
ataagctgcttcatgtcatgacagtgagatgggaacagagcaggggtggtcccaggcagtggtcagtgggacactgcctcggccatgagaggccatctcctgctctcctgtggggaggttccgggttcttgaggtataatttaccagcagtgaaacgcacccttttcaagtggaccatttgaattttgttgactgtgcagaggcgagaacccaccagtacagcagagctgaagcctgttcccagaacgggtctcttgtcccattgcagtcccctgcccgattcagcaaccactgactgttttccaagccccaggtattctatctttcctagtctgtcagtacatagaattgcatcgcatgtggccttttgatgggcacgccgtggcccagatgactcctgtagcccccaagtgccctccaagctgtctccccacagtcaggcctggaccgtgctttcacatgggacttctgctgcaaaacctatgtgtgaagttgtagtgaatggtgccccattgtgggactgtgttaaacagtcacctgtgtgttctacatcattcagacagtcacatttacatgtgacagtggccttatggtttttcctgctttggaatagtcctcatgttttgtgtttgaaaaatttggtgttgcagtgaaatgctaaccattctactataacctttaccatccttcaaaacttctcatggggccaggcgcagtggctcgtgcctgtaatcccagcttagcgggactgaggcaagaggatcgcttgagcccgggagcttgagaccagcctgggcaagatggccagacctaatctttacaagaaaaaaaaattaatgtaaaaaaaatgaagtaaataattaaacttgtcacggatggcaggtagtgtatcagagtgcttgttatgtatgctcttcttggggggaggtggagttttttat

SEQ ID NO: 355552 - DNA, 364 bp, Homo sapiens
gaatcgatgctccgtaccttacgatgtcgctgtgcgatgatccacctagaagaaacccaaggacttggacttcgcccagcagaagctgaccgataagaacctgggcttccagatgctgcagaagatgggctggaaggagggccatggcctgggctccctcggaaagggcatcagggagccggtcagcgtgggaaccccctcggaaggggaagggttgggtgctgacgggcaggagcacaaagaagacacattcgatgtgttccgacagaggatgatgcagatgtacagacacaagcgggccaacaaatagatcaaaaccactgatgtgaaagattaacaagttttttttttttttttttttttt

SEQ ID NO: 355553 - DNA, 7177 bp, Homo sapiens
cgcgcaggcgctgtggcgcccctaggcttggcctcccagagactcgcggacgctcacgataaccaaggacgaccgcgaaccaagggcaaaataacatggcagccagacgaattacacaggagacttttgatgctgtattacaagaaaaagccaaacgatatcacatggatgccagtggtgaggctgtaagcgaaactcttcagtttaaagctcaagatctcttaagggcagtcccaagatccagagcagagatgtatgatgacgtccacagcgatggcagatactccctcagtggatctgtagctcactctagagatgccggaagagaaggcctgagaagtgacgtatttccagggccttccttcagatcaagcaacccttccatcagtgatgacagctactttcgcaaagaatgtggccgggatctggaattttctcactctgattctcgggaccaggtcattggccaccggaaattggggcatttccgttctcaggactggaaatttgcgctccgtggttcttgggaacaagactttggccatccagtttctcaagagtcctcttggtcacaggagtatagttttggtccctctgcagttttgggggactttggatcttccaggctgattgagaaagagtgtttggagaaggagagtcgggattatgacgtggaccatcctggggaggctgactctgtgcttaggggcagcagtcaagtccaggccagaggtcgagctctaaacatcgttgaccaggaaggttccctcctaggaaagggggagactcagggcctgctcacagctaaggggggtgttgggaaacttgtcacattgagaaatgtgagcacaaaaaaaatacccaccgtgaatcgtattactcccaaaactcagggcactaaccaaatccagaaaaacactccaagtcctgatgtgaccctggggacaaacccagggacagaagatatccagttccccattcagaagatccctctggggctggatctgaagaatcttcggctccccagaagaaagatgagctttgacatcatagataagtctgatgttttttcaagatttgggatagaaataatcaaatgggcaggattccacaccataaaagatgatattaaattttcccaacttttccagactctctttgaacttgaaacagaaacctgtgctaaaatgcttgcctcattcaaatgttccttaaaaccagagcacagagatttttgcttttttactatcaaatttttaaagcactctgctttgaaaacacccagagttgataatgagtttttaaacatgcttttagacaaaggtgctgtgaagaccaaaaattgcttttttgaaatcataaagccttttgacaagtacataatgagacttcaagaccggcttctgaagagtgtcacacctttgcttatggcctgcaatgcctacgagctaagtgtcaagatgaagaccctcagtaaccccctggacttggctcttgccctagaaaccaccaactctctctgccggaagtctttggcccttttgggacagacattttccttggcctcttctttccggcaggagaaaatcttagaagctgtcggcctgcaagatatagctccctcacctgctgcgtttccaaacttcgaagactccactttgtttgggcgagagtacatagaccacctgaaggcctggctagtcagcagcggatgtcccctccaggttaagaaagccgaaccagagccgatgcgagaggaggagaaaatgattcctcctacgaaacctgaaattcaggccaaggctccaagtagtctgagtgatgctgtcccccagcgagcagatcacagggtagtgggcaccatcgaccagcttgtgaaacgtgtcatcgaaggcagcctgtctcccaaagagagaactcttctcaaagaggaccctgcttactggtttttgtctgatgaaaatagtctggagtataaatattacaagctgaagttggcagaaatgcagcggatgagcgagaacttgcgaggagccgaccagaagccgacctcagcagactgtgcagtgagggccatgctgtactcccgggctgtccgcaacctcaagaagaaactccttccgtggcagcggcgggggctcctccgtgctcaagggctccggggctggaaggcgaggagagcgaccaccgggacccagaccctcctatcctcaggcaccaggctgaaacaccacggccggcaggctccaggcctctcacaggcaaaaccatccctgccagacagaaatgatgctgccaaggactgcccgccagacccagttggaccttctcctcaggaccccagcttagaagcctcaggcccatcccccaagccagcaggagtggacatctctgaagcacctcagacctcttctccctgcccatctgctgacattgacatgaagacaatggagactgcagagaaactggctagatttgttgctcaggtgggaccagagatcgaacaattcagcatagaaaacagcaccgataaccctgacctgtggtttctacatgaccaaaatagttctgctttcaaattctatcgaaagaaagtgtttgaactatgtccatcaatttgtttcacgtcatctccgcacaaccttcacactggtggtggtgacaccacgggttctcaggagagccccgtggacctcatggaaggggaagcagagtttgaagacgagccccctccgcgggaggctgagctggagagcccagaggtgatgcctgaggaggaggacgaggacgatgaggatgggggagaggaggcccccgctcctggaggggcgggcaagtctgagggcagcacccctgccgacggccttcccggcgaggctgccgaggacgacctggctggagcacctgccttgtcacaggcctcctcaggtacctgcttccctcggaagaggatcagcagcaagtcattgaaggttggcatgattccagctcccaagagagtgtgtctcatccaggagccaaaagtccatgaaccagttcgaattgcctatgacaggcctcggggtcgtcccatgtccaaaaagaagaaacccaaggacttggacttcgcccagcagaagctgaccgataagaacctgggcttccagatgctgcagaagatgggctggaaggagggccatggcctgggctccctcggaaagggcatcagggagccggtcagcgtgtacgcagcaggcagcctggggtgggagtgggtggggcctcagtccttccacctgcagcctgccgcttggctccttcacagccaagatggcttacagctggcagttgatttttgttttttaaacagaaggcatcttcagatgagaagctgatcatttacatgtgcaggtgtttacagggctcctttctgtcctggtgtagattttttaaccagcttgttggccctggtcattttggccacatttgtgaccatcataaaagctaagtggtatttctgtgtagtttccgtctggaactgctttcccattcccgggaacccatagccgggccagccagggtcccgaacacaggcccaaagtttattaaaccccgatcataacctccagcaggcatttcatttaatactgagcttagttcctgctgggtaaggcattccgaggtaaccagggccctctgggcaccccctcaaaagccagctcttcgagggtgagtactccttgtttctactgtgagtcgcgtcttgattttccctttctttgatgtctcagtgtgtgtcccaaacacctgcatctcatggactgtttgtgcccatgcccagttcctggcatgccaggccctgggctcaggtgcacaactgactctctttttcactccctaggggaaccccctcggaaggggaagggttgggtgctgacgggcaggagcacaaagaagacacattcgatgtgttccgacagaggatgatgcagatgtacagacacaagcgggccaacaaatagggtatgttcacaggccagtgtgtaaggccgtctgccctcgctggcgtgctggtatgcagagaaatttcccccaacaaagttgatgttccctgctcccccaaaaatgccacacacaaaaaaaatcacaaaattctgtgagggaaacaaaagggtctatggatgtggatatgccccattcttaccttccaggtttgctgaaggagcaaacctcacactggccaagggcagatgcgcatggcctgcctggtgccccggctgtgagcccctcaaggcctccaggccagcctccgtggatgtgcgtgtggaaataggccacgcctgtctcttctcttgctcaagttttctctcacagatgacagccacctaccacataacatgaccagcaaacggactgttcctagtccagagggccttgccatcatgcaagtggaagggcgactgtgacagccactgccacagaggatggcagttggctgtgtccctttgtgagggtcttcaaatccttttccttctgcagggccttgggcctgtaaatatcctcatctttctattcttttttttttttagttgccccctcacctaatttccacctcagttttgaacaaaatcgttctcttcctgaatagatcaaaaccactgatgtgaaagataagccttgaagcagcaattgcccttaaaacatcatccctgccctggatcggcctggagccagtgcccaagtacggtttggtgtgtacatgaaaacaaacgtctctgcagtctctggggcggaggtttcgctggcttttctttctctcaaagaaaaaaacatgcaccattttcaatgtgcttttgcctctcctctctgttcacatgcttttagcagcaagtcccctccaaatctgtcttggttccccttcagaaggtggcgctgcccccgaaaggcacctcagcctgtgagtgctgaggaaccagctcctctggctgattttccagttggactggccattgctctccagaagtgctctgttagcaaacgtgatgtggaaacgatcacagatggtgttttctcgttgttcgccagaatttatacgggggagacaaattcccggtaattaccaagtctgcactcgggtaccaaagctctgaagctctctgaacagttgccatacttgagttgatgaatgtgttattcatggtgtctcatctcatcaatgcatcttgagagacttaatgaaattttagcaacagtatagaatagctctatcgggtggggagtaatcattaaacagatgaaatcggccccagatttacatgtctctttagaatccacagtgtaagcaaactacagttacaaagggatgggggttgtaaaccctctgagactctgcacttttcgcacgtatggcatcgtcaagtgctgtcttattacagcctttgtaaggagaggcaggctcctcctggggtgggctctgcagctgctctatttccaggcatgtgatcgcccccgctctccagattccccagcactctgctgcgtgtaactccactcaattctccactcatccttccttgtgaagcaggatcgttgaagttttaagtatgggcaaaaatctggaaaacttaggatccctctgacaccccaggattaggggacacagcagtggctagggcatcagccacagaactgagcgggaaatgccacttgtattggctgtaaagaaatcctggctttgggccaggcacagtggctcaagcctgtaatcccagcactttaggaggttgaggcggatggatcacctgaggtcaggagtttgagaccagcctggccaacatggtgtaaccccgtctctactaaaaatacaaaaaaattagccaggcgtggtagcgggcacctgtaatcccagctactcaggaggctgaggcaggagaatcacttgaaccggggaggcagaggttgcagtgagctgagatcatgccactccactccagcctgggcgacagagcaagactctgtctcaaaaaaaaaaaaggaaatcctggctttctttaagccacagacttcctaggctgtggtcccagctccttgtctgcctggtccctgtcaccttgcagtgccaccacccccaggggctctgcttgcttccagtggcttctgtagctttggcaactggcagatctttatggcagtagaggtgccagcatggaggatggagtttgggtttataacccaaccctcgaacgaaccagcctgtgggggcctggagtggagctggttttggggagtcacaggtgcggggggttcatcatctcctttctccttctcctttcctgacccctccgacagcttccatgttggccatgggtcaggtgaatggatggagctccaagcggggctcagcccattgacccgagcgaggcgcacacacctgcagcgtggatcaagcgcactctctccagcatcgccctgaccattccatgtgctttgtcctagcatgttcattcttgactttctccacttcattttattaaaaagttaaatgctttaggaatctgtggcgtgtggccactgaccgccccccacctcctgccgctcctccaagtttgagctgagatggttctgtgagtccttggcaggggtcaaagggcacatctccttgaacctagaaagccccctacactctcagaggacacctctcctgtggattcagcgctggggcagtgaaggtgtcgggagccagcagagcatggtgcgtgctgccagctgccggccagccgggatagaggagatgccactggccctccgtgcccccagcccctccctcttaaccgaggctgtccttgctctctgcagaggccgctctgcaggatcctcgtgtcgcgcgtgatgtgtggtggcacagccgtgtcaaagtcacagtgtcttttctgtcgttctagttccagggtcacccccgagaggacaacaggcatctggaagtgctctctcgccactctgggtgctttactgtctctggcttgtttccatcactggaaatcacttagagaattgtagtgtttttggtccttgataaagcctagaagacatttgtgatgttacaaaatggaagttttcttttgtttctgttttttaagatctaagaagttgtgaatgttgttaatcatttagccgttgcaataaatgtagaggaaatgca

SEQ ID NO: 355554 - DNA, 7423 bp, Homo sapiens
ggccttgggggcccgccccgggctccgtgatggcgtcgcaggctcggccctctggctgcggcggcggccgcgtccccgccgggttggcctgggtggccggctgcggcctcccgggcccggcgcccccatttcctcgcccgcagaggccgggagacggcgggccgcgtccacaaaggctcattggttcagtcgttcattcattcctcccgaactcggagcggcccccgctcgggaggagataacggcgcccagcgctgcatcgggcccttgccctctttagaaccggttcagcccccacaccagcccctttactggctgcccattccatagggcaaaataacatggcagccagacgaattacacaggagacttttgatgctgtattacaagaaaaagccaaacgatatcacatggatgccagtggtgaggctgtaagcgaaactcttcagtttaaagctcaagatctcttaagggcagtcccaagatccagagcagagatgtatgatgacgtccacagcgatggcagatactccctcagtggatctgtagctcactctagagatgccggaagagaaggcctgagaagtgacgtatttccagggccttccttcagatcaagcaacccttccatcagtgatgacagctactttcgcaaagaatgtggccgggatctggaattttctcactctgattctcgggaccaggtcattggccaccggaaattggggcatttccgttctcaggactggaaatttgcgctccgtggttcttgggaacaagactttggccatccagtttctcaagagtcctcttggtcacaggagtatagttttggtccctctgcagttttgggggactttggatcttccaggctgattgagaaagagtgtttggagaaggagagtcgggattatgacgtggaccatcctggggaggctgactctgtgcttaggggcagcagtcaagtccaggccagaggtcgagctctaaacatcgttgaccaggaaggttccctcctaggaaagggggagactcagggcctgctcacagctaaggggggtgttgggaaacttgtcacattgagaaatgtgagcacaaaaaaaatacccaccgtgaatcgtattactcccaaaactcagggcactaaccaaatccagaaaaacactccaagtcctgatgtgaccctggggacaaacccagggacagaagatatccagttccccattcagaagatccctctggggctggatctgaagaatcttcggctccccagaagaaagatgagctttgacatcatagataagtctgatgttttttcaagatttgggatagaaataatcaaatgggcaggattccacaccataaaagatgatattaaattttcccaacttttccagactctctttgaacttgaaacagaaacctgtgctaaaatgcttgcctcattcaaatgttccttaaaaccagagcacagagatttttgcttttttactatcaaatttttaaagcactctgctttgaaaacacccagagttgataatgagtttttaaacatgcttttagacaaaggtgctgtgaagaccaaaaattgcttttttgaaatcataaagccttttgacaagtacataatgagacttcaagaccggcttctgaagagtgtcacacctttgcttatggcctgcaatgcctacgagctaagtgtcaagatgaagaccctcagtaaccccctggacttggctcttgccctagaaaccaccaactctctctgccggaagtctttggcccttttgggacagacattttccttggcctcttctttccggcaggagaaaatcttagaagctgtcggcctgcaagatatagctccctcacctgctgcgtttccaaacttcgaagactccactttgtttgggcgagagtacatagaccacctgaaggcctggctagtcagcagcggatgtcccctccaggttaagaaagccgaaccagagccgatgcgagaggaggagaaaatgattcctcctacgaaacctgaaattcaggccaaggctccaagtagtctgagtgatgctgtcccccagcgagcagatcacagggtagtgggcaccatcgaccagcttgtgaaacgtgtcatcgaaggcagcctgtctcccaaagagagaactcttctcaaagaggaccctgcttactggtttttgtctgatgaaaatagtctggagtataaatattacaagctgaagttggcagaaatgcagcggatgagcgagaacttgcgaggagccgaccagaagccgacctcagcagactgtgcagtgagggccatgctgtactcccgggctgtccgcaacctcaagaagaaactccttccgtggcagcggcgggggctcctccgtgctcaagggctccggggctggaaggcgaggagagcgaccaccgggacccagaccctcctatcctcaggcaccaggctgaaacaccacggccggcaggctccaggcctctcacaggcaaaaccatccctgccagacagaaatgatgctgccaaggactgcccgccagacccagttggaccttctcctcaggaccccagcttagaagcctcaggcccatcccccaagccagcaggagtggacatctctgaagcacctcagacctcttctccctgcccatctgctgacattgacatgaagacaatggagactgcagagaaactggctagatttgttgctcaggtgggaccagagatcgaacaattcagcatagaaaacagcaccgataaccctgacctgtggtttctacatgaccaaaatagttctgctttcaaattctatcgaaagaaagtgtttgaactatgtccatcaatttgtttcacgtcatctccgcacaaccttcacactggtggtggtgacaccacgggttctcaggagagccccgtggacctcatggaaggggaagcagagtttgaagacgagccccctccgcgggaggctgagctggagagcccagaggtgatgcctgaggaggaggacgaggacgatgaggatgggggagaggaggcccccgctcctggaggggcgggcaagtctgagggcagcacccctgccgacggccttcccggcgaggctgccgaggacgacctggctggagcacctgccttgtcacaggcctcctcaggtacctgcttccctcggaagaggatcagcagcaagtcattgaaggttggcatgattccagctcccaagagagtgtgtctcatccaggagccaaaagtccatgaaccagttcgaattgcctatgacaggcctcggggtcgtcccatgtccaaaaagaagaaacccaaggacttggacttcgcccagcagaagctgaccgataagaacctgggcttccagatgctgcagaagatgggctggaaggagggccatggcctgggctccctcggaaagggcatcagggagccggtcagcgtgtacgcagcaggcagcctggggtgggagtgggtggggcctcagtccttccacctgcagcctgccgcttggctccttcacagccaagatggcttacagctggcagttgatttttgttttttaaacagaaggcatcttcagatgagaagctgatcatttacatgtgcaggtgtttacagggctcctttctgtcctggtgtagattttttaaccagcttgttggccctggtcattttggccacatttgtgaccatcataaaagctaagtggtatttctgtgtagtttccgtctggaactgctttcccattcccgggaacccatagccgggccagccagggtcccgaacacaggcccaaagtttattaaaccccgatcataacctccagcaggcatttcatttaatactgagcttagttcctgctgggtaaggcattccgaggtaaccagggccctctgggcaccccctcaaaagccagctcttcgagggtgagtactccttgtttctactgtgagtcgcgtcttgattttccctttctttgatgtctcagtgtgtgtcccaaacacctgcatctcatggactgtttgtgcccatgcccagttcctggcatgccaggccctgggctcaggtgcacaactgactctctttttcactccctaggggaaccccctcggaaggggaagggttgggtgctgacgggcaggagcacaaagaagacacattcgatgtgttccgacagaggatgatgcagatgtacagacacaagcgggccaacaaatagggtatgttcacaggccagtgtgtaaggccgtctgccctcgctggcgtgctggtatgcagagaaatttcccccaacaaagttgatgttccctgctcccccaaaaatgccacacacaaaaaaaatcacaaaattctgtgagggaaacaaaagggtctatggatgtggatatgccccattcttaccttccaggtttgctgaaggagcaaacctcacactggccaagggcagatgcgcatggcctgcctggtgccccggctgtgagcccctcaaggcctccaggccagcctccgtggatgtgcgtgtggaaataggccacgcctgtctcttctcttgctcaagttttctctcacagatgacagccacctaccacataacatgaccagcaaacggactgttcctagtccagagggccttgccatcatgcaagtggaagggcgactgtgacagccactgccacagaggatggcagttggctgtgtccctttgtgagggtcttcaaatccttttccttctgcagggccttgggcctgtaaatatcctcatctttctattcttttttttttttagttgccccctcacctaatttccacctcagttttgaacaaaatcgttctcttcctgaatagatcaaaaccactgatgtgaaagataagccttgaagcagcaattgcccttaaaacatcatccctgccctggatcggcctggagccagtgcccaagtacggtttggtgtgtacatgaaaacaaacgtctctgcagtctctggggcggaggtttcgctggcttttctttctctcaaagaaaaaaacatgcaccattttcaatgtgcttttgcctctcctctctgttcacatgcttttagcagcaagtcccctccaaatctgtcttggttccccttcagaaggtggcgctgcccccgaaaggcacctcagcctgtgagtgctgaggaaccagctcctctggctgattttccagttggactggccattgctctccagaagtgctctgttagcaaacgtgatgtggaaacgatcacagatggtgttttctcgttgttcgccagaatttatacgggggagacaaattcccggtaattaccaagtctgcactcgggtaccaaagctctgaagctctctgaacagttgccatacttgagttgatgaatgtgttattcatggtgtctcatctcatcaatgcatcttgagagacttaatgaaattttagcaacagtatagaatagctctatcgggtggggagtaatcattaaacagatgaaatcggccccagatttacatgtctctttagaatccacagtgtaagcaaactacagttacaaagggatgggggttgtaaaccctctgagactctgcacttttcgcacgtatggcatcgtcaagtgctgtcttattacagcctttgtaaggagaggcaggctcctcctggggtgggctctgcagctgctctatttccaggcatgtgatcgcccccgctctccagattccccagcactctgctgcgtgtaactccactcaattctccactcatccttccttgtgaagcaggatcgttgaagttttaagtatgggcaaaaatctggaaaacttaggatccctctgacaccccaggattaggggacacagcagtggctagggcatcagccacagaactgagcgggaaatgccacttgtattggctgtaaagaaatcctggctttgggccaggcacagtggctcaagcctgtaatcccagcactttaggaggttgaggcggatggatcacctgaggtcaggagtttgagaccagcctggccaacatggtgtaaccccgtctctactaaaaatacaaaaaaattagccaggcgtggtagcgggcacctgtaatcccagctactcaggaggctgaggcaggagaatcacttgaaccggggaggcagaggttgcagtgagctgagatcatgccactccactccagcctgggcgacagagcaagactctgtctcaaaaaaaaaaaaggaaatcctggctttctttaagccacagacttcctaggctgtggtcccagctccttgtctgcctggtccctgtcaccttgcagtgccaccacccccaggggctctgcttgcttccagtggcttctgtagctttggcaactggcagatctttatggcagtagaggtgccagcatggaggatggagtttgggtttataacccaaccctcgaacgaaccagcctgtgggggcctggagtggagctggttttggggagtcacaggtgcggggggttcatcatctcctttctccttctcctttcctgacccctccgacagcttccatgttggccatgggtcaggtgaatggatggagctccaagcggggctcagcccattgacccgagcgaggcgcacacacctgcagcgtggatcaagcgcactctctccagcatcgccctgaccattccatgtgctttgtcctagcatgttcattcttgactttctccacttcattttattaaaaagttaaatgctttaggaatctgtggcgtgtggccactgaccgccccccacctcctgccgctcctccaagtttgagctgagatggttctgtgagtccttggcaggggtcaaagggcacatctccttgaacctagaaagccccctacactctcagaggacacctctcctgtggattcagcgctggggcagtgaaggtgtcgggagccagcagagcatggtgcgtgctgccagctgccggccagccgggatagaggagatgccactggccctccgtgcccccagcccctccctcttaaccgaggctgtccttgctctctgcagaggccgctctgcaggatcctcgtgtcgcgcgtgatgtgtggtggcacagccgtgtcaaagtcacagtgtcttttctgtcgttctagttccagggtcacccccgagaggacaacaggcatctggaagtgctctctcgccactctgggtgctttactgtctctggcttgtttccatcactggaaatcacttagagaattgtagtgtttttggtccttgataaagcctagaagacatttgtgatgttacaaaatggaagttttcttttgtttctgttttttaagatctaagaagttgtgaatgttgttaatcatttagccgttgcaataaatgtagaggaaatgca

SEQ ID NO: 355555 - DNA, 5938 bp, Homo sapiens
agcggctgtgcggcgcggcgctgcggagaccgttggttcatttgcatgtccccgcctcgcgcggcggcggcggcgggtgaggagcctgaggcggcggcgggggtggctccgcgcgcggtggtctcgggggcaaaataacatggcagccagacgaattacacaggagacttttgatgctgtattacaagaaaaagccaaacgatatcacatggatgccagtggtgaggctgtaagcgaaactcttcagtttaaagctcaagatctcttaagggcagtcccaagatccagagcagagatgtatgatgacgtccacagcgatggcagatactccctcagtggatctgtagctcactctagagatgccggaagagaaggcctgagaagtgacgtatttccagggccttccttcagatcaagcaacccttccatcagtgatgacagctactttcgcaaagaatgtggccgggatctggaattttctcactctgattctcgggaccaggtcattggccaccggaaattggggcatttccgttctcaggactggaaatttgcgctccgtggttcttgggaacaagactttggccatccagtttctcaagagtcctcttggtcacaggagtatagttttggtccctctgcagttttgggggactttggatcttccaggctgattgagaaagagtgtttggagaaggagagtcgggattatgacgtggaccatcctggggaggctgactctgtgcttaggggcagcagtcaagtccaggccagaggtcgagctctaaacatcgttgaccaggaaggttccctcctaggaaagggggagactcagggcctgctcacagctaaggggggtgttgggaaacttgtcacattgagaaatgtgagcacaaaaaaaatacccaccgtgaatcgtattactcccaaaactcagggcactaaccaaatccagaaaaacactccaagtcctgatgtgaccctggggacaaacccagggacagaagatatccagttccccattcagaagatccctctggggctggatctgaagaatcttcggctccccagaagaaagatgagctttgacatcatagataagtctgatgttttttcaagatttgggatagaaataatcaaatgggcaggattccacaccataaaagatgatattaaattttcccaacttttccagactctctttgaacttgaaacagaaacctgtgctaaaatgcttgcctcattcaaatgttccttaaaaccagagcacagagatttttgcttttttactatcaaatttttaaagcactctgctttgaaaacacccagagttgataatgagtttttaaacatgcttttagacaaaggtgctgtgaagaccaaaaattgcttttttgaaatcataaagccttttgacaagtacataatgagacttcaagaccggcttctgaagagtgtcacacctttgcttatggcctgcaatgcctacgagctaagtgtcaagatgaagaccctcagtaaccccctggacttggctcttgccctagaaaccaccaactctctctgccggaagtctttggcccttttgggacagacattttccttggcctcttctttccggcaggagaaaatcttagaagctgtcggcctgcaagatatagctccctcacctgctgcgtttccaaacttcgaagactccactttgtttgggcgagagtacatagaccacctgaaggcctggctagtcagcagcggatgtcccctccaggttaagaaagccgaaccagagccgatgcgagaggaggagaaaatgattcctcctacgaaacctgaaattcaggccaaggctccaagtagtctgagtgatgctgtcccccagcgagcagatcacagggtagtgggcaccatcgaccagcttgtgaaacgtgtcatcgaaggcagcctgtctcccaaagagagaactcttctcaaagaggaccctgcttactggtttttgtctgatgaaaatagtctggagtataaatattacaagctgaagttggcagaaatgcagcggatgagcgagaacttgcgaggagccgaccagaagccgacctcagcagactgtgcagtgagggccatgctgtactcccgggctgtccgcaacctcaagaagaaactccttccgtggcagcggcgggggctcctccgtgctcaagggctccggggctggaaggcgaggagagcgaccaccgggacccagaccctcctatcctcaggcaccaggctgaaacaccacggccggcaggctccaggcctctcacaggcaaaaccatccctgccagacagaaatgatgctgccaaggactgcccgccagacccagttggaccttctcctcaggaccccagcttagaagcctcaggcccatcccccaagccagcaggagtggacatctctgaagcacctcagacctcttctccctgcccatctgctgacattgacatgaagacaatggagactgcagagaaactggctagatttgttgctcaggtgggaccagagatcgaacaattcagcatagaaaacagcaccgataaccctgacctgtggtttctacatgaccaaaatagttctgctttcaaattctatcgaaagaaagtgtttgaactatgtccatcaatttgtttcacgtcatctccgcacaaccttcacactggtggtggtgacaccacgggttctcaggagagccccgtggacctcatggaaggggaagcagagtttgaagacgagccccctccgcgggaggctgagctggagagcccagaggtgatgcctgaggaggaggacgaggacgatgaggatgggggagaggaggcccccgctcctggaggggcgggcaagtctgagggcagcacccctgccgacggccttcccggcgaggctgccgaggacgacctggctggagcacctgccttgtcacaggcctcctcaggtacctgcttccctcggaagaggatcagcagcaagtcattgaaggttggcatgattccagctcccaagagagtgtgtctcatccaggagccaaaagtccatgaaccagttcgaattgcctatgacaggcctcggggtcgtcccatgtccaaaaagaagaaacccaaggacttggacttcgcccagcagaagctgaccgataagaacctgggcttccagatgctgcagaagatgggctggaaggagggccatggcctgggctccctcggaaagggcatcagggagccggtcagcgtgggaaccccctcggaaggggaagggttgggtgctgacgggcaggagcacaaagaagacacattcgatgtgttccgacagaggatgatgcagatgtacagacacaagcgggccaacaaatagatcaaaaccactgatgtgaaagataagccttgaagcagcaattgcccttaaaacatcatccctgccctggatcggcctggagccagtgcccaagtacggtttggtgtgtacatgaaaacaaacgtctctgcagtctctggggcggaggtttcgctggcttttctttctctcaaagaaaaaaacatgcaccattttcaatgtgcttttgcctctcctctctgttcacatgcttttagcagcaagtcccctccaaatctgtcttggttccccttcagaaggtggcgctgcccccgaaaggcacctcagcctgtgagtgctgaggaaccagctcctctggctgattttccagttggactggccattgctctccagaagtgctctgttagcaaacgtgatgtggaaacgatcacagatggtgttttctcgttgttcgccagaatttatacgggggagacaaattcccggtaattaccaagtctgcactcgggtaccaaagctctgaagctctctgaacagttgccatacttgagttgatgaatgtgttattcatggtgtctcatctcatcaatgcatcttgagagacttaatgaaattttagcaacagtatagaatagctctatcgggtggggagtaatcattaaacagatgaaatcggccccagatttacatgtctctttagaatccacagtgtaagcaaactacagttacaaagggatgggggttgtaaaccctctgagactctgcacttttcgcacgtatggcatcgtcaagtgctgtcttattacagcctttgtaaggagaggcaggctcctcctggggtgggctctgcagctgctctatttccaggcatgtgatcgcccccgctctccagattccccagcactctgctgcgtgtaactccactcaattctccactcatccttccttgtgaagcaggatcgttgaagttttaagtatgggcaaaaatctggaaaacttaggatccctctgacaccccaggattaggggacacagcagtggctagggcatcagccacagaactgagcgggaaatgccacttgtattggctgtaaagaaatcctggctttgggccaggcacagtggctcaagcctgtaatcccagcactttaggaggttgaggcggatggatcacctgaggtcaggagtttgagaccagcctggccaacatggtgtaaccccgtctctactaaaaatacaaaaaaattagccaggcgtggtagcgggcacctgtaatcccagctactcaggaggctgaggcaggagaatcacttgaaccggggaggcagaggttgcagtgagctgagatcatgccactccactccagcctgggcgacagagcaagactctgtctcaaaaaaaaaaaaggaaatcctggctttctttaagccacagacttcctaggctgtggtcccagctccttgtctgcctggtccctgtcaccttgcagtgccaccacccccaggggctctgcttgcttccagtggcttctgtagctttggcaactggcagatctttatggcagtagaggtgccagcatggaggatggagtttgggtttataacccaaccctcgaacgaaccagcctgtgggggcctggagtggagctggttttggggagtcacaggtgcggggggttcatcatctcctttctccttctcctttcctgacccctccgacagcttccatgttggccatgggtcaggtgaatggatggagctccaagcggggctcagcccattgacccgagcgaggcgcacacacctgcagcgtggatcaagcgcactctctccagcatcgccctgaccattccatgtgctttgtcctagcatgttcattcttgactttctccacttcattttattaaaaagttaaatgctttaggaatctgtggcgtgtggccactgaccgccccccacctcctgccgctcctccaagtttgagctgagatggttctgtgagtccttggcaggggtcaaagggcacatctccttgaacctagaaagccccctacactctcagaggacacctctcctgtggattcagcgctggggcagtgaaggtgtcgggagccagcagagcatggtgcgtgctgccagctgccggccagccgggatagaggagatgccactggccctccgtgcccccagcccctccctcttaaccgaggctgtccttgctctctgcagaggccgctctgcaggatcctcgtgtcgcgcgtgatgtgtggtggcacagccgtgtcaaagtcacagtgtcttttctgtcgttctagttccagggtcacccccgagaggacaacaggcatctggaagtgctctctcgccactctgggtgctttactgtctctggcttgtttccatcactggaaatcacttagagaattgtagtgtttttggtccttgataaagcctagaagacatttgtgatgttacaaaatggaagttttcttttgtttctgttttttaagatctaagaagttgtgaatgttgttaatcatttagccgttgcaataaatgtagaggaaatgca

SEQ ID NO: 355556 - DNA, 7031 bp, Homo sapiens
agcggctgtgcggcgcggcgctgcggagaccgttggttcatttgcatgtccccgcctcgcgcggcggcggcggcgggtgaggagcctgaggcggcggcgggggtggctccgcgcgcggtggtctcgggggcaaaataacatggcagccagacgaattacacaggagacttttgatgctgtattacaagaaaaagccaaacgatatcacatggatgccagtggtgaggctgtaagcgaaactcttcagtttaaagctcaagatctcttaagggcagtcccaagatccagagcagagatgtatgatgacgtccacagcgatggcagatactccctcagtggatctgtagctcactctagagatgccggaagagaaggcctgagaagtgacgtatttccagggccttccttcagatcaagcaacccttccatcagtgatgacagctactttcgcaaagaatgtggccgggatctggaattttctcactctgattctcgggaccaggtcattggccaccggaaattggggcatttccgttctcaggactggaaatttgcgctccgtggttcttgggaacaagactttggccatccagtttctcaagagtcctcttggtcacaggagtatagttttggtccctctgcagttttgggggactttggatcttccaggctgattgagaaagagtgtttggagaaggagagtcgggattatgacgtggaccatcctggggaggctgactctgtgcttaggggcagcagtcaagtccaggccagaggtcgagctctaaacatcgttgaccaggaaggttccctcctaggaaagggggagactcagggcctgctcacagctaaggggggtgttgggaaacttgtcacattgagaaatgtgagcacaaaaaaaatacccaccgtgaatcgtattactcccaaaactcagggcactaaccaaatccagaaaaacactccaagtcctgatgtgaccctggggacaaacccagggacagaagatatccagttccccattcagaagatccctctggggctggatctgaagaatcttcggctccccagaagaaagatgagctttgacatcatagataagtctgatgttttttcaagatttgggatagaaataatcaaatgggcaggattccacaccataaaagatgatattaaattttcccaacttttccagactctctttgaacttgaaacagaaacctgtgctaaaatgcttgcctcattcaaatgttccttaaaaccagagcacagagatttttgcttttttactatcaaatttttaaagcactctgctttgaaaacacccagagttgataatgagtttttaaacatgcttttagacaaaggtgctgtgaagaccaaaaattgcttttttgaaatcataaagccttttgacaagtacataatgagacttcaagaccggcttctgaagagtgtcacacctttgcttatggcctgcaatgcctacgagctaagtgtcaagatgaagaccctcagtaaccccctggacttggctcttgccctagaaaccaccaactctctctgccggaagtctttggcccttttgggacagacattttccttggcctcttctttccggcaggagaaaatcttagaagctgtcggcctgcaagatatagctccctcacctgctgcgtttccaaacttcgaagactccactttgtttgggcgagagtacatagaccacctgaaggcctggctagtcagcagcggatgtcccctccaggttaagaaagccgaaccagagccgatgcgagaggaggagaaaatgattcctcctacgaaacctgaaattcaggccaaggctccaagtagtctgagtgatgctgtcccccagcgagcagatcacagggtagtgggcaccatcgaccagcttgtgaaacgtgtcatcgaaggcagcctgtctcccaaagagagaactcttctcaaagaggaccctgcttactggtttttgtctgatgaaaatagtctggagtataaatattacaagctgaagttggcagaaatgcagcggatgagcgagaacttgcgaggagccgaccagaagccgacctcagcagactgtgcagtgagggccatgctgtactcccgggctgtccgcaacctcaagaagaaactccttccgtggcagcggcgggggctcctccgtgctcaagggctccggggctggaaggcgaggagagcgaccaccgggacccagaccctcctatcctcaggcaccaggctgaaacaccacggccggcaggctccaggcctctcacaggcaaaaccatccctgccagacagaaatgatgctgccaaggactgcccgccagacccagttggaccttctcctcaggaccccagcttagaagcctcaggcccatcccccaagccagcaggagtggacatctctgaagcacctcagacctcttctccctgcccatctgctgacattgacatgaagacaatggagactgcagagaaactggctagatttgttgctcaggtgggaccagagatcgaacaattcagcatagaaaacagcaccgataaccctgacctgtggtttctacatgaccaaaatagttctgctttcaaattctatcgaaagaaagtgtttgaactatgtccatcaatttgtttcacgtcatctccgcacaaccttcacactggtggtggtgacaccacgggttctcaggagagccccgtggacctcatggaaggggaagcagagtttgaagacgagccccctccgcgggaggctgagctggagagcccagaggtgatgcctgaggaggaggacgaggacgatgaggatgggggagaggaggcccccgctcctggaggggcgggcaagtctgagggcagcacccctgccgacggccttcccggcgaggctgccgaggacgacctggctggagcacctgccttgtcacaggcctcctcaggtacctgcttccctcggaagaggatcagcagcaagtcattgaaggttggcatgattccagctcccaagagagtgtgtctcatccaggagccaaaagtccatgaaccagttcgaattgcctatgacaggcctcggggtcgtcccatgtccaaaaagaagaaacccaaggacttggacttcgcccagcagaagctgaccgataagaacctgggcttccagatgctgcagaagatgggctggaaggagggccatggcctgggctccctcggaaagggcatcagggagccggtcagcgtgtacgcagcaggcagcctggggtgggagtgggtggggcctcagtccttccacctgcagcctgccgcttggctccttcacagccaagatggcttacagctggcagttgatttttgttttttaaacagaaggcatcttcagatgagaagctgatcatttacatgtgcaggtgtttacagggctcctttctgtcctggtgtagattttttaaccagcttgttggccctggtcattttggccacatttgtgaccatcataaaagctaagtggtatttctgtgtagtttccgtctggaactgctttcccattcccgggaacccatagccgggccagccagggtcccgaacacaggcccaaagtttattaaaccccgatcataacctccagcaggcatttcatttaatactgagcttagttcctgctgggtaaggcattccgaggtaaccagggccctctgggcaccccctcaaaagccagctcttcgagggtgagtactccttgtttctactgtgagtcgcgtcttgattttccctttctttgatgtctcagtgtgtgtcccaaacacctgcatctcatggactgtttgtgcccatgcccagttcctggcatgccaggccctgggctcaggtgcacaactgactctctttttcactccctaggggaaccccctcggaaggggaagggttgggtgctgacgggcaggagcacaaagaagacacattcgatgtgttccgacagaggatgatgcagatgtacagacacaagcgggccaacaaatagggtatgttcacaggccagtgtgtaaggccgtctgccctcgctggcgtgctggtatgcagagaaatttcccccaacaaagttgatgttccctgctcccccaaaaatgccacacacaaaaaaaatcacaaaattctgtgagggaaacaaaagggtctatggatgtggatatgccccattcttaccttccaggtttgctgaaggagcaaacctcacactggccaagggcagatgcgcatggcctgcctggtgccccggctgtgagcccctcaaggcctccaggccagcctccgtggatgtgcgtgtggaaataggccacgcctgtctcttctcttgctcaagttttctctcacagatgacagccacctaccacataacatgaccagcaaacggactgttcctagtccagagggccttgccatcatgcaagtggaagggcgactgtgacagccactgccacagaggatggcagttggctgtgtccctttgtgagggtcttcaaatccttttccttctgcagggccttgggcctgtaaatatcctcatctttctattcttttttttttttagttgccccctcacctaatttccacctcagttttgaacaaaatcgttctcttcctgaatagatcaaaaccactgatgtgaaagataagccttgaagcagcaattgcccttaaaacatcatccctgccctggatcggcctggagccagtgcccaagtacggtttggtgtgtacatgaaaacaaacgtctctgcagtctctggggcggaggtttcgctggcttttctttctctcaaagaaaaaaacatgcaccattttcaatgtgcttttgcctctcctctctgttcacatgcttttagcagcaagtcccctccaaatctgtcttggttccccttcagaaggtggcgctgcccccgaaaggcacctcagcctgtgagtgctgaggaaccagctcctctggctgattttccagttggactggccattgctctccagaagtgctctgttagcaaacgtgatgtggaaacgatcacagatggtgttttctcgttgttcgccagaatttatacgggggagacaaattcccggtaattaccaagtctgcactcgggtaccaaagctctgaagctctctgaacagttgccatacttgagttgatgaatgtgttattcatggtgtctcatctcatcaatgcatcttgagagacttaatgaaattttagcaacagtatagaatagctctatcgggtggggagtaatcattaaacagatgaaatcggccccagatttacatgtctctttagaatccacagtgtaagcaaactacagttacaaagggatgggggttgtaaaccctctgagactctgcacttttcgcacgtatggcatcgtcaagtgctgtcttattacagcctttgtaaggagaggcaggctcctcctggggtgggctctgcagctgctctatttccaggcatgtgatcgcccccgctctccagattccccagcactctgctgcgtgtaactccactcaattctccactcatccttccttgtgaagcaggatcgttgaagttttaagtatgggcaaaaatctggaaaacttaggatccctctgacaccccaggattaggggacacagcagtggctagggcatcagccacagaactgagcgggaaatgccacttgtattggctgtaaagaaatcctggctttgggccaggcacagtggctcaagcctgtaatcccagcactttaggaggttgaggcggatggatcacctgaggtcaggagtttgagaccagcctggccaacatggtgtaaccccgtctctactaaaaatacaaaaaaattagccaggcgtggtagcgggcacctgtaatcccagctactcaggaggctgaggcaggagaatcacttgaaccggggaggcagaggttgcagtgagctgagatcatgccactccactccagcctgggcgacagagcaagactctgtctcaaaaaaaaaaaaggaaatcctggctttctttaagccacagacttcctaggctgtggtcccagctccttgtctgcctggtccctgtcaccttgcagtgccaccacccccaggggctctgcttgcttccagtggcttctgtagctttggcaactggcagatctttatggcagtagaggtgccagcatggaggatggagtttgggtttataacccaaccctcgaacgaaccagcctgtgggggcctggagtggagctggttttggggagtcacaggtgcggggggttcatcatctcctttctccttctcctttcctgacccctccgacagcttccatgttggccatgggtcaggtgaatggatggagctccaagcggggctcagcccattgacccgagcgaggcgcacacacctgcagcgtggatcaagcgcactctctccagcatcgccctgaccattccatgtgctttgtcctagcatgttcattcttgactttctccacttcattttattaaaaagttaaatgctttaggaatctgtggcgtgtggccactgaccgccccccacctcctgccgctcctccaagtttgagctgagatggttctgtgagtccttggcaggggtcaaagggcacatctccttgaacctagaaagccccctacactctcagaggacacctctcctgtggattcagcgctggggcagtgaaggtgtcgggagccagcagagcatgttccagggtcacccccgagaggacaacaggcatctggaagtgctctctcgccactctgggtgctttactgtctctggcttgtttccatcactggaaatcacttagagaattgtagtgtttttggtccttgataaagcctagaagacatttgtgatgttacaaaatggaagttttcttttgtttctgttttttaagatctaagaagttgtgaatgttgttaatcatttagccgttgcaataaatgtagaggaaatgca

SEQ ID NO: 355557 - DNA, 7082 bp, Homo sapiens
agcggctgtgcggcgcggcgctgcggagaccgttggttcatttgcatgtccccgcctcgcgcggcggcggcggcgggtgaggagcctgaggcggcggcgggggtggctccgcgcgcggtggtctcgggggcaaaataacatggcagccagacgaattacacaggagacttttgatgctgtattacaagaaaaagccaaacgatatcacatggatgccagtggtgaggctgtaagcgaaactcttcagtttaaagctcaagatctcttaagggcagtcccaagatccagagcagagatgtatgatgacgtccacagcgatggcagatactccctcagtggatctgtagctcactctagagatgccggaagagaaggcctgagaagtgacgtatttccagggccttccttcagatcaagcaacccttccatcagtgatgacagctactttcgcaaagaatgtggccgggatctggaattttctcactctgattctcgggaccaggtcattggccaccggaaattggggcatttccgttctcaggactggaaatttgcgctccgtggttcttgggaacaagactttggccatccagtttctcaagagtcctcttggtcacaggagtatagttttggtccctctgcagttttgggggactttggatcttccaggctgattgagaaagagtgtttggagaaggagagtcgggattatgacgtggaccatcctggggaggctgactctgtgcttaggggcagcagtcaagtccaggccagaggtcgagctctaaacatcgttgaccaggaaggttccctcctaggaaagggggagactcagggcctgctcacagctaaggggggtgttgggaaacttgtcacattgagaaatgtgagcacaaaaaaaatacccaccgtgaatcgtattactcccaaaactcagggcactaaccaaatccagaaaaacactccaagtcctgatgtgaccctggggacaaacccagggacagaagatatccagttccccattcagaagatccctctggggctggatctgaagaatcttcggctccccagaagaaagatgagctttgacatcatagataagtctgatgttttttcaagatttgggatagaaataatcaaatgggcaggattccacaccataaaagatgatattaaattttcccaacttttccagactctctttgaacttgaaacagaaacctgtgctaaaatgcttgcctcattcaaatgttccttaaaaccagagcacagagatttttgcttttttactatcaaatttttaaagcactctgctttgaaaacacccagagttgataatgagtttttaaacatgcttttagacaaaggtgctgtgaagaccaaaaattgcttttttgaaatcataaagccttttgacaagtacataatgagacttcaagaccggcttctgaagagtgtcacacctttgcttatggcctgcaatgcctacgagctaagtgtcaagatgaagaccctcagtaaccccctggacttggctcttgccctagaaaccaccaactctctctgccggaagtctttggcccttttgggacagacattttccttggcctcttctttccggcaggagaaaatcttagaagctgtcggcctgcaagatatagctccctcacctgctgcgtttccaaacttcgaagactccactttgtttgggcgagagtacatagaccacctgaaggcctggctagtcagcagcggatgtcccctccaggttaagaaagccgaaccagagccgatgcgagaggaggagaaaatgattcctcctacgaaacctgaaattcaggccaaggctccaagtagtctgagtgatgctgtcccccagcgagcagatcacagggtagtgggcaccatcgaccagcttgtgaaacgtgtcatcgaaggcagcctgtctcccaaagagagaactcttctcaaagaggaccctgcttactggtttttgtctgatgaaaatagtctggagtataaatattacaagctgaagttggcagaaatgcagcggatgagcgagaacttgcgaggagccgaccagaagccgacctcagcagactgtgcagtgagggccatgctgtactcccgggctgtccgcaacctcaagaagaaactccttccgtggcagcggcgggggctcctccgtgctcaagggctccggggctggaaggcgaggagagcgaccaccgggacccagaccctcctatcctcaggcaccaggctgaaacaccacggccggcaggctccaggcctctcacaggcaaaaccatccctgccagacagaaatgatgctgccaaggactgcccgccagacccagttggaccttctcctcaggaccccagcttagaagcctcaggcccatcccccaagccagcaggagtggacatctctgaagcacctcagacctcttctccctgcccatctgctgacattgacatgaagacaatggagactgcagagaaactggctagatttgttgctcaggtgggaccagagatcgaacaattcagcatagaaaacagcaccgataaccctgacctgtggtttctacatgaccaaaatagttctgctttcaaattctatcgaaagaaagtgtttgaactatgtccatcaatttgtttcacgtcatctccgcacaaccttcacactggtggtggtgacaccacgggttctcaggagagccccgtggacctcatggaaggggaagcagagtttgaagacgagccccctccgcgggaggctgagctggagagcccagaggtgatgcctgaggaggaggacgaggacgatgaggatgggggagaggaggcccccgctcctggaggggcgggcaagtctgagggcagcacccctgccgacggccttcccggcgaggctgccgaggacgacctggctggagcacctgccttgtcacaggcctcctcaggtacctgcttccctcggaagaggatcagcagcaagtcattgaaggttggcatgattccagctcccaagagagtgtgtctcatccaggagccaaaagtccatgaaccagttcgaattgcctatgacaggcctcggggtcgtcccatgtccaaaaagaagaaacccaaggacttggacttcgcccagcagaagctgaccgataagaacctgggcttccagatgctgcagaagatgggctggaaggagggccatggcctgggctccctcggaaagggcatcagggagccggtcagcgtgtacgcagcaggcagcctggggtgggagtgggtggggcctcagtccttccacctgcagcctgccgcttggctccttcacagccaagatggcttacagctggcagttgatttttgttttttaaacagaaggcatcttcagatgagaagctgatcatttacatgtgcaggtgtttacagggctcctttctgtcctggtgtagattttttaaccagcttgttggccctggtcattttggccacatttgtgaccatcataaaagctaagtggtatttctgtgtagtttccgtctggaactgctttcccattcccgggaacccatagccgggccagccagggtcccgaacacaggcccaaagtttattaaaccccgatcataacctccagcaggcatttcatttaatactgagcttagttcctgctgggtaaggcattccgaggtaaccagggccctctgggcaccccctcaaaagccagctcttcgagggtgagtactccttgtttctactgtgagtcgcgtcttgattttccctttctttgatgtctcagtgtgtgtcccaaacacctgcatctcatggactgtttgtgcccatgcccagttcctggcatgccaggccctgggctcaggtgcacaactgactctctttttcactccctaggggaaccccctcggaaggggaagggttgggtgctgacgggcaggagcacaaagaagacacattcgatgtgttccgacagaggatgatgcagatgtacagacacaagcgggccaacaaatagggtatgttcacaggccagtgtgtaaggccgtctgccctcgctggcgtgctggtatgcagagaaatttcccccaacaaagttgatgttccctgctcccccaaaaatgccacacacaaaaaaaatcacaaaattctgtgagggaaacaaaagggtctatggatgtggatatgccccattcttaccttccaggtttgctgaaggagcaaacctcacactggccaagggcagatgcgcatggcctgcctggtgccccggctgtgagcccctcaaggcctccaggccagcctccgtggatgtgcgtgtggaaataggccacgcctgtctcttctcttgctcaagttttctctcacagatgacagccacctaccacataacatgaccagcaaacggactgttcctagtccagagggccttgccatcatgcaagtggaagggcgactgtgacagccactgccacagaggatggcagttggctgtgtccctttgtgagggtcttcaaatccttttccttctgcagggccttgggcctgtaaatatcctcatctttctattcttttttttttttagttgccccctcacctaatttccacctcagttttgaacaaaatcgttctcttcctgaatagatcaaaaccactgatgtgaaagataagccttgaagcagcaattgcccttaaaacatcatccctgccctggatcggcctggagccagtgcccaagtacggtttggtgtgtacatgaaaacaaacgtctctgcagtctctggggcggaggtttcgctggcttttctttctctcaaagaaaaaaacatgcaccattttcaatgtgcttttgcctctcctctctgttcacatgcttttagcagcaagtcccctccaaatctgtcttggttccccttcagaaggtggcgctgcccccgaaaggcacctcagcctgtgagtgctgaggaaccagctcctctggctgattttccagttggactggccattgctctccagaagtgctctgttagcaaacgtgatgtggaaacgatcacagatggtgttttctcgttgttcgccagaatttatacgggggagacaaattcccggtaattaccaagtctgcactcgggtaccaaagctctgaagctctctgaacagttgccatacttgagttgatgaatgtgttattcatggtgtctcatctcatcaatgcatcttgagagacttaatgaaattttagcaacagtatagaatagctctatcgggtggggagtaatcattaaacagatgaaatcggccccagatttacatgtctctttagaatccacagtgtaagcaaactacagttacaaagggatgggggttgtaaaccctctgagactctgcacttttcgcacgtatggcatcgtcaagtgctgtcttattacagcctttgtaaggagaggcaggctcctcctggggtgggctctgcagctgctctatttccaggcatgtgatcgcccccgctctccagattccccagcactctgctgcgtgtaactccactcaattctccactcatccttccttgtgaagcaggatcgttgaagttttaagtatgggcaaaaatctggaaaacttaggatccctctgacaccccaggattaggggacacagcagtggctagggcatcagccacagaactgagcgggaaatgccacttgtattggctgtaaagaaatcctggctttgggccaggcacagtggctcaagcctgtaatcccactactcaggaggctgaggcaggagaatcacttgaacccgggaggcggaggttgcagtgagccgagattgtgccaccgcactccagcctggcaacagagcgagactctgtctcaaaaaaaaaaaaggaaatcctggctttctttaagccacagacttcctaggctgtggtcccagctccttgtctgcctggtccctgtcaccttgcagtgccaccacccccaggggctctgcttgcttccagtggcttctgtagctttggcaactggcagatctttatggcagtagaggtgccagcatggaggatggagtttgggtttataacccaaccctcgaacgaaccagcctgtgggggcctggagtggagctggttttggggagtcacaggtgcggggggttcatcatctcctttctccttctcctttcctgacccctccgacagcttccatgttggccatgggtcaggtgaatggatggagctccaagcggggctcagcccattgacccgagcgaggcgcacacacctgcagcgtggatcaagcgcactctctccagcatcgccctgaccattccatgtgctttgtcctagcatgttcattcttgactttctccacttcattttattaaaaagttaaatgctttaggaatctgtggcgtgtggccactgaccgccccccacctcctgccgctcctccaagtttgagctgagatggttctgtgagtccttggcaggggtcaaagggcacatctccttgaacctagaaagccccctacactctcagaggacacctctcctgtggattcagcgctggggcagtgaaggtgtcgggagccagcagagcatggtgcgtgctgccagctgccggccagccgggatagaggagatgccactggccctccgtgcccccagcccctccctcttaaccgaggctgtccttgctctctgcagaggccgctctgcaggatcctcgtgtcgcgcgtgatgtgtggtggcacagccgtgtcaaagtcacagtgtcttttctgtcgttctagttccagggtcacccccgagaggacaacaggcatctggaagtgctctctcgccactctgggtgctttactgtctctggcttgtttccatcactggaaatcacttagagaattgtagtgtttttggtccttgataaagcctagaagacatttgtgatgttacaaaatggaagttttcttttgtttctgttttttaagatctaagaagttgtgaatgttgttaatcatttagccgttgcaataaatgtagaggaaatgca

SEQ ID NO: 355558 - DNA, 4964 bp, Homo sapiens
aacctgggaccgcaacagttgaaggagctatatcttgcaggccgacagcttctaagattttctcctgccggaaatgatgctgccaaggactgcccgccagacccagttggaccttctcctcaggaccccagcttagaagcctcaggcccatcccccaagccagcaggagtggacatctctgaagcacctcagacctcttctccctgcccatctgctgacattgacatgaagacaatggagactgcagagaaactggctagatttgttgctcaggtgggaccagagatcgaacaattcagcatagaaaacagcaccgataaccctgacctgtggtttctacatgaccaaaatagttctgctttcaaattctatcgaaagaaagtgtttgaactatgtccatcaatttgtttcacgtcatctccgcacaaccttcacactggtggtggtgacaccacgggttctcaggagagccccgtggacctcatggaaggggaagcagagtttgaagacgagccccctccgcgggaggctgagctggagagcccagaggtgatgcctgaggaggaggacgaggacgatgaggatgggggagaggaggcccccgctcctggaggggcgggcaagtctgagggcagcacccctgccgacggccttcccggcgaggctgccgaggacgacctggctggagcacctgccttgtcacaggcctcctcaggtacctgcttccctcggaagaggatcagcagcaagtcattgaaggttggcatgattccagctcccaagagagtgtgtctcatccaggagccaaaagtccatgaaccagttcgaattgcctatgacaggcctcggggtcgtcccatgtccaaaaagaagaaacccaaggacttggacttcgcccagcagaagctgaccgataagaacctgggcttccagatgctgcagaagatgggctggaaggagggccatggcctgggctccctcggaaagggcatcagggagccggtcagcgtgtacgcagcaggcagcctggggtgggagtgggtggggcctcagtccttccacctgcagcctgccgcttggctccttcacagccaagatggcttacagctggcagttgatttttgttttttaaacagaaggcatcttcagatgagaagctgatcatttacatgtgcaggtgtttacagggctcctttctgtcctggtgtagattttttaaccagcttgttggccctggtcattttggccacatttgtgaccatcataaaagctaagtggtatttctgtgtagtttccgtctggaactgctttcccattcccgggaacccatagccgggccagccagggtcccgaacacaggcccaaagtttattaaaccccgatcataacctccagcaggcatttcatttaatactgagcttagttcctgctgggtaaggcattccgaggtaaccagggccctctgggcaccccctcaaaagccagctcttcgagggtgagtactccttgtttctactgtgagtcgcgtcttgattttccctttctttgatgtctcagtgtgtgtcccaaacacctgcatctcatggactgtttgtgcccatgcccagttcctggcatgccaggccctgggctcaggtgcacaactgactctctttttcactccctaggggaaccccctcggaaggggaagggttgggtgctgacgggcaggagcacaaagaagacacattcgatgtgttccgacagaggatgatgcagatgtacagacacaagcgggccaacaaatagggtatgttcacaggccagtgtgtaaggccgtctgccctcgctggcgtgctggtatgcagagaaatttcccccaacaaagttgatgttccctgctcccccaaaaatgccacacacaaaaaaaatcacaaaattctgtgagggaaacaaaagggtctatggatgtggatatgccccattcttaccttccaggtttgctgaaggagcaaacctcacactggccaagggcagatgcgcatggcctgcctggtgccccggctgtgagcccctcaaggcctccaggccagcctccgtggatgtgcgtgtggaaataggccacgcctgtctcttctcttgctcaagttttctctcacagatgacagccacctaccacataacatgaccagcaaacggactgttcctagtccagagggccttgccatcatgcaagtggaagggcgactgtgacagccactgccacagaggatggcagttggctgtgtccctttgtgagggtcttcaaatccttttccttctgcagggccttgggcctgtaaatatcctcatctttctattcttttttttttttagttgccccctcacctaatttccacctcagttttgaacaaaatcgttctcttcctgaatagatcaaaaccactgatgtgaaagataagccttgaagcagcaattgcccttaaaacatcatccctgccctggatcggcctggagccagtgcccaagtacggtttggtgtgtacatgaaaacaaacgtctctgcagtctctggggcggaggtttcgctggcttttctttctctcaaagaaaaaaacatgcaccattttcaatgtgcttttgcctctcctctctgttcacatgcttttagcagcaagtcccctccaaatctgtcttggttccccttcagaaggtggcgctgcccccgaaaggcacctcagcctgtgagtgctgaggaaccagctcctctggctgattttccagttggactggccattgctctccagaagtgctctgttagcaaacgtgatgtggaaacgatcacagatggtgttttctcgttgttcgccagaatttatacgggggagacaaattcccggtaattaccaagtctgcactcgggtaccaaagctctgaagctctctgaacagttgccatacttgagttgatgaatgtgttattcatggtgtctcatctcatcaatgcatcttgagagacttaatgaaattttagcaacagtatagaatagctctatcgggtggggagtaatcattaaacagatgaaatcggccccagatttacatgtctctttagaatccacagtgtaagcaaactacagttacaaagggatgggggttgtaaaccctctgagactctgcacttttcgcacgtatggcatcgtcaagtgctgtcttattacagcctttgtaaggagaggcaggctcctcctggggtgggctctgcagctgctctatttccaggcatgtgatcgcccccgctctccagattccccagcactctgctgcgtgtaactccactcaattctccactcatccttccttgtgaagcaggatcgttgaagttttaagtatgggcaaaaatctggaaaacttaggatccctctgacaccccaggattaggggacacagcagtggctagggcatcagccacagaactgagcgggaaatgccacttgtattggctgtaaagaaatcctggctttgggccaggcacagtggctcaagcctgtaatcccagcactttaggaggttgaggcggatggatcacctgaggtcaggagtttgagaccagcctggccaacatggtgtaaccccgtctctactaaaaatacaaaaaaattagccaggcgtggtagcgggcacctgtaatcccagctactcaggaggctgaggcaggagaatcacttgaaccggggaggcagaggttgcagtgagctgagatcatgccactccactccagcctgggcgacagagcaagactctgtctcaaaaaaaaaaaaggaaatcctggctttctttaagccacagacttcctaggctgtggtcccagctccttgtctgcctggtccctgtcaccttgcagtgccaccacccccaggggctctgcttgcttccagtggcttctgtagctttggcaactggcagatctttatggcagtagaggtgccagcatggaggatggagtttgggtttataacccaaccctcgaacgaaccagcctgtgggggcctggagtggagctggttttggggagtcacaggtgcggggggttcatcatctcctttctccttctcctttcctgacccctccgacagcttccatgttggccatgggtcaggtgaatggatggagctccaagcggggctcagcccattgacccgagcgaggcgcacacacctgcagcgtggatcaagcgcactctctccagcatcgccctgaccattccatgtgctttgtcctagcatgttcattcttgactttctccacttcattttattaaaaagttaaatgctttaggaatctgtggcgtgtggccactgaccgccccccacctcctgccgctcctccaagtttgagctgagatggttctgtgagtccttggcaggggtcaaagggcacatctccttgaacctagaaagccccctacactctcagaggacacctctcctgtggattcagcgctggggcagtgaaggtgtcgggagccagcagagcatggtgcgtgctgccagctgccggccagccgggatagaggagatgccactggccctccgtgcccccagcccctccctcttaaccgaggctgtccttgctctctgcagaggccgctctgcaggatcctcgtgtcgcgcgtgatgtgtggtggcacagccgtgtcaaagtcacagtgtcttttctgtcgttctagttccagggtcacccccgagaggacaacaggcatctggaagtgctctctcgccactctgggtgctttactgtctctggcttgtttccatcactggaaatcacttagagaattgtagtgtttttggtccttgataaagcctagaagacatttgtgatgttacaaaatggaagttttcttttgtttctgttttttaagatctaagaagttgtgaatgttgttaatcatttagccgttgcaataaatgtagaggaaatgca

SEQ ID NO: 355559 - DNA, 3645 bp, Homo sapiens
agcggctgtgcggcgcggcgctgcggagaccgttggttcatttgcatgtccccgcctcgcgcggcggcggcggcgggtgaggagcctgaggcggcggcgggggtggctccgcgcgcggtggtctcgggggcaaaataacatggcagccagacgaattacacaggagacttttgatgctgtattacaagaaaaagccaaacgatatcacatggatgccagtggtgaggctgtaagcgaaactcttcagtttaaagctcaagatctcttaagggcagtcccaagatccagagcagagatgtatgatgacgtccacagcgatggcagatactccctcagtggatctgtagctcactctagagatgccggaagagaaggcctgagaagtgacgtatttccagggccttccttcagatcaagcaacccttccatcagtgatgacagctactttcgcaaagaatgtggccgggatctggaattttctcactctgattctcgggaccaggtcattggccaccggaaattggggcatttccgttctcaggactggaaatttgcgctccgtggttcttgggaacaagactttggccatccagtttctcaagagtcctcttggtcacaggagtatagttttggtccctctgcagttttgggggactttggatcttccaggctgattgagaaagagtgtttggagaaggagagtcgggattatgacgtggaccatcctggggaggctgactctgtgcttaggggcagcagtcaagtccaggccagaggtcgagctctaaacatcgttgaccaggaaggttccctcctaggaaagggggagactcagggcctgctcacagctaaggggggtgttgggaaacttgtcacattgagaaatgtgagcacaaaaaaaatacccaccgtgaatcgtattactcccaaaactcagggcactaaccaaatccagaaaaacactccaagtcctgatgtgaccctggggacaaacccagggacagaagatatccagttccccattcagaagatccctctggggctggatctgaagaatcttcggctccccagaagaaagatgagctttgacatcatagataagtctgatgttttttcaagatttgggatagaaataatcaaatgggcaggattccacaccataaaagatgatattaaattttcccaacttttccagactctctttgaacttgaaacagaaacctgtgctaaaatgcttgcctcattcaaatgttccttaaaaccagagcacagagatttttgcttttttactatcaaatttttaaagcactctgctttgaaaacacccagagttgataatgagtttttaaacatgcttttagacaaaggtgctgtgaagaccaaaaattgcttttttgaaatcataaagccttttgacaagtacataatgagacttcaagaccggcttctgaagagtgtcacacctttgcttatggcctgcaatgcctacgagctaagtgtcaagatgaagaccctcagtaaccccctggacttggctcttgccctagaaaccaccaactctctctgccggaagtctttggcccttttgggacagacattttccttggcctcttctttccggcaggagaaaatcttagaagctgtcggcctgcaagatatagctccctcacctgctgcgtttccaaacttcgaagactccactttgtttgggcgagagtacatagaccacctgaaggcctggctagtcagcagcggatgtcccctccaggttaagaaagccgaaccagagccgatgcgagaggaggagaaaatgattcctcctacgaaacctgaaattcaggccaaggctccaagtagtctgagtgatgctgtcccccagcgagcagatcacagggtagtgggcaccatcgaccagcttgtgaaacgtgtcatcgaaggcagcctgtctcccaaagagagaactcttctcaaagaggaccctgcttactggtttttgtctgatgaaaatagtctggagtataaatattacaagctgaagttggcagaaatgcagcggatgagcgagaacttgcgaggagccgaccagaagccgacctcagcagactgtgcagtgagggccatgctgtactcccgggctgtccgcaacctcaagaagaaactccttccgtggcagcggcgggggctcctccgtgctcaagggctccggggctggaaggcgaggagagcgaccaccgggacccagaccctcctatcctcaggcaccaggctgaaacaccacggccggcaggctccaggcctctcacaggcaaaaccatccctgccagacagaaatgatgctgccaaggactgcccgccagacccagttggaccttctcctcaggaccccagcttagaagcctcaggcccatcccccaagccagcaggagtggacatctctgaagcacctcagacctcttctccctgcccatctgctgacattgacatgaagacaatggagactgcagagaaactggctagatttgttgctcaggtgggaccagagatcgaacaattcagcatagaaaacagcaccgataaccctgacctgtggtttctacatgaccaaaatagttctgctttcaaattctatcgaaagaaagtgtttgaactatgtccatcaatttgtttcacgtcatctccgcacaaccttcacactggtggtggtgacaccacgggttctcaggagagccccgtggacctcatggaaggggaagcagagtttgaagacgagccccctccgcgggaggctgagctggagagcccagaggtgatgcctgaggaggaggacgaggacgatgaggatgggggagaggaggcccccgctcctggaggggcgggcaagtctgagggcagcacccctgccgacggccttcccggcgaggctgccgaggacgacctggctggagcacctgccttgtcacaggcctcctcaggtacctgcttccctcggaagaggatcagcagcaagtcattgaaggttggcatgattccagctcccaagagagtgtgtctcatccaggagccaaaagtccatgaaccagttcgaattgcctatgacaggcctcggggtcgtcccatgtccaaaaagaagaaacccaaggacttggacttcgcccagcagaagctgaccgataagaacctgggcttccagatgctgcagaagatgggctggaaggagggccatggcctgggctccctcggaaagggcatcagggagccggtcagcgtgggaaccccctcggaaggggaagggttgggtgctgacgggcaggagcacaaagaagacacattcgatgtgttccgacagaggatgatgcagatgtacagacacaagcgggccaacaaatagttccagggtcacccccgagaggacaacaggcatctggaagtgctctctcgccactctgggtgctttactgtctctggcttgtttccatcactggaaatcacttagagaattgtagtgtttttggtccttgataaagcctagaagacatttgtgatgttacaaaatggaagttttcttttgtttctgttttttaagatctaagaagttgtgaatgttgttaatcatttagccgttgcaataaatgtagaggaaatgca

SEQ ID NO: 355560 - DNA, 3745 bp, Homo sapiens
agcggctgtgcggcgcggcgctgcggagaccgttggttcatttgcatgtccccgcctcgcgcggcggcggcggcgggtgaggagcctgaggcggcggcgggggtggctccgcgcgcggtggtctcgggggcaaaataacatggcagccagacgaattacacaggagacttttgatgctgtattacaagaaaaagccaaacgatatcacatggatgccagtggtgaggctgtaagcgaaactcttcagtttaaagctcaagatctcttaagggcagtcccaagatccagagcagagatgtatgatgacgtccacagcgatggcagatactccctcagtggatctgtagctcactctagagatgccggaagagaaggcctgagaagtgacgtatttccagggccttccttcagatcaagcaacccttccatcagtgatgacagctactttcgcaaagaatgtggccgggatctggaattttctcactctgattctcgggaccaggtcattggccaccggaaattggggcatttccgttctcaggactggaaatttgcgctccgtggttcttgggaacaagactttggccatccagtttctcaagagtcctcttggtcacaggagtatagttttggtccctctgcagttttgggggactttggatcttccaggctgattgagaaagagtgtttggagaaggagagtcgggattatgacgtggaccatcctggggaggctgactctgtgcttaggggcagcagtcaagtccaggccagaggtcgagctctaaacatcgttgaccaggaaggttccctcctaggaaagggggagactcagggcctgctcacagctaaggggggtgttgggaaacttgtcacattgagaaatgtgagcacaaaaaaaatacccaccgtgaatcgtattactcccaaaactcagggcactaaccaaatccagaaaaacactccaagtcctgatgtgaccctggggacaaacccagggacagaagatatccagttccccattcagaagatccctctggggctggatctgaagaatcttcggctccccagaagaaagatgagctttgacatcatagataagtctgatgttttttcaagatttgggatagaaataatcaaatgggcaggattccacaccataaaagatgatattaaattttcccaacttttccagactctctttgaacttgaaacagaaacctgtgctaaaatgcttgcctcattcaaatgttccttaaaaccagagcacagagatttttgcttttttactatcaaatttttaaagcactctgctttgaaaacacccagagttgataatgagtttttaaacatgcttttagacaaaggtgctgtgaagaccaaaaattgcttttttgaaatcataaagccttttgacaagtacataatgagacttcaagaccggcttctgaagagtgtcacacctttgcttatggcctgcaatgcctacgagctaagtgtcaagatgaagaccctcagtaaccccctggacttggctcttgccctagaaaccaccaactctctctgccggaagtctttggcccttttgggacagacattttccttggcctcttctttccggcaggagaaaatcttagaagctgtcggcctgcaagatatagctccctcacctgctgcgtttccaaacttcgaagactccactttgtttgggcgagagtacatagaccacctgaaggcctggctagtcagcagcggatgtcccctccaggttaagaaagccgaaccagagccgatgcgagaggaggagaaaatgattcctcctacgaaacctgaaattcaggccaaggctccaagtagtctgagtgatgctgtcccccagcgagcagatcacagggtagtgggcaccatcgaccagcttgtgaaacgtgtcatcgaaggcagcctgtctcccaaagagagaactcttctcaaagaggaccctgcttactggtttttgtctgatgaaaatagtctggagtataaatattacaagctgaagttggcagaaatgcagcggatgagcgagaacttgcgaggagccgaccagaagccgacctcagcagactgtgcagtgagggccatgctgtactcccgggctgtccgcaacctcaagaagaaactccttccgtggcagcggcgggggctcctccgtgctcaagggctccggggctggaaggcgaggagagcgaccaccgggacccagaccctcctatcctcaggcaccaggctgaaacaccacggccggcaggctccaggcctctcacaggcaaaaccatccctgccagacagaaatgatgctgccaaggactgcccgccagacccagttggaccttctcctcaggaccccagcttagaagcctcaggcccatcccccaagccagcaggagtggacatctctgaagcacctcagacctcttctccctgcccatctgctgacattgacatgaagacaatggagactgcagagaaactggctagatttgttgctcaggtgggaccagagatcgaacaattcagcatagaaaacagcaccgataaccctgacctgtggtttctacatgaccaaaatagttctgctttcaaattctatcgaaagaaagtgtttgaactatgtccatcaatttgtttcacgtcatctccgcacaaccttcacactggtggtggtgacaccacgggttctcaggagagccccgtggacctcatggaaggggaagcagagtttgaagacgagccccctccgcgggaggctgagctggagagcccagaggtgatgcctgaggaggaggacgaggacgatgaggatgggggagaggaggcccccgctcctggaggggcgggcaagtctgagggcagcacccctgccgacggccttcccggcgaggctgccgaggacgacctggctggagcacctgccttgtcacaggcctcctcaggtacctgcttccctcggaagaggatcagcagcaagtcattgaaggttggcatgattccagctcccaagagagtgtgtctcatccaggagccaaaagtccatgaaccagttcgaattgcctatgacaggcctcggggtcgtcccatgtccaaaaagaagaaacccaaggacttggacttcgcccagcagaagctgaccgataagaacctgggcttccagatgctgcagaagatgggctggaaggagggccatggcctgggctccctcggaaagggcatcagggagccggtcagcgtgggaaccccctcggaaggggaagggttgggtgctgacgggcaggagcacaaagaagacacattcgatgtgttccgacagaggatgatgcagatgtacagacacaagcgggccaacaaatagatcaaaaccactgatgtgaaagataagccttgaagcagcaattgcccttaaaacatcatccctgccctggatcggcctggagccagtgcccaagtacggtttccagggtcacccccgagaggacaacaggcatctggaagtgctctctcgccactctgggtgctttactgtctctggcttgtttccatcactggaaatcacttagagaattgtagtgtttttggtccttgataaagcctagaagacatttgtgatgttacaaaatggaagttttcttttgtttctgttttttaagatctaagaagttgtgaatgttgttaatcatttagccgttgcaataaatgtagaggaaatgca

SEQ ID NO: 355561 - DNA, 4302 bp, Homo sapiens
agcggctgtgcggcgcggcgctgcggagaccgttggttcatttgcatgtccccgcctcgcgcggcggcggcggcgggtgaggagcctgaggcggcggcgggggtggctccgcgcgcggtggtctcgggggcaaaataacatggcagccagacgaattacacaggagacttttgatgctgtattacaagaaaaagccaaacgatatcacatggatgccagtggtgaggctgtaagcgaaactcttcagtttaaagctcaagatctcttaagggcagtcccaagatccagagcagagatgtatgatgacgtccacagcgatggcagatactccctcagtggatctgtagctcactctagagatgccggaagagaaggcctgagaagtgacgtatttccagggccttccttcagatcaagcaacccttccatcagtgatgacagctactttcgcaaagaatgtggccgggatctggaattttctcactctgattctcgggaccaggtcattggccaccggaaattggggcatttccgttctcaggactggaaatttgcgctccgtggttcttgggaacaagactttggccatccagtttctcaagagtcctcttggtcacaggagtatagttttggtccctctgcagttttgggggactttggatcttccaggctgattgagaaagagtgtttggagaaggagagtcgggattatgacgtggaccatcctggggaggctgactctgtgcttaggggcagcagtcaagtccaggccagaggtcgagctctaaacatcgttgaccaggaaggttccctcctaggaaagggggagactcagggcctgctcacagctaaggggggtgttgggaaacttgtcacattgagaaatgtgagcacaaaaaaaatacccaccgtgaatcgtattactcccaaaactcagggcactaaccaaatccagaaaaacactccaagtcctgatgtgaccctggggacaaacccagggacagaagatatccagttccccattcagaagatccctctggggctggatctgaagaatcttcggctccccagaagaaagatgagctttgacatcatagataagtctgatgttttttcaagatttgggatagaaataatcaaatgggcaggattccacaccataaaagatgatattaaattttcccaacttttccagactctctttgaacttgaaacagaaacctgtgctaaaatgcttgcctcattcaaatgttccttaaaaccagagcacagagatttttgcttttttactatcaaatttttaaagcactctgctttgaaaacacccagagttgataatgagtttttaaacatgcttttagacaaaggtgctgtgaagaccaaaaattgcttttttgaaatcataaagccttttgacaagtacataatgagacttcaagaccggcttctgaagagtgtcacacctttgcttatggcctgcaatgcctacgagctaagtgtcaagatgaagaccctcagtaaccccctggacttggctcttgccctagaaaccaccaactctctctgccggaagtctttggcccttttgggacagacattttccttggcctcttctttccggcaggagaaaatcttagaagctgtcggcctgcaagatatagctccctcacctgctgcgtttccaaacttcgaagactccactttgtttgggcgagagtacatagaccacctgaaggcctggctagtcagcagcggatgtcccctccaggttaagaaagccgaaccagagccgatgcgagaggaggagaaaatgattcctcctacgaaacctgaaattcaggccaaggctccaagtagtctgagtgatgctgtcccccagcgagcagatcacagggtagtgggcaccatcgaccagcttgtgaaacgtgtcatcgaaggcagcctgtctcccaaagagagaactcttctcaaagaggaccctgcttactggtttttgtctgatgaaaatagtctggagtataaatattacaagctgaagttggcagaaatgcagcggatgagcgagaacttgcgaggagccgaccagaagccgacctcagcagactgtgcagtgagggccatgctgtactcccgggctgtccgcaacctcaagaagaaactccttccgtggcagcggcgggggctcctccgtgctcaagggctccggggctggaaggcgaggagagcgaccaccgggacccagaccctcctatcctcaggcaccaggctgaaacaccacggccggcaggctccaggcctctcacaggcaaaaccatccctgccagacagaaatgatgctgccaaggactgcccgccagacccagttggaccttctcctcaggaccccagcttagaagcctcaggcccatcccccaagccagcaggagtggacatctctgaagcacctcagacctcttctccctgcccatctgctgacattgacatgaagacaatggagactgcagagaaactggctagatttgttgctcaggtgggaccagagatcgaacaattcagcatagaaaacagcaccgataaccctgacctgtggtttctacatgaccaaaatagttctgctttcaaattctatcgaaagaaagtgtttgaactatgtccatcaatttgtttcacgtcatctccgcacaaccttcacactggtggtggtgacaccacgggttctcaggagagccccgtggacctcatggaaggggaagcagagtttgaagacgagccccctccgcgggaggctgagctggagagcccagaggtgatgcctgaggaggaggacgaggacgatgaggatgggggagaggaggcccccgctcctggaggggcgggcaagtctgagggcagcacccctgccgacggccttcccggcgaggctgccgaggacgacctggctggagcacctgccttgtcacaggcctcctcaggtacctgcttccctcggaagaggatcagcagcaagtcattgaaggttggcatgattccagctcccaagagagtgtgtctcatccaggagccaaaagtccatgaaccagttcgaattgcctatgacaggcctcggggtcgtcccatgtccaaaaagaagaaacccaaggacttggacttcgcccagcagaagctgaccgataagaacctgggcttccagatgctgcagaagatgggctggaaggagggccatggcctgggctccctcggaaagggcatcagggagccggtcagcgtgtacgcagcaggcagcctggggtgggagtgggtggggcctcagtccttccacctgcagcctgccgcttggctccttcacagccaagatggcttacagctggcagttgatttttgttttttaaacagaaggcatcttcagatgagaagctgatcatttacatgtgcaggtgtttacagggctcctttctgtcctggtgtagattttttaaccagcttgttggccctggtcattttggccacatttgtgaccatcataaaagctaagtggtatttctgtgtagtttccgtctggaactgctttcccattcccgggaacccatagccgggccagccagggtcccgaacacaggcccaaagtttattaaaccccgatcataacctccagcaggcatttcatttaatactgagcttagttcctgctgggtaaggcattccgaggtaaccagggccctctgggcaccccctcaaaagccagctcttcgagggtgagtactccttgtttctactgtgagtcgcgtcttgattttccctttctttgatgtctcagtgtgtgtcccaaacacctgcatctcatggactgtttgtgcccatgcccagttcctggcatgccaggccctgggctcaggtgcacaactgactctctttttcactccctaggggaaccccctcggaaggggaagggttgggtgctgacgggcaggagcacaaagaagacacattcgatgtgttccgacagaggatgatgcagatgtacagacacaagcgggccaacaaatagttccagggtcacccccgagaggacaacaggcatctggaagtgctctctcgccactctgggtgctttactgtctctggcttgtttccatcactggaaatcacttagagaattgtagtgtttttggtccttgataaagcctagaagacatttgtgatgttacaaaatggaagttttcttttgtttctgttttttaagatctaagaagttgtgaatgttgttaatcatttagccgttgcaataaatgtagaggaaatgca

SEQ ID NO: 355562 - DNA, 3809 bp, Homo sapiens
agcggctgtgcggcgcggcgctgcggagaccgttggttcatttgcatgtccccgcctcgcgcggcggcggcggcgggtgaggagcctgaggcggcggcgggggtggctccgcgcgcggtggtctcgggggcaaaataacatggcagccagacgaattacacaggagacttttgatgctgtattacaagaaaaagccaaacgatatcacatggatgccagtggtgaggctgtaagcgaaactcttcagtttaaagctcaagatctcttaagggcagtcccaagatccagagcagagatgtatgatgacgtccacagcgatggcagatactccctcagtggatctgtagctcactctagagatgccggaagagaaggcctgagaagtgacgtatttccagggccttccttcagatcaagcaacccttccatcagtgatgacagctactttcgcaaagaatgtggccgggatctggaattttctcactctgattctcgggaccaggtcattggccaccggaaattggggcatttccgttctcaggactggaaatttgcgctccgtggttcttgggaacaagactttggccatccagtttctcaagagtcctcttggtcacaggagtatagttttggtccctctgcagttttgggggactttggatcttccaggctgattgagaaagagtgtttggagaaggagagtcgggattatgacgtggaccatcctggggaggctgactctgtgcttaggggcagcagtcaagtccaggccagaggtcgagctctaaacatcgttgaccaggaaggttccctcctaggaaagggggagactcagggcctgctcacagctaaggggggtgttgggaaacttgtcacattgagaaatgtgagcacaaaaaaaatacccaccgtgaatcgtattactcccaaaactcagggcactaaccaaatccagaaaaacactccaagtcctgatgtgaccctggggacaaacccagggacagaagatatccagttccccattcagaagatccctctggggctggatctgaagaatcttcggctccccagaagaaagatgagctttgacatcatagataagtctgatgttttttcaagatttgggatagaaataatcaaatgggcaggattccacaccataaaagatgatattaaattttcccaacttttccagactctctttgaacttgaaacagaaacctgtgctaaaatgcttgcctcattcaaatgttccttaaaaccagagcacagagatttttgcttttttactatcaaatttttaaagcactctgctttgaaaacacccagagttgataatgagtttttaaacatgcttttagacaaaggtgctgtgaagaccaaaaattgcttttttgaaatcataaagccttttgacaagtacataatgagacttcaagaccggcttctgaagagtgtcacacctttgcttatggcctgcaatgcctacgagctaagtgtcaagatgaagaccctcagtaaccccctggacttggctcttgccctagaaaccaccaactctctctgccggaagtctttggcccttttgggacagacattttccttggcctcttctttccggcaggagaaaatcttagaagctgtcggcctgcaagatatagctccctcacctgctgcgtttccaaacttcgaagactccactttgtttgggcgagagtacatagaccacctgaaggcctggctagtcagcagcggatgtcccctccaggttaagaaagccgaaccagagccgatgcgagaggaggagaaaatgattcctcctacgaaacctgaaattcaggccaaggctccaagtagtctgagtgatgctgtcccccagcgagcagatcacagggtagtgggcaccatcgaccagcttgtgaaacgtgtcatcgaaggcagcctgtctcccaaagagagaactcttctcaaagaggaccctgcttactggtttttgtctgatgaaaatagtctggagtataaatattacaagctgaagttggcagaaatgcagcggatgagcgagaacttgcgaggagccgaccagaagccgacctcagcagactgtgcagtgagggccatgctgtactcccgggctgtccgcaacctcaagaagaaactccttccgtggcagcggcgggggctcctccgtgctcaagggctccggggctggaaggcgaggagagcgaccaccgggacccagaccctcctatcctcaggcaccaggctgaaacaccacggccggcaggctccaggcctctcacaggcaaaaccatccctgccagacagaaatgatgctgccaaggactgcccgccagacccagttggaccttctcctcaggaccccagcttagaagcctcaggcccatcccccaagccagcaggagtggacatctctgaagcacctcagacctcttctccctgcccatctgctgacattgacatgaagacaatggagactgcagagaaactggctagatttgttgctcaggtgggaccagagatcgaacaattcagcatagaaaacagcaccgataaccctgacctgtggtttctacatgaccaaaatagttctgctttcaaattctatcgaaagaaagtgtttgaactatgtccatcaatttgtttcacgtcatctccgcacaaccttcacactggtggtggtgacaccacgggttctcaggagagccccgtggacctcatggaaggggaagcagagtttgaagacgagccccctccgcgggaggctgagctggagagcccagaggtgatgcctgaggaggaggacgaggacgatgaggatgggggagaggaggcccccgctcctggaggggcgggcaagtctgagggcagcacccctgccgacggccttcccggcgaggctgccgaggacgacctggctggagcacctgccttgtcacaggcctcctcaggtacctgcttccctcggaagaggatcagcagcaagtcattgaaggttggcatgattccagctcccaagagagtgtgtctcatccaggagccaaaagaggcgagaacccaccagtacagcagagctgaagcctgttcccagaacgggtctcttgtcccattgcagtcccctgcccgattcagcaaccactgactgttttccaagccccaggtattctatctttcctagtctgtcagtacatagaattgcatcgcatgtggccttttgatgggcacgccgtggcccagatgactcctgtagcccccaagtgccctccaagctgtctccccacagtcaggcctggaccgtgctttcacatgggacttctgctgcaaaacctatgtgtgaagttgtagtgaatggtgccccattgtgggactgtgttaaacagtcacctgtgtgttctacatcattcagacagtcacatttacatgtgacagtggccttatggtttttcctgctttggaatagtcctcatgttttgtgtttgaaaaatttggtgttgcagtgaaatgctaaccattctactataacctttaccatccttcaaaacttctcatggggccaggcgcagtggctcgtgcctgtaatcccagcttagcgggactgaggcaagaggatcgcttgagcccgggagcttgagaccagcctgggcaagatggccagacctaatctttacaagaaaaaaaaattaatgtaaaaaaaatgaagtaaataattaaacttgtcacggatggcaggtagtgtatcagagtgcttgttatgtatgctcttcttggggggaggtggagttttttat

SEQ ID NO: 355563 - DNA, 2168 bp, Homo sapiens
gacttgggatgttttcttttccaaaaaatgcttggtgtccataggtttctaccttcttgaaaatagttttttaagccaattgtaaatatacgtattattgttaaaagtaactttaaactgcaacacatagcttcaaaacaatatagagattttgtaataccttataagtggagttggctaaaataccttatccatataaaacttattctattctttgcatgcttattttgtgtgttggttgctagcttaaagtttgatttgttgttactctttgtgtgccaaattcactaggcaagcggatttttcctcagacttcaaaaaataattcttttaagaaaaaatgtaaaaatgtttattctaaaaagctgcattaaagggacaacctataaaaagttttgctagctcatctttagaaggaagaaagaatattagcttgggtgatgtttaatttgggtggcgatagtttctgtaggctaaactttatgagaaaagtgtacctactctataaaggtaataaatgtaaaacctcttgctgttattgaggaagctcttcaactaccctaaatttcacaaatgtaacttataacactatgaaaagatttgaccaacaatttacgtttgctgtgtgctttagtttttgtttaagcatattcttttgcttgaatttctgtgttcatgagagttagggtgttttatgcttcttgaactaattttataacatatttaatatattaccagttaagatataaaatcatttgtacatagcgaattgtaaagcagctattaaagtaggtgaaataaagtatatatttgccggttatccatatcttttagaagtcctgacagaacaaccagtttatttgcacataggtagcttctgtttgaaggaaggtaaagttataaggaaactcaaatactataagatgtgtcaaggtatttctccagaattaattgcaaagctagtgctgaaggattttaatcagcttctaaaattttcttctcaataagacatatgttttgattacttagggaagattcctcatttttatttgccctttatgcatttaatccacatgataggacattaaaaattaatataaagaaaaatcgtgctcatactgtacatctatttctgtgcttggaactacttgttaatagtttttatcgaagctgtcagcaataagggacataaaactgctgtattatacattgtggaattgaataaacagcctaatttttttttttctagtatagggtacttaagcatttccacttttggaagaaaagtgtattagtattttatattgcatttcatttaaaaggacagtttttttttttttttgtaaatccattcattgaaatggtttctaaactgtataatgtaatttggagcctatttagtaatagaattaaatgtcctatgtagtgctacaatttttgaattagaaagtgatcaaatgtaagaaaaaaatttaaaaattcagcccagaaaacaaaatagtgtattaaattagtttaatgtaaaaggaatttataagatttttttcctcaatatagatacctcacttgaaaagaaagcacagcatacttaaagtagttctagtaaacatgtcctagaaaacagttgctaaatgtaggacatcttttgaggaattagtttatgagaaataaaattttacttgtttttactatcctgttagaagtatttgtttatcctgataattttaagccaacatagtagtcttaaattacttttgaatttctaatctgtgaaggcagtaaatgaaatatctgttctgcaactgttgaaacaaataattggctacattgaccataattaaagttaaaattttgccaatgatgtacagttttatggttaaagttgctgtggttggttgcattacatgacacagaaaactgtcctctacctcacgtgaaataaatattttatatggttttactaaaaataagactcatgtatctggtcacctagtttacaaattttgaattatatttattgaaacatgacatactgtgctctgagcttatacctcaattgtattttgtgctgttttccattttcatgccttgtaaataacttgtatagattgtggatcaaatactaaataaaaacttttaatgccaattaaatttgattcaagttattt

SEQ ID NO: 355564 - DNA, 2115 bp, Homo sapiens
gacttgggatgttttcttttccaaaaaatgcttggtgtccataggtttctaccttcttgaaaatagttttttaagccaattgtaaatatacgtattattgttaaaagtaactttaaactgcaacacatagcttcaaaacaatatagagattttgtaataccttataagtggagttggctaaaataccttatccatataaaacttattctattctttgcatgcttattttgtgtgttggttgctagcttaaagtttgatttgttgttactctttgtgtgccaaattcactaggcaagcggatttttcctcagacttcaaaaaataattcttttaagaaaaaatgtaaaaatgtttattctaaaaagctgcattaaagggacaacctataaaaagttttgctagctcatctttagaaggaagaaagaatattagcttgggtgatgtttaatttgggtggcgatagtttctgtaggctaaactttatgagaaaagtgtacctactctataaaggtaataaatgtaaaacctcttgctgttattgaggaagctcttcaactaccctaaatttcacaaatgtaacttataacactatgaaaagatttgaccaacaatttacgtttgctgtgtgctttagtttttgtttaagcatattcttttgcttgaatttctgtgttcatgagagttagggtgttttatgcttcttgaactaattttataacatatttaatatattaccagttaagatataaaatcatttgtacatagcgaattgtaaagcagctattaaagtaggtgaaataaagtatatatttgccggttatccatatcttttagaagtcctgacagaacaaccagtttatttgcacataggtagcttctgtttgaaggaaggtaaagttataaggaaactcaaatactataagatgtgtcaaggtatttctccagaattaattgcaaagctagtgctgaaggattttaatcagcttctaaaattttcttctcaataagacatatgttttgattacttagggaagattcctcatttttatttgccctttatgcatttaatccacatgataggacattaaaaattaatataaagaaaaatcgtgctcatactgtacatctatttctgtgcttggaactacttgttaatagtttttatcgaagctgtcagcaataagggacataaaactgctgtattatacattgtggaattgaataaacagcctaatttttttttttctagtatagggtacttaagcatttccacttttggaagaaaagtgtattagtattttatattgcatttcatttaaatgtataatgtaatttggagcctatttagtaatagaattaaatgtcctatgtagtgctacaatttttgaattagaaagtgatcaaatgtaagaaaaaaatttaaaaattcagcccagaaaacaaaatagtgtattaaattagtttaatgtaaaaggaatttataagatttttttcctcaatatagatacctcacttgaaaagaaagcacagcatacttaaagtagttctagtaaacatgtcctagaaaacagttgctaaatgtaggacatcttttgaggaattagtttatgagaaataaaattttacttgtttttactatcctgttagaagtatttgtttatcctgataattttaagccaacatagtagtcttaaattacttttgaatttctaatctgtgaaggcagtaaatgaaatatctgttctgcaactgttgaaacaaataattggctacattgaccataattaaagttaaaattttgccaatgatgtacagttttatggttaaagttgctgtggttggttgcattacatgacacagaaaactgtcctctacctcacgtgaaataaatattttatatggttttactaaaaataagactcatgtatctggtcacctagtttacaaattttgaattatatttattgaaacatgacatactgtgctctgagcttatacctcaattgtattttgtgctgttttccattttcatgccttgtaaataacttgtatagattgtggatcaaatactaaataaaaacttttaatgccaattaaatttgattcaagttattt

SEQ ID NO: 355565 - DNA, 1300 bp, Homo sapiens
  misc_feature (10)..(10): n is a, c, g, or t
cctcgtgaanttctggcacagaagacacgttataaggaaactcaaatactataagatgtgtcaaggtatttctccagaattaattgcaaagctagtgctgaaggattttaatcagcttctaaaattttcttctcaataagacatatgttttgattacttagggaagattcctcatttttatttgccctttatgcatttaatccacatgataggacattaaaaattaatataaagaaaaatcgtgctcatactgtacatctatttctgtgcttggaactacttgttaatagtttttatcgaagctgtcagcaataagggacataaaactgctgtattatacattgtggaattgaataaacagcctaatttttttttttctagtatagggtacttaagcatttccacttttggaagaaaagtgtattagtattttatattgcatttcatttaaaaggacagtttttttttttttttgtaaatccattcattgaaatggtttctaaactgtataatgtaatttggagcctatttagtaatagaattaaatgtcctatgtagtgctacaatttttgaattagaaagtgatcaaatgtaagaaaaaaatttaaaaattcagcccagaaaacaaaatagtgtattaaattagtttaatgtaaaaggaatttataagatttttttcctcaatatagatacctcacttgaaaagaaagcacagcatacttaaagtagttctagtaaacatgtcctagaaaacagttgctaaatgtaggacatcttttgaggaattagtttatgagaaataaaattttacttgtttttactatcctgttagaagtatttgtttatcctgataattttaagccaacatagtagtcttaaattacttttgaatttctaatctgtgaaggcagtaaatgaaatatctgttctgcaactgttgaaacaaataattggctacattgaccataattaaagttaaaattttgccaatgatgtacagttttatggttaaagttgctgtggttggttgcattacatgacacagaaaactgtcctctacctcacgtgaaataaatattttatatggttttactaaaaataagactcatgtatctggtcacctagtttacaaattttgaattatatttattgaaacatgacatactgtgctctgagcttatacctcaattgtattttgtgctgttttccattttcatgccttgtaaataacttgtatagattgtggatcaaatactaaataaaaacttttaatgccaattaaatttgattcaagttattt

SEQ ID NO: 355566 - DNA, 607 bp, Homo sapiens
ttcctttcccggtatgaagtataaagcgttgagtagttctagtaaacatgtcctagaaaacagttgctaaatgtaggacatcttttgaggaattagtttatgagaaataaaattttacttgtttttactatcctgttagaagtatttgtttatcctgataattttaagccaacatagtagtcttaaattacttttgaatttctaatctgtgaaggcagtaaatgaaatatctgttctgcaactgttgaaacaaataattggctacattgaccataattaaagttaaaattttgccaatgatgtacagttttatggttaaagttgctgtggttggttgcattacatgacacagaaaactgtcctctacctcacgtgaaataaatattttatatggttttactaaaaataagactcatgtatctggtcacctagtttacaaattttgaattatatttattgaaacatgacatactgtgctctgagcttatacctcaattgtattttgtgctgttttccattttcatgccttgtaaataacttgtatagattgtggatcaaatactaaataaaaacttttaatgccaattaaatttgattcaagttattt

SEQ ID NO: 355567 - DNA, 1703 bp, Homo sapiens
gacttgggatgttttcttttccaaaaaatgcttggtgtccataggtttctaccttcttgaaaatagttttttaagccaattgtaaatatacgtattattgttaaaagtaactttaaactgcaacacatagcttcaaaacaatatagagattttgtaataccttataagtggagttggctaaaataccttatccatataaaacttattctattctttgcatgcttattttgtgtgttggttgctagcttaaagtttgatttgttgttactctttgtgtgccaaattcactaggcaagcggatttttcctcagacttcaaaaaataattcttttaagaaaaaatgtaaaaatgtttattctaaaaagctgcattaaagggacaacctataaaaagttttgctagctcatctttagaaggaagaaagaatattagcttgggtgatgtttaatttgggtggcgatagtttctgtaggctaaactttatgagaaaagtgtacctactctataaaggtaataaatgtaaaacctcttgctgttattgaggaagctcttcaactaccctaaatttcacaaatgtaacttataacactatgaaaagatttgaccaacaatttacgtttgctgtgtgctttagtttttgtttaagcatattcttttgcttgaatttctgtgttcatgagagttagggtgttttatgcttcttgaactaattttataacatatttaatatattaccagttaagatataaaatcatttgtacatagcgaattgtaaagcagctattaaagtaggtgaaataaagtatatatttgccggttatccatatcttttagaagtcctgacagaacaaccagtttatttgcacataggtagcttctgtttgaaggaaggtaaagttataaggaaactcaaatactataagatgtgtcaaggtatttctccagaattaattgcaaagctagtgctgaaggattttaatcagcttctaaaattttcttctcaataagacatatgttttgattacttagggaagattcctcatttttatttgccctttatgcatttaatccacatgataggacattaaaaattaatataaagaaaaatcgtgctcatactgtacatctatttctgtgcttggaactacttgttaatagtttttatcgaagctgtcagcaataagggacataaaactgctgtattatacattgtggaattgaataaacagcctaatttttttttttctagtatagggtacttaagcatttccacttttggaagaaaagtgtattagtattttatattgcatttcatttaaaaggacagtttttttttttttttgtaaatccattcattgaaatggtttctaaactgtataatgtaatttggagcctatttagtaatagaattaaatgtcctatgtagtgctacaatttttgaattagaaagtgatcaaatgtaagaaaaaaatttaaaaattcagcccagaaaacaaaatagtgtattaaattagtttaatgtaaaaggaatttataagatttttttcctcaatatagatacctcacttgaaaagaaagcacagcatacttaaagtagttctagtaaacatgtcctagaaaacagttgctaaatgtaggacatcttttgagaatagtatgtatacttgatctattggagcagatgttgttgactgtgacatatg

SEQ ID NO: 355568 - DNA, 3521 bp, Homo sapiens
  misc_feature (123)..(123): n is a, c, g, or t
  misc_feature (129)..(129): n is a, c, g, or t
gaaagagacgaccaactgagaggtgggcccccaaagccggctgcgagagtcaccgaagatttccggagagccaaggagtcgggaagagccacttactgagcgttgccgaacgtgtacggaganagccgnagatgcggaaggcggggccacaagagcccttcctgcagggaacctcaggcttcagagagccgaaaagttgggaggcgtaaccacttacaggccggaagtgtccggggtggacgcattcgggtagccgaagaagtcccaggattgccgaagaagtcccaggatttccgaagcgagccgaagcatcgcgacagttttcagagacagctgatcggttggagctgttgcgccgagcagtcatggcggcggccagagctactacgccggccgatggcgaggagcccgccccggaggctgaggctctggccgcagcccgggagcggagcagccgcttcttgagcggcctggagctggtgaagcagggtgccgaggcgcgcgtgttccgtggccgcttccagggccgcgcggcggtgatcaagcaccgcttccccaagggctaccggcacccggcgctggaggcgcggcttggcagacggcggacggtgcaggaggcccgggcgctcctccgctgtcgccgcgctggaatatctgccccagttgtcttttttgtggactatgcttccaactgcttatatatggaagaaattgaaggctcagtgactgttcgagattatattcagtccactatggagactgaaaaaactccccagggtctctccaacttagccaagacaattgggcaggttttggctcgaatgcacgatgaagacctcattcatggtgatctcaccacctccaacatgctcctgaaaccccccctggaacagctgaacattgtgctcatagactttgggctgagtttcatttcagcacttccagaggataagggagtagacctctatgtcctggagaaggccttcctcagtacccatcccaacactgaaactgtgtttgaagcctttctgaagagctactccacctcctccaaaaaggccaggccagtgctaaaaaaattagatgaagtgcgcctgagaggaagaaagaggtccatggttgggtagaagaatgtgtatgacaaccacacacagtgaagctcttttttcaaagtaaatttgaagaaatgctacaagtatgagatgagatctaagtaaaggtgttaagatatttttaagtggtatgtgatcgtgtcattatcatctgcacttcactcaagagcttactatgtgtctaagtcatgttctaggcagaattgggtatttaaagtaaattgaggacaggcttctcccagattgtgacatgtatatctcagatacatgggtgtggcattgaaccacataatgagaacattattctctttttagtccttgtgagacaaggatgaagtctcagttgctgatactcgctgagcttactggccctctaacccagtgtttttttttgttgttgttgtgtacatgttatatttattttgaaaccagtttaatgggatacaaccagcattttaaaaaatgaaatagaatacagcatggaaaatatcagtgtattgttttatgaaactttcacgtgtatatatagaccaaggatatgtgctgagttttgatgtcaaatatatttctctttcagggtcatgatcaaaaaatgaaaagtctgcttaactccaatttctcttttaaaaaagcagacttacagctttcaggcaactgaaattcatgttaacatgtttttatttttattgctttgtatttttgtggttaccttctaagacaagtgattgatctaaagttccttttaagtttataccgctaaacaaactgagttgatttctatcacaggcagtaagtaggtagagcaaaaatggtgaagtgacttgtgaagactgaagtttgatgaagtctggtttaaggcacaggtaaactgagtgtggatgcaaaagtaccaggagctagcttttaaccttgcccagcctcagtttcttttcttagaagaagctatgtttgggtgggaagggaagagagggataagaaaatacctttcttccttgtaaactccaatcaacaaacatattttgagtgccttttgtgttccttggcaccctgttgggtattgggtacttggcaccctgttgggtattgggtacaatggtgagccagacagacacagcgcctgtccttttgtaagaatatttatttttataaaaaagtataaagtatacagtgggatgttttgatatacattatgaaatgattgctacagctgagctaattaacacccatcacctcacatagttactgtcttgtttcttaatatggacatttgcagctatgaatttccctctgcacactgttgtcatcacacactctcagttttggtattttgtgtttttgttttcattcatctcaaagtattttctaatttcccttgtgatttcttctttgaccccttgattgtttagaaatctgttaatttccacacatttgtaaatgttccaatttttcttttgttattgccagcttcattccattgtgttcagagatgatacagtcagtgcctgttcttatgaagcaaacattctataatagtaggaccagtaccctgtctgtttcattcaccacagtcagcatgccccaagtgcccagcatggggcggatggccaggaatgagtgaaaacttcccttcctgggtagttgtgactagtagagaggaaaaataatataattgcctgcttactgcatgccaggcattgggctgggaatttttatattggatctaaaataactcttaagttaggcattatccccattttatagatggagaaactggccccaaaaggtgggaacttgtccaagacgtcacaggtagcaagaggtacttttacctggctccaaatctgtgttctttccactgacaaatgagatatgggatatggtgcatctttacagtactataataagtattggcgtataacattattttcaaggaactccaagggccacaggagctgacaggtttttcaattaatattcccaacatgaatgagatgcctcattcctcagtttcctcacgtgtactataaggctagtacctgctttgttggggtatggttggctcgtgtgcattaagtcaacaaatccctagttgatagggtttggctgtgtccccatccaaatctcatcttgaattgttcccgtaatccccacgtgacatgggagggacccagtgggaggtaatttaatcctcggggcggctacctccgtgctgttctcgtgatagcgagtgagttctcacgagatctgatggttttataaggggcttttccctcttgttcggcacttcctgctgccacgtggagaagggtgtgtttgtttccccatctgccatgattataagttttctgaggcatccccagccatgctgaactgtgagttattaaacttttcctttataaattaaaaaat

SEQ ID NO: 355569 - DNA, 3467 bp, Homo sapiens
  misc_feature (123)..(123): n is a, c, g, or t
  misc_feature (129)..(129): n is a, c, g, or t
gaaagagacgaccaactgagaggtgggcccccaaagccggctgcgagagtcaccgaagatttccggagagccaaggagtcgggaagagccacttactgagcgttgccgaacgtgtacggaganagccgnagatgcggaaggcggggccacaagagcccttcctgcagggaacctcaggcttcagagagccgaaaagttgggaggcgtaaccacttacaggccggaagtgtccggggtggacgcattcgggtagccgaagaagtcccaggattgccgaagaagtcccaggatttccgaagcgagccgaagcatcgcgacagttttcagagacagctgatcggttggagctgttgcgccgagcagtcatggcggcggccagagctactacgccggccgatggcgaggagcccgccccggaggctgaggctctggccgcagcccgggagcggagcagccgcttcttgagcggcctggagctggtgaagcagggtgccgaggcgcgcgtgttccgtggccgcttccagggccgcgcggcggtgatcaagcaccgcttccccaagggctaccggcacccggcgctggaggcgcggcttggcagacggcggacggtgcaggaggcccgggcgctcctccgctgtcgccgcgctggaatatctgccccagttgtcttttttgtggactatgcttccaactgcttatatatggaagaaattgaaggctcagtgactgttcgagattatattcagtccactatggagactgaaaaaactccccagggtctctccaacttagccaagacaattgggcaggttttggctcgaatgcacgatgaagacctcattcatggtgatctcaccacctccaacatgctcctgaaaccccccctggaacagctgaacattgtgctcatagactttgggctgagtttcatttcagcacttccagaggataagggagtagacctctatgtcctggagaaggccttcctcagtacccatcccaacactgaaactgtgtttgaagcctttctgaagagctactccacctcctccaaaaaggccaggccagtgctaaaaaaattagatgaagtgcgcctgagaggaagaaagaggtccatggttgggtagaagaatgtgtatgacaaccacacacagtgaagctcttttttcaaagtaaatttgaagaaatgctacaagtatgagatgagatctaagtaaaggtgttaagatatttttaagtggtatgtgatcgtgtcattatcatctgcacttcactcaagagcttactatgtgtctaagtcatgttctaggcagaattgggtatttaaagtaaattgaggacaggcttctcccagattgtgacatgtatatctcagatacatgggtgtggcattgaaccacataatgagaacattattctctttttagtccttgtgagacaaggatgaagtctcagttgctgatactcgctgagcttactggccctctaacccagtgtttttttttgttgttgttgtgtacatgttatatttattttgaaaccagtttaatgggatacaaccagcattttaaaaaatgaaatagaatacagcatggaaaatatcagtgtattgttttatgaaactttcacgtgtatatatagaccaaggatatgtgctgagttttgatgtcaaatatatttctctttcagggtcatgatcaaaaaatgaaaagtctgcttaactccaatttctcttttaaaaaagcagacttacagctttcaggcaactgaaattcatgttaacatgtttttatttttattgctttgtatttttgtggttaccttctaagacaagtgattgatctaaagttccttttaagtttataccgctaaacaaactgagttgatttctatcacaggcagtaagtaggtagagcaaaaatggtgaagtgacttgtgaagactgaagtttgatgaagtctggtttaaggcacaggtaaactgagtgtggatgcaaaagtaccaggagctagcttttaaccttgcccagcctcagtttcttttcttagaagaagctatgtttgggtgggaagggaagagagggataagaaaatacctttcttccttgtaaactccaatcaacaaacatattttgagtgccttttgtgttccttggcaccctgttgggtattgggtacttggcaccctgttgggtattgggtacaatggtgagccagacagacacagcgcctgtccttttgtaagaatatttatttttataaaaaactgagctaattaacacccatcacctcacatagttactgtcttgtttcttaatatggacatttgcagctatgaatttccctctgcacactgttgtcatcacacactctcagttttggtattttgtgtttttgttttcattcatctcaaagtattttctaatttcccttgtgatttcttctttgaccccttgattgtttagaaatctgttaatttccacacatttgtaaatgttccaatttttcttttgttattgccagcttcattccattgtgttcagagatgatacagtcagtgcctgttcttatgaagcaaacattctataatagtaggaccagtaccctgtctgtttcattcaccacagtcagcatgccccaagtgcccagcatggggcggatggccaggaatgagtgaaaacttcccttcctgggtagttgtgactagtagagaggaaaaataatataattgcctgcttactgcatgccaggcattgggctgggaatttttatattggatctaaaataactcttaagttaggcattatccccattttatagatggagaaactggccccaaaaggtgggaacttgtccaagacgtcacaggtagcaagaggtacttttacctggctccaaatctgtgttctttccactgacaaatgagatatgggatatggtgcatctttacagtactataataagtattggcgtataacattattttcaaggaactccaagggccacaggagctgacaggtttttcaattaatattcccaacatgaatgagatgcctcattcctcagtttcctcacgtgtactataaggctagtacctgctttgttggggtatggttggctcgtgtgcattaagtcaacaaatccctagttgatagggtttggctgtgtccccatccaaatctcatcttgaattgttcccgtaatccccacgtgacatgggagggacccagtgggaggtaatttaatcctcggggcggctacctccgtgctgttctcgtgatagcgagtgagttctcacgagatctgatggttttataaggggcttttccctcttgttcggcacttcctgctgccacgtggagaagggtgtgtttgtttccccatctgccatgattataagttttctgaggcatccccagccatgctgaactgtgagttattaaacttttcctttataaattaaaaaat

SEQ ID NO: 355570 - DNA, 2972 bp, Homo sapiens
gtaaccgttcgtacgagaatcgctgtcctctccttgcggccgccagtgtggtggaattggtgcaggaggcccgggcgctcctccgctgtcgccgcgctggaatatctgccccagttgtcttttttgtggactatgcttccaactgcttatatatggaagaaattgaaggctcagtgactgttcgagattatattcagtccactatggagactgaaaaaactccccagggtctctccaacttagccaagacaattgggcaggttttggctcgaatgcacgatgaagacctcattcatggtgatctcaccacctccaacatgctcctgaaaccccccctggaacagctgaacattgtgctcatagactttgggctgagtttcatttcagcacttccagaggataagggagtagacctctatgtcctggagaaggccttcctcagtacccatcccaacactgaaactgtgtttgaagcctttctgaagagctactccacctcctccaaaaaggccaggccagtgctaaaaaaattagatgaagtgcgcctgagaggaagaaagaggtccatggttgggtagaagaatgtgtatgacaaccacacacagtgaagctcttttttcaaagtaaatttgaagaaatgctacaagtatgagatgagatctaagtaaaggtgttaagatatttttaagtggtatgtgatcgtgtcattatcatctgcacttcactcaagagcttactatgtgtctaagtcatgttctaggcagaattgggtatttaaagtaaattgaggacaggcttctcccagattgtgacatgtatatctcagatacatgggtgtggcattgaaccacataatgagaacattattctctttttagtccttgtgagacaaggatgaagtctcagttgctgatactcgctgagcttactggccctctaacccagtgtttttttttgttgttgttgtgtacatgttatatttattttgaaaccagtttaatgggatacaaccagcattttaaaaaatgaaatagaatacagcatggaaaatatcagtgtattgttttatgaaactttcacgtgtatatatagaccaaggatatgtgctgagttttgatgtcaaatatatttctctttcagggtcatgatcaaaaaatgaaaagtctgcttaactccaatttctcttttaaaaaagcagacttacagctttcaggcaactgaaattcatgttaacatgtttttatttttattgctttgtatttttgtggttaccttctaagacaagtgattgatctaaagttccttttaagtttataccgctaaacaaactgagttgatttctatcacaggcagtaagtaggtagagcaaaaatggtgaagtgacttgtgaagactgaagtttgatgaagtctggtttaaggcacaggtaaactgagtgtggatgcaaaagtaccaggagctagcttttaaccttgcccagcctcagtttcttttcttagaagaagctatgtttgggtgggaagggaagagagggataagaaaatacctttcttccttgtaaactccaatcaacaaacatattttgagtgccttttgtgttccttggcaccctgttgggtattgggtacttggcaccctgttgggtattgggtacaatggtgagccagacagacacagcgcctgtccttttgtaagaatatttatttttataaaaaagtataaagtatacagtgggatgttttgatatacattatgaaatgattgctacagctgagctaattaacacccatcacctcacatagttactgtcttgtttcttaatatggacatttgcagctatgaatttccctctgcacactgttgtcatcacacactctcagttttggtattttgtgtttttgttttcattcatctcaaagtattttctaatttcccttgtgatttcttctttgaccccttgattgtttagaaatctgttaatttccacacatttgtaaatgttccaatttttcttttgttattgccagcttcattccattgtgttcagagatgatacagtcagtgcctgttcttatgaagcaaacattctataatagtaggaccagtaccctgtctgtttcattcaccacagtcagcatgccccaagtgcccagcatggggcggatggccaggaatgagtgaaaacttcccttcctgggtagttgtgactagtagagaggaaaaataatataattgcctgcttactgcatgccaggcattgggctgggaatttttatattggatctaaaataactcttaagttaggcattatccccattttatagatggagaaactggccccaaaaggtgggaacttgtccaagacgtcacaggtagcaagaggtacttttacctggctccaaatctgtgttctttccactgacaaatgagatatgggatatggtgcatctttacagtactataataagtattggcgtataacattattttcaaggaactccaagggccacaggagctgacaggtttttcaattaatattcccaacatgaatgagatgcctcattcctcagtttcctcacgtgtactataaggctagtacctgctttgttggggtatggttggctcgtgtgcattaagtcaacaaatccctagttgatagggtttggctgtgtccccatccaaatctcatcttgaattgttcccgtaatccccacgtgacatgggagggacccagtgggaggtaatttaatcctcggggcggctacctccgtgctgttctcgtgatagcgagtgagttctcacgagatctgatggttttataaggggcttttccctcttgttcggcacttcctgctgccacgtggagaagggtgtgtttgtttccccatctgccatgattataagttttctgaggcatccccagccatgctgaactgtgagttattaaacttttcctttataaattaaaaaat

SEQ ID NO: 355571 - DNA, 1232 bp, Homo sapiens
  misc_feature (123)..(123): n is a, c, g, or t
  misc_feature (129)..(129): n is a, c, g, or t
gaaagagacgaccaactgagaggtgggcccccaaagccggctgcgagagtcaccgaagatttccggagagccaaggagtcgggaagagccacttactgagcgttgccgaacgtgtacggaganagccgnagatgcggaaggcggggccacaagagcccttcctgcagggaacctcaggcttcagagagccgaaaagttgggaggcgtaaccacttacaggccggaagtgtccggggtggacgcattcgggtagccgaagaagtcccaggattgccgaagaagtcccaggatttccgaagcgagccgaagcatcgcgacagttttcagagacagctgatcggttggagctgttgcgccgagcagtcatggcggcggccagagctactacgccggccgatggcgaggagcccgccccggaggctgaggctctggccgcagcccgggagcggagcagccgcttcttgagcggcctggagctggtgaagcagggtgccgaggcgcgcgtgttccgtggccgcttccagggccgcgcggcggtgatcaagcaccgcttccccaagggctaccggcacccggcgctggaggcgcggcttggcagacggcggacggtgcaggaggcccgggcgctcctccgctgtcgccgcgctggaatatctgccccagttgtcttttttgtggactatgcttccaactgcttatatatggaagaaattgaaggctcagtgactgttcgagattatattcagtccactatggagactgaaaaaactccccagggtctctccaacttagccaagacaattgggcaggttttggctcgaatgcacgatgaagacctcattcatggtgatctcaccacctccaacatgctcctgaaaccccccctggaacagctgaacattgtgctcatagactttgggctgagtttcatttcagcacttccagaggataagggagtagacctctatgtcctggagaaggccttcctcagtacccatcccaacactgaaactgtgtttgaagcctttctgaagagctactccacctcctccaaaaaggccaggccagtgctaaaaaaattagatgaagtgcgcctgagaggaagaaagaggtccatggttgggtagaagaatgtgtatgacaaccacacacagtgaagctcttttttcaaagtaaatttgaagaaatgctacaagtatgagatgagatctaagtaaaggtgttaagatatt

SEQ ID NO: 355572 - DNA, 3496 bp, Homo sapiens
  misc_feature (123)..(123): n is a, c, g, or t
  misc_feature (129)..(129): n is a, c, g, or t
gaaagagacgaccaactgagaggtgggcccccaaagccggctgcgagagtcaccgaagatttccggagagccaaggagtcgggaagagccacttactgagcgttgccgaacgtgtacggaganagccgnagatgcggaaggcggggccacaagagcccttcctgcagggaacctcaggcttcagagagccgaaaagttgggaggcgtaaccacttacaggccggaagtgtccggggtggacgcattcgggtagccgaagaagtcccaggattgccgaagaagtcccaggatttccgaagcgagccgaagcatcgcgacagttttcagagacagctgatcggttggagctgttgcgccgagcagtcatggcggcggccagagctactacgccggccgatggcgaggagcccgccccggaggctgaggctctggccgcagcccgggagcggagcagccgcttcttgagcggcctggagctggtgaagcagggtgccgaggcgcgcgtgttccgtggccgcttccagggccgcgcggcggtgatcaagcaccgcttccccaagggctaccggcacccggcgctggaggcgcggcttggcagacggcggacggtgcaggaggcccgggcgctcctccgctgtcgccgcgctggaatatctgccccagttgtcttttttgtggactatgcttccaactgcttatatatggaagaaattgaaggctcagtgactgttcgagattatattcagtccactatggagactgaaaaaactccccagggtctctccaacttagccaagacaattgggcaggttttggctcgaatgcacgatgaagacctcattcatggtgatctcaccacctccaacatgctcctgaaaccccccctggaacagctgaacattgtgctcatagactttgggctgagtttcatttcagcacttccagaggataagggagtagacctctatgtcctggagaaggccttcctcagtacccatcccaacactgaaactgtgtttgaagcctttctgaagagctactccacctcctccaaaaaggccaggccagtgctaaaaaaattagatgaagtgcgcctgagaggaagaaagaggtccatggttgggtagaagaatgtgtatgacaaccacacacagtgaagctcttttttcaaagtaaatttgaagaaatgctacaagtatgagatgagatctaagtaaaggtgttaagatatttttaagtggtatgtgatcgtgtcattatcatctgcacttcactcaagagcttactatgtgtctaagtcatgttctaggcagaattgggtatttaaagtaaattgaggacaggcttctcccagattgtgacatgtatatctcagatacatgggtgtggcattgaaccacataatgagaacattattctctttttagtccttgtgagacaaggatgaagtctcagttgctgatactcgctgagcttactggccctctaacccagtgtttttttttgttgttgttgtgtacatgttatatttattttgaaaccagtttaatgggatacaaccagcattttaaaaaatgaaatagaatacagcatggaaaatatcagtgtattgttttatgaaactttcacgtgtatatatagaccaaggatatgtgctgagttttgatgtcaaatatatttctctttcagggtcatgatcaaaaaatgaaaagtctgcttaactccaatttctcttttaaaaaagcagacttacagctttcaggcaactgaaattcatgttaacatgtttttatttttattgctttgtatttttgtggttaccttctaagacaagtgattgatctaaagttccttttaagtttataccgctaaacaaactgagttgatttctatcacaggcagtaagtaggtagagcaaaaatggtgaagtgacttgtgaagactgaagtttgatgaagtctggtttaaggcacaggtaaactgagtgtggatgcaaaagtaccaggagctagcttttaaccttgcccagcctcagtttcttttcttagaagaagctatgtttgggtgggaagggaagagagggataagaaaatacctttcttccttgtaaactccaatcaacaaacatattttgagtgccttttgtgttccttggcacccctgttgggtattgggtacaatggtgagccagacagacacagcgcctgtccttttgtaagaatatttatttttataaaaaagtataaagtatacagtgggatgttttgatatacattatgaaatgattgctacagctgagctaattaacacccatcacctcacatagttactgtcttgtttcttaatatggacatttgcagctatgaatttccctctgcacactgttgtcatcacacactctcagttttggtattttgtgtttttgttttcattcatctcaaagtattttctaatttcccttgtgatttcttctttgaccccttgattgtttagaaatctgttaatttccacacatttgtaaatgttccaatttttcttttgttattgccagcttcattccattgtgttcagagatgatacagtcagtgcctgttcttatgaagcaaacattctataatagtaggaccagtaccctgtctgtttcattcaccacagtcagcatgccccaagtgcccagcatggggcggatggccaggaatgagtgaaaacttcccttcctgggtagttgtgactagtagagaggaaaaataatataattgcctgcttactgcatgccaggcattgggctgggaatttttatattggatctaaaataactcttaagttaggcattatccccattttatagatggagaaactggccccaaaaggtgggaacttgtccaagacgtcacaggtagcaagaggtacttttacctggctccaaatctgtgttctttccactgacaaatgagatatgggatatggtgcatctttacagtactataataagtattggcgtataacattattttcaaggaactccaagggccacaggagctgacaggtttttcaattaatattcccaacatgaatgagatgcctcattcctcagtttcctcacgtgtactataaggctagtacctgctttgttggggtatggttggctcgtgtgcattaagtcaacaaatccctagttgatagggtttggctgtgtccccatccaaatctcatcttgaattgttcccgtaatccccacgtgacatgggagggacccagtgggaggtaatttaatcctcggggcggctacctccgtgctgttctcgtgatagcgagtgagttctcacgagatctgatggttttataaggggcttttccctcttgttcggcacttcctgctgccacgtggagaagggtgtgtttgtttccccatctgccatgattataagttttctgaggcatccccagccatgctgaactgtgagttattaaacttttcctttataaattaaaaaat

SEQ ID NO: 355573 - DNA, 3467 bp, Homo sapiens
  misc_feature (123)..(123): n is a, c, g, or t
  misc_feature (129)..(129): n is a, c, g, or t
gaaagagacgaccaactgagaggtgggcccccaaagccggctgcgagagtcaccgaagatttccggagagccaaggagtcgggaagagccacttactgagcgttgccgaacgtgtacggaganagccgnagatgcggaaggcggggccacaagagcccttcctgcagggaacctcaggcttcagagagccgaaaagttgggaggcgtaaccacttacaggccggaagtgtccggggtggacgcattcgggtagccgaagaagtcccaggattgccgaagaagtcccaggatttccgaagcgagccgaagcatcgcgacagttttcagagacagctgatcggttggagctgttgcgccgagcagtcatggcggcggccagagctactacgccggccgatggcgaggagcccgccccggaggctgaggctctggccgcagcccgggagcggagcagccgcttcttgagcggcctggagctggtgaagcagggtgccgaggcgcgcgtgttccgtggccgcttccagggccgcgcggcggtgatcaagcaccgcttccccaagggctaccggcacccggcgctggaggcgcggcttggcagacggcggacggtgcaggaggcccgggcgctcctccgctgtcgccgcgctggaatatctgccccagttgtcttttttgtggactatgcttccaactgcttatatatggaagaaattgaaggctcagtgactgttcgagattatattcagtccactatggagactgaacgaatgcacgatgaagacctcattcatggtgatctcaccacctccaacatgctcctgaaaccccccctggaacagctgaacattgtgctcatagactttgggctgagtttcatttcagcacttccagaggataagggagtagacctctatgtcctggagaaggccttcctcagtacccatcccaacactgaaactgtgtttgaagcctttctgaagagctactccacctcctccaaaaaggccaggccagtgctaaaaaaattagatgaagtgcgcctgagaggaagaaagaggtccatggttgggtagaagaatgtgtatgacaaccacacacagtgaagctcttttttcaaagtaaatttgaagaaatgctacaagtatgagatgagatctaagtaaaggtgttaagatatttttaagtggtatgtgatcgtgtcattatcatctgcacttcactcaagagcttactatgtgtctaagtcatgttctaggcagaattgggtatttaaagtaaattgaggacaggcttctcccagattgtgacatgtatatctcagatacatgggtgtggcattgaaccacataatgagaacattattctctttttagtccttgtgagacaaggatgaagtctcagttgctgatactcgctgagcttactggccctctaacccagtgtttttttttgttgttgttgtgtacatgttatatttattttgaaaccagtttaatgggatacaaccagcattttaaaaaatgaaatagaatacagcatggaaaatatcagtgtattgttttatgaaactttcacgtgtatatatagaccaaggatatgtgctgagttttgatgtcaaatatatttctctttcagggtcatgatcaaaaaatgaaaagtctgcttaactccaatttctcttttaaaaaagcagacttacagctttcaggcaactgaaattcatgttaacatgtttttatttttattgctttgtatttttgtggttaccttctaagacaagtgattgatctaaagttccttttaagtttataccgctaaacaaactgagttgatttctatcacaggcagtaagtaggtagagcaaaaatggtgaagtgacttgtgaagactgaagtttgatgaagtctggtttaaggcacaggtaaactgagtgtggatgcaaaagtaccaggagctagcttttaaccttgcccagcctcagtttcttttcttagaagaagctatgtttgggtgggaagggaagagagggataagaaaatacctttcttccttgtaaactccaatcaacaaacatattttgagtgccttttgtgttccttggcaccctgttgggtattgggtacttggcaccctgttgggtattgggtacaatggtgagccagacagacacagcgcctgtccttttgtaagaatatttatttttataaaaaagtataaagtatacagtgggatgttttgatatacattatgaaatgattgctacagctgagctaattaacacccatcacctcacatagttactgtcttgtttcttaatatggacatttgcagctatgaatttccctctgcacactgttgtcatcacacactctcagttttggtattttgtgtttttgttttcattcatctcaaagtattttctaatttcccttgtgatttcttctttgaccccttgattgtttagaaatctgttaatttccacacatttgtaaatgttccaatttttcttttgttattgccagcttcattccattgtgttcagagatgatacagtcagtgcctgttcttatgaagcaaacattctataatagtaggaccagtaccctgtctgtttcattcaccacagtcagcatgccccaagtgcccagcatggggcggatggccaggaatgagtgaaaacttcccttcctgggtagttgtgactagtagagaggaaaaataatataattgcctgcttactgcatgccaggcattgggctgggaatttttatattggatctaaaataactcttaagttaggcattatccccattttatagatggagaaactggccccaaaaggtgggaacttgtccaagacgtcacaggtagcaagaggtacttttacctggctccaaatctgtgttctttccactgacaaatgagatatgggatatggtgcatctttacagtactataataagtattggcgtataacattattttcaaggaactccaagggccacaggagctgacaggtttttcaattaatattcccaacatgaatgagatgcctcattcctcagtttcctcacgtgtactataaggctagtacctgctttgttggggtatggttggctcgtgtgcattaagtcaacaaatccctagttgatagggtttggctgtgtccccatccaaatctcatcttgaattgttcccgtaatccccacgtgacatgggagggacccagtgggaggtaatttaatcctcggggcggctacctccgtgctgttctcgtgatagcgagtgagttctcacgagatctgatggttttataaggggcttttccctcttgttcggcacttcctgctgccacgtggagaagggtgtgtttgtttccccatctgccatgattataagttttctgaggcatccccagccatgctgaactgtgagttattaaacttttcctttataaattaaaaaat

SEQ ID NO: 355574 - DNA, 1110 bp, Homo sapiens
gcgtgggcagggggcgggcccgggagttggaacagagggcacagacggcccctcctcggaggggagggaccggagccggggcctttttctttaagactcgcagcactggatcccagaacttagtctgcgcggcggcattgacactagctgggctcctcggggcgcgccccaggtggtccgaagcccggtccgccctccacgcaggtgccccgcgctccccgctcagccatgtcgtcctgcagccgcgtggcgctggtgaccggggccaacaggggcatcggcttggccatcgcgcgcgaactgtgccgacagttctctggggatgtggtgctcaccgcgcgggacgtggcgcggggccaggcggccgtgcagcagctgcaggcggagggcctgagcccgcgcttccaccaactggacatcgacgacttgcagagcatccgcgccctgcgcgacttcctgcgcaaggagtacggggggctcaatgtactggtcaacaacgcggccgtcgccttcaagagtgatgatccaatgccctttgacattaaagctgagatgacactgaagacaaatttttttgccactagaaacatgtgcaacgagttactgccgataatgaaacctcatgggagagtggtgaatatcagtagtttgcagtgtttaagggcttttgaaaactgcagtgaagatctgcaggaaaggttccacagtgagacactcacagaaggagacctggtggatctcatgaaaaagtttgtggaggacacaaaaaatgaggtgcatgagagggaaggctggcccaactcaccttatggggtgtccaagttgggggtcacggtcttatcgaggatcctggccaggcgtctggatgagaagaggaaagctgacaggattctggtgaatgcgtgctgcccaggaccagtgaagacagacatggatgggaaagacagcatcaggactgtggaggagggggctgagacccctgtctacttggccctcttgcctccagatgccactgagccacaaggccagttggtccatgacaaagttgtgcaaaactggtaaacgtctgcttcggagcttgctgcttaataaatgttggtggaatgaatg

SEQ ID NO: 355575 - DNA, 1161 bp, Homo sapiens
gcgtgggcagggggcgggcccgggagttggaacagagggcacagacggcccctcctcggaggggagggaccggagccggggcctttttctttaagactcgcagcactggatcccagaacttagtctgcgcggcggcattgacactagctgggctcctcggggcgcgccccaggtggtccgaagcccggtccgccctccacgcaggtgccccgcgctccccgctcagccatgtcgtcctgcagccgcgtggcgctggtgaccggggccaacaggggcatcggcttggccatcgcgcgcgaactgtgccgacagttctctggggatgtggtgctcaccgcgcgggacgtggcgcggggccaggcggccgtgcagcagctgcaggcggagggcctgagcccgcgcttccaccaactggacatcgacgacttgcagagcatccgcgccctgcgcgacttcctgcgcaaggagtacggggggctcaatgtactggtcaacaacgcggccgtcgccttcaagagtgatgatccaatgccctttgacattaaagctgagatgacactgaagacaaatttttttgccactagaaacatgtgcaacgagttactgccgataatgaaacctcatgggagagtggtgaatatcagtagtttgcagtgtttaagggcttttgaaaactgcagtgaagatctgcaggaaaggttccacagtgagacactcacagaaggagacctggtggatctcatgaaaaagtttgtggaggacacaaaaaatgaggtgcatgagagggaaggctggcccaactcaccttatggggtgtccaagttgggggtcacggtcttatcgaggatcctggccaggcgtctggatgagaagaggaaagctgacaggattctggtgaatgcgtgctgcccaggaccagtgaagacagacatggatgggaaagacagcatcaggactgtggaggagggggctgagacccctgtctacttggccctcttgcctccagatgccactgagccacaaggccagttggtccatgacaaagttgtgcaaaactggtaaacgtctgcttcggagcttgctgcttaataaatgttggtggaatgaatgaatgaattgatgctgtggtttgattatttctgttctttttttttttgagac

SEQ ID NO: 355576 - DNA, 669 bp, Homo sapiens
gcgtgggcagggggcgggcccgggagttggaacagagggcacagacggcccctcctcggaggggagggaccggagccggggcctttttctttaagactcgcagcactggatcccagaacttagtctgcgcggcggcattgacactagctgggctcctcggggcgcgccccaggtggtccgaagcccggtccgccctccacgcaggtgccccgcgctccccgctcagccatgtcgtcctgcagccgcgtggcgctggtgaccggggccaacaggggcatcggcttggccatcgcgcgcgaactgtgccgacagttctctggggatgtggtgctcaccgcgcgggacgtggcgcggggccaggcggccgtgcagcagctgcaggcggagggcctgagcccgcgcttccaccaactggacatcgacgacttgcagagcatccgcgccctgcgcgacttcctgcgcaaggagtacggggggctcaatgtactggtcaacaacgcggccgtcgccttcaagagtgatgatccaatgccctttgacattaaagctgagatgacactgaagacaaatttttttgccactagaaacatgtgcaacgagttactgccgataatgaaacctcatggtaagcccaacgtgtggacagtcgggttgcatccctcagtaaga

SEQ ID NO: 355577 - DNA, 147 bp, Homo sapiens
caaatcaggtgaaataaaggcaagccttttgtgttagtccttcagagagccactcaccaggtcaaaacaatacaattctttgagagcagagtctactctgttatctccagcaccagtaacccactctgggaattactgccaccgagc

SEQ ID NO: 355578 - DNA, 7484 bp, Homo sapiens
ctgacagtgttccggagccggggcgagcagccaaaaggcccgcggagtcgcgctgggccgccccggcgcagctgaaccgggggccgcgcctgccaggccgacgggtctggcccagcctggcgccaaggggttcgtgcgctgtggagacgcggagggtcgaggcggcgcggcctgagtgaaacccaatggaaaaagcatgacatttagaagtagaagacttagcttcaaatccctactccttcacttactaattttgtgatttggaaatatccgcgcaagatgttgacgttgcagacttggctagtgcaagccttgtttattttcctcaccactgaatctacaggtgaacttctagatccatgtggttatatcagtcctgaatctccagttgtacaacttcattctaatttcactgcagtttgtgtgctaaaggaaaaatgtatggattattttcatgtaaatgctaattacattgtctggaaaacaaaccattttactattcctaaggagcaatatactatcataaacagaacagcatccagtgtcacctttacagatatagcttcattaaatattcagctcacttgcaacattcttacattcggacagcttgaacagaatgtttatggaatcacaataatttcaggcttgcctccagaaaaacctaaaaatttgagttgcattgtgaacgaggggaagaaaatgaggtgtgagtgggatggtggaagggaaacacacttggagacaaacttcactttaaaatctgaatgggcaacacacaagtttgctgattgcaaagcaaaacgtgacacccccacctcatgcactgttgattattctactgtgtattttgtcaacattgaagtctgggtagaagcagagaatgcccttgggaaggttacatcagatcatatcaattttgatcctgtatataaagtgaagcccaatccgccacataatttatcagtgatcaactcagaggaactgtctagtatcttaaaattgacatggaccaacccaagtattaagagtgttataatactaaaatataacattcaatataggaccaaagatgcctcaacttggagccagattcctcctgaagacacagcatccacccgatcttcattcactgtccaagaccttaaaccttttacagaatatgtgtttaggattcgctgtatgaaggaagatggtaagggatactggagtgactggagtgaagaagcaagtgggatcacctatgaagatagaccatctaaagcaccaagtttctggtataaaatagatccatcccatactcaaggctacagaactgtacaactcgtgtggaagacattgcctccttttgaagccaatggaaaaatcttggattatgaagtgactctcacaagatggaaatcacatttacaaaattacacagttaatgccacaaaactgacagtaaatctcacaaatgatcgctatctagcaaccctaacagtaagaaatcttgttggcaaatcagatgcagctgttttaactatccctgcctgtgactttcaagctactcaccctgtaatggatcttaaagcattccccaaagataacatgctttgggtggaatggactactccaagggaatctgtaaagaaatatatacttgagtggtgtgtgttatcagataaagcaccctgtatcacagactggcaacaagaagatggtaccgtgcatcgcacctatttaagagggaacttagcagagagcaaatgctatttgataacagttactccagtatatgctgatggaccaggaagccctgaatccataaaggcataccttaaacaagctccaccttccaaaggacctactgttcggacaaaaaaagtagggaaaaacgaagctgtcttagagtgggaccaacttcctgttgatgttcagaatggatttatcagaaattatactatattttatagaaccatcattggaaatgaaactgctgtgaatgtggattcttcccacacagaatatacattgtcctctttgactagtgacacattgtacatggtacgaatggcagcatacacagatgaaggtgggaaggatggtccagaattcacttttactaccccaaagtttgctcaaggagaaattgaagccatagtcgtgcctgtttgcttagcattcctattgacaactcttctgggagtgctgttctgctttaataagcgagacctaattaaaaaacacatctggcctaatgttccagatccttcaaagagtcatattgcccagtggtcacctcacactcctccaaggcacaattttaattcaaaagatcaaatgtattcagatggcaatttcactgatgtaagtgttgtggaaatagaagcaaatgacaaaaagccttttccagaagatctgaaatcattggacctgttcaaaaaggaaaaaattaatactgaaggacacagcagtggtattggggggtcttcatgcatgtcatcttctaggccaagcatttctagcagtgatgaaaatgaatcttcacaaaacacttcgagcactgtccagtattctaccgtggtacacagtggctacagacaccaagttccgtcagtccaagtcttctcaagatccgagtctacccagcccttgttagattcagaggagcggccagaagatctacaattagtagatcatgtagatggcggtgatggtattttgcccaggcaacagtacttcaaacagaactgcagtcagcatgaatccagtccagatatttcacattttgaaaggtcaaagcaagtttcatcagtcaatgaggaagattttgttagacttaaacagcagatttcagatcatatttcacaatcctgtggatctgggcaaatgaaaatgtttcaggaagtttctgcagcagatgcttttggtccaggtactgagggacaagtagaaagatttgaaacagttggcatggaggctgcgactgatgaaggcatgcctaaaagttacttaccacagactgtacggcaaggcggctacatgcctcagtgaaggactagtagttcctgctacaacttcagcagtacctataaagtaaagctaaaatgattttatctgtgaattcagattttaaaaagtcttcactctctgaagatgatcatttgcccttaaggacaaaaatgaactgaagtttcacatgagctatttccattccagaatatctgggattctactttaagcactacataaactgactttatcctcagactagctgaatgattttgtgctgtttcaggatgtttgcactgaagaaaaacagaaagcttatctgaaatttataaaactttttgttttgctacatagaaaacagaaggtatttgaataataagcagtgatatgcttagtgagcacagctatactgattttgattagaatagtcatcagagtggcttagggacagttaatataaaagaggagcaaggtgtagaccatcatctacttctgctaaaataacttaaaaagaggtccataggccataactacatgagcccagcttttgtaatctgacaaaaaaatgaggagcagcttcgtgtatatcagtgtacacggtattccttaggtcccttccattggtagtgatgctgcgagttattactggagaaaaggaattctagagctttaacttggcagattaaaagtactcattttttattcatcaataattagtaatctcactagttttcaaaaatttgcatattattgacaacctctttgaagatgcatttcacaaactcaacagagtgccatgataagagctagggatcccccaaactatctcaagcatctaaaaaattgccatttttaaaggcttaaattgtagtagtaaaggggaaaacaggaagtagtagtaaaggggaaaaaaaaccaataaagcatctaaaaaattggcatgttaaaaggcttaaattgctaatgtgtgtatatatatatatatatatacacacacatatacacacacatatcattgacttttcttaagacttcagagtactgggtagatgaacactttatacagtatatatcttcagcttaaatttgttttgagtattttttttatttttaaataagtaggcaaagatttaaatttttttatttttagtaaatgtttgaggcacactaagacaacttgggcaatatttgccaaaacaaaacagaaccccaaaaaatgtacatcttgttcttagcaaatatcattattgtagagacacttaataaagagatggtattttaatgtctgcagttctgaggtagggtggaacttagttctacattgtgatttaggaatttttaaaaccttttttcttcaagggagaagtgacccaggcctcgagtttagtgctaaagccgctagtgtacttatgctgtcccctaaccaccacgtgcgatatggaagcagatgctaaatataggggttttcttagaaagtaagaggaaattagcaagcgttattagtgattgactactgctatcaagtgaattcaaaggaaacaggtttttatgccatatttaagttacagaaaccaggcatgcttagaatagtttctagaggttattggagaatagaaagctaagaaaacttggtatacatttacaatggaaatataattacactttttactctcagaatattgttcacattagacttcctgtttatcttttatattcttgcatttatataatgcctcatcctttcaaagttctttcacatattatatgatcttctttatgaaaaaaatagatgtttcattctgatatattcagtttcccactttaggcaaaagtagattaatagaatgacgaattcaaagtagatgaggaaaatcaggcacagagaagtaaaggtagggatagacccaaatttacacaacaagataatgacatctccagcttttaagttgatcatcaaaggctgggctggatttgtcttgctgtatgtgtcaggaaatttatacctattacattttccattttctcaaaatttaagtcacatgactaatatttagctgcaactttcctcataacaaatagtgtcatgaagaatgttgtagtgtgaagtttgtacatttcagggtcagatatacaatatgaactcttaatctacaggaatgagaatggaggatcattgaaggccatgatataaacaaatttgcatgttgaagcctgtataaaacatggtacagtgagtgaatatacccccatccccaagaacactttatacatattaaatggatatatgattactgtgcaaaaattcattctggaaatgaacatatatttgagcactaatatgtaatgtacacctgccctaaggagaaaataaattataaaactttttacattcaaaattactttcccaagcatgtcttagaataatctatgtgttgatgcatgtaaattgtactttaggtaggcaaagaaatctggttatttatgtaaaaactagtctaataaagttagttagtggctttatcactttaaatctttagtgtccaaaagtggtgtttaaagtaatagcacatcagaaaaccttgtctggacaaaactagttcactcactgcttctgcacctgcagttgctccctttagggttataaaataatgacccaaatgttacatgtgttgatattataacttgtcagttactgatgtctgtggtatcctaccctcatctctgaaagggataatactgaataattattagaaaactataaaacttcacactttgtaccattaaaacctaaaattttaatcttgtccttttttactatggatcagtcggcactcgggaacagcagcaaggaaaaaaagcaaatttcattcacatgttctgtgttcatacctcttctctacctaattgttcatttaaatttcagccttattccttgataagggattttaccacatgaagtcatccagtgaccctagctcttattgtgaagttagtggagtatacttagaaatgttacaactttaaaatgttacaaaacattcattaaagctcatatttaaagtagagcatctagtttgagaaatagaaatcaattattaaagatgtcttttttctacccatttaactagttaaaaccatgacatgtaaatgtagaagtagaataatcatagaattccctaaaatatttctgtttactaacatatattgaccaagtacatcaagcaggagagatcttccttcattctgttatagtccacatcattctaattttgctcagttgttattaagagcatattcctaaaccatacacttttgtttcaataaagttttattttgttgagatgaataaaataacaaagttataagctgcataagacaaaagttcaattgttcaaaaaaaatttactgggatagctttctattacaggtattgttagattatattgtgctgataagattactttctaaaaaatttgtacttttctgtaaattaaaagaatatggagtcataaaatggcaagtgttttaggattagcctaaaattggacattgtcattgatttcaaagaaggtatgaactagcagtcttacagcctaattcttctttggactggtccttggcagcagttccttttcagactcgataaacagaattcagatgatgtaagtcaaaacaaaactttacaaagccaagcgtattatcttttgcattaacctatttttttccatcatacatgctactagtatgtgcattagcatgatattctcatatacattgcattaaaaattaaaaggtggcagctcagggtgagctcttctgttgctcatttgttcctaaatttttaagggctttttctcagtcaatagtttgtacaaactggttagtttaacttcattacccatttcattaaagttgatgggtcgtgtgatgagatgcatttaaggccgatagtgatagatgttttttttatttcttgaacacaggctttgtctgaatgatgttcttttatctcttgaacacaagctttgaatgataactacaggttttaagtgctgttacattaataccataatgtgatgtgttagaaacaaagggatatttcaaaggtagatatttgaaaattctctagtctcaatatgtatgtgtattgaatatactctaaaaataaatgtgcaatttgctagtaggacaatgcagtgactgactagcattaggtatgtttcttttatatcctagctatgtcccactttcttctaagtgcaatcctttcatgttcacttgctgttttaccccatctactctaacttcatttggaaggcttgtctagagtatagcatgtatttttacctttgcagtgaattgcatgtgctaattgtaaccacagctatttttatgttgacataactccaaatgttatattaaatgttctattatatattagctctaatcccttaagtaaattttaagaaataaatacttgttcaaatttt

SEQ ID NO: 355579 - DNA, 7279 bp, Homo sapiens
atctgacagtgttccggagccggccgacgggtctggcccagcctggcgcctgagtgaaacccaatggaaaaagcatgacatttagaagtagaagacttagcttcaaatccctactccttcacttactaattttgtgatttggaaatatccgcgcaagatgttgacgttgcagacttggctagtgcaagccttgtttattttcctcaccactgaatctacaggtgaacttctagatccatgtggttatatcagtcctgaatctccagttgtacaacttcattctaatttcactgcagtttgtgtgctaaaggaaaaatgtatggattattttcatgtaaatgctaattacattgtctggaaaacaaaccattttactattcctaaggagcaatatactatcataaacagaacagcatccagtgtcacctttacagatatagcttcattaaatattcagctcacttgcaacattcttacattcggacagcttgaacagaatgtttatggaatcacaataatttcaggcttgcctccagaaaaacctaaaaatttgagttgcattgtgaacgaggggaagaaaatgaggtgtgagtgggatggtggaagggaaacacacttggagacaaacttcactttaaaatctgaatgggcaacacacaagtttgctgattgcaaagcaaaacgtgacacccccacctcatgcactgttgattattctactgtgtattttgtcaacattgaagtctgggtagaagcagagaatgcccttgggaaggttacatcagatcatatcaattttgatcctgtatataaagtgaagcccaatccgccacataatttatcagtgatcaactcagaggaactgtctagtatcttaaaattgacatggaccaacccaagtattaagagtgttataatactaaaatataacattcaatataggaccaaagatgcctcaacttggagccagattcctcctgaagacacagcatccacccgatcttcattcactgtccaagaccttaaaccttttacagaatatgtgtttaggattcgctgtatgaaggaagatggtaagggatactggagtgactggagtgaagaagcaagtgggatcacctatgaagataacattgcctccttttgaagccaatggaaaaatcttggattatgaagtgactctcacaagatggaaatcacatttacaaaattacacagttaatgccacaaaactgacagtaaatctcacaaatgatcgctatctagcaaccctaacagtaagaaatcttgttggcaaatcagatgcagctgttttaactatccctgcctgtgactttcaagctactcaccctgtaatggatcttaaagcattccccaaagataacatgctttgggtggaatggactactccaagggaatctgtaaagaaatatatacttgagtggtgtgtgttatcagataaagcaccctgtatcacagactggcaacaagaagatggtaccgtgcatcgcacctatttaagagggaacttagcagagagcaaatgctatttgataacagttactccagtatatgctgatggaccaggaagccctgaatccataaaggcataccttaaacaagctccaccttccaaaggacctactgttcggacaaaaaaagtagggaaaaacgaagctgtcttagagtgggaccaacttcctgttgatgttcagaatggatttatcagaaattatactatattttatagaaccatcattggaaatgaaactgctgtgaatgtggattcttcccacacagaatatacattgtcctctttgactagtgacacattgtacatggtacgaatggcagcatacacagatgaaggtgggaaggatggtccagaattcacttttactaccccaaagtttgctcaaggagaaattgaagccatagtcgtgcctgtttgcttagcattcctattgacaactcttctgggagtgctgttctgctttaataagcgagacctaattaaaaaacacatctggcctaatgttccagatccttcaaagagtcatattgcccagtggtcacctcacactcctccaaggcacaattttaattcaaaagatcaaatgtattcagatggcaatttcactgatgtaagtgttgtggaaatagaagcaaatgacaaaaagccttttccagaagatctgaaatcattggacctgttcaaaaaggaaaaaattaatactgaaggacacagcagtggtattggggggtcttcatgcatgtcatcttctaggccaagcatttctagcagtgatgaaaatgaatcttcacaaaacacttcgagcactgtccagtattctaccgtggtacacagtggctacagacaccaagttccgtcagtccaagtcttctcaagatccgagtctacccagcccttgttagattcagaggagcggccagaagatctacaattagtagatcatgtagatggcggtgatggtattttgcccaggcaacagtacttcaaacagaactgcagtcagcatgaatccagtccagatatttcacattttgaaaggtcaaagcaagtttcatcagtcaatgaggaagattttgttagacttaaacagcagatttcagatcatatttcacaatcctgtggatctgggcaaatgaaaatgtttcaggaagtttctgcagcagatgcttttggtccaggtactgagggacaagtagaaagatttgaaacagttggcatggaggctgcgactgatgaaggcatgcctaaaagttacttaccacagactgtacggcaaggcggctacatgcctcagtgaaggactagtagttcctgctacaacttcagcagtacctataaagtaaagctaaaatgattttatctgtgaattcagattttaaaaagtcttcactctctgaagatgatcatttgcccttaaggacaaaaatgaactgaagtttcacatgagctatttccattccagaatatctgggattctactttaagcactacataaactgactttatcctcagactagctgaatgattttgtgctgtttcaggatgtttgcactgaagaaaaacagaaagcttatctgaaatttataaaactttttgttttgctacatagaaaacagaaggtatttgaataataagcagtgatatgcttagtgagcacagctatactgattttgattagaatagtcatcagagtggcttagggacagttaatataaaagaggagcaaggtgtagaccatcatctacttctgctaaaataacttaaaaagaggtccataggccataactacatgagcccagcttttgtaatctgacaaaaaaatgaggagcagcttcgtgtatatcagtgtacacggtattccttaggtcccttccattggtagtgatgctgcgagttattactggagaaaaggaattctagagctttaacttggcagattaaaagtactcattttttattcatcaataattagtaatctcactagttttcaaaaatttgcatattattgacaacctctttgaagatgcatttcacaaactcaacagagtgccatgataagagctagggatcccccaaactatctcaagcatctaaaaaattgccatttttaaaggcttaaattgtagtagtaaaggggaaaacaggaagtagtagtaaaggggaaaaaaaaccaataaagcatctaaaaaattggcatgttaaaaggcttaaattgctaatgtgtgtatatatatatatatatatacacacacatatacacacacatatcattgacttttcttaagacttcagagtactgggtagatgaacactttatacagtatatatcttcagcttaaatttgttttgagtattttttttatttttaaataagtaggcaaagatttaaatttttttatttttagtaaatgtttgaggcacactaagacaacttgggcaatatttgccaaaacaaaacagaaccccaaaaaatgtacatcttgttcttagcaaatatcattattgtagagacacttaataaagagatggtattttaatgtctgcagttctgaggtagggtggaacttagttctacattgtgatttaggaatttttaaaaccttttttcttcaagggagaagtgacccaggcctcgagtttagtgctaaagccgctagtgtacttatgctgtcccctaaccaccacgtgcgatatggaagcagatgctaaatataggggttttcttagaaagtaagaggaaattagcaagcgttattagtgattgactactgctatcaagtgaattcaaaggaaacaggtttttatgccatatttaagttacagaaaccaggcatgcttagaatagtttctagaggttattggagaatagaaagctaagaaaacttggtatacatttacaatggaaatataattacactttttactctcagaatattgttcacattagacttcctgtttatcttttatattcttgcatttatataatgcctcatcctttcaaagttctttcacatattatatgatcttctttatgaaaaaaatagatgtttcattctgatatattcagtttcccactttaggcaaaagtagattaatagaatgacgaattcaaagtagatgaggaaaatcaggcacagagaagtaaaggtagggatagacccaaatttacacaacaagataatgacatctccagcttttaagttgatcatcaaaggctgggctggatttgtcttgctgtatgtgtcaggaaatttatacctattacattttccattttctcaaaatttaagtcacatgactaatatttagctgcaactttcctcataacaaatagtgtcatgaagaatgttgtagtgtgaagtttgtacatttcagggtcagatatacaatatgaactcttaatctacaggaatgagaatggaggatcattgaaggccatgatataaacaaatttgcatgttgaagcctgtataaaacatggtacagtgagtgaatatacccccatccccaagaacactttatacatattaaatggatatatgattactgtgcaaaaattcattctggaaatgaacatatatttgagcactaatatgtaatgtacacctgccctaaggagaaaataaattataaaactttttacattcaaaattactttcccaagcatgtcttagaataatctatgtgttgatgcatgtaaattgtactttaggtaggcaaagaaatctggttatttatgtaaaaactagtctaataaagttagttagtggctttatcactttaaatctttagtgtccaaaagtggtgtttaaagtaatagcacatcagaaaaccttgtctggacaaaactagttcactcactgcttctgcacctgcagttgctccctttagggttataaaataatgacccaaatgttacatgtgttgatattataacttgtcagttactgatgtctgtggtatcctaccctcatctctgaaagggataatactgaataattattagaaaactataaaacttcacactttgtaccattaaaacctaaaattttaatcttgtccttttttactatggatcagtcggcactcgggaacagcagcaaggaaaaaaagcaaatttcattcacatgttctgtgttcatacctcttctctacctaattgttcatttaaatttcagccttattccttgataagggattttaccacatgaagtcatccagtgaccctagctcttattgtgaagttagtggagtatacttagaaatgttacaactttaaaatgttacaaaacattcattaaagctcatatttaaagtagagcatctagtttgagaaatagaaatcaattattaaagatgtcttttttctacccatttaactagttaaaaccatgacatgtaaatgtagaagtagaataatcatagaattccctaaaatatttctgtttactaacatatattgaccaagtacatcaagcaggagagatcttccttcattctgttatagtccacatcattctaattttgctcagttgttattaagagcatattcctaaaccatacacttttgtttcaataaagttttattttgttgagatgaataaaataacaaagttataagctgcataagacaaaagttcaattgttcaaaaaaaatttactgggatagctttctattacaggtattgttagattatattgtgctgataagattactttctaaaaaatttgtacttttctgtaaattaaaagaatatggagtcataaaatggcaagtgttttaggattagcctaaaattggacattgtcattgatttcaaagaaggtatgaactagcagtcttacagcctaattcttctttggactggtccttggcagcagttccttttcagactcgataaacagaattcagatgatgtaagtcaaaacaaaactttacaaagccaagcgtattatcttttgcattaacctatttttttccatcatacatgctactagtatgtgcattagcatgatattctcatatacattgcattaaaaattaaaaggtggcagctcagggtgagctcttctgttgctcatttgttcctaaatttttaagggctttttctcagtcaatagtttgtacaaactggttagtttaacttcattacccatttcattaaagttgatgggtcgtgtgatgagatgcatttaaggccgatagtgatagatgttttttttatttcttgaacacaggctttgtctgaatgatgttcttttatctcttgaacacaagctttgaatgataactacaggttttaagtgctgttacattaataccataatgtgatgtgttagaaacaaagggatatttcaaaggtagatatttgaaaattctctagtctcaatatgtatgtgtattgaatatactctaaaaataaatgtgcaatttgctagtaggacaatgcagtgactgactagcattaggtatgtttcttttatatcctagctatgtcccactttcttctaagtgcaatcctttcatgttcacttgctgttttaccccatctactctaacttcatttggaaggcttgtctagagtatagcatgtatttttacctttgcagtgaattgcatgtgctaattgtaaccacagctatttttatgttgacataactccaaatgttatattaaatgttctattatatattagctctaatcccttaagtaaattttaagaaataaatacttgttcaaatttt

SEQ ID NO: 355580 - DNA, 7347 bp, Homo sapiens
ctgacagtgttccggagccggggcgagcagccaaaaggcccgcggagtcgcgctgggccgccccggcgcagctgaaccgggggccgcgcctgccaggccgacgggtctggcccagcctggcgccaaggggttcgtgcgctgtggagacgcggagggtcgaggcggcgcggcctgagtgaaacccaatggaaaaagcatgacatttagaagtagaagacttagcttcaaatccctactccttcacttactaattttgtgatttggaaatatccgcgcaagatgttgacgttgcagacttggctagtgcaagccttgtttattttcctcaccactgaatctacaggtgaacttctagatccatgtggttatatcagtcctgaatctccagttgtacaacttcattctaatttcactgcagtttgtgtgctaaaggaaaaatgtatggattattttcatgtaaatgctaattacattgtctggaaaacaaaccattttactattcctaaggagcaatatactatcataaacagaacagcatccagtgtcacctttacagatatagcttcattaaatattcagctcacttgcaacattcttacattcggacagcttgaacagaatgtttatggaatcacaataatttcaggcttgcctccagaaaaacctaaaaatttgagttgcattgtgaacgaggggaagaaaatgaggtgtgagtgggatggtggaagggaaacacacttggagacaaacttcactttaaaatctgaatgggcaacacacaagtttgctgattgcaaagcaaaacgtgacacccccacctcatgcactgttgattattctactgtgtattttgtcaacattgaagtctgggtagaagcagagaatgcccttgggaaggttacatcagatcatatcaattttgatcctgtatataaagtgaagcccaatccgccacataatttatcagtgatcaactcagaggaactgtctagtatcttaaaattgacatggaccaacccaagtattaagagtgttataatactaaaatataacattcaatataggaccaaagatgcctcaacttggagccagattcctcctgaagacacagcatccacccgatcttcattcactgtccaagaccttaaaccttttacagaatatgtgtttaggattcgctgtatgaaggaagatggtaagggatactggagtgactggagtgaagaagcaagtgggatcacctatgaagataacattgcctccttttgaagccaatggaaaaatcttggattatgaagtgactctcacaagatggaaatcacatttacaaaattacacagttaatgccacaaaactgacagtaaatctcacaaatgatcgctatctagcaaccctaacagtaagaaatcttgttggcaaatcagatgcagctgttttaactatccctgcctgtgactttcaagctactcaccctgtaatggatcttaaagcattccccaaagataacatgctttgggtggaatggactactccaagggaatctgtaaagaaatatatacttgagtggtgtgtgttatcagataaagcaccctgtatcacagactggcaacaagaagatggtaccgtgcatcgcacctatttaagagggaacttagcagagagcaaatgctatttgataacagttactccagtatatgctgatggaccaggaagccctgaatccataaaggcataccttaaacaagctccaccttccaaaggacctactgttcggacaaaaaaagtagggaaaaacgaagctgtcttagagtgggaccaacttcctgttgatgttcagaatggatttatcagaaattatactatattttatagaaccatcattggaaatgaaactgctgtgaatgtggattcttcccacacagaatatacattgtcctctttgactagtgacacattgtacatggtacgaatggcagcatacacagatgaaggtgggaaggatggtccagaattcacttttactaccccaaagtttgctcaaggagaaattgaagccatagtcgtgcctgtttgcttagcattcctattgacaactcttctgggagtgctgttctgctttaataagcgagacctaattaaaaaacacatctggcctaatgttccagatccttcaaagagtcatattgcccagtggtcacctcacactcctccaaggcacaattttaattcaaaagatcaaatgtattcagatggcaatttcactgatgtaagtgttgtggaaatagaagcaaatgacaaaaagccttttccagaagatctgaaatcattggacctgttcaaaaaggaaaaaattaatactgaaggacacagcagtggtattggggggtcttcatgcatgtcatcttctaggccaagcatttctagcagtgatgaaaatgaatcttcacaccaagttccgtcagtccaagtcttctcaagatccgagtctacccagcccttgttagattcagaggagcggccagaagatctacaattagtagatcatgtagatggcggtgatggtattttgcccaggcaacagtacttcaaacagaactgcagtcagcatgaatccagtccagatatttcacattttgaaaggtcaaagcaagtttcatcagtcaatgaggaagattttgttagacttaaacagcagatttcagatcatatttcacaatcctgtggatctgggcaaatgaaaatgtttcaggaagtttctgcagcagatgcttttggtccaggtactgagggacaagtagaaagatttgaaacagttggcatggaggctgcgactgatgaaggcatgcctaaaagttacttaccacagactgtacggcaaggcggctacatgcctcagtgaaggactagtagttcctgctacaacttcagcagtacctataaagtaaagctaaaatgattttatctgtgaattcagattttaaaaagtcttcactctctgaagatgatcatttgcccttaaggacaaaaatgaactgaagtttcacatgagctatttccattccagaatatctgggattctactttaagcactacataaactgactttatcctcagactagctgaatgattttgtgctgtttcaggatgtttgcactgaagaaaaacagaaagcttatctgaaatttataaaactttttgttttgctacatagaaaacagaaggtatttgaataataagcagtgatatgcttagtgagcacagctatactgattttgattagaatagtcatcagagtggcttagggacagttaatataaaagaggagcaaggtgtagaccatcatctacttctgctaaaataacttaaaaagaggtccataggccataactacatgagcccagcttttgtaatctgacaaaaaaatgaggagcagcttcgtgtatatcagtgtacacggtattccttaggtcccttccattggtagtgatgctgcgagttattactggagaaaaggaattctagagctttaacttggcagattaaaagtactcattttttattcatcaataattagtaatctcactagttttcaaaaatttgcatattattgacaacctctttgaagatgcatttcacaaactcaacagagtgccatgataagagctagggatcccccaaactatctcaagcatctaaaaaattgccatttttaaaggcttaaattgtagtagtaaaggggaaaacaggaagtagtagtaaaggggaaaaaaaaccaataaagcatctaaaaaattggcatgttaaaaggcttaaattgctaatgtgtgtatatatatatatatatatacacacacatatacacacacatatcattgacttttcttaagacttcagagtactgggtagatgaacactttatacagtatatatcttcagcttaaatttgttttgagtattttttttatttttaaataagtaggcaaagatttaaatttttttatttttagtaaatgtttgaggcacactaagacaacttgggcaatatttgccaaaacaaaacagaaccccaaaaaatgtacatcttgttcttagcaaatatcattattgtagagacacttaataaagagatggtattttaatgtctgcagttctgaggtagggtggaacttagttctacattgtgatttaggaatttttaaaaccttttttcttcaagggagaagtgacccaggcctcgagtttagtgctaaagccgctagtgtacttatgctgtcccctaaccaccacgtgcgatatggaagcagatgctaaatataggggttttcttagaaagtaagaggaaattagcaagcgttattagtgattgactactgctatcaagtgaattcaaaggaaacaggtttttatgccatatttaagttacagaaaccaggcatgcttagaatagtttctagaggttattggagaatagaaagctaagaaaacttggtatacatttacaatggaaatataattacactttttactctcagaatattgttcacattagacttcctgtttatcttttatattcttgcatttatataatgcctcatcctttcaaagttctttcacatattatatgatcttctttatgaaaaaaatagatgtttcattctgatatattcagtttcccactttaggcaaaagtagattaatagaatgacgaattcaaagtagatgaggaaaatcaggcacagagaagtaaaggtagggatagacccaaatttacacaacaagataatgacatctccagcttttaagttgatcatcaaaggctgggctggatttgtcttgctgtatgtgtcaggaaatttatacctattacattttccattttctcaaaatttaagtcacatgactaatatttagctgcaactttcctcataacaaatagtgtcatgaagaatgttgtagtgtgaagtttgtacatttcagggtcagatatacaatatgaactcttaatctacaggaatgagaatggaggatcattgaaggccatgatataaacaaatttgcatgttgaagcctgtataaaacatggtacagtgagtgaatatacccccatccccaagaacactttatacatattaaatggatatatgattactgtgcaaaaattcattctggaaatgaacatatatttgagcactaatatgtaatgtacacctgccctaaggagaaaataaattataaaactttttacattcaaaattactttcccaagcatgtcttagaataatctatgtgttgatgcatgtaaattgtactttaggtaggcaaagaaatctggttatttatgtaaaaactagtctaataaagttagttagtggctttatcactttaaatctttagtgtccaaaagtggtgtttaaagtaatagcacatcagaaaaccttgtctggacaaaactagttcactcactgcttctgcacctgcagttgctccctttagggttataaaataatgacccaaatgttacatgtgttgatattataacttgtcagttactgatgtctgtggtatcctaccctcatctctgaaagggataatactgaataattattagaaaactataaaacttcacactttgtaccattaaaacctaaaattttaatcttgtccttttttactatggatcagtcggcactcgggaacagcagcaaggaaaaaaagcaaatttcattcacatgttctgtgttcatacctcttctctacctaattgttcatttaaatttcagccttattccttgataagggattttaccacatgaagtcatccagtgaccctagctcttattgtgaagttagtggagtatacttagaaatgttacaactttaaaatgttacaaaacattcattaaagctcatatttaaagtagagcatctagtttgagaaatagaaatcaattattaaagatgtcttttttctacccatttaactagttaaaaccatgacatgtaaatgtagaagtagaataatcatagaattccctaaaatatttctgtttactaacatatattgaccaagtacatcaagcaggagagatcttccttcattctgttatagtccacatcattctaattttgctcagttgttattaagagcatattcctaaaccatacacttttgtttcaataaagttttattttgttgagatgaataaaataacaaagttataagctgcataagacaaaagttcaattgttcaaaaaaaatttactgggatagctttctattacaggtattgttagattatattgtgctgataagattactttctaaaaaatttgtacttttctgtaaattaaaagaatatggagtcataaaatggcaagtgttttaggattagcctaaaattggacattgtcattgatttcaaagaaggtatgaactagcagtcttacagcctaattcttctttggactggtccttggcagcagttccttttcagactcgataaacagaattcagatgatgtaagtcaaaacaaaactttacaaagccaagcgtattatcttttgcattaacctatttttttccatcatacatgctactagtatgtgcattagcatgatattctcatatacattgcattaaaaattaaaaggtggcagctcagggtgagctcttctgttgctcatttgttcctaaatttttaagggctttttctcagtcaatagtttgtacaaactggttagtttaacttcattacccatttcattaaagttgatgggtcgtgtgatgagatgcatttaaggccgatagtgatagatgttttttttatttcttgaacacaggctttgtctgaatgatgttcttttatctcttgaacacaagctttgaatgataactacaggttttaagtgctgttacattaataccataatgtgatgtgttagaaacaaagggatatttcaaaggtagatatttgaaaattctctagtctcaatatgtatgtgtattgaatatactctaaaaataaatgtgcaatttgctagtaggacaatgcagtgactgactagcattaggtatgtttcttttatatcctagctatgtcccactttcttctaagtgcaatcctttcatgttcacttgctgttttaccccatctactctaacttcatttggaaggcttgtctagagtatagcatgtatttttacctttgcagtgaattgcatgtgctaattgtaaccacagctatttttatgttgacataactccaaatgttatattaaatgttctattatatattagctctaatcccttaagtaaattttaagaaataaatacttgttcaaatttt

SEQ ID NO: 355581 - DNA, 6935 bp, Homo sapiens
atctgacagtgttccggagccggccgacgggtctggcccagcctggcgcctgagtgaaacccaatggaaaaagcatgacatttagaagtagaagacttagcttcaaatccctactccttcacttactaattttgtgatttggaaatatccgcgcaagatgttgacgttgcagacttggctagtgcaagccttgtttattttcctcaccactgaatctacagggcaacacacaagtttgctgattgcaaagcaaaacgtgacacccccacctcatgcactgttgattattctactgtgtattttgtcaacattgaagtctgggtagaagcagagaatgcccttgggaaggttacatcagatcatatcaattttgatcctgtatataaagtgaagcccaatccgccacataatttatcagtgatcaactcagaggaactgtctagtatcttaaaattgacatggaccaacccaagtattaagagtgttataatactaaaatataacattcaatataggaccaaagatgcctcaacttggagccagattcctcctgaagacacagcatccacccgatcttcattcactgtccaagaccttaaaccttttacagaatatgtgtttaggattcgctgtatgaaggaagatggtaagggatactggagtgactggagtgaagaagcaagtgggatcacctatgaagatagaccatctaaagcaccaagtttctggtataaaatagatccatcccatactcaaggctacagaactgtacaactcgtgtggaagacattgcctccttttgaagccaatggaaaaatcttggattatgaagtgactctcacaagatggaaatcacatttacaaaattacacagttaatgccacaaaactgacagtaaatctcacaaatgatcgctatctagcaaccctaacagtaagaaatcttgttggcaaatcagatgcagctgttttaactatccctgcctgtgactttcaagctactcaccctgtaatggatcttaaagcattccccaaagataacatgctttgggtggaatggactactccaagggaatctgtaaagaaatatatacttgagtggtgtgtgttatcagataaagcaccctgtatcacagactggcaacaagaagatggtaccgtgcatcgcacctatttaagagggaacttagcagagagcaaatgctatttgataacagttactccagtatatgctgatggaccaggaagccctgaatccataaaggcataccttaaacaagctccaccttccaaaggacctactgttcggacaaaaaaagtagggaaaaacgaagctgtcttagagtgggaccaacttcctgttgatgttcagaatggatttatcagaaattatactatattttatagaaccatcattggaaatgaaactgctgtgaatgtggattcttcccacacagaatatacattgtcctctttgactagtgacacattgtacatggtacgaatggcagcatacacagatgaaggtgggaaggatggtccagaattcacttttactaccccaaagtttgctcaaggagaaattgaagccatagtcgtgcctgtttgcttagcattcctattgacaactcttctgggagtgctgttctgctttaataagcgagacctaattaaaaaacacatctggcctaatgttccagatccttcaaagagtcatattgcccagtggtcacctcacactcctccaaggcacaattttaattcaaaagatcaaatgtattcagatggcaatttcactgatgtaagtgttgtggaaatagaagcaaatgacaaaaagccttttccagaagatctgaaatcattggacctgttcaaaaaggaaaaaattaatactgaaggacacagcagtggtattggggggtcttcatgcatgtcatcttctaggccaagcatttctagcagtgatgaaaatgaatcttcacaaaacacttcgagcactgtccagtattctaccgtggtacacagtggctacagacaccaagttccgtcagtccaagtcttctcaagatccgagtctacccagcccttgttagattcagaggagcggccagaagatctacaattagtagatcatgtagatggcggtgatggtattttgcccaggcaacagtacttcaaacagaactgcagtcagcatgaatccagtccagatatttcacattttgaaaggtcaaagcaagtttcatcagtcaatgaggaagattttgttagacttaaacagcagatttcagatcatatttcacaatcctgtggatctgggcaaatgaaaatgtttcaggaagtttctgcagcagatgcttttggtccaggtactgagggacaagtagaaagatttgaaacagttggcatggaggctgcgactgatgaaggcatgcctaaaagttacttaccacagactgtacggcaaggcggctacatgcctcagtgaaggactagtagttcctgctacaacttcagcagtacctataaagtaaagctaaaatgattttatctgtgaattcagattttaaaaagtcttcactctctgaagatgatcatttgcccttaaggacaaaaatgaactgaagtttcacatgagctatttccattccagaatatctgggattctactttaagcactacataaactgactttatcctcagactagctgaatgattttgtgctgtttcaggatgtttgcactgaagaaaaacagaaagcttatctgaaatttataaaactttttgttttgctacatagaaaacagaaggtatttgaataataagcagtgatatgcttagtgagcacagctatactgattttgattagaatagtcatcagagtggcttagggacagttaatataaaagaggagcaaggtgtagaccatcatctacttctgctaaaataacttaaaaagaggtccataggccataactacatgagcccagcttttgtaatctgacaaaaaaatgaggagcagcttcgtgtatatcagtgtacacggtattccttaggtcccttccattggtagtgatgctgcgagttattactggagaaaaggaattctagagctttaacttggcagattaaaagtactcattttttattcatcaataattagtaatctcactagttttcaaaaatttgcatattattgacaacctctttgaagatgcatttcacaaactcaacagagtgccatgataagagctagggatcccccaaactatctcaagcatctaaaaaattgccatttttaaaggcttaaattgtagtagtaaaggggaaaacaggaagtagtagtaaaggggaaaaaaaaccaataaagcatctaaaaaattggcatgttaaaaggcttaaattgctaatgtgtgtatatatatatatatatatacacacacatatacacacacatatcattgacttttcttaagacttcagagtactgggtagatgaacactttatacagtatatatcttcagcttaaatttgttttgagtattttttttatttttaaataagtaggcaaagatttaaatttttttatttttagtaaatgtttgaggcacactaagacaacttgggcaatatttgccaaaacaaaacagaaccccaaaaaatgtacatcttgttcttagcaaatatcattattgtagagacacttaataaagagatggtattttaatgtctgcagttctgaggtagggtggaacttagttctacattgtgatttaggaatttttaaaaccttttttcttcaagggagaagtgacccaggcctcgagtttagtgctaaagccgctagtgtacttatgctgtcccctaaccaccacgtgcgatatggaagcagatgctaaatataggggttttcttagaaagtaagaggaaattagcaagcgttattagtgattgactactgctatcaagtgaattcaaaggaaacaggtttttatgccatatttaagttacagaaaccaggcatgcttagaatagtttctagaggttattggagaatagaaagctaagaaaacttggtatacatttacaatggaaatataattacactttttactctcagaatattgttcacattagacttcctgtttatcttttatattcttgcatttatataatgcctcatcctttcaaagttctttcacatattatatgatcttctttatgaaaaaaatagatgtttcattctgatatattcagtttcccactttaggcaaaagtagattaatagaatgacgaattcaaagtagatgaggaaaatcaggcacagagaagtaaaggtagggatagacccaaatttacacaacaagataatgacatctccagcttttaagttgatcatcaaaggctgggctggatttgtcttgctgtatgtgtcaggaaatttatacctattacattttccattttctcaaaatttaagtcacatgactaatatttagctgcaactttcctcataacaaatagtgtcatgaagaatgttgtagtgtgaagtttgtacatttcagggtcagatatacaatatgaactcttaatctacaggaatgagaatggaggatcattgaaggccatgatataaacaaatttgcatgttgaagcctgtataaaacatggtacagtgagtgaatatacccccatccccaagaacactttatacatattaaatggatatatgattactgtgcaaaaattcattctggaaatgaacatatatttgagcactaatatgtaatgtacacctgccctaaggagaaaataaattataaaactttttacattcaaaattactttcccaagcatgtcttagaataatctatgtgttgatgcatgtaaattgtactttaggtaggcaaagaaatctggttatttatgtaaaaactagtctaataaagttagttagtggctttatcactttaaatctttagtgtccaaaagtggtgtttaaagtaatagcacatcagaaaaccttgtctggacaaaactagttcactcactgcttctgcacctgcagttgctccctttagggttataaaataatgacccaaatgttacatgtgttgatattataacttgtcagttactgatgtctgtggtatcctaccctcatctctgaaagggataatactgaataattattagaaaactataaaacttcacactttgtaccattaaaacctaaaattttaatcttgtccttttttactatggatcagtcggcactcgggaacagcagcaaggaaaaaaagcaaatttcattcacatgttctgtgttcatacctcttctctacctaattgttcatttaaatttcagccttattccttgataagggattttaccacatgaagtcatccagtgaccctagctcttattgtgaagttagtggagtatacttagaaatgttacaactttaaaatgttacaaaacattcattaaagctcatatttaaagtagagcatctagtttgagaaatagaaatcaattattaaagatgtcttttttctacccatttaactagttaaaaccatgacatgtaaatgtagaagtagaataatcatagaattccctaaaatatttctgtttactaacatatattgaccaagtacatcaagcaggagagatcttccttcattctgttatagtccacatcattctaattttgctcagttgttattaagagcatattcctaaaccatacacttttgtttcaataaagttttattttgttgagatgaataaaataacaaagttataagctgcataagacaaaagttcaattgttcaaaaaaaatttactgggatagctttctattacaggtattgttagattatattgtgctgataagattactttctaaaaaatttgtacttttctgtaaattaaaagaatatggagtcataaaatggcaagtgttttaggattagcctaaaattggacattgtcattgatttcaaagaaggtatgaactagcagtcttacagcctaattcttctttggactggtccttggcagcagttccttttcagactcgataaacagaattcagatgatgtaagtcaaaacaaaactttacaaagccaagcgtattatcttttgcattaacctatttttttccatcatacatgctactagtatgtgcattagcatgatattctcatatacattgcattaaaaattaaaaggtggcagctcagggtgagctcttctgttgctcatttgttcctaaatttttaagggctttttctcagtcaatagtttgtacaaactggttagtttaacttcattacccatttcattaaagttgatgggtcgtgtgatgagatgcatttaaggccgatagtgatagatgttttttttatttcttgaacacaggctttgtctgaatgatgttcttttatctcttgaacacaagctttgaatgataactacaggttttaagtgctgttacattaataccataatgtgatgtgttagaaacaaagggatatttcaaaggtagatatttgaaaattctctagtctcaatatgtatgtgtattgaatatactctaaaaataaatgtgcaatttgctagtaggacaatgcagtgactgactagcattaggtatgtttcttttatatcctagctatgtcccactttcttctaagtgcaatcctttcatgttcacttgctgttttaccccatctactctaacttcatttggaaggcttgtctagagtatagcatgtatttttacctttgcagtgaattgcatgtgctaattgtaaccacagctatttttatgttgacataactccaaatgttatattaaatgttctattatatattagctctaatcccttaagtaaattttaagaaataaatacttgttcaaatttt

SEQ ID NO: 355582 - DNA, 7569 bp, Homo sapiens
ctgacagtgttccggagccggggcgagcagccaaaaggcccgcggagtcgcgctgggccgccccggcgcagctgaaccgggggccgcgcctgccaggccgacgggtctggcccagcctggcgccaaggggttcgtgcgctgtggagacgcggagggtcgaggcggcgcggcctgagtgaaacccaatggaaaaagcatgacatttagaagtagaagacttagcttcaaatccctactccttcacttactaattttgtgatttggaaatatccgcgcaagatgttgacgttgcagacttggctagtgcaagccttgtttattttcctcaccactgaatctacaggtgaacttctagatccatgtggttatatcagtcctgaatctccagttgtacaacttcattctaatttcactgcagtttgtgtgctaaaggaaaaatgtatggattattttcatgtaaatgctaattacattgtctggaaaacaaaccattttactattcctaaggagcaatatactatcataaacagaacagcatccagtgtcacctttacagatatagcttcattaaatattcagctcacttgcaacattcttacattcggacagcttgaacagaatgtttatggaatcacaataatttcaggcttgcctccagaaaaacctaaaaatttgagttgcattgtgaacgaggggaagaaaatgaggtgtgagtgggatggtggaagggaaacacacttggagacaaacttcactttaaaatctgaatgggcaacacacaagtttgctgattgcaaagcaaaacgtgacacccccacctcatgcactgttgattattctactgtgtattttgtcaacattgaagtctgggtagaagcagagaatgcccttgggaaggttacatcagatcatatcaattttgatcctgtatataaagtgaagcccaatccgccacataatttatcagtgatcaactcagaggaactgtctagtatcttaaaattgacatggaccaacccaagtattaagagtgttataatactaaaatataacattcaatataggaccaaagatgcctcaacttggagccagattcctcctgaagacacagcatccacccgatcttcattcactgtccaagaccttaaaccttttacagaatatgtgtttaggattcgctgtatgaaggaagatggtaagggatactggagtgactggagtgaagaagcaagtgggatcacctatgaagatagaccatctaaagcaccaagtttctggtataaaatagatccatcccatactcaaggctacagaactgtacaactcgtgtggaagacattgcctccttttgaagccaatggaaaaatcttggattatgaagtgactctcacaagatggaaatcacatttacaaaattacacagttaatgccacaaaactgacagtaaatctcacaaatgatcgctatctagcaaccctaacagtaagaaatcttgttggcaaatcagatgcagctgttttaactatccctgcctgtgactttcaagctactcaccctgtaatggatcttaaagcattccccaaagataacatgctttgggtggaatggactactccaagggaatctgtaaagaaatatatacttgagtggtgtgtgttatcagataaagcaccctgtatcacagactggcaacaagaagatggtaccgtgcatcgcacctatttaagagggaacttagcagagagcaaatgctatttgataacagttactccagtatatgctgatggaccaggaagccctgaatccataaaggcataccttaaacaagctccaccttccaaaggacctactgttcggacaaaaaaagtagggaaaaacgaagctgtcttagagtgggaccaacttcctgttgatgttcagaatggatttatcagaaattatactatattttatagaaccatcattggaaatgaaactgctgtgaatgtggattcttcccacacagaatatacattgtcctctttgactagtgacacattgtacatggtacgaatggcagcatacacagatgaaggtgggaaggatggtccagaattcacttttactaccccaaagtttgtctcatggatccattatggcttcttcacatggcttgagtcttgccaacgaggaccttacagcttagttgaagaaattttgcataactcaaggagaaattgaagccatagtcgtgcctgtttgcttagcattcctattgacaactcttctgggagtgctgttctgctttaataagcgagacctaattaaaaaacacatctggcctaatgttccagatccttcaaagagtcatattgcccagtggtcacctcacactcctccaaggcacaattttaattcaaaagatcaaatgtattcagatggcaatttcactgatgtaagtgttgtggaaatagaagcaaatgacaaaaagccttttccagaagatctgaaatcattggacctgttcaaaaaggaaaaaattaatactgaaggacacagcagtggtattggggggtcttcatgcatgtcatcttctaggccaagcatttctagcagtgatgaaaatgaatcttcacaaaacacttcgagcactgtccagtattctaccgtggtacacagtggctacagacaccaagttccgtcagtccaagtcttctcaagatccgagtctacccagcccttgttagattcagaggagcggccagaagatctacaattagtagatcatgtagatggcggtgatggtattttgcccaggcaacagtacttcaaacagaactgcagtcagcatgaatccagtccagatatttcacattttgaaaggtcaaagcaagtttcatcagtcaatgaggaagattttgttagacttaaacagcagatttcagatcatatttcacaatcctgtggatctgggcaaatgaaaatgtttcaggaagtttctgcagcagatgcttttggtccaggtactgagggacaagtagaaagatttgaaacagttggcatggaggctgcgactgatgaaggcatgcctaaaagttacttaccacagactgtacggcaaggcggctacatgcctcagtgaaggactagtagttcctgctacaacttcagcagtacctataaagtaaagctaaaatgattttatctgtgaattcagattttaaaaagtcttcactctctgaagatgatcatttgcccttaaggacaaaaatgaactgaagtttcacatgagctatttccattccagaatatctgggattctactttaagcactacataaactgactttatcctcagactagctgaatgattttgtgctgtttcaggatgtttgcactgaagaaaaacagaaagcttatctgaaatttataaaactttttgttttgctacatagaaaacagaaggtatttgaataataagcagtgatatgcttagtgagcacagctatactgattttgattagaatagtcatcagagtggcttagggacagttaatataaaagaggagcaaggtgtagaccatcatctacttctgctaaaataacttaaaaagaggtccataggccataactacatgagcccagcttttgtaatctgacaaaaaaatgaggagcagcttcgtgtatatcagtgtacacggtattccttaggtcccttccattggtagtgatgctgcgagttattactggagaaaaggaattctagagctttaacttggcagattaaaagtactcattttttattcatcaataattagtaatctcactagttttcaaaaatttgcatattattgacaacctctttgaagatgcatttcacaaactcaacagagtgccatgataagagctagggatcccccaaactatctcaagcatctaaaaaattgccatttttaaaggcttaaattgtagtagtaaaggggaaaacaggaagtagtagtaaaggggaaaaaaaaccaataaagcatctaaaaaattggcatgttaaaaggcttaaattgctaatgtgtgtatatatatatatatatatacacacacatatacacacacatatcattgacttttcttaagacttcagagtactgggtagatgaacactttatacagtatatatcttcagcttaaatttgttttgagtattttttttatttttaaataagtaggcaaagatttaaatttttttatttttagtaaatgtttgaggcacactaagacaacttgggcaatatttgccaaaacaaaacagaaccccaaaaaatgtacatcttgttcttagcaaatatcattattgtagagacacttaataaagagatggtattttaatgtctgcagttctgaggtagggtggaacttagttctacattgtgatttaggaatttttaaaaccttttttcttcaagggagaagtgacccaggcctcgagtttagtgctaaagccgctagtgtacttatgctgtcccctaaccaccacgtgcgatatggaagcagatgctaaatataggggttttcttagaaagtaagaggaaattagcaagcgttattagtgattgactactgctatcaagtgaattcaaaggaaacaggtttttatgccatatttaagttacagaaaccaggcatgcttagaatagtttctagaggttattggagaatagaaagctaagaaaacttggtatacatttacaatggaaatataattacactttttactctcagaatattgttcacattagacttcctgtttatcttttatattcttgcatttatataatgcctcatcctttcaaagttctttcacatattatatgatcttctttatgaaaaaaatagatgtttcattctgatatattcagtttcccactttaggcaaaagtagattaatagaatgacgaattcaaagtagatgaggaaaatcaggcacagagaagtaaaggtagggatagacccaaatttacacaacaagataatgacatctccagcttttaagttgatcatcaaaggctgggctggatttgtcttgctgtatgtgtcaggaaatttatacctattacattttccattttctcaaaatttaagtcacatgactaatatttagctgcaactttcctcataacaaatagtgtcatgaagaatgttgtagtgtgaagtttgtacatttcagggtcagatatacaatatgaactcttaatctacaggaatgagaatggaggatcattgaaggccatgatataaacaaatttgcatgttgaagcctgtataaaacatggtacagtgagtgaatatacccccatccccaagaacactttatacatattaaatggatatatgattactgtgcaaaaattcattctggaaatgaacatatatttgagcactaatatgtaatgtacacctgccctaaggagaaaataaattataaaactttttacattcaaaattactttcccaagcatgtcttagaataatctatgtgttgatgcatgtaaattgtactttaggtaggcaaagaaatctggttatttatgtaaaaactagtctaataaagttagttagtggctttatcactttaaatctttagtgtccaaaagtggtgtttaaagtaatagcacatcagaaaaccttgtctggacaaaactagttcactcactgcttctgcacctgcagttgctccctttagggttataaaataatgacccaaatgttacatgtgttgatattataacttgtcagttactgatgtctgtggtatcctaccctcatctctgaaagggataatactgaataattattagaaaactataaaacttcacactttgtaccattaaaacctaaaattttaatcttgtccttttttactatggatcagtcggcactcgggaacagcagcaaggaaaaaaagcaaatttcattcacatgttctgtgttcatacctcttctctacctaattgttcatttaaatttcagccttattccttgataagggattttaccacatgaagtcatccagtgaccctagctcttattgtgaagttagtggagtatacttagaaatgttacaactttaaaatgttacaaaacattcattaaagctcatatttaaagtagagcatctagtttgagaaatagaaatcaattattaaagatgtcttttttctacccatttaactagttaaaaccatgacatgtaaatgtagaagtagaataatcatagaattccctaaaatatttctgtttactaacatatattgaccaagtacatcaagcaggagagatcttccttcattctgttatagtccacatcattctaattttgctcagttgttattaagagcatattcctaaaccatacacttttgtttcaataaagttttattttgttgagatgaataaaataacaaagttataagctgcataagacaaaagttcaattgttcaaaaaaaatttactgggatagctttctattacaggtattgttagattatattgtgctgataagattactttctaaaaaatttgtacttttctgtaaattaaaagaatatggagtcataaaatggcaagtgttttaggattagcctaaaattggacattgtcattgatttcaaagaaggtatgaactagcagtcttacagcctaattcttctttggactggtccttggcagcagttccttttcagactcgataaacagaattcagatgatgtaagtcaaaacaaaactttacaaagccaagcgtattatcttttgcattaacctatttttttccatcatacatgctactagtatgtgcattagcatgatattctcatatacattgcattaaaaattaaaaggtggcagctcagggtgagctcttctgttgctcatttgttcctaaatttttaagggctttttctcagtcaatagtttgtacaaactggttagtttaacttcattacccatttcattaaagttgatgggtcgtgtgatgagatgcatttaaggccgatagtgatagatgttttttttatttcttgaacacaggctttgtctgaatgatgttcttttatctcttgaacacaagctttgaatgataactacaggttttaagtgctgttacattaataccataatgtgatgtgttagaaacaaagggatatttcaaaggtagatatttgaaaattctctagtctcaatatgtatgtgtattgaatatactctaaaaataaatgtgcaatttgctagtaggacaatgcagtgactgactagcattaggtatgtttcttttatatcctagctatgtcccactttcttctaagtgcaatcctttcatgttcacttgctgttttaccccatctactctaacttcatttggaaggcttgtctagagtatagcatgtatttttacctttgcagtgaattgcatgtgctaattgtaaccacagctatttttatgttgacataactccaaatgttatattaaatgttctattatatattagctctaatcccttaagtaaattttaagaaataaatacttgttcaaatttt

SEQ ID NO: 355583 - DNA, 5291 bp, Homo sapiens
agttggaacgccggcaggtcccggtccggaaattccggggcaccatactactaataaattcgcggccgcgtcgacgcccagtggtcacctcacactcctccaaggcacaattttaattcaaaagatcaaatgtattcagatggcaatttcactgatgtaagtgttgtggaaatagaagcaaatgacaaaaagccttttccagaagatctgaaatcattggacctgttcaaaaaggaaaaaattaatactgaaggacacagcagtggtattggggggtcttcatgcatgtcatcttctaggccaagcatttctagcagtgatgaaaatgaatcttcacaaaacacttcgagcactgtccagtattctaccgtggtacacagtggctacagacaccaagttccgtcagtccaagtcttctcaagatccgagtctacccagcccttgttagattcagaggagcggccagaagatctacaattagtagatcatgtagatggcggtgatggtattttgcccaggcaacagtacttcaaacagaactgcagtcagcatgaatccagtccagatatttcacattttgaaaggtcaaagcaagtttcatcagtcaatgaggaagattttgttagacttaaacagcagatttcagatcatatttcacaatcctgtggatctgggcaaatgaaaatgtttcaggaagtttctgcagcagatgcttttggtccaggtactgagggacaagtagaaagatttgaaacagttggcatggaggctgcgactgatgaaggcatgcctaaaagttacttaccacagactgtacggcaaggcggctacatgcctcagtgaaggactagtagttcctgctacaacttcagcagtacctataaagtaaagctaaaatgattttatctgtgaattcagattttaaaaagtcttcactctctgaagatgatcatttgcccttaaggacaaaaatgaactgaagtttcacatgagctatttccattccagaatatctgggattctactttaagcactacataaactgactttatcctcagactagctgaatgattttgtgctgtttcaggatgtttgcactgaagaaaaacagaaagcttatctgaaatttataaaactttttgttttgctacatagaaaacagaaggtatttgaataataagcagtgatatgcttagtgagcacagctatactgattttgattagaatagtcatcagagtggcttagggacagttaatataaaagaggagcaaggtgtagaccatcatctacttctgctaaaataacttaaaaagaggtccataggccataactacatgagcccagcttttgtaatctgacaaaaaaatgaggagcagcttcgtgtatatcagtgtacacggtattccttaggtcccttccattggtagtgatgctgcgagttattactggagaaaaggaattctagagctttaacttggcagattaaaagtactcattttttattcatcaataattagtaatctcactagttttcaaaaatttgcatattattgacaacctctttgaagatgcatttcacaaactcaacagagtgccatgataagagctagggatcccccaaactatctcaagcatctaaaaaattgccatttttaaaggcttaaattgtagtagtaaaggggaaaacaggaagtagtagtaaaggggaaaaaaaaccaataaagcatctaaaaaattggcatgttaaaaggcttaaattgctaatgtgtgtatatatatatatatatatacacacacatatacacacacatatcattgacttttcttaagacttcagagtactgggtagatgaacactttatacagtatatatcttcagcttaaatttgttttgagtattttttttatttttaaataagtaggcaaagatttaaatttttttatttttagtaaatgtttgaggcacactaagacaacttgggcaatatttgccaaaacaaaacagaaccccaaaaaatgtacatcttgttcttagcaaatatcattattgtagagacacttaataaagagatggtattttaatgtctgcagttctgaggtagggtggaacttagttctacattgtgatttaggaatttttaaaaccttttttcttcaagggagaagtgacccaggcctcgagtttagtgctaaagccgctagtgtacttatgctgtcccctaaccaccacgtgcgatatggaagcagatgctaaatataggggttttcttagaaagtaagaggaaattagcaagcgttattagtgattgactactgctatcaagtgaattcaaaggaaacaggtttttatgccatatttaagttacagaaaccaggcatgcttagaatagtttctagaggttattggagaatagaaagctaagaaaacttggtatacatttacaatggaaatataattacactttttactctcagaatattgttcacattagacttcctgtttatcttttatattcttgcatttatataatgcctcatcctttcaaagttctttcacatattatatgatcttctttatgaaaaaaatagatgtttcattctgatatattcagtttcccactttaggcaaaagtagattaatagaatgacgaattcaaagtagatgaggaaaatcaggcacagagaagtaaaggtagggatagacccaaatttacacaacaagataatgacatctccagcttttaagttgatcatcaaaggctgggctggatttgtcttgctgtatgtgtcaggaaatttatacctattacattttccattttctcaaaatttaagtcacatgactaatatttagctgcaactttcctcataacaaatagtgtcatgaagaatgttgtagtgtgaagtttgtacatttcagggtcagatatacaatatgaactcttaatctacaggaatgagaatggaggatcattgaaggccatgatataaacaaatttgcatgttgaagcctgtataaaacatggtacagtgagtgaatatacccccatccccaagaacactttatacatattaaatggatatatgattactgtgcaaaaattcattctggaaatgaacatatatttgagcactaatatgtaatgtacacctgccctaaggagaaaataaattataaaactttttacattcaaaattactttcccaagcatgtcttagaataatctatgtgttgatgcatgtaaattgtactttaggtaggcaaagaaatctggttatttatgtaaaaactagtctaataaagttagttagtggctttatcactttaaatctttagtgtccaaaagtggtgtttaaagtaatagcacatcagaaaaccttgtctggacaaaactagttcactcactgcttctgcacctgcagttgctccctttagggttataaaataatgacccaaatgttacatgtgttgatattataacttgtcagttactgatgtctgtggtatcctaccctcatctctgaaagggataatactgaataattattagaaaactataaaacttcacactttgtaccattaaaacctaaaattttaatcttgtccttttttactatggatcagtcggcactcgggaacagcagcaaggaaaaaaagcaaatttcattcacatgttctgtgttcatacctcttctctacctaattgttcatttaaatttcagccttattccttgataagggattttaccacatgaagtcatccagtgaccctagctcttattgtgaagttagtggagtatacttagaaatgttacaactttaaaatgttacaaaacattcattaaagctcatatttaaagtagagcatctagtttgagaaatagaaatcaattattaaagatgtcttttttctacccatttaactagttaaaaccatgacatgtaaatgtagaagtagaataatcatagaattccctaaaatatttctgtttactaacatatattgaccaagtacatcaagcaggagagatcttccttcattctgttatagtccacatcattctaattttgctcagttgttattaagagcatattcctaaaccatacacttttgtttcaataaagttttattttgttgagatgaataaaataacaaagttataagctgcataagacaaaagttcaattgttcaaaaaaaatttactgggatagctttctattacaggtattgttagattatattgtgctgataagattactttctaaaaaatttgtacttttctgtaaattaaaagaatatggagtcataaaatggcaagtgttttaggattagcctaaaattggacattgtcattgatttcaaagaaggtatgaactagcagtcttacagcctaattcttctttggactggtccttggcagcagttccttttcagactcgataaacagaattcagatgatgtaagtcaaaacaaaactttacaaagccaagcgtattatcttttgcattaacctatttttttccatcatacatgctactagtatgtgcattagcatgatattctcatatacattgcattaaaaattaaaaggtggcagctcagggtgagctcttctgttgctcatttgttcctaaatttttaagggctttttctcagtcaatagtttgtacaaactggttagtttaacttcattacccatttcattaaagttgatgggtcgtgtgatgagatgcatttaaggccgatagtgatagatgttttttttatttcttgaacacaggctttgtctgaatgatgttcttttatctcttgaacacaagctttgaatgataactacaggttttaagtgctgttacattaataccataatgtgatgtgttagaaacaaagggatatttcaaaggtagatatttgaaaattctctagtctcaatatgtatgtgtattgaatatactctaaaaataaatgtgcaatttgctagtaggacaatgcagtgactgactagcattaggtatgtttcttttatatcctagctatgtcccactttcttctaagtgcaatcctttcatgttcacttgctgttttaccccatctactctaacttcatttggaaggcttgtctagagtatagcatgtatttttacctttgcagtgaattgcatgtgctaattgtaaccacagctatttttatgttgacataactccaaatgttatattaaatgttctattatatattagctctaatcccttaagtaaattttaagaaataaatacttgttcaaatttt

SEQ ID NO: 355584 - DNA, 3068 bp, Homo sapiens
ggaaactgaatatatcagaatgaaacatctatttttttcataaagaagatcatataatatgtgaaagaactttgaaaggatgaggcattatataaatgcaagaatataaaagagaaacaggtttttatgccatatttaagttacagaaaccaggcatgcttagaatagtttctagaggttattggagaatagaaagctaagaaaacttggtatacatttacaatggaaatataattacactttttactctcagaatattgttcacattagacttcctgtttatcttttatattcttgcatttatataatgcctcatcctttcaaagttctttcacatattatatgatcttctttatgaaaaaaatagatgtttcattctgatatattcagtttcccactttaggcaaaagtagattaatagaatgacgaattcaaagtagatgaggaaaatcaggcacagagaagtaaaggtagggatagacccaaatttacacaacaagataatgacatctccagcttttaagttgatcatcaaaggctgggctggatttgtcttgctgtatgtgtcaggaaatttatacctattacattttccattttctcaaaatttaagtcacatgactaatatttagctgcaactttcctcataacaaatagtgtcatgaagaatgttgtagtgtgaagtttgtacatttcagggtcagatatacaatatgaactcttaatctacaggaatgagaatggaggatcattgaaggccatgatataaacaaatttgcatgttgaagcctgtataaaacatggtacagtgagtgaatatacccccatccccaagaacactttatacatattaaatggatatatgattactgtgcaaaaattcattctggaaatgaacatatatttgagcactaatatgtaatgtacacctgccctaaggagaaaataaattataaaactttttacattcaaaattactttcccaagcatgtcttagaataatctatgtgttgatgcatgtaaattgtactttaggtaggcaaagaaatctggttatttatgtaaaaactagtctaataaagttagttagtggctttatcactttaaatctttagtgtccaaaagtggtgtttaaagtaatagcacatcagaaaaccttgtctggacaaaactagttcactcactgcttctgcacctgcagttgctccctttagggttataaaataatgacccaaatgttacatgtgttgatattataacttgtcagttactgatgtctgtggtatcctaccctcatctctgaaagggataatactgaataattattagaaaactataaaacttcacactttgtaccattaaaacctaaaattttaatcttgtccttttttactatggatcagtcggcactcgggaacagcagcaaggaaaaaaagcaaatttcattcacatgttctgtgttcatacctcttctctacctaattgttcatttaaatttcagccttattccttgataagggattttaccacatgaagtcatccagtgaccctagctcttattgtgaagttagtggagtatacttagaaatgttacaactttaaaatgttacaaaacattcattaaagctcatatttaaagtagagcatctagtttgagaaatagaaatcaattattaaagatgtcttttttctacccatttaactagttaaaaccatgacatgtaaatgtagaagtagaataatcatagaattccctaaaatatttctgtttactaacatatattgaccaagtacatcaagcaggagagatcttccttcattctgttatagtccacatcattctaattttgctcagttgttattaagagcatattcctaaaccatacacttttgtttcaataaagttttattttgttgagatgaataaaataacaaagttataagctgcataagacaaaagttcaattgttcaaaaaaaatttactgggatagctttctattacaggtattgttagattatattgtgctgataagattactttctaaaaaatttgtacttttctgtaaattaaaagaatatggagtcataaaatggcaagtgttttaggattagcctaaaattggacattgtcattgatttcaaagaaggtatgaactagcagtcttacagcctaattcttctttggactggtccttggcagcagttccttttcagactcgataaacagaattcagatgatgtaagtcaaaacaaaactttacaaagccaagcgtattatcttttgcattaacctatttttttccatcatacatgctactagtatgtgcattagcatgatattctcatatacattgcattaaaaattaaaaggtggcagctcagggtgagctcttctgttgctcatttgttcctaaatttttaagggctttttctcagtcaatagtttgtacaaactggttagtttaacttcattacccatttcattaaagttgatgggtcgtgtgatgagatgcatttaaggccgatagtgatagatgttttttttatttcttgaacacaggctttgtctgaatgatgttcttttatctcttgaacacaagctttgaatgataactacaggttttaagtgctgttacattaataccataatgtgatgtgttagaaacaaagggatatttcaaaggtagatatttgaaaattctctagtctcaatatgtatgtgtattgaatatactctaaaaataaatgtgcaatttgctagtaggacaatgcagtgactgactagcattaggtatgtttcttttatatcctagctatgtcccactttcttctaagtgcaatcctttcatgttcacttgctgttttaccccatctactctaacttcatttggaaggcttgtctagagtatagcatgtatttttacctttgcagtgaattgcatgtgctaattgtaaccacagctatttttatgttgacataactccaaatgttatattaaatgttctattatatattagctctaatcccttaagtaaattttaagaaataaatacttgttcaaatttt

SEQ ID NO: 355585 - DNA, 7430 bp, Homo sapiens
ctgacagtgttccggagccggggcgagcagccaaaaggcccgcggagtcgcgctgggccgccccggcgcagctgaaccgggggccgcgcctgccaggccgacgggtctggcccagcctggcgccaaggggttcgtgcgctgtggagacgcggagggtcgaggcggcgcggcctgagtgaaacccaatggaaaaagcatgacatttagaagtagaagacttagcttcaaatccctactccttcacttactaattttgtgatttggaaatatccgcgcaagatgttgacgttgcagacttggctagtgcaagccttgtttattttcctcaccactgaatctacaggtgaacttctagatccatgtggttatatcagtcctgaatctccagttgtacaacttcattctaatttcactgcagtttgtgtgctaaaggaaaaatgtatggattattttcatgtaaatgctaattacattgtctggaaaacaaaccattttactattcctaaggagcaatatactatcataaacagaacagcatccagtgtcacctttacagatatagcttcattaaatattcagctcacttgcaacattcttacattcggacagcttgaacagaatgtttatggaatcacaataatttcaggcttgcctccagaaaaacctaaaaatttgagttgcattgtgaacgaggggaagaaaatgaggtgtgagtgggatggtggaagggaaacacacttggagacaaacttcactttaaaatctgaatgggcaacacacaagtttgctgattgcaaagcaaaacgtgacacccccacctcatgcactgttgattattctactgtgtattttgtcaacattgaagtctgggtagaagcagagaatgcccttgggaaggttacatcagatcatatcaattttgatcctgtatataaagtgaagcccaatccgccacataatttatcagtgatcaactcagaggaactgtctagtatcttaaaattgacatggaccaacccaagtattaagagtgttataatactaaaatataacattcaatataggaccaaagatgcctcaacttggagccagattcctcctgaagacacagcatccacccgatcttcattcactgtccaagaccttaaaccttttacagaatatgtgtttaggattcgctgtatgaaggaagatggtaagggatactggagtgactggagtgaagaagcaagtgggatcacctatgaagatagaccatctaaagcaccaagtttctggtataaaatagatccatcccatactcaaggctacagaactgtacaactcgtgtggaagacattgcctccttttgaagccaatggaaaaatcttggattatgaagtgactctcacaagatggaaatcacatttacaaaattacacagttaatgccacaaaactgacagtaaatctcacaaatgatcgctatctagcaaccctaacagtaagaaatcttgttggcaaatcagatgcagctgttttaactatccctgcctgtgactttcaagctactcaccctgtaatggatcttaaagcattccccaaagataacatgctttgggtggaatggactactccaagggaatctgtaaagaaatatatacttgagtggtgtgtgttatcagataaagcaccctgtatcacagactggcaacaagaagatggtaccgtgcatcgcacctatttaagagggaacttagcagagagcaaatgctatttgataacagttactccagtatatgctgatggaccaggaagccctgaatccataaaggcataccttaaacaagctccaccttccaaaggacctactgttcggacaaaaaaagtagggaaaaacgaagctgtcttagagtgggaccaacttcctgttgatgttcagaatggatttatcagaaattatactatattttatagaaccatcattggaaatgaaactgctgtgaatgtggattcttcccacacagaatatacattgtcctctttgactagtgacacattgtacatggtacgaatggcagcatacacagatgaaggtgggaaggatggtccagaattcacttttactaccccaaagtttgctcaaggagaaattgaagccatagtcgtgcctgtttgcttagcattcctattgacaactcttctgggagtgctgttctgctttaataagcgagacctaattaaaaaacacatctggcctaatgttccagatccttcaaagagtcatattgcccagtggtcacctcacactcctccaaggcacaattttaattcaaaagatcaaatgtattcagatggcaatttcactgatgtaagtgttgtggaaatagaagcaaatgacaaaaagccttttccagaagatctgaaatcattggacctgttcaaaaaggaaaaaattaatactgaaggacacagcagtggtattggggggtcttcatgcatgtcatcttctaggccaagcatttctagcagtgatgaaaatgaatcttcacaaaacacttcgagcactgtccagtattctaccgtggtacacagtggctacagacaccaagttccgtcagtccaagtcttctcaagatccgagtctacccagcccttgttagattcagaggagcggccagaagatctacaattagtagatcatgtagatggcggtgatggtattttgcccaggcaacagtacttcaaacagaactgcagtcagcatgaatccagtccagatatttcacattttgaaaggtcaaagcaagtttcatcagtcaatgaggaagattttgttagacttaaacagcagatttcagatcatatttcacaatcctgtggatctgggcaaatgaaaatgtttcaggaagtttctgcagcagatgcttttggtccaggtactgagggacaagtagaaagatttgaaacagttggcatggaggctgcgactgatgaaggcatgcctaaaagttacttaccacagactgtacggcaaggcggctacatgcctcagtgaaggactagtagttcctgctacaacttcagcagtacctataaagtaaagctaaaatgattttatctgtgaattcagattttaaaaagtcttcactctctgaagatgatcatttgcccttaaggacaaaaatgaactgaagtttcacatgagctatttccattccagaatatctgggattctactttaagcactacataaactgactttatcctcagactagctgaatgattttgtgctgtttcaggatgtttgcactgaagaaaaacagaaagcttatctgaaatttataaaactttttgttttgctacatagaaaacagaaggtatttgaataataagcagtgatatgcttagtgagcacagctatactgattttgattagaatagtcatcagagtggcttagggacagttaatataaaagaggagcaaggtgtagaccatcatctacttctgctaaaataacttaaaaagaggtccataggccataactacatgagcccagcttttgtaatctgacaaaaaaatgaggagcagcttcgtgtatatcagtgtacacggtattccttaggtcccttccattggtagtgatgctgcgagttattactggagaaaaggaattctagagctttaacttggcagattaaaagtactcattttttattcatcaataattagtaatctcactagttttcaaaaatttgcatattattgacaacctctttgaagatgcatttcacaaactcaacagagtgccatgataagagctagggatcccccaaactatctcaagcatctaaaaaattgccatttttaaaggcttaaattgtagtagtaaaggggaaaacaggaagtagtagtaaaggggaaaaaaaaccaataaagcatctaaaaaattggcatgttaaaaggcttaaattgctaatgtgtgtatatatatatatatatatacacacacatatacacacacatatcattgacttttcttaagacttcagagtactgggtagatgaacactttatacagtatatatcttcagcttaaatttgttttgagtattttttttatttttaaataagtaggcaaagatttaaatttttttatttttagtaaatgtttgaggcacactaagacaacttgggcaatatttgccaaaacaaaacagaaccccaaaaaatgtacatcttgttcttagcaaatatcattattgtagagacacttaataaagagatggtattttaatgtctgcagttctgaggtagggtggaacttagttctacattgtgatttaggaatttttaaaaccttttttcttcaagggagaagtgacccaggcctcgagtttagtgctaaagccgctagtgtacttatgctgtcccctaaccaccacgtgcgatatggaagcagatgctaaatataggggttttcttagaaagtaagaggaaattagcaagcgttattagtgattgactactgctatcaagtgaattcaaaggaaacaggtttttatgccatatttaagttacagaaaccaggcatgcttagaatagtttctagaggttattggagaatagaaagctaagaaaacttggtatacatttacaatggaaatataattacactttttactctcagaatattgttcacattagacttcctgtttatcttttatattcttgcatttatataatgcctcatcctttcaaagttctttcacatattatatgatcttctttatgaaaaaaatagatgtttcattctgatatattcagtttcccactttaggcaaaagtagattaatagaatgacgaattcaaagtagatgaggaaaatcaggcacagagaagtaaaggtagggatagacccaaatttacacaacaagataatgacatctccagcttttaagttgatcatcaaaggctgggctggatttgtcttgctgtatgtgtcaggaaatttatacctattacattttccattttctcaaaatttaagtcacatgactaatatttagctgcaactttcctcataacaaatagtgtcatgaagaatgttgtagtgtgaagtttgtacatttcagggtcagatatacaatatgaactcttaatctacaggaatgagaatggaggatcattgaaggccatgatataaacaaatttgcatgttgaagcctgtataaaacatggtacagtgagtgaatatacccccatccccaagaacactttatacatattaaatggatatatgattactgtgcaaaaattcattctggaaatgaacatatatttgagcactaatatgtaatgtacacctgccctaaggagaaaataaattataaaactttttacattcaaaattactttcccaagcatgtcttagaataatctatgtgttgatgcatgtaaattgtactttaggtaggcaaagaaatctggttatttatgtaaaaactagtctaataaagttagttagtggctttatcactttaaatctttagtgtccaaaagtggtgtttaaagtaatagcacatcagaaaaccttgtctggacaaaactagttcactcactgcttctgcacctgcagttgctccctttagggttataaaataatgacccaaatgttacatgtgttgatattataacttgtcagttactgatgtctgtggtatcctaccctcatctctgaaagggataatactgaataattattagaaaactataaaacttcacactttgtaccattaaaacctaaaattttaatcttgtccttttttactatggatcagtcggcactcgggaacagcagcaaggaaaaaaagcaaatttcattcacatgttctgtgttcatacctcttctctacctaattgttcatttaaatttcagccttattccttgataagggattttaccacatgaagtcatccagtgaccctagctcttattgtgaagttagtggagtatacttagaaatgttacaactttaaaatgttacaaaacattcattaaagctcatatttaaagtagagcatctagtttgagaaatagaaatcaattattaaagatgtcttttttctacccatttaactagttaaaaccatgacatgtaaatgtagaagtagaataatcatagaattccctaaaatatttctgtttactaacatatattgaccaagtacatcaagcaggagagatcttccttcattctgttatagtccacatcattctaattttgctcagttgttattaagagcatattcctaaaccatacacttttgtttcaataaagttttattttgttgagatgaataaaataacaaagttataagctgcataagacaaaagttcaattgttcaaaaaaaatttactgggatagctttctattacaggtattgttagattatattgtgctgataagattactttctaaaaaatttgtacttttctgtaaattaaaagaatatggagtcataaaatggcaagtgttttaggattagcctaaaattggacattgtcattgatttcaaagaaggtatgaactagcagtcttacagcctaattcttctttggactggtccttggcagcagttccttttcagactcgataaacagaattcagatgatgtaagtcaaaacaaaactttacaaagccaagcgtattatcttttgcattaacctatttttttccatcatacatgctactagtatgtgcattagcatgatattctcatatacattgcattaaaaattaaaaggtggcagctcagggtgagctcttctgttgctcatttgttcctaaatttttaagggctttttctcagtcaatagtttgtacaaactggttagtttaacttcattacccatttcattaaagttgatgggtcgtgtgatgagatgcatttaaggccgatagtgatagatgttttttttatttcttgaacacaggctttgtctgaatgatgttcttttatctcttgaacacaagctttgaatgataactacaggttttaagtgctgttacattaataccataatgtgatgtgttagaaacaaagggatatttcaaaggtagatatttgtgcaatttgctagtaggacaatgcagtgactgactagcattaggtatgtttcttttatatcctagctatgtcccactttcttctaagtgcaatcctttcatgttcacttgctgttttaccccatctactctaacttcatttggaaggcttgtctagagtatagcatgtatttttacctttgcagtgaattgcatgtgctaattgtaaccacagctatttttatgttgacataactccaaatgttatattaaatgttctattatatattagctctaatcccttaagtaaattttaagaaataaatacttgttcaaatttt

SEQ ID NO: 355586 - DNA, 2336 bp, Homo sapiens
ggtactgttacgtgcttgagggccatttttggcttaggctgaggttgttaggttttcactgttaatgagaacccaagttagattgtcccaatgagagatttaaatctctcattgcatattaaatggatatatgattactgtgcaaaaattcattctggaaatgaacatatatttgagcactaatatgtaatgtacacctgccctaaggagaaaataaattataaaactttttacattcaaaattactttcccaagcatgtcttagaataatctatgtgttgatgcatgtaaattgtactttaggtaggcaaagaaatctggttatttatgtaaaaactagtctaataaagttagttagtggctttatcactttaaatctttagtgtccaaaagtggtgtttaaagtaatagcacatcagaaaaccttgtctggacaaaactagttcactcactgcttctgcacctgcagttgctccctttagggttataaaataatgacccaaatgttacatgtgttgatattataacttgtcagttactgatgtctgtggtatcctaccctcatctctgaaagggataatactgaataattattagaaaactataaaacttcacactttgtaccattaaaacctaaaattttaatcttgtccttttttactatggatcagtcggcactcgggaacagcagcaaggaaaaaaagcaaatttcattcacatgttctgtgttcatacctcttctctacctaattgttcatttaaatttcagccttattccttgataagggattttaccacatgaagtcatccagtgaccctagctcttattgtgaagttagtggagtatacttagaaatgttacaactttaaaatgttacaaaacattcattaaagctcatatttaaagtagagcatctagtttgagaaatagaaatcaattattaaagatgtcttttttctacccatttaactagttaaaaccatgacatgtaaatgtagaagtagaataatcatagaattccctaaaatatttctgtttactaacatatattgaccaagtacatcaagcaggagagatcttccttcattctgttatagtccacatcattctaattttgctcagttgttattaagagcatattcctaaaccatacacttttgtttcaataaagttttattttgttgagatgaataaaataacaaagttataagctgcataagacaaaagttcaattgttcaaaaaaaatttactgggatagctttctattacaggtattgttagattatattgtgctgataagattactttctaaaaaatttgtacttttctgtaaattaaaagaatatggagtcataaaatggcaagtgttttaggattagcctaaaattggacattgtcattgatttcaaagaaggtatgaactagcagtcttacagcctaattcttctttggactggtccttggcagcagttccttttcagactcgataaacagaattcagatgatgtaagtcaaaacaaaactttacaaagccaagcgtattatcttttgcattaacctatttttttccatcatacatgctactagtatgtgcattagcatgatattctcatatacattgcattaaaaattaaaaggtggcagctcagggtgagctcttctgttgctcatttgttcctaaatttttaagggctttttctcagtcaatagtttgtacaaactggttagtttaacttcattacccatttcattaaagttgatgggtcgtgtgatgagatgcatttaaggccgatagtgatagatgttttttttatttcttgaacacaggctttgtctgaatgatgttcttttatctcttgaacacaagctttgaatgataactacaggttttaagtgctgttacattaataccataatgtgatgtgttagaaacaaagggatatttcaaaggtagatatttgaaaattctctagtctcaatatgtatgtgtattgaatatactctaaaaataaatgtgcaatttgctagtaggacaatgcagtgactgactagcattaggtatgtttcttttatatcctagctatgtcccactttcttctaagtgcaatcctttcatgttcacttgctgttttaccccatctactctaacttcatttggaaggcttgtctagagtatagcatgtatttttacctttgcagtgaattgcatgtgctaattgtaaccacagctatttttatgttgacataactccaaatgttatattaaatgttctattatatattagctctaatcccttaagtaaattttaagaaataaatacttgttcaaatttt

SEQ ID NO: 355587 - DNA, 7047 bp, Homo sapiens
  misc_feature (7036)..(7036): n is a, c, g, or t
ctgacagtgttccggagccggggcgagcagccaaaaggcccgcggagtcgcgctgggccgccccggcgcagctgaaccgggggccgcgcctgccaggccgacgggtctggcccagcctggcgccaaggggttcgtgcgctgtggagacgcggagggtcgaggcggcgcggcctgagtgaaacccaatggaaaaagcatgacatttagaagtagaagacttagcttcaaatccctactccttcacttactaattttgtgatttggaaatatccgcgcaagatgttgacgttgcagacttggctagtgcaagccttgtttattttcctcaccactgaatctacaggtgaacttctagatccatgtggttatatcagtcctgaatctccagttgtacaacttcattctaatttcactgcagtttgtgtgctaaaggaaaaatgtatggattattttcatgtaaatgctaattacattgtctggaaaacaaaccattttactattcctaaggagcaatatactatcataaacagaacagcatccagtgtcacctttacagatatagcttcattaaatattcagctcacttgcaacattcttacattcggacagcttgaacagaatgtttatggaatcacaataatttcaggcttgcctccagaaaaacctaaaaatttgagttgcattgtgaacgaggggaagaaaatgaggtgtgagtgggatggtggaagggaaacacacttggagacaaacttcactttaaaatctgaatgggcaacacacaagtttgctgattgcaaagcaaaacgtgacacccccacctcatgcactgttgattattctactgtgtattttgtcaacattgaagtctgggtagaagcagagaatgcccttgggaaggttacatcagatcatatcaattttgatcctgtatataaagtgaagcccaatccgccacataatttatcagtgatcaactcagaggaactgtctagtatcttaaaattgacatggaccaacccaagtattaagagtgttataatactaaaatataacattcaatataggaccaaagatgcctcaacttggagccagattcctcctgaagacacagcatccacccgatcttcattcactgtccaagaccttaaaccttttacagaatatgtgtttaggattcgctgtatgaaggaagatggtaagggatactggagtgactggagtgaagaagcaagtgggatcacctatgaagatagaccatctaaagcaccaagtttctggtataaaatagatccatcccatactcaaggctacagaactgtacaactcgtgtggaagacattgcctccttttgaagccaatggaaaaatcttggattatgaagtgactctcacaagatggaaatcacatttacaaaattacacagttaatgccacaaaactgacagtaaatctcacaaatgatcgctatctagcaaccctaacagtaagaaatcttgttggcaaatcagatgcagctgttttaactatccctgcctgtgactttcaagctactcaccctgtaatggatcttaaagcattccccaaagataacatgctttgggtggaatggactactccaagggaatctgtaaagaaatatatacttgagtggtgtgtgttatcagataaagcaccctgtatcacagactggcaacaagaagatggtaccgtgcatcgcacctatttaagagggaacttagcagagagcaaatgctatttgataacagttactccagtatatgctgatggaccaggaagccctgaatccataaaggcataccttaaacaagctccaccttccaaaggacctactgttcggacaaaaaaagtagggaaaaacgaagctgtcttagagtgggaccaacttcctgttgatgttcagaatggatttatcagaaattatactatattttatagaaccatcattggaaatgaaactgctgtgaatgtggattcttcccacacagaatatacattgtcctctttgactagtgacacattgtacatggtacgaatggcagcatacacagatgaaggtgggaaggatggtccagaattcacttttactaccccaaagtttgctcaaggagaaattgaagccatagtcgtgcctgtttgcttagcattcctattgacaactcttctgggagtgctgttctgctttaataagcgagacctaattaaaaaacacatctggcctaatgttccagatccttcaaagagtcatattgcccagtggtcacctcacactcctccaaggcacaattttaattcaaaagatcaaatgtattcagatggcaatttcactgatgtaagtgttgtggaaatagaagcaaatgacaaaaagccttttccagaagatctgaaatcattggacctgttcaaaaaggaaaaaattaatactgaaggacacagcagtggtattggggggtcttcatgcatgtcatcttctaggccaagcatttctagcagtgatgaaaatgaatcttcacaaaacacttcgagcactgtccagtattctaccgtggtacacagtggctacagacaccaagttccgtcagtccaagtcttctcaagatccgagtctacccagcccttgttagattcagaggagcggccagaagatctacaattagtagatcatgtagatggcggtgatggtattttgcccaggcaacagtacttcaaacagaactgcagtcagcatgaatccagtccagatatttcacattttgaaaggtcaaagcaagtttcatcagtcaatgaggaagattttgttagacttaaacagcagatttcagatcatatttcacaatcctgtggatctgggcaaatgaaaatgtttcaggaagtttctgcagcagatgcttttggtccaggtactgagggacaagtagaaagatttgaaacagttggcatggaggctgcgactgatgaaggcatgcctaaaagttacttaccacagactgtacggcaaggcggctacatgcctcagtgaaggactagtagttcctgctacaacttcagcagtacctataaagtaaagctaaaatgattttatctgtgaattcagattttaaaaagtcttcactctctgaagatgatcatttgcccttaaggacaaaaatgaactgaagtttcacatgagctatttccattccagaatatctgggattctactttaagcactacataaactgactttatcctcagactagctgaatgattttgtgctgtttcaggatgtttgcactgaagaaaaacagaaagcttatctgaaatttataaaactttttgttttgctacatagaaaacagaaggtatttgaataataagcagtgatatgcttagtgagcacagctatactgattttgattagaatagtcatcagagtggcttagggacagttaatataaaagaggagcaaggtgtagaccatcatctacttctgctaaaataacttaaaaagaggtccataggccataactacatgagcccagcttttgtaatctgacaaaaaaatgaggagcagcttcgtgtatatcagtgtacacggtattccttaggtcccttccattggtagtgatgctgcgagttattactggagaaaaggaattctagagctttaacttggcagattaaaagtactcattttttattcatcaataattagtaatctcactagttttcaaaaatttgcatattattgacaacctctttgaagatgcatttcacaaactcaacagagtgccatgataagagctagggatcccccaaactatctcaagcatctaaaaaattgccatttttaaaggcttaaattgtagtagtaaaggggaaaacaggaagtagtagtaaaggggaaaaaaaaccaataaagcatctaaaaaattggcatgttaaaaggcttaaattgctaatgtgtgtatatatatatatatatatacacacacatatacacacacatatcattgacttttcttaagacttcagagtactgggtagatgaacactttatacagtatatatcttcagcttaaatttgttttgagtattttttttatttttaaataagtaggcaaagatttaaatttttttatttttagtaaatgtttgaggcacactaagacaacttgggcaatatttgccaaaacaaaacagaaccccaaaaaatgtacatcttgttcttagcaaatatcattattgtagagacacttaataaagagatggtattttaatgtctgcagttctgaggtagggtggaacttagttctacattgtgatttaggaatttttaaaaccttttttcttcaagggagaagtgacccaggcctcgagtttagtgctaaagccgctagtgtacttatgctgtcccctaaccaccacgtgcgatatggaagcagatgctaaatataggggttttcttagaaagtaagaggaaattagcaagcgttattagtgattgactactgctatcaagtgaattcaaaggaaacaggtttttatgccatatttaagttacagaaaccaggcatgcttagaatagtttctagaggttattggagaatagaaagctaagaaaacttggtatacatttacaatggaaatataattacactttttactctcagaatattgttcacattagacttcctgtttatcttttatattcttgcatttatataatgcctcatcctttcaaagttctttcacatattatatgatcttctttatgaaaaaaatagatgtttcattctgatatattcagtttcccactttaggcaaaagtagattaatagaatgacgaattcaaagtagatgaggaaaatcaggcacagagaagtaaaggtagggatagacccaaatttacacaacaagataatgacatctccagcttttaagttgatcatcaaaggctgggctggatttgtcttgctgtatgtgtcaggaaatttatacctattacattttccattttctcaaaatttaagtcacatgactaatatttagctgcaactttcctcataacaaatagtgtcatgaagaatgttgtagtgtgaagtttgtacatttcagggtcagatatacaatatgaactcttaatctacaggaatgagaatggaggatcattgaaggccatgatataaacaaatttgcatgttgaagcctgtataaaacatggtacagtgagtgaatatacccccatccccaagaacactttatacatattaaatggatatatgattactgtgcaaaaattcattctggaaatgaacatatatttgagcactaatatgtaatgtacacctgccctaaggagaaaataaattataaaactttttacattcaaaattactttcccaagcatgtcttagaataatctatgtgttgatgcatgtaaattgtactttaggtaggcaaagaaatctggttatttatgtaaaaactagtctaataaagttagttagtggctttatcactttaaatctttagtgtccaaaagtggtgtttaaagtaatagcacatcagaaaaccttgtctggacaaaactagttcactcactgcttctgcacctgcagttgctccctttagggttataaaataatgacccaaatgttacatgtgttgatattataacttgtcagttactgatgtctgtggtatcctaccctcatctctgaaagggataatactgaataattattagaaaactataaaacttcacactttgtaccattaaaacctaaaattttaatcttgtccttttttactatggatcagtcggcactcgggaacagcagcaaggaaaaaaagcaaatttcattcacatgttctgtgttcatacctcttctctacctaattgttcatttaaatttcagccttattccttgataagggattttaccacatgaagtcatccagtgaccctagctcttattgtgaagttagtggagtatacttagaaatgttacaactttaaaatgttacaaaacattcattaaagctcatatttaaagtagagcatctagtttgagaaatagaaatcaattattaaagatgtcttttttctacccatttaactagttaaaaccatgacatgtaaatgtagaagtagaataatcatagaattccctaaaatatttctgtttactaacatatattgaccaagtacatcaagcaggagagatcttccttcattctgttatagtccacatcattctaattttgctcagttgttattaagagcatattcctaaaccatacacttttgtttcaataaagttttattttgttgagatgaataaaataacaaagttataagctgcataagacaaaagttcaattgttcaaaaaaaatttactgggatagctttctattacaggtattgttagattatattgtgctgataagattactttctaaaaaatttgtacttttctgtaaattaaaagaatatggagtcataaaatggcaagtgttttaggattagcctaaaattggacattgtcattgatttcaaagaaggtatgaactagcagtcttacagcctaattcttctttggactggtccttggcagcagttccttttcagactcgataaacagaattcagatgatgtaagtcaaaacaaaactttacaaagccaagcgtattatcttttgcattaacctatttttttccatcatacatgctactagtatgtgcattagcatgatattctcatatacattgcattaaaaattaaaaggtggcagctcagggtgagctcttctgttgctcatttgttcctaaatttttaagggctttttctcagtcaatagtttgtacaaactggttagtttaacttcattacccatttcattaaagttgatgggtcgtgtgatgagatgcatttaaggccgatagtgatagatgttttttttatttcttgaacacaggctttgtctgaatgatgttcttttatctcttgaacacaagctttgatgcgtccgtcgangttggtccagg

SEQ ID NO: 355588 - DNA, 6853 bp, Homo sapiens
ctgacagtgttccggagccggggcgagcagccaaaaggcccgcggagtcgcgctgggccgccccggcgcagctgaaccgggggccgcgcctgccaggccgacgggtctggcccagcctggcgccaaggggttcgtgcgctgtggagacgcggagggtcgaggcggcgcggcctgagtgaaacccaatggaaaaagcatgacatttagaagtagaagacttagcttcaaatccctactccttcacttactaattttgtgatttggaaatatccgcgcaagatgttgacgttgcagacttggctagtgcaagccttgtttattttcctcaccactgaatctacaggtgaacttctagatccatgtggttatatcagtcctgaatctccagttgtacaacttcattctaatttcactgcagtttgtgtgctaaaggaaaaatgtatggattattttcatgtaaatgctaattacattgtctggaaaacaaaccattttactattcctaaggagcaatatactatcataaacagaacagcatccagtgtcacctttacagatatagcttcattaaatattcagctcacttgcaacattcttacattcggacagcttgaacagaatgtttatggaatcacaataatttcaggcttgcctccagaaaaacctaaaaatttgagttgcattgtgaacgaggggaagaaaatgaggtgtgagtgggatggtggaagggaaacacacttggagacaaacttcactttaaaatctgaatgggcaacacacaagtttgctgattgcaaagcaaaacgtgacacccccacctcatgcactgttgattattctactgtgtattttgtcaacattgaagtctgggtagaagcagagaatgcccttgggaaggttacatcagatcatatcaattttgatcctgtatataaagtgaagcccaatccgccacataatttatcagtgatcaactcagaggaactgtctagtatcttaaaattgacatggaccaacccaagtattaagagtgttataatactaaaatataacattcaatataggaccaaagatgcctcaacttggagccagattcctcctgaagacacagcatccacccgatcttcattcactgtccaagaccttaaaccttttacagaatatgtgtttaggattcgctgtatgaaggaagatggtaagggatactggagtgactggagtgaagaagcaagtgggatcacctatgaagatagaccatctaaagcaccaagtttctggtataaaatagatccatcccatactcaaggctacagaactgtacaactcgtgtggaagacattgcctccttttgaagccaatggaaaaatcttggattatgaagtgactctcacaagatggaaatcacatttacaaaattacacagttaatgccacaaaactgacagtaaatctcacaaatgatcgctatctagcaaccctaacagtaagaaatcttgttggcaaatcagatgcagctgttttaactatccctgcctgtgactttcaagctactcaccctgtaatggatcttaaagcattccccaaagataacatgctttgggtggaatggactactccaagggaatctgtaaagaaatatatacttgagtggtgtgtgttatcagataaagcaccctgtatcacagactggcaacaagaagatggtaccgtgcatcgcacctatttaagagggaacttagcagagagcaaatgctatttgataacagttactccagtatatgctgatggaccaggaagccctgaatccataaaggcataccttaaacaagctccaccttccaaaggacctactgttcggacaaaaaaagtagggaaaaacgaagctgtcttagagtgggaccaacttcctgttgatgttcagaatggatttatcagaaattatactatattttatagaaccatcattggaaatgaaactgctgtgaatgtggattcttcccacacagaatatacattgtcctctttgactagtgacacattgtacatggtacgaatggcagcatacacagatgaaggtgggaaggatggtccagaattcacttttactaccccaaagtttgctcaaggagaaattgaagccatagtcgtgcctgtttgcttagcattcctattgacaactcttctgggagtgctgttctgctttaataagcgagacctaattaaaaaacacatctggcctaatgttccagatccttcaaagagtcatattgcccagtggtcacctcacactcctccaaggcacaattttaattcaaaagatcaaatgtattcagatggcaatttcactgatgtaagtgttgtggaaatagaagcaaatgacaaaaagccttttccagaagatctgaaatcattggacctgttcaaaaaggaaaaaattaatactgaaggacacagcagtggtattggggggtcttcatgcatgtcatcttctaggccaagcatttctagcagtgatgaaaatgaatcttcacaaaacacttcgagcactgtccagtattctaccgtggtacacagtggctacagacaccaagttccgtcagtccaagtcttctcaagatccgagtctacccagcccttgttagattcagaggagcggccagaagatctacaattagtagatcatgtagatggcggtgatggtattttgcccaggcaacagtacttcaaacagaactgcagtcagcatgaatccagtccagatatttcacattttgaaaggtcaaagcaagtttcatcagtcaatgaggaagattttgttagacttaaacagcagatttcagatcatatttcacaatcctgtggatctgggcaaatgaaaatgtttcaggaagtttctgcagcagatgcttttggtccaggtactgagggacaagtagaaagatttgaaacagttggcatggaggctgcgactgatgaaggcatgcctaaaagttacttaccacagactgtacggcaaggcggctacatgcctcagtgaaggactagtagttcctgctacaacttcagcagtacctataaagtaaagctaaaatgattttatctgtgaattcagattttaaaaagtcttcactctctgaagatgatcatttgcccttaaggacaaaaatgaactgaagtttcacatgagctatttccattccagaatatctgggattctactttaagcactacataaactgactttatcctcagactagctgaatgattttgtgctgtttcaggatgtttgcactgaagaaaaacagaaagcttatctgaaatttataaaactttttgttttgctacatagaaaacagaaggtatttgaataataagcagtgatatgcttagtgagcacagctatactgattttgattagaatagtcatcagagtggcttagggacagttaatataaaagaggagcaaggtgtagaccatcatctacttctgctaaaataacttaaaaagaggtccataggccataactacatgagcccagcttttgtaatctgacaaaaaaatgaggagcagcttcgtgtatatcagtgtacacggtattccttaggtcccttccattggtagtgatgctgcgagttattactggagaaaaggaattctagagctttaacttggcagattaaaagtactcattttttattcatcaataattagtaatctcactagttttcaaaaatttgcatattattgacaacctctttgaagatgcatttcacaaactcaacagagtgccatgataagagctagggatcccccaaactatctcaagcatctaaaaaattgccatttttaaaggcttaaattgtagtagtaaaggggaaaacaggaagtagtagtaaaggggaaaaaaaaccaataaagcatctaaaaaattggcatgttaaaaggcttaaattgctaatgtgtgtatatatatatatatatatacacacacatatacacacacatatcattgacttttcttaagacttcagagtactgggtagatgaacactttatacagtatatatcttcagcttaaatttgttttgagtattttttttatttttaaataagtaggcaaagatttaaatttttttatttttagtaaatgtttgaggcacactaagacaacttgggcaatatttgccaaaacaaaacagaaccccaaaaaatgtacatcttgttcttagcaaatatcattattgtagagacacttaataaagagatggtattttaatgtctgcagttctgaggtagggtggaacttagttctacattgtgatttaggaatttttaaaaccttttttcttcaagggagaagtgacccaggcctcgagtttagtgctaaagccgctagtgtacttatgctgtcccctaaccaccacgtgcgatatggaagcagatgctaaatataggggttttcttagaaagtaagaggaaattagcaagcgttattagtgattgactactgctatcaagtgaattcaaaggaaacaggtttttatgccatatttaagttacagaaaccaggcatgcttagaatagtttctagaggttattggagaatagaaagctaagaaaacttggtatacatttacaatggaaatataattacactttttactctcagaatattgttcacattagacttcctgtttatcttttatattcttgcatttatataatgcctcatcctttcaaagttctttcacatattatatgatcttctttatgaaaaaaatagatgtttcattctgatatattcagtttcccactttaggcaaaagtagattaatagaatgacgaattcaaagtagatgaggaaaatcaggcacagagaagtaaaggtagggatagacccaaatttacacaacaagataatgacatctccagcttttaagttgatcatcaaaggctgggctggatttgtcttgctgtatgtgtcaggaaatttatacctattacattttccattttctcaaaatttaagtcacatgactaatatttagctgcaactttcctcataacaaatagtgtcatgaagaatgttgtagtgtgaagtttgtacatttcagggtcagatatacaatatgaactcttaatctacaggaatgagaatggaggatcattgaaggccatgatataaacaaatttgcatgttgaagcctgtataaaacatggtacagtgagtgaatatacccccatccccaagaacactttatacatattaaatggatatatgattactgtgcaaaaattcattctggaaatgaacatatatttgagcactaatatgtaatgtacacctgccctaaggagaaaataaattataaaactttttacattcaaaattactttcccaagcatgtcttagaataatctatgtgttgatgcatgtaaattgtactttaggtaggcaaagaaatctggttatttatgtaaaaactagtctaataaagttagttagtggctttatcactttaaatctttagtgtccaaaagtggtgtttaaagtaatagcacatcagaaaaccttgtctggacaaaactagttcactcactgcttctgcacctgcagttgctccctttagggttataaaataatgacccaaatgttacatgtgttgatattataacttgtcagttactgatgtctgtggtatcctaccctcatctctgaaagggataatactgaataattattagaaaactataaaacttcacactttgtaccattaaaacctaaaattttaatcttgtccttttttactatggatcagtcggcactcgggaacagcagcaaggaaaaaaagcaaatttcattcacatgttctgtgttcatacctcttctctacctaattgttcatttaaatttcagccttattccttgataagggattttaccacatgaagtcatccagtgaccctagctcttattgtgaagttagtggagtatacttagaaatgttacaactttaaaatgttacaaaacattcattaaagctcatatttaaagtagagcatctagtttgagaaatagaaatcaattattaaagatgtcttttttctacccatttaactagttaaaaccatgacatgtaaatgtagaagtagaataatcatagaattccctaaaatatttctgtttactaacatatattgaccaagtacatcaagcaggagagatcttccttcattctgttatagtccacatcattctaattttgctcagttgttattaagagcatattcctaaaccatacacttttgtttcaataaagttttattttgttgagatgaataaaataacaaagttataagctgcataagacaaaagttcaattgttcaaaaaaaatttactgggatagctttctattacaggtattgttagattatattgtgctgataagattactttctaaaaaatttgtacttttctgtaaattaaaagaatatggagtcataaaatggcaagtgttttaggattagcctaaaattggacattgtcattgatttcaaagaaggtatgaactagcagtcttacagcctaattcttctttggactggtccttggcagcagttccttttcagactcgataaacagaattcagatgatgtaagtcaaaacaaaactttacaaagccaagcgtattatcttttgcattaacctatttttttccatcatacatgctactagtatgtgcgtactagttatgtgcgtactagttatgtgcgtactagttatgtgcgtactagttatgtgcgtactagttatgtgcgtactagttatgtgcgtactatgcttatgtgcgt

SEQ ID NO: 355589 - DNA, 326 bp, Homo sapiens
aatcccttaagtaaattttaagaaataaatacttgttcaaattttttttctgtatgtggttactatcatctgactatgcatatttgtaacagcatttatcattagtggtgttagctaaataagcatcttagtgtaaatgagatgcttcgtgtgggttttgtgacattttaaatgacataatggaatgtgatttaaaagaaaaccagtacactatcttggtcttaataacatagaatggagatggcaaatttatccactagttttccagatttactatttaatagctgaggtctgaaatcgtagcatcctccctcctagtggacatt

SEQ ID NO: 355590 - DNA, 216 bp, Homo sapiens
tagaaacaaagggatatttcaaaggtagatatttgaaaattctctagtctcaatatgtatgtgtattgaatatactctaaaaataaatgtgcaatttgctagtaggacaatgcagtgactgactagcattaggtatgtttcttttatatcctagctatgtcccactttcttctaagtgcaatcctttcatgttcacttgctgttttaccccatcta

SEQ ID NO: 355591 - DNA, 7401 bp, Homo sapiens
ctgacagtgttccggagccggggcgagcagccaaaaggcccgcggagtcgcgctgggccgccccggcgcagctgaaccgggggccgcgcctgccaggccgacgggtctggcccagcctggcgccaaggggttcgtgcgctgtggagacgcggagggtcgaggcggcgcggcctgagtgaaacccaatggaaaaagcatgacatttagaagtagaagacttagcttcaaatccctactccttcacttactaattttgtgatttggaaatatccgcgcaagatgttgacgttgcagacttggctagtgcaagccttgtttattttcctcaccactgaatctacaggtgaacttctagatccatgtggttatatcagtcctgaatctccagttgtacaacttcattctaatttcactgcagtttgtgtgctaaaggaaaaatgtatggattattttcatgtaaatgctaattacattgtctggaaaacaaaccattttactattcctaaggagcaatatactatcataaacagaacagcatccagtgtcacctttacagatatagcttcattaaatattcagctcacttgcaacattcttacattcggacagcttgaacagaatgtttatggaatcacaataatttcaggcttgcctccagaaaaacctaaaaatttgagttgcattgtgaacgaggggaagaaaatgaggtgtgagtgggatggtggaagggaaacacacttggagacaaacttcactttaaaatctgaatgggcaacacacaagtttgctgattgcaaagcaaaacgtgacacccccacctcatgcactgttgattattctactgtgtattttgtcaacattgaagtctgggtagaagcagagaatgcccttgggaaggttacatcagatcatatcaattttgatcctgtatataaagtgaagcccaatccgccacataatttatcagtgatcaactcagaggaactgtctagtatcttaaaattgacatggaccaacccaagtattaagagtgttataatactaaaatataacattcaatataggaccaaagatgcctcaacttggagccagattcctcctgaagacacagcatccacccgatcttcattcactgtccaagaccttaaaccttttacagaatatgtgtttaggattcgctgtatgaaggaagatggtaagggatactggagtgactggagtgaagaagcaagtgggatcacctatgaagataacattgcctccttttgaagccaatggaaaaatcttggattatgaagtgactctcacaagatggaaatcacatttacaaaattacacagttaatgccacaaaactgacagtaaatctcacaaatgatcgctatctagcaaccctaacagtaagaaatcttgttggcaaatcagatgcagctgttttaactatccctgcctgtgactttcaagctactcaccctgtaatggatcttaaagcattccccaaagataacatgctttgggtggaatggactactccaagggaatctgtaaagaaatatatacttgagtggtgtgtgttatcagataaagcaccctgtatcacagactggcaacaagaagatggtaccgtgcatcgcacctatttaagagggaacttagcagagagcaaatgctatttgataacagttactccagtatatgctgatggaccaggaagccctgaatccataaaggcataccttaaacaagctccaccttccaaaggacctactgttcggacaaaaaaagtagggaaaaacgaagctgtcttagagtgggaccaacttcctgttgatgttcagaatggatttatcagaaattatactatattttatagaaccatcattggaaatgaaactgctgtgaatgtggattcttcccacacagaatatacattgtcctctttgactagtgacacattgtacatggtacgaatggcagcatacacagatgaaggtgggaaggatggtccagaattcacttttactaccccaaagtttgctcaaggagaaattgaagccatagtcgtgcctgtttgcttagcattcctattgacaactcttctgggagtgctgttctgctttaataagcgagacctaattaaaaaacacatctggcctaatgttccagatccttcaaagagtcatattgcccagtggtcacctcacactcctccaaggcacaattttaattcaaaagatcaaatgtattcagatggcaatttcactgatgtaagtgttgtggaaatagaagcaaatgacaaaaagccttttccagaagatctgaaatcattggacctgttcaaaaaggaaaaaattaatactgaaggacacagcagtggtattggggggtcttcatgcatgtcatcttctaggccaagcatttctagcagtgatgaaaatgaatcttcacaaaacacttcgagcactgtccagtattctaccgtggtacacagtggctacagacaccaagttccgtcagtccaagtcttctcaagatccgagtctacccagcccttgttagattcagaggagcggccagaagatctacaattagtagatcatgtagatggcggtgatggtattttgcccaggcaacagtacttcaaacagaactgcagtcagcatgaatccagtccagatatttcacattttgaaaggtcaaagcaagtttcatcagtcaatgaggaagattttgttagacttaaacagcagatttcagatcatatttcacaatcctgtggatctgggcaaatgaaaatgtttcaggaagtttctgcagcagatgcttttggtccaggtactgagggacaagtagaaagatttgaaacagttggcatggaggctgcgactgatgaaggcatgcctaaaagttacttaccacagactgtacggcaaggcggctacatgcctcagtgaaggactagtagttcctgctacaacttcagcagtacctataaagtaaagctaaaatgattttatctgtgaattcagattttaaaaagtcttcactctctgaagatgatcatttgcccttaaggacaaaaatgaactgaagtttcacatgagctatttccattccagaatatctgggattctactttaagcactacataaactgactttatcctcagactagctgaatgattttgtgctgtttcaggatgtttgcactgaagaaaaacagaaagcttatctgaaatttataaaactttttgttttgctacatagaaaacagaaggtatttgaataataagcagtgatatgcttagtgagcacagctatactgattttgattagaatagtcatcagagtggcttagggacagttaatataaaagaggagcaaggtgtagaccatcatctacttctgctaaaataacttaaaaagaggtccataggccataactacatgagcccagcttttgtaatctgacaaaaaaatgaggagcagcttcgtgtatatcagtgtacacggtattccttaggtcccttccattggtagtgatgctgcgagttattactggagaaaaggaattctagagctttaacttggcagattaaaagtactcattttttattcatcaataattagtaatctcactagttttcaaaaatttgcatattattgacaacctctttgaagatgcatttcacaaactcaacagagtgccatgataagagctagggatcccccaaactatctcaagcatctaaaaaattgccatttttaaaggcttaaattgtagtagtaaaggggaaaacaggaagtagtagtaaaggggaaaaaaaaccaataaagcatctaaaaaattggcatgttaaaaggcttaaattgctaatgtgtgtatatatatatatatatatacacacacatatacacacacatatcattgacttttcttaagacttcagagtactgggtagatgaacactttatacagtatatatcttcagcttaaatttgttttgagtattttttttatttttaaataagtaggcaaagatttaaatttttttatttttagtaaatgtttgaggcacactaagacaacttgggcaatatttgccaaaacaaaacagaaccccaaaaaatgtacatcttgttcttagcaaatatcattattgtagagacacttaataaagagatggtattttaatgtctgcagttctgaggtagggtggaacttagttctacattgtgatttaggaatttttaaaaccttttttcttcaagggagaagtgacccaggcctcgagtttagtgctaaagccgctagtgtacttatgctgtcccctaaccaccacgtgcgatatggaagcagatgctaaatataggggttttcttagaaagtaagaggaaattagcaagcgttattagtgattgactactgctatcaagtgaattcaaaggaaacaggtttttatgccatatttaagttacagaaaccaggcatgcttagaatagtttctagaggttattggagaatagaaagctaagaaaacttggtatacatttacaatggaaatataattacactttttactctcagaatattgttcacattagacttcctgtttatcttttatattcttgcatttatataatgcctcatcctttcaaagttctttcacatattatatgatcttctttatgaaaaaaatagatgtttcattctgatatattcagtttcccactttaggcaaaagtagattaatagaatgacgaattcaaagtagatgaggaaaatcaggcacagagaagtaaaggtagggatagacccaaatttacacaacaagataatgacatctccagcttttaagttgatcatcaaaggctgggctggatttgtcttgctgtatgtgtcaggaaatttatacctattacattttccattttctcaaaatttaagtcacatgactaatatttagctgcaactttcctcataacaaatagtgtcatgaagaatgttgtagtgtgaagtttgtacatttcagggtcagatatacaatatgaactcttaatctacaggaatgagaatggaggatcattgaaggccatgatataaacaaatttgcatgttgaagcctgtataaaacatggtacagtgagtgaatatacccccatccccaagaacactttatacatattaaatggatatatgattactgtgcaaaaattcattctggaaatgaacatatatttgagcactaatatgtaatgtacacctgccctaaggagaaaataaattataaaactttttacattcaaaattactttcccaagcatgtcttagaataatctatgtgttgatgcatgtaaattgtactttaggtaggcaaagaaatctggttatttatgtaaaaactagtctaataaagttagttagtggctttatcactttaaatctttagtgtccaaaagtggtgtttaaagtaatagcacatcagaaaaccttgtctggacaaaactagttcactcactgcttctgcacctgcagttgctccctttagggttataaaataatgacccaaatgttacatgtgttgatattataacttgtcagttactgatgtctgtggtatcctaccctcatctctgaaagggataatactgaataattattagaaaactataaaacttcacactttgtaccattaaaacctaaaattttaatcttgtccttttttactatggatcagtcggcactcgggaacagcagcaaggaaaaaaagcaaatttcattcacatgttctgtgttcatacctcttctctacctaattgttcatttaaatttcagccttattccttgataagggattttaccacatgaagtcatccagtgaccctagctcttattgtgaagttagtggagtatacttagaaatgttacaactttaaaatgttacaaaacattcattaaagctcatatttaaagtagagcatctagtttgagaaatagaaatcaattattaaagatgtcttttttctacccatttaactagttaaaaccatgacatgtaaatgtagaagtagaataatcatagaattccctaaaatatttctgtttactaacatatattgaccaagtacatcaagcaggagagatcttccttcattctgttatagtccacatcattctaattttgctcagttgttattaagagcatattcctaaaccatacacttttgtttcaataaagttttattttgttgagatgaataaaataacaaagttataagctgcataagacaaaagttcaattgttcaaaaaaaatttactgggatagctttctattacaggtattgttagattatattgtgctgataagattactttctaaaaaatttgtacttttctgtaaattaaaagaatatggagtcataaaatggcaagtgttttaggattagcctaaaattggacattgtcattgatttcaaagaaggtatgaactagcagtcttacagcctaattcttctttggactggtccttggcagcagttccttttcagactcgataaacagaattcagatgatgtaagtcaaaacaaaactttacaaagccaagcgtattatcttttgcattaacctatttttttccatcatacatgctactagtatgtgcattagcatgatattctcatatacattgcattaaaaattaaaaggtggcagctcagggtgagctcttctgttgctcatttgttcctaaatttttaagggctttttctcagtcaatagtttgtacaaactggttagtttaacttcattacccatttcattaaagttgatgggtcgtgtgatgagatgcatttaaggccgatagtgatagatgttttttttatttcttgaacacaggctttgtctgaatgatgttcttttatctcttgaacacaagctttgaatgataactacaggttttaagtgctgttacattaataccataatgtgatgtgttagaaacaaagggatatttcaaaggtagatatttgaaaattctctagtctcaatatgtatgtgtattgaatatactctaaaaataaatgtgcaatttgctagtaggacaatgcagtgactgactagcattaggtatgtttcttttatatcctagctatgtcccactttcttctaagtgcaatcctttcatgttcacttgctgttttaccccatctactctaacttcatttggaaggcttgtctagagtatagcatgtatttttacctttgcagtgaattgcatgtgctaattgtaaccacagctatttttatgttgacataactccaaatgttatattaaatgttctattatatattagctctaatcccttaagtaaattttaagaaataaatacttgttcaaatttt

SEQ ID NO: 355592 - DNA, 7430 bp, Homo sapiens
ctgacagtgttccggagccggggcgagcagccaaaaggcccgcggagtcgcgctgggccgccccggcgcagctgaaccgggggccgcgcctgccaggccgacgggtctggcccagcctggcgccaaggggttcgtgcgctgtggagacgcggagggtcgaggcggcgcggcctgagtgaaacccaatggaaaaagcatgacatttagaagtagaagacttagcttcaaatccctactccttcacttactaattttgtgatttggaaatatccgcgcaagatgttgacgttgcagacttggctagtgcaagccttgtttattttcctcaccactgaatctacaggtgaacttctagatccatgtggttatatcagtcctgaatctccagttgtacaacttcattctaatttcactgcagtttgtgtgctaaaggaaaaatgtatggattattttcatgtaaatgctaattacattgtctggaaaacaaaccattttactattcctaaggagcaatatactatcataaacagaacagcatccagtgtcacctttacagatatagcttcattaaatattcagctcacttgcaacattcttacattcggacagcttgaacagaatgtttatggaatcacaataatttcaggcttgcctccagaaaaacctaaaaatttgagttgcattgtgaacgaggggaagaaaatgaggtgtgagtgggatggtggaagggaaacacacttggagacaaacttcactttaaaatctgaatgggcaacacacaagtttgctgattgcaaagcaaaacgtgacacccccacctcatgcactgttgattattctactgtgtattttgtcaacattgaagtctgggtagaagcagagaatgcccttgggaaggttacatcagatcatatcaattttgatcctgtatataaagtgaagcccaatccgccacataatttatcagtgatcaactcagaggaactgtctagtatcttaaaattgacatggaccaacccaagtattaagagtgttataatactaaaatataacattcaatataggaccaaagatgcctcaacttggagccagattcctcctgaagacacagcatccacccgatcttcattcactgtccaagaccttaaaccttttacagaatatgtgtttaggattcgctgtatgaaggaagatggtaagggatactggagtgactggagtgaagaagcaagtgggatcacctatgaagatagaccatctaaagcaccaagtttctggtataaaatagatccatcccatactcaaggctacagaactgtacaactcgtgtggaagacattgcctccttttgaagccaatggaaaaatcttggattatgaagtgactctcacaagatggaaatcacatttacaaaattacacagttaatgccacaaaactgacagtaaatctcacaaatgatcgctatctagcaaccctaacagtaagaaatcttgttggcaaatcagatgcagctgttttaactatccctgcctgtgactttcaagctactcaccctgtaatggatcttaaagcattccccaaagataacatgctttgggtggaatggactactccaagggaatctgtaaagaaatatatacttgagtggtgtgtgttatcagataaagcaccctgtatcacagactggcaacaagaagatggtaccgtgcatcgcacctatttaagagggaacttagcagagagcaaatgctatttgataacagttactccagtatatgctgatggaccaggaagccctgaatccataaaggcataccttaaacaagctccaccttccaaaggacctactgttcggacaaaaaaagtagggaaaaacgaagctgtcttagagtgggaccaacttcctgttgatgttcagaatggatttatcagaaattatactatattttatagaaccatcattggaaatgaaactgctgtgaatgtggattcttcccacacagaatatacattgtcctctttgactagtgacacattgtacatggtacgaatggcagcatacacagatgaaggtgggaaggatggtccagaattcacttttactaccccaaagtttgctcaaggagaaattgaagccatagtcgtgcctgtttgcttagcattcctattgacaactcttctgggagtgctgttctgctttaataagcgagacctaattaaaaaacacatctggcctaatgttccagatccttcaaagagtcatattgcccagtggtcacctcacactcctccaaggcacaattttaattcaaaagatcaaatgtattcagatggcaatttcactgatgtaagtgttgtggaaatagaagcaaatgacaaaaagccttttccagaagatctgaaatcattggacctgttcaaaaaggaaaaaattaatactgaaggacacagcagtggtattggggggtcttcatgcatgtcatcttctaggccaagcatttctagcagtgatgaaaatgaatcttcacaaaacacttcgagcactgtccagtattctaccgtggtacacagtggctacagacaccaagttccgtcagtccaagtcttctcaagatccgagtctacccagcccttgttagattcagaggagcggccagaagatctacaattagtagatcatgtagatggcggtgatggtattttgcccaggcaacagtacttcaaacagaactgcagtcagcatgaatccagtccagatatttcacattttgaaaggtcaaagcaagtttcatcagtcaatgaggaagattttgttagacttaaacagcagatttcagatcatatttcacaatcctgtggatctgggcaaatgaaaatgtttcaggaagtttctgcagcagatgcttttggtccaggtactgagggacaagtagaaagatttgaaacagttggcatggaggctgcgactgatgaaggcatgcctaaaagttacttaccacagactgtacggcaaggcggctacatgcctcagtgaaggactagtagttcctgctacaacttcagcagtacctataaagtaaagctaaaatgattttatctgtgaattcagattttaaaaagtcttcactctctgaagatgatcatttgcccttaaggacaaaaatgaactgaagtttcacatgagctatttccattccagaatatctgggattctactttaagcactacataaactgactttatcctcagactagctgaatgattttgtgctgtttcaggatgtttgcactgaagaaaaacagaaagcttatctgaaatttataaaactttttgttttgctacatagaaaacagaaggtatttgaataataagcagtgatatgcttagtgagcacagctatactgattttgattagaatagtcatcagagtggcttagggacagttaatataaaagaggagcaaggtgtagaccatcatctacttctgctaaaataacttaaaaagaggtccataggccataactacatgagcccagcttttgtaatctgacaaaaaaatgaggagcagcttcgtgtatatcagtgtacacggtattccttaggtcccttccattggtagtgatgctgcgagttattactggagaaaaggaattctagagctttaacttggcagattaaaagtactcattttttattcatcaataattagtaatctcactagttttcaaaaatttgcatattattgacaacctctttgaagatgcatttcacaaactcaacagagtgccatgataagagctagggatcccccaaactatctcaagcatctaaaaaattgccatttttaaaggcttaaattgtagtagtaaaggggaaaacaggaagtagtagtaaaggggaaaaaaaaccaataaagcatctaaaaaattggcatgttaaaaggcttaaattgctaatgtgtgtatatatatatatatatatacacacacatatacacacacatatcattgacttttcttaagacttcagagtactgggtagatgaacactttatacagtatatatcttcagcttaaatttgttttgagtattttttttatttttaaataagtaggcaaagatttaaatttttttatttttagtaaatgtttgaggcacactaagacaacttgggcaatatttgccaaaacaaaacagaaccccaaaaaatgtacatcttgttcttagcaaatatcattattgtagagacacttaataaagagatggtattttaatgtctgcagttctgaggtagggtggaacttagttctacattgtgatttaggaatttttaaaaccttttttcttcaagggagaagtgacccaggcctcgagtttagtgctaaagccgctagtgtacttatgctgtcccctaaccaccacgtgcgatatggaagcagatgctaaatataggggttttcttagaaagtaagaggaaattagcaagcgttattagtgattgactactgctatcaagtgaattcaaaggaaacaggtttttatgccatatttaagttacagaaaccaggcatgcttagaatagtttctagaggttattggagaatagaaagctaagaaaacttggtatacatttacaatggaaatataattacactttttactctcagaatattgttcacattagacttcctgtttatcttttatattcttgcatttatataatgcctcatcctttcaaagttctttcacatattatatgatcttctttatgaaaaaaatagatgtttcattctgatatattcagtttcccactttaggcaaaagtagattaatagaatgacgaattcaaagtagatgaggaaaatcaggcacagagaagtaaaggtagggatagacccaaatttacacaacaagataatgacatctccagcttttaagttgatcatcaaaggctgggctggatttgtcttgctgtatgtgtcaggaaatttatacctattacattttccattttctcaaaatttaagtcacatgactaatatttagctgcaactttcctcataacaaatagtgtcatgaagaatgttgtagtgtgaagtttgtacatttcagggtcagatatacaatatgaactcttaatctacaggaatgagaatggaggatcattgaaggccatgatataaacaaatttgcatgttgaagcctgtataaaacatggtacagtgagtgaatatacccccatccccaagaacactttatacatattaaatggatatatgattactgtgcaaaaattcattctggaaatgaacatatatttgagcactaatatgtaatgtacacctgccctaaggagaaaataaattataaaactttttacattcaaaattactttcccaagcatgtcttagaataatctatgtgttgatgcatgtaaattgtactttaggtaggcaaagaaatctggttatttatgtaaaaactagtctaataaagttagttagtggctttatcactttaaatctttagtgtccaaaagtggtgtttaaagtaatagcacatcagaaaaccttgtctggacaaaactagttcactcactgcttctgcacctgcagttgctccctttagggttataaaataatgacccaaatgttacatgtgttgatattataacttgtcagttactgatgtctgtggtatcctaccctcatctctgaaagggataatactgaataattattagaaaactataaaacttcacactttgtaccattaaaacctaaaattttaatcttgtccttttttactatggatcagtcggcactcgggaacagcagcaaggaaaaaaagcaaatttcattcacatgttctgtgttcatacctcttctctacctaattgttcatttaaatttcagccttattccttgataagggattttaccacatgaagtcatccagtgaccctagctcttattgtgaagttagtggagtatacttagaaatgttacaactttaaaatgttacaaaacattcattaaagctcatatttaaagtagagcatctagtttgagaaatagaaatcaattattaaagatgtcttttttctacccatttaactagttaaaaccatgacatgtaaatgtagaagtagaataatcatagaattccctaaaatatttctgtttactaacatatattgaccaagtacatcaagcaggagagatcttccttcattctgttatagtccacatcattctaattttgctcagttgttattaagagcatattcctaaaccatacacttttgtttcaataaagttttattttgttgagatgaataaaataacaaagttataagctgcataagacaaaagttcaattgttcaaaaaaaatttactgggatagctttctattacaggtattgttagattatattgtgctgataagattactttctaaaaaatttgtacttttctgtaaattaaaagaatatggagtcataaaatggcaagtgttttaggattagcctcctaattcttctttggactggtccttggcagcagttccttttcagactcgataaacagaattcagatgatgtaagtcaaaacaaaactttacaaagccaagcgtattatcttttgcattaacctatttttttccatcatacatgctactagtatgtgcattagcatgatattctcatatacattgcattaaaaattaaaaggtggcagctcagggtgagctcttctgttgctcatttgttcctaaatttttaagggctttttctcagtcaatagtttgtacaaactggttagtttaacttcattacccatttcattaaagttgatgggtcgtgtgatgagatgcatttaaggccgatagtgatagatgttttttttatttcttgaacacaggctttgtctgaatgatgttcttttatctcttgaacacaagctttgaatgataactacaggttttaagtgctgttacattaataccataatgtgatgtgttagaaacaaagggatatttcaaaggtagatatttgaaaattctctagtctcaatatgtatgtgtattgaatatactctaaaaataaatgtgcaatttgctagtaggacaatgcagtgactgactagcattaggtatgtttcttttatatcctagctatgtcccactttcttctaagtgcaatcctttcatgttcacttgctgttttaccccatctactctaacttcatttggaaggcttgtctagagtatagcatgtatttttacctttgcagtgaattgcatgtgctaattgtaaccacagctatttttatgttgacataactccaaatgttatattaaatgttctattatatattagctctaatcccttaagtaaattttaagaaataaatacttgttcaaatttt

SEQ ID NO: 355593 - DNA, 6677 bp, Homo sapiens
  misc_feature (7)..(7): n is a, c, g, or t
  misc_feature (25)..(25): n is a, c, g, or t
  misc_feature (41)..(41): n is a, c, g, or t
  misc_feature (63)..(63): n is a, c, g, or t
taggtanttataaacgactcgttanatcacttggtgtcatncaattttaagatactagacagntcctctgagttgatcactgataaattatgtggcggattgggcttcaattttgatcctgtatataaagtgaagcccaatccgccacataatttatcagtgatcaactcagaggaactgtctagtatcttaaaattgacatggaccaacccaagtattaagagtgttataatactaaaatataacattcaatataggaccaaagatgcctcaacttggagccagattcctcctgaagacacagcatccacccgatcttcattcactgtccaagaccttaaaccttttacagaatatgtgtttaggattcgctgtatgaaggaagatggtaagggatactggagtgactggagtgaagaagcaagtgggatcacctatgaagatagaccatctaaagcaccaagtttctggtataaaatagatccatcccatactcaaggctacagaactgtacaactcgtgtggaagacattgcctccttttgaagccaatggaaaaatcttggattatgaagtgactctcacaagatggaaatcacatttacaaaattacacagttaatgccacaaaactgacagtaaatctcacaaatgatcgctatctagcaaccctaacagtaagaaatcttgttggcaaatcagatgcagctgttttaactatccctgcctgtgactttcaagctactcaccctgtaatggatcttaaagcattccccaaagataacatgctttgggtggaatggactactccaagggaatctgtaaagaaatatatacttgagtggtgtgtgttatcagataaagcaccctgtatcacagactggcaacaagaagatggtaccgtgcatcgcacctatttaagagggaacttagcagagagcaaatgctatttgataacagttactccagtatatgctgatggaccaggaagccctgaatccataaaggcataccttaaacaagctccaccttccaaaggacctactgttcggacaaaaaaagtagggaaaaacgaagctgtcttagagtgggaccaacttcctgttgatgttcagaatggatttatcagaaattatactatattttatagaaccatcattggaaatgaaactgctgtgaatgtggattcttcccacacagaatatacattgtcctctttgactagtgacacattgtacatggtacgaatggcagcatacacagatgaaggtgggaaggatggtccagaattcacttttactaccccaaagtttgctcaaggagaaattgaagccatagtcgtgcctgtttgcttagcattcctattgacaactcttctgggagtgctgttctgctttaataagcgagacctaattaaaaaacacatctggcctaatgttccagatccttcaaagagtcatattgcccagtggtcacctcacactcctccaaggcacaattttaattcaaaagatcaaatgtattcagatggcaatttcactgatgtaagtgttgtggaaatagaagcaaatgacaaaaagccttttccagaagatctgaaatcattggacctgttcaaaaaggaaaaaattaatactgaaggacacagcagtggtattggggggtcttcatgcatgtcatcttctaggccaagcatttctagcagtgatgaaaatgaatcttcacaaaacacttcgagcactgtccagtattctaccgtggtacacagtggctacagacaccaagttccgtcagtccaagtcttctcaagatccgagtctacccagcccttgttagattcagaggagcggccagaagatctacaattagtagatcatgtagatggcggtgatggtattttgcccaggcaacagtacttcaaacagaactgcagtcagcatgaatccagtccagatatttcacattttgaaaggtcaaagcaagtttcatcagtcaatgaggaagattttgttagacttaaacagcagatttcagatcatatttcacaatcctgtggatctgggcaaatgaaaatgtttcaggaagtttctgcagcagatgcttttggtccaggtactgagggacaagtagaaagatttgaaacagttggcatggaggctgcgactgatgaaggcatgcctaaaagttacttaccacagactgtacggcaaggcggctacatgcctcagtgaaggactagtagttcctgctacaacttcagcagtacctataaagtaaagctaaaatgattttatctgtgaattcagattttaaaaagtcttcactctctgaagatgatcatttgcccttaaggacaaaaatgaactgaagtttcacatgagctatttccattccagaatatctgggattctactttaagcactacataaactgactttatcctcagactagctgaatgattttgtgctgtttcaggatgtttgcactgaagaaaaacagaaagcttatctgaaatttataaaactttttgttttgctacatagaaaacagaaggtatttgaataataagcagtgatatgcttagtgagcacagctatactgattttgattagaatagtcatcagagtggcttagggacagttaatataaaagaggagcaaggtgtagaccatcatctacttctgctaaaataacttaaaaagaggtccataggccataactacatgagcccagcttttgtaatctgacaaaaaaatgaggagcagcttcgtgtatatcagtgtacacggtattccttaggtcccttccattggtagtgatgctgcgagttattactggagaaaaggaattctagagctttaacttggcagattaaaagtactcattttttattcatcaataattagtaatctcactagttttcaaaaatttgcatattattgacaacctctttgaagatgcatttcacaaactcaacagagtgccatgataagagctagggatcccccaaactatctcaagcatctaaaaaattgccatttttaaaggcttaaattgtagtagtaaaggggaaaacaggaagtagtagtaaaggggaaaaaaaaccaataaagcatctaaaaaattggcatgttaaaaggcttaaattgctaatgtgtgtatatatatatatatatatacacacacatatacacacacatatcattgacttttcttaagacttcagagtactgggtagatgaacactttatacagtatatatcttcagcttaaatttgttttgagtattttttttatttttaaataagtaggcaaagatttaaatttttttatttttagtaaatgtttgaggcacactaagacaacttgggcaatatttgccaaaacaaaacagaaccccaaaaaatgtacatcttgttcttagcaaatatcattattgtagagacacttaataaagagatggtattttaatgtctgcagttctgaggtagggtggaacttagttctacattgtgatttaggaatttttaaaaccttttttcttcaagggagaagtgacccaggcctcgagtttagtgctaaagccgctagtgtacttatgctgtcccctaaccaccacgtgcgatatggaagcagatgctaaatataggggttttcttagaaagtaagaggaaattagcaagcgttattagtgattgactactgctatcaagtgaattcaaaggaaacaggtttttatgccatatttaagttacagaaaccaggcatgcttagaatagtttctagaggttattggagaatagaaagctaagaaaacttggtatacatttacaatggaaatataattacactttttactctcagaatattgttcacattagacttcctgtttatcttttatattcttgcatttatataatgcctcatcctttcaaagttctttcacatattatatgatcttctttatgaaaaaaatagatgtttcattctgatatattcagtttcccactttaggcaaaagtagattaatagaatgacgaattcaaagtagatgaggaaaatcaggcacagagaagtaaaggtagggatagacccaaatttacacaacaagataatgacatctccagcttttaagttgatcatcaaaggctgggctggatttgtcttgctgtatgtgtcaggaaatttatacctattacattttccattttctcaaaatttaagtcacatgactaatatttagctgcaactttcctcataacaaatagtgtcatgaagaatgttgtagtgtgaagtttgtacatttcagggtcagatatacaatatgaactcttaatctacaggaatgagaatggaggatcattgaaggccatgatataaacaaatttgcatgttgaagcctgtataaaacatggtacagtgagtgaatatacccccatccccaagaacactttatacatattaaatggatatatgattactgtgcaaaaattcattctggaaatgaacatatatttgagcactaatatgtaatgtacacctgccctaaggagaaaataaattataaaactttttacattcaaaattactttcccaagcatgtcttagaataatctatgtgttgatgcatgtaaattgtactttaggtaggcaaagaaatctggttatttatgtaaaaactagtctaataaagttagttagtggctttatcactttaaatctttagtgtccaaaagtggtgtttaaagtaatagcacatcagaaaaccttgtctggacaaaactagttcactcactgcttctgcacctgcagttgctccctttagggttataaaataatgacccaaatgttacatgtgttgatattataacttgtcagttactgatgtctgtggtatcctaccctcatctctgaaagggataatactgaataattattagaaaactataaaacttcacactttgtaccattaaaacctaaaattttaatcttgtccttttttactatggatcagtcggcactcgggaacagcagcaaggaaaaaaagcaaatttcattcacatgttctgtgttcatacctcttctctacctaattgttcatttaaatttcagccttattccttgataagggattttaccacatgaagtcatccagtgaccctagctcttattgtgaagttagtggagtatacttagaaatgttacaactttaaaatgttacaaaacattcattaaagctcatatttaaagtagagcatctagtttgagaaatagaaatcaattattaaagatgtcttttttctacccatttaactagttaaaaccatgacatgtaaatgtagaagtagaataatcatagaattccctaaaatatttctgtttactaacatatattgaccaagtacatcaagcaggagagatcttccttcattctgttatagtccacatcattctaattttgctcagttgttattaagagcatattcctaaaccatacacttttgtttcaataaagttttattttgttgagatgaataaaataacaaagttataagctgcataagacaaaagttcaattgttcaaaaaaaatttactgggatagctttctattacaggtattgttagattatattgtgctgataagattactttctaaaaaatttgtacttttctgtaaattaaaagaatatggagtcataaaatggcaagtgttttaggattagcctaaaattggacattgtcattgatttcaaagaaggtatgaactagcagtcttacagcctaattcttctttggactggtccttggcagcagttccttttcagactcgataaacagaattcagatgatgtaagtcaaaacaaaactttacaaagccaagcgtattatcttttgcattaacctatttttttccatcatacatgctactagtatgtgcattagcatgatattctcatatacattgcattaaaaattaaaaggtggcagctcagggtgagctcttctgttgctcatttgttcctaaatttttaagggctttttctcagtcaatagtttgtacaaactggttagtttaacttcattacccatttcattaaagttgatgggtcgtgtgatgagatgcatttaaggccgatagtgatagatgttttttttatttcttgaacacaggctttgtctgaatgatgttcttttatctcttgaacacaagctttgaatgataactacaggttttaagtgctgttacattaataccataatgtgatgtgttagaaacaaagggatatttcaaaggtagatatttgaaaattctctagtctcaatatgtatgtgtattgaatatactctaaaaataaatgtgcaatttgctagtaggacaatgcagtgactgactagcattaggtatgtttcttttatatcctagctatgtcccactttcttctaagtgcaatcctttcatgttcacttgctgttttaccccatctactctaacttcatttggaaggcttgtctagagtatagcatgtatttttacctttgcagtgaattgcatgtgctaattgtaaccacagctatttttatgttgacataactccaaatgttatattaaatgttctattatatattagctctaatcccttaagtaaattttaagaaataaatacttgttcaaatttt

SEQ ID NO: 355594 - DNA, 7431 bp, Homo sapiens
ctgacagtgttccggagccggggcgagcagccaaaaggcccgcggagtcgcgctgggccgccccggcgcagctgaaccgggggccgcgcctgccaggccgacgggtctggcccagcctggcgccaaggggttcgtgcgctgtggagacgcggagggtcgaggcggcgcggcctgagtgaaacccaatggaaaaagcatgacatttagaagtagaagacttagcttcaaatccctactccttcacttactaattttgtgatttggaaatatccgcgcaagatgttgacgttgcagacttggctagtgcaagccttgtttattttcctcaccactgaatctacaggtgaacttctagatccatgtggttatatcagtcctgaatctccagttgtacaacttcattctaatttcactgcagtttgtgtgctaaaggaaaaatgtatggattattttcatgtaaatgctaattacattgtctggaaaacaaaccattttactattcctaaggagcaatatactatcataaacagaacagcatccagtgtcacctttacagatatagcttcattaaatattcagctcacttgcaacattcttacattcggacagcttgaacagaatgtttatggaatcacaataatttcaggcttgcctccagaaaaacctaaaaatttgagttgcattgtgaacgaggggaagaaaatgaggtgtgagtgggatggtggaagggaaacacacttggagacaaacttcactttaaaatctgaatgggcaacacacaagtttgctgattgcaaagcaaaacgtgacacccccacctcatgcactgttgattattctactgtgtattttgtcaacattgaagtctgggtagaagcagagaatgcccttgggaaggttacatcagatcatatcaattttgatcctgtatataaagtgaagcccaatccgccacataatttatcagtgatcaactcagaggaactgtctagtatcttaaaattgacatggaccaacccaagtattaagagtgttataatactaaaatataacattcaatataggaccaaagatgcctcaacttggagccagattcctcctgaagacacagcatccacccgatcttcattcactgtccaagaccttaaaccttttacagaatatgtgtttaggattcgctgtatgaaggaagatggtaagggatactggagtgactggagtgaagaagcaagtgggatcacctatgaagatagaccatctaaagcaccaagtttctggtataaaatagatccatcccatactcaaggctacagaactgtacaactcgtgtggaagacattgcctccttttgaagccaatggaaaaatcttggattatgaagtgactctcacaagatggaaatcacatttacaaaattacacagttaatgccacaaaactgacagtaaatctcacaaatgatcgctatctagcaaccctaacagtaagaaatcttgttggcaaatcagatgcagctgttttaactatccctgcctgtgactttcaagctactcaccctgtaatggatcttaaagcattccccaaagataacatgctttgggtggaatggactactccaagggaatctgtaaagaaatatatacttgagtggtgtgtgttatcagataaagcaccctgtatcacagactggcaacaagaagatggtaccgtgcatcgcacctatttaagagggaacttagcagagagcaaatgctatttgataacagttactccagtatatgctgatggaccaggaagccctgaatccataaaggcataccttaaacaagctccaccttccaaaggacctactgttcggacaaaaaaagtagggaaaaacgaagctgtcttagagtgggaccaacttcctgttgatgttcagaatggatttatcagaaattatactatattttatagaaccatcattggaaatgaaactgctgtgaatgtggattcttcccacacagaatatacattgtcctctttgactagtgacacattgtacatggtacgaatggcagcatacacagatgaaggtgggaaggatggtccagaattcacttttactaccccaaagtttgctcaaggagaaattgaagccatagtcgtgcctgtttgcttagcattcctattgacaactcttctgggagtgctgttctgctttaataagcgagacctaattaaaaaacacatctggcctaatgttccagatccttcaaagagtcatattgcccagtggtcacctcacactcctccaaggcacaattttaattcaaaagatcaaatgtattcagatggcaatttcactgatgtaagtgttgtggaaatagaagcaaatgacaaaaagccttttccagaagatctgaaatcattggacctgttcaaaaaggaaaaaattaatactgaaggacacagcagtggtattggggggtcttcatgcatgtcatcttctaggccaagcatttctagcagtgatgaaaatgaatcttcacaaaacacttcgagcactgtccagtattctaccgtggtacacagtggctacagacaccaagttccgtcagtccaagtcttctcaagatccgagtctacccagcccttgttagattcagaggagcggccagaagatctacaattagtagatcatgtagatggcggtgatggtattttgcccaggcaacagtacttcaaacagaactgcagtcagcatgaatccagtccagatatttcacattttgaaaggtcaaagcaagtttcatcagtcaatgaggaagattttgttagacttaaacagcagatttcagatcatatttcacaatcctgtggatctgggcaaatgaaaatgtttcaggaagtttctgcagcagatgcttttggtccaggtactgagggacaagtagaaagatttgaaacagttggcatggaggctgcgactgatgaaggcatgcctaaaagttacttaccacagactgtacggcaaggcggctacatgcctcagtgaaggactagtagttcctgctacaacttcagcagtacctataaagtaaagctaaaatgattttatctgtgaattcagattttaaaaagtcttcactctctgaagatgatcatttgcccttaaggacaaaaatgaactgaagtttcacatgagctatttccattccagaatatctgggattctactttaagcactacataaactgactttatcctcagactagctgaatgattttgtgctgtttcaggatgtttgcactgaagaaaaacagaaagcttatctgaaatttataaaactttttgttttgctacatagaaaacagaaggtatttgaataataagcagtgatatgcttagtgagcacagctatactgattttgattagaatagtcatcagagtggcttagggacagttaatataaaagaggagcaaggtgtagaccatcatctacttctgctaaaataacttaaaaagaggtccataggccataactacatgagcccagcttttgtaatctgacaaaaaaatgaggagcagcttcgtgtatatcagtgtacacggtattccttaggtcccttccattggtagtgatgctgcgagttattactggagaaaaggaattctagagctttaacttggcagattaaaagtactcattttttattcatcaataattagtaatctcactagttttcaaaaatttgcatattattgacaacctctttgaagatgcatttcacaaactcaacagagtgccatgataagagctagggatcccccaaactatctcaagcatctaaaaaattgccatttttaaaggcttaaattgtagtagtaaaggggaaaacaggaagtagtagtaaaggggaaaaaaaaccaataaagcatctaaaaaattggcatgttaaaaggcttaaattgctaatgtgtgtatatatatatatatatatacacacacatatacacacacatatcattgacttttcttaagacttcagagtactgggtagatgaacactttatacagtatatatcttcagcttaaatttgttttgagtattttttttatttttaaataagtaggcaaagatttaaatttttttatttttagtaaatgtttgaggcacactaagacaacttgggcaatatttgccaaaacaaaacagaaccccaaaaaatgtacatcttgttcttagcaaatatcattattgtagagacacttaataaagagatggtattttaatgtctgcagttctgaggtagggtggaacttagttctacattgtgatttaggaatttttaaaaccttttttcttcaagggagaagtgacccaggcctcgagtttagtgctaaagccgctagtgtacttatgctgtcccctaaccaccacgtgcgatatggaagcagatgctaaatataggggttttcttagaaagtaagaggaaattagcaagcgttattagtgattgactactgctatcaagtgaattcaaaggaaacaggtttttatgccatatttaagttacagaaaccaggcatgcttagaatagtttctagaggttattggagaatagaaagctaagaaaacttggtatacatttacaatggaaatataattacactttttactctcagaatattgttcacattagacttcctgtttatcttttatattcttgcatttatataatgcctcatcctttcaaagttctttcacatattatatgatcttctttatgaaaaaaatagatgtttcattctgatatattcagtttcccactttaggcaaaagtagattaatagaatgacgaattcaaagtagatgaggaaaatcaggcacagagaagtaaaggtagggatagacccaaatttacacaacaagataatgacatctccagcttttaagttgatcatcaaaggctgggctggatttgtcttgctgtatgtgtcaggaaatttatacctattacattttccattttctcaaaatttaagtcacatgactaatatttagctgcaactttcctcataacaaatagtgtcatgaagaatgttgtagtgtgaagtttgtacatttcagggtcagatatacaatatgaactcttaatctacaggaatgagaatggaggatcattgaaggccatgatataaacaaatttgcatgttgaagcctgtataaaacatggtacagtgagtgaatatacccccatccccaagaacactttatacatattaaatggatatatgattactgtgcaaaaattcattctggaaatgaacatatatttgagcactaatatgtaatgtacacctgccctaaggagaaaataaattataaaactttttacattcaaaattactttcccaagcatgtcttagaataatctatgtgttgatgcatgtaaattgtactttaggtaggcaaagaaatctggttatttatgtaaaaactagtctaataaagttagttagtggctttatcactttaaatctttagtgtccaaaagtggtgtttaaagtaatagcacatcagaaaaccttgtctggacaaaactagttcactcactgcttctgcacctgcagttgctccctttagggttataaaataatgacccaaatgttacatgtgttgatattataacttgtcagttactgatgtctgtggtatcctaccctcatctctgaaagggataatactgaataattattagaaaactataaaacttcacactttgtaccattaaaacctaaaattttaatcttgtccttttttactatggatcagtcggcactcgggaacagcagcaaggaaaaaaagcaaatttcattcacatgttctgtgttcatacctcttctctacctaattgttcatttaaatttcagccttattccttgataagggattttaccacatgaagtcatccagtgaccctagctcttattgtgaagttagtggagtatacttagaaatgttacaactttaaaatgttacaaaacattcattaaagctcatatttaaagtagagcatctagtttgagaaatagaaatcaattattaaagatgtcttttttctacccatttaactagttaaaaccatgacatgtaaatgtagaagtagaataatcatagaattccctaaaatatttctgtttactaacatatattgaccaagtacatcaagcaggagagatcttccttcattctgttatagtccacatcattctaattttgctcagttgttattaagagcatattcctaaaccatacacttttgtttcaataaagttttattttgttgagatgaataaaataacaaagttataagctgcataagacaaaagttcaattgttcaaaaaaaatttactgggatagctttctattacaggtattgttagattatattgtgctgataagattactttctaaaaaatttgtacttttctgtaaattaaaagaatatggagtcataaaatggcaagtgttttaggattagcctaaaattggacattgtcattgatttcaaagaaggtatgaactagcagtcttacagcctaattcttctttggactggtccttggcagcagttccttttcagactcgataaacagaattcagatgatgtaagtcaaaacaaaactttacaaagccaagcgtattatcttttgcattaacctatttttttccatcatacatgctactagtatgtgcattagcatgatattctcatatacattgcattaaaaattaaaagggctttttctcagtcaatagtttgtacaaactggttagtttaacttcattacccatttcattaaagttgatgggtcgtgtgatgagatgcatttaaggccgatagtgatagatgttttttttatttcttgaacacaggctttgtctgaatgatgttcttttatctcttgaacacaagctttgaatgataactacaggttttaagtgctgttacattaataccataatgtgatgtgttagaaacaaagggatatttcaaaggtagatatttgaaaattctctagtctcaatatgtatgtgtattgaatatactctaaaaataaatgtgcaatttgctagtaggacaatgcagtgactgactagcattaggtatgtttcttttatatcctagctatgtcccactttcttctaagtgcaatcctttcatgttcacttgctgttttaccccatctactctaacttcatttggaaggcttgtctagagtatagcatgtatttttacctttgcagtgaattgcatgtgctaattgtaaccacagctatttttatgttgacataactccaaatgttatattaaatgttctattatatattagctctaatcccttaagtaaattttaagaaataaatacttgttcaaatttt

SEQ ID NO: 355595 - DNA, 7477 bp, Homo sapiens
  misc_feature (7476)..(7477): n is a, c, g, or t
ctgacagtgttccggagccggggcgagcagccaaaaggcccgcggagtcgcgctgggccgccccggcgcagctgaaccgggggccgcgcctgccaggccgacgggtctggcccagcctggcgccaaggggttcgtgcgctgtggagacgcggagggtcgaggcggcgcggcctgagtgaaacccaatggaaaaagcatgacatttagaagtagaagacttagcttcaaatccctactccttcacttactaattttgtgatttggaaatatccgcgcaagatgttgacgttgcagacttggctagtgcaagccttgtttattttcctcaccactgaatctacaggtgaacttctagatccatgtggttatatcagtcctgaatctccagttgtacaacttcattctaatttcactgcagtttgtgtgctaaaggaaaaatgtatggattattttcatgtaaatgctaattacattgtctggaaaacaaaccattttactattcctaaggagcaatatactatcataaacagaacagcatccagtgtcacctttacagatatagcttcattaaatattcagctcacttgcaacattcttacattcggacagcttgaacagaatgtttatggaatcacaataatttcaggcttgcctccagaaaaacctaaaaatttgagttgcattgtgaacgaggggaagaaaatgaggtgtgagtgggatggtggaagggaaacacacttggagacaaacttcactttaaaatctgaatgggcaacacacaagtttgctgattgcaaagcaaaacgtgacacccccacctcatgcactgttgattattctactgtgtattttgtcaacattgaagtctgggtagaagcagagaatgcccttgggaaggttacatcagatcatatcaattttgatcctgtatataaagtgaagcccaatccgccacataatttatcagtgatcaactcagaggaactgtctagtatcttaaaattgacatggaccaacccaagtattaagagtgttataatactaaaatataacattcaatataggaccaaagatgcctcaacttggagccagattcctcctgaagacacagcatccacccgatcttcattcactgtccaagaccttaaaccttttacagaatatgtgtttaggattcgctgtatgaaggaagatggtaagggatactggagtgactggagtgaagaagcaagtgggatcacctatgaagatagaccatctaaagcaccaagtttctggtataaaatagatccatcccatactcaaggctacagaactgtacaactcgtgtggaagacattgcctccttttgaagccaatggaaaaatcttggattatgaagtgactctcacaagatggaaatcacatttacaaaattacacagttaatgccacaaaactgacagtaaatctcacaaatgatcgctatctagcaaccctaacagtaagaaatcttgttggcaaatcagatgcagctgttttaactatccctgcctgtgactttcaagctactcaccctgtaatggatcttaaagcattccccaaagataacatgctttgggtggaatggactactccaagggaatctgtaaagaaatatatacttgagtggtgtgtgttatcagataaagcaccctgtatcacagactggcaacaagaagatggtaccgtgcatcgcacctatttaagagggaacttagcagagagcaaatgctatttgataacagttactccagtatatgctgatggaccaggaagccctgaatccataaaggcataccttaaacaagctccaccttccaaaggacctactgttcggacaaaaaaagtagggaaaaacgaagctgtcttagagtgggaccaacttcctgttgatgttcagaatggatttatcagaaattatactatattttatagaaccatcattggaaatgaaactgctgtgaatgtggattcttcccacacagaatatacattgtcctctttgactagtgacacattgtacatggtacgaatggcagcatacacagatgaaggtgggaaggatggtccagaattcacttttactaccccaaagtttgctcaaggagaaattgaagccatagtcgtgcctgtttgcttagcattcctattgacaactcttctgggagtgctgttctgctttaataagcgagacctaattaaaaaacacatctggcctaatgttccagatccttcaaagagtcatattgcccagtggtcacctcacactcctccaaggcacaattttaattcaaaagatcaaatgtattcagatggcaatttcactgatgtaagtgttgtggaaatagaagcaaatgacaaaaagccttttccagaagatctgaaatcattggacctgttcaaaaaggaaaaaattaatactgaaggacacagcagtggtattggggggtcttcatgcatgtcatcttctaggccaagcatttctagcagtgatgaaaatgaatcttcacaaaacacttcgagcactgtccagtattctaccgtggtacacagtggctacagacaccaagttccgtcagtccaagtcttctcaagatccgagtctacccagcccttgttagattcagaggagcggccagaagatctacaattagtagatcatgtagatggcggtgatggtattttgcccaggcaacagtacttcaaacagaactgcagtcagcatgaatccagtccagatatttcacattttgaaaggtcaaagcaagtttcatcagtcaatgaggaagattttgttagacttaaacagcagatttcagatcatatttcacaatcctgtggatctgggcaaatgaaaatgtttcaggaagtttctgcagcagatgcttttggtccaggtactgagggacaagtagaaagatttgaaacagttggcatggaggctgcgactgatgaaggcatgcctaaaagttacttaccacagactgtacggcaaggcggctacatgcctcagtgaaggactagtagttcctgctacaacttcagcagtacctataaagtaaagctaaaatgattttatctgtgaattcagattttaaaaagtcttcactctctgaagatgatcatttgcccttaaggacaaaaatgaactgaagtttcacatgagctatttccattccagaatatctgggattctactttaagcactacataaactgactttatcctcagactagctgaatgattttgtgctgtttcaggatgtttgcactgaagaaaaacagaaagcttatctgaaatttataaaactttttgttttgctacatagaaaacagaaggtatttgaataataagcagtgatatgcttagtgagcacagctatactgattttgattagaatagtcatcagagtggcttagggacagttaatataaaagaggagcaaggtgtagaccatcatctacttctgctaaaataacttaaaaagaggtccataggccataactacatgagcccagcttttgtaatctgacaaaaaaatgaggagcagcttcgtgtatatcagtgtacacggtattccttaggtcccttccattggtagtgatgctgcgagttattactggagaaaaggaattctagagctttaacttggcagattaaaagtactcattttttattcatcaataattagtaatctcactagttttcaaaaatttgcatattattgacaacctctttgaagatgcatttcacaaactcaacagagtgccatgataagagctagggatcccccaaactatctcaagcatctaaaaaattgccatttttaaaggcttaaattgtagtagtaaaggggaaaacaggaagtagtagtaaaggggaaaaaaaaccaataaagcatctaaaaaattggcatgttaaaaggcttaaattgctaatgtgtgtatatatatatatatatatacacacacatatacacacacatatcattgacttttcttaagacttcagagtactgggtagatgaacactttatacagtatatatcttcagcttaaatttgttttgagtattttttttatttttaaataagtaggcaaagatttaaatttttttatttttagtaaatgtttgaggcacactaagacaacttgggcaatatttgccaaaacaaaacagaaccccaaaaaatgtacatcttgttcttagcaaatatcattattgtagagacacttaataaagagatggtattttaatgtctgcagttctgaggtagggtggaacttagttctacattgtgatttaggaatttttaaaaccttttttcttcaagggagaagtgacccaggcctcgagtttagtgctaaagccgctagtgtacttatgctgtcccctaaccaccacgtgcgatatggaagcagatgctaaatataggggttttcttagaaagtaagaggaaattagcaagcgttattagtgattgactactgctatcaagtgaattcaaaggaaacaggtttttatgccatatttaagttacagaaaccaggcatgcttagaatagtttctagaggttattggagaatagaaagctaagaaaacttggtatacatttacaatggaaatataattacactttttactctcagaatattgttcacattagacttcctgtttatcttttatattcttgcatttatataatgcctcatcctttcaaagttctttcacatattatatgatcttctttatgaaaaaaatagatgtttcattctgatatattcagtttcccactttaggcaaaagtagattaatagaatgacgaattcaaagtagatgaggaaaatcaggcacagagaagtaaaggtagggatagacccaaatttacacaacaagataatgacatctccagcttttaagttgatcatcaaaggctgggctggatttgtcttgctgtatgtgtcaggaaatttatacctattacattttccattttctcaaaatttaagtcacatgactaatatttagctgcaactttcctcataacaaatagtgtcatgaagaatgttgtagtgtgaagtttgtacatttcagggtcagatatacaatatgaactcttaatctacaggaatgagaatggaggatcattgaaggccatgatataaacaaatttgcatgttgaagcctgtataaaacatggtacagtgagtgaatatacccccatccccaagaacactttatacatattaaatggatatatgattactgtgcaaaaattcattctggaaatgaacatatatttgagcactaatatgtaatgtacacctgccctaaggagaaaataaattataaaactttttacattcaaaattactttcccaagcatgtcttagaataatctatgtgttgatgcatgtaaattgtactttaggtaggcaaagaaatctggttatttatgtaaaaactagtctaataaagttagttagtggctttatcactttaaatctttagtgtccaaaagtggtgtttaaagtaatagcacatcagaaaaccttgtctggacaaaactagttcactcactgcttctgcacctgcagttgctccctttagggttataaaataatgacccaaatgttacatgtgttgatattataacttgtcagttactgatgtctgtggtatcctaccctcatctctgaaagggataatactgaataattattagaaaactataaaacttcacactttgtaccattaaaacctaaaattttaatcttgtccttttttactatggatcagtcggcactcgggaacagcagcaaggaaaaaaagcaaatttcattcacatgttctgtgttcatacctcttctctacctaattgttcatttaaatttcagccttattccttgataagggattttaccacatgaagtcatccagtgaccctagctcttattgtgaagttagtggagtatacttagaaatgttacaactttaaaatgttacaaaacattcattaaagctcatatttaaagtagagcatctagtttgagaaatagaaatcaattattaaagatgtcttttttctacccatttaactagttaaaaccatgacatgtaaatgtagaagtagaataatcatagaattccctaaaatatttctgtttactaacatatattgaccaagtacatcaagcaggagagatcttccttcattctgttatagtccacatcattctaattttgctcagttgttattaagagcatattcctaaaccatacacttttgtttcaataaagttttattttgttgagatgaataaaataacaaagttataagctgcataagacaaaagttcaattgttcaaaaaaaatttactgggatagctttctattacaggtattgttagattatattgtgctgataagattactttctaaaaaatttgtacttttctgtaaattaaaagaatatggagtcataaaatggcaagtgttttaggattagcctaaaattggacattgtcattgatttcaaagaaggtatgaactagcagtcttacagcctaattcttctttggactggtccttggcagcagttccttttcagactcgataaacagaattcagatgatgtaagtcaaaacaaaactttacaaagccaagcgtattatcttttgcattaacctatttttttccatcatacatgctactagtatgtgcattagcatgatattctcatatacattgcattaaaaattaaaaggtggcagctcagggtgagctcttctgttgctcatttgttcctaaatttttaagggctttttctcagtcaatagtttgtacaaactggttagtttaacttcattacccatttcattaaagttgatgggtcgtgtgatgagatgcatttaaggccgatagtgatagatgttttttttatttcttgaacacaggctttgtctgaatgatgttcttttatctcttgaacacaagctttgaatgataactacaggttttaagtgctgttacattaataccataatgtgatgtgttagaaacaaagggatatttcaaaggtagatatttgtgcaatttgctagtaggacaatgcagtgactgactagcattaggtatgtttcttttatatcctagctatgtcccactttcttctaagtgcaatcctttcatgttcacttgctgttttaccccatctactctaacttcatttggaaggcttgtctagagtatagcatgtatttttacctttgcagtgaattgcatgtgctaattgtaaccacagctatttatgtgactactccctgtgtttaatgtctatatatagtctatccttagaatttagctatctgtccttacaaaccaacatcgggcggccatccttgaggtcgcggcaaggggacagccaattacctcggtgccctcctggttgttgtnn

SEQ ID NO: 355596 - DNA, 7113 bp, Homo sapiens
  misc_feature (7108)..(7108): n is a, c, g, or t
ctgacagtgttccggagccggggcgagcagccaaaaggcccgcggagtcgcgctgggccgccccggcgcagctgaaccgggggccgcgcctgccaggccgacgggtctggcccagcctggcgccaaggggttcgtgcgctgtggagacgcggagggtcgaggcggcgcggcctgagtgaaacccaatggaaaaagcatgacatttagaagtagaagacttagcttcaaatccctactccttcacttactaattttgtgatttggaaatatccgcgcaagatgttgacgttgcagacttggctagtgcaagccttgtttattttcctcaccactgaatctacaggtgaacttctagatccatgtggttatatcagtcctgaatctccagttgtacaacttcattctaatttcactgcagtttgtgtgctaaaggaaaaatgtatggattattttcatgtaaatgctaattacattgtctggaaaacaaaccattttactattcctaaggagcaatatactatcataaacagaacagcatccagtgtcacctttacagatatagcttcattaaatattcagctcacttgcaacattcttacattcggacagcttgaacagaatgtttatggaatcacaataatttcaggcttgcctccagaaaaacctaaaaatttgagttgcattgtgaacgaggggaagaaaatgaggtgtgagtgggatggtggaagggaaacacacttggagacaaacttcactttaaaatctgaatgggcaacacacaagtttgctgattgcaaagcaaaacgtgacacccccacctcatgcactgttgattattctactgtgtattttgtcaacattgaagtctgggtagaagcagagaatgcccttgggaaggttacatcagatcatatcaattttgatcctgtatataaagtgaagcccaatccgccacataatttatcagtgatcaactcagaggaactgtctagtatcttaaaattgacatggaccaacccaagtattaagagtgttataatactaaaatataacattcaatataggaccaaagatgcctcaacttggagccagattcctcctgaagacacagcatccacccgatcttcattcactgtccaagaccttaaaccttttacagaatatgtgtttaggattcgctgtatgaaggaagatggtaagggatactggagtgactggagtgaagaagcaagtgggatcacctatgaagatagaccatctaaagcaccaagtttctggtataaaatagatccatcccatactcaaggctacagaactgtacaactcgtgtggaagacattgcctccttttgaagccaatggaaaaatcttggattatgaagtgactctcacaagatggaaatcacatttacaaaattacacagttaatgccacaaaactgacagtaaatctcacaaatgatcgctatctagcaaccctaacagtaagaaatcttgttggcaaatcagatgcagctgttttaactatccctgcctgtgactttcaagctactcaccctgtaatggatcttaaagcattccccaaagataacatgctttgggtggaatggactactccaagggaatctgtaaagaaatatatacttgagtggtgtgtgttatcagataaagcaccctgtatcacagactggcaacaagaagatggtaccgtgcatcgcacctatttaagagggaacttagcagagagcaaatgctatttgataacagttactccagtatatgctgatggaccaggaagccctgaatccataaaggcataccttaaacaagctccaccttccaaaggacctactgttcggacaaaaaaagtagggaaaaacgaagctgtcttagagtgggaccaacttcctgttgatgttcagaatggatttatcagaaattatactatattttatagaaccatcattggaaatgaaactgctgtgaatgtggattcttcccacacagaatatacattgtcctctttgactagtgacacattgtacatggtacgaatggcagcatacacagatgaaggtgggaaggatggtccagaattcacttttactaccccaaagtttgctcaaggagaaattgaagccatagtcgtgcctgtttgcttagcattcctattgacaactcttctgggagtgctgttctgctttaataagcgagacctaattaaaaaacacatctggcctaatgttccagatccttcaaagagtcatattgcccagtggtcacctcacactcctccaaggcacaattttaattcaaaagatcaaatgtattcagatggcaatttcactgatgtaagtgttgtggaaatagaagcaaatgacaaaaagccttttccagaagatctgaaatcattggacctgttcaaaaaggaaaaaattaatactgaaggacacagcagtggtattggggggtcttcatgcatgtcatcttctaggccaagcatttctagcagtgatgaaaatgaatcttcacaaaacacttcgagcactgtccagtattctaccgtggtacacagtggctacagacaccaagttccgtcagtccaagtcttctcaagatccgagtctacccagcccttgttagattcagaggagcggccagaagatctacaattagtagatcatgtagatggcggtgatggtattttgcccaggcaacagtacttcaaacagaactgcagtcagcatgaatccagtccagatatttcacattttgaaaggtcaaagcaagtttcatcagtcaatgaggaagattttgttagacttaaacagcagatttcagatcatatttcacaatcctgtggatctgggcaaatgaaaatgtttcaggaagtttctgcagcagatgcttttggtccaggtactgagggacaagtagaaagatttgaaacagttggcatggaggctgcgactgatgaaggcatgcctaaaagttacttaccacagactgtacggcaaggcggctacatgcctcagtgaaggactagtagttcctgctacaacttcagcagtacctataaagtaaagctaaaatgattttatctgtgaattcagattttaaaaagtcttcactctctgaagatgatcatttgcccttaaggacaaaaatgaactgaagtttcacatgagctatttccattccagaatatctgggattctactttaagcactacataaactgactttatcctcagactagctgaatgattttgtgctgtttcaggatgtttgcactgaagaaaaacagaaagcttatctgaaatttataaaactttttgttttgctacatagaaaacagaaggtatttgaataataagcagtgatatgcttagtgagcacagctatactgattttgattagaatagtcatcagagtggcttagggacagttaatataaaagaggagcaaggtgtagaccatcatctacttctgctaaaataacttaaaaagaggtccataggccataactacatgagcccagcttttgtaatctgacaaaaaaatgaggagcagcttcgtgtatatcagtgtacacggtattccttaggtcccttccattggtagtgatgctgcgagttattactggagaaaaggaattctagagctttaacttggcagattaaaagtactcattttttattcatcaataattagtaatctcactagttttcaaaaatttgcatattattgacaacctctttgaagatgcatttcacaaactcaacagagtgccatgataagagctagggatcccccaaactatctcaagcatctaaaaaattgccatttttaaaggcttaaattgtagtagtaaaggggaaaacaggaagtagtagtaaaggggaaaaaaaaccaataaagcatctaaaaaattggcatgttaaaaggcttaaattgctaatgtgtgtatatatatatatatatatacacacacatatacacacacatatcattgacttttcttaagacttcagagtactgggtagatgaacactttatacagtatatatcttcagcttaaatttgttttgagtattttttttatttttaaataagtaggcaaagatttaaatttttttatttttagtaaatgtttgaggcacactaagacaacttgggcaatatttgccaaaacaaaacagaaccccaaaaaatgtacatcttgttcttagcaaatatcattattgtagagacacttaataaagagatggtattttaatgtctgcagttctgaggtagggtggaacttagttctacattgtgatttaggaatttttaaaaccttttttcttcaagggagaagtgacccaggcctcgagtttagtgctaaagccgctagtgtacttatgctgtcccctaaccaccacgtgcgatatggaagcagatgctaaatataggggttttcttagaaagtaagaggaaattagcaagcgttattagtgattgactactgctatcaagtgaattcaaaggaaacaggtttttatgccatatttaagttacagaaaccaggcatgcttagaatagtttctagaggttattggagaatagaaagctaagaaaacttggtatacatttacaatggaaatataattacactttttactctcagaatattgttcacattagacttcctgtttatcttttatattcttgcatttatataatgcctcatcctttcaaagttctttcacatattatatgatcttctttatgaaaaaaatagatgtttcattctgatatattcagtttcccactttaggcaaaagtagattaatagaatgacgaattcaaagtagatgaggaaaatcaggcacagagaagtaaaggtagggatagacccaaatttacacaacaagataatgacatctccagcttttaagttgatcatcaaaggctgggctggatttgtcttgctgtatgtgtcaggaaatttatacctattacattttccattttctcaaaatttaagtcacatgactaatatttagctgcaactttcctcataacaaatagtgtcatgaagaatgttgtagtgtgaagtttgtacatttcagggtcagatatacaatatgaactcttaatctacaggaatgagaatggaggatcattgaaggccatgatataaacaaatttgcatgttgaagcctgtataaaacatggtacagtgagtgaatatacccccatccccaagaacactttatacatattaaatggatatatgattactgtgcaaaaattcattctggaaatgaacatatatttgagcactaatatgtaatgtacacctgccctaaggagaaaataaattataaaactttttacattcaaaattactttcccaagcatgtcttagaataatctatgtgttgatgcatgtaaattgtactttaggtaggcaaagaaatctggttatttatgtaaaaactagtctaataaagttagttagtggctttatcactttaaatctttagtgtccaaaagtggtgtttaaagtaatagcacatcagaaaaccttgtctggacaaaactagttcactcactgcttctgcacctgcagttgctccctttagggttataaaataatgacccaaatgttacatgtgttgatattataacttgtcagttactgatgtctgtggtatcctaccctcatctctgaaagggataatactgaataattattagaaaactataaaacttcacactttgtaccattaaaacctaaaattttaatcttgtccttttttactatggatcagtcggcactcgggaacagcagcaaggaaaaaaagcaaatttcattcacatgttctgtgttcatacctcttctctacctaattgttcatttaaatttcagccttattccttgataagggattttaccacatgaagtcatccagtgaccctagctcttattgtgaagttagtggagtatacttagaaatgttacaactttaaaatgttacaaaacattcattaaagctcatatttaaagtagagcatctagtttgagaaatagaaatcaattattaaagatgtcttttttctacccatttaactagttaaaaccatgacatgtaaatgtagaagtagaataatcatagaattccctaaaatatttctgtttactaacatatattgaccaagtacatcaagcaggagagatcttccttcattctgttatagtccacatcattctaattttgctcagttgttattaagagcatattcctaaaccatacacttttgtttcaataaagttttattttgttgagatgaataaaataacaaagttataagctgcataagacaaaagttcaattgttcaaaaaaaatttactgggatagctttctattacaggtattgttagattatattgtgctgataagattactttctaaaaaatttgtacttttctgtaaattaaaagaatatggagtcataaaatggcaagtgttttaggattagcctaaaattggacattgtcattgatttcaaagaaggtatgaactagcagtcttacagcctaattcttctttggactggtccttggcagcagttccttttcagactcgataaacagaattcagatgatgtaagtcaaaacaaaactttacaaagccaagcgtattatcttttgcattaacctatttttttccatcatacatgctactagtatgtgcattagcatgatattctcatatacattgcattaaaaattaaaaggtggcagctcagggtgagctcttctgttgctcatttgttcctaaatttttaagggctttttctcagtcaatagtttgtacaaactggttagtttaacttcattacccatttcattaaagttgatgggtcgtgtgatgagatgcatttaaggccgatagtgatagatgttttttttatttcttgaacacaggctttgtctgaatgatgttcttttatctcttgaacacaagctttgaatgataactacaggttttaagtgctgtttcaatccagagtgctgtttcaaaccaggggatcctctagagcgaccgcaggcagcanaaagc

SEQ ID NO: 355597 - DNA, 5808 bp, Homo sapiens
ctgacagtgttccggagccggggcgagcagccaaaaggcccgcggagtcgcgctgggccgccccggcgcagctgaaccgggggccgcgcctgccaggccgacgggtctggcccagcctggcgccaaggggttcgtgcgctgtggagacgcggagggtcgaggcggcgcggcctgagtgaaacccaatggaaaaagcatgacatttagaagtagaagacttagcttcaaatccctactccttcacttactaattttgtgatttggaaatatccgcgcaagatgttgacgttgcagacttggctagtgcaagccttgtttattttcctcaccactgaatctacaggtgaacttctagatccatgtggttatatcagtcctgaatctccagttgtacaacttcattctaatttcactgcagtttgtgtgctaaaggaaaaatgtatggattattttcatgtaaatgctaattacattgtctggaaaacaaaccattttactattcctaaggagcaatatactatcataaacagaacagcatccagtgtcacctttacagatatagcttcattaaatattcagctcacttgcaacattcttacattcggacagcttgaacagaatgtttatggaatcacaataatttcaggcttgcctccagaaaaacctaaaaatttgagttgcattgtgaacgaggggaagaaaatgaggtgtgagtgggatggtggaagggaaacacacttggagacaaacttcactttaaaatctgaatgggcaacacacaagtttgctgattgcaaagcaaaacgtgacacccccacctcatgcactgttgattattctactgtgtattttgtcaacattgaagtctgggtagaagcagagaatgcccttgggaaggttacatcagatcatatcaattttgatcctgtatataaagtgaagcccaatccgccacataatttatcagtgatcaactcagaggaactgtctagtatcttaaaattgacatggaccaacccaagtattaagagtgttataatactaaaatataacattcaatataggaccaaagatgcctcaacttggagccagattcctcctgaagacacagcatccacccgatcttcattcactgtccaagaccttaaaccttttacagaatatgtgtttaggattcgctgtatgaaggaagatggtaagggatactggagtgactggagtgaagaagcaagtgggatcacctatgaagatagaccatctaaagcaccaagtttctggtataaaatagatccatcccatactcaaggctacagaactgtacaactcgtgtggaagacattgcctccttttgaagccaatggaaaaatcttggattatgaagtgactctcacaagatggaaatcacatttacaaaattacacagttaatgccacaaaactgacagtaaatctcacaaatgatcgctatctagcaaccctaacagtaagaaatcttgttggcaaatcagatgcagctgttttaactatccctgcctgtgactttcaagctactcaccctgtaatggatcttaaagcattccccaaagataacatgctttgggtggaatggactactccaagggaatctgtaaagaaatatatacttgagtggtgtgtgttatcagataaagcaccctgtatcacagactggcaacaagaagatggtaccgtgcatcgcacctatttaagagggaacttagcagagagcaaatgctatttgataacagttactccagtatatgctgatggaccaggaagccctgaatccataaaggcataccttaaacaagctccaccttccaaaggacctactgttcggacaaaaaaagtagggaaaaacgaagctgtcttagagtgggaccaacttcctgttgatgttcagaatggatttatcagaaattatactatattttatagaaccatcattggaaatgaaactgctgtgaatgtggattcttcccacacagaatatacattgtcctctttgactagtgacacattgtacatggtacgaatggcagcatacacagatgaaggtgggaaggatggtccagaattcacttttactaccccaaagtttgctcaaggagaaattgaagccatagtcgtgcctgtttgcttagcattcctattgacaactcttctgggagtgctgttctgctttaataagcgagacctaattaaaaaacacatctggcctaatgttccagatccttcaaagagtcatattgcccagtggtcacctcacactcctccaaggcacaattttaattcaaaagatcaaatgtattcagatggcaatttcactgatgtaagtgttgtggaaatagaagcaaatgacaaaaagccttttccagaagatctgaaatcattggacctgttcaaaaaggaaaaaattaatactgaaggacacagcagtggtattggggggtcttcatgcatgtcatcttctaggccaagcatttctagcagtgatgaaaatgaatcttcacaaaacacttcgagcactgtccagtattctaccgtggtacacagtggctacagacaccaagttccgtcagtccaagtcttctcaagatccgagtctacccagcccttgttagattcagaggagcggccagaagatctacaattagtagatcatgtagatggcggtgatggtattttgcccaggcaacagtacttcaaacagaactgcagtcagcatgaatccagtccagatatttcacattttgaaaggtcaaagcaagtttcatcagtcaatgaggaagattttgttagacttaaacagcagatttcagatcatatttcacaatcctgtggatctgggcaaatgaaaatgtttcaggaagtttctgcagcagatgcttttggtccaggtactgagggacaagtagaaagatttgaaacagttggcatggaggctgcgactgatgaaggcatgcctaaaagttacttaccacagactgtacggcaaggcggctacatgcctcagtgaaggactagtagttcctgctacaacttcagcagtacctataaagtaaagctaaaatgattttatctgtgaattcagattttaaaaagtcttcactctctgaagatgatcatttgcccttaaggacaaaaatgaactgaagtttcacatgagctatttccattccagaatatctgggattctactttaagcactacataaactgactttatcctcagactagctgaatgattttgtgctgtttcaggatgtttgcactgaagaaaaacagaaagcttatctgaaatttataaaactttttgttttgctacatagaaaacagaaggtatttgaataataagcagtgatatgcttagtgagcacagctatactgattttgattagaatagtcatcagagtggcttagggacagttaatataaaagaggagcaaggtgtagaccatcatctacttctgctaaaataacttaaaaagaggtccataggccataactacatgagcccagcttttgtaatctgacaaaaaaatgaggagcagcttcgtgtatatcagtgtacacggtattccttaggtcccttccattggtagtgatgctgcgagttattactggagaaaaggaattctagagctttaacttggcagattaaaagtactcattttttattcatcaataattagtaatctcactagttttcaaaaatttgcatattattgacaacctctttgaagatgcatttcacaaactcaacagagtgccatgataagagctagggatcccccaaactatctcaagcatctaaaaaattgccatttttaaaggcttaaattgtagtagtaaaggggaaaacaggaagtagtagtaaaggggaaaaaaaaccaataaagcatctaaaaaattggcatgttaaaaggcttaaattgctaatgtgtgtatatatatatatatatatacacacacatatacacacacatatcattgacttttcttaagacttcagagtactgggtagatgaacactttatacagtatatatcttcagcttaaatttgttttgagtattttttttatttttaaataagtaggcaaagatttaaatttttttatttttagtaaatgtttgaggcacactaagacaacttgggcaatatttgccaaaacaaaacagaaccccaaaaaatgtacatcttgttcttagcaaatatcattattgtagagacacttaataaagagatggtattttaatgtctgcagttctgaggtagggtggaacttagttctacattgtgatttaggaatttttaaaaccttttttcttcaagggagaagtgacccaggcctcgagtttagtgctaaagccgctagtgtacttatgctgtcccctaaccaccacgtgcgatatggaagcagatgctaaatataggggttttcttagaaagtaagaggaaattagcaagcgttattagtgattgactactgctatcaagtgaattcaaaggaaacaggtttttatgccatatttaagttacagaaaccaggcatgcttagaatagtttctagaggttattggagaatagaaagctaagaaaacttggtatacatttacaatggaaatataattacactttttactctcagaatattgttcacattagacttcctgtttatcttttatattcttgcatttatataatgcctcatcctttcaaagttctttcacatattatatgatcttctttatgaaaaaaatagatgtttcattctgatatattcagtttcccactttaggcaaaagtagattaatagaatgacgaattcaaagtagatgaggaaaatcaggcacagagaagtaaaggtagggatagacccaaatttacacaacaagataatgacatctccagcttttaagttgatcatcaaaggctgggctggatttgtcttgctgtatgtgtcaggaaatttatacctattacattttccattttctcaaaatttaagtcacatgactaatatttagctgcaactttcctcataacaaatagtgtcatgaagaatgttgtagtgtgaagtttgtacatttcagggtcagatatacaatatgaactcttaatctacaggaatgagaatggaggatcattgaaggccatgatataaacaaatttgcatgttgaagcctgtataaaacatggtacagtgagtgaatatacccccatccccaagaacactttatacatattaaatggatatatgattactgtgcaaaaattcattctggaaatgaacatatatttgagcactaatatgtaatgtacacctgccctaaggagaaaataaattataaaactttttacattcaaaattactttcccaagcatgtcttagaataatctatgtgttgatgcatgtaaattgtactttaggtaggcaaagaaatctggttatttatgtaaaaactagtctaataaagttagttagtggctttatcactttaaatctttagtgtccaaaagtggtgtttaaagtaatagcacatcagaaaaccttgtctggacaaaactagttcactcactgcttctgcacctgcagttgctccctttagggttataaaataatgacccaaatgttacatgtgttgatattataacttgtcagttactgatgtctgtggtatcctaccctcatctctgaaaggcatcaccatcaatggccattagagctccaatagtcttagctctttcgtacgcgttagaccgtcccgtttagtaacagatatacac

SEQ ID NO: 355598 - DNA, 393 bp, Homo sapiens
gtattaagtgtttcacaagaaatactcctttacacgtatgtgattatagcttgggggaacaatcaaggataaatgacagtttcttttctttctttctttctttctttctttcttttctttctttggcattattgtgagagggaacaattttataagtaaatgtttttactccaaacatgagtaaactgttcaagctaagggctttactgacttacttccttcatgggtttgtctggttcatcttattcccttgtcatctatttctcctgatgacttttttccacttataaattgaaatatagttccacacccatgacacaattatttctgtaactttggcccagtttcctaacccagagacatttttctcttcagtgagtgctgtaaattaaa

SEQ ID NO: 355599 - DNA, 1085 bp, Homo sapiens
tgtgggcgtccgtcgtggtcttctgatgacgcagttagtcggctgcaatggcgccggtgaggcggtccgcgaagtggcggcctggtggtattgaggcgcgtggtgaaggggtttccactgtcgggtacaggaataagaatgtgagacagaagacatggcggcctaaccacccgcaagccttcgtggggagcgttcgcgagggacaaggctttgcttttcgaagaaaactgaaaatacagcaaagttacaagaaattgctacggaaggaaaagaaggctcaaacgtcactggaatctcaattcacagatcgatacccagataatctgaaacatctctatttagctgaagaggaaagacataggaagcaagcaagaaaagtcgaccatcctttgtcagaacaagttcaccagccgttgcttgaagaacagtgtagcattgacgagcctttatttgaagatcagtgtagctttgaccagcctcagccagaagaacaatgtattaaaacagtaaactcctttacaattccaaagaaaaataaaaagaaaacatcaaatcaaaaagcacaagaagaatatgaacagatacaagccaaacgtgctgctaagaaacaagaattcgagaggagaaaacaggagagagaagaagcccaaaggcagtacaaaaagaagaaaatggaagtgtttaaaatactgaacaaaaagactaaaaagggccaaccaaacttgaatgtacaaatggagtaccttcttcaaaaaatacaagaaaaatgttaaacattttgttcctacaggttaaaatatctgctgcctattaggttcttctgtgacatgtgcctcccagcagtgaactaaatttgtcgacataaactggattgctaaactatgctaaatataagatgttcacatatttttattatggtaaaaaattttctaaatatgttctacatgtttcttatttatttgcctctgaaggaaggttggcctgaagaactgaaagaacctcttattttgcaagacaggcccaagcatgtaatacttttgtaccatatgagatttatatgaaataaattttttaaaaataaggaa

SEQ ID NO: 355600 - DNA, 542 bp, Homo sapiens
tgtgggcgtccgtcgtggtcttctgatgacgcagttagtcggctgcaatggcgccggtgaggcggtccgcgaagtggcggcctggtggtattgaggcgcgtggtgaaggggtttccactgtcgggtacaggaataagaatgtgagacagaagacatggcggcctaaccacccgcaagccttcgtggggagcgttcgcgagggacaaggctttgcttttcgaagaaaactgaaaatacagcaaagttacaagaaattgctacggaaggaaaagaaggctcaaacgtcactggaatctcaattcacagatcgatacccagataatctgaaacatctctatttagctgaagaggaaagacataggaagcaagcaagaaaagtcgaccatcctttgtcagaacaagttcaccagccgttgcttgaagaacagtgtagcattgacgagcctttatttgaagatcagtgtagctttgaccagcctcagccagaagaacaatgtattaaaacagtaaagtatgtattttcttcatttgaaatcctttaa

SEQ ID NO: 355601 - DNA, 1001 bp, Homo sapiens
cgcgtctctgagggcagggcctccgtctccgacgctgacttcctcagcgcagccagcactgtctccggtggcaagtcgaccagctcctcccacacggattctgtgtagaaatccacggacaaggctttgcttttcgaagaaaactgaaaatacagcaaagttacaagaaattgctacggaaggaaaagaaggctcaaacgtcactggaatctcaattcacagatcgatacccagataatctgaaacatctctatttagctgaagaggaaagacataggaagcaagcaagaaaagtcgaccatcctttgtcagaacaagttcaccagccgttgcttgaagaacagtgtagcattgacgagcctttatttgaagatcagtgtagctttgaccagcctcagccagaagaacaatgtattaaaacagtaaactcctttacaattccaaagaaaaataaaaagaaaacatcaaatcaaaaagcacaagaagaatatgaacagatacaagccaaacgtgctgctaagaaacaagaattcgagaggagaaaacaggagagagaagaagcccaaaggcagtacaaaaagaagaaaatggaagtgtttaaaatactgaacaaaaagactaaaaagggccaaccaaacttgaatgtacaaatggagtaccttcttcaaaaaatacaagaaaaatgttaaacattttgttcctacaggttaaaatatctgctgcctattaggttcttctgtgacatgtgcctcccagcagtgaactaaatttgtcgacataaactggattgctaaactatgctaaatataagatgttcacatatttttattatggtaaaaaattttctaaatatgttctacatgtttcttatttatttgcctctgaaggaaggttggcctgaagaactgaaagaacctcttattttgcaagacaggcccaagcatgtaatacttttgtaccatatgagatttatatgaaataaattttttaaaaataaggaa

SEQ ID NO: 355602 - DNA, 671 bp, Homo sapiens
tgtgggcgtccgtcgtggtcttctgatgacgcagttagtcggctgcaatggcgccggtgaggcggtccgcgaagtggcggcctggtggtattgaggcgcgtggtgaaggggtttccactgtcgggtacaggaataagaatgtgagacagaagacatggcggcctaaccacccgcaagccttcgtggggagcgttcgcgagggacaaggctttgcttttcgaagaaaactgaaaatacagcaaagttacaagaaattgctacggaaggaaaagaaggctcaaacgtcactggaatctcaattcacagatcgatacccagataatctgaaacatctctatttagctgaagaggaaagacataggaagcaagcaagaaaagtcgaccatcctttgtcagaacaagttcaccagccgttgcttgaagaacagtgtagcattgacgagcctttatttgaagatcagtgtagctttgaccagcctcagccagaagaacaatgtattaaaacagtaaactcctttacaattccaaagaaaaataaaaagaaaacatcaaatcaaaaagcacaagaagaatatgaacagatacaagccaaacgtgctgctaagaaacaaattagagtgttcaaagcaggcccgagccgcctggataccgcacaaagaaataaaagtaag

SEQ ID NO: 355603 - DNA, 1218 bp, Homo sapiens
aataggactgaggacaggtctctggatttgtggactaggcagtcactagtcactagtccaaagtcgctagtgattagtagctattaaaatattatattgtagttacagagtatagtgaaaagttgaatgatagaggaaagtaaagttattactgaatcaaggatgctgaggaaatgaatggaattccaagtagttggattagccttgacaaaaaggacatcttcagagaggtgagaagtagttaaagatagaacagttcaaaatggtatctagatccaaggtatggtgattcatgactaggtaggtaaaatggaatagagaggaggggctcagaaaacttcgagattaaagttcatatatacacataattttcttaacatccttaaacaacaagtttaattcttttttcagtctggcatttctatcattcatatactggtttcattacttttaaaagtttttttttttaacattttaggatttttcatagctttctatattttttcctagttgaaatatttctctaagaatccccatttgtgccttttatttaatatatactcttaaaagctacaactgtgtttttaatacctttttggacattttactaataaagtcctgtttcctcatcccccaattaaaagctcctttacaattccaaagaaaaataaaaagaaaacatcaaatcaaaaagcacaagaagaatatgaacagatacaagccaaacgtgctgctaagaaacaagaattcgagaggagaaaacaggagagagaagaagcccaaaggcagtacaaaaagaagaaaatggaagtgtttaaaatactgaacaaaaagactaaaaagggccaaccaaacttgaatgtacaaatggagtaccttcttcaaaaaatacaagaaaaatgttaaacattttgttcctacaggttaaaatatctgctgcctattaggttcttctgtgacatgtgcctcccagcagtgaactaaatttgtcgacataaactggattgctaaactatgctaaatataagatgttcacatatttttattatggtaaaaaattttctaaatatgttctacatgtttcttatttatttgcctctgaaggaaggttggcctgaagaactgaaagaacctcttattttgcaagacaggcccaagcatgtaatacttttgtaccatatgagatttatatgaaataaattttttaaaaataaggaa

SEQ ID NO: 355604 - DNA, 970 bp, Homo sapiens
ctaaagatatgtaattttgcttgtttttgctttagaatatctgtaattaagaattcttaacatcaaaaatgttttcattgttcttaagctggtggcagattaggagaaagcaggaaaatttcttcatgggaatactggaccagtattaactagcacagctttatgctttttccaaccatctgtcacctttggaaacagtatatcagatgaagtgcagtaatgaccattatgctgtaaaacatttaatgtccttttaaaattttgtttatatagagctggggctttgtgatcatgaaaattctctgttataccatgggtcattataatatgaaggcaaagagggtactttgcttcaattaggagaaacagtgcacatcttgcaaaatagaagagacaaaccttagagtgtttgcttagtaatagctatttcaagacaatttctgaactgtatctactgtttgttgctaatgaaagttacatatgttaataattttaggaattcgagaggagaaaacaggagagagaagaagcccaaaggcagtacaaaaagaagaaaatggaagtgtttaaaatactgaacaaaaagactaaaaagggccaaccaaacttgaatgtacaaatggagtaccttcttcaaaaaatacaagaaaaatgttaaacattttgttcctacaggttaaaatatctgctgcctattaggttcttctgtgacatgtgcctcccagcagtgaactaaatttgtcgacataaactggattgctaaactatgctaaatataagatgttcacatatttttattatggtaaaaaattttctaaatatgttctacatgtttcttatttatttgcctctgaaggaaggttggcctgaagaactgaaagaacctcttattttgcaagacaggcccaagcatgtaatacttttgtaccatatgagatttatatgaaataaattttttaaaaataaggaa

SEQ ID NO: 355605 - DNA, 1580 bp, Homo sapiens
tgtgggcgtccgtcgtggtcttctgatgacgcagttagtcggctgcaatggcgccggtgaggcggtccgcgaagtggcggcctggtggtattgaggcgcgtggtgaaggggtttccactgtcgggtacaggaataagaatgtgagacagaagacatggcggcctaaccacccgcaagccttcgtggggagcgttcgcgagggacaaggctttgcttttcgaagaaaactgaaaatacagcaaagttacaagaaattgctacggaaggaaaagaaggctcaaacgtcactggaatctcaattcacagatcgatacccagataatctgaaacatctctatttagctgaagaggaaagacataggaagcaagcaagaaaagtcgaccatcctttgtcagaacaagttcaccagccgttgcttgaagaacagtgtagcattgacgagcctttatttgaagatcagtgtagctttgaccagcctcagccagaagaacaatgtattaaaacagtaaactcctttacaattccaaagaaaaataaaaagaaaacatcaaatcaaaaagcacaagaagaatatgaacagatacaagccaaacgtgctgctaagaaacaagaattcgagaggagaaaacaggagagagaagaagcccaaaggcagtacaaaaagaagaaaatggaagtgtttaaaatactgaacaaaaagactaaaaagggccaaccaaacttgaatgtacaaatggagtaccttcttcaaaaaatacaagaaaaatgttaaacattttgttcctacaggttaaaatatctgctgcctattaggttcttctgtgacatgtgcctcccagcagtgaactaaatttgtcgacataaactggattgctaaactatgctaaatataagatgttcacatatttttattatggtaaaaaattttctaaatatgttctacatgtttcttatttatttgcctctgaaggaaggttggcctgaagaactgaaagaacctcttattttgcaagacaggcccaagcatgtaatacttttgtaccatatgagatttatatgaaataaattttttaaaaataaggaaaaaaaaaaaaaaaaaaaaaaaaaaaaaaagaaaaaaaaaacaaaaagtaagaaacaaataaaataaaagataaagaagggcgcataaatagtcagcaaagaatcagcacccaaagcagtgaaaccacctatcagtgccaccaagagtcgagtagacactaatgaagcgtacaaacttcttaacacacctctcatgtaacagcatgagcagaccggacacctagcctaattacatcaccgtgagctcttcgctattgacaatacggacctcatccgccgaacaactacatcagcgaaaaggagacataaccctgatgtggcatggaggaaaaatactatagactggcacaccatctctcctcgatgagcattatacgacagcccatagctatataccccttacatctttcacaggattctgatgtagcggacccacacaatcgtcatagctttctgatcatggaatgatggctaatcgcgcgttattctcagcata

SEQ ID NO: 355606 - DNA, 1620 bp, Homo sapiens
tgtgggcgtccgtcgtggtcttctgatgacgcagttagtcggctgcaatggcgccggtgaggcggtccgcgaagtggcggcctggtggtattgaggcgcgtggtgaaggggtttccactgtcgggtacaggaataagaatgtgagacagaagacatggcggcctaaccacccgcaagccttcgtggggagcgttcgcgagggacaaggctttgcttttcgaagaaaactgaaaatacagcaaagttacaagaaattgctacggaaggaaaagaaggctcaaacgtcactggaatctcaattcacagatcgatacccagataatctgaaacatctctatttagctgaagaggaaagacataggaagcaagcaagaaaagtcgaccatcctttgtcagaacaagttcaccagccgttgcttgaagaacagtgtagcattgacgagcctttatttgaagatcagtgtagctttgaccagcctcagccagaagaacaatgtattaaaacagtaaactcctttacaattccaaagaaaaataaaaagaaaacatcaaatcaaaaagcacaagaagaatatgaacagatacaagccaaacgtgctgctaagaaacaagaattcgagaggagaaaacaggagagagaagaagcccaaaggcagtacaaaaagaagaaaatggaagtgtttaaaatactgaacaaaaagactaaaaagggccaaccaaacttgaatgtacaaatggagtaccttcttcaaaaaatacaagaaaaatgttaaacattttgttcctacaggttaaaatatctgctgcctattaggttcttctgtgacatgtgcctcccagcagtgaactaaatttgtcgacataaactggattgctaaactatgctaaatataagatgttcacatatttttattatggtaaaaaattttctaaatatgttctacatgtttcttatttatttgcctctgaaggaaggttggcctgaagaactgaaagaacctcttattttgcaagacaggcccaagcatgtaatacttttgtaccatatgagatttatatgaaataaattttttaaaaataaggaatcagagctatcaatgaagcatttcaatgaaatatttcaatttagtaaacagttacgttgttttaaaatttattttaatgatgagggaggcaaagactcctcttggactttttatttattttaagtacatgttacagggtgatgggtgctgaaataaactgccctcaccatataacaaagcgaccttcacaaagcagtgaactcaaagtctgatatttataaacattcccttaaatgggtgtacatggcttgttagtctaaggtcttttaaataatgatggaaaccccacagtgtcacagcaagaattaagctttccagttcctatggaccctatactttaagaacattatctctgtctcccttgttggtacccttgtgagctgagataagccactgggataactgcttctcatgctttgcaaattgcagaagaatgagaaaggcttgaaatatatatatagtcattgtaagcaaaaagggctgaccaataatacttgccaaatattgaataataaaattttataaatgatagcaa

SEQ ID NO: 355607 - DNA, 630 bp, Homo sapiens
  misc_feature (1)..(1): n is a, c, g, or t
nattcaggtaatagcctctcttctgggtcagagctttccaccaggctttgattcctgtgattgggatttggaaacagaagtgatagggggaggccgggcgcggtgctaacgcctgtaatcccagcattttgggaggctgaagcagacagctggtcttgaactcctgacctcgtgatccacccgccttggcctcccaaagtgctgggattacaggcatgagccaccgcacctggccttccctgcttcctctctagaatccaattagggatgtttgttactactcatattgattaaaacagttaacaaacttttttctttttaaaatgtgagatcagtgaactctggttttaagataatctgaaacaaggtccttgggagtaataaaattggtcacattctgtaaagcacattctgtttaggaatcaacttatctcaaattgtaactcggggcctaactatatgagatggctgaaaaaataccacatcgtctgttttcactaggtgatgccaaaatattttgctttatgtatattacagttctttttaaaacactggaagactcatgttaaactctaattgtgaaggcagaatctctgctaatttttcagattaaaattctctttgaaaaaa

SEQ ID NO: 355608 - DNA, 2967 bp, Homo sapiens
cgagctcgccctgagatccctccgctcagcgccttcaacgccgtgtcccggcaccccgcacccgggcacacaaaaaacgggtcgcccgcgattctcagggattgatcgcctcttcagaaaagtcctccatacattttctccccaattccattccttgggcatgccatagcatttgggaaaagtccaattgaatttctagaaaatgcatatgagaagtatggacctgtatttagttttaccatggtaggcaagacatttacttaccttctggggagtgatgctgctgcactgctttttaatagtaaaaatgaagacctgaatgcagaagatgtctacagtcgcctgacaacacctgtgtttgggaagggagttgcatacgatgtgcctaatccagttttcttggagcagaagaaaatgttaaaaagtggccttaacatagcccactttaaacagcatgtttctataattgaaaaagaaacaaaggaatactttgagagttggggagaaagtggagaaaaaaatgtgtttgaagctctttctgagctcataattttaacagctagccattgtttgcatggaaaggaaatcagaagtcaactcaatgaaaaggtagcacagctgtatgcagatttggatggaggtttcagccatgcagcctggctcttaccaggttggctgcctttgcctagtttcagacgcagggacagagctcatcgggaaatcaaggatattttctataaggcaatccagaaacgcagacagtctcaagaaaaaattgatgacattctccaaactttactagatgctacatacaaggatgggcgtcctttgactgatgatgaagtagcagggatgcttattggattactcttggcagggcagcatacatcctcaactactagtgcttggatgggcttctttttggccagagacaaaacacttcaaaaaaaatgttatttagaacagaaaacagtctgtggagagaatctgcctcctttaacttatgaccagctcaaggatctaaatttacttgatcgctgtataaaagaaacattaagacttagacctcctataatgatcatgatgagaatggccagaactcctcagactgtggcagggtataccattcctccaggacatcaggtgtgtgtttctcccactgtcaatcaaagacttaaagactcatgggtagaacgcctggactttaatcctgatcgctacttacaggataacccagcatcaggggaaaagtttgcctatgtgccatttggagctgggcgtcatcgttgtattggggaaaattttgcctatgttcaaattaagacaatttggtccactatgcttcgtttatatgaatttgatctcattgatggatactttcccactgtgaattatacaactatgattcacacccctgaaaacccagttatccgttacaaacgaagatcaaaatgaaaaaggttgcaaggaacgaatatatgtgattatcactgtaagccacaaaggcattcgaagagaatgaagtgtacaaaacaactcttgtagtttactgtttttttaagtgtgtaattctaaaagccagtttatgatttaggattttgttaactgaatggttctatcaaatataatagcatttgaaacattttctaatagttatgatacttatacatgtgctttcaggaagttccttggtgaaacaattgttgaggggggatctaggtaattggcagattctaaataatataatttccagatagtaattttaagagtactcatcgctcttgccaaataagttcagggtattcaaatcttggactagtcctgcaaggtataaagaataaaaatcccagtgagatacttggaaaccacagtttattattatttatctgggcaattattgtgtgtgtgaggatggaagggtagggaataatcgaacatctaaagccttgaataagagaatactaattgttttggtatgatgatactcagaaatggagatattataggaaaaagaaatcctttggaattttaactaaaatcactgcatatgggaaattaagagatccaggaccatatttgataagagttcctaaaaataatgtaattattaatgctaaagactgctcatgtatcttgatctaattactaaataattacatatttatttacctgataaatatgtatctagttctacaaggtcacatttatgtggaagtccaaagtcaagtccttaggggataattttgttttggctcagttgttccctgcttcctttttttttttttttttttgagatggagtctcgctctgttgcccaggctggagtgcagtggtgcgatctcagctcactgcatcctctgcctcccgggttcaagcaattctctgcctcagcctcccaagtagttgggattacaggcacctgccaccatgcctggctaattttttgtatttttagtagagacgggggtttcactatgttggctaggctggtcttgaactcctgacctcgtgatccacccgccttggcctcccaaagtgctgggattacaggcatgagccaccgcacctggccttccctgcttcctctctagaatccaattagggatgtttgttactactcatattgattaaaacagttaacaaacttttttctttttaaaatgtgagatcagtgaactctggttttaagataatctgaaacaaggtccttgggagtaataaaattggtcacattctgtaaagcacattctgtttaggaatcaacttatctcaaattgtaactcggggcctaactatatgagatggctgaaaaaataccacatcgtctgttttcactaggtgatgccaaaatattttgctttatgtatattacagttctttttaaaacactggaagactcatgttaaactctaattgtgaaggcagaatctctgctaatttttcagattaaaattctctttgaaaaaa

SEQ ID NO: 355609 - DNA, 2670 bp, Homo sapiens
caggagtggcctggggttcacagtggctgttgcacatatctcctgcacactcacagccatgttgatgtgtcctgatgggagaagactgggcatcttgttttcttggagcagaagaaaatgttaaaaagtggccttaacatagcccactttaaacagcatgtttctataattgaaaaagaaacaaaggaatactttgagagttggggagaaagtggagaaaaaaatgtgtttgaagctctttctgagctcataattttaacagctagccattgtttgcatggaaaggaaatcagaagtcaactcaatgaaaaggtagcacagctgtatgcagatttggatggaggtttcagccatgcagcctggctcttaccaggttggctgcctttgcctagtttcagacgcagggacagagctcatcgggaaatcaaggatattttctataaggcaatccagaaacgcagacagtctcaagaaaaaattgatgacattctccaaactttactagatgctacatacaaggatgggcgtcctttgactgatgatgaagtagcagggatgcttattggattactcttggcagggcagcatacatcctcaactactagtgcttggatgggcttctttttggccagagacaaaacacttcaaaaaaaatgttatttagaacagaaaacagtctgtggagagaatctgcctcctttaacttatgaccagctcaaggatctaaatttacttgatcgctgtataaaagaaacattaagacttagacctcctataatgatcatgatgagaatggccagaactcctcagactgtggcagggtataccattcctccaggacatcaggtgtgtgtttctcccactgtcaatcaaagacttaaagactcatgggtagaacgcctggactttaatcctgatcgctacttacaggataacccagcatcaggggaaaagtttgcctatgtgccatttggagctgggcgtcatcgttgtattggggaaaattttgcctatgttcaaattaagacaatttggtccactatgcttcgtttatatgaatttgatctcattgatggatactttcccactgtgaattatacaactatgattcacacccctgaaaacccagttatccgttacaaacgaagatcaaaatgaaaaaggttgcaaggaacgaatatatgtgattatcactgtaagccacaaaggcattcgaagagaatgaagtgtacaaaacaactcttgtagtttactgtttttttaagtgtgtaattctaaaagccagtttatgatttaggattttgttaactgaatggttctatcaaatataatagcatttgaaacattttctaatagttatgatacttatacatgtgctttcaggaagttccttggtgaaacaattgttgaggggggatctaggtaattggcagattctaaataatataatttccagatagtaattttaagagtactcatcgctcttgccaaataagttcagggtattcaaatcttggactagtcctgcaaggtataaagaataaaaatcccagtgagatacttggaaaccacagtttattattatttatctgggcaattattgtgtgtgtgaggatggaagggtagggaataatcgaacatctaaagccttgaataagagaatactaattgttttggtatgatgatactcagaaatggagatattataggaaaaagaaatcctttggaattttaactaaaatcactgcatatgggaaattaagagatccaggaccatatttgataagagttcctaaaaataatgtaattattaatgctaaagactgctcatgtatcttgatctaattactaaataattacatatttatttacctgataaatatgtatctagttctacaaggtcacatttatgtggaagtccaaagtcaagtccttaggggataattttgttttggctcagttgttccctgcttcctttttttttttttttttttgagatggagtctcgctctgttgcccaggctggagtgcagtggtgcgatctcagctcactgcatcctctgcctcccgggttcaagcaattctctgcctcagcctcccaagtagttgggattacaggcacctgccaccatgcctggctaattttttgtatttttagtagagacgggggtttcactatgttggctaggctggtcttgaactcctgacctcgtgatccacccgccttggcctcccaaagtgctgggattacaggcatgagccaccgcacctggccttccctgcttcctctctagaatccaattagggatgtttgttactactcatattgattaaaacagttaacaaacttttttctttttaaaatgtgagatcagtgaactctggttttaagataatctgaaacaaggtccttgggagtaataaaattggtcacattctgtaaagcacattctgtttaggaatcaacttatctcaaattgtaactcggggcctaactatatgagatggctgaaaaaataccacatcgtctgttttcactaggtgatgccaaaatattttgctttatgtatattacagttctttttaaaacactggaagactcatgttaaactctaattgtgaaggcagaatctctgctaatttttcagattaaaattctctttgaaaaaa

SEQ ID NO: 355610 - DNA, 1895 bp, Homo sapiens
gactctagagtatcccccggcagaatcacactcaaactgtggcagggtataccattcctccaggacatcaggtgtgtgtttctcccactgtcaatcaaagacttaaagactcatgggtagaacgcctggactttaatcctgatcgctacttacaggataacccagcatcaggggaaaagtttgcctatgtgccatttggagctgggcgtcatcgttgtattggggaaaattttgcctatgttcaaattaagacaatttggtccactatgcttcgtttatatgaatttgatctcattgatggatactttcccactgtgaattatacaactatgattcacacccctgaaaacccagttatccgttacaaacgaagatcaaaatgaaaaaggttgcaaggaacgaatatatgtgattatcactgtaagccacaaaggcattcgaagagaatgaagtgtacaaaacaactcttgtagtttactgtttttttaagtgtgtaattctaaaagccagtttatgatttaggattttgttaactgaatggttctatcaaatataatagcatttgaaacattttctaatagttatgatacttatacatgtgctttcaggaagttccttggtgaaacaattgttgaggggggatctaggtaattggcagattctaaataatataatttccagatagtaattttaagagtactcatcgctcttgccaaataagttcagggtattcaaatcttggactagtcctgcaaggtataaagaataaaaatcccagtgagatacttggaaaccacagtttattattatttatctgggcaattattgtgtgtgtgaggatggaagggtagggaataatcgaacatctaaagccttgaataagagaatactaattgttttggtatgatgatactcagaaatggagatattataggaaaaagaaatcctttggaattttaactaaaatcactgcatatgggaaattaagagatccaggaccatatttgataagagttcctaaaaataatgtaattattaatgctaaagactgctcatgtatcttgatctaattactaaataattacatatttatttacctgataaatatgtatctagttctacaaggtcacatttatgtggaagtccaaagtcaagtccttaggggataattttgttttggctcagttgttccctgcttcctttttttttttttttttttgagatggagtctcgctctgttgcccaggctggagtgcagtggtgcgatctcagctcactgcatcctctgcctcccgggttcaagcaattctctgcctcagcctcccaagtagttgggattacaggcacctgccaccatgcctggctaattttttgtatttttagtagagacgggggtttcactatgttggctaggctggtcttgaactcctgacctcgtgatccacccgccttggcctcccaaagtgctgggattacaggcatgagccaccgcacctggccttccctgcttcctctctagaatccaattagggatgtttgttactactcatattgattaaaacagttaacaaacttttttctttttaaaatgtgagatcagtgaactctggttttaagataatctgaaacaaggtccttgggagtaataaaattggtcacattctgtaaagcacattctgtttaggaatcaacttatctcaaattgtaactcggggcctaactatatgagatggctgaaaaaataccacatcgtctgttttcactaggtgatgccaaaatattttgctttatgtatattacagttctttttaaaacactggaagactcatgttaaactctaattgtgaaggcagaatctctgctaatttttcagattaaaattctctttgaaaaaa

SEQ ID NO: 355611 - DNA, 2280 bp, Homo sapiens
cgagctcgccctgagatccctccgctcagcgccttcaacgccgtgtcccggcaccccgcacccgggcacacaaaaaacgggtcgcccgcgattctcagggattgatcgcctcttcaggtaagttatcttccggccccgtaccactgtgccacaggcgcagcccgcttcctcaggtgccctatcccgcgcagaagaccacggcttcacagagtgttatttaagggcgtggccagcggaacatcccgccccattctgtgacgcacggggtggcgcgcgtgggacccgaggggtggggctgggtttagtaggagacctggggcaaggccccctgtggacgaccatctgccagcttctctcgttccgtcgattgggaggagcggtggcgacctcggccttcagtgtttccgacggagtgaatggcggcggcggctgggatgctgctgctgggcttgctgcaggcgggtgggtcggtgctgggccaggcgatggagaaggtgacaggcggcaacctcttgtccatgctgctgatcgcctgcgccttcaccctcagcctggtctacctgatccgtctggccgccggccacctggtccagctgcccgcaggggtgaaaagtcctccatacattttctccccaattccattccttgggcatgccatagcatttgggaaaagtccaattgaatttctagaaaatgcatatgagaagtatggacctgtatttagttttaccatggtaggcaagacatttacttaccttctggggagtgatgctgctgcactgctttttaatagtaaaaatgaagacctgaatgcagaagatgtctacagtcgcctgacaacacctgtgtttgggaagggagttgcatacgatgtgcctaatccagttttcttggagcagaagaaaatgttaaaaagtggccttaacatagcccactttaaacagcatgtttctataattgaaaaagaaacaaaggaatactttgagagttggggagaaagtggagaaaaaaatgtgtttgaagctctttctgagctcataattttaacagctagccattgtttgcatggaaaggaaatcagaagtcaactcaatgaaaaggtagcacagctgtatgcagatttggatggaggtttcagccatgcagcctggctcttaccaggttggctgcctttgcctagtttcagacgcagggacagagctcatcgggaaatcaaggatattttctataaggcaatccagaaacgcagacagtctcaagaaaaaattgatgacattctccaaactttactagatgctacatacaaggatgggcgtcctttgactgatgatgaagtagcagggatgcttattggattactcttggcagggcagcatacatcctcaactactagtgcttggatgggcttctttttggccagagacaaaacacttcaaaaaaaatgttatttagaacagaaaacagtctgtggagagaatctgcctcctttaacttatgaccagctcaaggatctaaatttacttgatcgctgtataaaagaaacattaagacttagacctcctataatgatcatgatgagaatggccagaactcctcagactgtggcagggtataccattcctccaggacatcaggtgtgtgtttctcccactgtcaatcaaagacttaaagactcatgggtagaacgcctggactttaatcctgatcgctacttacaggataacccagcatcaggggaaaagtttgcctatgtgccatttggagctgggcgtcatcgttgtattggggaaaattttgcctatgttcaaattaagacaatttggtccactatgcttcgtttatatgaatttgatctcattgatggatactttcccactgtgaattatacaactatgattcacacccctgaaaacccagttatccgttacaaacgaagatcaaaatgaaaaaggttgcaaggaacgaatatatgtgattatcactgtaagccacaaaggcattcgaagagaatgaagtgtacaaaacaactcttgtagtttactgtttttttaagtgtgtaattctaaaagccagtttatgatttaggattttgttaactgaatggtttatatgagatggctgaaaaaataccacatcgtctgttttcactaggtgatgccaaaatattttgctttatgtatattacagttctttttaaaacactggaagactcatgttaaactctaattgtgaaggcagaatctctgctaatttttcagattaaaattctctttgaaaaaa

SEQ ID NO: 355612 - DNA, 530 bp, Homo sapiens
ggtaccccccccatacgttagggatgcccatttcaagattaatattcccaccttcaaataaaagtctgccttctgttccaaaaaattaaatcggttgccaaagaggaagttaccgagcaaccaccgcacctggccttccctgcttcctctctagaatccaattagggatgtttgttactactcatattgattaaaacagttaacaaacttttttctttttaaaatgtgagatcagtgaactctggttttaagataatctgaaacaaggtccttgggagtaataaaattggtcacattctgtaaagcacattctgtttaggaatcaacttatctcaaattgtaactcggggcctaactatatgagatggctgaaaaaataccacatcgtctgttttcactaggtgatgccaaaatattttgctttatgtatattacagttctttttaaaacactggaagactcatgttaaactctaattgtgaaggcagaatctctgctaatttttcagattaaaattctctttgaaaaaa

SEQ ID NO: 355613 - DNA, 224 bp, Homo sapiens
acttatctcaaattgtaactcggggcctaactatatgagatggctgaaaaaataccacatcgtctgttttcactaggtgatgccaaaatattttgctttatgtatattacagttctttttaaaacactggaagactcatgttaaactctaattgtgaaggcagaatctctgctaatttttcagattaaaattctctttgaaaaaatacagtctgtattcatgaa

SEQ ID NO: 355614 - DNA, 3458 bp, Homo sapiens
cgagctcgccctgagatccctccgctcagcgccttcaacgccgtgtcccggcaccccgcacccgggcacacaaaaaacgggtcgcccgcgattctcagggattgatcgcctcttcaggtaagttatcttccggccccgtaccactgtgccacaggcgcagcccgcttcctcaggtgccctatcccgcgcagaagaccacggcttcacagagtgttatttaagggcgtggccagcggaacatcccgccccattctgtgacgcacggggtggcgcgcgtgggacccgaggggtggggctgggtttagtaggagacctggggcaaggccccctgtggacgaccatctgccagcttctctcgttccgtcgattgggaggagcggtggcgacctcggccttcagtgtttccgacggagtgaatggcggcggcggctgggatgctgctgctgggcttgctgcaggcgggtgggtcggtgctgggccaggcgatggagaaggtgacaggcggcaacctcttgtccatgctgctgatcgcctgcgccttcaccctcagcctggtctacctgatccgtctggccgccggccacctggtccagctgcccgcaggggtgaaaagtcctccatacattttctccccaattccattccttgggcatgccatagcatttgggaaaagtccaattgaatttctagaaaatgcatatgagaagtatggacctgtatttagttttaccatggtaggcaagacatttacttaccttctggggagtgatgctgctgcactgctttttaatagtaaaaatgaagacctgaatgcagaagatgtctacagtcgcctgacaacacctgtgtttgggaagggagttgcatacgatgtgcctaatccagttttcttggagcagaagaaaatgttaaaaagtggccttaacatagcccactttaaacagcatgtttctataattgaaaaagaaacaaaggaatactttgagagttggggagaaagtggagaaaaaaatgtgtttgaagctctttctgagctcataattttaacagctagccattgtttgcatggaaaggaaatcagaagtcaactcaatgaaaaggtagcacagctgtatgcagatttggatggaggtttcagccatgcagcctggctcttaccaggttggctgcctttgcctagtttcagacgcagggacagagctcatcgggaaatcaaggatattttctataaggcaatccagaaacgcagacagtctcaagaaaaaattgatgacattctccaaactttactagatgctacatacaaggatgggcgtcctttgactgatgatgaagtagcagggatgcttattggattactcttggcagggcagcatacatcctcaactactagtgcttggatgggcttctttttggccagagacaaaacacttcaaaaaaaatgttatttagaacagaaaacagtctgtggagagaatctgcctcctttaacttatgaccagctcaaggatctaaatttacttgatcgctgtataaaagaaacattaagacttagacctcctataatgatcatgatgagaatggccagaactcctcagactgtggcagggtataccattcctccaggacatcaggtgtgtgtttctcccactgtcaatcaaagacttaaagactcatgggtagaacgcctggactttaatcctgatcgctacttacaggataacccagcatcaggggaaaagtttgcctatgtgccatttggagctgggcgtcatcgttgtattggggaaaattttgcctatgttcaaattaagacaatttggtccactatgcttcgtttatatgaatttgatctcattgatggatactttcccactgtgaattatacaactatgattcacacccctgaaaacccagttatccgttacaaacgaagatcaaaatgaaaaaggttgcaaggaacgaatatatgtgattatcactgtaagccacaaaggcattcgaagagaatgaagtgtacaaaacaactcttgtagtttactgtttttttaagtgtgtaattctaaaagccagtttatgatttaggattttgttaactgaatggttctatcaaatataatagcatttgaaacattttctaatagttatgatacttatacatgtgctttcaggaagttccttggtgaaacaattgttgaggggggatctaggtaattggcagattctaaataatataatttccagatagtaattttaagagtactcatcgctcttgccaaataagttcagggtattcaaatcttggactagtcctgcaaggtataaagaataaaaatcccagtgagatacttggaaaccacagtttattattatttatctgggcaattattgtgtgtgtgaggatggaagggtagggaataatcgaacatctaaagccttgaataagagaatactaattgttttggtatgatgatactcagaaatggagatattataggaaaaagaaatcctttggaattttaactaaaatcactgcatatgggaaattaagagatccaggaccatatttgataagagttcctaaaaataatgtaattattaatgctaaagactgctcatgtatcttgatctaattactaaataattacatatttatttacctgataaatatgtatctagttctacaaggtcacatttatgtggaagtccaaagtcaagtccttaggggataattttgttttggctcagttgttccctgcttcctttttttttttttttttttgagatggagtctcgctctgttgcccaggctggagtgcagtggtgcgatctcagctcactgcatcctctgcctcccgggttcaagcaattctctgcctcagcctcccaagtagttgggattacaggcacctgccaccatgcctggctaattttttgtatttttagtagagacgggggtttcactatgttggctaggctggtcttgaactcctgacctcgtgatccacccgccttggcctcccaaagtgctgggattacaggcatgagccaccgcacctggccttccctgcttcctctctagaatccaattagggatgtttgttactactcatattgattaaaacagttaacaaacttttttctttttaaaatgtgagatcagtgaactctggttttaagataatctgaaacaaggtccttgggagtaataaaattggtcacattctgtaaagcacattctgtttaggaatcaacttatctcaaattgtaactcggggcctaactatatgagatggctgaaaaaataccacatcgtctgttttcactaggtgatgccaaaatattttgctttatgtatattacagttctttttaaaacactggaagactcatgttaaactctaattgtgaaggcagaatctctgctaatttttcagattaaaattctctttgaaaaaa

SEQ ID NO: 355615 - DNA, 3402 bp, Homo sapiens
  misc_feature (1119)..(1119): n is a, c, g, or t
cgagctcgccctgagatccctccgctcagcgccttcaacgccgtgtcccggcaccccgcacccgggcacacaaaaaacgggtcgcccgcgattctcagggattgatcgcctcttcaggtaagttatcttccggccccgtaccactgtgccacaggcgcagcccgcttcctcaggtgccctatcccgcgcagaagaccacggcttcacagagtgttatttaagggcgtggccagcggaacatcccgccccattctgtgacgcacggggtggcgcgcgtgggacccgaggggtggggctgggtttagtaggagacctggggcaaggccccctgtggacgaccatctgccagcttctctcgttccgtcgattgggaggagcggtggcgacctcggccttcagtgtttccgacggagtgaatggcggcggcggctgggatgctgctgctgggcttgctgcaggcgggtgggtcggtgctgggccaggcgatggagaaggtgacaggcggcaacctcttgtccatgctgctgatcgcctgcgccttcaccctcagcctggtctacctgatccgtctggccgccggccacctggtccagctgcccgcaggggtgaaaagtcctccatacattttctccccaattccattccttgggcatgccatagcatttgggaaaagtccaattgaatttctagaaaatgcatatgagaagtatggacctgtatttagttttaccatggtaggcaagacatttacttaccttctggggagtgatgctgctgcactgctttttaatagtaaaaatgaagacctgaatgcagaagatgtctacagtcgcctgacaacacctgtgtttgggaagggagttgcatacgatgtgcctaatccagttttcttggagcagaagaaaatgttaaaaagtggccttaacatagcccactttaaacagcatgtttctataattgaaaaagaaacaaaggaatactttgagagttggggagaaagtggagaaaaaaatgtgtttgaagctctttctgagctcataattttaacagctagccattgtttgcatggaaaggaaatcagaagtcaactcaatgtggctcttaccagtttgcttgccntgcctaggttcacgcagggacagagctcatcgggaaatcaaggatattttctataaggcaatccagaaacgcagacagtctcaagaaaaaattgatgacattctccaaactttactagatgctacatacaaggatgggcgtcctttgactgatgatgaagtagcagggatgcttattggattactcttggcagggcagcatacatcctcaactactagtgcttggatgggcttctttttggccagagacaaaacacttcaaaaaaaatgttatttagaacagaaaacagtctgtggagagaatctgcctcctttaacttatgaccagctcaaggatctaaatttacttgatcgctgtataaaagaaacattaagacttagacctcctataatgatcatgatgagaatggccagaactcctcagactgtggcagggtataccattcctccaggacatcaggtgtgtgtttctcccactgtcaatcaaagacttaaagactcatgggtagaacgcctggactttaatcctgatcgctacttacaggataacccagcatcaggggaaaagtttgcctatgtgccatttggagctgggcgtcatcgttgtattggggaaaattttgcctatgttcaaattaagacaatttggtccactatgcttcgtttatatgaatttgatctcattgatggatactttcccactgtgaattatacaactatgattcacacccctgaaaacccagttatccgttacaaacgaagatcaaaatgaaaaaggttgcaaggaacgaatatatgtgattatcactgtaagccacaaaggcattcgaagagaatgaagtgtacaaaacaactcttgtagtttactgtttttttaagtgtgtaattctaaaagccagtttatgatttaggattttgttaactgaatggttctatcaaatataatagcatttgaaacattttctaatagttatgatacttatacatgtgctttcaggaagttccttggtgaaacaattgttgaggggggatctaggtaattggcagattctaaataatataatttccagatagtaattttaagagtactcatcgctcttgccaaataagttcagggtattcaaatcttggactagtcctgcaaggtataaagaataaaaatcccagtgagatacttggaaaccacagtttattattatttatctgggcaattattgtgtgtgtgaggatggaagggtagggaataatcgaacatctaaagccttgaataagagaatactaattgttttggtatgatgatactcagaaatggagatattataggaaaaagaaatcctttggaattttaactaaaatcactgcatatgggaaattaagagatccaggaccatatttgataagagttcctaaaaataatgtaattattaatgctaaagactgctcatgtatcttgatctaattactaaataattacatatttatttacctgataaatatgtatctagttctacaaggtcacatttatgtggaagtccaaagtcaagtccttaggggataattttgttttggctcagttgttccctgcttcctttttttttttttttttttgagatggagtctcgctctgttgcccaggctggagtgcagtggtgcgatctcagctcactgcatcctctgcctcccgggttcaagcaattctctgcctcagcctcccaagtagttgggattacaggcacctgccaccatgcctggctaattttttgtatttttagtagagacgggggtttcactatgttggctaggctggtcttgaactcctgacctcgtgatccacccgccttggcctcccaaagtgctgggattacaggcatgagccaccgcacctggccttccctgcttcctctctagaatccaattagggatgtttgttactactcatattgattaaaacagttaacaaacttttttctttttaaaatgtgagatcagtgaactctggttttaagataatctgaaacaaggtccttgggagtaataaaattggtcacattctgtaaagcacattctgtttaggaatcaacttatctcaaattgtaactcggggcctaactatatgagatggctgaaaaaataccacatcgtctgttttcactaggtgatgccaaaatattttgctttatgtatattacagttctttttaaaacactggaagactcatgttaaactctaattgtgaaggcagaatctctgctaatttttcagattaaaattctctttgaaaaaa

SEQ ID NO: 355616 - DNA, 3374 bp, Homo sapiens
cgagctcgccctgagatccctccgctcagcgccttcaacgccgtgtcccggcaccccgcacccgggcacacaaaaaacgggtcgcccgcgattctcagggattgatcgcctcttcaggtaagttatcttccggccccgtaccactgtgccacaggcgcagcccgcttcctcaggtgccctatcccgcgcagaagaccacggcttcacagagtgttatttaagggcgtggccagcggaacatcccgccccattctgtgacgcacggggtggcgcgcgtgggacccgaggggtggggctgggtttagtaggagacctggggcaaggccccctgtggacgaccatctgccagcttctctcgttccgtcgattgggaggagcggtggcgacctcggccttcagtgtttccgacggagtgaatggcggcggcggctgggatgctgctgctgggcttgctgcaggcgggtgggtcggtgctgggccaggcgatggagaaggtgacaggcggcaacctcttgtccatgctgctgatcgcctgcgccttcaccctcagcctggtctacctgatccgtctggccgccggccacctggtccagctgcccgcaggggtgaaaagtcctccatacattttctccccaattccattccttgggcatgccatagcatttgggaaaagtccaattgaatttctagaaaatgcatatgagaagtatggacctgtatttagttttaccatggtaggcaagacatttacttaccttctggggagtgatgctgctgcactgctttttaatagtaaaaatgaagacctgaatgcagaagatgtctacagtcgcctgacaacacctgtgtttgggaagggagttgcatacgatgtgcctaatccagttttcttggagcagaagaaaatgttaaaaagtggccttaacatagcccactttaaacagcatgtttctataattgaaaaagaaacaaaggaatactttgagagttggggagaaagtggagaaaaaaatgtgtttgaagctctttctgagctcataattttaacagctagccattgtttgcatggaaaggaaatcagaagtcaactcaatgaaaaggtagcacagctgtatgcagatttggatggaggtttcagccatgcagcctggctcttaccaggttggctgcctttgcctagtttcagacgcagggacagagctcatcgggaaatcaaggatattttctataaggcaatccagaaacgcagacagtctcaagaaaaaattgatgacattctccaaactttactagatgctacatacaaggatgggcgtcctttgactgatgatgaagtagcagggatgcttattggattactcttggcagggcagcatacatcctcaactactagtgcttggatgggcttctttttggccagagacaaaacacttcaaaaaaaatgttatttagaacagaaaacagtctgtggagagaatctgcctcctttaacttatgaccagctcaaggatctaaatttacttgatcgctgtataaaagaaacattaagacttagacctcctataatgatcatgatgagaatggccagaactcctcagactgtggcagggtataccattcctccaggacatcaggataacccagcatcaggggaaaagtttgcctatgtgccatttggagctgggcgtcatcgttgtattggggaaaattttgcctatgttcaaattaagacaatttggtccactatgcttcgtttatatgaatttgatctcattgatggatactttcccactgtgaattatacaactatgattcacacccctgaaaacccagttatccgttacaaacgaagatcaaaatgaaaaaggttgcaaggaacgaatatatgtgattatcactgtaagccacaaaggcattcgaagagaatgaagtgtacaaaacaactcttgtagtttactgtttttttaagtgtgtaattctaaaagccagtttatgatttaggattttgttaactgaatggttctatcaaatataatagcatttgaaacattttctaatagttatgatacttatacatgtgctttcaggaagttccttggtgaaacaattgttgaggggggatctaggtaattggcagattctaaataatataatttccagatagtaattttaagagtactcatcgctcttgccaaataagttcagggtattcaaatcttggactagtcctgcaaggtataaagaataaaaatcccagtgagatacttggaaaccacagtttattattatttatctgggcaattattgtgtgtgtgaggatggaagggtagggaataatcgaacatctaaagccttgaataagagaatactaattgttttggtatgatgatactcagaaatggagatattataggaaaaagaaatcctttggaattttaactaaaatcactgcatatgggaaattaagagatccaggaccatatttgataagagttcctaaaaataatgtaattattaatgctaaagactgctcatgtatcttgatctaattactaaataattacatatttatttacctgataaatatgtatctagttctacaaggtcacatttatgtggaagtccaaagtcaagtccttaggggataattttgttttggctcagttgttccctgcttcctttttttttttttttttttgagatggagtctcgctctgttgcccaggctggagtgcagtggtgcgatctcagctcactgcatcctctgcctcccgggttcaagcaattctctgcctcagcctcccaagtagttgggattacaggcacctgccaccatgcctggctaattttttgtatttttagtagagacgggggtttcactatgttggctaggctggtcttgaactcctgacctcgtgatccacccgccttggcctcccaaagtgctgggattacaggcatgagccaccgcacctggccttccctgcttcctctctagaatccaattagggatgtttgttactactcatattgattaaaacagttaacaaacttttttctttttaaaatgtgagatcagtgaactctggttttaagataatctgaaacaaggtccttgggagtaataaaattggtcacattctgtaaagcacattctgtttaggaatcaacttatctcaaattgtaactcggggcctaactatatgagatggctgaaaaaataccacatcgtctgttttcactaggtgatgccaaaatattttgctttatgtatattacagttctttttaaaacactggaagactcatgttaaactctaattgtgaaggcagaatctctgctaatttttcagattaaaattctctttgaaaaaa

SEQ ID NO: 355617 - DNA, 1901 bp, Homo sapiens
cgagctcgccctgagatccctccgctcagcgccttcaacgccgtgtcccggcaccccgcacccgggcacacaaaaaacgggtcgcccgcgattctcagggattgatcgcctcttcaggtaagttatcttccggccccgtaccactgtgccacaggcgcagcccgcttcctcaggtgccctatcccgcgcagaagaccacggcttcacagagtgttatttaagggcgtggccagcggaacatcccgccccattctgtgacgcacggggtggcgcgcgtgggacccgaggggtggggctgggtttagtaggagacctggggcaaggccccctgtggacgaccatctgccagcttctctcgttccgtcgattgggaggagcggtggcgacctcggccttcagtgtttccgacggagtgaatggcggcggcggctgggatgctgctgctgggcttgctgcaggcgggtgggtcggtgctgggccaggcgatggagaaggtgacaggcggcaacctcttgtccatgctgctgatcgcctgcgccttcaccctcagcctggtctacctgatccgtctggccgccggccacctggtccagctgcccgcaggggtgaaaagtcctccatacattttctccccaattccattccttgggcatgccatagcatttgggaaaagtccaattgaatttctagaaaatgcatatgagaagtatggacctgtatttagttttaccatggtaggcaagacatttacttaccttctggggagtgatgctgctgcactgctttttaatagtaaaaatgaagacctgaatgcagaagatgtctacagtcgcctgacaacacctgtgtttgggaagggagttgcatacgatgtgcctaatccagttttcttggagcagaagaaaatgttaaaaagtggccttaacatagcccactttaaacagcatgtttctataattgaaaaagaaacaaaggaatactttgagagttggggagaaagtggagaaaaaaatgtgtttgaagctctttctgagctcataattttaacagctagccattgtttgcatggaaaggaaatcagaagtcaactcaatgaaaaggtagcacagctgtatgcagatttggatggaggtttcagccatgcagcctggctcttaccaggttggctgcctttgcctagtttcagacgcagggacagagctcatcgggaaatcaaggatattttctataaggcaatccagaaacgcagacagtctcaagaaaaaattgatgacattctccaaactttactagatgctacatacaaggatgggcgtcctttgactgatgatgaatagttgggattacaggcacctgccaccatgcctggctaattttttgtatttttagtagagacgggggtttcactatgttggctaggctggtcttgaactcctgacctcgtgatccacccgccttggcctcccaaagtgctgggattacaggcatgagccaccgcacctggccttccctgcttcctctctagaatccaattagggatgtttgttactactcatattgattaaaacagttaacaaacttttttctttttaaaatgtgagatcagtgaactctggttttaagataatctgaaacaaggtccttgggagtaataaaattggtcacattctgtaaagcacattctgtttaggaatcaacttatctcaaattgtaactcggggcctaactatatgagatggctgaaaaaataccacatcgtctgttttcactaggtgatgccaaaatattttgctttatgtatattacagttctttttaaaacactggaagactcatgttaaactctaattgtgaaggcagaatctctgctaatttttcagattaaaattctctttgaaaaaa

SEQ ID NO: 355618 - DNA, 1571 bp, Homo sapiens
cgagctcgccctgagatccctccgctcagcgccttcaacgccgtgtcccggcaccccgcacccgggcacacaaaaaacgggtcgcccgcgattctcagggattgatcgcctcttcaggtaagttatcttccggccccgtaccactgtgccacaggcgcagcccgcttcctcaggtgccctatcccgcgcagaagaccacggcttcacagagtgttatttaagggcgtggccagcggaacatcccgccccattctgtgacgcacggggtggcgcgcgtgggacccgaggggtggggctgggtttagtaggagacctggggcaaggccccctgtggacgaccatctgccagcttctctcgttccgtcgattgggaggagcggtggcgacctcggccttcagtgtttccgacggagtgaatggcggcggcggctgggatgctgctgctgggcttgctgcaggcgggtgggtcggtgctgggccaggcgatggagaaggtgacaggcggcaacctcttgtccatgctgctgatcgcctgcgccttcaccctcagcctggtctacctgatccgtctggccgccggccacctggtccagctgcccgcaggggtgaaaagtcctccatacattttctccccaattccattccttgggcatgccatagcatttgggaaaagtccaattgaatttctagaaaatgcatatgagaagtatggacctgtatttagttttaccatggtaggcaagacatttacttaccttctggggagtgatgctgctgcactgctttttaatagtaaaaatgaagacctgaatgcagaagatgtctacagtcgcctgacaacacctgtgtttgggaagggagttgcatacgatgtgcctaatccagttttcttggagcagaagaaaatgttaaaaagtggccttaacatagcccactttaaacagcatgtttctataattgaaaaagaaacaaaggaatactttgagagttggggagaaagtggagaaaaaaatgtgtttgaagctctttctgagctcataattttaacagctagccattgtttgcatggaaaggaaatcagaagtcaactcaatgaaaaggtagcacagctgtatgcagatttggatggaggtttcagccatgcagcctggctcttaccaggttggctgcctttgcctagtttcagacgcagggacagagctcatcgggaaatcaaggatattttctataaggcaatccagaaacgcagacagtctcaagaaaaaattgatgacattctccaaactttactagatgctacatacaaggatgggcgtcctttgactgatgatgaagtagcagggatgcttattggattactcttggcagggcagcatacatcctcaactactagtgcttggatgggcttctttttggccagagacaaaacacttcaaaaaaaatgttatttagaacagaaaacagtctgtggagagaatctgcctcctttaacttatgaccagctcaaggatctaaatttacttgatcgctgtataactcctcagactgtggcagggtataccattcctcca

SEQ ID NO: 355619 - DNA, 206 bp, Homo sapiens
tttcctgcacatcctactctgtgttcaaaggtttccctgtgagagattagttcacagttgctgacacctcacaatctccctcacaacctgcaggaaccgttactttgagttgtcagagggtcattcagctcatagctacttttcaggatgatgctgggcaagagatctgccatcctaaaaatgatcctgatgtatgaggaaaaagc

SEQ ID NO: 355620 - DNA, 2170 bp, Homo sapiens
gcccctaaccgaggcagcagcggacgtgagcgataatggcggatatggaggatctcttcgggagcgacgccgacagcgaagctgagcgtaaagattctgattctggatctgactcagattctgatcaagagaatgctgcctctggcagtaatgcctctggaagtgaaagtgatcaggatgaaagaggtgattcaggacaaccaagtaataaggaactgtttggagatgacagtgaggacgagggagcttcacatcatagtggtagtgataatcactctgaaagatcagacaatagatcagaagcttctgagcgttctgaccatgaggacaatgacccctcagatgtagatcagcacagtggatcagaagcccctaatgatgatgaagacgaaggtcatagatcggatggagggagccatcattcagaagcagaaggttctgaaaaagcacattcagatgatgaaaaatggggcagagaagataaaagtgaccagtcagatgatgaaaagatacaaaattctgatgatgaggagagggcacaaggatctgatgaagataagctgcagaattctgacgatgatgagaaaatgcagaacacagatgatgaggagaggcctcagctttccgatgatgagagacaacagctatctgaggaggaaaaggctaattctgatgatgaacggccggtagcttctgataatgatgatgagaaacagaattctgatgatgaagaacaaccacagctgtctgatgaagagaaaatgcaaaattctgatgatgaaaggccacaggcctcagatgaagaacacaggcattcagatgatgaagaggaacaggatcataaatcagaatctgcaagaggcagtgatagtgaagatgaagttttacgaatgaaacgcaagaatgcgattgcatctgattcagaagcggatagtgacactgaggtgccaaaagataatagtggaaccatggatttatttggaggtgcagatgatatctcttcagggagtgatggagaagacaaaccacctactccaggacagcctgttgatgaaaatggattgcctcaggatcaacaggaagaggagccaattcctgagaccagaatagaagtagaaatacccaaagtaaacactgatttaggaaacgacttatattttgttaaactgcccaactttctcagtgtagagcccagaccttttgatcctcagtattatgaagatgaatttgaagatgaagaaatgctggatgaagaaggtagaaccaggttaaaattaaaggtagaaaatactataagatggaggatacgccgagatgaagaaggaaatgaaattaaagaaagcaatgctcggatagtcaagtggtcagatggaagcatgtccctgcatttaggcaatgaagtgtttgatgtgtacaaagccccactgcagggcgaccacaatcatctttttataagacaaggtactggtctacagggacaagcagtctttaaaacgaaactcaccttcagacctcactctacggacagtgccacacatagaaagatgactctgtcacttgcagataggtgttcaaagacacagaagattagaatcttgccaatggctggtcgtgatcctgaatgccaacgcacagaaatgattaagaaagaagaagaacgtttgagggcttccatacgtagggaatctcagcagcgccgaatgagagagaaacagcaccagcgggggctgagcgccagttacctggaacctgatcgatacgatgaggaggaggaaggcgaggagtccatcagcttggctgccattaaaaaccgatataaagggggcattcgagaggaacgagccagaatctattcatcagacagtgatgagggatcagaagaagataaagctcaaagattactcaaagcaaagaaacttaccagtgatgaggaaggtgaaccttccggaaagagaaaagcagaagatgatgataaagcaaataaaaagcataagaagtatgtgatcagcgatgaagaggaagaagatgatgattgaagtatgaaatatgaaaacattttatatattttattgtacagttataaatatgtaaacatgagttattttgattgaaatgaatcgatttgcttttgtgtaattttaattgtaataaaacaatttaaaagcaaatc

SEQ ID NO: 355621 - DNA, 1239 bp, Homo sapiens
  misc_feature (1229)..(1229): n is a, c, g, or t
gcccctaaccgaggcagcagcggacgtgagcgataatggcggatatggaggatctcttcgggagcgacgccgacagcgaagctgagcgtaaagattctgattctggatctgactcagattctgatcaagagaatgctgcctctggcagtaatgcctctggaagtgaaagtgatcaggatgaaagaggtgattcaggacaaccaagtaataaggaactgtttggagatgacagtgaggacgagggagcttcacatcatagtggtagtgataatcactctgaaagatcagacaatagatcagaagcttctgagcgttctgaccatgaggacaatgacccctcagatgtagatcagcacagtggatcagaagcccctaatgatgatgaagacgaaggtcatagatcggatggagggagccatcattcagaagcagaaggttctgaaaaagcacattcagatgatgaaaaatggggcagagaagataaaagtgaccagtcagatgatgaaaagatacaaaattctgatgatgaggagagggcacaaggatctgatgaagataagctgcagaattctgacgatgatgagaaaatgcagaacacagatgatgaggagaggcctcagctttccgatgatgagagacaacagctatctgaggaggaaaaggctaattctgatgatgaacggccggtagcttctgataatgatgatgagaaacagaattctgatgatgaagaacaaccacagctgtctgatgaagagaaaatgcaaaattctgatgatgaaaggccacaggcctcagatgaagaacacaggcattcagatgatgaagaggaacaggatcataaatcaggtaatacatttatgagaaccagaatggctcagaaagaagcattcagatacagcagggacccatttagtctttattcccatctttattaccctgttttttctcttctgtcccctccctttcaaacttttctaactctagaatacattttgcttcttttaaatctttctaatccacttattctttcttactcctttcccttccatttgttaatggataggtctgggggaaaacaatttaaagaggacttaaaattgagtcttagagggagggatatggtgtaagaagagctgataatgagttaagttgattccatttctgtggataactgaagagcatgcctcatgtgagagaatagattagcctggggagctccaagcctntagggtacca

SEQ ID NO: 355622 - DNA, 1890 bp, Homo sapiens
tgtgtgtgtgtgtgtattttttttttgcccagagtctcactctgttgcccaagctggagtgcaatggtgtggccttggctcattgcaacctctgcctcccgggttcaagcaattcccctgcctcagcctcccaagtagctgggattacaggcacctgtcaccaagcccagctaatttttgtatttttagtagagacggggtttcaccatgttggtcaggctggtgtcaaactcctgaccttaagtgatccacctgccttggcctcccaaagtgctgggattacaggcatgaaccactgtgcctggactgtaattttgaatctgggatagacttatggaaaatgggtgtctgtggagtgcttcagccccaactttgagcatctagactgtaggaaacatttgggctcctggggaataaaggaaagtgggagaacaaggatggtgaaaatgaaaggagaaataagtgcctcctgtgcagcttgcctttcactagatttgcccccttccctctccccacactctctggttgggtctttgagagccaggctcagcattatgtttttggtggttttctgatgctggtccagaaaccttgggaatgtgttgaagtgatcagctgtgaagaaccttagttacagatagtaacactaatgcctttttccttctgcattgaagataatagtggaaccatggatttatttggaggtgcagatgatatctcttcagggagtgatggagaagacaaaccacctactccaggacagcctgttgatgaaaatggattgcctcaggatcaacaggaagaggagccaattcctgagaccagaatagaagtagaaatacccaaagtaaacactgatttaggaaacgacttatattttgttaaactgcccaactttctcagtgtagagcccagaccttttgatcctcagtattatgaagatgaatttgaagatgaagaaatgctggatgaagaaggtagaaccaggttaaaattaaaggtagaaaatactataagatggaggatacgccgagatgaagaaggaaatgaaattaaagaaagcaatgctcggatagtcaagtggtcagatggaagcatgtccctgcatttaggcaatgaagtgtttgatgtgtacaaagccccactgcagggcgaccacaatcatctttttataagacaaggtactggtctacagggacaagcagtctttaaaacgaaactcaccttcagacctcactctacggacagtgccacacatagaaagatgactctgtcacttgcagataggtgttcaaagacacagaagattagaatcttgccaatggctggtcgtgatcctgaatgccaacgcacagaaatgattaagaaagaagaagaacgtttgagggcttccatacgtagggaatctcagcagcgccgaatgagagagaaacagcaccagcgggggctgagcgccagttacctggaacctgatcgatacgatgaggaggaggaaggcgaggagtccatcagcttggctgccattaaaaaccgatataaagggggcattcgagaggaacgagccagaatctattcatcagacagtgatgagggatcagaagaagataaagctcaaagattactcaaagcaaagaaacttaccagtgatgaggaaggtgaaccttccggaaagagaaaagcagaagatgatgataaagcaaataaaaagcataagaagtatgtgatcagcgatgaagaggaagaagatgatgattgaagtatgaaatatgaaaacattttatatattttattgtacagttataaatatgtaaacatgagttattttgattgaaatgaatcgatttgcttttgtgtaattttaattgtaataaaacaatttaaaagcaaatc

SEQ ID NO: 355623 - DNA, 1229 bp, Homo sapiens
tgtgttcttcatctgaggcctgtggcctttcatcatcagaattttgcattttctcttcatcagacagctgtggttgttcttcatcatcagaattctgtgtctcatcatcattatcagaagctaccggccgttcatcatcagaattagccaattcctgagaccagaatagaagtagaaatacccaaagtaaacactgatttaggaaacgacttatattttgttaaactgcccaactttctcagtgtagagcccagaccttttgatcctcagtattatgaagatgaatttgaagatgaagaaatgctggatgaagaaggtagaaccaggttaaaattaaaggtagaaaatactataagatggaggatacgccgagatgaagaaggaaatgaaattaaagaaagcaatgctcggatagtcaagtggtcagatggaagcatgtccctgcatttaggcaatgaagtgtttgatgtgtacaaagccccactgcagggcgaccacaatcatctttttataagacaaggtactggtctacagggacaagcagtctttaaaacgaaactcaccttcagacctcactctacggacagtgccacacatagaaagatgactctgtcacttgcagataggtgttcaaagacacagaagattagaatcttgccaatggctggtcgtgatcctgaatgccaacgcacagaaatgattaagaaagaagaagaacgtttgagggcttccatacgtagggaatctcagcagcgccgaatgagagagaaacagcaccagcgggggctgagcgccagttacctggaacctgatcgatacgatgaggaggaggaaggcgaggagtccatcagcttggctgccattaaaaaccgatataaagggggcattcgagaggaacgagccagaatctattcatcagacagtgatgagggatcagaagaagataaagctcaaagattactcaaagcaaagaaacttaccagtgatgaggaaggtgaaccttccggaaagagaaaagcagaagatgatgataaagcaaataaaaagcataagaagtatgtgatcagcgatgaagaggaagaagatgatgattgaagtatgaaatatgaaaacattttatatattttattgtacagttataaatatgtaaacatgagttattttgattgaaatgaatcgatttgcttttgtgtaattttaattgtaataaaacaatttaaaagcaaatc

SEQ ID NO: 355624 - DNA, 1044 bp, Homo sapiens
tgtgtgtgtgtgtgtattttttttttgcccagagtctcactctgttgcccaagctggagtgcaatggtgtggccttggctcattgcaacctctgcctcccgggttcaagcaattcccctgcctcagcctcccaagtagctgggattacaggcacctgtcaccaagcccagctaatttttgtatttttagtagagacggggtttcaccatgttggtcaggctggtgtcaaactcctgaccttaagtgatccacctgccttggcctcccaaagtgctgggattacaggcatgaaccactgtgcctggactgtaattttgaatctgggatagacttatggaaaatgggtgtctgtggagtgcttcagccccaactttgagcatctagactgtaggaaacatttgggctcctggggaataaaggaaagtgggagaacaaggatggtgaaaatgaaaggagaaataagtgcctcctgtgcagcttgcctttcactagatttgcccccttccctctccccacactctctggttgggtctttgagagccaggctcagcattatgtttttggtggttttctgatgctggtccagaaaccttgggaatgtgttgaagtgatcagctgtgaagaaccttagttacagatagtaacactaatgcctttttccttctgcattgaagataatagtggaaccatggatttatttggaggtgcagatgatatctcttcagggagtgatggagaagacaaaccacctactccaggacagcctgttgtaagtcagttagtaacatgaacttattcaaggccaagcataaagtttcaaaggtgaagagtctcccttattctaggaaaggaagttgataactgaattctagtatgaaaataccatgaacagatgactttcttcattatgtagggaactcttggttataagggggagtggaaataactgccaaacatgaggttggtgtcatgccttaggggactgaactgtgaggacttgtgatttgagaaccattgacttgaatgtttttcttgctcatgcca

SEQ ID NO: 355625 - DNA, 551 bp, Homo sapiens
gtttatagatgccctttaatgtcatcaaatattttcttaaaaacctttatgatgtttttaatgcattgaaacaaattgttccaaaaaaaccaaatcaacagtctttaaaatactgaattttagataatgaaaagaagtgaaatgctgaggaggcagagaaaaaaaatttgagaaattacctgatcatggtaaaaatatcctgacaggaccagtggttagacaggcagaacttcctcgggagagccccaccccttctgtggcaaatcctgtctccagtttcctgcacatcctactctgtgttcaaaggtttccctgtgagagattagttcacagttgctgacacctcacaatctccctcacaacctgcaggaaccgttactttgagttgtcagagggtcattcagctcatagctacttttcataaaccatcctaaaaatgttctttattgacttgtagatttgtaaaaattgtatctgtttaggaaggtgaaccttccggaaagagaaaagcagaagatgatgataaagcaaataaaaagcataagaagtat

SEQ ID NO: 355626 - DNA, 2272 bp, Homo sapiens
gcccctaaccgaggcagcagcggacgtgagcgataatggcggatatggaggatctcttcgggagcgacgccgacagcgaagctgagcgtaaagattctgattctggatctgactcagattctgatcaagagaatgctgcctctggcagtaatgcctctggaagtgaaagtgatcaggatgaaagaggtgattcaggacaaccaagtaataaggaactgtttggagatgacagtgaggacgagggagcttcacatcatagtggtagtgataatcactctgaaagatcagacaatagatcagaagcttctgagcgttctgaccatgaggacaatgacccctcagatgtagatcagcacagtggatcagaagcccctaatgatgatgaagacgaaggtcatagatcggatggagggagccatcattcagaagcagaaggttctgaaaaagcacattcagatgatgaaaaatggggcagagaagataaaagtgaccagtcagatgatgaaaagatacaaaattctgatgatgaggagagggcacaaggatctgatgaagataagctgcagaattctgacgatgatgagaaaatgcagaacacagatgatgaggagaggcctcagctttccgatgatgagagacaacagctatctgaggaggaaaaggctaattctgatgatgaacggccggtagcttctgataatgatgatgagaaacagaattctgatgatgaagaacaaccacagctgtctgatgaagagaaaatgcaaaattctgatgatgaaaggccacaggcctcagatgaagaacacaggcattcagatgatgaagaggaacaggatcataaatcagaatctgcaagaggcagtgatagtgaagatgaagttttacgaatgaaacgcaagaatgcgattgcatctgattcagaagcggatagtgacactgaggtgccaaaagataatagtggaaccatggatttatttggaggtgcagatgatatctcttcagggagtgatggagaagacaaaccacctactccaggacagcctgttgatgaaaatggattgcctcaggatcaacaggaagaggagccaattcctgagaccagaatagaagtagaaatacccaaagtaaacactgatttaggaaacgacttatattttgttaaactgcccaactttctcagtgtagagcccagaccttttgatcctcagtattatgaagatgaatttgaagatgaagaaatgctggatgaagaaggtagaaccaggttaaaattaaaggtagaaaatactataagatggaggatacgccgagatgaagaaggaaatgaaattaaagaaagcaatgctcggatagtcaagtggtcagatggaagcatgtccctgcatttaggcaatgaagtgtttgatgtgtacaaagccccactgcagggcgaccacaatcatctttttataagacaaggtactggtctacagggacaagcagtctttaaaacgaaactcaccttcagacctcactctacggacagtgccacacatagaaagatgactctgtcacttgcagataggtgttcaaagacacagaagattagaatcttgccaatggctggtcgtgatcctgaatgccaacgcacagaaatgattaagaaagaagaagaacgtttgagggcttccatacgtagggaatctcagcagcgccgaatgagagagaaacagcaccagcgggggctgagcgccagttacctggaacctgatcgatacgatgaggaggaggaaggcgaggagtccatcagcttggctgccattaaaaaccgatataaagggggcattcgagaggaacgagccagaatctattcatcagacagtgatgagggatcagaagaagataaagctcaaagattactcaaagcaaagaaacttaccagtgatgaggaaggtgaccttccggaagagaaacgcagagatgctgatacgcacatacaagcatacgaagtatgtgaccacaaacaaacaaaacaaacaaaaactagacgcgcagcatggcagagaagtataagaccaccggtgggccgggcccatagaatgccagtgcaacgtgtcccacgaccccgagatcaggtgggtccacaaaaaacccgcgaccgcggtacacacgtgacgagtcaaggcaacaaacagccggaaaagccacggtggagagaacaacgtatcagacatcacagaaccgagacacaataggaaaaaagaaggagataacggacacaccaacattg

SEQ ID NO: 355627 - DNA, 2040 bp, Homo sapiens
actcccaacggctcctttctcttctcttagcagcacccagcttgcccacccatgctcaagatgggcgggatgccagcctgttacataaatgtgccaaaagcctggccatgcctggaaaatggaccaatccgcccgccaagaggttgggtctcgttccctagagagaaggaagtttcctctccttgaagtgagagctagaatcgcactttctgtcaagctgagagaaagactcttttccagaggctaaaaggacaagaaaatctgatttgcttgcttctaactttgcgttttaaagggggaaggaggaaaggaaagagggggagggtggttctgcttagccccacccctccggctaccccaggtccagccgtccattccggtggaggcagaggcagtcctggggctctggggctcgggctttgtcaccgggacccgcaggagccagaaccactcggcgccgcctggtgcatgggaggggagccgggccaggagtaagtaactcatacgggcgccggggacccgggtcgggctgggggcttccaactcagagggagtgtgatttgcctgatcctcttcggcgttgtcctgctctgccgcatccagccctgtaccgccatcccacttcccgccgttcccatctgtgttccgggtgggatcggtctggaggcggccgaggacttcccaggcaggagctcggggcggaggccgggtccgcggcagaccagggcagcgaggcgctggccggcagggggcgctgcggtgccagcctgaggctgggctgctccgcgaggatacagcggcccctgccctgtcctgtcctgccctgccctgtcctgtcctgccctgccctgccctgtcctgtcctgccctgccctgccctgtgtcctcagacaatatgttagccgtgcactttgacaagccgggaggaccggaaaacctctacgtgaaggaggtggccaagccgagcccgggggagggtgaagtcctcctgaaggtggcggccagcgccctgaaccgggcggacttaatgcagagacaaggccagtatgacccacctccaggagccagcaacattttgggacttgaggcatctggacatgtggcagagctggggcctggctgccagggacactggaagatcggggacacagccatggctctgctccccggtgggggccaggctcagtacgtcactgtccccgaagggctcctcatgcctatcccagagggattgaccctgacccaggctgcagccatcccagaggcctggctcaccgccttccagctgttacatcttgtgggaaatgttcaggctggagactatgtgctaatccatgcaggactgagtggtgtgggcacagctgctatccaactcacccggatggctggagctattcctctggtcacagctggctcccagaagaagcttcaaatggcagaaaagcttggagcagctgctggattcaattacaaaaaagaggatttctctgaagcaacgctgaaattcaccaaaggtgctggagttaatcttattctagactgcataggcggatcctactgggagaagaacgtcaactgcctggctcttgatggtcgatgggttctctatggtctgatgggaggaggtgacatcaatgggcccctgttttcaaagctactttttaagcgaggaagtctgatcaccagtttgctgaggtctagggacaataagtacaagcaaatgctggtgaatgctttcacggagcaaattctgcctcacttctccacggagggcccccaacgtctgctgccggttctggacagaatctacccagtgaccgaaatccaggaggcccataagtacatggaggccaacaagaacataggcaagatcgtcctggaactgccccagtgaaggaggatggggcaggacaggacgcggccaccccaggcctttccagagcaaacctggagaagattcacaatagacaggccaagaaacccggtgcttcctccagagccgtttaaagctgatatgaggaaataaagagtgaactggaa

SEQ ID NO: 355628 - DNA, 1766 bp, Homo sapiens
actcccaacggctcctttctcttctcttagcagcacccagcttgcccacccatgctcaagatgggcgggatgccagcctgttacataaatgtgccaaaagcctggccatgcctggaaaatggaccaatccgcccgccaagaggttgggtctcgttccctagagagaaggaagtttcctctccttgaagtgagagctagaatcgcactttctgtcaagctgagagaaagactcttttccagaggctaaaaggacaagaaaatctgatttgcttgcttctaactttgcgttttaaagggggaaggaggaaaggaaagagggggagggtggttctgcttagccccacccctccggctaccccaggtccagccgtccattccggtggaggcagaggcagtcctggggctctggggctcgggctttgtcaccgggacccgcaggagccagaaccactcggcgccgcctggtgcatgggaggggagccgggccaggaacaatatgttagccgtgcactttgacaagccgggaggaccggaaaacctctacgtgaaggaggtggccaagccgagcccgggggagggtgaagtcctcctgaaggtggcggccagcgccctgaaccgggcggacttaatgcagagacaaggccagtatgacccacctccaggagccagcaacattttgggacttgaggcatctggacatgtggcagagctggggcctggctgccagggacactggaagatcggggacacagccatggctctgctccccggtgggggccaggctcagtacgtcactgtccccgaagggctcctcatgcctatcccagagggattgaccctgacccaggctgcagccatcccagaggcctggctcaccgccttccagctgttacatcttgtgggaaatgttcaggctggagactatgtgctaatccatgcaggactgagtggtgtgggcacagctgctatccaactcacccggatggctggagctattcctctggtcacagctggctcccagaagaagcttcaaatggcagaaaagcttggagcagctgctggattcaattacaaaaaagaggatttctctgaagcaacgctgaaattcaccaaaggtgctggagttaatcttattctagactgcataggcggatcctactgggagaagaacgtcaactgcctggctcttgatggtcgatgggttctctatggtctgatgggaggaggtgacatcaatgggcccctgttttcaaagctactttttaagcgaggaagtctgatcaccagtttgctgaggtctagggacaataagtacaagcaaatgctggtgaatgctttcacggagcaaattctgcctcacttctccacggagggcccccaacgtctgctgccggttctggacagaatctacccagtgaccgaaatccaggaggcccataagtacatggaggccaacaagaacataggcaagatcgtcctggaactgccccagtgaaggaggatggggcaggacaggacgcggccaccccaggcctttccagagcaaacctggagaagattcacaatagacaggccaagaaacccggtgcttcctccagagccgtttaaagctgatatgaggaaataaagagtgaactggaaaccacccccacaccaaaaacaacacgcgggtctcggggggcgacacagggcacaagggcaggccaggggcgcgcccgtttcggaaaggggacggggggccaaaggggggaaaagaacccgcccac

SEQ ID NO: 355629 - DNA, 2015 bp, Homo sapiens
actcccaacggctcctttctcttctcttagcagcacccagcttgcccacccatgctcaagatgggcgggatgccagcctgttacataaatgtgccaaaagcctggccatgcctggaaaatggaccaatccgcccgccaagaggttgggtctcgttccctagagagaaggaagtttcctctccttgaagtgagagctagaatcgcactttctgtcaagctgagagaaagactcttttccagaggctaaaaggacaagaaaatctgatttgcttgcttctaactttgcgttttaaagggggaaggaggaaaggaaagagggggagggtggttctgcttagccccacccctccggctaccccaggtccagccgtccattccggtggaggcagaggcagtcctggggctctggggctcgggctttgtcaccgggacccgcaggagccagaaccactcggcgccgcctggtgcatgggaggggagccgggccaggagtaagtaactcatacgggcgccggggacccgggtcgggctgggggcttccaactcagagggagtgtgatttgcctgatcctcttcggcgttgtcctgctctgccgcatccagccctgtaccgccatcccacttcccgccgttcccatctgtgttccgggtgggatcggtctggaggcggccgaggacttcccaggcaggagctcggggcggaggccgggtccgcggcagaccagggcagcgaggcgctggccggcagggggcgctgcggtgccagcctgaggctgggctgctccgcgaggatacagcggcccctgccctgtcctgtcctgccctgccctgtcctgtcctgccctgccctgccctgtgtcctcagacaatatgttagccgtgcactttgacaagccgggaggaccggaaaacctctacgtgaaggaggtggccaagccgagcccgggggagggtgaagtcctcctgaaggtggcggccagcgccctgaaccgggcggacttaatgcagagacaaggccagtatgacccacctccaggagccagcaacattttgggacttgaggcatctggacatgtggcagagctggggcctggctgccagggacactggaagatcggggacacagccatggctctgctccccggtgggggccaggctcagtacgtcactgtccccgaagggctcctcatgcctatcccagagggattgaccctgacccaggctgcagccatcccagaggcctggctcaccgccttccagctgttacatcttgtgggaaatgttcaggctggagactatgtgctaatccatgcaggactgagtggtgtgggcacagctgctatccaactcacccggatggctggagctattcctctggtcacagctggctcccagaagaagcttcaaatggcagaaaagcttggagcagctgctggattcaattacaaaaaagaggatttctctgaagcaacgctgaaattcaccaaaggtgctggagttaatcttattctagactgcataggcggatcctactgggagaagaacgtcaactgcctggctcttgatggtcgatgggttctctatggtctgatgggaggaggtgacatcaatgggcccctgttttcaaagctactttttaagcgaggaagtctgatcaccagtttgctgaggtctagggacaataagtacaagcaaatgctggtgaatgctttcacggagcaaattctgcctcacttctccacggagggcccccaacgtctgctgccggttctggacagaatctacccagtgaccgaaatccaggaggcccataagtacatggaggccaacaagaacataggcaagatcgtcctggaactgccccagtgaaggaggatggggcaggacaggacgcggccaccccaggcctttccagagcaaacctggagaagattcacaatagacaggccaagaaacccggtgcttcctccagagccgtttaaagctgatatgaggaaataaagagtgaactggaa

SEQ ID NO: 355630 - DNA, 1602 bp, Homo sapiens
actcccaacggctcctttctcttctcttagcagcacccagcttgcccacccatgctcaagatgggcgggatgccagcctgttacataaatgtgccaaaagcctggccatgcctggaaaatggaccaatccgcccgccaagaggttgggtctcgttccctagagagaaggaagtttcctctccttgaagtgagagctagaatcgcactttctgtcaagctgagagaaagactcttttccagaggctaaaaggacaagaaaatctgatttgcttgcttctaactttgcgttttaaagggggaaggaggaaaggaaagagggggagggtggttctgcttagccccacccctccggctaccccaggtccagccgtccattccggtggaggcagaggcagtcctggggctctggggctcgggctttgtcaccgggacccgcaggagccagaaccactcggcgccgcctggtgcatgggaggggagccgggccaggaacaatatgttagccgtgcactttgacaagccgggaggaccggaaaacctctacgtgaaggaggtggccaagccgagcccgggggagggtgaagtcctcctgaaggtggcggccagcgccctgaaccgggcggacttaatgcagagacaaggccagtatgacccacctccaggagccagcaacattttgggacttgaggcatctggacatgtggcagagctggggcctggctgccagggacactggaagatcggggacacagccatggctctgctccccggtgggggccaggctcagtacgtcactgtccccgaagggctcctcatgcctatcccagagggattgaccctgacccaggctgcagccatcccagaggcctggctcaccgccttccagctgttacatcttgtgggactgagtggtgtgggcacagctgctatccaactcacccggatggctggagctattcctctggtcacagctggctcccagaagaagcttcaaatggcagaaaagcttggagcagctgctggattcaattacaaaaaagaggatttctctgaagcaacgctgaaattcaccaaaggtgctggagttaatcttattctagactgcataggcggatcctactgggagaagaacgtcaactgcctggctcttgatggtcgatgggttctctatggtctgatgggaggaggtgacatcaatgggcccctgttttcaaagctactttttaagcgaggaagtctgatcaccagtttgctgaggtctagggacaataagtacaagcaaatgctggtgaatgctttcacggagcaaattctgcctcacttctccacggagggcccccaacgtctgctgccggttctggacagaatctacccagtgaccgaaatccaggaggcccataagtacatggaggccaacaagaacataggcaagatcgtcctggaactgccccagtgaaggaggatggggcaggacaggacgcggccaccccaggcctttccagagcaaacctggagaagattcacaatagacaggccaagaaacccggtgcttcctccagagccgtttaaagctgatatgaggaaataaagagtgaactggaa

SEQ ID NO: 355631 - DNA, 1444 bp, Homo sapiens
actcccaacggctcctttctcttctcttagcagcacccagcttgcccacccatgctcaagatgggcgggatgccagcctgttacataaatgtgccaaaagcctggccatgcctggaaaatggaccaatccgcccgccaagaggttgggtctcgttccctagagagaaggaagtttcctctccttgaagtgagagctagaatcgcactttctgtcaagctgagagaaagactcttttccagaggctaaaaggacaagaaaatctgatttgcttgcttctaactttgcgttttaaagggggaaggaggaaaggaaagagggggagggtggttctgcttagccccacccctccggctaccccaggtccagccgtccattccggtggaggcagaggcagtcctggggctctggggctcgggctttgtcaccgggacccgcaggagccagaaccactcggcgccgcctggtgcatgggaggggagccgggccaggaacaatatgttagccgtgcactttgacaagccgggaggaccggaaaacctctacgtgaaggaggtggccaagccgagcccgggggagggtgaagtcctcctgaaggtggcggccagcgccctgaaccgggcggacttaatgcagagacaaggccagtatgacccacctccaggagccagcaacattttgggacttgaggcatctggacatgtggcagagctggggcctggctgccagggacactggaagatcggggacacagccatggctctgctccccggtgggggccaggctcagtacgtcactgtccccgaagggctcctcatgcctatcccagagggattgaccctgacccaggctgcagccatcccagaggcctggctcaccgccttccagctgttacatcttgtgggaaatgttcaggctggagactatgtgctaatccatgcaggactgagtggtgtgggcacagctgctatccaactcacccggatggctggagctattcctctggtcacagctggctcccagaagaagcttcaaatggcagaaaagcttggagcagctgctggattcaattacaaaaaagaggatttctctgaagcaacgctgaaattcaccaaagtacaagcaaatgctggtgaatgctttcacggagcaaattctgcctcacttctccacggagggcccccaacgtctgctgccggttctggacagaatctacccagtgaccgaaatccaggaggcccataagtacatggaggccaacaagaacataggcaagatcgtcctggaactgccccagtgaaggaggatggggcaggacaggacgcggccaccccaggcctttccagagcaaacctggagaagattcacaatagacaggccaagaaacccggtgcttcctccagagccgtttaaagctgatatgaggaaataaagagtgaactggaa

SEQ ID NO: 355632 - DNA, 1568 bp, Homo sapiens
actcccaacggctcctttctcttctcttagcagcacccagcttgcccacccatgctcaagatgggcgggatgccagcctgttacataaatgtgccaaaagcctggccatgcctggaaaatggaccaatccgcccgccaagaggttgggtctcgttccctagagagaaggaagtttcctctccttgaagtgagagctagaatcgcactttctgtcaagctgagagaaagactcttttccagaggctaaaaggacaagaaaatctgatttgcttgcttctaactttgcgttttaaagggggaaggaggaaaggaaagagggggagggtggttctgcttagccccacccctccggctaccccaggtccagccgtccattccggtggaggcagaggcagtcctggggctctggggctcgggctttgtcaccgggacccgcaggagccagaaccactcggcgccgcctggtgcatgggaggggagccgggccaggagtaagtaactcatacgggcgccggggacccgggtcgggctgggggcttccaactcagagggagtgtgatttgcctgatcctcttcggcgttgtcctgctctgccgcatccagccctgtaccgccatcccacttcccgccgttcccatctgtgttccgggtgggatcggtctggaggcggccgaggacttcccaggcaggagctcggggcggaggccgggtccgcggcagaccagggcagcgaggcgctggccggcagggggcgctgcggtgccagcctgaggctgggctgctccgcgaggatacagcggcccctgccctgtcctgtcctgccctgccctgtcctgtcctgccctgccctgccctgtgtcctcagacaatatgttagccgtgcactttgacaagccgggaggaccggaaaacctctacgtgaaggaggtggccaagccgagcccgggggagggtgaagtcctcctgaaggtggcggccagcgccctgaaccgggcggacttaatgcagagacaaggccagtatgacccacctccaggagccagcaacattttgggacttgaggcatctggacatgtggcagagctggggcctggctgccagggacactggaagatcggggacacagccatggctctgctccccggtgggggccaggctcagtacgtcactgtccccgaagggctcctcatgcctatcccagagggattgaccctgacccaggctgcagccatcccagaggcctggctcaccgccttccagctgttacatcttgtgggaaatgttcaggctggagactatgtgctaatccatgcaggactgagtggtgtgggcacagctgctatccaactcacccggatggctggagctattcctctggtcacagctggctcccagaagaagcttcaaatggcagaaaagcttggagcagctgctggattcaattacaaaaaagaggatttctctgaagcaacgctgaaattcaccaaaggtaaacaactgcttctacagttcagcaggaatttaagagatgattaaataaaagccccaccagtctcaaagttgccagt

SEQ ID NO: 355633 - DNA, 1641 bp, Homo sapiens
actcccaacggctcctttctcttctcttagcagcacccagcttgcccacccatgctcaagatgggcgggatgccagcctgttacataaatgtgccaaaagcctggccatgcctggaaaatggaccaatccgcccgccaagaggttgggtctcgttccctagagagaaggaagtttcctctccttgaagtgagagctagaatcgcactttctgtcaagctgagagaaagactcttttccagaggctaaaaggacaagaaaatctgatttgcttgcttctaactttgcgttttaaagggggaaggaggaaaggaaagagggggagggtggttctgcttagccccacccctccggctaccccaggtccagccgtccattccggtggaggcagaggcagtcctggggctctggggctcgggctttgtcaccgggacccgcaggagccagaaccactcggcgccgcctggtgcatgggaggggagccgggccaggaacaatatgttagccgtgcactttgacaagccgggaggaccggaaaacctctacgtgaaggaggtggccaagccgagcccgggggagggtgaagtcctcctgaaggtggcggccagcgccctgaaccgggcggacttaatgcagagacaaggccagtatgacccacctccaggagccagcaacattttgggacttgaggcatctggacatgtggcagagctggggcctggctgccagggacactggaagatcggggacacagccatggctctgctccccggtgggggccaggctcagtacgtcactgtccccgaagggctcctcatgcctatcccagagggattgaccctgacccaggctgcagccatcccagaggcctggctcaccgccttccagctgttacatcttgtgggaaatgttcaggctggagactatgtgctaatccatgcaggactgagtggtgtgggcacagctgctatccaactcacccggatggctggagctattcctctggtcacagctggctcccagaagaagcttcaaatggcagaaaagcttggagcagctgctggattcaattacaaaaaagaggatttctctgaagcaacgctgaaattcaccaaaggtgctggagttaatcttattctagactgcataggcggatcctactgggagaagaacgtcaactgcctggctcttgatggtcgatgggttctctatggtctgatgggaggaggtgacatcaatgggcccctgttttcaaagctactttttaagcgaggaagtctgatcaccagtttgctgaggtctagggacaataagtacaagcaaatgctggtgaatgctttcacggagcaaattctgcctcacttctccacggagggcccccaacgtctgctgccggttctggacagaatctacccagtgaccgaaatccaggaggcccataagtacatggaggccaacaagaacataggcaagatcgtcctggaactgccccagtgaaggaggatggggcaggacaggacgcggccaccccaggcctttccagagcaaacctggagaagattcacaatagacaggccaagaaacccggtgcttcctccagagccgtttaaagctgatatgaggaaataaagagtgaactggaa

SEQ ID NO: 355634 - DNA, 1467 bp, Homo sapiens
actcccaacggctcctttctcttctcttagcagcacccagcttgcccacccatgctcaagatgggcgggatgccagcctgttacataaatgtgccaaaagcctggccatgcctggaaaatggaccaatccgcccgccaagaggttgggtctcgttccctagagagaaggaagtttcctctccttgaagtccagccgtccattccggtggaggcagaggcagtcctggggctctggggctcgggctttgtcaccgggacccgcaggagccagaaccactcggcgccgcctggtgcatgggaggggagccgggccaggaacaatatgttagccgtgcactttgacaagccgggaggaccggaaaacctctacgtgaaggaggtggccaagccgagcccgggggagggtgaagtcctcctgaaggtggcggccagcgccctgaaccgggcggacttaatgcagagacaaggccagtatgacccacctccaggagccagcaacattttgggacttgaggcatctggacatgtggcagagctggggcctggctgccagggacactggaagatcggggacacagccatggctctgctccccggtgggggccaggctcagtacgtcactgtccccgaagggctcctcatgcctatcccagagggattgaccctgacccaggctgcagccatcccagaggcctggctcaccgccttccagctgttacatcttgtgggaaatgttcaggctggagactatgtgctaatccatgcaggactgagtggtgtgggcacagctgctatccaactcacccggatggctggagctattcctctggtcacagctggctcccagaagaagcttcaaatggcagaaaagcttggagcagctgctggattcaattacaaaaaagaggatttctctgaagcaacgctgaaattcaccaaaggtgctggagttaatcttattctagactgcataggcggatcctactgggagaagaacgtcaactgcctggctcttgatggtcgatgggttctctatggtctgatgggaggaggtgacatcaatgggcccctgttttcaaagctactttttaagcgaggaagtctgatcaccagtttgctgaggtctagggacaataagtacaagcaaatgctggtgaatgctttcacggagcaaattctgcctcacttctccacggagggcccccaacgtctgctgccggttctggacagaatctacccagtgaccgaaatccaggaggcccataagtacatggaggccaacaagaacataggcaagatcgtcctggaactgccccagtgaaggaggatggggcaggacaggacgcggccaccccaggcctttccagagcaaacctggagaagattcacaatagacaggccaagaaacccggtgcttcctccagagccgtttaaagctgatatgaggaaataaagagtgaactggaa

SEQ ID NO: 355635 - DNA, 1428 bp, Homo sapiens
actcccaacggctcctttctcttctcttagcagcacccagcttgcccacccatgctcaagatgggcgggatgccagcctgttacataaatgtgccaaaagcctggccatgcctggaaaatggaccaatccgcccgccaagaggttgggtctcgttccctagagagaaggaagtttcctctccttgaagtgagagctagaatcgcactttctgtcaagctgagagaaagactcttttccagaggctaaaaggacaagaaaatctgatttgcttgcttctaactttgcgttttaaagggggaaggaggaaaggaaagagggggagggtggttctgcttagccccacccctccggctaccccaggtccagccgtccattccggtggaggcagaggcagtcctggggctctggggctcgggctttgtcaccgggacccgcaggagccagaaccactcggcgccgcctggtgcatgggaggggagccgggccaggaacaatatgttagccgtgcactttgacaagccgggaggaccggaaaacctctacgtgaaggaggtggccaagccgagcccgggggagggtgaagtcctcctgaaggtggcggccagcgccctgaaccgggcggacttaatgcagagacaaggccagtatgacccacctccaggagccagcaacattttgggacttgaggcatctggacatgtggcagagctggggcctggctgccagggacactggaagatcggggacacagccatggctctgctccccggtgggggccaggctcagtacgtcactgtccccgaagggctcctcatgcctatcccagagggattgaccctgacccaggctgcagccatcccagaggcctggctcaccgccttccagctgttacatcttgtgggtgctggagttaatcttattctagactgcataggcggatcctactgggagaagaacgtcaactgcctggctcttgatggtcgatgggttctctatggtctgatgggaggaggtgacatcaatgggcccctgttttcaaagctactttttaagcgaggaagtctgatcaccagtttgctgaggtctagggacaataagtacaagcaaatgctggtgaatgctttcacggagcaaattctgcctcacttctccacggagggcccccaacgtctgctgccggttctggacagaatctacccagtgaccgaaatccaggaggcccataagtacatggaggccaacaagaacataggcaagatcgtcctggaactgccccagtgaaggaggatggggcaggacaggacgcggccaccccaggcctttccagagcaaacctggagaagattcacaatagacaggccaagaaacccggtgcttcctccagagccgtttaaagctgatatgaggaaataaagagtgaactggaa

SEQ ID NO: 355636 - DNA, 1194 bp, Homo sapiens
actcccaacggctcctttctcttctcttagcagcacccagcttgcccacccatgctcaagatgggcgggatgccagcctgttacataaatgtgccaaaagcctggccatgcctggaaaatggaccaatccgcccgccaagaggttgggtctcgttccctagagagaaggaagtttcctctccttgaagtgagagctagaatcgcactttctgtcaagctgagagaaagactcttttccagaggctaaaaggacaagaaaatctgatttgcttgcttctaactttgcgttttaaagggggaaggaggaaaggaaagagggggagggtggttctgcttagccccacccctccggctaccccaggtccagccgtccattccggtggaggcagaggcagtcctggggctctggggctcgggctttgtcaccgggacccgcaggagccagaaccactcggcgccgcctggtgcatgggaggggagccgggccaggaacaatatgttagccgtgcactttgacaagccgggaggaccggaaaacctctacgtgaaggaggtggccaagccgagcccgggggagggtgaagtcctcctgaaggtggcggccagcgccctgaaccgggcggacttaatgcagagacaaggccagtatgacccacctccaggagccagcaacattttgggacttgaggcatctggacatgtggcagagctggggcctggctgccagggacactggaagatcggggacacagccatggctctgctccccggtgggggccaggctcagtacgtcactgtccccgaagggctcctcatgcctatcccagagggattgaccctgacccaggctgcagccatcccagaggcctggctcaccgccttccagctgttacatcttgtgggaaatgttcaggctggagactatgtgctaatccatgcaggactgagtggtgtgggcacagctgctatccaactcacccggatggctggagctattcctctggtcacagctggctcccagaagaagcttcaaatggcagaaaagcttggagcagctgctggattcaattacaaaaaagaggatttctctgaagcaacgctgaaattcaccaaaggtaaacaactgcttctacagttcagcaggaatttaagagatgattaaataaaagccccaccagtctcaaagttgccagt

SEQ ID NO: 355637 - DNA, 495 bp, Homo sapiens
gtctctggtgataagggctttttgccctagtatggggagggtacccctctcagaggaatctttatgacttgctacatgcaagaagagacaggtcagctagccttttctgaaactacaatttctccaatgctttcacctcaaaattaacaatatacctatcggacatattctgagatggcacatgactccttcaagggtatttcacacacatgctaggaagtgaggggttaagtgtccctgtgtgctttttcagatacgtggcttcagagagagcaagaaggctgaggaggatgaggagggcagggtgaggctctctccccaggctgatgatctcctttcccttgtcttagtacaagcaaatgctggtgaatgctttcacggagcaaattctgcctcacttctccacggagggcccccaacgtctgctgccggttctggacagaatctacccagtgaccgaaatccaggaggcccataagtacatggaggccaaca

SEQ ID NO: 355638 - DNA, 756 bp, Homo sapiens
caagaatcgtctacattttgacattttattgtaggaaaataattttataatgcaaaatctgtcaaatatcttaaaacttttttagataatttgtaatttgttgtagtcaaattacaaattatggagagcttcacattacaagaatgagcttgacatggcatctgccctccacaactcactgtttagtcatcagactaatgtataaacaactattattatcttaatatgactgtacagtggttctgtgggagcataggggaggggtgcttaatcttggaaattttacaggatttatttatttattgcctgaactaagatgtgaaggctcactaggactttgataaagaaactgcaaagtcatgatattatggtttgttttaggaattcatgatttgttcctgtagctgaaacatacattgaatggtaagttagagcccgacataaaagactttctgtactgtactagaaaattagtgtctgggtgtggtggctcactcctgtaatcccgtcactttgggaggccaaggtgggaggatcgcttaaggctgggagttcagccaggccacaaagaccccatctctatgggcatggtggtgcgggtgtagtggtgcgcactgctactactagctacttgggctgctgaggcagaacgatcattttgagctcacgagttgcagagactgcagtgaggtatgatagagctccactgaactccagcctgcaccacagagtgagaccctgtctctaaaaaaaaaa

SEQ ID NO: 355639 - DNA, 1852 bp, Homo sapiens
aaagaaagaatacatgtgaagaacttggaacagtgcctagaacatagtataggggttcaggtgttactaattataattatttataattgttatttttatttataattataattgttaacttttactgttaccattatttcctggctttacattggtttaagataatatctgtagggtatagtataatgttatccaaatattaaattacatatagtatgtttagttttatttagcattgttaagattactcagtgtcaaagggagcattttaaaattatttagtttttgagacggggtctcacactcacccaggttggagtatagtagcacaatctcagctcactgaagcctctgcctcctgggctcaagcagtcctcccacctcagcctcctgagtagcttgagaatacaggtgtgcacaccacactgcactgctttttaaattttttgtagatgtgaagtctcactgtattgaccaggctggtctcgaacttaggagatcaagcagtcttcctgcctcaccctccaaaggtgctgggattacaggcatgagctactgcacctggccagaggcaacattaaaaaaaaaaaaaaaagattgttgaggctttttaactcacaactcttggagacataaaacttctgttatctcaggcacttggtaaatctgaagcttcagagaaaagagggtcagggggtaggacatgatcaatttcagttatgttatagacttaatatgggaacaccttatatagtgcttgacattttatagaacattttttacttctgtttttagttaacatggatatttgtgtcagttcatcgataaggttctgaaatctagaaatataggtggtttctctcacttacacgattattatgtaatatacttgagcttaagaatccaagattctggatagcattgtttctttgggaaaatgtagattctaagttccgaacagttgatttcctaaatatctttcagttctcagccatttgtaagctgcgcttcacctgctactaatcttgctgttacttctgctatcccatctttaaatttttatcacaatttgaatgattggcaactatgatcatcttatgtctttagtaacagtaagcaaaatttacatgtttttaaaggaaaatttaatttctataaatattgttaaaaaggggttatttgtggatatgtaattttgttttggtgtatttttctgtaactttaaggaagcactaatctgtttagtgtttgttctgttttgccttgttgagaggttgattacttttaatatgaaataattttaaaaggaggctttttataaggttgtaggggctttttaaagttattgatacctttttttttttagtttgtagataactgctatagagatcagtaccattgcatattttgcatagtgtagaaccagtggtcattaatttttaaaactaccttatgcaagtgtagttttcaaggaaataaatacatagatgcatatacaattaaacaagaaaatgaaaacagtttaaaataggataaggaaatatacagatagaatactgagagtaataaatatggagagtgggtcagaattgtaacattgataggcattgcataaaccctgcagcatttttaagttaaacttgctctcattttgggtatcaagaaaattgcaggaaaacacaactagctctataatgagtattgcatataagaaaaagagactggacatggtggctcactcctttaatctcagcactttgggaggccaaggtgggagggtcacttgtggccaggagttcgagaccagtctgggtgacatagtgggacccctctctaaaaataaaatgaaaaa

SEQ ID NO: 355640 - DNA, 640 bp, Homo sapiens
actacatacttccgatagaaatgaatctcctatactgattctctctttagatccatttgctacatttaaactactgtatttctttctgcatgtttctagtttattaaccttgcaagaactcttcaggcacatatggaagatctcgaaagtaggtggaatttcccctccccagactagttgaatttacttttgcaaattaaacccaaagcaaaacctaagtatatactctgttctgccaaattagagctcatttataggcttagtaataccaaaatgattgatttgggaaatatgggtcgggaaactgacattagtttttttttttttttaaagcatattttaaggtatggaagcatgtaatcgtttacggagctgcattttacttttttttttcaaagagaaatttattgttgatcaccttgatttcaggatttataataaaaaaggcataaatcttaactactaatcaaaccaacatttcttaatctgttaggattttgttttgtttcgtttctggtaagaaattttacctgttactcaggtttgttagatcataagagattattcctgggcttacctatgattccaggaaaatatgggacaaggagtcctaattctgaatccatatcagaagccatga

SEQ ID NO: 355641 - DNA, 758 bp, Homo sapiens
caagaatcgtctacattttgacattttattgtaggaaaataattttataatgcaaaatctgtcaaatatcttaaaacttttttagataatttgtaatttgttgtagtcaaattacaaattatggagagcttcacattacaagaatgagcttgacatggcatctgccctccacaactcactgtttagtcatcagactaatgtataaacaactattattatcttaatatgactgtacagtggttctgtgggagcataggggaggggtgcttaatcttggaaattttacaggatttatttatttattgcctgaactaagatgtgaaggctcactaggactttgataaagaaactgcaaagtcatgatattatggtttgttttaggaattcatgatttgttcctgtagctgaaacatacattgaatggtaagttagagcccgacataaaagactttctgtactgtactagaaaattagtgtctgggtgtggtggctcactcctgtaatcccgtcactttgggaggccaaggtgggaggatcgcttaaggctgggagttcagccaggccacaaagaccccatctctatgggcatggtggtgcgggtgtagtggtgcgcactgctactactagctatcgggaggctgaggcaggagaatggcatgaaccctggaggcagagcttgcagtgaatcaagatcacgccactgcactctagcctgggcgacagagcgagactctgtctcaaaaaaaacaaaaaacaaa

SEQ ID NO: 355642 - DNA, 3517 bp, Homo sapiens
cgcgaagtggggggaggaggagcagggaggggcacttaacggtggtggctggttctgcgccggatccgggagaggggcgggcgccattgtgcttcgctgccgactgcatttcctcagtcacgggcctagaactccaaggagaaaggcggcgaaaaatctttaagaatggagtctaaaccttcaaggattccaagaagaatttctgttcaaccttccagctccttaagtgctaggatgatgtctggaagcagaggaagtagtttaaatgatacctatcactcaagagactcttcatttagattggattctgaatatcagtctacatcagcatcagcatctgcgtcaccatttcaatctgcatggtatagtgaatctgagataactcagggagcacgctcaagatcgcagaaccagcaacgggatcatgattcaaaaagacctaaactttcctgtacaaactgtactacctcagctgggagaaatgttggaaatggtttaaacacattatcagattcatcttggaggcatagtcaagttcctagatcttcatcaatggtacttggatcatttggaacagacttaatgagagagaggagagatttggagagaagaacagattcctctattagtaatcttatggattatagtcaccgaagtggtgatttcacaacttcatcatatgttcaagacagagttccttcatattcacaaggagcaagaccaaaagaaaactcaatgagcactttacagttgaatacatcatccacaaaccaccaattgccttctgaacatcagaccatactaagttctagggattccagaaattctttaagatcaaatttttcttcaagagaatcagaatcttcccgaagcaatacgcagcctggattttcttacagttcaagtagagatgaagccccaatcataagcaattcagaaagggttgtttcatctcaaagaccatttcaagaatcttctgacaatgaaggtaggcggacaacgaggagattgctgtcacgcatagcttctagcatgtcatctacttttttttcacgaagatctagtcaggattccttgaatacaagatcattgaattctgaaaattcttacgtttctccaagaatcttgacagcttcacagtcccgtagtaatgtaccatcagcttctgaagttcccgataatagggcatctgaagcttctcagggatttcgatttcttaggcgaagatggggtttgtcatctcttagccacaatcatagctctgagtcagattcagaaaattttaaccaagaatctgaaggtagaaatacaggaccatggttatcttcctcacttagaaatagatgcacacctttgttctctagaaggaggcgagagggaagagatgaatcttcaaggatacctacctctgatacatcatctagatctcatatttttagaagagaatcaaatgaagtggttcaccttgaagcacagaatgatcctcttggagctgctgccaacagaccacaagcatctgcagcatcaagcagtgccacaacaggtggctctacatcagattcggctcaaggtggaagaaatacaggaatatcagggattcttcctggttccttattccggtttgcagtccccccagcacttgggagtaatttgaccgacaatgtcatgatcacagtagatattattccttcaggttggaattcagctgatggtaaaagtgataaaactaaaagtgcgccttcaagagatccagaaagattgcagaaaataaaagagagcctccttttagaggactcagaagaagaagaaggtgacttatgtagaatttgtcaaatggcagctgcatcatcatctaatttgctgatagagccatgcaagtgcacaggaagtttgcagtatgtccaccaagactgtatgaaaaagtggttacaggccaaaattaactctggttcttcattagaagctgtaaccacctgtgaactatgtaaagagaagttggagcttaacctggaggattttgatattcatgaactacatagagctcatgcaaatgaacaagctgagtatgagtttatcagctctggtctctacctagtggtgttattgcacttgtgcgaacaaagcttttctgatatgatgggaaatacaaatgaaccaagcacacgtgtccgatttattaaccttgcaagaactcttcaggcacatatggaagatctcgaaacttcagaggatgattccgaagaagacggagaccataacaggacatttgatattgcctaacttcatataagacagatggatgatctgtgaacataagtgtttattaaaaatggcaattaaatataaattacttttgtgggggaatgcctaataaatacattgactatatataaaatgaatatatacatacacatgtatgcctgtatatatatattcattctccagtgttgctgaattaaaattctgctggactttttaacatagcaaatccgatgtttataaactggtaatcaaaaaggttttttcttttaggtgagtgggaaagtattacccttgttttaaatatctaagcaatgcctatcaacccttttttgtgttatgattactgtagtcatatttatgaaaaaaggtttgtgttttactcttgctagtgagaaaagtgggacaaaatatacttttgaaataaaatgctatatggcacctaattattttttcttttaaaatgccttaagttgcagtctcattttgataatcatttgcttccagtgtttaaaaattaaaaaaagaatggggagaaggttatgagaagagcattattaagtttccaaatttaatttgaattccaaattcacctagcaataaaatctaatttttaaaaagtatataaatataaaatgtataaatgatggatagatttttgtattgatttgcaaaatgcagattatatttgataggctatagtatgtagatattccttttaggaatattacagctgtaaattatatgagacttgccagtcaaatgctatttggtttaaaaaaattattgcaatctcaagttaatggaatatttttaaatcccacattcagagtttaaaacactggttttcaatgtgttttttagtgttgtcacttgtttatagataaatatataaataacctgtttggatcctggtcctttttaactgttccttggtaattctgagcatttatttgatgacttaatatttttcactacctttggagaacagatgaacattattcaccatgaatggatctatactgtgtggtcatgagttgtgtatacttccataacactgtatttttcttctgtcagtacccttaggatacactttaaaacaccttaaggtctgatgttatggcaacaaactactttttcaaacctaaataggaaccatgtaatttctcaaaagtgattgaacagtttgcccacacttagtttgttggtcttatgtaaaacattggctcaaaataaagtacacactgatttattttac

SEQ ID NO: 355643 - DNA, 4311 bp, Homo sapiens
aaagaaagaatacatgtgaagaacttggaacagtgcctagaacatagtataggggttcaggtgttactaattataattatttataattgttatttttatttataattataattgttaacttttactgttaccattatttcctggctttacattggtttaagataatatctgtagggtatagtataatgttatccaaatattaaattacatatagtatgtttagttttatttagcattgttaagattactcagtgtcaaagggagcattttaaaattatttagtttttgagacggggtctcacactcacccaggttggagtatagtagcacaatctcagctcactgaagcctctgcctcctgggctcaagcagtcctcccacctcagcctcctgagtagcttgagaatacaggtgtgcacaccacactgcactgctttttaaattttttgtagatgtgaagtctcactgtattgaccaggctggtctcgaacttaggagatcaagcagtcttcctgcctcaccctccaaaggtgctgggattacaggcatgagctactgcacctggccagaggcaacattaaaaaaaaaaaaaaaagattgttgaggctttttaactcacaactcttggagacataaaacttctgttatctcaggcacttggtaaatctgaagcttcagagaaaagagggtcagggggtaggacatgatcaatttcagttatgttatagacttaatatgggaacaccttatatagtgcttgacattttatagaacattttttacttctgtttttagttaacatggatatttgtgtcagttcatcgataaggttctgaaatctagaaatataggtggtttctctcacttacacgattattatgtaatatacttgagcttaagaatccaagattctggatagcattgtttctttgggaaaatgtagattctaagttccgaacagttgatttcctaaatatctttcagttctcagccatttgtaagctgcgcttcacctgctactaatcttgctgttacttctgctatcccatctttaaatttttatcacaatttgaatgattggcaactatgatcatcttatgtctttagtaacatctacatcagcatcagcatctgcgtcaccatttcaatctgcatggtatagtgaatctgagataactcagggagcacgctcaagatcgcagaaccagcaacgggatcatgattcaaaaagacctaaactttcctgtacaaactgtactacctcagctgggagaaatgttggaaatggtttaaacacattatcagattcatcttggaggcatagtcaagttcctagatcttcatcaatggtacttggatcatttggaacagacttaatgagagagaggagagatttggagagaagaacagattcctctattagtaatcttatggattatagtcaccgaagtggtgatttcacaacttcatcatatgttcaagacagagttccttcatattcacaaggagcaagaccaaaagaaaactcaatgagcactttacagttgaatacatcatccacaaaccaccaattgccttctgaacatcagaccatactaagttctagggattccagaaattctttaagatcaaatttttcttcaagagaatcagaatcttcccgaagcaatacgcagcctggattttcttacagttcaagtagagatgaagccccaatcataagcaattcagaaagggttgtttcatctcaaagaccatttcaagaatcttctgacaatgaaggtaggcggacaacgaggagattgctgtcacgcatagcttctagcatgtcatctacttttttttcacgaagatctagtcaggattccttgaatacaagatcattgaattctgaaaattcttacgtttctccaagaatcttgacagcttcacagtcccgtagtaatgtaccatcagcttctgaagttcccgataatagggcatctgaagcttctcagggatttcgatttcttaggcgaagatggggtttgtcatctcttagccacaatcatagctctgagtcagattcagaaaattttaaccaagaatctgaaggtagaaatacaggaccatggttatcttcctcacttagaaatagatgcacacctttgttctctagaaggaggcgagagggaagagatgaatcttcaaggatacctacctctgatacatcatctagatctcatatttttagaagagaatcaaatgaagtggttcaccttgaagcacagaatgatcctcttggagctgctgccaacagaccacaagcatctgcagcatcaagcagtgccacaacaggtggctctacatcagattcggctcaaggtggaagaaatacaggaatatcagggattcttcctggttccttattccggtttgcagtccccccagcacttgggagtaatttgaccgacaatgtcatgatcacagtagatattattccttcaggttggaattcagctgatggtaaaagtgataaaactaaaagtgcgccttcaagagatccagaaagattgcagaaaataaaagagagcctccttttagaggactcagaagaagaagaaggtgacttatgtagaatttgtcaaatggcagctgcatcatcatctaatttgctgatagagccatgcaagtgcacaggaagtttgcagtatgtccaccaagactgtatgaaaaagtggttacaggccaaaattaactctggttcttcattagaagctgtaaccacctgtgaactatgtaaagagaagttggagcttaacctggaggattttgatattcatgaactacatagagctcatgcaaatgaacaagctgagtatgagtttatcagctctggtctctacctagtggtgttattgcacttgtgcgaacaaagcttttctgatatgatgggaaatacaaatgaaccaagcacacgtgtccgatttattaaccttgcaagaactcttcaggcacatatggaagatctcgaaacttcagaggatgattccgaagaagacggagaccataacaggacatttgatattgcctaacttcatataagacagatggatgatctgtgaacataagtgtttattaaaaatggcaattaaatataaattacttttgtgggggaatgcctaataaatacattgactatatataaaatgaatatatacatacacatgtatgcctgtatatatatattcattctccagtgttgctgaattaaaattctgctggactttttaacatagcaaatccgatgtttataaactggtaatcaaaaaggttttttcttttaggtgagtgggaaagtattacccttgttttaaatatctaagcaatgcctatcaacccttttttgtgttatgattactgtagtcatatttatgaaaaaaggtttgtgttttactcttgctagtgagaaaagtgggacaaaatatacttttgaaataaaatgctatatggcacctaattattttttcttttaaaatgccttaagttgcagtctcattttgataatcatttgcttccagtgtttaaaaattaaaaaaagaatggggagaaggttatgagaagagcattattaagtttccaaatttaatttgaattccaaattcacctagcaataaaatctaatttttaaaaagtatataaatataaaatgtataaatgatggatagatttttgtattgatttgcaaaatgcagattatatttgataggctatagtatgtagatattccttttaggaatattacagctgtaaattatatgagacttgccagtcaaatgctatttggtttaaaaaaattattgcaatctcaagttaatggaatatttttaaatcccacattcagagtttaaaacactggttttcaatgtgttttttagtgttgtcacttgtttatagataaatatataaataacctgtttggatcctggtcctttttaactgttccttggtaattctgagcatttatttgatgacttaatatttttcactacctttggagaacagatgaacattattcaccatgaatggatctatactgtgtggtcatgagttgtgtatacttccataacactgtatttttcttctgtcagtacccttaggatacactttaaaacaccttaaggtctgatgttatggcaacaaactactttttcaaacctaaataggaaccatgtaatttctcaaaagtgattgaacagtttgcccacacttagtttgttggtcttatgtaaaacattggctcaaaataaagtacacactgatttattttac

SEQ ID NO: 355644 - DNA, 3700 bp, Homo sapiens
cgcgaagtggggggaggaggagcagggaggggcacttaacggtggtggctggttctgcgccggatccgggagaggggcgggcgccattgtgcttcgctgccgactgcatttcctcagtcacgggcctagaactccaaggagaaaggcggcggtgcgtgttgctgcgagtgggacgcgcactggtcggtgccggctcaggagccggggaattcatgatttgttcctgtagctgaaacatacattgaatgctttctgccctggcatgaacttacatggtcagagctggtttttcctgccctcaaatatatttctctgactctaccggttagactagaaaaatctttaagaatggagtctaaaccttcaaggattccaagaagaatttctgttcaaccttccagctccttaagtgctaggatgatgtctggaagcagaggaagtagtttaaatgatacctatcactcaagagactcttcatttagattggattctgaatatcagtctacatcagcatcagcatctgcgtcaccatttcaatctgcatggtatagtgaatctgagataactcagggagcacgctcaagatcgcagaaccagcaacgggatcatgattcaaaaagacctaaactttcctgtacaaactgtactacctcagctgggagaaatgttggaaatggtttaaacacattatcagattcatcttggaggcatagtcaagttcctagatcttcatcaatggtacttggatcatttggaacagacttaatgagagagaggagagatttggagagaagaacagattcctctattagtaatcttatggattatagtcaccgaagtggtgatttcacaacttcatcatatgttcaagacagagttccttcatattcacaaggagcaagaccaaaagaaaactcaatgagcactttacagttgaatacatcatccacaaaccaccaattgccttctgaacatcagaccatactaagttctagggattccagaaattctttaagatcaaatttttcttcaagagaatcagaatcttcccgaagcaatacgcagcctggattttcttacagttcaagtagagatgaagccccaatcataagcaattcagaaagggttgtttcatctcaaagaccatttcaagaatcttctgacaatgaaggtaggcggacaacgaggagattgctgtcacgcatagcttctagcatgtcatctacttttttttcacgaagatctagtcaggattccttgaatacaagatcattgaattctgaaaattcttacgtttctccaagaatcttgacagcttcacagtcccgtagtaatgtaccatcagcttctgaagttcccgataatagggcatctgaagcttctcagggatttcgatttcttaggcgaagatggggtttgtcatctcttagccacaatcatagctctgagtcagattcagaaaattttaaccaagaatctgaaggtagaaatacaggaccatggttatcttcctcacttagaaatagatgcacacctttgttctctagaaggaggcgagagggaagagatgaatcttcaaggatacctacctctgatacatcatctagatctcatatttttagaagagaatcaaatgaagtggttcaccttgaagcacagaatgatcctcttggagctgctgccaacagaccacaagcatctgcagcatcaagcagtgccacaacaggtggctctacatcagattcggctcaaggtggaagaaatacaggaatatcagggattcttcctggttccttattccggtttgcagtccccccagcacttgggagtaatttgaccgacaatgtcatgatcacagtagatattattccttcaggttggaattcagctgatggtaaaagtgataaaactaaaagtgcgccttcaagagatccagaaagattgcagaaaataaaagagagcctccttttagaggactcagaagaagaagaaggtgacttatgtagaatttgtcaaatggcagctgcatcatcatctaatttgctgatagagccatgcaagtgcacaggaagtttgcagtatgtccaccaagactgtatgaaaaagtggttacaggccaaaattaactctggttcttcattagaagctgtaaccacctgtgaactatgtaaagagaagttggagcttaacctggaggattttgatattcatgaactacatagagctcatgcaaatgaacaagctgagtatgagtttatcagctctggtctctacctagtggtgttattgcacttgtgcgaacaaagcttttctgatatgatgggaaatacaaatgaaccaagcacacgtgtccgatttattaaccttgcaagaactcttcaggcacatatggaagatctcgaaacttcagaggatgattccgaagaagacggagaccataacaggacatttgatattgcctaacttcatataagacagatggatgatctgtgaacataagtgtttattaaaaatggcaattaaatataaattacttttgtgggggaatgcctaataaatacattgactatatataaaatgaatatatacatacacatgtatgcctgtatatatatattcattctccagtgttgctgaattaaaattctgctggactttttaacatagcaaatccgatgtttataaactggtaatcaaaaaggttttttcttttaggtgagtgggaaagtattacccttgttttaaatatctaagcaatgcctatcaacccttttttgtgttatgattactgtagtcatatttatgaaaaaaggtttgtgttttactcttgctagtgagaaaagtgggacaaaatatacttttgaaataaaatgctatatggcacctaattattttttcttttaaaatgccttaagttgcagtctcattttgataatcatttgcttccagtgtttaaaaattaaaaaaagaatggggagaaggttatgagaagagcattattaagtttccaaatttaatttgaattccaaattcacctagcaataaaatctaatttttaaaaagtatataaatataaaatgtataaatgatggatagatttttgtattgatttgcaaaatgcagattatatttgataggctatagtatgtagatattccttttaggaatattacagctgtaaattatatgagacttgccagtcaaatgctatttggtttaaaaaaattattgcaatctcaagttaatggaatatttttaaatcccacattcagagtttaaaacactggttttcaatgtgttttttagtgttgtcacttgtttatagataaatatataaataacctgtttggatcctggtcctttttaactgttccttggtaattctgagcatttatttgatgacttaatatttttcactacctttggagaacagatgaacattattcaccatgaatggatctatactgtgtggtcatgagttgtgtatacttccataacactgtatttttcttctgtcagtacccttaggatacactttaaaacaccttaaggtctgatgttatggcaacaaactactttttcaaacctaaataggaaccatgtaatttctcaaaagtgattgaacagtttgcccacacttagtttgttggtcttatgtaaaacattggctcaaaataaagtacacactgatttattttac

SEQ ID NO: 355645 - DNA, 4262 bp, Homo sapiens
aaagaaagaatacatgtgaagaacttggaacagtgcctagaacatagtataggggttcaggtgttactaattataattatttataattgttatttttatttataattataattgttaacttttactgttaccattatttcctggctttacattggtttaagataatatctgtagggtatagtataatgttatccaaatattaaattacatatagtatgtttagttttatttagcattgttaagattactcagtgtcaaagggagcattttaaaattatttagtttttgagacggggtctcacactcacccaggttggagtatagtagcacaatctcagctcactgaagcctctgcctcctgggctcaagcagtcctcccacctcagcctcctgagtagcttgagaatacaggtgtgcacaccacactgcactgctttttaaattttttgtagatgtgaagtctcactgtattgaccaggctggtctcgaacttaggagatcaagcagtcttcctgcctcaccctccaaaggtgctgggattacaggcatgagctactgcacctggccagaggcaacattaaaaaaaaaaaaaaaagattgttgaggctttttaactcacaactcttggagacataaaacttctgttatctcaggcacttggtaaatctgaagcttcagagaaaagagggtcagggggtaggacatgatcaatttcagttatgttatagacttaatatgggaacaccttatatagtgcttgacattttatagaacattttttacttctgtttttagttaacatggatatttgtgtcagttcatcgataaggttctgaaatctagaaatataggtggtttctctcacttacacgattattatgtaatatacttgagcttaagaatccaagattctggatagcattgtttctttgggaaaatgtagattctaagttccgaacagttgatttcctaaatatctttcagttctcagccatttgtaagctgcgcttcacctgctactaatcttgctgttacttctgctatcccatctttaaatttttatcacaatttgaatgattggcaactatgatcatcttatgtctttagtaacatctacatcagcatcagcatctgcgtcaccatttcaatctgcatggtatagtgaatctgagataactcagggagcacgctcaagatcgcagaaccagcaacgggatcatgattcaaaaagacctaaactttcctgtacaaactgtactacctcagctgggagaaatgttggaaatggtttaaacacattatcagattcatcttggaggcatagtcaagttcctagatcttcatcaatggtacttggatcatttggaacagacttaatgagagagaggagagatttggagagaagaacagattcctctattagtaatcttatggattatagtcaccgaagtggtgatttcacaacttcatcatatgttcaagacagagttccttcatattcacaaggagcaagaccaaaagaaaactcaatgagcactttacagttgaatacatcatccacaaaccaccaattgccttctgaacatcagaccatactaagttctagggattccagaaattctttaagatcaaatttttcttcaagagaatcagaatcttcccgaagcaatacgcagcctggattttcttacagttcaagtagagatgaagccccaatcataagcaattcagaaagggttgtttcatctcaaagaccatttcaagaatcttctgacaatgaaggtaggcggacaacgaggagattgctgtcacgcatagcttctagcatgtcatctacttttttttcacgaagatctagtcaggattccttgaatacaagatcattgaattctgaaaattcttacgtttctccaagaatcttgacagcttcacagtcccgtagtaatgtaccatcagcttctgaagttcccgataatagggcatctgaagcttctcagggatttcgatttcttaggcgaagatggggtttgtcatctcttagccacaatcatagctctgagtcagattcagaaaattttaaccaagaatctgaaggtagaaatacaggaccatggttatcttcctcacttagaaatagatgcacacctttgttctctagaaggaggcgagagggaagagatgaatcttcaaggatacctacctctgatacatcatctagatctcatatttttagaagagaatcaaatgaagtggttcaccttgaagcacagaatgatcctcttggagctgctgccaacagaccacaagcatctgcagcatcaagcagtgccacaacaggtggctctacatcagattcggctcaaggtggaagaaatacaggaatatcagggattcttcctggttccttattccggtttgcagtccccccagcacttgggagtaatttgaccgacaatgtcatgatcacagtagatattattccttcaggttggaattcagctgatggtaaaagtgataaaactaaaagtgcgccttcaagagatccagaaagattgcagaaaataaaagagagcctccttttagaggactcagaagaagaagaaggtgacttatgtagaatttgtcaaatggcagctgcatcatcatctaatttgctgatagagccatgcaagtgcacaggaagtttgcagtatgtccaccaagactgtatgaaaaagtggttacaggccaaaattaactctggttcttcattagaagctgtaaccacctgtgaactatgtaaagagaagttggagcttaacctggaggattttgatattcatgaactacatagagctcatgcaaatgaacaagctgagtatgagtttatcagctctggtctctacctagtggtgttattgcacttgtgcgaacaaagcttttctgatatgatgggaaatacaaatgaaccaagcacacgtgtccgacttcagaggatgattccgaagaagacggagaccataacaggacatttgatattgcctaacttcatataagacagatggatgatctgtgaacataagtgtttattaaaaatggcaattaaatataaattacttttgtgggggaatgcctaataaatacattgactatatataaaatgaatatatacatacacatgtatgcctgtatatatatattcattctccagtgttgctgaattaaaattctgctggactttttaacatagcaaatccgatgtttataaactggtaatcaaaaaggttttttcttttaggtgagtgggaaagtattacccttgttttaaatatctaagcaatgcctatcaacccttttttgtgttatgattactgtagtcatatttatgaaaaaaggtttgtgttttactcttgctagtgagaaaagtgggacaaaatatacttttgaaataaaatgctatatggcacctaattattttttcttttaaaatgccttaagttgcagtctcattttgataatcatttgcttccagtgtttaaaaattaaaaaaagaatggggagaaggttatgagaagagcattattaagtttccaaatttaatttgaattccaaattcacctagcaataaaatctaatttttaaaaagtatataaatataaaatgtataaatgatggatagatttttgtattgatttgcaaaatgcagattatatttgataggctatagtatgtagatattccttttaggaatattacagctgtaaattatatgagacttgccagtcaaatgctatttggtttaaaaaaattattgcaatctcaagttaatggaatatttttaaatcccacattcagagtttaaaacactggttttcaatgtgttttttagtgttgtcacttgtttatagataaatatataaataacctgtttggatcctggtcctttttaactgttccttggtaattctgagcatttatttgatgacttaatatttttcactacctttggagaacagatgaacattattcaccatgaatggatctatactgtgtggtcatgagttgtgtatacttccataacactgtatttttcttctgtcagtacccttaggatacactttaaaacaccttaaggtctgatgttatggcaacaaactactttttcaaacctaaataggaaccatgtaatttctcaaaagtgattgaacagtttgcccacacttagtttgttggtcttatgtaaaacattggctcaaaataaagtacacactgatttattttac

SEQ ID NO: 355646 - DNA, 4340 bp, Homo sapiens
aaagaaagaatacatgtgaagaacttggaacagtgcctagaacatagtataggggttcaggtgttactaattataattatttataattgttatttttatttataattataattgttaacttttactgttaccattatttcctggctttacattggtttaagataatatctgtagggtatagtataatgttatccaaatattaaattacatatagtatgtttagttttatttagcattgttaagattactcagtgtcaaagggagcattttaaaattatttagtttttgagacggggtctcacactcacccaggttggagtatagtagcacaatctcagctcactgaagcctctgcctcctgggctcaagcagtcctcccacctcagcctcctgagtagcttgagaatacaggtgtgcacaccacactgcactgctttttaaattttttgtagatgtgaagtctcactgtattgaccaggctggtctcgaacttaggagatcaagcagtcttcctgcctcaccctccaaaggtgctgggattacaggcatgagctactgcacctggccagaggcaacattaaaaaaaaaaaaaaaagattgttgaggctttttaactcacaactcttggagacataaaacttctgttatctcaggcacttggtaaatctgaagcttcagagaaaagagggtcagggggtaggacatgatcaatttcagttatgttatagacttaatatgggaacaccttatatagtgcttgacattttatagaacattttttacttctgtttttagttaacatggatatttgtgtcagttcatcgataaggttctgaaatctagaaatataggtggtttctctcacttacacgattattatgtaatatacttgagcttaagaatccaagattctggatagcattgtttctttgggaaaatgtagattctaagttccgaacagttgatttcctaaatatctttcagttctcagccatttgtaagctgcgcttcacctgctactaatcttgctgttacttctgctatcccatctttaaatttttatcacaatttgaatgattggcaactatgatcatcttatgtctttagtaacatctacatcagcatcagcatctgcgtcaccatttcaatctgcatggtatagtgaatctgagataactcagggagcacgctcaagatcgcagaaccagcaacgggatcatgattcaaaaagacctaaactttcctgtacaaactgtactacctcagctgggagaaatgttggaaatggtttaaacacattatcagattcatcttggaggcatagtcaagttcctagatcttcatcaatggtacttggatcatttggaacagacttaatgagagagaggagagatttggagagaagaacagattcctctattagtaatcttatggattatagtcaccgaagtggtgatttcacaacttcatcatatgttcaagacagagttccttcatattcacaaggagcaagaccaaaagaaaactcaatgagcactttacagttgaatacatcatccacaaaccaccaattgccttctgaacatcagaccatactaagttctagggattccagaaattctttaagatcaaatttttcttcaagagaatcagaatcttcccgaagcaatacgcagcctggattttcttacagttcaagtagagatgaagccccaatcataagcaattcagaaagggttgtttcatctcaaagaccatttcaagaatcttctgacaatgaaggtaggcggacaacgaggagattgctgtcacgcatagcttctagcatgtcatctacttttttttcacgaagatctagtcaggattccttgaatacaagatcattgaattctgaaaattcttacgtttctccaagaatcttgacagcttcacagtcccgtagtaatgtaccatcagcttctgaagttcccgataatagggcatctgaagcttctcagggatttcgatttcttaggcgaagatggggtttgtcatctcttagccacaatcatagctctgagtcagattcagaaaattttaaccaagaatctgaaggtagaaatacaggaccatggttatcttcctcacttagaaatagatgcacacctttgttctctagaaggaggcgagagggaagagatgaatcttcaaggatacctacctctgatacatcatctagatctcatatttttagaagagaatcaaatgaagtggttcaccttgaagcacagaatgatcctcttggagctgctgccaacagaccacaagcatctgcagcatcaagcagtgccacaacaggtggctctacatcagattcggctcaaggtggaagaaatacaggaatatcagggattcttcctggttccttattccggtttgcagtccccccagcacttgggagtaatttgaccgacaatgtcatgatcacagtagatattattccttcaggttggaattcagctgatggtaaaagtgataaaactaaaagtgctgcccttccaagcagaatcccaggaaaagcattggcaggcaaccatcaccaagagaagcctccgtatttcagccagggattccagcaagcacagcacagcacaggttgcacttcatgtccagacaatttggtcaaaatgggcaagcttgaattcaatcaatactaagatttgcttgataagaagccattggcaatgttgcaccatgggaaagttttggccagtaattggttccaccaatgactggtatgacaaaacgtggtttacatgggccaaaaaattacactactgggttcttcattagaagctgtaaccacctgtgaactatgtaaagagaagttggagcttaacctggaggattttgatattcatgaactacatagagctcatgcaaatgaacaagctgagtatgagtttatcagctctggtctctacctagtggtgttattgcacttgtgcgaacaaagcttttctgatatgatgggaaatacaaatgaaccaagcacacgtgtccgacttcagaggatgattccgaagaagacggagaccataacaggacatttgatattgcctaacttcatataagacagatggatgatctgtgaacataagtgtttattaaaaatggcaattaaatataaattacttttgtgggggaatgcctaataaatacattgactatatataaaatgaatatatacatacacatgtatgcctgtatatatatattcattctccagtgttgctgaattaaaattctgctggactttttaacatagcaaatccgatgtttataaactggtaatcaaaaaggttttttcttttaggtgagtgggaaagtattacccttgttttaaatatctaagcaatgcctatcaacccttttttgtgttatgattactgtagtcatatttatgaaaaaaggtttgtgttttactcttgctagtgagaaaagtgggacaaaatatacttttgaaataaaatgctatatggcacctaattattttttcttttaaaatgccttaagttgcagtctcattttgataatcatttgcttccagtgtttaaaaattaaaaaaagaatggggagaaggttatgagaagagcattattaagtttccaaatttaatttgaattccaaattcacctagcaataaaatctaatttttaaaaagtatataaatataaaatgtataaatgatggatagatttttgtattgatttgcaaaatgcagattatatttgataggctatagtatgtagatattccttttaggaatattacagctgtaaattatatgagacttgccagtcaaatgctatttggtttaaaaaaattattgcaatctcaagttaatggaatatttttaaatcccacattcagagtttaaaacactggttttcaatgtgttttttagtgttgtcacttgtttatagataaatatataaataacctgtttggatcctggtcctttttaactgttccttggtaattctgagcatttatttgatgacttaatatttttcactacctttggagaacagatgaacattattcaccatgaatggatctatactgtgtggtcatgagttgtgtatacttccataacactgtatttttcttctgtcagtacccttaggatacactttaaaacaccttaaggtctgatgttatggcaacaaactactttttcaaacctaaataggaaccatgtaatttctcaaaagtgattgaacagtttgcccacacttagtttgttggtcttatgtaaaacattggctcaaaataaagtacacactgatttattttac

SEQ ID NO: 355647 - DNA, 3212 bp, Homo sapiens
aaagaaagaatacatgtgaagaacttggaacagtgcctagaacatagtataggggttcaggtgttactaattataattatttataattgttatttttatttataattataattgttaacttttactgttaccattatttcctggctttacattggtttaagataatatctgtagggtatagtataatgttatccaaatattaaattacatatagtatgtttagttttatttagcattgttaagattactcagtgtcaaagggagcattttaaaattatttagtttttgagacggggtctcacactcacccaggttggagtatagtagcacaatctcagctcactgaagcctctgcctcctgggctcaagcagtcctcccacctcagcctcctgagtagcttgagaatacaggtgtgcacaccacactgcactgctttttaaattttttgtagatgtgaagtctcactgtattgaccaggctggtctcgaacttaggagatcaagcagtcttcctgcctcaccctccaaaggtgctgggattacaggcatgagctactgcacctggccagaggcaacattaaaaaaaaaaaaaaaagattgttgaggctttttaactcacaactcttggagacataaaacttctgttatctcaggcacttggtaaatctgaagcttcagagaaaagagggtcagggggtaggacatgatcaatttcagttatgttatagacttaatatgggaacaccttatatagtgcttgacattttatagaacattttttacttctgtttttagttaacatggatatttgtgtcagttcatcgataaggttctgaaatctagaaatataggtggtttctctcacttacacgattattatgtaatatacttgagcttaagaatccaagattctggatagcattgtttctttgggaaaatgtagattctaagttccgaacagttgatttcctaaatatctttcagttctcagccatttgtaagctgcgcttcacctgctactaatcttgctgttacttctgctatcccatctttaaatttttatcacaatttgaatgattggcaactatgatcatcttatgtctttagtaacatctacatcagcatcagcatctgcgtcaccatttcaatctgcatggtatagtgaatctgagataactcagggagcacgctcaagatcgcagaaccagcaacgggatcatgattcaaaaagacctaaactttcctgtacaaactgtactacctcagctgggagaaatgttggaaatggtttaaacacattatcagattcatcttggaggcatagtcaagttcctagatcttcatcaatggtacttggatcatttggaacagacttaatgagagagaggagagatttggagagaagaacagattcctctattagtaatcttatggattatagtcaccgaagtggtgatttcacaacttcatcatcctccttttagaggactcagaagaagaagaaggtgacttatgtagaatttgtcaaatggcagctgcatcatcatctaatttgctgatagagccatgcaagtgcacaggaagtttgcagtatgtccaccaagactgtatgaaaaagtggttacaggccaaaattaactctggttcttcattagaagctgtaaccacctgtgaactatgtaaagagaagttggagcttaacctggaggattttgatattcatgaactacatagagctcatgcaaatgaacaagctgagtatgagtttatcagctctggtctctacctagtggtgttattgcacttgtgcgaacaaagcttttctgatatgatgggaaatacaaatgaaccaagcacacgtgtccgatttattaaccttgcaagaactcttcaggcacatatggaagatctcgaaacttcagaggatgattccgaagaagacggagaccataacaggacatttgatattgcctaacttcatataagacagatggatgatctgtgaacataagtgtttattaaaaatggcaattaaatataaattacttttgtgggggaatgcctaataaatacattgactatatataaaatgaatatatacatacacatgtatgcctgtatatatatattcattctccagtgttgctgaattaaaattctgctggactttttaacatagcaaatccgatgtttataaactggtaatcaaaaaggttttttcttttaggtgagtgggaaagtattacccttgttttaaatatctaagcaatgcctatcaacccttttttgtgttatgattactgtagtcatatttatgaaaaaaggtttgtgttttactcttgctagtgagaaaagtgggacaaaatatacttttgaaataaaatgctatatggcacctaattattttttcttttaaaatgccttaagttgcagtctcattttgataatcatttgcttccagtgtttaaaaattaaaaaaagaatggggagaaggttatgagaagagcattattaagtttccaaatttaatttgaattccaaattcacctagcaataaaatctaatttttaaaaagtatataaatataaaatgtataaatgatggatagatttttgtattgatttgcaaaatgcagattatatttgataggctatagtatgtagatattccttttaggaatattacagctgtaaattatatgagacttgccagtcaaatgctatttggtttaaaaaaattattgcaatctcaagttaatggaatatttttaaatcccacattcagagtttaaaacactggttttcaatgtgttttttagtgttgtcacttgtttatagataaatatataaataacctgtttggatcctggtcctttttaactgttccttggtaattctgagcatttatttgatgacttaatatttttcactacctttggagaacagatgaacattattcaccatgaatggatctatactgtgtggtcatgagttgtgtatacttccataacactgtatttttcttctgtcagtacccttaggatacactttaaaacaccttaaggtctgatgttatggcaacaaactactttttcaaacctaaataggaaccatgtaatttctcaaaagtgattgaacagtttgcccacacttagtttgttggtcttatgtaaaacattggctcaaaataaagtacacactgatttattttac

SEQ ID NO: 355648 - DNA, 4364 bp, Homo sapiens
aaagaaagaatacatgtgaagaacttggaacagtgcctagaacatagtataggggttcaggtgttactaattataattatttataattgttatttttatttataattataattgttaacttttactgttaccattatttcctggctttacattggtttaagataatatctgtagggtatagtataatgttatccaaatattaaattacatatagtatgtttagttttatttagcattgttaagattactcagtgtcaaagggagcattttaaaattatttagtttttgagacggggtctcacactcacccaggttggagtatagtagcacaatctcagctcactgaagcctctgcctcctgggctcaagcagtcctcccacctcagcctcctgagtagcttgagaatacaggtgtgcacaccacactgcactgctttttaaattttttgtagatgtgaagtctcactgtattgaccaggctggtctcgaacttaggagatcaagcagtcttcctgcctcaccctccaaaggtgctgggattacaggcatgagctactgcacctggccagaggcaacattaaaaaaaaaaaaaaaagattgttgaggctttttaactcacaactcttggagacataaaacttctgttatctcaggcacttggtaaatctgaagcttcagagaaaagagggtcagggggtaggacatgatcaatttcagttatgttatagacttaatatgggaacaccttatatagtgcttgacattttatagaacattttttacttctgtttttagttaacatggatatttgtgtcagttcatcgataaggttctgaaatctagaaatataggtggtttctctcacttacacgattattatgtaatatacttgagcttaagaatccaagattctggatagcattgtttctttgggaaaatgtagattctaagttccgaacagttgatttcctaaatatctttcagttctcagccatttgtaagctgcgcttcacctgctactaatcttgctgttacttctgctatcccatctttaaatttttatcacaatttgaatgattggcaactatgatcatcttatgtctttagtaacatctacatcagcatcagcatctgcgtcaccatttcaatctgcatggtatagtgaatctgagataactcagggagcacgctcaagatcgcagaaccagcaacgggatcatgattcaaaaagacctaaactttcctgtacaaactgtactacctcagctgggagaaatgttggaaatggtttaaacacattatcagattcatcttggaggcatagtcaagttcctagatcttcatcaatggtacttggatcatttggaacagacttaatgagagagaggagagatttggagagaagaacagattcctctattagtaatcttatggattatagtcaccgaagtggtgatttcacaacttcatcatatgttcaagacagagttccttcatattcacaaggagcaagaccaaaagaaaactcaatgagcactttacagttgaatacatcatccacaaaccaccaattgccttctgaacatcagaccatactaagttctagggattccagaaattctttaagatcaaatttttcttcaagagaatcagaatcttcccgaagcaatacgcagcctggattttcttacagttcaagtagagatgaagccccaatcataagcaattcagaaagggttgtttcatctcaaagaccatttcaagaatcttctgacaatgaaggtaggcggacaacgaggagattgctgtcacgcatagcttctagcatgtcatctacttttttttcacgaagatctagtcaggattccttgaatacaagatcattgaattctgaaaattcttacgtttctccaagaatcttgacagcttcacagtcccgtagtaatgtaccatcagcttctgaagttcccgataatagggcatctgaagcttctcagggatttcgatttcttaggcgaagatggggtttgtcatctcttagccacaatcatagctctgagtcagattcagaaaattttaaccaagaatctgaaggtagaaatacaggaccatggttatcttcctcacttagaaatagatgcacacctttgttctctagaaggaggcgagagggaagagatgaatcttcaaggatacctacctctgatacatcatctagatctcatatttttagaagagaatcaaatgaagtggttcaccttgaagcacagaatgatcctcttggagctgctgccaacagaccacaagcatctgcagcatcaagcagtgccacaacaggtggctctacatcagattcggctcaaggtggaagaaatacaggaatatcagggattcttcctggttccttattccggtttgcagtccccccagcacttgggagtaatttgaccgacaatgtcatgatcacagtagatattattccttcaggttggaattcagctgatggtaaaagtgataaaactaaaagtgcgccttcaagagatccagaaagattgcagaaaataaaagagagcctccttttagaggactcagaagaagaagaaggtgacttatgtagaatttgtcaaatggcagctgcatcatcatctaatttgctgatagagccatgcaagtgcacaggaagtttgcagtatgtccaccaagactgtatgaaaaagtggttacaggccaaaattaactctggttcttcattagaagctgtaaccacctgtgaactatgtaaagagaagttggagcttaacctggaggattttgatattcatgaactacatagagctcatgcaaatgaacaagctgagtatgagtttatcagctctggtctctacctagtggtgttattgcacttgtgcgaacaaagcttttctgatatgatgggaaatacaaatgaaccaagcacacgtgtccgatttattaaccttgcaagaactcttcaggcacatatggaagatctcgaaacttcagaggatgattccgaagaagacggagaccataacaggacatttgatattgcctaacttcatataagacagatggatgatctgtgaacataagtgtttattaaaaatggcaattaaatataaattacttttgtgggggaatgcctaataaatacattgactatatataaaatgaatatatacatacacatgtatgcctgtatatatatattcattctccagtgttgctgaattaaaattctgctggactttttaacatagcaaatccgatgtttataaactggtaatcaaaaaggttttttcttttaggtgagtgggaaagtattacccttgttttaaatatctaagcaatgcctatcaacccttttttgtgttatgattactgtagtcatatttatgaaaaaaggtttgtgttttactcttgctagtgagaaaagtgggacaaaatatacttttgaaataaaatgctatatggcacctaattattttttcttttaaaatgccttaagttgcagtctcaatttttaaacactggaagcaaatgattatcaaaatgagactgcaacttaaggattttgataatcatttgcttccagtgtttaaaaattaaaaaaagaatggggagaaggttatgagaagagcattattaagtttccaaatttaatttgaattccaaattcacctagcaataaaatctaatttttaaaaagtatataaatataaaatgtataaatgatggatagatttttgtattgatttgcaaaatgcagattatatttgataggctatagtatgtagatattccttttaggaatattacagctgtaaattatatgagacttgccagtcaaatgctatttggtttaaaaaaattattgcaatctcaagttaatggaatatttttaaatcccacattcagagtttaaaacactggttttcaatgtgttttttagtgttgtcacttgtttatagataaatatataaataacctgtttggatcctggtcctttttaactgttccttggtaattctgagcatttatttgatgacttaatatttttcactacctttggagaacagatgaacattattcaccatgaatggatctatactgtgtggtcatgagttgtgtatacttccataacactgtatttttcttctgtcagtacccttaggatacactttaaaacaccttaaggtctgatgttatggcaacaaactactttttcaaacctaaataggaaccatgtaatttctcaaaagtgattgaacagtttgcccacacttagtttgttggtcttatgtaaaacattggctcaaaataaagtacacactgatttattttac

SEQ ID NO: 355649 - DNA, 2489 bp, Homo sapiens
tccatactcaaataagcatgaaagacaagggtgctgcaagttaacccctaaatatcagagtattagtacattctgaaatgggttctgactaaattatcctctcctgtggagtggagttaaatggaaaaacacaagaagttccttaataagctgtaattttttagtttggtatttctcagtgatagagcataaaacttaacagtagagtttattatcagtcatgacttagttatatgctttgtcatttattaaatggatttaaatctattagtgttgcatagtttttctgtgctttgccctaggttgattccatttgttggatgctcttaatttgtccaatgtaaatataaaaagagagggcattaaaccgttttgccctataatgggggaaagatgctggttagatgtttattttagtgagcttgcattttcttacacgtgcaaagcagttcatagaattcatagttttacacttactatgtctttcctaaagacacccaggatgctttatttttaactcttgagccactagtgactcttgaataaattgaggtcagaaatgttgcaaaagtggtaagtttctggcagtgtggagacaggggaataatctcaacagtaggtttttactgaatccaattattttaatttaggctgtgtctatatgaagcttttttgacttactaaatgaacttttatcttggcattgtatagacatagctttgatgtaaattgcaagaacacccataacctcttattctatgtacatttcttttcattctcatcggatgcaccaaacatgcagcggtaataagccagattttactcaggtgtgtgagagcacttgccttaagttgacttttttcctagtgtttatatatcattagctactatgaacacagattgatctcagaaacattttagaagatgctcttgaaccacatttttaagcactttcatttttataaaaattgatataacattacaaaacgatgtgggggcggggagaattgtggttgggtatcacccacaggcagaccaccctaaccctgtcatacaacttatcattttgatcaaacaatatactaaattgggatttttgtttttacaagtcattgctgttctggcttcatatttacacttcccattcttatcccccttaaaatcattcttgatcatcctgttttctttcaacacttcagaggatgattccgaagaagacggagaccataacaggacatttgatattgcctaacttcatataagacagatggatgatctgtgaacataagtgtttattaaaaatggcaattaaatataaattacttttgtgggggaatgcctaataaatacattgactatatataaaatgaatatatacatacacatgtatgcctgtatatatatattcattctccagtgttgctgaattaaaattctgctggactttttaacatagcaaatccgatgtttataaactggtaatcaaaaaggttttttcttttaggtgagtgggaaagtattacccttgttttaaatatctaagcaatgcctatcaacccttttttgtgttatgattactgtagtcatatttatgaaaaaaggtttgtgttttactcttgctagtgagaaaagtgggacaaaatatacttttgaaataaaatgctatatggcacctaattattttttcttttaaaatgccttaagttgcagtctcattttgataatcatttgcttccagtgtttaaaaattaaaaaaagaatggggagaaggttatgagaagagcattattaagtttccaaatttaatttgaattccaaattcacctagcaataaaatctaatttttaaaaagtatataaatataaaatgtataaatgatggatagatttttgtattgatttgcaaaatgcagattatatttgataggctatagtatgtagatattccttttaggaatattacagctgtaaattatatgagacttgccagtcaaatgctatttggtttaaaaaaattattgcaatctcaagttaatggaatatttttaaatcccacattcagagtttaaaacactggttttcaatgtgttttttagtgttgtcacttgtttatagataaatatataaataacctgtttggatcctggtcctttttaactgttccttggtaattctgagcatttatttgatgacttaatatttttcactacctttggagaacagatgaacattattcaccatgaatggatctatactgtgtggtcatgagttgtgtatacttccataacactgtatttttcttctgtcagtacccttaggatacactttaaaacaccttaaggtctgatgttatggcaacaaactactttttcaaacctaaataggaaccatgtaatttctcaaaagtgattgaacagtttgcccacacttagtttgttggtcttatgtaaaacattggctcaaaataaagtacacactgatttattttac

SEQ ID NO: 355650 - DNA, 2435 bp, Homo sapiens
tccatactcaaataagcatgaaagacaagggtgctgcaagttaacccctaaatatcagagtattagtacattctgaaatgggttctgactaaattatcctctcctgtggagtggagttaaatggaaaaacacaagaagttccttaataagctgtaattttttagtttggtatttctcagtgatagagcataaaacttaacagtagagtttattatcagtcatgacttagttatatgctttgtcatttattaaatggatttaaatctattagtgttgcatagtttttctgtgctttgccctaggttgattccatttgttggatgctcttaatttgtccaatgtaaatataaaaagagagggcattaaaccgttttgccctataatgggggaaagatgctggttagatgtttattttagtgagcttgcattttcttacacgtgcaaagcagttcatagaattcatagttttacacttactatgtctttcctaaagacacccaggatgctttatttttaactcttgagccactagtgactcttgaataaattgaggtcagaaatgttgcaaaagtggtaagtttctggcagtgtggagacaggggaataatctcaacagtaggtttttactgaatccaattattttaatttaggctgtgtctatatgaagcttttttgacttactaaatgaacttttatcttggcattgtatagacatagctttgatgtaaattgcaagaacacccataacctcttattctatgtacatttcttttcattctcatcggatgcaccaaacatgcagcggtaataagccagattttactcaggtgtgtgagagcacttgccttaagttgacttttttcctagtgtttatatatcattagctactatgaacacagattgatctcagaaacattttagaagatgctcttgaaccacatttttaagcactttcatttttataaaaattgatataacattacaccctaaccctgtcatacaacttatcattttgatcaaacaatatactaaattgggatttttgtttttacaagtcattgctgttctggcttcatatttacacttcccattcttatcccccttaaaatcattcttgatcatcctgttttctttcaacacttcagaggatgattccgaagaagacggagaccataacaggacatttgatattgcctaacttcatataagacagatggatgatctgtgaacataagtgtttattaaaaatggcaattaaatataaattacttttgtgggggaatgcctaataaatacattgactatatataaaatgaatatatacatacacatgtatgcctgtatatatatattcattctccagtgttgctgaattaaaattctgctggactttttaacatagcaaatccgatgtttataaactggtaatcaaaaaggttttttcttttaggtgagtgggaaagtattacccttgttttaaatatctaagcaatgcctatcaacccttttttgtgttatgattactgtagtcatatttatgaaaaaaggtttgtgttttactcttgctagtgagaaaagtgggacaaaatatacttttgaaataaaatgctatatggcacctaattattttttcttttaaaatgccttaagttgcagtctcattttgataatcatttgcttccagtgtttaaaaattaaaaaaagaatggggagaaggttatgagaagagcattattaagtttccaaatttaatttgaattccaaattcacctagcaataaaatctaatttttaaaaagtatataaatataaaatgtataaatgatggatagatttttgtattgatttgcaaaatgcagattatatttgataggctatagtatgtagatattccttttaggaatattacagctgtaaattatatgagacttgccagtcaaatgctatttggtttaaaaaaattattgcaatctcaagttaatggaatatttttaaatcccacattcagagtttaaaacactggttttcaatgtgttttttagtgttgtcacttgtttatagataaatatataaataacctgtttggatcctggtcctttttaactgttccttggtaattctgagcatttatttgatgacttaatatttttcactacctttggagaacagatgaacattattcaccatgaatggatctatactgtgtggtcatgagttgtgtatacttccataacactgtatttttcttctgtcagtacccttaggatacactttaaaacaccttaaggtctgatgttatggcaacaaactactttttcaaacctaaataggaaccatgtaatttctcaaaagtgattgaacagtttgcccacacttagtttgttggtcttatgtaaaacattggctcaaaataaagtacacactgatttattttac

SEQ ID NO: 355651 - DNA, 3722 bp, Homo sapiens
aaagaaagaatacatgtgaagaacttggaacagtgcctagaacatagtataggggttcaggtgttactaattataattatttataattgttatttttatttataattataattgttaacttttactgttaccattatttcctggctttacattggtttaagataatatctgtagggtatagtataatgttatccaaatattaaattacatatagtatgtttagttttatttagcattgttaagattactcagtgtcaaagggagcattttaaaattatttagtttttgagacggggtctcacactcacccaggttggagtatagtagcacaatctcagctcactgaagcctctgcctcctgggctcaagcagtcctcccacctcagcctcctgagtagcttgagaatacaggtgtgcacaccacactgcactgctttttaaattttttgtagatgtgaagtctcactgtattgaccaggctggtctcgaacttaggagatcaagcagtcttcctgcctcaccctccaaaggtgctgggattacaggcatgagctactgcacctggccagaggcaacattaaaaaaaaaaaaaaaagattgttgaggctttttaactcacaactcttggagacataaaacttctgttatctcaggcacttggtaaatctgaagcttcagagaaaagagggtcagggggtaggacatgatcaatttcagttatgttatagacttaatatgggaacaccttatatagtgcttgacattttatagaacattttttacttctgtttttagttaacatggatatttgtgtcagttcatcgataaggttctgaaatctagaaatataggtggtttctctcacttacacgattattatgtaatatacttgagcttaagaatccaagattctggatagcattgtttctttgggaaaatgtagattctaagttccgaacagttgatttcctaaatatctttcagttctcagccatttgtaagctgcgcttcacctgctactaatcttgctgttacttctgctatcccatctttaaatttttatcacaatttgaatgattggcaactatgatcatcttatgtctttagtaacatctacatcagcatcagcatctgcgtcaccatttcaatctgcatggtatagtgaatctgagataactcagggagcacgctcaagatcgcagaaccagcaacgggatcatgattcaaaaagacctaaactttcctgtacaaactgtactacctcagctgggagaaatgttggaaatggtttaaacacattatcagattcatcttggaggcatagtcaagttcctagatcttcatcaatggtacttggatcatttggaacagacttaatgagagagaggagagatttggagagaagaacagattcctctattagtaatcttatggattatagtcaccgaagtggtgatttcacaacttcatcatatgttcaagacagagttccttcatattcacaaggagcaagaccaaaagaaaactcaatgagcactttacagttgaatacatcatccacaaaccaccaattgccttctgaacatcagaccatactaagttctagggattccagaaattctttaagatcaaatttttcttcaagagaatcagaatcttcccgaagcaatacgcagcctggattttcttacagttcaagtagagatgaagccccaatcataagcaattcagaaagggttgtttcatctcaaagaccatttcaagaatcttctgacaatgaaggtaggcggacaacgaggagattgctgtcacgcatagcttctagcatgtcatctacttttttttcacgaagatctagtcaggattccttgaatacaagatcattgaattctgaaaattcttacgtttctccaagaatcttgacagcttcacagtcccgtagtaatgtaccatcagcttctgaagttcccgataatagggcatctgaagcttctcagggatttcgatttcttaggcgaagatggggtttgtcatctcttagccacaatcatagctctgagtcagattcagaaaattttaaccaagaatctgaaggtagaaatacaggaccatggttatcttcctcacttagaaatagatgcacacctttgttctctagaaggaggcgagagggaagagatgaatcttcaaggatacctacctctgatacatcatctagatctcatatttttagaagagaatcaaatgaagtggttcaccttgaagcacagaatgatcctcttggagctgctgccaacagaccacaagcatctgcagcatcaagcagtgccacaacaggtggctctacatcagattcggctcaaggtggaagaaatacaggaatatcagggattcttcctggttccttattccggtttgcagtccccccagcacttgggagtaatttgaccgacaatgtcatgatcacagtagatattattccttcaggttggaattcagctgatggtaaaagtgataaaactaaaagtgcgccttcaagagatccagaaagattgcagaaaataaaagagagcctccttttagaggactcagaagaagaagaaggtgacttatgtagaatttgtcaaatggcagctgcatcatcatctaatttgctgatagagccatgcaagtgcacaggaagtttgcagtatgtccaccaagactgtatgaaaaagtggttacaggccaaaattaactctggttcttcattagaagctgtaaccacctgtgaactatgtaaagagaagttggagcttaacctggaggattttgatattcatgaactacatagagctcatgcaaatgaacaagctgagtatgagtttatcagctctggtctctacctagtggtgttattgcacttgtgcgaacaaagcttttctgatatgatgggaaatacaaatgaaccaagcacacgtgtccgatttattaaccttgcaagaactcttcaggcacatatggaagatctcgaaacttcagaggatgattccgaagaagacggagaccataacaggacatttgatattgcctaacttcatataagacagatggatgatctgtgaacataagtgtttattaaaaatggcaattaaatataaattacttttgtgggggaatgcctaataaatacattgactatatataaaatgaatatatacatacacatgtatgcctgtatatatatattcattctccagtgttgctgaattaaaattctgctggactttttaacatagcaaatccgatgtttataaactggtaatcaaaaaggttttttcttttaggtgagtgggaaagtattacccttgttttaaatatctaagcaatgcctatcaacccttttttgtgttatgattactgtagtcatatttatgaaaaaaggtttgtgttttactcttgctagtgagaaaagtgggacaaaatatacttttgaaataaaatgctatatggcacctaattattttttcttttaaaatgccttaagttgcagtctcgcgcattgagagtgcacacggcattgagtgtgcacacgaaacttatacaaagctgcaacccccagggatagcacgaatgctacagccatatgatttcgcagacgcctggccagaaggccacgcatccgaggttttggcaaaacttcggagcctatggtagttactgtccttatacgtgtgcactac

SEQ ID NO: 355652 - DNA, 3507 bp, Homo sapiens
aaagaaagaatacatgtgaagaacttggaacagtgcctagaacatagtataggggttcaggtgttactaattataattatttataattgttatttttatttataattataattgttaacttttactgttaccattatttcctggctttacattggtttaagataatatctgtagggtatagtataatgttatccaaatattaaattacatatagtatgtttagttttatttagcattgttaagattactcagtgtcaaagggagcattttaaaattatttagtttttgagacggggtctcacactcacccaggttggagtatagtagcacaatctcagctcactgaagcctctgcctcctgggctcaagcagtcctcccacctcagcctcctgagtagcttgagaatacaggtgtgcacaccacactgcactgctttttaaattttttgtagatgtgaagtctcactgtattgaccaggctggtctcgaacttaggagatcaagcagtcttcctgcctcaccctccaaaggtgctgggattacaggcatgagctactgcacctggccagaggcaacattaaaaaaaaaaaaaaaagattgttgaggctttttaactcacaactcttggagacataaaacttctgttatctcaggcacttggtaaatctgaagcttcagagaaaagagggtcagggggtaggacatgatcaatttcagttatgttatagacttaatatgggaacaccttatatagtgcttgacattttatagaacattttttacttctgtttttagttaacatggatatttgtgtcagttcatcgataaggttctgaaatctagaaatataggtggtttctctcacttacacgattattatgtaatatacttgagcttaagaatccaagattctggatagcattgtttctttgggaaaatgtagattctaagttccgaacagttgatttcctaaatatctttcagttctcagccatttgtaagctgcgcttcacctgctactaatcttgctgttacttctgctatcccatctttaaatttttatcacaatttgaatgattggcaactatgatcatcttatgtctttagtaacatctacatcagcatcagcatctgcgtcaccatttcaatctgcatggtatagtgaatctgagataactcagggagcacgctcaagatcgcagaaccagcaacgggatcatgattcaaaaagacctaaactttcctgtacaaactgtactacctcagctgggagaaatgttggaaatggtttaaacacattatcagattcatcttggaggcatagtcaagttcctagatcttcatcaatggtacttggatcatttggaacagacttaatgagagagaggagagatttggagagaagaacagattcctctattagtaatcttatggattatagtcaccgaagtggtgatttcacaacttcatcatatgttcaagacagagttccttcatattcacaaggagcaagaccaaaagaaaactcaatgagcactttacagttgaatacatcatccacaaaccaccaattgccttctgaacatcagaccatactaagttctagggattccagaaattctttaagatcaaatttttcttcaagagaatcagaatcttcccgaagcaatacgcagcctggattttcttacagttcaagtagagatgaagccccaatcataagcaattcagaaagggttgtttcatctcaaagaccatttcaagaatcttctgacaatgaaggtaggcggacaacgaggagattgctgtcacgcatagcttctagcatgtcatctacttttttttcacgaagatctagtcaggattccttgaatacaagatcattgaattctgaaaattcttacgtttctccaagaatcttgacagcttcacagtcccgtagtaatgtaccatcagcttctgaagttcccgataatagggcatctgaagcttctcagggatttcgatttcttaggcgaagatggggtttgtcatctcttagccacaatcatagctctgagtcagattcagaaaattttaaccaagaatctgaaggtagaaatacaggaccatggttatcttcctcacttagaaatagatgcacacctttgttctctagaaggaggcgagagggaagagatgaatcttcaaggatacctacctctgatacatcatctagatctcatatttttagaagagaatcaaatgaagtggttcaccttgaagcacagaatgatcctcttggagctgctgccaacagaccacaagcatctgcagcatcaagcagtgccacaacaggtggctctacatcagattcggctcaaggtggaagaaatacaggaatatcagggattcttcctggttccttattccggtttgcagtccccccagcacttgggagtaatttgaccgacaatgtcatgatcacagtagatattattccttcaggttggaattcagctgatggtaaaagtgataaaactaaaagtgcgccttcaagagatccagaaagattgcagaaaataaaagagagcctccttttagaggactcagaagaagaagaaggtgacttatgtagaatttgtcaaatggcagctgcatcatcatctaatttgctgatagagccatgcaagtgcacaggaagtttgcagtatgtccaccaagactgtatgaaaaagtggttacaggccaaaattaactctggttcttcattagaagctgtaaccacctgtgaactatgtaaagagaagttggagcttaacctggaggattttgatattcatgaactacatagagctcatgcaaatgaacaagctgagtatgagtttatcagctctggtctctacctagtggtgttattgcacttgtgcgaacaaagcttttctgatatgatgggaaatacaaatgaaccaagcacacgtgtccgatttattaaccttgcaagaactcttcaggcacatatggaagatctcgaaagtaggtggaatttcccctccccagactagttgaatttacttttgcaaattaaacccaaagcaaaacctaagtatatactctgttctgccaaattagagctcatttataggcttagtaataccaaaatgattgatttgggaaatatgggtcgggaaactgacattagtttttttttttttttaaagcatattttaaggtatggaagcatgtaatcgtttacggagctgcattttacttttttttttcaaagagaaatttattgttgatcaccttgatttcaggatttataataaaaaaggcataaatcttaactactaatcaaaccaacatttcttaatctgttaggattttgttttgtttcgtttctggtaagaaattttacctgttactcaggtttgttagatcataagagattattcctgggcttacctatgattccaggaaaatatgggacaaggagtcctaattctgaatccatatcagaagccatga

SEQ ID NO: 355653 - DNA, 3372 bp, Homo sapiens
aaagaaagaatacatgtgaagaacttggaacagtgcctagaacatagtataggggttcaggtgttactaattataattatttataattgttatttttatttataattataattgttaacttttactgttaccattatttcctggctttacattggtttaagataatatctgtagggtatagtataatgttatccaaatattaaattacatatagtatgtttagttttatttagcattgttaagattactcagtgtcaaagggagcattttaaaattatttagtttttgagacggggtctcacactcacccaggttggagtatagtagcacaatctcagctcactgaagcctctgcctcctgggctcaagcagtcctcccacctcagcctcctgagtagcttgagaatacaggtgtgcacaccacactgcactgctttttaaattttttgtagatgtgaagtctcactgtattgaccaggctggtctcgaacttaggagatcaagcagtcttcctgcctcaccctccaaaggtgctgggattacaggcatgagctactgcacctggccagaggcaacattaaaaaaaaaaaaaaaagattgttgaggctttttaactcacaactcttggagacataaaacttctgttatctcaggcacttggtaaatctgaagcttcagagaaaagagggtcagggggtaggacatgatcaatttcagttatgttatagacttaatatgggaacaccttatatagtgcttgacattttatagaacattttttacttctgtttttagttaacatggatatttgtgtcagttcatcgataaggttctgaaatctagaaatataggtggtttctctcacttacacgattattatgtaatatacttgagcttaagaatccaagattctggatagcattgtttctttgggaaaatgtagattctaagttccgaacagttgatttcctaaatatctttcagttctcagccatttgtaagctgcgcttcacctgctactaatcttgctgttacttctgctatcccatctttaaatttttatcacaatttgaatgattggcaactatgatcatcttatgtctttagtaacatctacatcagcatcagcatctgcgtcaccatttcaatctgcatggtatagtgaatctgagataactcagggagcacgctcaagatcgcagaaccagcaacgggatcatgattcaaaaagacctaaactttcctgtacaaactgtactacctcagctgggagaaatgttggaaatggtttaaacacattatcagattcatcttggaggcatagtcaagttcctagatcttcatcaatggtacttggatcatttggaacagacttaatgagagagaggagagatttggagagaagaacagattcctctattagtaatcttatggattatagtcaccgaagtggtgatttcacaacttcatcatatgttcaagacagagttccttcatattcacaaggagcaagaccaaaagaaaactcaatgagcactttacagttgaatacatcatccacaaaccaccaattgccttctgaacatcagaccatactaagttctagggattccagaaattctttaagatcaaatttttcttcaagagaatcagaatcttcccgaagcaatacgcagcctggattttcttacagttcaagtagagatgaagccccaatcataagcaattcagaaagggttgtttcatctcaaagaccatttcaagaatcttctgacaatgaaggtaggcggacaacgaggagattgctgtcacgcatagcttctagcatgtcatctacttttttttcacgaagatctagtcaggattccttgaatacaagatcattgaattctgaaaattcttacgtttctccaagaatcttgacagcttcacagtcccgtagtaatgtaccatcagcttctgaagttcccgataatagggcatctgaagcttctcagggatttcgatttcttaggcgaagatggggtttgtcatctcttagccacaatcatagctctgagtcagattcagaaaattttaaccaagaatctgaaggtagaaatacaggaccatggttatcttcctcacttagaaatagatgcacacctttgttctctagaaggaggcgagagggaagagatgaatcttcaaggatacctacctctgatacatcatctagatctcatatttttagaagagaatcaaatgaagtggttcaccttgaagcacagaatgatcctcttggagctgctgccaacagaccacaagcatctgcagcatcaagcagtgccacaacaggtggctctacatcagattcggctcaaggtggaagaaatacaggaatatcagggattcttcctggttccttattccggtttgcagtccccccagcacttgggagtaatttgaccgacaatgtcatgatcacagtagatattattccttcaggttggaattcagctgatggtaaaagtgataaaactaaaagtgcgccttcaagagatccagaaagattgcagaaaataaaagagagcctccttttagaggactcagaagaagaagaaggtgacttatgtagaatttgtcaaatggcagctgcatcatcatctaatttgctgatagagccatgcaagtgcacaggaagtttgcagtatgtccaccaagactgtatgaaaaagtggttacaggccaaaattaactctggttcttcattagaagctgtaaccacctgtgaactatgtaaagagaagttggagcttaacctggaggattttgatattcatgaactacatagagctcatgcaaatgaacaagctgagtatgagtttatcagctctggtctctacctagtggtgttattgcacttgtgcgaacaaagcttttctgatatgatgggaaatacaaatgaaccaagcacacgtgtccgagtaagtaataatgaagttggggagagggagggtatgatgcagcaagtgtatgccttggaaagcagattgtttcatatgttgacatcttatttcctttgggaagcttttattttttaaatgtttcttaaaaataaagataccgtagatttaatggaaattgctgtcttctataacaagcagcctgattttctcataaagttattttagagaaagaagtaattttctagctctcaaaggtaattggaatgtatttcattgaaaaacagaattggaaacatcgagggaaaatgggctttttattattaaaacaaaacctcagtattatcacttagaaacctgaaattgaactccaaaagccaaagagtatgggaaattaacttcaatttatttgttactgttctacaaa

SEQ ID NO: 355654 - DNA, 3572 bp, Homo sapiens
cgcgaagtggggggaggaggagcagggaggggcacttaacggtggtggctggttctgcgccggatccgggagaggggcgggcgccattgtgcttcgctgccgactgcatttcctcagtcacgggcctagaactccaaggagaaaggcggcggtgcgtgttgctgcgagtgggacgcgcactggtcggtgccggctcaggagccgggaaaaatctttaagaatggagtctaaaccttcaaggattccaagaagaatttctgttcaaccttccagctccttaagtgctaggatgatgtctggaagcagaggaagtagtttaaatgatacctatcactcaagagactcttcatttagattggattctgaatatcagtctacatcagcatcagcatctgcgtcaccatttcaatctgcatggtatagtgaatctgagataactcagggagcacgctcaagatcgcagaaccagcaacgggatcatgattcaaaaagacctaaactttcctgtacaaactgtactacctcagctgggagaaatgttggaaatggtttaaacacattatcagattcatcttggaggcatagtcaagttcctagatcttcatcaatggtacttggatcatttggaacagacttaatgagagagaggagagatttggagagaagaacagattcctctattagtaatcttatggattatagtcaccgaagtggtgatttcacaacttcatcatatgttcaagacagagttccttcatattcacaaggagcaagaccaaaagaaaactcaatgagcactttacagttgaatacatcatccacaaaccaccaattgccttctgaacatcagaccatactaagttctagggattccagaaattctttaagatcaaatttttcttcaagagaatcagaatcttcccgaagcaatacgcagcctggattttcttacagttcaagtagagatgaagccccaatcataagcaattcagaaagggttgtttcatctcaaagaccatttcaagaatcttctgacaatgaaggtaggcggacaacgaggagattgctgtcacgcatagcttctagcatgtcatctacttttttttcacgaagatctagtcaggattccttgaatacaagatcattgaattctgaaaattcttacgtttctccaagaatcttgacagcttcacagtcccgtagtaatgtaccatcagcttctgaagttcccgataatagggcatctgaagcttctcagggatttcgatttcttaggcgaagatggggtttgtcatctcttagccacaatcatagctctgagtcagattcagaaaattttaaccaagaatctgaaggtagaaatacaggaccatggttatcttcctcacttagaaatagatgcacacctttgttctctagaaggaggcgagagggaagagatgaatcttcaaggatacctacctctgatacatcatctagatctcatatttttagaagagaatcaaatgaagtggttcaccttgaagcacagaatgatcctcttggagctgctgccaacagaccacaagcatctgcagcatcaagcagtgccacaacaggtggctctacatcagattcggctcaaggtggaagaaatacaggaatatcagggattcttcctggttccttattccggtttgcagtccccccagcacttgggagtaatttgaccgacaatgtcatgatcacagtagatattattccttcaggttggaattcagctgatggtaaaagtgataaaactaaaagtgcgccttcaagagatccagaaagattgcagaaaataaaagagagcctccttttagaggactcagaagaagaagaaggtgacttatgtagaatttgtcaaatggcagctgcatcatcatctaatttgctgatagagccatgcaagtgcacaggaagtttgcagtatgtccaccaagactgtatgaaaaagtggttacaggccaaaattaactctggttcttcattagaagctgtaaccacctgtgaactatgtaaagagaagttggagcttaacctggaggattttgatattcatgaactacatagagctcatgcaaatgaacaagctgagtatgagtttatcagctctggtctctacctagtggtgttattgcacttgtgcgaacaaagcttttctgatatgatgggaaatacaaatgaaccaagcacacgtgtccgatttattaaccttgcaagaactcttcaggcacatatggaagatctcgaaacttcagaggatgattccgaagaagacggagaccataacaggacatttgatattgcctaacttcatataagacagatggatgatctgtgaacataagtgtttattaaaaatggcaattaaatataaattacttttgtgggggaatgcctaataaatacattgactatatataaaatgaatatatacatacacatgtatgcctgtatatatatattcattctccagtgttgctgaattaaaattctgctggactttttaacatagcaaatccgatgtttataaactggtaatcaaaaaggttttttcttttaggtgagtgggaaagtattacccttgttttaaatatctaagcaatgcctatcaacccttttttgtgttatgattactgtagtcatatttatgaaaaaaggtttgtgttttactcttgctagtgagaaaagtgggacaaaatatacttttgaaataaaatgctatatggcacctaattattttttcttttaaaatgccttaagttgcagtctcattttgataatcatttgcttccagtgtttaaaaattaaaaaaagaatggggagaaggttatgagaagagcattattaagtttccaaatttaatttgaattccaaattcacctagcaataaaatctaatttttaaaaagtatataaatataaaatgtataaatgatggatagatttttgtattgatttgcaaaatgcagattatatttgataggctatagtatgtagatattccttttaggaatattacagctgtaaattatatgagacttgccagtcaaatgctatttggtttaaaaaaattattgcaatctcaagttaatggaatatttttaaatcccacattcagagtttaaaacactggttttcaatgtgttttttagtgttgtcacttgtttatagataaatatataaataacctgtttggatcctggtcctttttaactgttccttggtaattctgagcatttatttgatgacttaatatttttcactacctttggagaacagatgaacattattcaccatgaatggatctatactgtgtggtcatgagttgtgtatacttccataacactgtatttttcttctgtcagtacccttaggatacactttaaaacaccttaaggtctgatgttatggcaacaaactactttttcaaacctaaataggaaccatgtaatttctcaaaagtgattgaacagtttgcccacacttagtttgttggtcttatgtaaaacattggctcaaaataaagtacacactgatttattttac

SEQ ID NO: 355655 - DNA, 2860 bp, Homo sapiens
gcttctctgatttgcttgggtaacctttattttctaagataaaggaggaaatgatacgatcccagtcttcattcttggtatcaagcaaaaccaggatcaggtcaaatcgacttaagagtgggctgccgagggcaatgttcacagacacggactcctgggggtcgtactggcctttggggttcgttgctgccaggatggtggtccttgtgttcagcttgcacacgaggtttgttctccgcctttgtcctaatccacaccagcaggtggagccgcagttaaagtttccgagtccattccgggagcgggagcccatcttgctggctgccgaggccctcgctggaggaggagggtcagaactcgggtgcagccaatcgagggcaacgctgctacttatcagagcagaatgggctgtagtttagtgaaataggaaagctgcaaaacactgtggagtgctcccgtgtaaataaaaagaggaaaaaagtttctcaagtcgccgctgcacgacgtctggccggcgctggagcgggggtctgcgctctcccgagcggccgcgcgctggactttattgtgccgcaaccagccccagttcccattgtttgtgtttttttcaaaatatggcaaaggttcaggtgaacaatgtagtggtgctggataacccttctcctttctacaacccgttccagttcgagatcaccttcgagtgcatcgaggacctgtctgaagacttggaatggaaaattatctatgtgggctctgcagaaagtgaagaatacgatcaagttttagactctgttttagtgggtcctgttcccgcaggaaggcatatgtttgtatttcaggctgatgcacctaatccaggactcattccagatgcagatgcagtaggcgtaactgttgtgctaattacttgtacctatcgaggacaagaatttattagagttggctattatgtaaataatgaatatactgagacagaattaagggaaaatccaccagtaaaaccagacttttctaagcttcaaaggaatattttggcatctaatcccagggtcacaagattccacattaattgggaagataacacagaaaaactggaagatgcagagagcagtaatccaaatctacagtcacttctttcaacagatgcattaccttcagcatcaaagggatggtccacatcagaaaactcactaaatgtcatgttagaatcccacatggactgcatgtgaccacctaccatccctttagtacaaattaagctattaaaaatacacagaactatttccctgaaattccgtaagtacatagtcaaaacacaatgtgaagaatttgtttaaaaacatcctgtagaaagtttataagaaaaccagtatttgaacaaattgtggaatataaatacaactatttttaagtaatttttttctctaatgtgttattttatttgttctgaaactaatctgattaaagcatatatattattttcttctcctttatatgtaatgaaagcacttataaagaaacaggaatcattagaccaggttgtaaagatgtcttggcctcccagacagtctttggaccactattttactggcctttgaaagaacaaagtttacttcaactaaaatgtttcttcctgtgaagacatatggtatcattttaatttaaggggcagatttccattcttttttggcatgtccttaaaaagaggatttgaaatcaactatatgctaccaagaactttaggatccaattttccaagccaccgtgaagcctcttatggctactattatagttcatgagatgttggacagcatttggtttgtttggtaagagaagaacaaatatggctaattgttaataaggtcccctggctatggtttttgttcttataacagagtttagaatatcagagcatttcttgaatcatacatcattattgtccagtgaattcaagaccaaatacaatatcgggagaaaatacaaactccctgtgtttaagaataggggattataatggctcaaattggttcatttgatttctaaaaataccatgacctttaaaaattcttttaatagatcatgttattggcagtatttatataaaaaccatggatttagaaaggtatatttagctttattataatagatacgttactattttggaaatatatatattttcacacctgtagtactcttccccatttcctctgacactcatgcagaatgagatcaggcatatttgtggttgacatactctagatagcttttccaacaaatctttgaaaagcaatcttggaaaggaattcattaactaaatggggtaaaaggtttctttttctttgagagttaagtccttcctcaaaaaattttcttatgctccataaaattgaggtagaatattttcattattcttgcagctaagcaagacagccatatgatgcaggttatgcagtgccttcatatctaaaacttttatactgcactttttaaagcttttatgttgaggaaaggaaaagggcatttgtctaaacatggattctgagttgtatatatttcctatcattctaaaaaagtgaatttgtgaagcaaagttttgccagatgttaaactttgaatttaatataccagattattaaaatattgtccattaactagttcatagattttaaaagtaaaatacttctgactgttaaaactatataaagaaaatctcatttgtctaattgcaattaaaagaaaaatgttaaaatattaaaatgaaaataaaagcattactttccaacaaagagctcagtggttaatataataggaacaacatatgtgcttattagaaataaagcatatacagccaaatcaccaa

SEQ ID NO: 355656 - DNA, 2781 bp, Homo sapiens
gcttctctgatttgcttgggtaacctttattttctaagataaaggaggaaatgatacgatcccagtcttcattcttggtatcaagcaaaaccaggatcaggtcaaatcgacttaagagtgggctgccgagggcaatgttcacagacacggactcctgggggtcgtactggcctttggggttcgttgctgccaggatggtggtccttgtgttcagcttgcacacgaggtttgttctccgcctttgtcctaatccacaccagcaggtggagccgcagttaaagtttccgagtccattccgggagcgggagcccatcttgctggctgccgaggccctcgctggaggaggagggtcagaactcgggtgcagccaatcgagggcaacgctgctacttatcagagcagaatgggctgtagtttagtgaaataggaaagctgcaaaacactgtggagtgctcccgtgtaaataaaaagaggaaaaaagtttctcaagtcgccgctgcacgacgtctggccggcgctggagcgggggtctgcgctctcccgagcggccgcgcgctggactttattgtgccgcaaccagccccagttcccattgtttgtgtttttttcaaaatatggcaaaggttcaggtgaacaatgtagtggtgctggataacccttctcctttctacaacccgttccagttcgagatcaccttcgagtgcatcgaggacctgtctgaagacttggaatggaaaattatctatgtgggctctgcagaaagtgaagaatacgatcaagttttagactctgttttagtgggtcctgttcccgcaggaaggcatatgtttgtatttcaggctgatgcacctaatccaggactcattccagatgcagatgcagtaggcgtaactgttgtgctaattacttgtacctatcgaggacaagaatttattagagttggctattatgtaaataatgaatatactgagacagaattaagggaaaatccaccagtaaaaccagacttttctaagcttcaaaggaatattttggcatctaatcccagggtcacaagattccacattaattgggaagataacacagaaaaactggaagatgcagagagcagtaatccaaatctacagtcacttctttcaacagatgcattaccttcagcatcaaagggatggtccacatcagaaaactcactaaatgtcatgttagaatcccacatggactgcatgtgaccacctaccatccctttagtacaaattaagctattaaaaatacacagaactatttccctgaaattccgtaagtacatagtcaaaacacaatgtgaagaatttgtttaaaaacatcctgtagaaagtttataagaaaaccagtatttgaacaaattgtggaatataaatacaactatttttaagtaatttttttctctaatgtgttattttatttgttctgaaactaatctgattaaagcatatatattattttcttctcctttatatgtaatgaaagcacttataaagaaacaggaatcattagaccaggttgtaaagatgtcttggcctcccagacagtctttggaccactattttactggcctttgaaagaacaaagtttacttcaactaaaatgtttcttcctgtgaagacatatggtatcattttaatttaaggggcagatttccattcttttttggcatgtccttaaaaagaggatttgaaatcaactatatgctaccaagaactttaggatccaattttccaagccaccgtgaagcctcttatggctactattatagttcatgagatgttggacagcatttggtttgtttggtaagagaagaacaaatatggctaattgttaataaggtcccctggctatggtttttgttcttataacagagtttagaatatcagagcatttcttgaatcatacatcattattgtccagtgaattcaagaccaaatacaatatcgggagaaaatacaaactccctgtgtttaagaataggggattataatggctcaaattggttcatttgatttctaaaaataccatgacctttaaaaattcttttaatagatcatgttattggcagtatttatataaaaaccatggatttagaaaggtatatttagctttattataatagatacgttactattttggaaatatatatattttcacacctgtagtactcttccccatttcctctgacactcatgcagaatgagatcaggcatatttgtggttgacatactctagatagcttttccaacaaatctttgaaaagcaatcttggaaaggaattcattaactaaatggggtaaaaggtttctttttctttgagagttaagtccttcctcaaaaaattttcttatgctccataaaattgaggtagaatattttcattattcttgcagctaagcaagacagccatatgatgcaggttatgcagtgccttcatatctaaaacttttatactgcactttttaaagcttttatgttgaggaaaggaaaagggcatttgtctaaacatggattctgagttgtatatatttcctatcattctaaaaaagtgaatttgtgaagcaaagttttgccagatgttaaactttgaatttaatataccagattattaaaatattgtccattaactagttcatagattttaaaagtaaaatacttctgactgttaaaactatataaagaaaatctcatttgtctaattgcaattaaaagaaaaatgttaaaatattaaaatgaaaataaaagcattactttcca

SEQ ID NO: 355657 - DNA, 824 bp, Homo sapiens
aaggtgtaggaaaccattaataataagttgtatttgacaatttttcattttcctttgaaaacataccaatctaaacaacatagtagcttgttaaataaagcatcttctgaagcattcattttcaaaaatgaggagattctttcttttagaaaacagaagtataggagttaaatagttaaaaagccagatgaatcccctcagattctccgtatcttgtttctgttaatctaaaataacttctttgctacagccctagtcgttacatcttattagttatatttaaggtacttaacttgaattatacctttgtatatgaacttagccctttaggagtactaacatgaaccattttattaagcttctatttgtatatggtgatttaactttcttagtgtttaccatttgtatgtttcctttttcctctagcttcaaaggaatattttggcatctaatcccagggtcacaagattccacattaattgggaagataacacagaaaaactggaagatgcagagagcagtaatccaaatctacagtcacttctttcaacagatgcattaccttcagcatcaaagggatggtccacatcagaaaactcactaaatgtcatgttagaatcccacatggactgcatgtgaccacctaccatccctttagtacaaattaagctattaaaaatacacagaactatttccctgaaattccgtaagtacatagtcaaaacacaatgtgaagaatttgtttaaaaacatcctgtagaaagtttataagaaaaccagtatttgaacaaattgtggaatataaatacaactatttttaagta

SEQ ID NO: 355658 - DNA, 2270 bp, Homo sapiens
aaggtgtaggaaaccattaataataagttgtatttgacaatttttcattttcctttgaaaacataccaatctaaacaacatagtagcttgttaaataaagcatcttctgaagcattcattttcaaaaatgaggagattctttcttttagaaaacagaagtataggagttaaatagttaaaaagccagatgaatcccctcagattctccgtatcttgtttctgttaatctaaaataacttctttgctacagccctagtcgttacatcttattagttatatttaaggtacttaacttgaattatacctttgtatatgaacttagccctttaggagtactaacatgaaccattttattaagcttctatttgtatatggtgatttaactttcttagtgtttaccatttgtatgtttcctttttcctctagcttcaaaggaatattttggcatctaatcccagggtcacaagattccacattaattgggaagataacacagaaaaactggaagatgcagagagcagtaatccaaatctacagtcacttctttcaacagatgcattaccttcagcatcaaagggatggtccacatcagaaaactcactaaatgtcatgttagaatcccacatggactgcatgtgaccacctaccatccctttagtacaaattaagctattaaaaatacacagaactatttccctgaaattccgtaagtacatagtcaaaacacaatgtgaagaatttgtttaaaaacatcctgtagaaagtttataagaaaaccagtatttgaacaaattgtggaatataaatacaactatttttaagtaatttttttctctaatgtgttattttatttgttctgaaactaatctgattaaagcatatatattattttcttctcctttatatgtaatgaaagcacttataaagaaacaggaatcattagaccaggttgtaaagatgtcttggcctcccagacagtctttggaccactattttactggcctttgaaagaacaaagtttacttcaactaaaatgtttcttcctgtgaagacatatggtatcattttaatttaaggggcagatttccattcttttttggcatgtccttaaaaagaggatttgaaatcaactatatgctaccaagaactttaggatccaattttccaagccaccgtgaagcctcttatggctactattatagttcatgagatgttggacagcatttggtttgtttggtaagagaagaacaaatatggctaattgttaataaggtcccctggctatggtttttgttcttataacagagtttagaatatcagagcatttcttgaatcatacatcattattgtccagtgaattcaagaccaaatacaatatcgggagaaaatacaaactccctgtgtttaagaataggggattataatggctcaaattggttcatttgatttctaaaaataccatgacctttaaaaattcttttaatagatcatgttattggcagtatttatataaaaaccatggatttagaaaggtatatttagctttattataatagatacgttactattttggaaatatatatattttcacacctgtagtactcttccccatttcctctgacactcatgcagaatgagatcaggcatatttgtggttgacatactctagatagcttttccaacaaatctttgaaaagcaatcttggaaaggaattcattaactaaatggggtaaaaggtttctttttctttgagagttaagtccttcctcaaaaaattttcttatgctccataaaattgaggtagaatattttcattattcttgcagctaagcaagacagccatatgatgcaggttatgcagtgccttcatatctaaaacttttatactgcactttttaaagcttttatgttgaggaaaggaaaagggcatttgtctaaacatggattctgagttgtatatatttcctatcattctaaaaaagtgaatttgtgaagcaaagttttgccagatgttaaactttgaatttaatataccagattattaaaatattgtccattaactagttcatagattttaaaagtaaaatacttctgactgttaaaactatataaagaaaatctcatttgtctaattgcaattaaaagaaaaatgttaaaatattaaaatgaaaataaaagcattactttccaacaaagagctcagtggttaatataataggaacaacatatgtgcttattagaaataaagcatatacagccaaatcaccaa

SEQ ID NO: 355659 - DNA, 567 bp, Homo sapiens
tgaactctggtaggaactttataaggagcatttcactgcctttctggattgctatgagaagccaattttaaagccagtaagtggctaagtggacattaaaagggtctttgatgtcatctggtaatgtaattactgaatatgaaataatgctttggttttttaaccctagacttggaatggaaaattatctatgtgggctctgcagaaagtgaagaatacgatcaagttttagactctgttttagtgggtcctgttcccgcaggaaggcatatgtttgtatttcaggtaagattaatcttggtaaatgtgtatgccaaatatgtttcgaagtagactatattatctattatcttataacccttatccctttccttttgggttaaagaactgcttctgctgcattcactttaaatctgtttccatcatgttttaggcagtctctgtgtcacagaggaactcttacttcctggttttatatgctgagagatgttaatgtgacgtttactttagagagatgaacaacctacagtaaattttatactgtatcatggcacacagggtggtgaa

SEQ ID NO: 355660 - DNA, 1414 bp, Homo sapiens
gcttctctgatttgcttgggtaacctttattttctaagataaaggaggaaatgatacgatcccagtcttcattcttggtatcaagcaaaaccaggatcaggtcaaatcgacttaagagtgggctgccgagggcaatgttcacagacacggactcctgggggtcgtactggcctttggggttcgttgctgccaggatggtggtccttgtgttcagcttgcacacgaggtttgttctccgcctttgtcctaatccacaccagcaggtggagccgcagttaaagtttccgagtccattccgggagcgggagcccatcttgctggctgccgaggccctcgctggaggaggagggtcagaactcgggtgcagccaatcgagggcaacgctgctacttatcagagcagaatgggctgtagtttagtgaaataggaaagctgcaaaacactgtggagtgctcccgtgtaaataaaaagaggaaaaaagtttctcaagtcgccgctgcacgacgtctggccggcgctggagcgggggtctgcgctctcccgagcggccgcgcgctggactttattgtgccgcaaccagccccagttcccattgtttgtgtttttttcaaaatatggcaaaggttcaggtgaacaatgtagtggtgctggataacccttctcctttctacaacccgttccagttcgagatcaccttcgagtgcatcgaggacctgtctgaagacttggaatggaaaattatctatgtgggctctgcagaaagtgaagaatacgatcaagttttagactctgttttagtgggtcctgttcccgcaggaaggcatatgtttgtatttcaggctgatgcacctaatccaggactcattccagatgcagatgcagtaggcgtaactgttgtgctaattacttgtacctatcgaggacaagaatttattagagttggctattatgtaaataatgaatatactgagacagaattaagggaaaatccaccagtaaaaccagacttttctaagcttcaaaggaatattttggcatctaatcccagggtcacaagattccacattaattgggaagataacacagaaaaactggaagatgcagagagcagtaatccaaatctacagtcacttctttcaacagatgcattaccttcagcatcaaagggatggtccacatcagaaaactcactaaatgtcatgttagaatcccacatggactgcatgtgaccacctaccatccctttagtacaaattaagctattaaaaatacacagaactatttccctgaaattccgtaagtacatagtcaaaacacaatgtgaagaatttgtttaaaaacatcctgtagaaagtttataagaaaaccagtatttgaacaaattgtggaatataaatacaactatttttaagta

SEQ ID NO: 355661 - DNA, 2804 bp, Homo sapiens
gcttctctgatttgcttgggtaacctttattttctaagataaaggaggaaatgatacgatcccagtcttcattcttggtatcaagcaaaaccaggatcaggtcaaatcgacttaagagtgggctgccgagggcaatgttcacagacacggactcctgggggtcgtactggcctttggggttcgttgctgccaggatggtggtccttgtgttcagcttgcacacgaggtttgttctccgcctttgtcctaatccacaccagcaggtggagccgcagttaaagtttccgagtccattccgggagcgggagcccatcttgctggctgccgaggccctcgctggaggaggagggtcagaactcgggtgcagccaatcgagggcaacgctgctacttatcagagcagaatgggctgtagtttagtgaaataggaaagctgcaaaacactgtggagtgctcccgtgtaaataaaaagaggaaaaaagtttctcaagtcgccgctgcacgacgtctggccggcgctggagcgggggtctgcgctctcccgagcggccgcgcgctggactttattgtgccgcaaccagccccagttcccattgtttgtgtttttttcaaaatatggcaaaggttcaggtgaacaatgtagtggtgctggataacccttctcctttctacaacccgttccagttcgagatcaccttcgagtgcatcgaggacctgtctgaagacttggaatggaaaattatctatgtgggctctgcagaaagtgaagaatacgatcaagttttagactctgttttagtgggtcctgttcccgcaggaaggcatatgtttgtatttcaggctgatgcacctaatccaggactcattccagatgcagatgcagtaggcgtaactgttgtgctaattacttgtacctatcgaggacaagaatttattagagttggctattatgtaaataatgaatatactgagacagaattaagggaaaatccaccagtaaaaccagacttttctaagcttcaaaggaatattttggcatctaatcccagggtcacaagattccacattaattgggaagataacacagaatgcattaccttcagcatcaaagggatggtccacatcagaaaactcactaaatgtcatgttagaatcccacatggactgcatgtgaccacctaccatccctttagtacaaattaagctattaaaaatacacagaactatttccctgaaattccgtaagtacatagtcaaaacacaatgtgaagaatttgtttaaaaacatcctgtagaaagtttataagaaaaccagtatttgaacaaattgtggaatataaatacaactatttttaagtaatttttttctctaatgtgttattttatttgttctgaaactaatctgattaaagcatatatattattttcttctcctttatatgtaatgaaagcacttataaagaaacaggaatcattagaccaggttgtaaagatgtcttggcctcccagacagtctttggaccactattttactggcctttgaaagaacaaagtttacttcaactaaaatgtttcttcctgtgaagacatatggtatcattttaatttaaggggcagatttccattcttttttggcatgtccttaaaaagaggatttgaaatcaactatatgctaccaagaactttaggatccaattttccaagccaccgtgaagcctcttatggctactattatagttcatgagatgttggacagcatttggtttgtttggtaagagaagaacaaatatggctaattgttaataaggtcccctggctatggtttttgttcttataacagagtttagaatatcagagcatttcttgaatcatacatcattattgtccagtgaattcaagaccaaatacaatatcgggagaaaatacaaactccctgtgtttaagaataggggattataatggctcaaattggttcatttgatttctaaaaataccatgacctttaaaaattcttttaatagatcatgttattggcagtatttatataaaaaccatggatttagaaaggtatatttagctttattataatagatacgttactattttggaaatatatatattttcacacctgtagtactcttccccatttcctctgacactcatgcagaatgagatcaggcatatttgtggttgacatactctagatagcttttccaacaaatctttgaaaagcaatcttggaaaggaattcattaactaaatggggtaaaaggtttctttttctttgagagttaagtccttcctcaaaaaattttcttatgctccataaaattgaggtagaatattttcattattcttgcagctaagcaagacagccatatgatgcaggttatgcagtgccttcatatctaaaacttttatactgcactttttaaagcttttatgttgaggaaaggaaaagggcatttgtctaaacatggattctgagttgtatatatttcctatcattctaaaaaagtgaatttgtgaagcaaagttttgccagatgttaaactttgaatttaatataccagattattaaaatattgtccattaactagttcatagattttaaaagtaaaatacttctgactgttaaaactatataaagaaaatctcatttgtctaattgcaattaaaagaaaaatgttaaaatattaaaatgaaaataaaagcattactttccaacaaagagctcagtggttaatataataggaacaacatatgtgcttattagaaataaagcatatacagccaaatcaccaa

SEQ ID NO: 355662 - DNA, 240 bp, Homo sapiens
gcaggaggattgatggagccagggagattgaggctgcggtgagctgtgattataccactgcactccagcctgggtgacagagcaagaccttgtctcaaaaaaaggggagaaaatattggagctctgtaagaaatgtaattacataacatgactaggctaggaataatagttgcttcatcataatcgtgtaaacactggatattaatctattctcaattataaaactgtcctgaaggaatc

SEQ ID NO: 355663 - DNA, 435 bp, Homo sapiens
  misc_feature (43)..(43): n is a, c, g, or t
cccaacgtaatccaaacttgatgcatctgcccatagtagatcncagggaagacacgattatacacctcagccgcctgagatgggggtcagctctttatataaagggaaaccagaccaggcctaaagcccaccccctaccctcacccccacaatcctctcctgaaacttaaaaacagtgggaatataggaaagggaaccaaatctcattaattaattgttctcccccattaccccactgaatgaatggccatacaggctaagctgaataatgacaaagttgaaaggaccaatacagccccttttataaggattttgaatgttttgcaaatgtattggtccctgtgttgtattttgtagccttttcctgggcttcagctcccctacttcttgtatgtgtatgcatactgtagctaaccattaaagtcatgacacaca

SEQ ID NO: 355664 - DNA, 783 bp, Homo sapiens
aatccagctgtcttttattaagcaagacttagagatctgcaaaatgtagaaagacttagtgatgagtgtcaccagaaaatagttcatgtttcttacattagcacatagtgggtctgtttttaaaaatgaatatttttaaaatctaatttctaatgtggaaaattctgaaataaaacgcacagaaatgagaactctttggggtcccaagaaccactgctttaaaccaaagattaatttgaaagcctctgtcagaaacccaaaccctagccagttagaactgtcttcccatgttggcctttcagactaagtcctaagtcaaggtttcttaatttctaggtcgctatctctttttgaatgcaattgcaaatcagctccggtacccaaatagccacactcactacttcagttgcaccatgctgtacctttttgcagaggccaatacggaagccatccaagaacagatcacaaggtaagcgagcagcttattttttaaatgcttcaaaaggatctcctccctttcatcttttttttttcctctttatgctttcagtgttcagtgaaaatccgtttggttggttttttttttgtttttttgagacggagtgttgctctgtcactcagtctgcagtacagtggcgccatcttggctcactgcaacctccgcctcccaggttcaagcgattctcgtgccttagcctctcaagtagctgggattacaggcgcctgccaccacgcccagctaatttttgtattttagtagagacggggtttcactatgttggc

SEQ ID NO: 355665 - DNA, 288 bp, Homo sapiens
gaaaggaccaatacagccccttttaactttgtcattattcagcttagcctgtatggccattcattcagtggggtaatgggggagaacaatgaatgaatggccatacaggctaagctgaataatgacaaagttgaaaggaccaatacagccccttttataaggattttgaatgttttgcaaatgtattggtccctgtgttgtattttgtagccttttcctgggcttcagctcccctacttcttgtatgtgtatgcatactgtagctaaccattaaagtcatgacacaca

SEQ ID NO: 355666 - DNA, 4823 bp, Homo sapiens
ggcgggctagaggatcccggaactctgttgaagagctaaaggaaacggtgaaagaagaatttatgccttgggtttcacagtatctggttatgaagagagtcagtattgagccaaactttcatagcctgtattcaaacttccttgacacgctgaagaatcctgaatttaacaagatggttctgaatgagacctacagaaacattaaagtgctcctgacctctgataaagctgcagccaatttctcagatcgttctttgctgaagaacttgggacattggctaggaatgatcacattagctaaaaacaaacccatcttacacactgacttggatgtgaaatcattgctgctagaggcttatgttaaaggacaacaagaattgctctatgtagtgccctttgttgccaaagtcttagaatctagcattcgtagtgtggtttttaggccaccaaacccttggacaatggcaattatgaatgtattagctgagctacatcaggagcatgacttaaagttaaacttgaagtttgaaatcgaggttctctgcaagaaccttgcattagacatcaatgagctaaaacctggaaacctcctaaaggataaagatcgcctgaagaatttagatgagcaactctctgctccaaagaaagatgtcaagcagccagaagaactccctcccatcacaaccacaacaacttctactacaccagctaccaacaccacttgtacagccacggttccaccacagccacagtacagctaccacgacatcaatgtctattcccttgcgggcttggcaccacacattactctaaatccaacaattcccttgtttcaggcccatccacagttgaagcagtgtgtgcgtcaggcaattgaacgggctgtccaggagctggtccatcctgtggtggatcgatcaattaagattgccatgactacttgtgagcaaatagtcaggaaggattttgccctggattcggaggaatctcgaatgcgaatagcagctcatcacatgatgcgtaacttgacagctggaatggctatgattacatgcagggaacctttgctcatgagcatatctaccaacttaaaaaacagttttgcctcagcccttcgtactgcttccccacaacaaagagaaatgatggatcaggcagctgctcaattagctcaggacaattgtgagttggcttgctgttttattcagaagactgcagtagaaaaagcaggccctgagatggacaagagattagcaactgaatttgagctgagaaaacatgctaggcaagaaggacgcagatactgtgatcctgttgttttaacatatcaagctgaacggatgccagagcaaatcaggctgaaagttggtggtgtggacccaaagcagttggctgtttacgaagagtttgcacgcaatgttcctggcttcttacctacaaatgacttaagtcagcccacgggatttttagcccagcccatgaagcaagcttgggcaacagatgatgtagctcagatttatgataagtgtattacagaactggagcaacatctacatgccatcccaccaactttggccatgaaccctcaagctcaggctcttcgaagtctcttggaggttgtagttttatctcgaaactctcgggatgccatagctgctcttggattgctccaaaaggctgtagagggcttactagatgccacaagtggtgctgatgctgaccttctgctgcgctacagggaatgccacctcttggtcctaaaagctctgcaggatggccgggcatatgggtctccatggtgcaacaaacagatcacaaggtgcctaattgaatgtcgagatgaatataaatataatgtggaggctgtggagctgctaattcgcaatcatttggttaatatgcagcagtatgatcttcacctagcgcagtcaatggagaatggcttaaactacatggctgtggcatttgctatgcagttagtaaaaatcctgctggtggatgaaaggagtgttgctcatgttactgaggcagatctgttccacaccattgaaaccctcatgaggattaatgctcattccagaggcaatgctccagaaggattgccccagctgatggaagtagtgcgatccaactatgaagcaatgattgatcgtgctcatggaggcccaaactttatgatgcattctgggatctctcaagcctcagagtatgatgaccctccaggcctgagggagaaggcagagtatcttctgagggaatgggtgaatctctaccattcagcagcagctggccgcgacagtaccaaagctttctctgcatttgttggacagatgcaccagcaaggaatactgaagaccgatgatctcataacaaggttctttcgtctgtgtactgaaatgtgtgttgaaatcagttaccgtgctcaggctgagcagcagcacaatcctgctgccaatcccaccatgatccgagccaagtgctatcacaacctggatgcctttgttcgactcattgcactgctcgtgaaacactcaggggaggccaccaacactgtcacaaagattaatctgctgaacaaggtccttggtatagtagtgggagttctccttcaggatcatgatgttcgtcagagtgaatttcagcaacttccctaccatcgaatttttatcatgcttctcttggaactcaatgcacctgagcatgtgttggaaaccattaatttccagacacttacagctttctgcaatacattccacatcttgaggcctaccaaagctcctggctttgtatatgcctggcttgaactgatttcccatcggatatttattgcaagaatgctggcacatacgccacagcagaaggggtggcctatgtatgcacagctactgattgatttattcaaatatttagcgcctttccttagaaatgtggaactcaccaaacctatgcaaatcctctacaagggcactttaagagtgctgctggttcttttgcatgatttcccagagttcctttgtgattaccattatgggttctgtgatgtgatcccacctaattgtatccagttaagaaatttgatcctgagtgcctttccaagaaacatgaggctccccgacccattcactcctaatctaaaggtggacatgttgagtgaaattaacattgctccccggattctcaccaatttcactggagtaatgccacctcagttcaaaaaggatttggattcctatcttaaaactcgatcaccagtcactttcctgtctgatctgcgcagcaacctacaggtatccaatgaacctgggaatcgctacaacctccagctcatcaatgcactggtgctctatgtcgggactcaggccattgcgcacatccacaacaagggcagcacaccttcaatgagcaccatcactcactcagcacacatggatatcttccagaatttggctgtggacttggacactgagggtcgctatctctttttgaatgcaattgcaaatcagctccggtacccaaatagccacactcactacttcagttgcaccatgctgtacctttttgcagaggccaatacggaagccatccaagaacagatcacaagagttctcttggaacggttgattgtaaataggccacatccttggggtcttcttattaccttcattgagctgattaaaaacccagcgtttaagttctggaaccatgaatttgtacactgtgccccagaaatcgaaaagttattccagtcggtcgcacagtgctgcatgggacagaagcaggcccagcaagtaatggaagggacaggtgccagttagacgaaactgcatctctgttgtacgtgtcagtctagaggtctcactgcaccgagttcataaactgactgaagaatcctttcagctcttcctgactttcccagccctttggtttgtgggtatctgccccaactactgttgggatcagcctcctgtcttatgtgggcacgttccaaagtttaaatgcatttttttgactcttggccaaaatttagaagatgctgtgaatatcattttgaacttgtgtaaatacatgaaagagaaaacctttgtctggaacttcttggctttgtgcaagctgtgtccaaggcaagtacataaactggtaccttgtaatgaagaggcagctgatgccatgcacttgtctgagggcatagctccatgtcttctgacattcctggtgtcccaaagaatagcaaaaagccagtttgaatattatgtaacttatttttttaatgtggacaggggaccttgaaaatcactaagttattaaaaatgtggatgtgctagaattggatatgtccaggaacatgggaagggctcactattggaatcccatgagtttccattttgtctctacccaaacgtattccaaagctgactgcatttgtaccatcttatttcttttggggattatacacctcagccgcctgagatgggggtcagctctttatataaagggaaaccagaccaggcctaaagcccaccccctaccctcacccccacaatcctctcctgaaacttaaaaacagtgggaatataggaaagggaaccaaatctcattaattaattgttctcccccattaccccactgaatgaatggccatacaggctaagctgaataatgacaaagttgaaaggaccaatacagccccttttataaggattttgaatgttttgcaaatgtattggtccctgtgttgtattttgtagccttttcctgggcttcagctcccctacttcttgtatgtgtatgcatactgtagctaaccattaaagtcatgacacaca

SEQ ID NO: 355667 - DNA, 6200 bp, Homo sapiens
caggcgctgttggctgtctgcaagcttgtgcagtgagtgtttctcaggagctatcagaaactatcctcaccatggtagccaattgcagtaatgttatgaataaggccagacaaccaccacctggagttatgccaaaaggacgtcctcctagtgctagcagcttagatgccatttctcctgttcagattgaccctcttgctggaatgacatctcttagtataggtggttcagctgcccctcacacccagagtatgcagggttttcctccaaatttgggttctgcattcagtacccctcagtcaccagcaaaagcatttccacccctttcaacccccaatcagaccactgcattcagtggtattggaggactttcatcacagcttccagtaggtggtcttggcacaggcagcctgactggtataggaactggtgctcttggactccctgcagtgaataacgacccttttgtacagaggaaactgggcacctctggactgaatcagcctacattccagcagacggacttgtctcaggtgtggccagaggcaaaccagcactttagtaaagagatagatgatgaagcaaacagctatttccagcgaatatataatcatccaccacatccaaccatgtctgttgatgaggtattagaaatgctgcagagatttaaagactctactataaagagggaacgagaagtatttaactgtatgctaaggaacttgtttgaagaatatcgtttttttccccagtatcctgataaagagttacatataacagcctgcctatttggtggtataattgagaaaggactggtcacttacatggcactaggtctggctctacgatatgttcttgaagccttacgcaagccttttggatccaaaatgtattatttcgggattgctgcactagatagatttaaaaacagattgaaggactatccccagtattgtcagcatttggcttctatcagtcactttatgcaatttccacatcatttacaggagtatattgagtatggacagcagtctagagatcctcctgtgaaaatgcaaggctctatcacaacccctggaagtattgcactggctcaggcccaggctcaggcccaggttccagcaaaagctcctcttgctggtcaagttagcactatggtaaccacctcaacaactaccactgttgctaaaacggttacggtcaccaggccaactggagtcagctttaagaaagatgtgccaccttctattaatactacaaatatagatacgttgcttgtggccacagatcaaactgagagaattgtggagcccccagaaaatatccaggagaaaattgcttttattttcaataatctctcacagtcaaatatgacacaaaaggttgaagagctaaaggaaacggtgaaagaagaatttatgccttgggtttcacagtatctggttatgaagagagtcagtattgagccaaactttcatagcctgtattcaaacttccttgacacgctgaagaatcctgaatttaacaagatggttctgaatgagacctacagaaacattaaagtgctcctgacctctgataaagctgcagccaatttctcagatcgttctttgctgaagaacttgggacattggctaggaatgatcacattagctaaaaacaaacccatcttacacactgacttggatgtgaaatcattgctgctagaggcttatgttaaaggacaacaagaattgctctatgtagtgccctttgttgccaaagtcttagaatctagcattcgtagtgtggtttttaggccaccaaacccttggacaatggcaattatgaatgtattagctgagctacatcaggagcatgacttaaagttaaacttgaagtttgaaatcgaggttctctgcaagaaccttgcattagacatcaatgagctaaaacctggaaacctcctaaaggataaagatcgcctgaagaatttagatgagcaactctctgctccaaagaaagatgtcaagcagccagaagaactccctcccatcacaaccacaacaacttctactacaccagctaccaacaccacttgtacagccacggttccaccacagccacagtacagctaccacgacatcaatgtctattcccttgcgggcttggcaccacacattactctaaatccaacaattcccttgtttcaggcccatccacagttgaagcagtgtgtgcgtcaggcaattgaacgggctgtccaggagctggtccatcctgtggtggatcgatcaattaagattgccatgactacttgtgagcaaatagtcaggaaggattttgccctggattcggaggaatctcgaatgcgaatagcagctcatcacatgatgcgtaacttgacagctggaatggctatgattacatgcagggaacctttgctcatgagcatatctaccaacttaaaaaacagttttgcctcagcccttcgtactgcttccccacaacaaagagaaatgatggatcaggcagctgctcaattagctcaggacaattgtgagttggcttgctgttttattcagaagactgcagtagaaaaagcaggccctgagatggacaagagattagcaactgaatttgagctgagaaaacatgctaggcaagaaggacgcagatactgtgatcctgttgttttaacatatcaagctgaacggatgccagagcaaatcaggctgaaagttggtggtgtggacccaaagcagttggctgtttacgaagagtttgcacgcaatgttcctggcttcttacctacaaatgacttaagtcagcccacgggatttttagcccagcccatgaagcaagcttgggcaacagatgatgtagctcagatttatgataagtgtattacagaactggagcaacatctacatgccatcccaccaactttggccatgaaccctcaagctcaggctcttcgaagtctcttggaggttgtagttttatctcgaaactctcgggatgccatagctgctcttggattgctccaaaaggctgtagagggcttactagatgccacaagtggtgctgatgctgaccttctgctgcgctacagggaatgccacctcttggtcctaaaagctctgcaggatggccgggcatatgggtctccatggtgcaacaaacagatcacaaggtgcctaattgaatgtcgagatgaatataaatataatgtggaggctgtggagctgctaattcgcaatcatttggttaatatgcagcagtatgatcttcacctagcgcagtcaatggagaatggcttaaactacatggctgtggcatttgctatgcagttagtaaaaatcctgctggtggatgaaaggagtgttgctcatgttactgaggcagatctgttccacaccattgaaaccctcatgaggattaatgctcattccagaggcaatgctccagaaggattgccccagctgatggaagtagtgcgatccaactatgaagcaatgattgatcgtgctcatggaggcccaaactttatgatgcattctgggatctctcaagcctcagagtatgatgaccctccaggcctgagggagaaggcagagtatcttctgagggaatgggtgaatctctaccattcagcagcagctggccgcgacagtaccaaagctttctctgcatttgttggacaggtagagcttttggaaagaaagatgcaccagcaaggaatactgaagaccgatgatctcataacaaggttctttcgtctgtgtactgaaatgtgtgttgaaatcagttaccgtgctcaggctgagcagcagcacaatcctgctgccaatcccaccatgatccgagccaagtgctatcacaacctggatgcctttgttcgactcattgcactgctcgtgaaacactcaggggaggccaccaacactgtcacaaagattaatctgctgaacaaggtccttggtatagtagtgggagttctccttcaggatcatgatgttcgtcagagtgaatttcagcaacttccctaccatcgaatttttatcatgcttctcttggaactcaatgcacctgagcatgtgttggaaaccattaatttccagacacttacagctttctgcaatacattccacatcttgaggcctaccaaagctcctggctttgtatatgcctggcttgaactgatttcccatcggatatttattgcaagaatgctggcacatacgccacagcagaaggggtggcctatgtatgcacagctactgattgatttattcaaatatttagcgcctttccttagaaatgtggaactcaccaaacctatgcaaatcctctacaagggcactttaagagtgctgctggttcttttgcatgatttcccagagttcctttgtgattaccattatgggttctgtgatgtgatcccacctaattgtatccagttaagaaatttgatcctgagtgcctttccaagaaacatgaggctccccgacccattcactcctaatctaaaggtggacatgttgagtgaaattaacattgctccccggattctcaccaatttcactggagtaatgccacctcagttcaaaaaggatttggattcctatcttaaaactcgatcaccagtcactttcctgtctgatctgcgcagcaacctacaggtatccaatgaacctgggaatcgctacaacctccagctcatcaatgcactggtgctctatgtcgggactcaggccattgcgcacatccacaacaagggcagcacaccttcaatgagcaccatcactcactcagcacacatggatatcttccagaatttggctgtggacttggacactgagggtcgctatctctttttgaatgcaattgcaaatcagctccggtacccaaatagccacactcactacttcagttgcaccatgctgtacctttttgcagaggccaatacggaagccatccaagaacagatcacaagagttctcttggaacggttgattgtaaataggccacatccttggggtcttcttattaccttcattgagctgattaaaaacccagcgtttaagttctggaaccatgaatttgtacactgtgccccagaaatcgaaaagttattccagtcggtcgcacagtgctgcatgggacagaagcaggcccagcaagtaatggaagggacaggtgccagttagacgaaactgcatctctgttgtacgtgtcagtctagaggtctcactgcaccgagttcataaactgactgaagaatcctttcagctcttcctgactttcccagccctttggtttgtgggtatctgccccaactactgttgggatcagcctcctgtcttatgtgggcacgttccaaagtttaaatgcatttttttgactcttggccaaaatttagaagatgctgtgaatatcattttgaacttgtgtaaatacatgaaagagaaaacctttgtctggaacttcttggctttgtgcaagctgtgtccaaggcaagtacataaactggtaccttgtaatgaagaggcagctgatgccatgcacttgtctgagggcatagctccatgtcttctgacattcctggtgtcccaaagaatagcaaaaagccagtttgaatattatgtaacttatttttttaatgtggacaggggaccttgaaaatcactaagttattaaaaatgtggatgtgctagaattggatatgtccaggaacatgggaagggctcactattggaatcccatgagtttccattttgtctctacccaaacgtattccaaagctgactgcatttgtaccatcttatttcttttggggattatacacctcagccgcctgagatgggggtcagctctttatataaagggaaaccagaccaggcctaaagcccaccccctaccctcacccccacaatcctctcctgaaacttaaaaacagtgggaatataggaaagggaaccaaatctcattaattaattgttctcccccattaccccactgaatgaatggccatacaggctaagctgaataatgacaaagttgaaaggaccaatacagccccttttataaggattttgaatgttttgcaaatgtattggtccctgtgttgtattttgtagccttttcctgggcttcagctcccctacttcttgtatgtgtatgcatactgtagctaaccattaaagtcatgacacaca

SEQ ID NO: 355668 - DNA, 6561 bp, Homo sapiens
caggcgctgttggctgtctgcaagcttgtgcagtgagtgtttctcaggagctatcagaaactatcctcaccatggtagccaattgcagtaatgttatgaataaggccagacaaccaccacctggagttatgccaaaaggacgtcctcctagtgctagcagcttagatgccatttctcctgttcagattgaccctcttgctggaatgacatctcttagtataggtggttcagctgcccctcacacccagagtatgcagggttttcctccaaatttgggttctgcattcagtacccctcagtcaccagcaaaagcatttccacccctttcaacccccaatcagaccactgcattcagtggtattggaggactttcatcacagcttccagtaggtggtcttggcacaggcagcctgactggtataggaactggtgctcttggactccctgcagtgaataacgacccttttgtacagaggaaactgggcacctctggactgaatcagcctacattccagcagacggacttgtctcaggtgtggccagaggcaaaccagcactttagtaaagagatagatgatgaagcaaacagctatttccagcgaatatataatcatccaccacatccaaccatgtctgttgatgaggtattagaaatgctgcagagatttaaagactctactataaagagggaacgagaagtatttaactgtatgctaaggaacttgtttgaagaatatcgtttttttccccagtatcctgataaagagttacatataacagcctgcctatttggtggtataattgagaaaggactggtcacttacatggcactaggtctggctctacgatatgttcttgaagccttacgcaagccttttggatccaaaatgtattatttcgggattgctgcactagatagatttaaaaacagattgaaggactatccccagtattgtcagcatttggcttctatcagtcactttatgcaatttccacatcatttacaggagtatattgagtatggacagcagtctagagatcctcctgtgaaaatgcaaggctctatcacaacccctggaagtattgcactggctcaggcccaggctcaggcccaggttccagcaaaagctcctcttgctggtcaagttagcactatggtaaccacctcaacaactaccactgttgctaaaacggttacggtcaccaggccaactggagtcagctttaagaaagatgtgccaccttctattaatactacaaatatagatacgttgcttgtggccacagatcaaactgagagaattgtggagcccccagaaaatatccaggagaaaattgcttttattttcaataatctctcacagtcaaatatgacacaaaaggttgaagagctaaaggaaacggtgaaagaagaatttatgccttgggtttcacagtatctggttatgaagagagtcagtattgagccaaactttcatagcctgtattcaaacttccttgacacgctgaagaatcctgaatttaacaagatggttctgaatgagacctacagaaacattaaagtgctcctgacctctgataaagctgcagccaatttctcagatcgttctttgctgaagaacttgggacattggctaggaatgatcacattagctaaaaacaaacccatcttacacactgacttggatgtgaaatcattgctgctagaggcttatgttaaaggacaacaagaattgctctatgtagtgccctttgttgccaaagtcttagaatctagcattcgtagtgtggtttttaggccaccaaacccttggacaatggcaattatgaatgtattagctgagctacatcaggagcatgacttaaagttaaacttgaagtttgaaatcgaggttctctgcaagaaccttgcattagacatcaatgagctaaaacctggaaacctcctaaaggataaagatcgcctgaagaatttagatgagcaactctctgctccaaagaaagatgtcaagcagccagaagaactccctcccatcacaaccacaacaacttctactacaccagctaccaacaccacttgtacagccacggttccaccacagccacagtacagctaccacgacatcaatgtctattcccttgcgggcttggcaccacacattactctaaatccaacaattcccttgtttcaggcccatccacagttgaagcagtgtgtgcgtcaggcaattgaacgggctgtccaggagctggtccatcctgtggtggatcgatcaattaagattgccatgactacttgtgagcaaatagtcaggaaggattttgccctggattcggaggaatctcgaatgcgaatagcagctcatcacatgatgcgtaacttgacagctggaatggctatgattacatgcagggaacctttgctcatgagcatatctaccaacttaaaaaacagttttgcctcagcccttcgtactgcttccccacaacaaagagaaatgatggatcaggcagctgctcaattagctcaggacaattgtgagttggcttgctgttttattcagaagactgcagtagaaaaagcaggccctgagatggacaagagattagcaactgaatttgagctgagaaaacatgctaggcaagaaggacgcagatactgtgatcctgttgttttaacatatcaagctgaacggatgccagagcaaatcaggctgaaagttggtggtgtggacccaaagcagttggctgtttacgaagagtttgcacgcaatgttcctggcttcttacctacaaatgacttaagtcagcccacgggatttttagcccagcccatgaagcaagcttgggcaacagatgatgtagctcagatttatgataagtgtattacagaactggagcaacatctacatgccatcccaccaactttggccatgaaccctcaagctcaggctcttcgaagtctcttggaggttgtagttttatctcgaaactctcgggatgccatagctgctcttggattgctccaaaaggctgtagagggcttactagatgccacaagtggtgctgatgctgaccttctgctgcgctacagggaatgccacctcttggtcctaaaagctctgcaggatggccgggcatatgggtctccatggtgcaacaaacagatcacaaggtgcctaattgaatgtcgagatgaatataaatataatgtggaggctgtggagctgctaattcgcaatcatttggttaatatgcagcagtatgatcttcacctagcgcagtcaatggagaatggcttaaactacatggctgtggcatttgctatgcagttagtaaaaatcctgctggtggatgaaaggagtgttgctcatgttactgaggcagatctgttccacaccattgaaaccctcatgaggattaatgctcattccagaggcaatgctccagaaggattgccccagctgatggaagtagtgcgatccaactatgaagcaatgattgatcgtgctcatggaggcccaaactttatgatgcattctgggatctctcaagcctcagagtatgatgaccctccaggcctgagggagaaggcagagtatcttctgagggaatgggtgaatctctaccattcagcagcagctggccgcgacagtaccaaagctttctctgcatttgttggacagatgcaccagcaaggaatactgaagaccgatgatctcataacaaggttctttcgtctgtgtactgaaatgtgtgttgaaatcagttaccgtgctcaggctgagcagcagcacaatcctgctgccaatcccaccatgatccgagccaagtgctatcacaacctggatgcctttgttcgactcattgcactgctcgtgaaacactcaggggaggccaccaacactgtcacaaagattaatctgctgaacaaggtccttggtatagtagtgggagttctccttcaggatcatgatgttcgtcagagtgaatttcagcaacttccctaccatcgaatttttatcatgcttctcttggaactcaatgcacctgagcatgtgttggaaaccattaatttccagacacttacagctttctgcaatacattccacatcttgaggcctaccaaagctcctggctttgtatatgcctggcttgaactgatttcccatcggatatttattgcaagaatgctggcacatacgccacagcagaaggggtggcctatgtatgcacagctactgattgatttattcaaatatttagcgcctttccttagaaatgtggaactcaccaaacctatgcaaatcctctacaagggcactttaagagtgctgctggttcttttgcatgatttcccagagttcctttgtgattaccattatgggttctgtgatgtgatcccacctaattgtatccagttaagaaatttgatcctgagtgcctttccaagaaacatgaggctccccgacccattcactcctaatctaaaggtggacatgttgagtgaaattaacattgctccccggattctcaccaatttcactggagtaatgccacctcagttcaaaaaggatttggattcctatcttaaaactcgatcaccagtcactttcctgtctgatctgcgcagcaacctacaggtatccaatgaacctgggaatcgctacaacctccagctcatcaatgcactggtgctctatgtcgggactcaggccattgcgcacatccacaacaagggcagcacaccttcaatgagcaccatcactcactcagcacacatggatatcttccagaatttggctgtggacttggacactgagggtcgctatctctttttgaatgcaattgcaaatcagctccggtacccaaatagccacactcactacttcagttgcaccatgctgtacctttttgcagaggccaatacggaagccatccaagaacagatcacaagagttctcttggaacggttgattgtaaataggccacatccttggggtcttcttattaccttcattgagctgattaaaaacccagcgtttaagttctggaaccatgaatttgtacactgtgccccagaaatcgaaaagttattccagtcggtcgcacagtgctgcatgggacagaagcaggcccagcaagtaatggaagggacaggtgccagttagacgaaactgcatctctgttgtacgtgtcagtctagaggtctcactgcaccgagttcataaactgactgaagaatcctttcagctcttcctgactttcccagccctttggtttgtgggtatctgccccaactactgttgggatcagcctcctgtcttatgtgggcacgttccaaagtttaaatgcatttttttgactcttggccaaaatttagaagatgctgtgaatatcattttgaacttgtgtaaatacatgaaagagaaaacctttgtctggaacttcttggctttgtgcaagctgtgtccaaggcaagtacataaactggtaccttgtaatgaagaggcagctgatgccatgcacttgtctgagggcatagctccatgtcttctgacattcctggtgtcccaaagaatagcaaaaagccagtttgaatattatgtaacttatttttttaatgtggacaggggaccttgaaaatcactaagttattaaaaatgtggatgtgctagaattggatatgtccaggaacatgggaagggctcactattggaatcccatgagtttccattttgtctctacccaaacgtattccaaagctgactgcatttgtaccatcttatttcttttggggattatacacctcagccgcctgagatgggggtcagctctttatataaagggaaaccagaccaggcctaaagcccaccccctaccctcacccccacaatcctctcctgaaacttaaaaacagtgggaatataggaaagggaaccaaatctcattaattaattgttctcccccattaccccactgaatgaatggccatacaggctaagctgaataatgacaaagttgaaaggaccaatacagccccttttataaggattttgaatgttttgcaaatgtattggtccctgtgttgtattttgtagccttttcctgggcttcagctcccctacttcttgtatgtgtatgcatactgtagctaaccattaaagtcatgacacacacatgagtccactgtgcctttctcagtagcagcaggcagtgctggtggtgaggaggaaaagtggacaatccagccctgtagaccttggggccatggggaaccaacaactaacttcttgctgaatgattgattgattggattgataggtcattcctactactaagctggcatgtttaaggaaattgtatttttcttcctatttatttcaacactggacaaatgctggagcaggtttatctggttaagctgagtttaaaatacccagttttaatatccttttcccccaggtatttttttttttttttaaagaaaatgagtagatacgtatttaaaaacttaacccacttaaaatttgccttacctttcatgactgtcaagtttta

SEQ ID NO: 355669 - DNA, 6213 bp, Homo sapiens
caggcgctgttggctgtctgcaagcttgtgcagtgagtgtttctcaggagctatcagaaactatcctcaccatggtagccaattgcagtaatgttatgaataaggccagacaaccaccacctggagttatgccaaaaggacgtcctcctagtgctagcagcttagatgccatttctcctgttcagattgaccctcttgctggaatgacatctcttagtataggtggttcagctgcccctcacacccagagtatgcagggttttcctccaaatttgggttctgcattcagtacccctcagtcaccagcaaaagcatttccacccctttcaacccccaatcagaccactgcattcagtggtattggaggactttcatcacagcttccagtaggtggtcttggcacaggcagcctgactggtataggaactggtgctcttggactccctgcagtgaataacgacccttttgtacagaggaaactgggcacctctggactgaatcagcctacattccagcagacggacttgtctcaggtgtggccagaggcaaaccagcactttagtaaagagatagatgatgaagcaaacagctatttccagcgaatatataatcatccaccacatccaaccatgtctgttgatgaggtattagaaatgctgcagagatttaaagactctactataaagagggaacgagaagtatttaactgtatgctaaggaacttgtttgaagaatatcgtttttttccccagtatcctgataaagagttacatataacagcctgcctatttggtggtataattgagaaaggactggtcacttacatggcactaggtctggctctacgatatgttcttgaagccttacgcaagccttttggatccaaaatgtattatttcgggattgctgcactagatagatttaaaaacagattgaaggactatccccagtattgtcagcatttggcttctatcagtcactttatgcaatttccacatcatttacaggagtatattgagtatggacagcagtctagagatcctcctgtgaaaatgcaaggctctatcacaacccctggaagtattgcactggctcaggcccaggctcaggcccaggttccagcaaaagctcctcttgctggtcaagttagcactatggtaaccacctcaacaactaccactgttgctaaaacggttacggtcaccaggccaactggagtcagctttaagaaagatgtgccaccttctattaatactacaaatatagatacgttgcttgtggccacagatcaaactgagagaattgtggagcccccagaaaatatccaggagaaaattgcttttattttcaataatctctcacagtcaaatatgacacaaaaggttgaagagctaaaggaaacggtgaaagaagaatttatgccttgggtttcacagtatctggttatgaagagagtcagtattgagccaaactttcatagcctgtattcaaacttccttgacacgctgaagaatcctgaatttaacaagatggttctgaatgagacctacagaaacattaaagtgctcctgacctctgataaagctgcagccaatttctcagatcgttctttgctgaagaacttgggacattggctaggaatgatcacattagctaaaaacaaacccatcttacacactgacttggatgtgaaatcattgctgctagaggcttatgttaaaggacaacaagaattgctctatgtagtgccctttgttgccaaagtcttagaatctagcattcgtagtgtggtttttaggccaccaaacccttggacaatggcaattatgaatgtattagctgagctacatcaggagcatgacttaaagttaaacttgaagtttgaaatcgaggttctctgcaagaaccttgcattagacatcaatgagctaaaacctggaaacctcctaaaggataaagatcgcctgaagaatttagatgagcaactctctgctccaaagaaagatgtcaagcagccagaagaactccctcccatcacaaccacaacaacttctactacaccagctaccaacaccacttgtacagccacggttccaccacagccacagtacagctaccacgacatcaatgtctattcccttgcgggcttggcaccacacattactctaaatccaacaattcccttgtttcaggcccatccacagttgaagcagtgtgtgcgtcaggcaattgaacgggctgtccaggagctggtccatcctgtggtggatcgatcaattaagattgccatgactacttgtgagcaaatagtcaggaaggattttgccctggattcggaggaatctcgaatgcgaatagcagctcatcacatgatgcgtaacttgacagctggaatggctatgattacatgcagggaacctttgctcatgagcatatctaccaacttaaaaaacagttttgcctcagcccttcgtactgcttccccacaacaaagagaaatgatggatcaggcagctgctcaattagctcaggacaattgtgagttggcttgctgttttattcagaagactgcagtagaaaaagcaggccctgagatggacaagagattagcaactgaatttgagctgagaaaacatgctaggcaagaaggacgcagatactgtgatcctgttgttttaacatatcaagctgaacggatgccagagcaaatcaggctgaaagttggtggtgtggacccaaagcagttggctgtttacgaagagtttgcacgcaatgttcctggcttcttacctacaaatgacttaagtcagcccacgggatttttagcccagcccatgaagcaagcttgggcaacagatgatgtagctcagatttatgataagtgtattacagaactggagcaacatctacatgccatcccaccaactttggccatgaaccctcaagctcaggctcttcgaagtctcttggaggttgtagttttatctcgaaactctcgggatgccatagctgctcttggattgctccaaaaggctgtagagggcttactagatgccacaagtggtgctgatgctgaccttctgctgcgctacagggaatgccacctcttggtcctaaaagctctgcaggatggccgggcatatgggtctccatggtgcaacaaacagatcacaaggtgcctaattgaatgtcgagatgaatataaatataatgtggaggctgtggagctgctaattcgcaatcatttggttaatatgcagcagtatgatcttcacctagcgcagtcaatggagaatggcttaaactacatggctgtggcatttgctatgcagttagtaaaaatcctgctggtggatgaaaggagtgttgctcatgttactgaggcagatctgttccacaccattgaaaccctcatgaggattaatgctcattccagaggcaatgctccagaaggattgccccagctgatggaagtagtgcgatccaactatgaagcaatgattgatcgtgctcatggaggcccaaactttatgatgcattctgggatctctcaagcctcagagtatgatgaccctccaggcctgagggagaaggcagagtatcttctgagggaatgggtgaatctctaccattcagcagcagctggccgcgacagtaccaaagctttctctgcatttgttggacagatgcaccagcaaggaatactgaagaccgatgatctcataacaaggttctttcgtctgtgtactgaaatgtgtgttgaaatcagttaccgtgctcaggctgagcagcagcacaatcctgctgccaatcccaccatgatccgagccaagtgctatcacaacctggatgcctttgttcgactcattgcactgctcgtgaaacactcaggggaggccaccaacactgtcacaaagattaatctgctgaacaaggtccttggtatagtagtgggagttctccttcaggatcatgatgttcgtcagagtgaatttcagcaacttccctaccatcgaatttttatcatgcttctcttggaactcaatgcacctgagcatgtgttggaaaccattaatttccagacacttacagctttctgcaatacattccacatcttgaggcctaccaaagctcctggctttgtatatgcctggcttgaactgatttcccatcggatatttattgcaagaatgctggcacatacgccacagcagaaggggtggcctatgtatgcacagctactgattgatttattcaaatatttagcgcctttccttagaaatgtggaactcaccaaacctatgcaaatcctctacaagggcactttaagagtgctgctggttcttttgcatgatttcccagagttcctttgtgattaccattatgggttctgtgatgtgatcccacctaattgtatccagttaagaaatttgatcctgagtgcctttccaagaaacatgaggctccccgacccattcactcctaatctaaaggtggacatgttgagtgaaattaacattgctccccggattctcaccaatttcactggagtaatgccacctcagttcaaaaaggatttggattcctatcttaaaactcgatcaccagtcactttcctgtctgatctgcgcagcaacctacaggtatccaatgaacctgggaatcgctacaacctccagctcatcaatgcactggtgctctatgtcgggactcaggccattgcgcacatccacaacaagggcagcacaccttcaatgagcaccatcactcactcagcacacatggatatcttccagaatttggctgtggacttggacactgagggtcgctatctctttttgaatgcaattgcaaatcagctccggtacccaaatagccacactcactacttcagttgcaccatgctgtacctttttgcagaggccaatacggaagccatccaagaacagatcacaagagttctcttggaacggttgattgtaaataggccacatccttggggtcttcttattaccttcattgagctgattaaaaacccagcgtttaagttctggaaccatgaatttgtacactgtgccccagaaatcgaaaagttattccagtcggtcgcacagtgctgcatgggacagaagcaggcccagcaagtaatggaagggacaggtgccagttagacgaaactgcatctctgttgtacgtgtcagtctagaggtctcactgcaccgagttcataaactgactgaagaatcctttcagctcttcctgactttcccagccctttggtttgtgggtatctgccccaactactgttgggatcagcctcctgtcttatgtgggcacgttccaaagtttaaatgcatttttttgactcttggccaaaatttagaagatgctgtgaatatcattttgaacttgtgtaaatacatgaaagagaaaacctttgtctggaacttcttggctttgtgcaagctgtgtccaaggcaagtacataaactggtaccttgtaatgaagaggcagctgatgccatgcacttgtctgagggcatagctccatgtcttctgacattcctggtgtcccaaagaatagcaaaaagccagtttgaatattatgtaacttatttttttaatgtggacaggggaccttgaaaatcactaagttattaaaaatgtggatgtgctagaattggatatgtccaggaacatgggaagggctcactattggaatcccatgagtttccattttgtctctacccaaacgtattccaaagctgactgcatttgtaccatcttatttcttttggggattatacacctcagccgcctgagatgggggtcagctctttatataaagggaaaccagaccaggcctaaagcccaccccctaccctcacccccacaatcctctcctgaaacttaaaaacagtgggaatataggaaagggaaccaaatctcattaattaattgttctcccccattaccccactgaatgaatggccatacaggctaagctgaataatgacaaagttgaaaggaccaatacagccccttttataaggattttgaatgttttgcaaatgtattggtccctgtgttgtattttgtagccttttcctgggcttcagctcccctacttcttgtatgtgtatgcatactgtagctaaccattaaagtcatgacacacaaaatccttataaaaggggctgtattgtcgacgcg

SEQ ID NO: 355670 - DNA, 6126 bp, Homo sapiens
caggcgctgttggctgtctgcaagcttgtgcagtgagtgtttctcaggagctatcagaaactatcctcaccatggtagccaattgcagtaatgttatgaataaggccagacaaccaccacctggagttatgccaaaaggacgtcctcctagtgctagcagcttagatgccatttctcctgttcagattgaccctcttgctggaatgacatctcttagtataggtggttcagctgcccctcacacccagagtatgcagggttttcctccaaatttgggttctgcattcagtacccctcagtcaccagcaaaagcatttccacccctttcaacccccaatcagaccactgcattcagtggtattggaggactttcatcacagcttccagtaggtggtcttggcacaggcagcctgactggtataggaactggtgctcttggactccctgcagtgaataacgacccttttgtacagaggaaactgggcacctctggactgaatcagcctacattccagcagacggacttgtctcaggtgtggccagaggcaaaccagcactttagtaaagagatagatgatgaagcaaacagctatttccagcgaatatataatcatccaccacatccaaccatgtctgttgatgaggtattagaaatgctgcagagatttaaagactctactataaagagggaacgagaagtatttaactgtatgctaaggaacttgtttgaagaatatcgtttttttccccagtatcctgataaagagttacatataacagcctgcctatttggtggtataattgagaaaggactggtcacttacatggcactaggtctggctctacgatatgttcttgaagccttacgcaagccttttggatccaaaatgtattatttcgggattgctgcactagatagatttaaaaacagattgaaggactatccccagtattgtcagcatttggcttctatcagtcactttatgcaatttccacatcatttacaggagtatattgagtatggacagcagtctagagatcctcctgtgaaaatgcaaggctctatcacaacccctggaagtattgcactggctcaggcccaggctcaggcccaggttccagcaaaagctcctcttgctggtcaagttagcactatggtaaccacctcaacaactaccactgttgctaaaacggttacggtcaccaggccaactggagtcagctttaagaaagatgtgccaccttctattaatactacaaatatagatacgttgcttgtggccacagatcaaactgagagaattgtggagcccccagaaaatatccaggagaaaattgcttttattttcaataatctctcacagtcaaatatgacacaaaaggttgaagagctaaaggaaacggtgaaagaagaatttatgccttgggtttcacagtatctggttatgaagagagtcagtattgagccaaactttcatagcctgtattcaaacttccttgacacgctgaagaatcctgaatttaacaagatggttctgaatgagacctacagaaacattaaagtgctcctgacctctgataaagctgcagccaatttctcagatcgttctttgctgaagaacttgggacattggctaggaatgatcacattagctaaaaacaaacccatcttacacactgacttggatgtgaaatcattgctgctagaggcttatgttaaaggacaacaagaattgctctatgtagtgccctttgttgccaaagtcttagaatctagcattcgtagtgtggtttttaggccaccaaacccttggacaatggcaattatgaatgtattagctgagctacatcaggagcatgacttaaagttaaacttgaagtttgaaatcgaggttctctgcaagaaccttgcattagacatcaatgagctaaaacctggaaacctcctaaaggataaagatcgcctgaagaatttagatgagcaactctctgctccaaagaaagatgtcaagcagccagaagaactccctcccatcacaaccacaacaacttctactacaccagctaccaacaccacttgtacagccacggttccaccacagccacagtacagctaccacgacatcaatgtctattcccttgcgggcttggcaccacacattactctaaatccaacaattcccttgtttcaggcccatccacagttgaagcagtgtgtgcgtcaggcaattgaacgggctgtccaggagctggtccatcctgtggtggatcgatcaattaagattgccatgactacttgtgagcaaatagtcaggaaggattttgccctggattcggaggaatctcgaatgcgaatagcagctcatcacatgatgcgtaacttgacagctggaatggctatgattacatgcagggaacctttgctcatgagcatatctaccaacttaaaaaacagttttgcctcagcccttcgtactgcttccccacaacaaagagaaatgatggatcaggcagctgctcaattagctcaggacaattgtgagttggcttgctgttttattcagaagactgcagtagaaaaagcaggccctgagatggacaagagattagcaactgaatttgagctgagaaaacatgctaggcaagaaggacgcagatactgtgatcctgttgttttaacatatcaagctgaacggatgccagagcaaatcaggctgaaagttggtggtgtggacccaaagcagttggctgtttacgaagagtttgcacgcaatgttcctggcttcttacctacaaatgacttaagtcagcccacgggatttttagcccagcccatgaagcaagcttgggcaacagatgatgtagctcagatttatgataagtgtattacagaactggagcaacatctacatgccatcccaccaactttggccatgaaccctcaagctcaggctcttcgaagtctcttggaggttgtagttttatctcgaaactctcgggatgccatagctgctcttggattgctccaaaaggctgtagagggcttactagatgccacaagtggtgctgatgctgaccttctgctgcgctacagggaatgccacctcttggtcctaaaagctctgcaggatggccgggcatatgggtctccatggtgcaacaaacagatcacaaggtgcctaattgaatgtcgagatgaatataaatataatgtggaggctgtggagctgctaattcgcaatcatttggttaatatgcagcagtatgatcttcacctagcgcagtcaatggagaatggcttaaactacatggctgtggcatttgctatgcagttagtaaaaatcctgctggtggatgaaaggagtgttgctcatgttactgaggcagatctgttccacaccattgaaaccctcatgaggattaatgctcattccagaggcaatgctccagaaggattgccccagctgatggaagtagtgcgatccaactatgaagcaatgattgatcgtgctcatggaggcccaaactttatgatgcattctgggatctctcaagcctcagagtatgatgaccctccaggcctgagggagaaggcagagtatcttctgagggaatgggtgaatctctaccattcagcagcagctggccgcgacagtaccaaagctttctctgcatttgttggacagatgcaccagcaaggaatactgaagaccgatgatctcataacaaggttctttcgtctgtgtactgaaatgtgtgttgaaatcagttaccgtgctcaggctgagcagcagcacaatcctgctgccaatcccaccatgatccgagccaagtgctatcacaacctggatgcctttgttcgactcattgcactgctcgtgaaacactcaggggaggccaccaacactgtcacaaagattaatctgctgaacaaggtccttggtatagtagtgggagttctccttcaggatcatgatgttcgtcagagtgaatttcagcaacttccctaccatcgaatttttatcatgcttctcttggaactcaatgcacctgagcatgtgttggaaaccattaatttccagacacttacagctttctgcaatacattccacatcttgaggcctaccaaagctcctggctttgtatatgcctggcttgaactgatttcccatcggatatttattgcaagaatgctggcacatacgccacagcagaaggggtggcctatgtatgcacagctactgattgatttattcaaatatttagcgcctttccttagaaatgtggaactcaccaaacctatgcaaatcctctacaagggcactttaagagtgctgctggttcttttgcatgatttcccagagttcctttgtgattaccattatgggttctgtgatgtgatcccacctaattgtatccagttaagaaatttgatcctgagtgcctttccaagaaacatgaggctccccgacccattcactcctaatctaaaggtggacatgttgagtgaaattaacattgctccccggattctcaccaatttcactggagtaatgccacctcagttcaaaaaggatttggattcctatcttaaaactcgatcaccagtcactttcctgtctgatctgcgcagcaacctacaggtatccaatgaacctgggaatcgctacaacctccagctcatcaatgcactggtgctctatgtcgggactcaggccattgcgcacatccacaacaagggcagcacaccttcaatgagcaccatcactcactcagcacacatggatatcttccagaatttggctgtggacttggacactgagggtcgctatctctttttgaatgcaattgcaaatcagctccggtacccaaatagccacactcactacttcagttgcaccatgctgtacctttttgcagaggccaatacggaagccatccaagaacagatcacaagagttctcttggaacggttgattgtaaataggccacatccttggggtcttcttattaccttcattgagctgattaaaaacccagcgtttaagttctggaaccatgaatttgtacactgtgccccagaaatcgaaaataatggaagggacaggtgccagttagacgaaactgcatctctgttgtacgtgtcagtctagaggtctcactgcaccgagttcataaactgactgaagaatcctttcagctcttcctgactttcccagccctttggtttgtgggtatctgccccaactactgttgggatcagcctcctgtcttatgtgggcacgttccaaagtttaaatgcatttttttgactcttggccaaaatttagaagatgctgtgaatatcattttgaacttgtgtaaatacatgaaagagaaaacctttgtctggaacttcttggctttgtgcaagctgtgtccaaggcaagtacataaactggtaccttgtaatgaagaggcagctgatgccatgcacttgtctgagggcatagctccatgtcttctgacattcctggtgtcccaaagaatagcaaaaagccagtttgaatattatgtaacttatttttttaatgtggacaggggaccttgaaaatcactaagttattaaaaatgtggatgtgctagaattggatatgtccaggaacatgggaagggctcactattggaatcccatgagtttccattttgtctctacccaaacgtattccaaagctgactgcatttgtaccatcttatttcttttggggattatacacctcagccgcctgagatgggggtcagctctttatataaagggaaaccagaccaggcctaaagcccaccccctaccctcacccccacaatcctctcctgaaacttaaaaacagtgggaatataggaaagggaaccaaatctcattaattaattgttctcccccattaccccactgaatgaatggccatacaggctaagctgaataatgacaaagttgaaaggaccaatacagccccttttataaggattttgaatgttttgcaaatgtattggtccctgtgttgtattttgtagccttttcctgggcttcagctcccctacttcttgtatgtgtatgcatactgtagctaaccattaaagtcatgacacaca

SEQ ID NO: 355671 - DNA, 10600 bp, Homo sapiens
caggcgctgttggctgtctgcaagcttgtgcagtgagtgtttctcaggagctatcagaaactatcctcaccatggtagccaattgcagtaatgttatgaataaggccagacaaccaccacctggagttatgccaaaaggacgtcctcctagtgctagcagcttagatgccatttctcctgttcagattgaccctcttgctggaatgacatctcttagtataggtggttcagctgcccctcacacccagagtatgcagggttttcctccaaatttgggttctgcattcagtacccctcagtcaccagcaaaagcatttccacccctttcaacccccaatcagaccactgcattcagtggtattggaggactttcatcacagcttccagtaggtggtcttggcacaggcagcctgactggtataggaactggtgctcttggactccctgcagtgaataacgacccttttgtacagaggaaactgggcacctctggactgaatcagcctacattccagcagacggacttgtctcaggtgtggccagaggcaaaccagcactttagtaaagagatagatgatgaagcaaacagctatttccagcgaatatataatcatccaccacatccaaccatgtctgttgatgaggtattagaaatgctgcagagatttaaagactctactataaagagggaacgagaagtatttaactgtatgctaaggaacttgtttgaagaatatcgtttttttccccagtatcctgataaagagttacatataacagcctgcctatttggtggtataattgagaaaggactggtcacttacatggcactaggtctggctctacgatatgttcttgaagccttacgcaagccttttggatccaaaatgtattatttcgggattgctgcactagatagatttaaaaacagattgaaggactatccccagtattgtcagcatttggcttctatcagtcactttatgcaatttccacatcatttacaggagtatattgagtatggacagcagtctagagatcctcctgtgaaaatgcaaggctctatcacaacccctggaagtattgcactggctcaggcccaggctcaggcccaggttccagcaaaagctcctcttgctggtcaagttagcactatggtaaccacctcaacaactaccactgttgctaaaacggttacggtcaccaggccaactggagtcagctttaagaaagatgtgccaccttctattaatactacaaatatagatacgttgcttgtggccacagatcaaactgagagaattgtggagcccccagaaaatatccaggagaaaattgcttttattttcaataatctctcacagtcaaatatgacacaaaaggttgaagagctaaaggaaacggtgaaagaagaatttatgccttgggtttcacagtatctggttatgaagagagtcagtattgagccaaactttcatagcctgtattcaaacttccttgacacgctgaagaatcctgaatttaacaagatggttctgaatgagacctacagaaacattaaagtgctcctgacctctgataaagctgcagccaatttctcagatcgttctttgctgaagaacttgggacattggctaggaatgatcacattagctaaaaacaaacccatcttacacactgacttggatgtgaaatcattgctgctagaggcttatgttaaaggacaacaagaattgctctatgtagtgccctttgttgccaaagtcttagaatctagcattcgtagtgtggtttttaggccaccaaacccttggacaatggcaattatgaatgtattagctgagctacatcaggagcatgacttaaagttaaacttgaagtttgaaatcgaggttctctgcaagaaccttgcattagacatcaatgagctaaaacctggaaacctcctaaaggataaagatcgcctgaagaatttagatgagcaactctctgctccaaagaaagatgtcaagcagccagaagaactccctcccatcacaaccacaacaacttctactacaccagctaccaacaccacttgtacagccacggttccaccacagccacagtacagctaccacgacatcaatgtctattcccttgcgggcttggcaccacacattactctaaatccaacaattcccttgtttcaggcccatccacagttgaagcagtgtgtgcgtcaggcaattgaacgggctgtccaggagctggtccatcctgtggtggatcgatcaattaagattgccatgactacttgtgagcaaatagtcaggaaggattttgccctggattcggaggaatctcgaatgcgaatagcagctcatcacatgatgcgtaacttgacagctggaatggctatgattacatgcagggaacctttgctcatgagcatatctaccaacttaaaaaacagttttgcctcagcccttcgtactgcttccccacaacaaagagaaatgatggatcaggcagctgctcaattagctcaggacaattgtgagttggcttgctgttttattcagaagactgcagtagaaaaagcaggccctgagatggacaagagattagcaactgaatttgagctgagaaaacatgctaggcaagaaggacgcagatactgtgatcctgttgttttaacatatcaagctgaacggatgccagagcaaatcaggctgaaagttggtggtgtggacccaaagcagttggctgtttacgaagagtttgcacgcaatgttcctggcttcttacctacaaatgacttaagtcagcccacgggatttttagcccagcccatgaagcaagcttgggcaacagatgatgtagctcagatttatgataagtgtattacagaactggagcaacatctacatgccatcccaccaactttggccatgaaccctcaagctcaggctcttcgaagtctcttggaggttgtagttttatctcgaaactctcgggatgccatagctgctcttggattgctccaaaaggctgtagagggcttactagatgccacaagtggtgctgatgctgaccttctgctgcgctacagggaatgccacctcttggtcctaaaagctctgcaggatggccgggcatatgggtctccatggtgcaacaaacagatcacaaggtgcctaattgaatgtcgagatgaatataaatataatgtggaggctgtggagctgctaattcgcaatcatttggttaatatgcagcagtatgatcttcacctagcgcagtcaatggagaatggcttaaactacatggctgtggcatttgctatgcagttagtaaaaatcctgctggtggatgaaaggagtgttgctcatgttactgaggcagatctgttccacaccattgaaaccctcatgaggattaatgctcattccagaggcaatgctccagaaggattgccccagctgatggaagtagtgcgatccaactatgaagcaatgattgatcgtgctcatggaggcccaaactttatgatgcattctgggatctctcaagcctcagagtatgatgaccctccaggcctgagggagaaggcagagtatcttctgagggaatgggtgaatctctaccattcagcagcagctggccgcgacagtaccaaagctttctctgcatttgttggacagatgcaccagcaaggaatactgaagaccgatgatctcataacaaggttctttcgtctgtgtactgaaatgtgtgttgaaatcagttaccgtgctcaggctgagcagcagcacaatcctgctgccaatcccaccatgatccgagccaagtgctatcacaacctggatgcctttgttcgactcattgcactgctcgtgaaacactcaggggaggccaccaacactgtcacaaagattaatctgctgaacaaggtccttggtatagtagtgggagttctccttcaggatcatgatgttcgtcagagtgaatttcagcaacttccctaccatcgaatttttatcatgcttctcttggaactcaatgcacctgagcatgtgttggaaaccattaatttccagacacttacagctttctgcaatacattccacatcttgaggcctaccaaagctcctggctttgtatatgcctggcttgaactgatttcccatcggatatttattgcaagaatgctggcacatacgccacagcagaaggggtggcctatgtatgcacagctactgattgatttattcaaatatttagcgcctttccttagaaatgtggaactcaccaaacctatgcaaatcctctacaagggcactttaagagtgctgctggttcttttgcatgatttcccagagttcctttgtgattaccattatgggttctgtgatgtgatcccacctaattgtatccagttaagaaatttgatcctgagtgcctttccaagaaacatgaggctccccgacccattcactcctaatctaaaggtggacatgttgagtgaaattaacattgctccccggattctcaccaatttcactggagtaatgccacctcagttcaaaaaggatttggattcctatcttaaaactcgatcaccagtctttcaaacagttccatgcaaacatcacatttttcaaatggaaaaacttccaactggaccagaagttcatactgctaatgtacttttcattgaaacaatttttagtaagtacaaatacatggcattaaggttcagaacctaatataggcctgacaatcaagtccttattttctggaggaaggcctcaagtccaataaatttccagtaacaatgtttttacaaatcaatttaataataaggggttttattttccttcatgtttttgtttttagcattctagtcttaagactagattagaagttagctcaattccccaaaaggcaaatggtttttctttgcagtatgaaataatccacaaaaaaacctcttccccaaactaattcctaataaccaatctgtgcttaagatgtatctttttctatacaatgtaaacggtaacttaggtaaaatgtacccatgaacattaaaactagtcattagaaagacttaactagctttataatttaagttttaaaacataaatatttgcagcttgatcttctgttgacaatgattgtcggagcctagaattcaacatttacaatgtccattcatgcacacaaaacacataccattatcacacaacttactcctcatgtcttaagagaagaatcttccgcttctttaaatctttggcctcccagtcaatgccatgttcaaacaacttttaactcaaacttcactctcagatttttaacaagctttccacccacacgttattaatgcttttcctaatctttcatgttgtactgccaaatctgaaacctgcctcaaagagatcatcagatttttaaaaaatgaaatataaagtggttatttcaaaacggagtatgggaggtcagaattcaagattccctaatgggatcatattttattttactgcaatgaatgactgctatcagtaagaaaaatcctctattggattctttcacactctttggcaactggccaaagaacctcaaaaatgttttggagtacatgcgctttttcatacaaagtgccctcataggaacaccaggatagctgcaattcatttgaggcctcacctatagaaagaggctatcacacagacagccaggacacccaccagtttgtggagatccctgagaaagtatgattttaaaaaatctggactgtacttgtttcaccagcctttttcactgtataggaaagttgcagctggtctaccagcactcatactacctttcttatcctaggtttgccgcgtaatagctatggctttccaatctcccaagtgatattctataaacttgaaggaataattatatctcctaattccaggtttgtagtttccaaatatcacttacagttctctttattgtaaagtagccatatgaacaccaaccatctatgagaaaaggttctcctcaaacatttaacactctacaattaggaattagctgtaccaaaacacatgaaaaaaaaaactgatggttggtatttgagataaaaatttgttcgacatgcaacctagtggtttatttattgcaaaatcaaaactgatagctgtgaatttactacatccattcgaaataaataagttatatgaaatacagattctggcatagatataagatgtaaaaatcaaaatcaatagattgaacctgcatatttcatttgctcacaaacttgcacacactattattctgcaaaatagacaactgcagcaaagaaaaagaaaactgcccttttgcaaacaagtctaaaagcatccctccaaagacgccaaaaaataaacatgcatatatatatgtataaagtgttactgttcaacacaaatgctatttctaggaaaaatttaactgcataggcaaaaaaacataaacagaaaccaaaagaaaaaaaaaatgtgcaacatcttaagccattaaagcaccaaaataaaaaacacaccaaaatcactgtttttatgacgattaacatacacaaataaaaaatattgatcaaaactcaggaagtaaatacttggactgatagactgtctattgctgggggaatttttcttcaatttaaatgtcttctcatctctaaaaaaaaatcttaaagtgctaactttatataaagcaggcaaattcttcaagtaatttgctattaagtaagccaattttttatagatctcaataaaaaacgaagaataaactaaagtgaaacaggaagataagacatggagaaaaaaatgacaagttgtagctggacaaagcaataaaatgctgttataccatcttagccttctaatttcaattaaacacataagctaacagatacctgctggtttagtacactctcttagatttactaaaatttacacaacaatcaacaggtatacataaaaagtcctaaggaaaagaatgccacttaaaaatcaacatcagatactaattaaagcaatcttaaaaggttgtctgctatcataaatgaatataaaatgtaatataccttacaaactaagaactgaaaccttgttcaaagtttcattactcctgcccttgagctgcttcttcaagatagtaacacattaaccaaatggcgattgaggtgtttgctgtaatcttttccctttctgaaagaacgatcacagaagatacaaacaaaatctcccttagccgctttgactgccaaggcttcctttgcattttttctgctagattcttgtggaactggccgagccccatgcaatccagaatcatcactaccctctgacatgttgtcacttaggtcacttccttcatggctgtggatgccttcatcttcatcaatttcctgagactcatttgctgccattgtagcaggaggtgatgccagtgcagttttggacactgcttcacgttcttctactgctgaagggggaagcattggtgaaactggttcttcaactgttgaatttataccagtgagattctctcttgtgttctgatcagtgtccattttcatttcacaaactatactgtcagtctgatgtttaccatttaaagtttcaccctctggcgtattcaagttttgtccagaggatgaaatatgggtagattcgttgatattagcagcaagaccaggtaggctctcatctgcctcttctgctcctactttctgaagaggggcttctttatttccttcacctgtgttgagtaatttttggtctcctgatgcctcttctcttaaattttcctttggcagtggtggtgatggtggtgagagatcctctgtgcttacactttcctttagaagccagctatctttaacaggcactaagccaacttcaataaggacttgctccttccgtgccctttcactctgcatgttagacttttcctttttatcttttcggagaggaggctttttggaaattggctccatgtgaaggggaggctctctgggaggaggtagctccctctgagcaggctccttctgaaccacccccatgggaggagacaactccatctgaacaggctccttctggaccacctctatgggaggagacagctctatcttaacaggttccttctggaccacctccatgggaggagacagctctatctgaacaggctccttctggaccacctccatgggaggagacagctccatctgaacaggctccttctggaccacctgcatgggagcagattctacctgggcaacctccatctgagcaggttccatgggagcaggccccatttgggcaacctccgtctgagcagtctccatgggaggaggcagctccatgtgagcaagtacaatttgggcacccaccatctgagcaggctccacgggaggcagcagctccttctgagcaggcccctcctgaaccacctccatctgaacaggctcgtcaggagcaggccgtatctgggcaccctccatctgagcatgctccatgggaggtggcggctccacctgaacgggccccttctgaaccgcctctgtgggagcaggccccatctgaggagggtccatctgagcagatcccttctcaacaggttccttctgaggaggcttactgcttttcttacttgatttatttttcagagttttcttctttgtactttttttcatgcaagtattttgctttttattctcctccactttgctgtcaccctttggcacttcctgactattatttttggatttgctttctaccttctttttcttttttgttgaagattcctcatcattcacaggaccatgtaaagaatggctgtcaacttccagcttccttttgcttttcttagttttactgaatttttctgaattgcttcctgtatgcacatccatctctttcacctctgttactgattttcgagttctggtagtcacctggatcactgacacattattagaaggctttttctcttttgagacatctcttttctctgctttgacggacttttcatttttctttccagccacatccccttttatttttgtttgttctatttctgttttttcattggtaatattatcaggcaagtcagcctctcgttttttggttttctttagtttcacttttgagacatccattgttttattaggacaagtaggatgcttagatttgaagtgatactgtagattacacttcttggaagctgcatagtcacatacagggcaattgaactgccgtgggttcacatgtagctctacatgttttttgaagttgcttctatctgctgttttgtaatcacagtgtgggcaattaagaggtttaggcccattgtgaacctgtcttgcatggcgggttacttcatgttgattagaggccacataactgcactgatcacatttaaatggcttctcacctgaatgagtacgcatatgtctagttagatgagtcttctgagaacttgagtaaggacaaagttcacatttatatgggcgttctcctgtatgagttctaacatgctgaacataattgttttttctgtctgaaaaatagttgcattttccacatgtgtatactttccttggaaaatggtttcttaaatgtttcctccagtgatactcgctcactgttgtgtatgtgcaaatgatacacttgtagactcgctcattatccccagctctggtgtggtgtttcaggtgtgctgtatagtgatcatatcgattagtattgtagccgcagcggtcacagcgaatggggcccttgagaaatctccctcttctgcagtggaagagagattccctgcttttgcctgcttctctgcactctcttccaacaaaaaatttcttagcactgtgaactctgatgtgatgcacaaactgttcttcagattctgcttcatattggcatggcttacagcgaaagggtttggtcttcgagctcttgcctttgtcctccgctccaggtgtttcagggggaagatctttatttgaactgtaaatatctggagcacctgatgcctcaaatacaggctgaggttctacgacgctgagttccaaacttctcagttccatgttttccagtccatgaggttcaccttttatatcagcagactcttcaagtccttctccttcttcactatctgaaaagttgttatccccaaccggcatcagttctgccatctgtctttcttcaccgaccaggtaatcacagcagctgccatttacttccccagttaaggccacatttgccagcataataagctgaggtgcggccagttcagctttggaaaggtcatgcaagtcatacatgtcgttaggcagggccattccaatgttgccactgctggtaaacagccctcctcctccagaagactgccccattacctgggtggccataactgtattcggccttcctcggtgaggaggggcgggcgaccctgagtcgccgctccttctccgactacttttctttgttgctggagtttcgggggagaggtgggggagggtggtaaagttgggtgctggggccgtcgtggaccaagaaggcctcgtgccgaattc

SEQ ID NO: 355672 - DNA, 5271 bp, Homo sapiens
caggcgctgttggctgtctgcaagcttgtgcagtgagtgtttctcaggagctatcagaaactatcctcaccatggtagccaattgcagtaatgttatgaataaggccagacaaccaccacctggagttatgccaaaaggacgtcctcctagtgctagcagcttagatgccatttctcctgttcagattgaccctcttgctggaatgacatctcttagtataggtggttcagctgcccctcacacccagagtatgcagggttttcctccaaatttgggttctgcattcagtacccctcagtcaccagcaaaagcatttccacccctttcaacccccaatcagaccactgcattcagtggtattggaggactttcatcacagcttccagtaggtggtcttggcacaggcagcctgactggtataggaactggtgctcttggactccctgcagtgaataacgacccttttgtacagaggaaactgggcacctctggactgaatcagcctacattccagcagacggacttgtctcaggtgtggccagaggcaaaccagcactttagtaaagagatagatgatgaagcaaacagctatttccagcgaatatataatcatccaccacatccaaccatgtctgttgatgaggtattagaaatgctgcagagatttaaagactctactataaagagggaacgagaagtatttaactgtatgctaaggaacttgtttgaagaatatcgtttttttccccagtatcctgataaagagttacatataacagcctgcctatttggtggtataattgagaaaggactggtcacttacatggcactaggtctggctctacgatatgttcttgaagccttacgcaagccttttggatccaaaatgtattatttcgggattgctgcactagatagatttaaaaacagattgaaggactatccccagtattgtcagcatttggcttctatcagtcactttatgcaatttccacatcatttacaggagtatattgagtatggacagcagtctagagatcctcctgtgaaaatgcaaggctctatcacaacccctggaagtattgcactggctcaggcccaggctcaggcccaggttccagcaaaagctcctcttgctggtcaagttagcactatggtaaccacctcaacaactaccactgttgctaaaacggttacggtcaccaggccaactggagtcagctttaagaaagatgtgccaccttctattaatactacaaatatagatacgttgcttgtggccacagatcaaactgagagaattgtggagcccccagaaaatatccaggagaaaattgcttttattttcaataatctctcacagtcaaatatgacacaaaaggttgaagagctaaaggaaacggtgaaagaagaatttatgccttgggtttcacagtatctggttatgaagagagtcagtattgagccaaactttcatagcctgtattcaaacttccttgacacgctgaagaatcctgaatttaacaagatggttctgaatgagacctacagaaacattaaagtgctcctgacctctgataaagctgcagccaatttctcagatcgttctttgctgaagaacttgggacattggctaggaatgatcacattagctaaaaacaaacccatcttacacactgacttggatgtgaaatcattgctgctagaggcttatgttaaaggacaacaagaattgctctatgtagtgccctttgttgccaaagtcttagaatctagcattcgtagtgtggtttttaggccaccaaacccttggacaatggcaattatgaatgtattagctgagctacatcaggagcatgacttaaagttaaacttgaagtttgaaatcgaggttctctgcaagaaccttgcattagacatcaatgagctaaaacctggaaacctcctaaaggataaagatcgcctgaagaatttagatgagcaactctctgctccaaagaaagatgtcaagcagccagaagaactccctcccatcacaaccacaacaacttctactacaccagctaccaacaccacttgtacagccacggttccaccacagccacagtacagctaccacgacatcaatgtctattcccttgcgggcttggcaccacacattactctaaatccaacaattcccttgtttcaggcccatccacagttgaagcagtgtgtgcgtcaggcaattgaacgggctgtccaggagctggtccatcctgtggtggatcgatcaattaagattgccatgactacttgtgagcaaatagtcaggaaggattttgccctggattcggaggaatctcgaatgcgaatagcagctcatcacatgatgcgtaacttgacagctggaatggctatgattacatgcagggaacctttgctcatgagcatatctaccaacttaaaaaacagttttgcctcagcccttcgtactgcttccccacaacaaagagaaatgatggatcaggcagctgctcaattagctcaggacaattgtgagttggcttgctgttttattcagaagactgcagtagaaaaagcaggccctgagatggacaagagattagcaactgaatttgagctgagaaaacatgctaggcaagaaggacgcagatactgtgatcctgttgttttaacatatcaagctgaacggatgccagagcaaatcaggctgaaagttggtggtgtggacccaaagcagttggctgtttacgaagagtttgcacgcaatgttcctggcttcttacctacaaatgacttaagtcagcccacgggatttttagcccagcccatgaagcaagcttgggcaacagatgatgtagctcagatttatgataagtgtattacagaactggagcaacatctacatgccatcccaccaactttggccatgaaccctcaagctcaggctcttcgaagtctcttggaggttgtagttttatctcgaaactctcgggatgccatagctgctcttggattgctccaaaaggctgtagagggcttactagatgccacaagtggtgctgatgctgaccttctgctgcgctacagggaatgccacctcttggtcctaaaagctctgcaggatggccgggcatatgggtctccatggtgcaacaaacagatcacaaggtgcctaattgaatgtcgagatgaatataaatataatgtggaggctgtggagctgctaattcgcaatcatttggttaatatgcagcagtatgatcttcacctagcgcagtcaatggagaatggcttaaactacatggctgtggcatttgctatgcagttagtaaaaatcctgctggtggatgaaaggagtgttgctcatgttactgaggcagatctgttccacaccattgaaaccctcatgaggattaatgctcattccagaggcaatgctccagaaggattgccccagctgatggaagtagtgcgatccaactatgaagcaatgattgatcgtgctcatggaggcccaaactttatgatgcattctgggatctctcaagcctcagagtatgatgaccctccaggcctgagggagaaggcagagtatcttctgagggaatgggtgaatctctaccattcagcagcagctggccgcgacagtaccaaagctttctctgcatttgttggacagatgcaccagcaaggaatactgaagaccgatgatctcataacaaggttctttcgtctgtgtactgaaatgtgtgttgaaatcagttaccgtgctcaggctgagcagcagcacaatcctgctgccaatcccaccatgatccgagccaagtgctatcacaacctggatgcctttgttcgactcattgcactgctcgtgaaacactcaggggaggccaccaacactgtcacaaagattaatctgctgaacaaggtccttggtatagtagtgggagttctccttcaggatcatgatgttcgtcagagtgaatttcagcaacttccctaccatcgaatttttatcatgcttctcttggaactcaatgcacctgagcatgtgttggaaaccattaatttccagacacttacagctttctgcaatacattccacatcttgaggcctaccaaagctcctggctttgtatatgcctggcttgaactgatttcccatcggatatttattgcaagaatgctggcacatacgccacagcagaaggggtggcctatgtatgcacagctactgattgatttattcaaatatttagcgcctttccttagaaatgtggaactcaccaaacctatgcaaatcctctacaagggcactttaagagtgctgctggttcttttgcatgatttcccagagttcctttgtgattaccattatgggttctgtgatgtgatcccacctaattgtatccagttaagaaatttgatcctgagtgcctttccaagaaacatgaggctccccgacccattcactcctaatctaaaggtggacatgttgagtgaaattaacattgctccccggattctcaccaatttcactggagtaatgccacctcagttcaaaaaggatttggattcctatcttaaaactcgatcaccagtcactttcctgtctgatctgcgcagcaacctacaggtatccaatgaacctgggaatcgctacaacctccagctcatcaatgcactggtgctctatgtcgggactcaggccattgcgcacatccacaacaagggcagcacaccttcaatgagcaccatcactcactcagcacacatggatatcttccagaatttggctgtggacttggacactgagggtcgctatctctttttgaatgcaattgcaaatcagctccggtacccaaatagccacactcactacttcagttgcaccatgctgtacctttttgcagaggccaatacggaagccatccaagaacagatcacaaggtaagcgagcagcttattttttaaatgcttcaaaaggatctcctccctttcatcttttttttttcctctttatgctttcagtgttcagtgaaaatccgtttggttggttttttttttgtttttttgagacggagtgttgctctgtcactcagtctgcagtacagtggcgccatcttggctcactgcaacctccgcctcccaggttcaagcgattctcgtgccttagcctctcaagtagctgggattacaggcgcctgccaccacgcccagctaatttttgtattttagtagagacggggtttcactatgttggc

SEQ ID NO: 355673 - DNA, 1691 bp, Homo sapiens
aatccagctgtcttttattaagcaagacttagagatctgcaaaatgtagaaagacttagtgatgagtgtcaccagaaaatagttcatgtttcttacattagcacatagtgggtctgtttttaaaaatgaatatttttaaaatctaatttctaatgtggaaaattctgaaataaaacgcacagaaatgagaactctttggggtcccaagaaccactgctttaaaccaaagattaatttgaaagcctctgtcagaaacccaaaccctagccagttagaactgtcttcccatgttggcctttcagactaagtcctaagtcaaggtttcttaatttctaggtcgctatctctttttgaatgcaattgcaaatcagctccggtacccaaatagccacactcactacttcagttgcaccatgctgtacctttttgcagaggccaatacggaagccatccaagaacagatcacaagagttctcttggaacggttgattgtaaataggccacatccttggggtcttcttattaccttcattgagctgattaaaaacccagcgtttaagttctggaaccatgaatttgtacactgtgccccagaaatcgaaaagttattccagtcggtcgcacagtgctgcatgggacagaagcaggcccagcaagtaatggaagggacaggtgccagttagacgaaactgcatctctgttgtacgtgtcagtctagaggtctcactgcaccgagttcataaactgactgaagaatcctttcagctcttcctgactttcccagccctttggtttgtgggtatctgccccaactactgttgggatcagcctcctgtcttatgtgggcacgttccaaagtttaaatgcatttttttgactcttggccaaaatttagaagatgctgtgaatatcattttgaacttgtgtaaatacatgaaagagaaaacctttgtctggaacttcttggctttgtgcaagctgtgtccaaggcaagtacataaactggtaccttgtaatgaagaggcagctgatgccatgcacttgtctgagggcatagctccatgtcttctgacattcctggtgtcccaaagaatagcaaaaagccagtttgaatattatgtaacttatttttttaatgtggacaggggaccttgaaaatcactaagttattaaaaatgtggatgtgctagaattggatatgtccaggaacatgggaagggctcactattggaatcccatgagtttccattttgtctctacccaaacgtattccaaagctgactgcatttgtaccatcttatttcttttggggattatacacctcagccgcctgagatgggggtcagctctttatataaagggaaaccagaccaggcctaaagcccaccccctaccctcacccccacaatcctctcctgaaacttaaaaacagtgggaatataggaaagggaaccaaatctcattaattaattgttctcccccattaccccactgaatgaatggccatacaggctaagctgaataatgacaaagttgaaaggaccaatacagccccttttataaggattttgaatgttttgcaaatgtattggtccctgtgttgtattttgtagccttttcctgggcttcagctcccctacttcttgtatgtgtatgcatactgtagctaaccattaaagtcatgacacaca

SEQ ID NO: 355674 - DNA, 1537 bp, Homo sapiens
tttgtgtgcccatgtactctgggctttatgtggcttcctctcccccatcaccccttattctgaacagctgtgaggtagataccattatctgcactttatataaatacttagtcttctacggctaagagcagggttcaaacccaggtattccaacctgtgctatttggagtatattaatccacctgtctttactaaaggtgaaaacttttgcatgtggttcaatagtcagggagaagttagaaaaaaagtaatggaagaataatcatgaatttgtatgcttctatacattaactagctctttctccctttttccagagttctcttggaacggttgattgtaaataggccacatccttggggtcttcttattaccttcattgagctgattaaaaacccagcgtttaagttctggaaccatgaatttgtacactgtgccccagaaatcgaaaagttattccagtcggtcgcacagtgctgcatgggacagaagcaggcccagcaagtaatggaagggacaggtgccagttagacgaaactgcatctctgttgtacgtgtcagtctagaggtctcactgcaccgagttcataaactgactgaagaatcctttcagctcttcctgactttcccagccctttggtttgtgggtatctgccccaactactgttgggatcagcctcctgtcttatgtgggcacgttccaaagtttaaatgcatttttttgactcttggccaaaatttagaagatgctgtgaatatcattttgaacttgtgtaaatacatgaaagagaaaacctttgtctggaacttcttggctttgtgcaagctgtgtccaaggcaagtacataaactggtaccttgtaatgaagaggcagctgatgccatgcacttgtctgagggcatagctccatgtcttctgacattcctggtgtcccaaagaatagcaaaaagccagtttgaatattatgtaacttatttttttaatgtggacaggggaccttgaaaatcactaagttattaaaaatgtggatgtgctagaattggatatgtccaggaacatgggaagggctcactattggaatcccatgagtttccattttgtctctacccaaacgtattccaaagctgactgcatttgtaccatcttatttcttttggggattatacacctcagccgcctgagatgggggtcagctctttatataaagggaaaccagaccaggcctaaagcccaccccctaccctcacccccacaatcctctcctgaaacttaaaaacagtgggaatataggaaagggaaccaaatctcattaattaattgttctcccccattaccccactgaatgaatggccatacaggctaagctgaataatgacaaagttgaaaggaccaatacagccccttttataaggattttgaatgttttgcaaatgtattggtccctgtgttgtattttgtagccttttcctgggcttcagctcccctacttcttgtatgtgtatgcatactgtagctaaccattaaagtcatgacacaca

SEQ ID NO: 355675 - DNA, 4587 bp, Homo sapiens
caggcgctgttggctgtctgcaagcttgtgcagtgagtgtttctcaggagctatcagaaactatcctcaccatggtagccaattgcagtaatgttatgaataaggccagacaaccaccacctggagttatgccaaaaggacgtcctcctagtgctagcagcttagatgccatttctcctgttcagattgaccctcttgctggaatgacatctcttagtataggtggttcagctgcccctcacacccagagtatgcagggttttcctccaaatttgggttctgcattcagtacccctcagtcaccagcaaaagcatttccacccctttcaacccccaatcagaccactgcattcagtggtattggaggactttcatcacagcttccagtaggtggtcttggcacaggcagcctgactggtataggaactggtgctcttggactccctgcagtgaataacgacccttttgtacagaggaaactgggcacctctggactgaatcagcctacattccagcagacggacttgtctcaggtgtggccagaggcaaaccagcactttagtaaagagatagatgatgaagcaaacagctatttccagcgaatatataatcatccaccacatccaaccatgtctgttgatgaggtattagaaatgctgcagagatttaaagactctactataaagagggaacgagaagtatttaactgtatgctaaggaacttgtttgaagaatatcgtttttttccccagtatcctgataaagagttacatataacagcctgcctatttggtggtataattgagaaaggactggtcacttacatggcactaggtctggctctacgatatgttcttgaagccttacgcaagccttttggatccaaaatgtattatttcgggattgctgcactagatagatttaaaaacagattgaaggactatccccagtattgtcagcatttggcttctatcagtcactttatgcaatttccacatcatttacaggagtatattgagtatggacagcagtctagagatcctcctgtgaaaatgcaaggctctatcacaacccctggaagtattgcactggctcaggcccaggctcaggcccaggttccagcaaaagctcctcttgctggtcaagttagcactatggtaaccacctcaacaactaccactgttgctaaaacggttacggtcaccaggccaactggagtcagctttaagaaagatgtgccaccttctattaatactacaaatatagatacgttgcttgtggccacagatcaaactgagagaattgtggagcccccagaaaatatccaggagaaaattgcttttattttcaataatctctcacagtcaaatatgacacaaaaggttgaagagctaaaggaaacggtgaaagaagaatttatgccttgggtttcacagtatctggttatgaagagagtcagtattgagccaaactttcatagcctgtattcaaacttccttgacacgctgaagaatcctgaatttaacaagatggttctgaatgagacctacagaaacattaaagtgctcctgacctctgataaagctgcagccaatttctcagatcgttctttgctgaagaacttgggacattggctaggaatgatcacattagctaaaaacaaacccatcttacacactgacttggatgtgaaatcattgctgctagaggcttatgttaaaggacaacaagaattgctctatgtagtgccctttgttgccaaagtcttagaatctagcattcgtagtgtggtttttaggccaccaaacccttggacaatggcaattatgaatgtattagctgagctacatcaggagcatgacttaaagttaaacttgaagtttgaaatcgaggttctctgcaagaaccttgcattagacatcaatgagctaaaacctggaaacctcctaaaggataaagatcgcctgaagaatttagatgagcaactctctgctccaaagaaagatgtcaagcagccagaagaactccctcccatcacaaccacaacaacttctactacaccagctaccaacaccacttgtacagccacggttccaccacagccacagtacagctaccacgacatcaatgtctattcccttgcgggcttggcaccacacattactctaaatccaacaattcccttgtttcaggcccatccacagttgaagcagtgtgtgcgtcaggcaattgaacgggctgtccaggagctggtccatcctgtggtggatcgatcaattaagattgccatgactacttgtgagcaaatagtcaggaaggattttgccctggattcggaggaatctcgaatgcgaatagcagctcatcacatgatgcgtaacttgacagctggaatggctatgattacatgcagggaacctttgctcatgagcatatctaccaacttaaaaaacagttttgcctcagcccttcgtactgcttccccacaacaaagagaaatgatggatcaggcagctgctcaattagctcaggacaattgtgagttggcttgctgttttattcagaagactgcagtagaaaaagcaggccctgagatggacaagagattagcaactgaatttgagctgagaaaacatgctaggcaagaaggacgcagatactgtgatcctgttgttttaacatatcaagctgaacggatgccagagcaaatcaggctgaaagttggtggtgtggacccaaagcagttggctgtttacgaagagtttgcacgcaatgttcctggcttcttacctacaaatgacttaagtcagcccacgggatttttagcccagcccatgaagcaagcttgggcaacagatgatgtagctcagatttatgataagtgtattacagaactggagcaacatctacatgccatcccaccaactttggccatgaaccctcaagctcaggctcttcgaagtctcttggaggttgtagttttatctcgaaactctcgggatgccatagctgctcttggattgctccaaaaggctgtagagggcttactagatgccacaagtggtgctgatgctgaccttctgctgcgctacagggaatgccacctcttggtcctaaaagctctgcaggatggccgggcatatgggtctccatggtgcaacaaacagatcacaaggtgcctaattgaatgtcgagatgaatataaatataatgtggaggctgtggagctgctaattcgcaatcatttggttaatatgcagcagtatgatcttcacctagcgcagtcaatggagaatggcttaaactacatggctgtggcatttgctatgcagttagtaaaaatcctgctggtggatgaaaggagtgttgctcatgttactgaggcagatctgttccacaccattgaaaccctcatgaggattaatgctcattccagaggcaatgctccagaaggattgccccagctgatggaagtagtgcgatccaactatgaagcaatgattgatcgtgctcatggaggcccaaactttatgatgcattctgggatctctcaagcctcagagtatgatgaccctccaggcctgagggagaaggcagagtatcttctgagggaatgggtgaatctctaccattcagcagcagctggccgcgacagtaccaaagctttctctgcatttgttggacagatgcaccagcaaggaatactgaagaccgatgatctcataacaaggttctttcgtctgtgtactgaaatgtgtgttgaaatcagttaccgtgctcaggctgagcagcagcacaatcctgctgccaatcccaccatgatccgagccaagtgctatcacaacctggatgcctttgttcgactcattgcactgctcgtgaaacactcaggggaggccaccaacactgtcacaaagattaatctgctgaacaaggtccttggtatagtagtgggagttctccttcaggatcatgatgttcgtcagagtgaatttcagcaacttccctaccatcgaatttttatcatgcttctcttggaactcaatgcacctgagcatgtgttggaaaccattaatttccagacacttacagctttctgcaatacattccacatcttgaggcctaccaaagctcctggctttgtatatgcctggcttgaactgatttcccatcggatatttattgcaagaatgctggcacatacgccacagcagaaggggtggcctatgtatgcacagctactgattgatttattcaaatatttagcgcctttccttagaaatgtggaactcaccaaacctatgcaaatcctctacaagggcactttaagagtgctgctggttcttttgcatgatttcccagagttcctttgtgattaccattatgggttctgtgatgtgatcccacctaattgtatccagttaagaaatttgatcctgagtgcctttccaagaaacatgaggctccccgaccatgatcgagtcagtgacgagagaaaaaagttcgagtcagcataggaaagaaccacaaagaaggccattacaatcacgatcagtgaaacagaaaatgagacccaaatcagtagat

SEQ ID NO: 355676 - DNA, 1683 bp, Homo sapiens
tttgtgtgcccatgtactctgggctttatgtggcttcctctcccccatcaccccttattctgaacagctgtgaggtagataccattatctgcactttatataaatacttagtcttctacggctaagagcagggttcaaacccaggtattccaacctgtgctatttggagtatattaatccacctgtctttactaaaggtgaaaacttttgcatgtggttcaatagtcagggagaagttagaaaaaaagtaatggaagaataatcatgaatttgtatgcttctatacattaactagctctttctccctttttccagagttctcttggaacggttgattgtaaataggccacatccttggggtcttcttattaccttcattgagctgattaaaaacccagcgtttaagttctggaaccatgaatttgtacactgtgccccagaaatcgaaaagtgagttcaaagtaatttttaattgtctaggaatgagactggagactgaaaaccatctgtctctaggttgggtcagctgaatgagatgcaaggtattgttaggcctactctttaatcagagatttgtaactgtcttcatccttcaggttattccagtcggtcgcacagtgctgcatgggacagaagcaggcccagcaagtaatggaagggacaggtgccagttagacgaaactgcatctctgttgtacgtgtcagtctagaggtctcactgcaccgagttcataaactgactgaagaatcctttcagctcttcctgactttcccagccctttggtttgtgggtatctgccccaactactgttgggatcagcctcctgtcttatgtgggcacgttccaaagtttaaatgcatttttttgactcttggccaaaatttagaagatgctgtgaatatcattttgaacttgtgtaaatacatgaaagagaaaacctttgtctggaacttcttggctttgtgcaagctgtgtccaaggcaagtacataaactggtaccttgtaatgaagaggcagctgatgccatgcacttgtctgagggcatagctccatgtcttctgacattcctggtgtcccaaagaatagcaaaaagccagtttgaatattatgtaacttatttttttaatgtggacaggggaccttgaaaatcactaagttattaaaaatgtggatgtgctagaattggatatgtccaggaacatgggaagggctcactattggaatcccatgagtttccattttgtctctacccaaacgtattccaaagctgactgcatttgtaccatcttatttcttttggggattatacacctcagccgcctgagatgggggtcagctctttatataaagggaaaccagaccaggcctaaagcccaccccctaccctcacccccacaatcctctcctgaaacttaaaaacagtgggaatataggaaagggaaccaaatctcattaattaattgttctcccccattaccccactgaatgaatggccatacaggctaagctgaataatgacaaagttgaaaggaccaatacagccccttttataaggattttgaatgttttgcaaatgtattggtccctgtgttgtattttgtagccttttcctgggcttcagctcccctacttcttgtatgtgtatgcatactgtagctaaccattaaagtcatgacacaca

SEQ ID NO: 355677 - DNA, 2752 bp, Homo sapiens
caggcgctgttggctgtctgcaagcttgtgcagtgagtgtttctcaggagctatcagaaactatcctcaccatggtagccaattgcagtaatgttatgaataaggccagacaaccaccacctggagttatgccaaaaggacgtcctcctagtgctagcagcttagatgccatttctcctgttcagattgaccctcttgctggaatgacatctcttagtataggtggttcagctgcccctcacacccagagtatgcagggttttcctccaaatttgggttctgcattcagtacccctcagtcaccagcaaaagcatttccacccctttcaacccccaatcagaccactgcattcagtggtattggaggactttcatcacagcttccagtaggtggtcttggcacaggcagcctgactggtataggaactggtgctcttggactccctgcagtgaataacgacccttttgtacagaggaaactgggcacctctggactgaatcagcctacattccagcagacggacttgtctcaggtgtggccagaggcaaaccagcactttagtaaagagatagatgatgaagcaaacagctatttccagcgaatatataatcatccaccacatccaaccatgtctgttgatgaggtattagaaatgctgcagagatttaaagactctactataaagagggaacgagaagtatttaactgtatgctaaggaacttgtttgaagaatatcgtttttttccccagtatcctgataaagagttacatataacagcctgcctatttggtggtataattgagaaaggactggtcacttacatggcactaggtctggctctacgatatgttcttgaagccttacgcaagccttttggatccaaaatgtattatttcgggattgctgcactagatagatttaaaaacagattgaaggactatccccagtattgtcagcatttggcttctatcagtcactttatgcaatttccacatcatttacaggagtatattgagtatggacagcagtctagagatcctcctgtgaaaatgcaaggctctatcacaacccctggaagtattgcactggctcaggcccaggctcaggcccaggttccagcaaaagctcctcttgctggtcaagttagcactatggtaaccacctcaacaactaccactgttgctaaaacggttacggtcaccaggccaactggagtcagctttaagaaagatgtgccaccttctattaatactacaaatatagatacgttgcttgtggccacagatcaaactgagagaattgtggagcccccagaaaatatccaggagaaaattgcttttattttcaataatctctcacagtcaaatatgacacaaaaggttgaagagctaaaggaaacggtgaaagaagaatttatgccttgggtttcacagtatctggttatgaagagagtcagtattgagccaaactttcatagcctgtattcaaacttccttgacacgctgaagaatcctgaatttaacaagatggttctgaatgagacctacagaaacattaaagtgctcctgacctctgataaagctgcagccaatttctcagatcgttctttgctgaagaacttgggacattggctaggaatgatcacattagctaaaaacaaacccatcttacacactgacttggatgtgaaatcattgctgctagaggcttatgttaaaggacaacaagaattgctctatgtagtgccctttgttgccaaagtcttagaatctagcattcgtagtgtggtttttaggccaccaaacccttggacaatggcaattatgaatgtattagctgagctacatcaggagcatgacttaaagttaaacttgaagtttgaaatcgaggttctctgcaagaaccttgcattagacatcaatgagctaaaacctggaaacctcctaaaggataaagatcgcctgaagaatttagatgagcaactctctgctccaaagaaagatgtcaagcagccagaagaactccctcccatcacaaccacaacaacttctactacaccagctaccaacaccacttgtacagccacggttccaccacagccacagtacagctaccacgacatcaatgtctattcccttgcgggcttggcaccacacattactctaaatccaacaattcccttgtttcaggcccatccacagttgaagcagtgtgtgcgtcaggcaattgaacgggctgtccaggagctggtccatcctgtggtggatcgatcaattaagattgccatgactacttgtgagcaaatagtcaggaaggattttgccctggattcggaggaatctcgaatgcgaatagcagctcatcacatgatgcgtaacttgacagctggaatggctatgattacatgcagggaacctttgctcatgagcatatctaccaacttaaaaaacagttttgcctcagcccttcgtgtaagttggctatttccttggtataggtacaaaacgtattactgcttgtctgtaataatttttttctttgtctatatatggcactgggcgttaccacttattcttaataatcaccatatttgtttgatgtcttccatcattttagattgtaattctgtgaggcaaagcatcatgtctgtgtgtttttttttttttctgttatattctcaacccgatgtttgacagatagtagatacccaaatatttgttggtttaaataaattaagatttaaaaagga

SEQ ID NO: 355678 - DNA, 264 bp, Homo sapiens
cttgctgttttattcagaagactgcagtagaaaaagcaggccctgagatggacaagagattagcaactgtaagtgtttagaatttgccttttaagattttcttttttaatttagggaagtgccttataacaagaacctcagtgactttttttgtttgcaggaatttgagctgagaaaacatgctaggcaagaaggacgcagatactgtgatcctgttgttttaacatatcaagctgaacggatgccagagcaaatcaggctgaa

SEQ ID NO: 355679 - DNA, 551 bp, Homo sapiens
ggctcgttttaatctatttttaagtaaaatatagcctttaaaaatcagaggtagtgtattttctgatgtaaatcctgtgaaaatcataagtattttctccttctatttttgttttcttcactttgacattttcttcaaataagttattcataggtaagatggaaaaaaatgacctagattagcatttggacaaaaacattttgttagtgatgcttctgttctgacatgaaatgatggtagaataattttgttggcagattgaaggactatccccagtattgtcagcatttggcttctatcagtcactttatgcaatttccacatcatttacaggaggtaagtgccctctgtaactaaaacccaaatagctatgtagtatttggagggtttaatattttggcttttttttgtagacttgatagtaatggcattaagatttcttaatgattggcatgatataggtacacatatcttttgttgaggttgctcattttgtggccttacaagagaacatgaaaaaataatcattcttggattatcttttctaagta

SEQ ID NO: 355680 - DNA, 367 bp, Homo sapiens
tgaatctctaccattcagcagcagctggccgcgacagtaccaaagctttctctgcatttgttggacaggtagagcttttggaaagaaaggtgctttttattcaacataagtagggtgtgatgcctccaatattaaagctcagtattgcgtacatgtggtcagacagttacctccatactcatgcaaacccaaactgtcatcattatatggttaaattacagcctgttttctcatggttgatcactaagcagtaaaggcaacattccctcccaccgttggttctgtatattccatttcagttgtcacagctacaaagtacaatgggtcagataatgaataataaaactaccaaatgtatttttactag

SEQ ID NO: 355681 - DNA, 6179 bp, Homo sapiens
caggcgctgttggctgtctgcaagcttgtgcagtgagtgtttctcaggagctatcagaaactatcctcaccatggtagccaattgcagtaatgttatgaataaggccagacaaccaccacctggagttatgccaaaaggacgtcctcctagtgctagcagcttagatgccatttctcctgttcagattgaccctcttgctggaatgacatctcttagtataggtggttcagctgcccctcacacccagagtatgcagggttttcctccaaatttgggttctgcattcagtacccctcagtcaccagcaaaagcatttccacccctttcaacccccaatcagaccactgcattcagtggtattggaggactttcatcacagcttccagtaggtggtcttggcacaggcagcctgactggtataggaactggtgctcttggactccctgcagtgaataacgacccttttgtacagaggaaactgggcacctctggactgaatcagcctacattccagcagacggacttgtctcaggtgtggccagaggcaaaccagcactttagtaaagagatagatgatgaagcaaacagctatttccagcgaatatataatcatccaccacatccaaccatgtctgttgatgaggtattagaaatgctgcagagatttaaagactctactataaagagggaacgagaagtatttaactgtatgctaaggaacttgtttgaagaatatcgtttttttccccagtatcctgataaagagttacatataacagcctgcctatttggtggtataattgagaaaggactggtcacttacatggcactaggtctggctctacgatatgttcttgaagccttacgcaagccttttggatccaaaatgtattatttcgggattgctgcactagatagatttaaaaacagattgaaggactatccccagtattgtcagcatttggcttctatcagtcactttatgcaatttccacatcatttacaggagtatattgagtatggacagcagtctagagatcctcctgtgaaaatgcaaggctctatcacaacccctggaagtattgcactggctcaggcccaggctcaggcccaggttccagcaaaagctcctcttgctggtcaagttagcactatggtaaccacctcaacaactaccactgttgctaaaacggttacggtcaccaggccaactggagtcagctttaagaaagatgtgccaccttctattaatactacaaatatagatacgttgcttgtggccacagatcaaactgagagaattgtggagcccccagaaaatatccaggagaaaattgcttttattttcaataatctctcacagtcaaatatgacacaaaaggttgaagagctaaaggaaacggtgaaagaagaatttatgccttgggtttcacagtatctggttatgaagagagtcagtattgagccaaactttcatagcctgtattcaaacttccttgacacgctgaagaatcctgaatttaacaagatggttctgaatgagacctacagaaacattaaagtgctcctgacctctgataaagctgcagccaatttctcagatcgttctttgctgaagaacttgggacattggctaggaatgatcacattagctaaaaacaaacccatcttacacactgacttggatgtgaaatcattgctgctagaggcttatgttaaaggacaacaagaattgctctatgtagtgccctttgttgccaaagtcttagaatctagcattcgtagtgtggtttttaggccaccaaacccttggacaatggcaattatgaatgtattagctgagctacatcaggagcatgacttaaagttaaacttgaagtttgaaatcgaggttctctgcaagaaccttgcattagacatcaatgagctaaaacctggaaacctcctaaaggataaagatcgcctgaagaatttagatgagcaactctctgctccaaagaaagatgtcaagcagccagaagaactccctcccatcacaaccacaacaacttctactacaccagctaccaacaccacttgtacagccacggttccaccacagccacagtacagctaccacgacatcaatgtctattcccttgcgggcttggcaccacacattactctaaatccaacaattcccttgtttcaggcccatccacagttgaagcagtgtgtgcgtcaggcaattgaacgggctgtccaggagctggtccatcctgtggtggatcgatcaattaagattgccatgactacttgtgagcaaatagtcaggaaggattttgccctggattcggaggaatctcgaatgcgaatagcagctcatcacatgatgcgtaacttgacagctggaatggctatgattacatgcagggaacctttgctcatgagcatatctaccaacttaaaaaacagttttgcctcagcccttcgtactgcttccccacaacaaagagaaatgatggatcaggcagctgctcaattagctcaggacaattgtgagttggcttgctgttttattcagaagactgcagtagaaaaagcaggccctgagatggacaagagattagcaactgaatttgagctgagaaaacatgctaggcaagaaggacgcagatactgtgatcctgttgttttaacatatcaagctgaacggatgccagagcaaatcaggctgaaagttggtggtgtggacccaaagcagttggctgtttacgaagagtttgcacgcaatgttcctggcttcttacctacaaatgacttaagtcagcccacgggatttttagcccagcccatgaagcaagcttgggcaacagatgatgtagctcagatttatgataagtgtattacagaactggagcaacatctacatgccatcccaccaactttggccatgaaccctcaagctcaggctcttcgaagtctcttggaggttgtagttttatctcgaaactctcgggatgccatagctgctcttggattgctccaaaaggctgtagagggcttactagatgccacaagtggtgctgatgctgaccttctgctgcgctacagggaatgccacctcttggtcctaaaagctctgcaggatggccgggcatatgggtctccatggtgcaacaaacagatcacaaggtgcctaattgaatgtcgagatgaatataaatataatgtggaggctgtggagctgctaattcgcaatcatttggttaatatgcagcagtatgatcttcacctagcgcagtcaatggagaatggcttaaactacatggctgtggcatttgctatgcagttagtaaaaatcctgctggtggatgaaaggagtgttgctcatgttactgaggcagatctgttccacaccattgaaaccctcatgaggattaatgctcattccagaggcaatgctccagaaggattgccccagctgatggaagtagtgcgatccaactatgaagcaatgattgatcgtgctcatggaggcccaaactttatgatgcattctgggatctctcaagcctcagagtatgatgaccctccaggcctgagggagaaggcagagtatcttctgagggaatgggtgaatctctaccattcagcagcagctggccgcgacagtaccaaagctttctctgcatttgttggacagatgcaccagcaaggaatactgaagaccgatgatctcataacaaggttctttcgtctgtgtactgaaatgtgtgttgaaatcagttaccgtgctcaggctgagcagcagcacaatcctgctgccaatcccaccatgatccgagccaagtgctatcacaacctggatgcctttgttcgactcattgcactgctcgtgaaacactcaggggaggccaccaacactgtcacaaagattaatctgctgaacaaggtccttggtatagtagtgggagttctccttcaggatcatgatgttcgtcagagtgaatttcagcaacttccctaccatcgaatttttatcatgcttctcttggaactcaatgcacctgagcatgtgttggaaaccattaatttccagacacttacagctttctgcaatacattccacatcttgaggcctaccaaagctcctggctttgtatatgcctggcttgaactgatttcccatcggatatttattgcaagaatgctggcacatacgccacagcagaaggggtggcctatgtatgcacagctactgattgatttattcaaatatttagcgcctttccttagaaatgtggaactcaccaaacctatgcaaatcctctacaagggcactttaagagtgctgctggttcttttgcatgatttcccagagttcctttgtgattaccattatgggttctgtgatgtgatcccacctaattgtatccagttaagaaatttgatcctgagtgcctttccaagaaacatgaggctccccgacccattcactcctaatctaaaggtggacatgttgagtgaaattaacattgctccccggattctcaccaatttcactggagtaatgccacctcagttcaaaaaggatttggattcctatcttaaaactcgatcaccagtcactttcctgtctgatctgcgcagcaacctacaggtatccaatgaacctgggaatcgctacaacctccagctcatcaatgcactggtgctctatgtcgggactcaggccattgcgcacatccacaacaagggcagcacaccttcaatgagcaccatcactcactcagcacacatggatatcttccagaatttggctgtggacttggacactgagggtcgctatctctttttgaatgcaattgcaaatcagctccggtacccaaatagccacactcactacttcagttgcaccatgctgtacctttttgcagaggccaatacggaagccatccaagaacagatcacaagagttctcttggaacggttgattgtaaataggccacatccttggggtcttcttattaccttcattgagctgattaaaaacccagcgtttaagttctggaaccatgaatttgtacactgtgccccagaaatcgaaaagttattccagtcggtcgcacagtgctgcatgggacagaagcaggcccagcaagtaatggaagggacaggtgccagttagacgaaactgcatctctgttgtacgtgtcagtctagaggtctcactgcaccgagttcataaactgactgaagaatcctttcagctcttcctgactttcccagccctttggtttgtgggtatctgccccaactactgttgggatcagcctcctgtcttatgtgggcacgttccaaagtttaaatgcatttttttgactcttggccaaaatttagaagatgctgtgaatatcattttgaacttgtgtaaatacatgaaagagaaaacctttgtctggaacttcttggctttgtgcaagctgtgtccaaggcaagtacataaactggtaccttgtaatgaagaggcagctgatgccatgcacttgtctgagggcatagctccatgtcttctgacattcctggtgtcccaaagaatagcaaaaagccagtttgaatattatgtaacttatttttttaatgtggacaggggaccttgaaaatcactaagttattaaaaatgtggatgtgctagaattggatatgtccaggaacatgggaagggctcactattggaatcccatgagtttccattttgtctctacccaaacgtattccaaagctgactgcatttgtaccatcttatttcttttggggattatacacctcagccgcctgagatgggggtcagctctttatataaagggaaaccagaccaggcctaaagcccaccccctaccctcacccccacaatcctctcctgaaacttaaaaacagtgggaatataggaaagggaaccaaatctcattaattaattgttctcccccattaccccactgaatgaatggccatacaggctaagctgaataatgacaaagttgaaaggaccaatacagccccttttataaggattttgaatgttttgcaaatgtattggtccctgtgttgtattttgtagccttttcctgggcttcagctcccctacttcttgtatgtgtatgcatactgtagctaaccattaaagtcatgacacaca

SEQ ID NO: 355682 - DNA, 5435 bp, Homo sapiens
caggcgctgttggctgtctgcaagcttgtgcagtgagtgtttctcaggagctatcagaaactatcctcaccatggtagccaattgcagtaatgttatgaataaggccagacaaccaccacctggagttatgccaaaaggacgtcctcctagtgctagcagcttagatgccatttctcctgttcagattgaccctcttgctggaatgacatctcttagtataggtggttcagctgcccctcacacccagagtatgcagggttttcctccaaatttgggttctgcattcagtacccctcagtcaccagcaaaagcatttccacccctttcaacccccaatcagaccactgcattcagtggtattggaggactttcatcacagcttccagtaggtggtcttggcacaggcagcctgactggtataggaactggtgctcttggactccctgcagtgaataacgacccttttgtacagaggaaactgggcacctctggactgaatcagcctacattccagcagacggacttgtctcaggtgtggccagaggcaaaccagcactttagtaaagagatagatgatgaagcaaacagctatttccagcgaatatataatcatccaccacatccaaccatgtctgttgatgaggtattagaaatgctgcagagatttaaagactctactataaagagggaacgagaagtatttaactgtatgctaaggaacttgtttgaagaatatcgtttttttccccagtatcctgataaagagttacatataacagcctgcctatttggtggtataattgagaaaggactggtcacttacatggcactaggtctggctctacgatatgttcttgaagccttacgcaagccttttggatccaaaatgtattatttcgggattgctgcactagatagatttaaaaacagattgaaggactatccccagtattgtcagcatttggcttctatcagtcactttatgcaatttccacatcatttacaggagtatattgagtatggacagcagtctagagatcctcctgtgaaaatgcaaggctctatcacaacccctggaagtattgcactggctcaggcccaggctcaggcccaggttccagcaaaagctcctcttgctggtcaagttagcactatggtaaccacctcaacaactaccactgttgctaaaacggttacggtcaccaggccaactggagtcagctttaagaaagatgtgccaccttctattaatactacaaatatagatacgttgcttgtggccacagatcaaactgagagaattgtggagcccccagaaaatatccaggagaaaattgcttttattttcaataatctctcacagtcaaatatgacacaaaaggttgaagagctaaaggaaacggtgaaagaagaatttatgccttgggtttcacagtatctggttatgaagagagtcagtattgagccaaactttcatagcctgtattcaaacttccttgacacgctgaagaatcctgaatttaacaagatggttctgaatgagacctacagaaacattaaagtgctcctgacctctgataaagctgcagccaatttctcagatcgttctttgctgaagaacttgggacattggctaggaatgatcacattagctaaaaacaaacccatcttacacactgacttggatgtgaaatcattgctgctagaggcttatgttaaaggacaacaagaattgctctatgtagtgccctttgttgccaaagtcttagaatctagcattcgtagtgtggtttttaggccaccaaacccttggacaatggcaattatgaatgtattagctgagctacatcaggagcatgacttaaagttaaacttgaagtttgaaatcgaggttctctgcaagaaccttgcattagacatcaatgagctaaaacctggaaacctcctaaaggataaagatcgcctgaagaatttagatgagcaactctctgctccaaagaaagatgtcaagcagccagaagaactccctcccatcacaaccacaacaacttctactacaccagctaccaacaccacttgtacagccacggttccaccacagccacagtacagctaccacgacatcaatgtctattcccttgcgggcttggcaccacacattactctaaatccaacaattcccttgtttcaggcccatccacagttgaagcagtgtgtgcgtcaggcaattgaacgggctgtccaggagctggtccatcctgtggtggatcgatcaattaagattgccatgactacttgtgagcaaatagtcaggaaggattttgccctggattcggaggaatctcgaatgcgaatagcagctcatcacatgatgcgtaacttgacagctggaatggctatgattacatgcagggaacctttgctcatgagcatatctaccaacttaaaaaacagttttgcctcagcccttcgtactgcttccccacaacaaagagaaatgatggatcaggcagctgctcaattagctcaggacaattgtgagttggcttgctgttttattcagaagactgcagtagaaaaagcaggccctgagatggacaagagattagcaactgaatttgagctgagaaaacatgctaggcaagaaggacgcagatactgtgatcctgttgttttaacatatcaagctgaacggatgccagagcaaatcaggctgaaagttggtggtgtggacccaaagcagttggctgtttacgaagagtttgcacgcaatgttcctggcttcttacctacaaatgacttaagtcagcccacgggatttttagcccagcccatgaagcaagcttgggcaacagatgatgtagctcagatttatgataagtgtattacagaactggagcaacatctacatgccatcccaccaactttggccatgaaccctcaagctcaggctcttcgaagtctcttggaggttgtagttttatctcgaaactctcgggatgccatagctgctcttggattgctccaaaaggctgtagagggcttactagatgccacaagtggtgctgatgctgaccttctgctgcgctacagggaatgccacctcttggtcctaaaagctctgcaggatggccgggcatatgggtctccatggtgcaacaaacagatcacaaggtgcctaattgaatgtcgagatgaatataaatataatgtggaggctgtggagctgctaattcgcaatcatttggttaatatgcagcagtatgatcttcacctagcgcagtcaatggagaatggcttaaactacatggctgtggcatttgctatgcagttagtaaaaatcctgctggtggatgaaaggagtgttgctcatgttactgaggcagatctgttccacaccattgaaaccctcatgaggattaatgctcattccagaggcaatgctccagaaggattgccccagctgatggaagtagtgcgatccaactatgaagcaatgattgatcgtgctcatggaggcccaaactttatgatgcattctgggatctctcaagcctcagagtatgatgaccctccaggcctgagggagaaggcagagtatcttctgagggaatgggtgaatctctaccattcagcagcagctggccgcgacagtaccaaagctttctctgcatttgttggacagatgcaccagcaaggaatactgaagaccgatgatctcataacaaggttctttcgtctgtgtactgaaatgtgtgttgaaatcagttaccgtgctcaggctgagcagcagcacaatcctgctgccaatcccaccatgatccgagccaagtgctatcacaacctggatgcctttgttcgactcattgcactgctcgtgaaacactcaggggaggccaccaacactgtcacaaagattaatctgctgaacaaggtccttggtatagtagtgggagttctccttcaggatcatgatgttcgtcagagtgaatttcagcaacttccctaccatcgaatttttatcatgcttctcttggaactcaatgcacctgagcatgtgttggaaaccattaatttccagacacttacagctttctgcaatacattccacatcttgaggcctaccaaagctcctggctttgtatatgcctggcttgaactgatttcccatcggatatttattgcaagaatgctggcacatacgccacagcagaaggggtggcctatgtatgcacagctactgattgatttattcaaatatttagcgcctttccttagaaatgtggaactcaccaaacctatgcaaatcctctacaagggcactttaagagtgctgctggttcttttgcatgatttcccagagttcctttgtgattaccattatgggttctgtgatgtgatcccacctaattgtatccagttaagaaatttgatcctgagtgcctttccaagaaacatgaggctccccgacccattcactcctaatctaaaggtggacatgttgagtgaaattaacattgctccccggattctcaccaatttcactggagtaatgccacctcagttcaaaaaggatttggattcctatcttaaaactcgatcaccagtcactttcctgtctgatctgcgcagcaacctacaggtatccaatgaacctgggaatcgctacaacctccagctcatcaatgcactggtgctctatgtcgggactcaggccattgcgcacatccacaacaagggcagcacaccttcaatgagcaccatcactcactcagcacacatggatatcttccagaatttggctgtggacttggacactgagggtcgctatctctttttgaatgcaattgcaaatcagctccggtacccaaatagccacactcactacttcagttgcaccatgctgtacctttttgcagaggccaatacggaagccatccaagaacagatcacaagagttctcttggaacggttgattgtaaataggccacatccttggggtcttcttattaccttcattgagctgattaaaaacccagcgtttaagttctggaaccatgaatttgtacactgtgccccagaaatcgaaaagttattccagtcggtcgcacagtgctgcatgggacagaagcaggcccagcaagtaatggaagggacaggtgccagttagacgaaactgcatctctgttgtacgtgtcagtctagaggtctcactgcaccgagttcataaactgactgaagaatcctttcagctcttcctgactttcccagccctttggtttgtgggtatctgccccaactactgttgggatcagcctcctgtcttatgtgggcacgttccaaagtttaaatgcatttttttgactcttggccaaaatttagaagatgctgtgaatatcattttgaacttgtgtaaatacatgaaagagaaaac

SEQ ID NO: 355683 - DNA, 6261 bp, Homo sapiens
caggcgctgttggctgtctgcaagcttgtgcagtgagtgtttctcaggagctatcagaaactatcctcaccatggtagccaattgcagtaatgttatgaataaggccagacaaccaccacctggagttatgccaaaaggacgtcctcctagtgctagcagcttagatgccatttctcctgttcagattgaccctcttgctggaatgacatctcttagtataggtggttcagctgcccctcacacccagagtatgcagggttttcctccaaatttgggttctgcattcagtacccctcagtcaccagcaaaagcatttccacccctttcaacccccaatcagaccactgcattcagtggtattggaggactttcatcacagcttccagtaggtggtcttggcacaggcagcctgactggtataggaactggtgctcttggactccctgcagtgaataacgacccttttgtacagaggaaactgggcacctctggactgaatcagcctacattccagcagacggacttgtctcaggtgtggccagaggcaaaccagcactttagtaaagagatagatgatgaagcaaacagctatttccagcgaatatataatcatccaccacatccaaccatgtctgttgatgaggtattagaaatgctgcagagatttaaagactctactataaagagggaacgagaagtatttaactgtatgctaaggaacttgtttgaagaatatcgtttttttccccagtatcctgataaagagttacatataacagcctgcctatttggtggtataattgagaaaggactggtcacttacatggcactaggtctggctctacgatatgttcttgaagccttacgcaagccttttggatccaaaatgtattatttcgggattgctgcactagatagatttaaaaacagattgaaggactatccccagtattgtcagcatttggcttctatcagtcactttatgcaatttccacatcatttacaggagtatattgagtatggacagcagtctagagatcctcctgtgaaaatgcaaggctctatcacaacccctggaagtattgcactggctcaggcccaggctcaggcccaggttccagcaaaagctcctcttgctggtcaagttagcactatggtaaccacctcaacaactaccactgttgctaaaacggttacggtcaccaggccaactggagtcagctttaagaaagatgtgccaccttctattaatactacaaatatagatacgttgcttgtggccacagatcaaactgagagaattgtggagcccccagaaaatatccaggagaaaattgcttttattttcaataatctctcacagtcaaatatgacacaaaaggttgaagagctaaaggaaacggtgaaagaagaatttatgccttgggtttcacagtatctggttatgaagagagtcagtattgagccaaactttcatagcctgtattcaaacttccttgacacgctgaagaatcctgaatttaacaagatggttctgaatgagacctacagaaacattaaagtgctcctgacctctgataaagctgcagccaatttctcagatcgttctttgctgaagaacttgggacattggctaggaatgatcacattagctaaaaacaaacccatcttacacactgacttggatgtgaaatcattgctgctagaggcttatgttaaaggacaacaagaattgctctatgtagtgccctttgttgccaaagtcttagaatctagcattcgtagtgtggtttttaggccaccaaacccttggacaatggcaattatgaatgtattagctgagctacatcaggagcatgacttaaagttaaacttgaagtttgaaatcgaggttctctgcaagaaccttgcattagacatcaatgagctaaaacctggaaacctcctaaaggataaagatcgcctgaagaatttagatgagcaactctctgctccaaagaaagatgtcaagcagccagaagaactccctcccatcacaaccacaacaacttctactacaccagctaccaacaccacttgtacagccacggttccaccacagccacagtacagctaccacgacatcaatgtctattcccttgcgggcttggcaccacacattactctaaatccaacaattcccttgtttcaggcccatccacagttgaagcagtgtgtgcgtcaggcaattgaacgggctgtccaggagctggtccatcctgtggtggatcgatcaattaagattgccatgactacttgtgagcaaatagtcaggaaggattttgccctggattcggaggaatctcgaatgcgaatagcagctcatcacatgatgcgtaacttgacagctggaatggctatgattacatgcagggaacctttgctcatgagcatatctaccaacttaaaaaacagttttgcctcagcccttcgtactgcttccccacaacaaagagaaatgatggatcaggcagctgctcaattagctcaggacaattgtgagttggcttgctgttttattcagaagactgcagtagaaaaagcaggccctgagatggacaagagattagcaactgaatttgagctgagaaaacatgctaggcaagaaggacgcagatactgtgatcctgttgttttaacatatcaagctgaacggatgccagagcaaatcaggctgaaagttggtggtgtggacccaaagcagttggctgtttacgaagagtttgcacgcaatgttcctggcttcttacctacaaatgacttaagtcagcccacgggatttttagcccagcccatgaagcaagcttgggcaacagatgatgtagctcagatttatgataagtgtattacagaactggagcaacatctacatgccatcccaccaactttggccatgaaccctcaagctcaggctcttcgaagtctcttggaggttgtagttttatctcgaaactctcgggatgccatagctgctcttggattgctccaaaaggctgtagagggcttactagatgccacaagtggtgctgatgctgaccttctgctgcgctacagggaatgccacctcttggtcctaaaagctctgcaggatggccgggcatatgggtctccatggtgcaacaaacagatcacaaggtgcctaattgaatgtcgagatgaatataaatataatgtggaggctgtggagctgctaattcgcaatcatttggttaatatgcagcagtatgatcttcacctagcgcagtcaatggagaatggcttaaactacatggctgtggcatttgctatgcagttagtaaaaatcctgctggtggatgaaaggagtgttgctcatgttactgaggcagatctgttccacaccattgaaaccctcatgaggattaatgctcattccagaggcaatgctccagaaggattgccccagctgatggaagtagtgcgatccaactatgaagcaatgattgatcgtgctcatggaggcccaaactttatgatgcattctgggatctctcaagcctcagagtatgatgaccctccaggcctgagggagaaggcagagtatcttctgagggaatgggtgaatctctaccattcagcagcagctggccgcgacagtaccaaagctttctctgcatttgttggacagatgcaccagcaaggaatactgaagaccgatgatctcataacaaggttctttcgtctgtgtactgaaatgtgtgttgaaatcagttaccgtgctcaggctgagcagcagcacaatcctgctgccaatcccaccatgatccgagccaagtgctatcacaacctggatgcctttgttcgactcattgcactgctcgtgaaacactcaggggaggccaccaacactgtcacaaagattaatctgctgaacaaggtccttggtatagtagtgggagttctccttcaggatcatgatgttcgtcagagtgaatttcagcaacttccctaccatcgaatttttatcatgcttctcttggaactcaatgcacctgagcatgtgttggaaaccattaatttccagacacttacagctttctgcaatacattccacatcttgaggcctaccaaagctcctggctttgtatatgcctggcttgaactgatttcccatcggatatttattgcaagaatgctggcacatacgccacagcagaagtactgcagaaagtaccattctttggcccctcagatcagaagaaatgtgactgctatgtaatggagtgaacttgacaaagaaggggtggcctatgtatgcacagctactgattgatttattcaaatatttagcgcctttccttagaaatgtggaactcaccaaacctatgcaaatcctctacaagggcactttaagagtgctgctggttcttttgcatgatttcccagagttcctttgtgattaccattatgggttctgtgatgtgatcccacctaattgtatccagttaagaaatttgatcctgagtgcctttccaagaaacatgaggctccccgacccattcactcctaatctaaaggtggacatgttgagtgaaattaacattgctccccggattctcaccaatttcactggagtaatgccacctcagttcaaaaaggatttggattcctatcttaaaactcgatcaccagtcactttcctgtctgatctgcgcagcaacctacaggtatccaatgaacctgggaatcgctacaacctccagctcatcaatgcactggtgctctatgtcgggactcaggccattgcgcacatccacaacaagggcagcacaccttcaatgagcaccatcactcactcagcacacatggatatcttccagaatttggctgtggacttggacactgagggtcgctatctctttttgaatgcaattgcaaatcagctccggtacccaaatagccacactcactacttcagttgcaccatgctgtacctttttgcagaggccaatacggaagccatccaagaacagatcacaagagttctcttggaacggttgattgtaaataggccacatccttggggtcttcttattaccttcattgagctgattaaaaacccagcgtttaagttctggaaccatgaatttgtacactgtgccccagaaatcgaaaagttattccagtcggtcgcacagtgctgcatgggacagaagcaggcccagcaagtaatggaagggacaggtgccagttagacgaaactgcatctctgttgtacgtgtcagtctagaggtctcactgcaccgagttcataaactgactgaagaatcctttcagctcttcctgactttcccagccctttggtttgtgggtatctgccccaactactgttgggatcagcctcctgtcttatgtgggcacgttccaaagtttaaatgcatttttttgactcttggccaaaatttagaagatgctgtgaatatcattttgaacttgtgtaaatacatgaaagagaaaacctttgtctggaacttcttggctttgtgcaagctgtgtccaaggcaagtacataaactggtaccttgtaatgaagaggcagctgatgccatgcacttgtctgagggcatagctccatgtcttctgacattcctggtgtcccaaagaatagcaaaaagccagtttgaatattatgtaacttatttttttaatgtggacaggggaccttgaaaatcactaagttattaaaaatgtggatgtgctagaattggatatgtccaggaacatgggaagggctcactattggaatcccatgagtttccattttgtctctacccaaacgtattccaaagctgactgcatttgtaccatcttatttcttttggggattatacacctcagccgcctgagatgggggtcagctctttatataaagggaaaccagaccaggcctaaagcccaccccctaccctcacccccacaatcctctcctgaaacttaaaaacagtgggaatataggaaagggaaccaaatctcattaattaattgttctcccccattaccccactgaatgaatggccatacaggctaagctgaataatgacaaagttgaaaggaccaatacagccccttttataaggattttgaatgttttgcaaatgtattggtccctgtgttgtattttgtagccttttcctgggcttcagctcccctacttcttgtatgtgtatgcatactgtagctaaccattaaagtcatgacacaca

SEQ ID NO: 355684 - DNA, 6325 bp, Homo sapiens
caggcgctgttggctgtctgcaagcttgtgcagtgagtgtttctcaggagctatcagaaactatcctcaccatggtagccaattgcagtaatgttatgaataaggccagacaaccaccacctggagttatgccaaaaggacgtcctcctagtgctagcagcttagatgccatttctcctgttcagattgaccctcttgctggaatgacatctcttagtataggtggttcagctgcccctcacacccagagtatgcagggttttcctccaaatttgggttctgcattcagtacccctcagtcaccagcaaaagcatttccacccctttcaacccccaatcagaccactgcattcagtggtattggaggactttcatcacagcttccagtaggtggtcttggcacaggcagcctgactggtataggaactggtgctcttggactccctgcagtgaataacgacccttttgtacagaggaaactgggcacctctggactgaatcagcctacattccagcagacggacttgtctcaggtgtggccagaggcaaaccagcactttagtaaagagatagatgatgaagcaaacagctatttccagcgaatatataatcatccaccacatccaaccatgtctgttgatgaggtattagaaatgctgcagagatttaaagactctactataaagagggaacgagaagtatttaactgtatgctaaggaacttgtttgaagaatatcgtttttttccccagtatcctgataaagagttacatataacagcctgcctatttggtggtataattgagaaaggactggtcacttacatggcactaggtctggctctacgatatgttcttgaagccttacgcaagccttttggatccaaaatgtattatttcgggattgctgcactagatagatttaaaaacagattgaaggactatccccagtattgtcagcatttggcttctatcagtcactttatgcaatttccacatcatttacaggagtatattgagtatggacagcagtctagagatcctcctgtgaaaatgcaaggctctatcacaacccctggaagtattgcactggctcaggcccaggctcaggcccaggttccagcaaaagctcctcttgctggtcaagttagcactatggtaaccacctcaacaactaccactgttgctaaaacggttacggtcaccaggccaactggagtcagctttaagaaagatgtgccaccttctattaatactacaaatatagatacgttgcttgtggccacagatcaaactgagagaattgtggagcccccagaaaatatccaggagaaaattgcttttattttcaataatctctcacagtcaaatatgacacaaaaggttgaagagctaaaggaaacggtgaaagaagaatttatgccttgggtttcacagtatctggttatgaagagagtcagtattgagccaaactttcatagcctgtattcaaacttccttgacacgctgaagaatcctgaatttaacaagatggttctgaatgagacctacagaaacattaaagtgctcctgacctctgataaagctgcagccaatttctcagatcgttctttgctgaagaacttgggacattggctaggaatgatcacattagctaaaaacaaacccatcttacacactgacttggatgtgaaatcattgctgctagaggcttatgttaaaggacaacaagaattgctctatgtagtgccctttgttgccaaagtcttagaatctagcattcgtagtgtggtttttaggccaccaaacccttggacaatggcaattatgaatgtattagctgagctacatcaggagcatgacttaaagttaaacttgaagtttgaaatcgaggttctctgcaagaaccttgcattagacatcaatgagctaaaacctggaaacctcctaaaggataaagatcgcctgaagaatttagatgagcaactctctgctccaaagaaagatgtcaagcagccagaagaactccctcccatcacaaccacaacaacttctactacaccagctaccaacaccacttgtacagccacggttccaccacagccacagtacagctaccacgacatcaatgtctattcccttgcgggcttggcaccacacattactctaaatccaacaattcccttgtttcaggcccatccacagttgaagcagtgtgtgcgtcaggcaattgaacgggctgtccaggagctggtccatcctgtggtggatcgatcaattaagattgccatgactacttgtgagcaaatagtcaggaaggattttgccctggattcggaggaatctcgaatgcgaatagcagctcatcacatgatgcgtaacttgacagctggaatggctatgattacatgcagggaacctttgctcatgagcatatctaccaacttaaaaaacagttttgcctcagcccttcgtactgcttccccacaacaaagagaaatgatggatcaggcagctgctcaattagctcaggacaattgtgagttggcttgctgttttattcagaagactgcagtagaaaaagcaggccctgagatggacaagagattagcaactgaatttgagctgagaaaacatgctaggcaagaaggacgcagatactgtgatcctgttgttttaacatatcaagctgaacggatgccagagcaaatcaggctgaaagttggtggtgtggacccaaagcagttggctgtttacgaagagtttgcacgcaatgttcctggcttcttacctacaaatgacttaagtcagcccacgggatttttagcccagcccatgaagcaagcttgggcaacagatgatgtagctcagatttatgataagtgtattacagaactggagcaacatctacatgccatcccaccaactttggccatgaaccctcaagctcaggctcttcgaagtctcttggaggttgtagttttatctcgaaactctcgggatgccatagctgctcttggattgctccaaaaggctgtagagggcttactagatgccacaagtggtgctgatgctgaccttctgctgcgctacagggaatgccacctcttggtcctaaaagctctgcaggatggccgggcatatgggtctccatggtgcaacaaacagatcacaaggtgcctaattgaatgtcgagatgaatataaatataatgtggaggctgtggagctgctaattcgcaatcatttggttaatatgcagcagtatgatcttcacctagcgcagtcaatggagaatggcttaaactacatggctgtggcatttgctatgcagttagtaaaaatcctgctggtggatgaaaggagtgttgctcatgttactgaggcagatctgttccacaccattgaaaccctcatgaggattaatgctcattccagaggcaatgctccagaaggattgccccagctgatggaagtagtgcgatccaactatgaagcaatgattgatcgtgctcatggaggcccaaactttatgatgcattctgggatctctcaagcctcagagtatgatgaccctccaggcctgagggagaaggcagagtatcttctgagggaatgggtgaatctctaccattcagcagcagctggccgcgacagtaccaaagctttctctgcatttgttggacagatgcaccagcaaggaatactgaagaccgatgatctcataacaaggttctttcgtctgtgtactgaaatgtgtgttgaaatcagttaccgtgctcaggctgagcagcagcacaatcctgctgccaatcccaccatgatccgagccaagtgctatcacaacctggatgcctttgttcgactcattgcactgctcgtgaaacactcaggggaggccaccaacactgtcacaaagattaatctgctgaacaaggtccttggtatagtagtgggagttctccttcaggatcatgatgttcgtcagagtgaatttcagcaacttccctaccatcgaatttttatcatgcttctcttggaactcaatgcacctgagcatgtgttggaaaccattaatttccagacacttacagctttctgcaatacattccacatcttgaggcctaccaaagctcctggctttgtatatgcctggcttgaactgatttcccatcggatatttattgcaagaatgctggcacatacgccacagcagaaggggtggcctatgtatgcacagctactgattgatttattcaaatatttagcgcctttccttagaaatgtggaactcaccaaacctatgcaaatcctctacaagggcactttaagagtgctgctggttcttttgcatgatttcccagagttcctttgtgattaccattatgggttctgtgatgtgatcccacctaattgtatccagttaagaaatttgatcctgagtgcctttccaagaaacatgaggctccccgacccattcactcctaatctaaaggtggacatgttgagtgaaattaacattgctccccggattctcaccaatttcactggagtaatgccacctcagttcaaaaaggatttggattcctatcttaaaactcgatcaccagtcactttcctgtctgatctgcgcagcaacctacaggtatccaatgaacctgggaatcgctacaacctccagctcatcaatgcactggtgctctatgtcgggactcaggccattgcgcacatccacaacaagggcagcacaccttcaatgagcaccatcactcactcagcacacatggatatcttccagaatttggctgtggacttggacactgagggtcgctatctctttttgaatgcaattgcaaatcagctccggtacccaaatagccacactcactacttcagttgcaccatgctgtacctttttgcagaggccaatacggaagccatccaagaacagatcacaagagttctcttggaacggttgattgtaaataggccacatccttggggtcttcttattaccttcattgagctgattaaaaacccagcgtttaagttctggaaccatgaatttgtacactgtgccccagaaatcgaaaagtgagttcaaagtaatttttaattgtctaggaatgagactggagactgaaaaccatctgtctctaggttgggtcagctgaatgagatgcaaggtattgttaggcctactctttaatcagagatttgtaactgtcttcatccttcaggttattccagtcggtcgcacagtgctgcatgggacagaagcaggcccagcaagtaatggaagggacaggtgccagttagacgaaactgcatctctgttgtacgtgtcagtctagaggtctcactgcaccgagttcataaactgactgaagaatcctttcagctcttcctgactttcccagccctttggtttgtgggtatctgccccaactactgttgggatcagcctcctgtcttatgtgggcacgttccaaagtttaaatgcatttttttgactcttggccaaaatttagaagatgctgtgaatatcattttgaacttgtgtaaatacatgaaagagaaaacctttgtctggaacttcttggctttgtgcaagctgtgtccaaggcaagtacataaactggtaccttgtaatgaagaggcagctgatgccatgcacttgtctgagggcatagctccatgtcttctgacattcctggtgtcccaaagaatagcaaaaagccagtttgaatattatgtaacttatttttttaatgtggacaggggaccttgaaaatcactaagttattaaaaatgtggatgtgctagaattggatatgtccaggaacatgggaagggctcactattggaatcccatgagtttccattttgtctctacccaaacgtattccaaagctgactgcatttgtaccatcttatttcttttggggattatacacctcagccgcctgagatgggggtcagctctttatataaagggaaaccagaccaggcctaaagcccaccccctaccctcacccccacaatcctctcctgaaacttaaaaacagtgggaatataggaaagggaaccaaatctcattaattaattgttctcccccattaccccactgaatgaatggccatacaggctaagctgaataatgacaaagttgaaaggaccaatacagccccttttataaggattttgaatgttttgcaaatgtattggtccctgtgttgtattttgtagccttttcctgggcttcagctcccctacttcttgtatgtgtatgcatactgtagctaaccattaaagtcatgacacaca

SEQ ID NO: 355685 - DNA, 5677 bp, Homo sapiens
caggcgctgttggctgtctgcaagcttgtgcagtgagtgtttctcaggagctatcagaaactatcctcaccatggtagccaattgcagtaatgttatgaataaggccagacaaccaccacctggagttatgccaaaaggacgtcctcctagtgctagcagcttagatgccatttctcctgttcagattgaccctcttgctggaatgacatctcttagtataggtggttcagctgcccctcacacccagagtatgcagggttttcctccaaatttgggttctgcattcagtacccctcagtcaccagcaaaagcatttccacccctttcaacccccaatcagaccactgcattcagtggtattggaggactttcatcacagcttccagtaggtggtcttggcacaggcagcctgactggtataggaactggtgctcttggactccctgcagtgaataacgacccttttgtacagaggaaactgggcacctctggactgaatcagcctacattccagcagacggacttgtctcaggtgtggccagaggcaaaccagcactttagtaaagagatagatgatgaagcaaacagctatttccagcgaatatataatcatccaccacatccaaccatgtctgttgatgaggtattagaaatgctgcagagatttaaagactctactataaagagggaacgagaagtatttaactgtatgctaaggaacttgtttgaagaatatcgtttttttccccagtatcctgataaagagttacatataacagcctgcctatttggtggtataattgagaaaggactggtcacttacatggcactaggtctggctctacgatatgttcttgaagccttacgcaagccttttggatccaaaatgtattatttcgggattgctgcactagatagatttaaaaacagattgaaggactatccccagtattgtcagcatttggcttctatcagtcactttatgcaatttccacatcatttacaggagtatattgagtatggacagcagtctagagatcctcctgtgaaaatgcaaggctctatcacaacccctggaagtattgcactggctcaggcccaggctcaggcccaggttccagcaaaagctcctcttgctggtcaagttagcactatggtaaccacctcaacaactaccactgttgctaaaacggttacggtcaccaggccaactggagtcagctttaagaaagatgtgccaccttctattaatactacaaatatagatacgttgcttgtggccacagatcaaactgagagaattgtggagcccccagaaaatatccaggagaaaattgcttttattttcaataatctctcacagtcaaatatgacacaaaaggttgaagagctaaaggaaacggtgaaagaagaatttatgccttgggtttcacagtatctggttatgaagagagtcagtattgagccaaactttcatagcctgtattcaaacttccttgacacgctgaagaatcctgaatttaacaagatggttctgaatgagacctacagaaacattaaagtgctcctgacctctgataaagctgcagccaatttctcagatcgttctttgctgaagaacttgggacattggctaggaatgatcacattagctaaaaacaaacccatcttacacactgacttggatgtgaaatcattgctgctagaggcttatgttaaaggacaacaagaattgctctatgtagtgccctttgttgccaaagtcttagaatctagcattcgtagtgtggtttttaggccaccaaacccttggacaatggcaattatgaatgtattagctgagctacatcaggagcatgacttaaagttaaacttgaagtttgaaatcgaggttctctgcaagaaccttgcattagacatcaatgagctaaaacctggaaacctcctaaaggataaagatcgcctgaagaatttagatgagcaactctctgctccaaagaaagatgtcaagcagccagaagaactccctcccatcacaaccacaacaacttctactacaccagctaccaacaccacttgtacagccacggttccaccacagccacagtacagctaccacgacatcaatgtctattcccttgcgggcttggcaccacacattactctaaatccaacaattcccttgtttcaggcccatccacagttgaagcagtgtgtgcgtcaggcaattgaacgggctgtccaggagctggtccatcctgtggtggatcgatcaattaagattgccatgactacttgtgagcaaatagtcaggaaggattttgccctggattcggaggaatctcgaatgcgaatagcagctcatcacatgatgcgtaacttgacagctggaatggctatgattacatgcagggaacctttgctcatgagcatatctaccaacttaaaaaacagttttgcctcagcccttcgtactgcttccccacaacaaagagaaatgatggatcaggcagctgctcaattagctcaggacaattgtgagttggcttgctgttttattcagaagactgcagtagaaaaagcaggccctgagatggacaagagattagcaactgaatttgagctgagaaaacatgctaggcaagaaggacgcagatactgtgatcctgttgttttaacatatcaagctgaacggatgccagagcaaatcaggctgaaagttggtggtgtggacccaaagcagttggctgtttacgaagagtttgcacgcaatgttcctggcttcttacctacaaatgacttaagtcagcccacgggatttttagcccagcccatgaagcaagcttgggcaacagatgatgtagctcagatttatgataagtgtattacagaactggagcaacatctacatgccatcccaccaactttggccatgaaccctcaagctcaggctcttcgaagtctcttggaggttgtagttttatctcgaaactctcgggatgccatagctgctcttggattgctccaaaaggctgtagagggcttactagatgccacaagtggtgctgatgctgaccttctgctgcgctacagggaatgccacctcttggtcctaaaagctctgcaggatggccgggcatatgggtctccatggtgcaacaaacagatcacaaggtgcctaattgaatgtcgagatgaatataaatataatgtggaggctgtggagctgctaattcgcaatcatttggttaatatgcagcagtatgatcttcacctagcgcagtcaatggagaatggcttaaactacatggctgtggcatttgctatgcagttagtaaaaatcctgctggtggatgaaaggagtgttgctcatgttactgaggcagatctgttccacaccattgaaaccctcatgaggattaatgctcattccagaggcaatgctccagaaggattgccccagctgatggaagtagtgcgatccaactatgaagcaatgattgatcgtgctcatggaggcccaaactttatgatgcattctgggatctctcaagcctcagagtatgatgaccctccaggcctgagggagaaggcagagtatcttctgagggaatgggtgaatctctaccattcagcagcagctggccgcgacagtaccaaagctttctctgcatttgttggacagatgcaccagcaaggaatactgaagaccgatgatctcataacaaggttctttcgtctgtgtactgaaatgtgtgttgaaatcagttaccgtgctcaggctgagcagcagcacaatcctgctgccaatcccaccatgatccgagccaagtgctatcacaacctggatgcctttgttcgactcattgcactgctcgtgaaacactcaggggaggccaccaacactgtcacaaagattaatctgctgaacaaggtccttggtatagtagtgggagttctccttcaggatcatgatgttcgtcagagtgaatttcagcaacttccctaccatcgaatttttatcatgcttctcttggaactcaatgcacctgagcatgtgttggaaaccattaatttccagacacttacagctttctgcaatacattccacatcttgaggcctaccaaagctcctggctttgtatatgcctggcttgaactgatttcccatcggatatttattgcaagaatgctggcacatacgccacagcagaaggggtggcctatgtatgcacagctactgattgatttattcaaatatttagcgcctttccttagaaatgtggaactcaccaaacctatgcaaatcctctacaagggcactttaagagtgctgctggttcttttgcatgatttcccagagttcctttgtgattaccattatgggttctgtgatgtgatcccacctaattgtatccagttaagaaatttgatcctgagtgcctttccaagaaacatgaggctccccgacccattcactcctaatctaaaggtggacatgttgagtgaaattaacattgctccccggattctcaccaatttcactggagtaatgccacctcagttcaaaaaggatttggattcctatcttaaaactcgatcaccagtcactttcctgtctgatctgcgcagcaacctacaggtatccaatgaacctgggaatcgctacaacctccagctcatcaatgcactggtgctctatgtcgggactcaggccattgcgcacatccacaacaagggcagcacaccttcaatgagcaccatcactcactcagcacacatggatatcttccagaatttggctgtggacttggacactgagggtcgctatctctttttgaatgcaattgcaaatcagctccggtacccaaatagccacactcactacttcagttgcaccatgctgtacctttttgcagaggccaatacggaagccatccaagaacagatcacaagagttctcttggaacggttgattgtaaataggccacatccttggggtcttcttattaccttcattgagctgattaaaaacccagcgtttaagttctggaaccatgaatttgtacactgtgccccagaaatcgaaaagttattccagtcggtcgcacagtgctgcatgggacagaagcaggcccagcaagtaatggaagggacaggtgccagttagacgaaactgcatctctgttgtacgtgtcagtctagaggtctcactgcaccgagttcataaactgactgaagaatcctttcagctcttcctgactttcccagccctttggtttgtgggtatctgccccaactactgttgggatcagcctcctgtcttatgtgggcacgttccaaagtttaaatgcatttttttgactcttggccaaaatttagaagatgctgtgaatatcattttgaacttgtgtaaatacatgaaagagaaaacctttgtctggaacttcttggctttgtgcaagctgtgtccaaggcaagtacataaactggtaccttgtaatgaagaggcagctgatgccatgcacttgtctgagggcatagctccatgtcttctgacattcctggtgtcccaaagaatagcaaaaagccagtttgaatattatgtaacttatttttttaatgtggacaggggaccttgaaaatcactaagttattaaaaatgtggatgtgcta

SEQ ID NO: 355686 - DNA, 6125 bp, Homo sapiens
caggcgctgttggctgtctgcaagcttgtgcagtgagtgtttctcaggagctatcagaaactatcctcaccatggtagccaattgcagtaatgttatgaataaggccagacaaccaccacctggagttatgccaaaaggacgtcctcctagtgctagcagcttagatgccatttctcctgttcagattgaccctcttgctggaatgacatctcttagtataggtggttcagctgcccctcacacccagagtatgcagggttttcctccaaatttgggttctgcattcagtacccctcagtcaccagcaaaagcatttccacccctttcaacccccaatcagaccactgcattcagtggtattggaggactttcatcacagcttccagtaggtggtcttggcacaggcagcctgactggtataggaactggtgctcttggactccctgcagtgaataacgacccttttgtacagaggaaactgggcacctctggactgaatcagcctacattccagcagacggacttgtctcaggtgtggccagaggcaaaccagcactttagtaaagagatagatgatgaagcaaacagctatttccagcgaatatataatcatccaccacatccaaccatgtctgttgatgaggtattagaaatgctgcagagatttaaagactctactataaagagggaacgagaagtatttaactgtatgctaaggaacttgtttgaagaatatcgtttttttccccagtatcctgataaagagttacatataacagcctgcctatttggtggtataattgagaaaggactggtcacttacatggcactaggtctggctctacgatatgttcttgaagccttacgcaagccttttggatccaaaatgtattatttcgggattgctgcactagatagatttaaaaacagattgaaggactatccccagtattgtcagcatttggcttctatcagtcactttatgcaatttccacatcatttacaggagtatattgagtatggacagcagtctagagatcctcctgtgaaaatgcaaggctctatcacaacccctggaagtattgcactggctcaggcccaggctcaggcccaggttccagcaaaagctcctcttgctggtcaagttagcactatggtaaccacctcaacaactaccactgttgctaaaacggttacggtcaccaggccaactggagtcagctttaagaaagatgtgccaccttctattaatactacaaatatagatacgttgcttgtggccacagatcaaactgagagaattgtggagcccccagaaaatatccaggagaaaattgcttttattttcaataatctctcacagtcaaatatgacacaaaaggttgaagagctaaaggaaacggtgaaagaagaatttatgccttgggtttcacagtatctggttatgaagagagtcagtattgagccaaactttcatagcctgtattcaaacttccttgacacgctgaagaatcctgaatttaacaagatggttctgaatgagacctacagaaacattaaagtgctcctgacctctgataaagctgcagccaatttctcagatcgttctttgctgaagaacttgggacattggctaggaatgatcacattagctaaaaacaaacccatcttacacactgacttggatgtgaaatcattgctgctagaggcttatgttaaaggacaacaagaattgctctatgtagtgccctttgttgccaaagtcttagaatctagcattcgtagtgtggtttttaggccaccaaacccttggacaatggcaattatgaatgtattagctgagctacatcaggagcatgacttaaagttaaacttgaagtttgaaatcgaggttctctgcaagaaccttgcattagacatcaatgagctaaaacctggaaacctcctaaaggataaagatcgcctgaagaatttagatgagcaactctctgctccaaagaaagatgtcaagcagccagaagaactccctcccatcacaaccacaacaacttctactacaccagctaccaacaccacttgtacagccacggttccaccacagccacagtacagctaccacgacatcaatgtctattcccttgcgggcttggcaccacacattactctaaatccaacaattcccttgtttcaggcccatccacagttgaagcagtgtgtgcgtcaggcaattgaacgggctgtccaggagctggtccatcctgtggtggatcgatcaattaagattgccatgactacttgtgagcaaatagtcaggaaggattttgccctggattcggaggaatctcgaatgcgaatagcagctcatcacatgatgcgtaacttgacagctggaatggctatgattacatgcagggaacctttgctcatgagcatatctaccaacttaaaaaacagttttgcctcagcccttcgtactgcttccccacaacaaagagaaatgatggatcaggcagctgctcaattagctcaggacaattgtgagttggcttgctgttttattcagaagactgcagtagaaaaagcaggccctgagatggacaagagattagcaactgaatttgagctgagaaaacatgctaggcaagaaggacgcagatactgtgatcctgttgttttaacatatcaagctgaacggatgccagagcaaatcaggctgaaagttggtggtgtggacccaaagcagttggctgtttacgaagagtttgcacgcaatgttcctggcttcttacctacaaatgacttaagtcagcccacgggatttttagcccagcccatgaagcaagcttgggcaacagatgatgtagctcagatttatgataagtgtattacagaactggagcaacatctacatgccatcccaccaactttggccatgaaccctcaagctcaggctcttcgaagtctcttggaggttgtagttttatctcgaaactctcgggatgccatagctgctcttggattgctccaaaaggctgtagagggcttactagatgccacaagtggtgctgatgctgaccttctgctgcgctacagggaatgccacctcttggtcctaaaagctctgcaggatggccgggcatatgggtctccatggtgcaacaaacagatcacaaggtgcctaattgaatgtcgagatgaatataaatataatgtggaggctgtggagctgctaattcgcaatcatttggttaatatgcagcagtatgatcttcacctagcgcagtcaatggagaatggcttaaactacatggctgtggcatttgctatgcagttagtaaaaatcctgctggtggatgaaaggagtgttgctcatgttactgaggcagatctgttccacaccattgaaaccctcatgaggattaatgctcattccagaggcaatgctccagaaggattgccccagctgatggaagtagtgcgatccaactatgaagcaatgattgatcgtgctcatggaggcccaaactttatgatgcattctgggatctctcaagcctcagagtatgatgaccctccaggcctgagggagaaggcagagtatcttctgagggaatgggtgaatctctaccattcagcagcagctggccgcgacagtaccaaagctttctctgcatttgttggacagatgcaccagcaaggaatactgaagaccgatgatctcataacaaggttctttcgtctgtgtactgaaatgtgtgttgaaatcagttaccgtgctcaggctgagcagcagcacaatcctgctgccaatcccaccatgatccgagccaagtgctatcacaacctggatgcctttgttcgactcattgcactgctcgtgaaacactcaggggaggccaccaacactgtcacaaagattaatctgctgaacaaggtccttggtatagtagtgggagttctccttcaggatcatgatgttcgtcagagtgaatttcagcaacttccctaccatcgaatttttatcatgcttctcttggaactcaatgcacctgagcatgtgttggaaaccattaatttccagacacttacagctttctgcaatacattccacatcttgaggcctaccaaagctcctggctttgtatatgcctggcttgaactgatttcccatcggatatttattgcaagaatgctggcacatacgccacagcagaaggggtggcctatgtatgcacagctactgattgatttattcaaatatttagcgcctttccttagaaatgtggaactcaccaaacctatgcaaatcctctacaagggcactttaagagtgctgctggttcttttgcatgatttcccagagttcctttgtgattaccattatgggttctgtgatgtgatcccacctaattgtatccagttaagaaatttgatcctgagtgcctttccaagaaacatgaggctccccgacccattcactcctaatctaaaggtggacatgttgagtgaaattaacattgctccccggattctcaccaatttcactggagtaatgccacctcagttcaaaaaggatttggattcctatgtatccaatgaacctgggaatcgctacaacctccagctcatcaatgcactggtgctctatgtcgggactcaggccattgcgcacatccacaacaagggcagcacaccttcaatgagcaccatcactcactcagcacacatggatatcttccagaatttggctgtggacttggacactgagggtcgctatctctttttgaatgcaattgcaaatcagctccggtacccaaatagccacactcactacttcagttgcaccatgctgtacctttttgcagaggccaatacggaagccatccaagaacagatcacaagagttctcttggaacggttgattgtaaataggccacatccttggggtcttcttattaccttcattgagctgattaaaaacccagcgtttaagttctggaaccatgaatttgtacactgtgccccagaaatcgaaaagttattccagtcggtcgcacagtgctgcatgggacagaagcaggcccagcaagtaatggaagggacaggtgccagttagacgaaactgcatctctgttgtacgtgtcagtctagaggtctcactgcaccgagttcataaactgactgaagaatcctttcagctcttcctgactttcccagccctttggtttgtgggtatctgccccaactactgttgggatcagcctcctgtcttatgtgggcacgttccaaagtttaaatgcatttttttgactcttggccaaaatttagaagatgctgtgaatatcattttgaacttgtgtaaatacatgaaagagaaaacctttgtctggaacttcttggctttgtgcaagctgtgtccaaggcaagtacataaactggtaccttgtaatgaagaggcagctgatgccatgcacttgtctgagggcatagctccatgtcttctgacattcctggtgtcccaaagaatagcaaaaagccagtttgaatattatgtaacttatttttttaatgtggacaggggaccttgaaaatcactaagttattaaaaatgtggatgtgctagaattggatatgtccaggaacatgggaagggctcactattggaatcccatgagtttccattttgtctctacccaaacgtattccaaagctgactgcatttgtaccatcttatttcttttggggattatacacctcagccgcctgagatgggggtcagctctttatataaagggaaaccagaccaggcctaaagcccaccccctaccctcacccccacaatcctctcctgaaacttaaaaacagtgggaatataggaaagggaaccaaatctcattaattaattgttctcccccattaccccactgaatgaatggccatacaggctaagctgaataatgacaaagttgaaaggaccaatacagccccttttataaggattttgaatgttttgcaaatgtattggtccctgtgttgtattttgtagccttttcctgggcttcagctcccctacttcttgtatgtgtatgcatactgtagctaaccattaaagtcatgacacaca

SEQ ID NO: 355687 - DNA, 5360 bp, Homo sapiens
caggcgctgttggctgtctgcaagcttgtgcagtgagtgtttctcaggagctatcagaaactatcctcaccatggtagccaattgcagtaatgttatgaataaggccagacaaccaccacctggagttatgccaaaaggacgtcctcctagtgctagcagcttagatgccatttctcctgttcagattgaccctcttgctggaatgacatctcttagtataggtggttcagctgcccctcacacccagagtatgcagggttttcctccaaatttgggttctgcattcagtacccctcagtcaccagcaaaagcatttccacccctttcaacccccaatcagaccactgcattcagtggtattggaggactttcatcacagcttccagtaggtggtcttggcacaggcagcctgactggtataggaactggtgctcttggactccctgcagtgaataacgacccttttgtacagaggaaactgggcacctctggactgaatcagcctacattccagcagacggacttgtctcaggtgtggccagaggcaaaccagcactttagtaaagagatagatgatgaagcaaacagctatttccagcgaatatataatcatccaccacatccaaccatgtctgttgatgaggtattagaaatgctgcagagatttaaagactctactataaagagggaacgagaagtatttaactgtatgctaaggaacttgtttgaagaatatcgtttttttccccagtatcctgataaagagttacatataacagcctgcctatttggtggtataattgagaaaggactggtcacttacatggcactaggtctggctctacgatatgttcttgaagccttacgcaagccttttggatccaaaatgtattatttcgggattgctgcactagatagatttaaaaacagattgaaggactatccccagtattgtcagcatttggcttctatcagtcactttatgcaatttccacatcatttacaggagtatattgagtatggacagcagtctagagatcctcctgtgaaaatgcaaggctctatcacaacccctggaagtattgcactggctcaggcccaggctcaggcccaggttccagcaaaagctcctcttgctggtcaagttagcactatggtaaccacctcaacaactaccactgttgctaaaacggttacggtcaccaggccaactggagtcagctttaagaaagatgtgccaccttctattaatactacaaatatagatacgttgcttgtggccacagatcaaactgagagaattgtggagcccccagaaaatatccaggagaaaattgcttttattttcaataatctctcacagtcaaatatgacacaaaaggttgaagagctaaaggaaacggtgaaagaagaatttatgccttgggtttcacagtatctggttatgaagagagtcagtattgagccaaactttcatagcctgtattcaaacttccttgacacgctgaagaatcctgaatttaacaagatggttctgaatgagacctacagaaacattaaagtgctcctgacctctgataaagctgcagccaatttctcagatcgttctttgctgaagaacttgggacattggctaggaatgatcacattagctaaaaacaaacccatcttacacactgacttggatgtgaaatcattgctgctagaggcttatgttaaaggacaacaagaattgctctatgtagtgccctttgttgccaaagtcttagaatctagcattcgtagtgtggtttttaggccaccaaacccttggacaatggcaattatgaatgtattagctgagctacatcaggagcatgacttaaagttaaacttgaagtttgaaatcgaggttctctgcaagaaccttgcattagacatcaatgagctaaaacctggaaacctcctaaaggataaagatcgcctgaagaatttagatgagcaactctctgctccaaagaaagatgtcaagcagccagaagaactccctcccatcacaaccacaacaacttctactacaccagctaccaacaccacttgtacagccacggttccaccacagccacagtacagctaccacgacatcaatgtctattcccttgcgggcttggcaccacacattactctaaatccaacaattcccttgtttcaggcccatccacagttgaagcagtgtgtgcgtcaggcaattgaacgggctgtccaggagctggtccatcctgtggtggatcgatcaattaagattgccatgactacttgtgagcaaatagtcaggaaggattttgccctggattcggaggaatctcgaatgcgaatagcagctcatcacatgatgcgtaacttgacagctggaatggctatgattacatgcagggaacctttgctcatgagcatatctaccaacttaaaaaacagttttgcctcagcccttcgtactgcttccccacaacaaagagaaatgatggatcaggcagctgctcaattagctcaggacaattgtgagttggcttgctgttttattcagaagactgcagtagaaaaagcaggccctgagatggacaagagattagcaactgaatttgagctgagaaaacatgctaggcaagaaggacgcagatactgtgatcctgttgttttaacatatcaagctgaacggatgccagagcaaatcaggctgaaagttggtggtgtggacccaaagcagttggctgtttacgaagagtttgcacgcaatgttcctggcttcttacctacaaatgacttaagtcagcccacgggatttttagcccagcccatgaagcaagcttgggcaacagatgatgtagctcagatttatgataagtgtattacagaactggagcaacatctacatgccatcccaccaactttggccatgaaccctcaagctcaggctcttcgaagtctcttggaggttgtagttttatctcgaaactctcgggatgccatagctgctcttggattgctccaaaaggctgtagagggcttactagatgccacaagtggtgctgatgctgaccttctgctgcgctacagggaatgccacctcttggtcctaaaagctctgcaggatggccgggcatatgggtctccatggtgcaacaaacagatcacaaggtgcctaattgaatgtcgagatgaatataaatataatgtggaggctgtggagctgctaattcgcaatcatttggttaatatgcagcagtatgatcttcacctagcgcagtcaatggagaatggcttaaactacatggctgtggcatttgctatgcagttagtaaaaatcctgctggtggatgaaaggagtgttgctcatgttactgaggcagatctgttccacaccattgaaaccctcatgaggattaatgctcattccagaggcaatgctccagaaggattgccccagctgatggaagtagtgcgatccaactatgaagcaatgattgatcgtgctcatggaggcccaaactttatgatgcattctgggatctctcaagcctcagagtatgatgaccctccaggcctgagggagaaggcagagtatcttctgagggaatgggtgaatctctaccattcagcagcagctggccgcgacagtaccaaagctttctctgcatttgttggacagatgcaccagcaaggaatactgaagaccgatgatctcataacaaggttctttcgtctgtgtactgaaatgtgtgttgaaatcagttaccgtgctcaggctgagcagcagcacaatcctgctgccaatcccaccatgatccgagccaagtgctatcacaacctggatgcctttgttcgactcattgcactgctcgtgaaacactcaggggaggccaccaacactgtcacaaagattaatctgctgaacaaggtccttggtatagtagtgggagttctccttcaggatcatgatgttcgtcagagtgaatttcagcaacttccctaccatcgaatttttatcatgcttctcttggaactcaatgcacctgagcatgtgttggaaaccattaatttccagacacttacagctttctgcaatacattccacatcttgaggcctaccaaagctcctggctttgtatatgcctggcttgaactgatttcccatcggatatttattgcaagaatgctggcacatacgccacagcagaaggggtggcctatgtatgcacagctactgattgatttattcaaatatttagcgcctttccttagaaatgtggaactcaccaaacctatgcaaatcctctacaagggcactttaagagtgctgctggttcttttgcatgatttcccagagttcctttgtgattaccattatgggttctgtgatgtgatcccacctaattgtatccagttaagaaatttgatcctgagtgcctttccaagaaacatgaggctccccgacccattcactcctaatctaaaggtggacatgttgagtgaaattaacattgctccccggattctcaccaatttcactggagtaatgccacctcagttcaaaaaggatttggattcctatcttaaaactcgatcaccagtcactttcctgtctgatctgcgcagcaacctacaggtatccaatgaacctgggaatcgctacaacctccagctcatcaatgcactggtgctctatgtcgggactcaggccattgcgcacatccacaacaagggcagcacaccttcaatgagcaccatcactcactcagcacacatggatatcttccagaatttggctgtggacttggacactgagggtcgctatctctttttgaatgcaattgcaaatcagctccggtacccaaatagccacactcactacttcagttgcaccatgctgtacctttttgcagaggccaatacggaagccatccaagaacagatcacaagagttctcttggaacggttgattgtaaataggccacatccttggggtcttcttattaccttcattgagctgattaaaaacccagcgtttaagttctggaaccatgaatttgtacactgtgccccagaaatcgaaaagttattccagtcggtcgcacagtgctgcatgggacagaagcaggcccagcaagtaatggaagggacaggtgccagttagacgaaactgcatctctgttgtacgtgtcagtctagaggtctcactgcaccgagttcataaactgactgaagaatcctttcagctcttcctgactttcccagccctttggtttgtgggtatctgccccaactactgttgggatcagcctcctgtcgggctagtcgggggatcctcagagcacccacgtcg

SEQ ID NO: 355688 - DNA, 2181 bp, Homo sapiens
gggtgatgtcacttccatgattcattgtacgcgccgcaccgagagacggctctgtgagccattggtgagtactgacctggtcttgccatgcttgatgtcctcgcactcgagatatatagatctagtagagacctgctgatcatattaagggcttaaccacgagcatgagaagggcatggactattgttagtgccttcagcggatctcgtatggatcagagtatgcaagactagtggaagacgacgtttccattagcaatactgttggcaactcaccatacatctagtgtgacatgtcctctaacagatggcgcaactaataatggagtggcgtagcatggatatacttttgcatgatttcccagagttcctttgtgattaccattatgggttctgtgatgtgatcccacctaattgtatccagttaagaaatttgatcctgagtgcctttccaagaaacatgaggctccccgacccattcactcctaatctaaaggtggacatgttgagtgaaattaacattgctccccggattctcaccaatttcactggagtaatgccacctcagttcaaaaaggatttggattcctatcttaaaactcgatcaccagtcactttcctgtctgatctgcgcagcaacctacaggtatccaatgaacctgggaatcgctacaacctccagctcatcaatgcactggtgctctatgtcgggactcaggccattgcgcacatccacaacaagggcagcacaccttcaatgagcaccatcactcactcagcacacatggatatcttccagaatttggctgtggacttggacactgagggtcgctatctctttttgaatgcaattgcaaatcagctccggtacccaaatagccacactcactacttcagttgcaccatgctgtacctttttgcagaggccaatacggaagccatccaagaacagatcacaagagttctcttggaacggttgattgtaaataggccacatccttggggtcttcttattaccttcattgagctgattaaaaacccagcgtttaagttctggaaccatgaatttgtacactgtgccccagaaatcgaaaagttattccagtcggtcgcacagtgctgcatgggacagaagcaggcccagcaagtaatggaagggacaggtgccagttagacgaaactgcatctctgttgtacgtgtcagtctagaggtctcactgcaccgagttcataaactgactgaagaatcctttcagctcttcctgactttcccagccctttggtttgtgggtatctgccccaactactgttgggatcagcctcctgtcttatgtgggcacgttccaaagtttaaatgcatttttttgactcttggccaaaatttagaagatgctgtgaatatcattttgaacttgtgtaaatacatgaaagagaaaacctttgtctggaacttcttggctttgtgcaagctgtgtccaaggcaagtacataaactggtaccttgtaatgaagaggcagctgatgccatgcacttgtctgagggcatagctccatgtcttctgacattcctggtgtcccaaagaatagcaaaaagccagtttgaatattatgtaacttatttttttaatgtggacaggggaccttgaaaatcactaagttattaaaaatgtggatgtgctagaattggatatgtccaggaacatgggaagggctcactattggaatcccatgagtttccattttgtctctacccaaacgtattccaaagctgactgcatttgtaccatcttatttcttttggggattatacacctcagccgcctgagatgggggtcagctctttatataaagggaaaccagaccaggcctaaagcccaccccctaccctcacccccacaatcctctcctgaaacttaaaaacagtgggaatataggaaagggaaccaaatctcattaattaattgttctcccccattaccccactgaatgaatggccatacaggctaagctgaataatgacaaagttgaaaggaccaatacagccccttttataaggattttgaatgttttgcaaatgtattggtccctgtgttgtattttgtagccttttcctgggcttcagctcccctacttcttgtatgtgtatgcatactgtagctaaccattaaagtcatgacacaca

SEQ ID NO: 355689 - DNA, 1704 bp, Homo sapiens
gttctgttttgctcattttaaggtatccaatgaacctgggaatcgctacaacctccagctcatcaatgcactggtgctctatgtcgggactcaggccattgcgcacatccacaacaagggcagcacaccttcaatgagcaccatcactcactcagcacacatggatatcttccagaatttggctgtggacttggacactgagggtcgctatctctttttgaatgcaattgcaaatcagctccggtacccaaatagccacactcactacttcagttgcaccatgctgtacctttttgcagaggccaatacggaagccatccaagaacagatcacaagagttctcttggaacggttgattgtaaataggccacatccttggggtcttcttattaccttcattgagctgattaaaaacccagcgtttaagttctggaaccatgaatttgtacactgtgccccagaaatcgaaaagtgagttcaaagtaatttttaattgtctaggaatgagactggagactgaaaaccatctgtctctaggttgggtcagctgaatgagatgcaaggtattgttaggcctactctttaatcagagatttgtaactgtcttcatccttcaggttattccagtcggtcgcacagtgctgcatgggacagaagcaggcccagcaagtaatggaagggacaggtgccagttagacgaaactgcatctctgttgtacgtgtcagtctagaggtctcactgcaccgagttcataaactgactgaagaatcctttcagctcttcctgactttcccagccctttggtttgtgggtatctgccccaactactgttgggatcagcctcctgtcttatgtgggcacgttccaaagtttaaatgcatttttttgactcttggccaaaatttagaagatgctgtgaatatcattttgaacttgtgtaaatacatgaaagagaaaacctttgtctggaacttcttggctttgtgcaagctgtgtccaaggcaagtacataaactggtaccttgtaatgaagaggcagctgatgccatgcacttgtctgagggcatagctccatgtcttctgacattcctggtgtcccaaagaatagcaaaaagccagtttgaatattatgtaacttatttttttaatgtggacaggggaccttgaaaatcactaagttattaaaaatgtggatgtgctagaattggatatgtccaggaacatgggaagggctcactattggaatcccatgagtttccattttgtctctacccaaacgtattccaaagctgactgcatttgtaccatcttatttcttttggggattatacacctcagccgcctgagatgggggtcagctctttatataaagggaaaccagaccaggcctaaagcccaccccctaccctcacccccacaatcctctcctgaaacttaaaaacagtgggaatataggaaagggaaccaaatctcattaattaattgttctcccccattaccccactgaatgaatggccatacaggctaagctgaataatgacaaagttgaaaggaccaatacagccccttttataaggattttgaatgttttgcaaatgtattggtccctgtgttgtattttgtagccttttcctgggcttcagctcccctacttcttgtatgtgtatgcatactgtagctaaccattaaagtcatgacacaca

SEQ ID NO: 355690 - DNA, 874 bp, Homo sapiens
cagcgatgtcagggaacaaaccagaggcagccatacttcatctattttcctcaaatcaagacagagaaggtatcattatcagcattcacaatatatatttggaaagacaaagggaaacaccggtgtttccctttgtctggaacttcttggctttgtgcaagctgtgtccaaggcaagtacataaactggtaccttgtaatgaagaggcagctgatgccatgcacttgtctgagggcatagctccatgtcttctgacattcctggtgtcccaaagaatagcaaaaagccagtttgaatattatgtaacttatttttttaatgtggacaggggaccttgaaaatcactaagttattaaaaatgtggatgtgctagaattggatatgtccaggaacatgggaagggctcactattggaatcccatgagtttccattttgtctctacccaaacgtattccaaagctgactgcatttgtaccatcttatttcttttggggattatacacctcagccgcctgagatgggggtcagctctttatataaagggaaaccagaccaggcctaaagcccaccccctaccctcacccccacaatcctctcctgaaacttaaaaacagtgggaatataggaaagggaaccaaatctcattaattaattgttctcccccattaccccactgaatgaatggccatacaggctaagctgaataatgacaaagttgaaaggaccaatacagccccttttataaggattttgaatgttttgcaaatgtattggtccctgtgttgtattttgtagccttttcctgggcttcagctcccctacttcttgtatgtgtatgcatactgtagctaaccattaaagtcatgacacaca

SEQ ID NO: 355691 - DNA, 4608 bp, Homo sapiens
caggcgctgttggctgtctgcaagcttgtgcagtgagtgtttctcaggagctatcagaaactatcctcaccatggtagccaattgcagtaatgttatgaataaggccagacaaccaccacctggagttatgccaaaaggacgtcctcctagtgctagcagcttagatgccatttctcctgttcagattgaccctcttgctggaatgacatctcttagtataggtggttcagctgcccctcacacccagagtatgcagggttttcctccaaatttgggttctgcattcagtacccctcagtcaccagcaaaagcatttccacccctttcaacccccaatcagaccactgcattcagtggtattggaggactttcatcacagcttccagtaggtggtcttggcacaggcagcctgactggtataggaactggtgctcttggactccctgcagtgaataacgacccttttgtacagaggaaactgggcacctctggactgaatcagcctacattccagcagacggacttgtctcaggtgtggccagaggcaaaccagcactttagtaaagagatagatgatgaagcaaacagctatttccagcgaatatataatcatccaccacatccaaccatgtctgttgatgaggtattagaaatgctgcagagatttaaagactctactataaagagggaacgagaagtatttaactgtatgctaaggaacttgtttgaagaatatcgtttttttccccagtatcctgataaagagttacatataacagcctgcctatttggtggtataattgagaaaggactggtcacttacatggcactaggtctggctctacgatatgttcttgaagccttacgcaagccttttggatccaaaatgtattatttcgggattgctgcactagatagatttaaaaacagattgaaggactatccccagtattgtcagcatttggcttctatcagtcactttatgcaatttccacatcatttacaggagtatattgagtatggacagcagtctagagatcctcctgtgaaaatgcaaggctctatcacaacccctggaagtattgcactggctcaggcccaggctcaggcccaggttccagcaaaagctcctcttgctggtcaagttagcactatggtaaccacctcaacaactaccactgttgctaaaacggttacggtcaccaggccaactggagtcagctttaagaaagatgtgccaccttctattaatactacaaatatagatacgttgcttgtggccacagatcaaactgagagaattgtggagcccccagaaaatatccaggagaaaattgcttttattttcaataatctctcacagtcaaatatgacacaaaaggttgaagagctaaaggaaacggtgaaagaagaatttatgccttgggtttcacagtatctggttatgaagagagtcagtattgagccaaactttcatagcctgtattcaaacttccttgacacgctgaagaatcctgaatttaacaagatggttctgaatgagacctacagaaacattaaagtgctcctgacctctgataaagctgcagccaatttctcagatcgttctttgctgaagaacttgggacattggctaggaatgatcacattagctaaaaacaaacccatcttacacactgacttggatgtgaaatcattgctgctagaggcttatgttaaaggacaacaagaattgctctatgtagtgccctttgttgccaaagtcttagaatctagcattcgtagtgtggtttttaggccaccaaacccttggacaatggcaattatgaatgtattagctgagctacatcaggagcatgacttaaagttaaacttgaagtttgaaatcgaggttctctgcaagaaccttgcattagacatcaatgagctaaaacctggaaacctcctaaaggataaagatcgcctgaagaatttagatgagcaactctctgctccaaagaaagatgtcaagcagccagaagaactccctcccatcacaaccacaacaacttctactacaccagctaccaacaccacttgtacagccacggttccaccacagccacagtacagctaccacgacatcaatgtctattcccttgcgggcttggcaccacacattactctaaatccaacaattcccttgtttcaggcccatccacagttgaagcagtgtgtgcgtcaggcaattgaacgggctgtccaggagctggtccatcctgtggtggatcgatcaattaagattgccatgactacttgtgagcaaatagtcaggaaggattttgccctggattcggaggaatctcgaatgcgaatagcagctcatcacatgatgcgtaacttgacagctggaatggctatgattacatgcagggaacctttgctcatgagcatatctaccaacttaaaaaacagttttgcctcagcccttcgtactgcttccccacaacaaagagaaatgatggatcaggcagctgctcaattagctcaggacaattgtgagttggcttgctgttttattcagaagactgcagtagaaaaagcaggccctgagatggacaagagattagcaactgaatttgagctgagaaaacatgctaggcaagaaggacgcagatactgtgatcctgttgttttaacatatcaagctgaacggatgccagagcaaatcaggctgaaagttggtggtgtggacccaaagcagttggctgtttacgaagagtttgcacgcaatgttcctggcttcttacctacaaatgacttaagtcagcccacgggatttttagcccagcccatgaagcaagcttgggcaacagatgatgtagctcagatttatgataagtgtattacagaactggagcaacatctacatgccatcccaccaactttggccatgaaccctcaagctcaggctcttcgaagtctcttggaggttgtagttttatctcgaaactctcgggatgccatagctgctcttggattgctccaaaaggctgtagagggcttactagatgccacaagtggtgctgatgctgaccttctgctgcgctacagggaatgccacctcttggtcctaaaagctctgcaggatggccgggcatatgggtctccatggtgcaacaaacagatcacaaggtgcctaattgaatgtcgagatgaatataaatataatgtggaggctgtggagctgctaattcgcaatcatttggttaatatgcagcagtatgatcttcacctagcgcagtcaatggagaatggcttaaactacatggctgtggcatttgctatgcagttagtaaaaatcctgctggtggatgaaaggagtgttgctcatgttactgaggcagatctgttccacaccattgaaaccctcatgaggattaatgctcattccagaggcaatgctccagaaggattgccccagctgatggaagtagtgcgatccaactatgaagcaatgattgatcgtgctcatggaggcccaaactttatgatgcattctgggatctctcaagcctcagagtatgatgaccctccaggcctgagggagaaggcagagtatcttctgagggaatgggtgaatctctaccattcagcagcagctggccgcgacagtaccaaagctttctctgcatttgttggacaggtagagcttttggaaagaaagatgcaccagcaaggaatactgaagaccgatgatctcataacaaggttctttcgtctgtgtactgaaatgtgtgttgaaatcagttaccgtgctcaggctgagcagcagcacaatcctgctgccaatcccaccatgatccgagccaagtgctatcacaacctggatgcctttgttcgactcattgcactgctcgtgaaacactcaggggaggccaccaacactgtcacaaagattaatctgctgaacaaggtccttggtatagtagtgggagttctccttcaggatcatgatgttcgtcagagtgaatttcagcaacttccctaccatcgaatttttatcatgcttctcttggaactcaatgcacctgagcatgtgttggaaaccattaatttccagacacttacagctttctgcaatacattccacatcttgaggcctaccaaagctcctggctttgtatatgcctggcttgaactgatttcccatcggatatttattgcaagaatgctggcacatacgccacagcagaaggggtggcctatgtatgcacagctactgattgatttattcaaatatttagcgcctttccttagaaatgtggaactcaccaaacctatgcaaatcctctacaagggcactttaagagtgctgctggttcttttgcatgatttcccagagttcctttgtgattaccattatgggttctgtgatgtgatcccacctaattgtatccagttaagaaatttgatcctgagtgcctttccaagaaacatgaggctccccgaccatgatcgagtcagtgacgagagaaaaaagttcgagtcagcataggaaagaaccacaaagaaggccattacaatcacgatcagtgaaacagaaaatgagacccaaatcagtagat

SEQ ID NO: 355692 - DNA, 563 bp, Homo sapiens
ggccgtaacgcgccgcgcggagccgacgagacggcggggctagagaggccgtcccgaccgcgccccccgccggaagcggcttgttcgggcctgagctggcgctacgaagttccggtccaggtctctgacttcgggcttgttcgctggtggcgtcggagccgagccggactggtcaggatgatcacggacgtgcagctcgccatcttcgccaacatgctgggcgtgtcgctcttcttgcttgtcgttctctatcactacgtggccgtcaacaatcccaagaagcaggaatgaaagtggcgctttctccgccccagggttccaggacatagtctgaggcaagatggagggtatgaggggccttcacacttcacttcatcccttctacccatcacaacatacaaagcaactacacctggatttttccaaacaacttttatttcctcagagtcttccttaatcctatggaacaagaagctgccactgaatagggcccagtataggggcttgcttttctactccctccccccaatataaaaatatagacttttttttgtggtcccaaa

SEQ ID NO: 355693 - DNA, 430 bp, Homo sapiens
gccgcagtgtgcctggattcctgggccgagccggactggtcaggatgatcacggacgtgcagctcgccatcttcgccaacatgctgggcgtgtcgctcttcttgcttgtcgttctctatcactacgtggccgtcaacaatcccaagaagcaggaatgaaagtggcgctttctccgccccagggttccaggacatagtctgaggcaagatggagggtatgaggggccttcacacttcacttcatcccttctacccatcacaacatacaaagcaactacacctggatttttccaaacaacttttatttcctcagagtcttccttaatcctatggaacaagaagctgccactgaatagggcccagtataggggcttgcttttctactccctccccccaatataaaaatatagacttttttttgtggtcccaaa

SEQ ID NO: 355694 - DNA, 472 bp, Homo sapiens
cgtggctggcccgtggggcgaggacgggttcttgcgagggcgaggagtgcgccagcccgcagctcagcccctctcttctccgcaggatgatcacggacgtgcagctcgccatcttcgccaacatgctgggcgtgtcgctcttcttgcttgtcgttctctatcactacgtggccgtcaacaatcccaagaagcaggaatgaaagtggcgctttctccgccccagggttccaggacatagtctgaggcaagatggagggtatgaggggccttcacacttcacttcatcccttctacccatcacaacatacaaagcaactacacctggatttttccaaacaacttttatttcctcagagtcttccttaatcctatggaacaagaagctgccactgaatagggcccagtataggggcttgcttttctactccctccccccaatataaaaatatagacttttttttgtggtcccaaa

SEQ ID NO: 355695 - DNA, 829 bp, Homo sapiens
ggccgtaacgcgccgcgcggagccgacgagacggcggggctagagaggccgtcccgaccgcgccccccgccggaagcggcttgttcgggcctgagctggcgctacgaagttccggtccaggtctctgacttcgggcttgttcgctggtggcgtcggagccgagccggactggtcaggatgatcacggacgtgcagctcgccatcttcgccaacatgctgggcgtgtcgctcttcttgcttgtcgttctctatcactacgtggccgtcaacaatcccaagaagcaggaatgaaagtggcgctttctccgccccagggttccaggacatagtctgaggcaagatggagggtatgaggggccttcacacttcacttcatcccttctacccatcacaacatacaaagcaactacacctggatttttccaaacaacttttatttcctcagagtcttccttaatcctatggaacaagaagctgccactgaatagggcccagtataggggcttgcttttctactccctccccccaatataaaaatatagacttttttttgtggtcccaaaaaaaaaaaaaagttgaagccctggcgcccgctgtggccctatggatgatatgctaactaaaccttaggcatgccgccttattttggggtccctccctggactcgccctttgggaggttggagacaatttatcggccggccttatccaacgcatattgggccaaacccccgtagtgcgccagttaatcatcttgccgcgaatgcctattaagcagtttggggataacccaagggggccgcacccattttcttttcacaactgccctt

SEQ ID NO: 355696 - DNA, 884 bp, Homo sapiens
  misc_feature (617)..(618): n is a, c, g, or t
ggccgtaacgcgccgcgcggagccgacgagacggcggggctagagaggccgtcccgaccgcgccccccgccggaagcggcttgttcgggcctgagctggcgctacgaagttccggtccaggtctctgacttcgggcttgttcgctggtggcgtcggagccgagccggactggtcaggatgatcacggacgtgcagctcgccatcttcgccaacatgctgggcgtgtcgctcttcttgcttgtcgttctctatcactacgtggccgtcaacaatcccaagaagcaggaatgaaagtggcgctttctccgccccagggttccaggacatagtctgaggcaagatggagggtatgaggggccttcacacttcacttcatcccttctacccatcacaacatacaaagcaactacacctggatttttccaaacaacttttatttcctcagagtcttccttaatcctatggaacaagaagctgccactgaatagggcccagtataggggcttgcttttctactccctccccccaatataaaaatatagacttttttttgtggtcccaaaaaaaaaaaaaaaaaaaaaaaaaaaaaaacaatttttgggcggcttgggccctcnnaaaagttttcataaaccactgtcgttgtggcccgggggcccagatgggctacggtgacccctgtgtcccaaaggtgggttccccagagaaaaacccggggaccaaggacagcagcggccgcggattcctccggcaatagaaaaaacgcccgccgggggaaaacgcggcacggtctctcgaacgcaatcccagaagggggctgcagagagggacagagagggagctgcaaccaccggggagtcccagaggaagcgccaaatcaatgc

SEQ ID NO: 355697 - DNA, 481 bp, Homo sapiens
gtcaacaatcccaagaagcaggaatgaaagtggcgctttctccgccccagggttccaggacatagtctgaggcaagatggagggtatgaggggccttcacacttcacttcatcccttctacccatcacaacatgctgggcgtgtcgctcttcttgcttgtcgttctctatcactacgtggccgtcaacaatcccaagaagcaggaatgaaagtggcgctttctccgccccagggttccaggacatagtctgaggcaagatggagggtatgaggggccttcacacttcacttcatcccttctacccatcacaacatacaaagcaactacacctggatttttccaaacaacttttatttcctcagagtcttccttaatcctatggaacaagaagctgccactgaatagggcccagtataggggcttgcttttctactccctccccccaatataaaaatatagacttttttttgtggtcccaaa

SEQ ID NO: 355698 - DNA, 852 bp, Homo sapiens
  misc_feature (582)..(582): n is a, c, g, or t
  misc_feature (584)..(584): n is a, c, g, or t
  misc_feature (598)..(599): n is a, c, g, or t
  misc_feature (603)..(603): n is a, c, g, or t
  misc_feature (605)..(605): n is a, c, g, or t
  misc_feature (619)..(619): n is a, c, g, or t
  misc_feature (630)..(630): n is a, c, g, or t
  misc_feature (633)..(633): n is a, c, g, or t
  misc_feature (637)..(637): n is a, c, g, or t
  misc_feature (641)..(641): n is a, c, g, or t
  misc_feature (646)..(646): n is a, c, g, or t
  misc_feature (650)..(650): n is a, c, g, or t
  misc_feature (653)..(653): n is a, c, g, or t
  misc_feature (660)..(660): n is a, c, g, or t
  misc_feature (663)..(663): n is a, c, g, or t
  misc_feature (668)..(668): n is a, c, g, or t
  misc_feature (679)..(680): n is a, c, g, or t
  misc_feature (687)..(689): n is a, c, g, or t
  misc_feature (692)..(694): n is a, c, g, or t
  misc_feature (698)..(698): n is a, c, g, or t
ggccgtaacgcgccgcgcggagccgacgagacggcggggctagagaggccgtcccgaccgcgccccccgccggaagcggcttgttcgggcctgagctggcgctacgaagttccggtccaggtctctgacttcgggcttgttcgctggtggcgtcggagccgagccggactggtcaggatgatcacggacgtgcagctcgccatcttcgccaacatgctgggcgtgtcgctcttcttgcttgtcgttctctatcactacgtggccgtcaacaatcccaagaagcaggaatgaaagtggcgctttctccgccccagggttccaggacatagtctgaggcaagatggagggtatgaggggccttcacacttcacttcatcccttctacccatcacaacatacaaagcaactacacctggatttttccaaacaacttttatttcctcagagtcttccttaatcctatggaacaagaagctgccactgaatagggcccagtataggggcttgcttttctactccctccccccaatataaaaatatagacttttttttgtggtcccaaaaaaaaaaaaaaaaaaaaancntgcggccgaatttnnagtnantgggccaattcccntatagggagtngtntacnattnattgnccgnggnttaacancgngggantgggccctggnnttcccannnttnnncggnttgaagccaatcccccctttcccagttgcctgaatagccaaaaaggccgacccaatccgccttccaataagtggccccctctaatggaaatggaaatttaaacgttaaattttgtaaaaatcccgtatttgggcagctaattttaacctgggcc

SEQ ID NO: 355699 - DNA, 903 bp, Homo sapiens
  misc_feature (633)..(633): n is a, c, g, or t
  misc_feature (635)..(635): n is a, c, g, or t
  misc_feature (649)..(650): n is a, c, g, or t
  misc_feature (654)..(654): n is a, c, g, or t
  misc_feature (656)..(656): n is a, c, g, or t
  misc_feature (670)..(670): n is a, c, g, or t
  misc_feature (681)..(681): n is a, c, g, or t
  misc_feature (684)..(684): n is a, c, g, or t
  misc_feature (688)..(688): n is a, c, g, or t
  misc_feature (692)..(692): n is a, c, g, or t
  misc_feature (697)..(697): n is a, c, g, or t
  misc_feature (701)..(701): n is a, c, g, or t
  misc_feature (704)..(704): n is a, c, g, or t
  misc_feature (711)..(711): n is a, c, g, or t
  misc_feature (714)..(714): n is a, c, g, or t
  misc_feature (719)..(719): n is a, c, g, or t
  misc_feature (730)..(731): n is a, c, g, or t
  misc_feature (738)..(740): n is a, c, g, or t
  misc_feature (743)..(745): n is a, c, g, or t
  misc_feature (749)..(749): n is a, c, g, or t
ggccgtaacgcgccgcgcggagccgacgagacggcggggctagagaggccgtcccgaccgcgccccccgccggaagcggcttgttcgggcctgagctggcgctacgaagttccggtccaggtctctgacttcgggcttgttcgctggtggcgtcggagccgagccggactggtcaggatgatcacggacgtgcagctcgccatcttcgccaacatgctgggcgtgtcgctcttcttgcttgtcgttctctatcactacgtggccgtcaacaatcccaagaagcaggaatgaaagtggcgctttctccgccccagggttccaggacatagtctgaggcaagatggagggtatgaggggccttcacacttcacttcatcccttctacccatcacaacatacaaagcaactacacctggatttttccaaacaacttttatttcctcagagtcttccttaatcctatggaacaagaagctgccactgaatagggcccagtataggggcttgcttttctactccctccccccaatataaaaatatagacttttttttgtggtcccaaaaaaaaaaaaaaaaaaaaaaaaaaaaaaaaaaaaaaaaaaaaaaaaaaacaaaaaaaaaaaaaaaaaaaancntgcggccgaatttnnagtnantgggccaattcccntatagggagtngtntacnattnattgnccgnggnttaacancgngggantgggccctggnnttcccannnttnnncggnttgaagccaatcccccctttcccagttgcctgaatagccaaaaaggccgacccaatccgccttccaataagtggccccctctaatggaaatggaaatttaaacgttaaattttgtaaaaatcccgtatttgggcagctaattttaacctgggcc

SEQ ID NO: 355700 - DNA, 604 bp, Homo sapiens
ggccgtaacgcgccgcgcggagccgacgagacggcggggctagagaggccgtcccgaccgcgccccccgccggaagcggcttgttcgggcctgagctggcgctacgaagttccggtccaggtctctgacttcgggcttgttcgctggtggcgtcggagccgagccggactggtcaggatgatcacggacgtgcagctcgccatcttcgccaacatgctgggcgtgtcgctcttcttgcttgtcgttctctatcactacgtggccgtcaacaatcccaagaagcaggaatgaaagtggcgctttctccgccccagggttccaggacatagtctgaggcaagatggagggtatgaggggccttcacacttcacttcatcccttctacccatcacaacatacaaagcaactacacctggatttttccaaacaacttttatttcctcagagtcttccttaatcctatggaacaagaagctgccactgaatagggcccagtataggggcttgcttttctactccctccccccaatataaaaatatagacttttttttgtggtcccaaaaaaaaaaaatcagactgcggccgcttcgagctccttggccc

SEQ ID NO: 355701 - DNA, 584 bp, Homo sapiens
ggccgtaacgcgccgcgcggagccgacgagacggcggggctagagaggccgtcccgaccgcgccccccgccggaagcggcttgttcgggcctgagctggcgctacgaagttccggtccaggtctctgacttcgggcttgttcgctggtggcgtcggagccgagccggactggtcaggatgatcacggacgtgcagctcgccatcttcgccaacatgctgggcgtgtcgctcttcttgcttgtcgttctctatcactacgtggccgtcaacaatcccaagaagcaggaatgaaagtggcgctttctccgccccaggtctttccccctcttttctagggttccaggacatagtctgaggcaagatggagggtatgaggggccttcacacttcacttcatcccttctacccatcacaacatacaaagcaactacacctggatttttccaaacaacttttatttcctcagagtcttccttaatcctatggaacaagaagctgccactgaatagggcccagtataggggcttgcttttctactccctccccccaatataaaaatatagacttttttttgtggtcccaaa

SEQ ID NO: 355702 - DNA, 2287 bp, Homo sapiens
ggagggcggcgctcggggcgggaggcccggccgggtccgctaggacagcggggccgctgggaagttgtgagagcggcgctcgggggcgcgcttgcgtgcacgagggcccgggccgcgagcagccgcggccgtcccggtcgccacccttagcagcggtcgcggtcggtgccgaagcggtgttccccgccttagccgctggcgcctcccaagagagcggccggtgggccctcgtcctgtcagtggcgtcggaggccggcgctgcggtggccgcgcccttctggtgctcggacaccgctgaggagccggggccgggcacggctggctgacggctccgggcagctaaggctgcccgaggagaaggcggcggccgcggcgtaggcgcacgtccggcgggctcctggagcctggaggaggccgaggggaccatgtccgggaggcgcttccacctctccaccaccgaccgcgtcatcaaagctgtcccctttcctccaacccaacggcttactttcaaggaagtatttgagaatgggaaacctaaagttgatgttttaaaaaaccatttggtaaaggaaggacgactggaagaggaagtagccttaaagataatcaatgatggggctgccatcctgaggcaagagaagactatgatagaagtagatgctccaatcacagtatgtggtgatattcatggacaattctttgacctaatgaagttatttgaagttggaggatcacctagtaacacacgctacctctttctgggtgactatgtggacagaggctatttcagtatagagtgtgtgctgtatttatggagtttaaagattaatcatcccaaaacattgtttctgcttcggggaaatcatgaatgcaggcatcttacagactatttcaccttcaaacaggaatgtcgaatcaaatattcggaacaggtgtatgatgcctgtatggagacatttgactgtcttcctcttgctgccctcttaaaccagcagtttctctgtgtacatggaggaatgtcacctgaaattacttctttagatgacattaggaaattagacaggtttacggaacctcccgcctttggacctgtgtgtgacctgctttggtctgatccctcagaggattatggcaatgagaagaccttggagcactatacccacaacactgtccgagggtgctcttatttctacagttaccctgcagtttgtgaatttttgcagaacaataatttactatcaattatcagagcccatgaagcccaagatgctgggtatcgaatgtacaggaagagccaagccacaggctttccatcacttattacaattttctctgcccccaattacctagatgtctataacaataaagctgctgtgttgaaatatgaaaacaatgtcatgaatatcaggcagtttaactgttctccacacccctactggcttccaaactttatggatgttttcacatggtctttgccttttgttggggaaaaagtcacagagatgctggtaaatgtgctcaacatatgctctgatgacgaactgatttctgatgatgaagcagaaggaagcactacagttcgtaaggagatcatcaggaataagatcagagccattgggaagatggcacgggtcttttcaattcttcggcaagaaagtgagagtgtgctgactctcaagggcctgactcccacaggcacactccctctgggcgtcctctcaggaggcaagcagactatcgagacagccatcagagggttctcgcttcagcacaagatccggagttttgaagaagcgcgaggtctggaccgaattaatgagcgaatgccaccccgaaaggatagcatacacgctggtgggccaatgaaatctgtaacctcagcacactcacatgctgcgcacaggagcgaccaagggaagaaagcccattcatgacttagagtcctgccgtggctcaggtggatctaaaactcaagaacaaattctatttatttattattggaaaatgaaaagcaactcaaaacaacttcaacctggaggtgcatttataattcagtctgcatttattctgtaaaaaggtgactgttttataaattcttttaatttatgttcaatatatataaaaagtgcatctgttttgtttttcccttttttctccataattttaagaaatgaatctgattgttgtcaacacatttgtgaagtcttgtgctataaaggggaacttcccctaataaaagggccttggaaacctcaaacctgggtttctgacttgaaaaaaatcagtc

SEQ ID NO: 355703 - DNA, 2287 bp, Homo sapiens
ggagggcggcgctcggggcgggaggcccggccgggtccgctaggacagcggggccgctgggaagttgtgagagcggcgctcgggggcgcgcttgcgtgcacgagggcccgggccgcgagcagccgcggccgtcccggtcgccacccttagcagcggtcgcggtcggtgccgaagcggtgttccccgccttagccgctggcgcctcccaagagagcggccggtgggccctcgtcctgtcagtggcgtcggaggccggcgctgcggtggccgcgcccttctggtgctcggacaccgctgaggagccggggccgggcacggctggctgacggctccgggcagctaaggctgcccgaggagaaggcggcggccgcggcgtaggcgcacgtccggcgggctcctggagcctggaggaggccgaggggaccatgtccgggaggcgcttccacctctccaccaccgaccgcgtcatcaaagctgtcccctttcctccaacccaacggcttactttcaaggaagtatttgagaatgggaaacctaaagttgatgttttaaaaaaccatttggtaaaggaaggacgactggaagaggaagtagccttaaagataatcaatgatggggctgccatcctgaggcaagagaagactatgatagaagtagatgctccaatcacagtatgtggtgatattcatggacaattctttgacctaatgaagttatttgaagttggaggatcacctagtaacacacgctacctctttctgggtgactatgtggacagaggctatttcagtatagagtgtgtgctgtatttatggagtttaaagattaatcatcccaaaacattgtttctgcttcggggaaatcatgaatgcaggcatcttacagactatttcaccttcaaacaggaatgtcgaatcaaatattcggaacaggtgtatgatgcctgtatggagacatttgactgtcttcctcttgctgccctcttaaaccagcagtttctctgtgtacatggaggaatgtcacctgaaattacttctttagatgacattaggaaattagacaggtttacggaacctcccgcctttggacctgtgtgtgacctgctttggtctgatccctcagaggattatggcaatgagaagaccttggagcactatacccacaacactgtccgagggtgctcttatttctacagttaccctgcagtttgtgaatttttgcagaacaataatttactatcaattatcagagcccatgaagcccaagatgctgggtatcgaatgtacaggaagagccaagccacaggctttccatcacttattacaattttctctgcccccaattacctagatgtctataacaataaagctgctgtgttgaaatatgaaaacaatgtcatgaatatcaggcagtttaactgttctccacacccctactggcttccaaactttatggatgttttcacatggtctttgccttttgttggggaaaaagtcacagagatgctggtaaatgtgctcaacatatgctctgatgacgaactgatttctgatgatgaagcagaaggaagcactacagttcgtaaggagatcatcaggaataagatcagagccattgggaagatggcacgggtcttttcaattcttcggcaagaaagtgagagtgtgctgactctcaagggcctgactcccacaggcacactccctctgggcgtcctctcaggaggcaagcagactatcgagacagccacagtagaagcggtagaggcccgggaagccatcagagggttctcgcttcagcacaagatccggagttttgaagaagcgcgaggtctggaccgaattaatgagcgaatgccaccccgaaaggatagcatacacgctggtgggccaatgaaatctgtaacctcagcacactcacatgctgcgcacaggagcgaccaagggaagaaagcccattcatgacttagagtcctgccgtggctcaggtggatctaaaactcaagaacaaattctatttatttattattggaaaatgaaaagcaactcaaaacaacttcaacctggaggtgcatttataattcagtctgcatttattctgtaaaaaggtgactgttttataaattcttttaatttatgttcaatatatataaaaagtgcatctgttttgtttttcccttttttctccataattttaagaaatgaatctgattgttgtcaacacatttgtgaagtcttgtgctataaaggggaacttcccctaataaaagggccttggaaacctcaaa

SEQ ID NO: 355704 - DNA, 993 bp, Homo sapiens
ggagggcggcgctcggggcgggaggcccggccgggtccgctaggacagcggggccgctgggaagttgtgagagcggcgctcgggggcgcgcttgcgtgcacgagggcccgggccgcgagcagccgcggccgtcccggtcgccacccttagcagcggtcgcggtcggtgccgaagcggtgttccccgccttagccgctggcgcctcccaagagagcggccggtgggccctcgtcctgtcagtggcgtcggaggccggcgctgcggtggccgcgcccttctggtgctcggacaccgctgaggagccggggccgggcacggctggctgacggctccgggcagctaaggctgcccgaggagaaggcggcggccgcggcgtaggcgcacgtccggcgggctcctggagcctggaggaggccgaggggaccatgtccgggaggcgcttccacctctccaccaccgaccgcgtcatcaaagctgtcccctttcctccaacccaacggcttactttcaaggaagtatttgagaatgggaaacctaaagttgatgttttaaaaaaccatttggtaaaggaaggacgactggaagaggaagtagccttaaagataatcaatgatggggctgccatcctgaggcaagagaagactatgatagaagtagatgctccaatcacagtatgtggtgatattcatggacaattctttgacctaatgaagttatttgaagttggaggatcacctagtaacacacgctacctctttctgggtgactatgtggacagaggctatttcagtatagagagatggggtcctgccatgttgcctaggctggagtgcagtggctatacacaggtgcgatcatttcgtacctcagcctccaactcctggattcaagccatcctcctgcctcagcttcctgagtatatggaactatagatgcacaccactgtgcctggctagtcattgtatttaataaaacaacttttaaaatatttat

SEQ ID NO: 355705 - DNA, 669 bp, Homo sapiens
actggtttttcgaagctttatcaacatttcaaatattttattattgcatcaccagaactataacagtgagaaaaggtatagttgtttctaggcatgttaacgaagcaggtgtttcctttgtgtcctatctttgcattaattttaaataaccttcaccacagctacagttttttttctgggctctatcagctttaatgcaacggcagaagcttaagcaactggtcatgagaggtcaagtggtttacttctgtatcccttccatgtacaagagacatccatttgattctcaagagagccaaataggtcagcctcttcagcgattctaaaagatttcaagagcagaggcagaagtagactggaatttagttcaattcatttctgaggttgccctaaggtaggcaagttaaattaactttgtttctatggaaaaccattgggaactgataaacttgtattatacttgtaattgttttattaggtaagatggttcaaaatgcgaatgccttaacttggtgttataaaagttgaatcggaaggaaaatatgtagaagctatttttaagtttttaacttatgtacagctcctggttgtgcaagatagaaagctgtcctaaacgaaaagattagctcttttgttacttttttttgtggtctatgtggcctttgtgcg

SEQ ID NO: 355706 - DNA, 655 bp, Homo sapiens
taaaaacttcatatttctgtaactattttgttgtttataaagtatgactataaattaataggactttgaaaataaacatgccagaacaaacatatccaaatgagtattgtcccttcaaagtagttaccttgggaggctacacacctattccaacaatgctgtccttgttcaaaaacatttttggaactcctcttttggcattgccttcagagtctgcgacacattcttttgattatcctcaatgatgggaaatcttcgtcctttgagggtggatttgatttttggacagccaaaagtcattcggagtcaagactgataaataagctgctgtgttgaaatatgaaaacaatgtcatgaatatcaggcagtttaactgttctccacacccctactggcttccaaactttatggatgttttcacatggtctttgccttttgttggggaaaaaggtaagagaactaaagcacatgtctcatcagttgtttggtgactgagcataccttatatttgcatgagcccctccatgattcagaaatgttttctaattttgtttgttctctacatagattttttttttttttttctgagatggagtctcgctctgtcacccaggctggagtgcagtggcacgatctcagctaactacaacctccg

SEQ ID NO: 355707 - DNA, 2257 bp, Homo sapiens
ggagggcggcgctcggggcgggaggcccggccgggtccgctaggacagcggggccgctgggaagttgtgagagcggcgctcgggggcgcgcttgcgtgcacgagggcccgggccgcgagcagccgcggccgtcccggtcgccacccttagcagcggtcgcggtcggtgccgaagcggtgttccccgccttagccgctggcgcctcccaagagagcggccggtgggccctcgtcctgtcagtggcgtcggaggccggcgctgcggtggccgcgcccttctggtgctcggacaccgctgaggagccggggccgggcacggctggctgacggctccgggcagctaaggctgcccgaggagaaggcggcggccgcggcgtaggcgcacgtccggcgggctcctggagcctggaggaggccgaggggaccatgtccgggaggcgcttccacctctccaccaccgaccgcgtcatcaaagctgtcccctttcctccaacccaacggcttactttcaaggaagtatttgagaatgggaaacctaaagttgatgttttaaaaaaccatttggtaaaggaaggacgactggaagaggaagtagccttaaagataatcaatgatggggctgccatcctgaggcaagagaagactatgatagaagtagatgctccaatcacagtatgtggtgatattcatggacaattctttgacctaatgaagttatttgaagttggaggatcacctagtaacacacgctacctctttctgggtgactatgtggacagaggctatttcagtatagagtgtgtgctgtatttatggagtttaaagattaatcatcccaaaacattgtttctgcttcggggaaatcatgaatgcaggcatcttacagactatttcaccttcaaacaggaatgtcgaatcaaatattcggaacaggtgtatgatgcctgtatggagacatttgactgtcttcctcttgctgccctcttaaaccagcagtttctctgtgtacatggaggaatgtcacctgaaattacttctttagatgacattaggaaattagacaggtttacggaacctcccgcctttggacctgtgtgtgacctgctttggtctgatccctcagaggattatggcaatgagaagaccttggagcactatacccacaacactgtccgagggtgctcttatttctacagttaccctgcagtttgtgaatttttgcagaacaataatttactatcaattatcagagcccatgaagcccaagatgctgggtatcgaatgtacaggaagagccaagccacaggctttccatcacttattacaattttctctgcccccaattacctagatgtctataacaataaagctgctgtgttgaaatatgaaaacaatgtcatgaatatcaggcagtttaactgttctccacacccctactggcttccaaactttatggatgttttcacatggtctttgccttttgttggggaaaaagtcacagagatgctggtaaatgtgctcaacatatgctctgatgacgaactgatttctgatgatgaagcagaaggaagcactacagttcgtaaggagatcatcaggaataagatcagagccattgggaagatggcacgggtcttttcaattcttcggcaagaaagtgagagtgtgctgactctcaagggcctgactcccacaggcacactccctctgggcgtcctctcaggaggcaagcagactatcgagacagccatcagagggttctcgcttcagcacaagatccggagttttgaagaagcgcgaggtctggaccgaattaatgagcgaatgccaccccgaaaggatagcatacacgctggtgggccaatgaaatctgtaacctcagcacactcacatgctgcgcacaggagcgaccaagggaagaaagcccattcatgacttagagtcctgccgtggctcaggtggatctaaaactcaagaacaaattctatttatttattattggaaaatgaaaagcaactcaaaacaacttcaacctggaggtgcatttataattcagtctgcatttattctgtaaaaaggtgactgttttataaattcttttaatttatgttcaatatatataaaaagtgcatctgttttgtttttcccttttttctccataattttaagaaatgaatctgattgttgtcaacacatttgtgaagtcttgtgctataaaggggaacttcccctaataaaagggccttggaaacctcaaa

SEQ ID NO: 355708 - DNA, 2314 bp, Homo sapiens
ggagggcggcgctcggggcgggaggcccggccgggtccgctaggacagcggggccgctgggaagttgtgagagcggcgctcgggggcgcgcttgcgtgcacgagggcccgggccgcgagcagccgcggccgtcccggtcgccacccttagcagcggtcgcggtcggtgccgaagcggtgttccccgccttagccgctggcgcctcccaagagagcggccggtgggccctcgtcctgtcagtggcgtcggaggccggcgctgcggtggccgcgcccttctggtgctcggacaccgctgaggagccggggccgggcacggctggctgacggctccgggcagctaaggctgcccgaggagaaggcggcggccgcggcgtaggcgcacgtccggcgggctcctggagcctggaggaggccgaggggaccatgtccgggaggcgcttccacctctccaccaccgaccgcgtcatcaaagctgtcccctttcctccaacccaacggcttactttcaaggaagtatttgagaatgggaaacctaaagttgatgttttaaaaaaccatttggtaaaggaaggacgactggaagaggaagtagccttaaagataatcaatgatggggctgccatcctgaggcaagagaagactatgatagaagtagatgctccaatcacagtatgtggtgatattcatggacaattctttgacctaatgaagttatttgaagttggaggatcacctagtaacacacgctacctctttctgggtgactatgtggacagaggctatttcagtatagagtgtgtgctgtatttatggagtttaaagattaatcatcccaaaacattgtttctgcttcggggaaatcatgaatgcaggcatcttacagactatttcaccttcaaacaggaatgtcgaatcaaatattcggaacaggtgtatgatgcctgtatggagacatttgactgtcttcctcttgctgccctcttaaaccagcagtttctctgtgtacatggaggaatgtcacctgaaattacttctttagatgacattaggaaattagacaggtttacggaacctcccgcctttggacctgtgtgtgacctgctttggtctgatccctcagaggattatggcaatgagaagaccttggagcactatacccacaacactgtccgagggtgctcttatttctacagttaccctgcagtttgtgaatttttgcagaacaataatttactatcaattatcagagcccatgaagcccaagatgctgggtatcgaatgtacaggaagagccaagccacaggctttccatcacttattacaattttctctgcccccaattacctagatgtctataacaataaagctgctgtgttgaaatatgaaaacaatgtcatgaatatcaggcagtttaactgttctccacacccctactggcttccaaactttatggatgttttcacatggtctttgccttttgttggggaaaaagtcacagagatgctggtaaatgtgctcaacatatgctctgatgacgaactgatttctgatgatgaagcagaagatcactacattccaagctatcagaaaggaagcactacagttcgtaaggagatcatcaggaataagatcagagccattgggaagatggcacgggtcttttcaattcttcggcaagaaagtgagagtgtgctgactctcaagggcctgactcccacaggcacactccctctgggcgtcctctcaggaggcaagcagactatcgagacagccacagtagaagcggtagaggcccgggaagccatcagagggttctcgcttcagcacaagatccggagttttgaagaagcgcgaggtctggaccgaattaatgagcgaatgccaccccgaaaggatagcatacacgctggtgggccaatgaaatctgtaacctcagcacactcacatgctgcgcacaggagcgaccaagggaagaaagcccattcatgacttagagtcctgccgtggctcaggtggatctaaaactcaagaacaaattctatttatttattattggaaaatgaaaagcaactcaaaacaacttcaacctggaggtgcatttataattcagtctgcatttattctgtaaaaaggtgactgttttataaattcttttaatttatgttcaatatatataaaaagtgcatctgttttgtttttcccttttttctccataattttaagaaatgaatctgattgttgtcaacacatttgtgaagtcttgtgctataaaggggaacttcccctaataaaagggccttggaaacctcaaa

SEQ ID NO: 355709 - DNA, 2317 bp, Homo sapiens
ggagggcggcgctcggggcgggaggcccggccgggtccgctaggacagcggggccgctgggaagttgtgagagcggcgctcgggggcgcgcttgcgtgcacgagggcccgggccgcgagcagccgcggccgtcccggtcgccacccttagcagcggtcgcggtcggtgccgaagcggtgttccccgccttagccgctggcgcctcccaagagagcggccggtgggccctcgtcctgtcagtggcgtcggaggccggcgctgcggtggccgcgcccttctggtgctcggacaccgctgaggagccggggccgggcacggctggctgacggctccgggcagctaaggctgcccgaggagaaggcggcggccgcggcgtaggcgcacgtccggcgggctcctggagcctggaggaggccgaggggaccatgtccgggaggcgcttccacctctccaccaccgaccgcgtcatcaaagctgtcccctttcctccaacccaacggcttactttcaaggaagtatttgagaatgggaaacctaaagttgatgttttaaaaaaccatttggtaaaggaaggacgactggaagaggaagtagccttaaagataatcaatgatggggctgccatcctgaggcaagagaagactatgatagaagtagatgctccaatcacagtatgtggtgatattcatggacaattctttgacctaatgaagttatttgaagttggaggatcacctagtaacacacgctacctctttctgggtgactatgtggacagaggctatttcagtatagagtgtgtgctgtatttatggagtttaaagattaatcatcccaaaacattgtttctgcttcggggaaatcatgaatgcaggcatcttacagactatttcaccttcaaacaggaatgtcgaatcaaatattcggaacaggtgtatgatgcctgtatggagacatttgactgtcttcctcttgctgccctcttaaaccagcagtttctctgtgtacatggaggaatgtcacctgaaattacttctttagatgacattaggaaattagacaggtttacggaacctcccgcctttggacctgtgtgtgacctgctttggtctgatccctcagaggattatggcaatgagaagaccttggagcactatacccacaacactgtccgagggtgctcttatttctacagttaccctgcagtttgtgaatttttgcagaacaataatttactatcaattatcagagcccatgaagcccaagatgctgggtatcgaatgtacaggaagagccaagccacaggctttccatcacttattacaattttctctgcccccaattacctagatgtctataacaataaagctgctgtgttgaaatatgaaaacaatgtcatgaatatcaggcagtttaactgttctccacacccctactggcttccaaactttatggatgttttcacatggtctttgccttttgttggggaaaaagtcacagagatgctggtaaatgtgctcaacatatgctctgatgacgaactgatttctgatgatgaagcagaaggaagcactacagttcgtaaggagatcatcaggaataagatcagagccattgggaagatggcacgggtcttttcaattcttcggcaagaaagtgagagtgtgctgactctcaagggcctgactcccacaggcacactccctctgggcgtcctctcaggaggcaagcagactatcgagacagccacagtagaagcggtagaggcccgggaagccatcagagggttctcgcttcagcacaagatccggagttttgaagaagcgcgaggtctggaccgaattaatgagcgaatgccaccccgaaaggatagcatacacgctggtgggccaatgaaatctgtaacctcagcacactcacatgctgcgcacaggagcgaccaagggaagaaagcccattcatgacttagagtcctgccgtggctcaggtggatctaaaactcaagaacaaattctatttatttattattggaaaatgaaaagcaactcaaaacaacttcaacctggaggtgcatttataattcagtctgcatttattctgtaaaaaggtgactgttttataaattcttttaatttatgttcaatatatataaaaagtgcatctgttttgtttttcccttttttctccataattttaagaaatgaatctgattgttgtcaacacatttgtgaagtcttgtgctataaaggggaacttcccctaataaaagggccttggaaacctcaaacctgggtttctgacttgaaaaaaatcagtc

SEQ ID NO: 355710 - DNA, 2256 bp, Homo sapiens
ggagggcggcgctcggggcgggaggcccggccgggtccgctaggacagcggggccgctgggaagttgtgagagcggcgctcgggggcgcgcttgcgtgcacgagggcccgggccgcgagcagccgcggccgtcccggtcgccacccttagcagcggtcgcggtcggtgccgaagcggtgttccccgccttagccgctggcgcctcccaagagagcggccggtgggccctcgtcctgtcagtggcgtcggaggccggcgctgcggtggccgcgcccttctggtgctcggacaccgctgaggagccggggccgggcacggctggctgacggctccgggcagctaaggctgcccgaggagaaggcggcggccgcggcgtaggcgcacgtccggcgggctcctggagcctggaggaggccgaggggaccatgtccgggaggcgcttccacctctccaccaccgaccgcgtcatcaaagctgtcccctttcctccaacccaacggcttactttcaaggaagtatttgagaatgggaaacctaaagttgatgttttaaaaaaccatttggtaaaggaaggacgactggaagaggaagtagccttaaagataatcaatgatggggctgccatcctgaggcaagagaagactatgatagaagtagatgctccaatcacagtatgtggtgatattcatggacaattctttgacctaatgaagttatttgaagttggaggatcacctagtaacacacgctacctctttctgggtgactatgtggacagaggctatttcagtatagagtgtgtgctgtatttatggagtttaaagattaatcatcccaaaacattgtttctgcttcggggaaatcatgaatgcaggcatcttacagactatttcaccttcaaacaggaatgtcgaatcaaatattcggaacaggtgtatgatgcctgtatggagacatttgactgtcttcctcttgctgccctcttaaaccagcagtttctctgtgtacatggaggaatgtcacctgaaattacttctttagatgacattaggaaattagacaggtttacggaacctcccgcctttggacctgtgtgtgacctgctttggtctgatccctcagaggattatggcaatgagaagaccttggagcactatacccacaacactgtccgagggtgctcttatttctacagttaccctgcagtttgtgaatttttgcagaacaataatttactatcaattatcagagcccatgaagcccaagatgctgggtatcgaatgtacaggaagagccaagccacaggctttccatcacttattacaattttctctgcccccaattacctagatgtctataacaataaagctgctgtgttgaaatatgaaaacaatgtcatgaatatcaggcagtttaactgttctccacacccctactggcttccaaactttatggatgttttcacatggtctttgccttttgttggggaaaaagtcacagagatgctggtaaatgtgctcaacatatgctctgatgacgaactgatttctgatgatgaagcagaaggaagcactacagttcgtaaggagatcatcaggaataagatcagagccattgggaagatggcacgggtcttttcaattcttcggcaagaaagtgagagtgtgctgactctcaagggcctgactcccacaggcacactccctctgggcgtcctctcaggaggcaagcagactatcgagacagccacagtagaagcggtagaggcccgggaagctttaatgcaacggcagaagcttaagcaactggtcatgagaggtcaagtggtttacttctgtatcccttccatgtacaagagacatccatttgattctcaagagagccaaataggtcagcctcttcagcgattctaaaagatttcaagagcagaggcagaagtagactggaatttagttcaattcatttctgaggttgccctaaggtaggcaagttaaattaactttgtttctatggaaaaccattgggaactgataaacttgtattatacttgtaattgttttattaggtaagatggttcaaaatgcgaatgccttaacttggtgttataaaagttgaatcggaaggaaaatatgtagaagctatttttaagtttttaacttatgtacagctcctggttgtgcaagatagaaagctgtcctaaacgaaaagattagctcttttgttacttttttttgtggtctatgtggcctttgtgcg

SEQ ID NO: 355711 - DNA, 1401 bp, Homo sapiens
gctgctgttcagaggatcccgatgatgtggacagaggctatttcagtatagaggtcgaatcaaatattcggaacaggtgtatgatgcctgtatggagacatttgactgtcttcctcttgctgccctcttaaaccagcagtttctctgtgtacatggaggaatgtcacctgaaattacttctttagatgacattaggaaattagacaggtttacggaacctcccgcctttggacctgtgtgtgacctgctttggtctgatccctcagaggattatggcaatgagaagaccttggagcactatacccacaacactgtccgagggtgctcttatttctacagttaccctgcagtttgtgaatttttgcagaacaataatttactatcaattatcagagcccatgaagcccaagatgctgggtatcgaatgtacaggaagagccaagccacaggctttccatcacttattacaattttctctgcccccaattacctagatgtctataacaataaagctgctgtgttgaaatatgaaaacaatgtcatgaatatcaggcagtttaactgttctccacacccctactggcttccaaactttatggatgttttcacatggtctttgccttttgttggggaaaaagtcacagagatgctggtaaatgtgctcaacatatgctctgatgacgaactgatttctgatgatgaagcagaaggaagcactacagttcgtaaggagatcatcaggaataagatcagagccattgggaagatggcacgggtcttttcaattcttcggcaagaaagtgagagtgtgctgactctcaagggcctgactcccacaggcacactccctctgggcgtcctctcaggaggcaagcagactatcgagacagccatcagagggttctcgcttcagcacaagatccggagttttgaagaagcgcgaggtctggaccgaattaatgagcgaatgccaccccgaaaggatagcatacacgctggtgggccaatgaaatctgtaacctcagcacactcacatgctgcgcacaggagcgaccaagggaagaaagcccattcatgacttagagtcctgccgtggctcaggtggatctaaaactcaagaacaaattctatttatttattattggaaaatgaaaagcaactcaaaacaacttcaacctggaggtgcatttataattcagtctgcatttattctgtaaaaaggtgactgttttataaattcttttaatttatgttcaatatatataaaaagtgcatctgttttgtttttcccttttttctccataattttaagaaatgaatctgattgttgtcaacacatttgtgaagtcttgtgctataaaggggaacttcccctaataaaagggccttggaaacctcaaa

SEQ ID NO: 355712 - DNA, 442 bp, Homo sapiens
tcaagggcctgactcccacaggcacactccctctgggcgtcctctcaggaggcaagcagactatcgagacaggtgagtatgagagtgctcctccatggaaggtgtgctcccgttacctaacagtcagcacacacttacaaatgggggctttcctcagaaaatgccacgagagcagttggttataccataagcggggaaatgaatcttcacccctacttccctccatacagaaaacctaaatcagaatggcttattataacttcagtgtaaaaagcaaaacagtaaaacaagaagaaagtatggagagtagacactggggtagacagagtccttaagtaggacacaaaaagtactaaccttaaaaagccagttgaatttcattaaaataaagaacttctcttcttaaaaatacatgattaagagaggaaaaaggcaagacaca

SEQ ID NO: 355713 - DNA, 416 bp, Homo sapiens
ggcttttgtgtgtcttctagttagacaggtttacggaacctcccgcctttggacctgtgtgtgacctgctttggtctgatccctcagaggattatggcaatgagaagaccttggagcactatacccacaacactgtccgagggtgctcttatttctacaggtaagctagtccttgaggtcgaaaattatgaaaggaaactgtaattcattttatcagatgatttttcagcattttatatttcaaatctatgtagtataagcactcctgtttaatttttcgattaataggaggcaagaaacttgtttgtttgttggctttttatattttcttaggtatatatcctaagaagtgtaatacaccaaacatgattggacatcctgcagtgctctgatatttttgtctgactctaagtgat

SEQ ID NO: 355714 - DNA, 849 bp, Homo sapiens
ggagggcggcgctcggggcgggaggcccggccgggtccgctaggacagcggggccgctgggaagttgtgagagcggcgctcgggggcgcgcttgcgtgcacgagggcccgggccgcgagcagccgcggccgtcccggtcgccacccttagcagcggtcgcggtcggtgccgaagcggtgttccccgccttagccgctggcgcctcccaagagagcggccggtgggccctcgtcctgtcagtggcgtcggaggccggcgctgcggtggccgcgcccttctggtgctcggacaccgctgaggagccggggccgggcacggctggctgacggctccgggcagctaaggctgcccgaggagaaggcggcggccgcggcgtaggcgcacgtccggcgggctcctggagcctggaggaggccgaggggaccatgtccgggaggcgcttccacctctccaccaccgaccgcgtcatcaaagctgtcccctttcctccaacccaacggcttactttcaaggaagtatttgagaatgggaaacctaaagttgatgttttaaaaaaccatttggtaaaggaaggacgactggaagaggaagtagccttaaagataatcaatgatggggctgccatcctgaggcaagagaagactatgatagaagtagatgctccaatcacagtatgtggtgatattcatggacaattctttgacctaatgaagttatttgaagttggaggatcacctagtaacacacgctacctctttctgggtgactatgtggacagaggctatttcagtatagaggtaaaaattaaactggatatgttgggactattatattgtctttcaaaaaaga

SEQ ID NO: 355715 - DNA, 2371 bp, Homo sapiens
ggagggcggcgctcggggcgggaggcccggccgggtccgctaggacagcggggccgctgggaagttgtgagagcggcgctcgggggcgcgcttgcgtgcacgagggcccgggccgcgagcagccgcggccgtcccggtcgccacccttagcagcggtcgcggtcggtgccgaagcggtgttccccgccttagccgctggcgcctcccaagagagcggccggtgggccctcgtcctgtcagtggcgtcggaggccggcgctgcggtggccgcgcccttctggtgctcggacaccgctgaggagccggggccgggcacggctggctgacggctccgggcagctaaggctgcccgaggagaaggcggcggccgcggcgtaggcgcacgtccggcgggctcctggagcctggaggaggccgaggggaccatgtccgggaggcgcttccacctctccaccaccgaccgcgtcatcaaagctgtcccctttcctccaacccaacggcttactttcaaggaagtatttgagaatgggaaacctaaagttgatgttttaaaaaaccatttggtaaaggaaggacgactggaagaggaagtagccttaaagataatcaatgatggggctgccatcctgaggcaagagaagactatgatagaagtagatgctccaatcacagtatgtggtgatattcatggacaattctttgacctaatgaagttatttgaagttggaggatcacctagtaacacacgctacctctttctgggtgactatgtggacagaggctatttcagtatagagtgtgtgctgtatttatggagtttaaagattaatcatcccaaaacattgtttctgcttcggggaaatcatgaatgcaggcatcttacagactatttcaccttcaaacaggaatgtcgaatcaaatattcggaacaggtgtatgatgcctgtatggagacatttgactgtcttcctcttgctgccctcttaaaccagcagtttctctgtgtacatggaggaatgtcacctgaaattacttctttagatgacattaggaaattagacaggtttacggaacctcccgcctttggacctgtgtgtgacctgctttggtctgatccctcagaggattatggcaatgagaagaccttggagcactatacccacaacactgtccgagggtgctcttatttctacagttaccctgcagtttgtgaatttttgcagaacaataatttactatcaattatcagagcccatgaagcccaagatgctgggtatcgaatgtacaggaagagccaagccacaggctttccatcacttattacaattttctctgcccccaattacctagatgtctataacaataaagagtctgcgacacattcttttgattatcctcaatgatgggaaatcttcgtcctttgagggtggatttgatttttggacagccaaaagtcattcggagtcaagactgataaataagctgctgtgttgaaatatgaaaacaatgtcatgaatatcaggcagtttaactgttctccacacccctactggcttccaaactttatggatgttttcacatggtctttgccttttgttggggaaaaagtcacagagatgctggtaaatgtgctcaacatatgctctgatgacgaactgatttctgatgatgaagcagaaggaagcactacagttcgtaaggagatcatcaggaataagatcagagccattgggaagatggcacgggtcttttcaattcttcggcaagaaagtgagagtgtgctgactctcaagggcctgactcccacaggcacactccctctgggcgtcctctcaggaggcaagcagactatcgagacagccatcagagggttctcgcttcagcacaagatccggagttttgaagaagcgcgaggtctggaccgaattaatgagcgaatgccaccccgaaaggatagcatacacgctggtgggccaatgaaatctgtaacctcagcacactcacatgctgcgcacaggagcgaccaagggaagaaagcccattcatgacttagagtcctgccgtggctcaggtggatctaaaactcaagaacaaattctatttatttattattggaaaatgaaaagcaactcaaaacaacttcaacctggaggtgcatttataattcagtctgcatttattctgtaaaaaggtgactgttttataaattcttttaatttatgttcaatatatataaaaagtgcatctgttttgtttttcccttttttctccataattttaagaaatgaatctgattgttgtcaacacatttgtgaagtcttgtgctataaaggggaacttcccctaataaaagggccttggaaacctcaaa

SEQ ID NO: 355716 - DNA, 1608 bp, Homo sapiens
  misc_feature (1600)..(1600): n is a, c, g, or t
ggagggcggcgctcggggcgggaggcccggccgggtccgctaggacagcggggccgctgggaagttgtgagagcggcgctcgggggcgcgcttgcgtgcacgagggcccgggccgcgagcagccgcggccgtcccggtcgccacccttagcagcggtcgcggtcggtgccgaagcggtgttccccgccttagccgctggcgcctcccaagagagcggccggtgggccctcgtcctgtcagtggcgtcggaggccggcgctgcggtggccgcgcccttctggtgctcggacaccgctgaggagccggggccgggcacggctggctgacggctccgggcagctaaggctgcccgaggagaaggcggcggccgcggcgtaggcgcacgtccggcgggctcctggagcctggaggaggccgaggggaccatgtccgggaggcgcttccacctctccaccaccgaccgcgtcatcaaagctgtcccctttcctccaacccaacggcttactttcaaggaagtatttgagaatgggaaacctaaagttgatgttttaaaaaaccatttggtaaaggaaggacgactggaagaggaagtagccttaaagataatcaatgatggggctgccatcctgaggcaagagaagactatgatagaagtagatgctccaatcacagtatgtggtgatattcatggacaattctttgacctaatgaagttatttgaagttggaggatcacctagtaacacacgctacctctttctgggtgactatgtggacagaggctatttcagtatagagtgtgtgctgtatttatggagtttaaagattaatcatcccaaaacattgtttctgcttcggggaaatcatgaatgcaggcatcttacagactatttcaccttcaaacaggaatgtcgaatcaaatattcggaacaggtgtatgatgcctgtatggagacatttgactgtcttcctcttgctgccctcttaaaccagcagtttctctgtgtacatggaggaatgtcacctgaaattacttctttagatgacattaggaaattagacaggtttacggaacctcccgcctttggacctgtgtgtgacctgctttggtctgatccctcagaggattatggcaatgagaagaccttggagcactatacccacaacactgtccgagggtgctcttatttctacagttaccctgcagtttgtgaatttttgcagaacaataatttactatcaattatcagagcccatgaagcccaagatgctgggtatcgaatgtacaggaagagccaagccacaggctttccatcacttattacaattttctctgcccccaattacctagatgtctataacaataaagctgctgtgttgaaatatgaaaacaatgtcatgaatatcaggcagtttaactgttctccacacccctactggcttccaaactttatggatgttttcacatggtctttgccttttgttggggaaaaagtcacagagatgctggtaaatgtgctcaacatatgctctgatgacgaactgatttctgatgatgaagcagaagaagcactacagttcgtagggaggttcttcggggnttaggttc

SEQ ID NO: 355717 - DNA, 790 bp, Homo sapiens
agctttttgttaggtatatgtctaccatgattatgcatatagagcttttatgaaaattactttcacaatttcagctgccctttgggctttaaggaagcagtagctgcagccaagactgattcagtcagacattgcccatgactttcactagacgtgtgctccatagccacctttctgtgtgtttctctaggaggttgctgtgtgctaagaaactttttttaagcctgttgctttgctgcctaattgagctctctccacctgcttcctgtttttctgtagccatcagagggttctcgcttcagcacaagatccggagttttgaagaagcgcgaggtctggaccgaattaatgagcgaatgccaccccgaaaggatagcatacacgctggtgggccaatgaaatctgtaacctcagcacactcacatgctgcgcacaggagcgaccaagggaagaaagcccattcatgacttagagtcctgccgtggctcaggtggatctaaaactcaagaacaaattctatttatttattattggaaaatgaaaagcaactcaaaacaacttcaacctggaggtgcatttataattcagtctgcatttattctgtaaaaaggtgactgttttataaattcttttaatttatgttcaatatatataaaaagtgcatctgttttgtttttcccttttttctccataattttaagaaatgaatctgattgttgtcaacacatttgtgaagtcttgtgctataaaggggaacttcccctaataaaagggccttggaaacctcaaa

SEQ ID NO: 355718 - DNA, 798 bp, Homo sapiens
gtttctaaagaccaaaaagggagacggggagttggctggtacaaaattgcctgtcaggaactccctgaagtttacagaaataacattgattaatgattagctatacattgttcagctacagggagtgagagatggtgtccagtgcagcatgtttaggttgctttatagccacttgtgatgatagcaagctgttttaatagatgaatacacggcttcaaaacagggacataagacattgttgctgtctcattttaatgcctaactctgggcttgttaatttgaaagcactcactttcctcacataaaatttcttttctttcctcagacatttgaattctttatagtttaggaatattttgaataaatatgtatttgttttacatgtctttggtaaaccatattcacgtttctctagaaatagaaattccaatagaaatataatgccaggcatatacgtacttttaaatgtattagtagacatgttttaaaaagtaaaaagaaagaggtgaaattattttttataatatatattcaactaaatatatttaaggtattatcattaccccatgtgacactagcaagatttcaagtgttcaatagctacccgtggtttgtggctatcatattggaaagcacaagtctatggggtagaaaagttgaatttctgggtcatagcatatatgtatgtgtgttttaccactagaatatacaggcaaacaattttccaaagtttttgaacttatttatactcttgccagaaatgaatagaagattataatgcttccgttgtgccaaaat

SEQ ID NO: 355719 - DNA, 2425 bp, Homo sapiens
ttctgggggtttattttaccatttacctctgacaggatggctgaagaggaatcatcctgggagttggttataatattatttatttaaaaatatttatcatttattaagtacttcttaggtgacaagaaccataagagctttccatacattgtttcattcaatacttacacaattctaatgttatctccatttttcagataggaaaatgaagttaatcagatgttgagcttagatttgaatcgaggactatttaatgccaaagcttaagattctttaagtcacacacacacagacacacacacacacacacacacgacgtgtgtttaaattttgagtttccaaggaaaaagaaaacatgaactatagaaaagaaaaatgaaataaaacaaatatggaagaaaatgaagacactgagcagaagcggcctagaaatctgcaaagagaaagagaaagtcaaggcagggaggttttgtagggaaagttttaagtgtcttgatctgttactaattatgtgttcttagagacatacaatctgagtctcagttttcacagatatattaatgaggtcatttactagatggtctctatattttatttcagctctaagattatacattttcttcttagagctttttatttatcgttttgtataaaatcaacttaacaagtttaatagttttcactaaatcccacaagaagcaaaatgttctgttaggcacccaatgtgaacagtggatttcataattcaccaagagaagcaatctgccagcataccaagaggatgtgacaattgccatgggtttcgcacgcacaggtcctacaaaaagtcattcactgtcaaaaaaaaagtttgtctagtttgtttgaggttcttgcttggcatgaagtcctcatggataatccctacgcttttttttgtggttaaaaactgggataaaagcaaatttttgatcttttaacttttaaacagtaaacaataccattacttaattatgacactttttttgtgagaaagggtatggggaaatgtgaaaagtgctttgaagaataacttaaaaagcctcttttgagtctttttccatcttcttcatttttctctgtatctacaaatgagtagattttctataactactagttgctgtttggtcaatctttaggaaaaggttaaaaggccaccgtcagtagtgagggcaagaggagaaaagcacaagctagagaagctctagaccagattgccaacttagctccacaagcctgattctgtcctgaagggtttcccagataatgtcggtaatgcagttaggaaaagcagtgtgagtgtttctgggacgaatgagatggagaaaataaaacaaaatacattattatttgagaaagagaaatgtaaaaaactcactattttactgtgttaaaaaaaagatggcacatttattgctacataaatgttatatacatattgtgttttctgttacagtgacagaaaaaaatttgaacttcttgctgctggttgaaaaggtttatcaataataccttgaatttgacacaggatacaaatctgcaataaaccaacaatggaaactggagaacaagatgagaagcaattcatctccaacaattagctcttacaatactccataggtactacacggtatgctagaatcctactatggtcttaaaatgctattgtaaatttctgatattaatgaacaggttatggtaaataaccctacattttttactacctaatataataaaataaagtaagaaactttttactgaaaactttttgatttcaaaaatctagaaagagtaatatttagaattcaagaaattttcttacaagattattgtataaaagactagctacagtgaaaaataagccaaatgtttttttctttctattttatgaaggaaagcttctgggcatactgcaaagtctaatatagcgaaaaagacaacaagctctgaagaaaaaaaggccaggcagtggcatatgttcactcacacatcataagcaacaacttctgtttagctgattaacactgaaatgaagaacaaggccacagatagagtccgatgtaactggagaatatatgcaaattaaagtaaccaaaaagtccactaagttcacaaatgactgacttgttaggaatcatcctgattagagtaccagaagttctgtcttgtttttgttctttcaaattaacagaaatctttaagctacatagtgatttgggtcctttcctctgtgtgctgattgccactgttgatattggctataaggaattattaagccaagatacctcctttagcatgtttttctctcccagggttgttgtggtggaagacaggtttcatggaagttcaaagtgattatgtcttttaaaacaactcctaaggattagagacagagagtgccttaatg

SEQ ID NO: 355720 - DNA, 561 bp, Homo sapiens
gacaaaatggctcagagaccctggggacccagcgtagtggaacactgaccctcaagagtgagaaaggagaccctggcagaagacagcagaggggatcgtgaaaccagtccccaacagacacggagaaatgacattactaaacacagcaactttatgggattgtatccagattacataagcccacaccagagccaaagaagatggaggaggaatgggattcattcttccagacaatacgttgacagaaaaaaatttgaacttcttgctgctggttgaaaaggtttatcaataataccttgaatttgacacaggatacacagatgatgaatagaacatgagactctagagagtcaccagtatatttctgtattatatgtcaaacacagagaacacacaatacggaacaaaagcgtgagtggaaaactttatctggttgatttagctggtagtgaaaaggttagtaaaactggagctgaaggtgctgtgccggatgaagctaaaaacatctacagtcactttctgctcttggaaatgttatctgctttagactgaggaccatcg

SEQ ID NO: 355721 - DNA, 541 bp, Homo sapiens
aagtggctagagtgggcatccttgtcttgtttctgatcttagaggaaaagcttccaacttttcaccagtgagttaggatgttagctatgggtttgtcatagatgcttctttattgtgttaaggtacattccttctataccaaatttaataagatcaaatacattaaaatatgctcaagttccacattaaacagcaatttagttttgctataacaattttgtatgacttttgtaattgtatttgaaattaatttcattttgcattttttttcttttggcactgtaatattttttcagattgcaaacattttcacaagctttgaaagacttggaaatcttgcacatggtgctcaccaagcccaaagacaaaatggctcagagaccctggggacccagcgtagtggaacactgaccctcaagagtgagaaaggagaccctggcagaagacagcagaggtaccacatgacagtttggggaagggattgaaggtctgcgtcaaagagaacagaaaacctctccaggttgtcttttggcaataacta

SEQ ID NO: 355722 - DNA, 1011 bp, Homo sapiens
ggggccgccaccgccgccgggccgagggagggcccggcaaccgccgcctgcgcgccggctgcccctcggctcctgggagccgcggcgctacgggcctgccgagcactcgggcgggcgccgagcaggctgggccccggcgcagtggcctagcctggaccgcaaggccgaagccgcctccgggccgcgtcccggtgtttcgggttgtgtaaccttggccaaaatgcttaagcttttttcctggctgccaaatggggccgatcgtctgacctgctgcctccggaacttgagggatcagatcaaataaccctttcctggcgctcgtctgccgctgtgaatgaatcacgggctcctgtaatcaccgttaggagagattgttaaactcgtacagggttggatgttttaaagttactgaatatttactggacccctactgttcaatcaagacatgctaagttagcttgccattcttgttcatttatgtgtttacttaactatttctgggtctcctcttcccagtcataaatatctcttggagtgtaagctcctcggagcagagatcctgtttccgtatttcctgtacctagaacagtgccagatccgtagtagacactgaaacaaaaaatctttaaaaaaaaaaatatatacgaatgtggcaccaccatttacacaggccactaagccaaaaatctcgaacttgtcagattgtctcttctcagccatcagcagtcaacaagttctagcatttggtctcttaaaagtggttcaagagtttatttttcctctccttcctctgccagtaccaaccagtcttccgtatcactatgtattgcaagagtctcacaagaagatatccatcactgactgatcttcctcccgtttaacatccccaacaggtgccagggtgatgttttttttattctaaaaagaaaccagattatatcgctcactcccttgcttaaaacagttcttcaatgttaggtaaataaatcatggagtcaccacgagggcgtt

SEQ ID NO: 355723 - DNA, 483 bp, Homo sapiens
aaagggataagaccagagacttggggagcagtgtttcatttatgaggtcaaactgaggttgagaagccaacgaatgaacctgagaaggagcagaacagtgagcagagtaccaaagagcccagagagtgcaggataatggagtctgagtgcaggataatggagtctgaggaagacaagagcaatgggagagggagtgtttaaaagcagtgaactctcgagggtgggcacggtagctcacgcctgtaatcccagccctttgggaggctgaggcaggcggatcacctgaggtcagcagtttgagaccagcgtgaccaacatggagaaaccccgtctctactaaaaatacaaaaaattagccgggcgtggtggcgtatgcctgtaatctcagctactcaggaggctgagacaggagaatcgtttgaacccaggaagcggaggttgtagtgagccgagatcgtgccatcgcaagcgaaactctgtctc

SEQ ID NO: 355724 - DNA, 388 bp, Homo sapiens
ggcgaaaaataactttacagtggagaaacttgacaaacactgtgccagccaggtaagcaagatcaatatcatcatttggatagtatttacctctaatatgatgtgaggaaagacactttatctctggtctttttcccaaaagcttataaccccagtaaaatcatgagaaaagtatgaggcaaattccaataaatgagcattctacaaaatatctaaccagtgctccccaaagctgtcaaggtcatcaaaaacaaggggagtctaagaaactggtaggaaaaagagcctaaggggatatgccaactaaatgtaatgtggtacctgaatgagaacatgggaagagaaaggacatgaggtaaaaatctcaggaaatctgaatgagatacgg

SEQ ID NO: 355725 - DNA, 428 bp, Homo sapiens
taacatggctctttaatttttccagggttttgttggggaaaatctgggaaataaaaagaaatgttaaatccacccttcttccattttgcttctccagctgccagagtctctcctggtaggcggatcttagctttctgtctctggaagttcctactccacccctgaccttcagccagaatggaaggcaagatggggacacagaacgggtttatcatgacgacgaagacaattctaaacaagggaggagggcgtggtctccacctctccttccccattcaatcaaacatcaagcgctgactctgctatgtgtccagcccttaggagtgagagagacatgagcctgaaggctcagacaagctccttaaccccgctaagcctgcttctcacctgcacaatggggataataaaacctacttccaaggggaatt

SEQ ID NO: 355726 - DNA, 374 bp, Homo sapiens
atcaatcgtttgtccctgcgatcttaaaaaatatttccacccgctgccagagtctctcctggtaggcggatcttagctttctgtctctggaagttcctactccacccctgaccttcagccagaatggaaggcaagatggggacacagaacgggtttatcatgacgacgaagacaattctaaacaagggaggagggcgtggtctccacctctccttccccattcaatcaaacatcaagcgctgactctgctatgtgtccagcccttaggagtgagagagacatgagcctgaaggctcagacaagctccttaaccccgctaagcctgcttctcacctgcacaatggggataataaaacctacttccaaggggaatt

SEQ ID NO: 355727 - DNA, 380 bp, Homo sapiens
ttaacactttctcttggcgggtgacacgggcagggaagaacaaaggctgctgccagagtctctcctggtaggcggatcttagctttctgtctctggaagttcctactccacccctgaccttcagccagaatggaaggcaagatggggacacagaacgggtttatcatgacgacgaagacaattctaaacaagggaggagggcgtggtctccacctctccttccccattcaatcaaacatcaagcgctgactctgctatgtgtccagcccttaggagtgagagagacatgagcctgaaggctcagacaagctccttaaccccgctaagcctgcttctcacctgcacaatggggataataaaacctacttccaaggggaatt

SEQ ID NO: 355728 - DNA, 366 bp, Homo sapiens
ctacatccgtgaaagccgcccaaaaaaacgcgtgactgccagagtctctcctggtaggcggatcttagctttctgtctctggaagttcctactccacccctgaccttcagccagaatggaaggcaagatggggacacagaacgggtttatcatgacgacgaagacaattctaaacaagggaggagggcgtggtctccacctctccttccccattcaatcaaacatcaagcgctgactctgctatgtgtccagcccttaggagtgagagagacatgagcctgaaggctcagacaagctccttaaccccgctaagcctgcttctcacctgcacaatggggataataaaacctacttccaaggggaatt

SEQ ID NO: 355729 - DNA, 724 bp, Homo sapiens
gcccaggagaagcaagggcttagagaagaatccaactgtgacatcgagaagagcctgtccagtcccttcccagtagtggctctggggcccaggcccggcttccagaagatggggcagctctactctggggtcaaagccaactactgcttggctgccagagtctctcctggtaggcggatcttagctttctgtctctggaagttcctactccacccctgaccttcagccagaatggaaggcaagatggggacacagaacgggtttatcatgacgacgaagacaattctaaacaagggaggagggcgtggtctccacctctccttccccattcaatcaaacatcaagcgctgactctgctatgtgtccagcccttaggagtgagagagacatgagcctgaaggctcagacaagctccttaaccccgctaagcctgcttctcacctgcacaatggggataataaaacctacttccaaggggaattaaaaaaaaaaaaaaaaaaagacaaacaacaaaaaaaaaacaaaaaaagaaaacaaaacgaagacaaacacagagcagcatcaagagacaacacacaccacaccaaaacacacaacaccagaaacaagacagcagaccaaaaggaagggggcgggcgccaaacaaaacaccgctgcccggggggcacacagacacgccacagcaccgacagggcagcacgcgcccccacgatgagacacaacg

SEQ ID NO: 355730 - DNA, 380 bp, Homo sapiens
ttctatgtgcgcgcgtcgccacgatcccccggaggagggaggagctcagctgccagagtctctcctggtaggcggatcttagctttctgtctctggaagttcctactccacccctgaccttcagccagaatggaaggcaagatggggacacagaacgggtttatcatgacgacgaagacaattctaaacaagggaggagggcgtggtctccacctctccttccccattcaatcaaacatcaagcgctgactctgctatgtgtccagcccttaggagtgagagagacatgagcctgaaggctcagacaagctccttaaccccgctaagcctgcttctcacctgcacaatggggataataaaacctacttccaaggggaatt

SEQ ID NO: 355731 - DNA, 1507 bp, Homo sapiens
cggcggttcaggtcgcttagagagtcgtaggttgggtagtgcgggttggggcgggggctgcggagagggtgctcggcttccgctaccaagacctccgacagaaaatccggccagtggccaaggagctgcagttcaactacattcccgtggatgcggagattgtctccatcgacactttcaacaagtcaccccccaagcggggtctggttgtggggatcacgttcatcaaggattcaggggacaagggcagccccttcctgaacatttactgcgactacgagcccggctctgagtacaaccttgactctattgcccagagctgcctgaacctggagctccagttcactccgttccagctgtgccatgcggaggtccaggtcggggatcaacttgagactgtgtttctcttgagtgggaacgacccggccattcatctctacaaggagaacgaggggctgcatcagtttgaggaacagcccgtggaaaacctcttcccagagctgacgaacctgaccagtagcgtcctctggctggacgtccacaacttccccggcacgtcccggcgcctctcagctctgggctgtcagagtggttatgtccgtgtcgcccacgtggaccagcggagtcgagaggttctgcagatgtggtcggtcctgcaggacggtcccatctcccgagtgattgtgttcagcctctcggccgccaaggagaccaaggacaggccactacaagatgagtacagcgtgctcgtggccagcatgttggagccagcagtggtgtatcgggacctgctgaaccggggtcttgaagaccagcttctcctgcccggcagtgaccagtttgacagcgtcctctgcagcctggtcaccgatgtggatttggatgggcggccagaagtcctggtggccacctatggacaggaactgctgtgttataagtaccggggcccagagtcggggcttcctgaggcccagcacgggttccatctgctgtggcagcggagcttctccagtcccctgctggccatggctcacgtggacctgaccggggatgggctgcaggagcttgccgtggtctccctgaagggcgtgcacatcctgcagcacagcctgattcaggcctcagagctggtcttgacccggcttcgacatcaagtggagcagaggagacgtcggctacaggggttggaggacggggcaggtgcagggcctgctgagaatgcagcctcttaagcacccatgcacccactcttcccagacctggggcgactcatggcgtgctcacctccagccgctggtggggggtgtcctgaaggacaggatgctctccccagacctccccagggtggtgaagctgtgccctggggccccagctaacccactcctctctctgtacgtcaatgtccctatttgaaagcagggatgatcccattccaccctgtccactctggatgagaattggccacctgatggttatttatacgtccagaagaacatcatttcccagt

SEQ ID NO: 355732 - DNA, 1451 bp, Homo sapiens
tgctggggggcgggggcctggaacgtggtgttgagaaggcttctgaggctctgtctgagccggggtcaccgtgctggaagaatgggatcagtggatgcggagattgtctccatcgacactttcaacaagtcaccccccaagcggggtctggttgtggggatcacgttcatcaaggattcaggggacaagggcagccccttcctgaacatttactgcgactacgagcccggctctgagtacaaccttgactctattgcccagagctgcctgaacctggagctccagttcactccgttccagctgtgccatgcggaggtccaggtcggggatcaacttgagactgtgtttctcttgagtgggaacgacccggccattcatctctacaaggagaacgaggggctgcatcagtttgaggaacagcccgtggaaaacctcttcccagagctgacgaacctgaccagtagcgtcctctggctggacgtccacaacttccccggcacgtcccggcgcctctcagctctgggctgtcagagtggttatgtccgtgtcgcccacgtggaccagcggagtcgagaggttctgcagatgtggtcggtcctgcaggacggtcccatctcccgagtgattgtgttcagcctctcggccgccaaggagaccaaggacaggccactacaagatgagtacagcgtgctcgtggccagcatgttggagccagcagtggtgtatcgggacctgctgaaccggggtcttgaagaccagcttctcctgcccggcagtgaccagtttgacagcgtcctctgcagcctggtcaccgatgtggatttggatgggcggccagaagtcctggtggccacctatggacaggaactgctgtgttataagtaccggggcccagagtcggggcttcctgaggcccagcacgggttccatctgctgtggcagcggagcttctccagtcccctgctggccatggctcacgtggacctgaccggggatgggctgcaggagcttgccgtggtctccctgaagggcgtgcacatcctgcagcacagcctgattcaggcctcagagctggtcttgacccggcttcgacatcaagtggagcagaggagacgtcggctacaggggttggaggacggggcaggtgcagggcctgctgagaatgcagcctcttaagcacccatgcacccactcttcccagacctggggcgactcatggcgtgctcacctccagccgctggtggggggtgtcctgaaggacaggatgctctccccagacctccccagggtggtgaagctgtgccctggggccccagctaacccactcctctctctgtacgtcaatgtccctatttgaaagcagggatgatcccattccaccctgtccactctggatgagaattggccacctgatggttatttatacgtccagaagaacatcatttcccagt

SEQ ID NO: 355733 - DNA, 1671 bp, Homo sapiens
cggcggttcaggtcgcttagagagtcgtaggttgggtagtgcgggttggggcgggggctgcggagagggtgcttaactgaggggcatgatgggggaggcggccgtggccgcggggccttgtccgttgcgcgaggacagcttcacgcgcttctcgtcgcagagcaatgtgtacgggctggcaggcggcgccggcgggcgcggggagctgctggccgccacccttaaaggcaaggtgctcggcttccgctaccaagacctccgacagaaaatccggccagtggccaaggagctgcagttcaactacattcccgtggatgcggagattgtctccatcgacactttcaacaagtcaccccccaagcggggtctggttgtggggatcacgttcatcaaggattcaggggacaagggcagccccttcctgaacatttactgcgactacgagcccggctctgagtacaaccttgactctattgcccagagctgcctgaacctggagctccagttcactccgttccagctgtgccatgcggaggtccaggtcggggatcaacttgagactgtgtttctcttgagtgggaacgacccggccattcatctctacaaggagaacgaggggctgcatcagtttgaggaacagcccgtggaaaacctcttcccagagctgacgaacctgaccagtagcgtcctctggctggacgtccacaacttccccggcacgtcccggcgcctctcagctctgggctgtcagagtggttatgtccgtgtcgcccacgtggaccagcggagtcgagaggttctgcagatgtggtcggtcctgcaggacggtcccatctcccgagtgattgtgttcagcctctcggccgccaaggagaccaaggacaggccactacaagatgagtacagcgtgctcgtggccagcatgttggagccagcagtggtgtatcgggacctgctgaaccggggtcttgaagaccagcttctcctgcccggcagtgaccagtttgacagcgtcctctgcagcctggtcaccgatgtggatttggatgggcggccagaagtcctggtggccacctatggacaggaactgctgtgttataagtaccggggcccagagtcggggcttcctgaggcccagcacgggttccatctgctgtggcagcggagcttctccagtcccctgctggccatggctcacgtggacctgaccggggatgggctgcaggagcttgccgtggtctccctgaagggcgtgcacatcctgcagcacagcctgattcaggcctcagagctggtcttgacccggcttcgacatcaagtggagcagaggagacgtcggctacaggggttggaggacggggcaggtgcagggcctgctgagaatgcagcctcttaagcacccatgcacccactcttcccagacctggggcgactcatggcgtgctcacctccagccgctggtggggggtgtcctgaaggacaggatgctctccccagacctccccagggtggtgaagctgtgccctggggccccagctaacccactcctctctctgtacgtcaatgtccctatttgaaagcagggatgatcccattccaccctgtccactctggatgagaattggccacctgatggttatttatacgtccagaagaacatcatttcccagt

SEQ ID NO: 355734 - DNA, 1503 bp, Homo sapiens
cggcggttcaggtcgcttagagagtcgtaggttgggtagtgcgggttggggcgggggctgcggagagggtgcttaactgaggggcatgatgggggaggcggccgtggccgcggggccttgtccgttgcgcgaggacagcttcacgcgcttctcgtcgcagagcaatgtgtacgggctggcaggcggcgccggcgggcgcggggagctgctggccgccacccttaaaggcaaggtgctcggcttccgctaccaagacctccgacagaaaatccggccagtggccaaggagctgcagttcaactacattcccgagagctgcctgaacctggagctccagttcactccgttccagctgtgccatgcggaggtccaggtcggggatcaacttgagactgtgtttctcttgagtgggaacgacccggccattcatctctacaaggagaacgaggggctgcatcagtttgaggaacagcccgtggaaaacctcttcccagagctgacgaacctgaccagtagcgtcctctggctggacgtccacaacttccccggcacgtcccggcgcctctcagctctgggctgtcagagtggttatgtccgtgtcgcccacgtggaccagcggagtcgagaggttctgcagatgtggtcggtcctgcaggacggtcccatctcccgagtgattgtgttcagcctctcggccgccaaggagaccaaggacaggccactacaagatgagtacagcgtgctcgtggccagcatgttggagccagcagtggtgtatcgggacctgctgaaccggggtcttgaagaccagcttctcctgcccggcagtgaccagtttgacagcgtcctctgcagcctggtcaccgatgtggatttggatgggcggccagaagtcctggtggccacctatggacaggaactgctgtgttataagtaccggggcccagagtcggggcttcctgaggcccagcacgggttccatctgctgtggcagcggagcttctccagtcccctgctggccatggctcacgtggacctgaccggggatgggctgcaggagcttgccgtggtctccctgaagggcgtgcacatcctgcagcacagcctgattcaggcctcagagctggtcttgacccggcttcgacatcaagtggagcagaggagacgtcggctacaggggttggaggacggggcaggtgcagggcctgctgagaatgcagcctcttaagcacccatgcacccactcttcccagacctggggcgactcatggcgtgctcacctccagccgctggtggggggtgtcctgaaggacaggatgctctccccagacctccccagggtggtgaagctgtgccctggggccccagctaacccactcctctctctgtacgtcaatgtccctatttgaaagcagggatgatcccattccaccctgtccactctggatgagaattggccacctgatggttatttatacgtccagaagaacatcatttcccagt

SEQ ID NO: 355735 - DNA, 1241 bp, Homo sapiens
cggcggttcaggtcgcttagagagtcgtaggttgggtagtgcgggttggggcgggggctgcggagagggtgcttaactgaggggcatgatgggggaggcggccgtggccgcggggccttgtccgttgcgcgaggacagcttcacgcgcttctcgtcgcagagcaatgtgtacgggctggcaggcggcgccggcgggcgcggggagctgctggccgccacccttaaaggcaaggtgctcggcttccgctaccaagacctccgacagaaaatccggccagtggccaaggagctgcagttcaactacattcccgtggatgcggagattgtctccatcgacactttcaacaagtcaccccccaagcggggtctggttgtggggatcacgttcatcaaggattcaggggacaagggcagccccttcctgaacatttactgcgactacgagcccggctctgagtacaaccttgactctattgcccagagctgcctgaacctggagctccagttcactccgttccagctgtgccatgcggaggtccaggtcggggatcaacttgagactgtgtttctcttgagtgggaacgacccggccattcatctctacaaggagaacgaggggctgcatcagtttgaggaacagcccgtggaaaacctcttcccagagctgacgaacctgaccagtagcgtcctctggctggacgtccacaacttccccggcacgtcccggcgcctctcagctctgggctgtcagagtggttatgtccgtgtcgcccacgtggaccagcggagtcgagaggttctgcagatgtggtcggtcctgcaggacggtcccatctcccgagtgattgtgttcagcctctcggccgccaaggagaccaaggacaggccactacaagatgagtacagcgtgctcgtggccagcatgttggagccagcagtggtgtatcgggacctgctgaaccggggtcttgaagaccagcttctcctgcccggcagtgaccagtttgacagcgtcctctgcagcctggtcaccgatgtggatttggatgggcggccagaagtcctggtggccacctatggacaggaactgctgtgttataagtaccggggcccagagtcggggcttcctgaggcccagcacgggttccatctgctgtggcagcggagcttctccagtccccttgacggctgtaaacctgggggaccgaggcctcggaatttcggaactccaatgggccata

SEQ ID NO: 355736 - DNA, 876 bp, Homo sapiens
attattgattgtattgtatactatattaaatgtgaatttgtaccccttcattttaaaaggtcattgtgttctactgcctattttagattactttggggttggggaagggtgttttggtaagcaggattttaagtcctctctctctcgattggttttatgaagatataaggttatgctcttactaccaagctcaggattcttgattttaaaggtacaaggatagttgtgggagttttatttttggttatatttgaactgtatgaatggtaggtctgaatattgagaatttccatggtcttatgtggaggtaaaatatacagataactgatcagtttgagtgactgcaacatgttctggttgcacaacagttaggcatgctatggtttatatttgtgaagtttggatgcctgtgaagaatgattaaatacatgtttctaatattttagtgttttgtatttaggttatttattctttgtatctaaaactgaacagctactgtgctatattgattttattggtagtattgagcagaccttgtttctgcatgaaactagttgcaaaacccactattttggaaataaaaatgtattttgacatatacaaataaaatgaataaaactattttaaatgtgtgaacttttaatgaagacattttaaattttgttctgagatatttaaattctgcatgggtattttttcactaattgctttacttggataccaatttgaataatttctgaaattgtaatattgtgataatttgcacagcattgtacatgcacatctgtaaatgcaatcttaattgccatatttatgcaatctgtgtaccaatttggacaaatgtttatatattttacataaagctgtctgtatgca

SEQ ID NO: 355737 - DNA, 1209 bp, Homo sapiens
attattgattgtattgtatactatattaaatgtgaatttgtaccccttcattttaaaaggtcattgtgttctactgcctattttagattactttggggttggggaagggtgttttggtaagcaggattttaagtcctctctctctcgattggttttatgaagatataaggttatgctcttactaccaagctcaggattcttgattttaaaggtacaaggatagttgtgggagttttatttttggttatatttgaactgtatgaatggtaggtctgaatattgagaatttccatggtcttatgtggaggtaaaatatacagataactgatcagtttgagtgactgcaacatgttctggttgcacaacagttaggcatgctatggtttatatttgtgaagtttggatgcctgtgaagaatgattaaatacatgtttctaatattttagtgttttgtatttaggttatttattctttgtatctaaaactgaacagctactgtgctatattgattttattggtagtattgagcagaccttgtttctgcatgaaactagttgcaaaacccactattttggaaataaaaatgtattttgacatatacaaataaaatgaataaaactattttaaatgtgtgaacttttaatgaagacattttaaattttgttctgagatatttaaattctgcatgggtattttttcactaattgctttacttggataccaatttgaataatttctgaaattgtaatattgtgataatttgcacagcattgtacatgcacatctgtaaatgcaatcttaattgccatatttatgcaatctgtgtaccaatttggacaaatgtttatatattttacataaagctgtctaaatgcaatcatgattgcatttagacccaggtgtcttcagtgtcatattaatttagaaacactgaactatatcattgtgtagagttcatttttgagtaaatcacagagaaacgctctgagatgatcatgtactgattatttacggactattaatgtcacatgcttcctcttcctgccttgtgtttgaaattaattgtccctttctcagtgcattctatgcctttttcacgactttttttttttggatacgggttctcctttggtcttccaggtggaattgtggtgccttgactcatggctcatcattgcaccctttttgattgggctgtttaaatgcaat

SEQ ID NO: 355738 - DNA, 791 bp, Homo sapiens
tccttgttttttgattgtagagctccgcgttaaaatgtgtcccgaaattatgttatccccgtgctggcccacaaattttctcgacggcgccgcgtcatttattgccccctttggggttacaccgcgtaaagcccctggaaaaggttgataaattgtgcccctcggaggcctttcataactctccttgaggtagagtgtggcccccaattagtgtgcccccccccccccgggatttaagggggttctccttttcccccaggggtccccccgggcttgccgcggtttttccccgtgctcccggcgcctttgtgtttttaccgcgcgcgcgcgccccgtgggcgctctatcgcgctgtttctatatatatatctccgcgctccccctcttatgggggcgccccccttgtgacaccaacaaaaacccctgggtgtctcgcccttaatccttgggcgccccccccgggggtttttttcccccccccccttttttttttttttttttttttttttttttttttttttttttcttctaaatttaagtagcatcctgctgctaccatattaaagctaaaatttaacttttgctgaagaatcagctaattcaggtaatccaaatatttgtggaaaaacatctggataatttattgaacacattagtattgtgttagctttgatcattcccatttcataggtttttattgtggaatagtcaacttaatatagattcactttcaatttgcatgtataaagtaatactcaataaaatttttttcatttatttttcaaaagtgg

SEQ ID NO: 355739 - DNA, 774 bp, Homo sapiens
cagctggtactccgtctcatttttgggaatgcaagagagagtgatgggcagaaaatctcacggactccaaataaagatcacagtgactccttagccctagctgcagttgctgtgcaggtatgtggtccctctttatcagataactgaatcttttttaagataacctgaaaagtccaatttttctgtgaagtcttgatttttgaatactggaactaattttaagactttatatgggacaaacacacttgcataacgaacagtctctgctttgcaaccatgaaggattttttaaatgtatcctttatagctcatatgctacattaagctgttttaatattgcaaagtaatcaatgagaaattttaaagtaataggagagcagaaaagtaatttgttcttttaccctaatttttatagctttatgaacaaattctagctgaaaatgaaaagctgaaggcacagctacatgatacaaatatggaactaacagatcttaaattacagttggaaaaggccacccaggtttgtacccttttctttttgttactctcaaggtaatggttgtgatttatcccatctaaaaatggtattaaaattttttctaatactctaaatagaagtttgataattggtaatagaagataatgctgtttatggatgatttactttttctggagtaaatttaaaaaatagtcatagtcaaaagtcaacttataaaaagccttttaataccaatgttgtggtatgtcaaggttttaaatgtttatttccagaat

SEQ ID NO: 355740 - DNA, 344 bp, Homo sapiens
tactgcttgactaaatatcagcattatttattatctgggaaagagtgtcttggaaatagtttcagtgtgattaaactaaatttaaatggtttgtatctgaaaggtgaccggcaagagtcagtatcttctgggcggtatgacctaaccagttttacagctcatcaattactgctgcttgctttttgcataacaccccagaatgcttatcatttaagggagaataaaacagtacactgcaataatgtgttgtgtgttggctttgcctgtcactctttgaaacaagtttaaaataaacgctgcagttgcttttctattacactcactgcattaatgctacacataat

SEQ ID NO: 355741 - DNA, 477 bp, Homo sapiens
ttttcattgtgtgggaataatgattaacttctacagttacaaataagttgctactataaccatatgtccttggggaatgttaatttttttaagctcaatagaaaatattcttggcatttttcttgctgaatactagggattttaataaaatgtttatatttccacagcacaaccagtgtctctgaagaagatgtctcaagtagatattctcgaacagatagaagtgggttccctagatataacagggatgcaaatgtttcaggtactctggtttcaagtagcacactggaaaagaaaattgaagatcttgaaaaggaagtagtaagagaaagacaagaaaacctaagacttgtgagactgatgcaagataaagaggaaatgattggaaaactcaaagaagaaattgatttattaaatagagacctagatgacatcgagatgctattgaaacttctaaactaggggagccggctcgac

SEQ ID NO: 355742 - DNA, 1020 bp, Homo sapiens
gatcacaccactgcactccagcctgggtgacagagcaagactctacctcaaaaataaaaataatcaatatagtttcaatgaagcaaagcatctcaggtaacaatttgagcataactttaaccataacttatgatagcataataacattcattagtaattcagtagccgtatgtgccaggctgtgttaggtgctttatatattgtttaatttttaaaaacttgtggagtgtacagattggtaaggtgacattgtatcacaaagctagtctttgagtccaaagttttgtggttttatgttatgatatacttttatcatggaattgtcttattaaatgttttgccagtggttcttaaagtgtgtttctgacaccagtagcattgacttcacttagaaacctgttagaaatacaaattatttggccccacccaacacttgagtcacaaactttgcagatggggctcaatctgttttaacaagcgcttcatgtaattttgatgcaggcctaagtttttgagccactgcagtatgcatttctatttttaagcaaagatcttggtctttctttttggacattgtagaaataacatgaacttgttttttgtttgtttttgttttgttttgttttaagctcctgatctttgttggttatgttgcaaaagattgtatcaggagaagcctcagcatggacattggcatcctgacataacccccattaatttagtattctttctgaaactcaaatggattctcaagtccaagagactatggaataaaatcattgtttgtctgtgttaagttttatctctgttattgcctgaagacttttggtaacaataatgcgctttcatcaaacttttaagacttgattggaaaaaataaatgtatgtttcatcagttatacaatttgttttgtatgtgttttgtatgggtggtccctgaggagcctgaatcttcaaaatatactttctgtgagctcagaaaatgaatagcacttttgagctaattgatcagtgtggaga

SEQ ID NO: 355743 - DNA, 5457 bp, Homo sapiens
tgacgggtggccgtgctgggggcgggagggcttctgtggtaggaagggaggtccgctcggccgggtgcgccgccccagtgctctgtgggatactggaagtctcgagcgtcggctccgggttcccagccctcctctggcccgcactcatagaaacattcacacaccccctgcctcccctctcttccctctccgcctcccccttccccccctcgcgataagaagacccggcggcaggagaggggatgaagatggcggacgcgaagcagaagcggaacgagcagctgaaacgctggatcggctccgagacggacctcgagcctccggtggtgaagcgccagaagaccaaggtgaagttcgacgatggcgccgtcttcctggctgcttgctccagcggcgacacggacgaggtcctcaagctgctgcaccgcggcgccgacatcaattacgccaatgtggacggactcactgccctgcaccaggcttgcattgatgacaatgttgatatggtgaagtttctggtagaaaatggagcaaatattaatcaacctgataatgaaggctggataccactacatgcagcagcttcctgtggatatcttgatattgcagagtttttgattggtcaaggagcacatgtaggggctgtcaacagtgaaggagatacacctttagatattgcggaggaggaggcaatggaagagctacttcaaaatgaagttaatcggcaaggggttgatatagaagcagctcgaaaggaagaagaacggatcatgcttagagatgccaggcagtggctaaatagtggtcatataaatgatgtccggcatgcaaaatctggaggtacagcacttcacgttgcagctgctaaaggctatacggaagttttaaaacttttaatacaggcaggctatgatgttaatattaaagactatgatggctggacacctcttcatgctgcagctcattggggtaaagaagaagcatgtcgaattttagtggacaatctgtgtgatatggagatggtcaacaaagtgggccaaacagcctttgatgtagcagatgaagacattttaggatatttagaagagttgcaaaagaaacaaaatctgctccatagtgaaaaacgggacaagaaatctccactaattgaatcaacagcaaatatggacaataatcagtcacagaagacctttaaaaacaaagagacgttgattattgaaccagagaaaaatgcatcccgtattgaatctctggaacaagaaaaggttgatgaagaagaagaaggaaagaaggatgagtctagctgctctagtgaagaagatgaggaagatgactcggaatcagaagctgaaacagataagacaaaacccctggcttctgtaactaatgccaacacttctagtacacaagcagctcctgtagctgttacaacacctactgtgtcatcaggtcaagcaacacctacatcacctattaaaaagtttccaaccacagctacaaaaatttctcccaaagaagaagagagaaaagatgagtctcctgcaacttggaggttaggacttagaaagacgggcagctatggtgcacttgctgaaatcacagcatctaaagagggtcagaaagaaaaagatactgcaggtgttacacgttcagcttcaagtcccagactttcctcctctttggataataaagaaaaggagaaagatagtaaaggaactaggcttgcatatgttgcacctacaataccaagacgactagccagtacatctgacattgaagagaaagaaaacagagattcttcaagtttgcgaacaagtagttcatatacaaggagaaaatgggaagatgatcttaaaaaaaatagctcagttaatgaaggatcaacgtatcataaaagttgctcctttggtagaagacaagatgatttgattagttctagtgttccaagcaccacatcaacaccaacagttacctctgcagctgggcttcagaaaagcctgctttccagcacaagcactactacaaagattacaacgggttcttcctcagcaggcacacaaagcagtacctcaaatcgtttgtgggctgaggatagtactgagaaagaaaaggacagtgttcctacggcagtgaccattcctgttgctccaactgttgtaaatgctgcagcttctaccacaaccctgactacaactactgctggcactgtctcctccacaacagaggtcagggagagacgcagatcatacctcactcctgttagggatgaagagtctgaatcccaaagaaaagcaagatctagacaagcaagacaatctagaagatcaacacagggagtgacattaactgatcttcaagaagctgagaaaacaataggaagaagtcgttctacccgaaccagagaacaagaaaatgaagaaaaagaaaaagaggaaaaagagaaacaagataaagagaaacaagaagaaaagaaggagtcagaaacatctagagaagatgaatataaacaaaagtactccagaacgtatgatgagacttaccagcgttataggccagtatcaacttcaagttcaaccactccatcctcttcactttctactatgagcagttcactgtatgcttcaagtcaactaaacaggccaaatagtcttgtaggcataacttctgcttactccagaggaataacaaaagaaaatgaaagagagggagaaaaaagagaagaggagaaagaaggagaagataaatcacaacctaaatcaatcagagaacgacgacgaccaagagagaaaagaagatctacaggagtttcattttggacacaagatagtgatgaaaatgaacaagaacaacaatcagacacagaagagggatccaataagaaagaaactcagacggattccatttctagatatgaaaccagttctacatcagctggtgatcgatatgattccttgctgggtcgctctggatcatacagttacttagaagaaagaaaaccttacagcagcaggctagaaaaggatgactcaactgactttaaaaagctttatgaacaaattctagctgaaaatgaaaagctgaaggcacagctacatgatacaaatatggaactaacagatcttaaattacagttggaaaaggccacccagagacaagaaagatttgctgatagatcactgttggaaatggaaaaaagggaacgaagagctctagaaagaagaatatctgaaatggaagaagagctcaaaatgttaccagacctaaaagcagacaaccagaggctaaaggatgaaaatggggccttgatcagagttataagcaaactttccaaataaaaaaaaaaaagcagcaagtaatggaattgcacatattagtaacccagtggaccataattggcagtcactggaagtctgggaagaatccttggagactgtcattttcggatatcctgccaaatgccctcttatctagaatttttgtttcattttgtttaattttctggggtgtttttgttgttgttggtttgttttttgtttttttttttaatcaagaccattgtttcatgttaatgcagctgctgagaagatttttttttaatgactgagaaaacttgtttacagctccagcatataaggaaagtgttcaaggccagatatgcctcagatatttaaccagtaagccttagttgtacataaatacttttgtgtcaacaaaaactttcagctctcacagaagacagttactcaacattttttgatgtgccacagtttcgagtttttcgatatttaaattttttggcttttcatctaagtttgggtttgtattttttccttctaaactcttcatgtggcagagtcttctatgttttcacagctttttcattacagaaaagaacacttgctcttctgtgattattgtcatgtattaggctaatgctgtgttgtctcccacctggaactgaattgcttggtggaacatatgctttcactgtttgtgcaatatgcatttatttcttatatgaatgctttaaagtcatttgaggttagatcttttaattcctattttctgcttcattggtcactttttttttattgtagtataagatgttagattctgtaatcttcacattcattttagcaggtactgagtgatgctgtatatacaaataagtgtattgttttgatttttagaccaccacatggcatgcttgactatttcttatttcaaatgtctgctaatgcagagtaggctactccatgatagtgttaaaaaacaaaatttgctaacaatgtgatataaagactttaaaagttacacattatgtggagccctatctttacaaaagtttcctactgtaaagtgcttttattttcagttttcacttgatagtactcaaccataattaaagttgcataagataattgctttacatttcacatacctatatttatctgagtgctgtctaaaactgttgtgctagccaaagtaatgctatgaaatcatttgcagaattaacccgtgagttaatgttaaatgcactgttattgccatgtgaagaggcatcgactttgataccaccatcatgttcagaccattttatacatttcagtggccttttttttttttaaggaaaaaaaagcgcaaaaccaagtacatagtgacgatggcttttatttggacaaatagcttttatattttcattaaaccatgcaaaaaatactacatctttctggcacataactgtctccttaaccactgaacagttcagccatttgaataaattgtacattgtaaagcttatagtagctgattgtattattgattgtattgtatactatattaaatgtgaatttgtaccccttcattttaaaaggtcattgtgttctactgcctattttagattactttggggttggggaagggtgttttggtaagcaggattttaagtcctctctctctcgattggttttatgaagatataaggttatgctcttactaccaagctcaggattcttgattttaaaggtacaaggatagttgtgggagttttatttttggttatatttgaactgtatgaatggtaggtctgaatattgagaatttccatggtcttatgtggaggtaaaatatacagataactgatcagtttgagtgactgcaacatgttctggttgcacaacagttaggcatgctatggtttatatttgtgaagtttggatgcctgtgaagaatgattaaatacatgtttctaatattttagtgttttgtatttaggttatttattctttgtatctaaaactgaacagctactgtgctatattgattttattggtagtattgagcagaccttgtttctgcatgaaactagttgcaaaacccactattttggaaataaaaatgtattttgacatatacaaataaaatgaataaaactattttaaatgtgaaaaaaaaaaa

SEQ ID NO: 355744 - DNA, 8761 bp, Homo sapiens
tgacgggtggccgtgctgggggcgggagggcttctgtggtaggaagggaggtccgctcggccgggtgcgccgccccagtgctctgtgggatactggaagtctcgagcgtcggctccgggttcccagccctcctctggcccgcactcatagaaacattcacacaccccctgcctcccctctcttccctctccgcctcccccttccccccctcgcgataagaagacccggcggcaggagaggggatgaagatggcggacgcgaagcagaagcggaacgagcagctgaaacgctggatcggctccgagacggacctcgagcctccggtggtgaagcgccagaagaccaaggtgaagttcgacgatggcgccgtcttcctggctgcttgctccagcggcgacacggacgaggtcctcaagctgctgcaccgcggcgccgacatcaattacgccaatgtggacggactcactgccctgcaccaggcttgcattgatgacaatgttgatatggtgaagtttctggtagaaaatggagcaaatattaatcaacctgataatgaaggctggataccactacatgcagcagcttcctgtggatatcttgatattgcagagtttttgattggtcaaggagcacatgtaggggctgtcaacagtgaaggagatacacctttagatattgcggaggaggaggcaatggaagagctacttcaaaatgaagttaatcggcaaggggttgatatagaagcagctcgaaaggaagaagaacggatcatgcttagagatgccaggcagtggctaaatagtggtcatataaatgatgtccggcatgcaaaatctggaggtacagcacttcacgttgcagctgctaaaggctatacggaagttttaaaacttttaatacaggcaggctatgatgttaatattaaagactatgatggctggacacctcttcatgctgcagctcattggggtaaagaagaagcatgtcgaattttagtggacaatctgtgtgatatggagatggtcaacaaagtgggccaaacagcctttgatgtagcagatgaagacattttaggatatttagaagagttgcaaaagaaacaaaatctgctccatagtgaaaaacgggacaagaaatctccactaattgaatcaacagcaaatatggacaataatcagtcacagaagacctttaaaaacaaagagacgttgattattgaaccagagaaaaatgcatcccgtattgaatctctggaacaagaaaaggttgatgaagaagaagaaggaaagaaggatgagtctagctgctctagtgaagaagatgaggaagatgactcggaatcagaagctgaaacagataagacaaaacccctggcttctgtaactaatgccaacacttctagtacacaagcagctcctgtagctgttacaacacctactgtgtcatcaggtcaagcaacacctacatcacctattaaaaagtttccaaccacagctacaaaaatttctcccaaagaagaagagagaaaagatgagtctcctgcaacttggaggttaggacttagaaagacgggcagctatggtgcacttgctgaaatcacagcatctaaagagggtcagaaagaaaaagatactgcaggtgttacacgttcagcttcaagtcccagactttcctcctctttggataataaagaaaaggagaaagatagtaaaggaactaggcttgcatatgttgcacctacaataccaagacgactagccagtacatctgacattgaagagaaagaaaacagagattcttcaagtttgcgaacaagtagttcatatacaaggagaaaatgggaagatgatcttaaaaaaaatagctcagttaatgaaggatcaacgtatcataaaagttgctcctttggtagaagacaagatgatttgattagttctagtgttccaagcaccacatcaacaccaacagttacctctgcagctgggcttcagaaaagcctgctttccagcacaagcactactacaaagattacaacgggttcttcctcagcaggcacacaaagcagtacctcaaatcgtttgtgggctgaggatagtactgagaaagaaaaggacagtgttcctacggcagtgaccattcctgttgctccaactgttgtaaatgctgcagcttctaccacaaccctgactacaactactgctggcactgtctcctccacaacagaggtcagggagagacgcagatcatacctcactcctgttagggatgaagagtctgaatcccaaagaaaagcaagatctagacaagcaagacaatctagaagatcaacacagggagtgacattaactgatcttcaagaagctgagaaaacaataggaagaagtcgttctacccgaaccagagaacaagaaaatgaagaaaaagaaaaagaggaaaaagagaaacaagataaagagaaacaagaagaaaagaaggagtcagaaacatctagagaagatgaatataaacaaaagtactccagaacgtatgatgagacttaccagcgttataggccagtatcaacttcaagttcaaccactccatcctcttcactttctactatgagcagttcactgtatgcttcaagtcaactaaacaggccaaatagtcttgtaggcataacttctgcttactccagaggaataacaaaagaaaatgaaagagagggagaaaaaagagaagaggagaaagaaggagaagataaatcacaacctaaatcaatcagagaacgacgacgaccaagagagaaaagaagatctacaggagtttcattttggacacaagatagtgatgaaaatgaacaagaacaacaatcagacacagaagagggatccaataagaaagaaactcagacggattccatttctagatatgaaaccagttctacatcagctggtgatcgatatgattccttgctgggtcgctctggatcatacagttacttagaagaaagaaaaccttacagcagcaggctagaaaaggatgactcaactgactttaaaaagctttatgaacaaattctagctgaaaatgaaaagctgaaggcacagctacatgatacaaatatggaactaacagatcttaaattacagttggaaaaggccacccagagacaagaaagatttgctgatagatcactgttggaaatggaaaaaagggaacgaagagctctagaaagaagaatatctgaaatggaagaagagctcaaagtaagtaaactatgttacttatgagagagagtgctgtttatgtattaatgtttaaaatactattatagatatggtttacattaattgttctcaaagctgattacccaatttgtgaactgtctatatctggtgcttctctttcttcctgaatccaggttttagtgagccagaagagggtctaaaacccaaatcttaacacctagccccgccggctgctgtgggagcggcggccgtccctctcctggaggtcgtctcctggcatcctcggggccgcaggaaggaagaggaggcagcggccggagccctggtgggcggcctgaggtgagagcccgaccggcccctttgggaatatggcgaccggtggctaccggaccagcagcggcctcggcggcagcaccacagacttcctggaggagtggaaggcgaaacgcgagaagatgcgcgccaagcagaaccccccgggcccggcccccccgggagggggcagcagcgacgccgctgggaagccccccgcgggggctctgggcaccccggcggccgccgctgccaacgagctcaacaacaacctcccgggcggcgcgccggccgcacctgccgtccccggtcccgggggcgtgaactgcgcggtcggctccgccatgctgacgcgggcggcccccggcccgcggcggtcggaggacgagcccccagccgcctctgcctcggctgcaccgccgccccagcgtgacgaggaggagccggacggcgtcccagagaagggcaagagctcgggccccagtgccaggaaaggcaaggggcagatcgagaagaggaagctgcgggagaagcggcgctccaccggcgtggtcaacatccctgccgcagagtgcttagatgagtacgaagatgatgaagcagggcagaaagagcggaaacgagaagatgcaattacacaacagaacactatacagaatgaagctgtaaacttactagatccaggcagttcctatctgctacaggagccacctagaacagtttcaggcagatataaaagcacaaccagtgtctctgaagaagatgtctcaagtagatattctcgaacagatagaagtgggttccctagatataacagggatgcaaatgtttcaggtactctggtttcaagtagcacactggaaaagaaaattgaagatcttgaaaaggaagtagtaagagaaagacaagaaaacctaagacttgtgagactgatgcaagataaagaggaaatgattggaaaactcaaagaagaaattgatttattaaatagagacctagatgacatagaagatgaaaatgaacagctaaagcaggaaaataaaactcttttgaaagttgtgggtcagctgaccaggtagaggattcaagactcaatgtggaaaaaatattttaaactactgattgaatgttaatggtcaatgctagcacaatattcctatgctgcaatacattaaaataactaagcaagtatatttatttctagcaaacagatgtttgttttcaaaatacttctttttcattattggttttaaaaaagcattatccttttatctcacaaataagtaatatctttcagttattaaatgatagataatgcctttttggttttgtgtggtattcaactaatacatggtttaaagtcacagccgtttgaatatattttatcttggtagtacattttctcccttaggaatatacatagtctttgtttacatgagttcaaatacttttgggatgttaccttcacatgtcctattactgatgtgtgcaaccttttatgtgttgatgactcactcataaaggtttttgtctactgtcatttgttctttccacttattctaagcatttagagtaatagagtcatacttttttataacagcaaccttttaaaaggaaagctcttataaagtcactgtcatgttttagttgactaaatataaatttaagagaatacttgaattgtgctatagtaaataaaaatttactattttgtgtttgaatattgaaaaattgaatcactttaactcctgaaaaacatacaattgtaatttcaatgtaaaatttcttatgtaggtactacctttttttatcgttccaaggtttgctagtgaacacaggatattttaaaagttttttattcttcgggcctggaaagtgtacaaagtcagtgtaggagaaaaaaatccatatttttatattagcatgcacactaaaaaccaaaatattattcatacttaaaacattcatacaaaacaatatgtaagcagaaatagtactaaaatactttgcctaatttctaagttgaagaataacactgggacacagttttttcatatgagagaatattccgctatttcaaatttaagggattttcttcctaacattgaaattttaaaaacagagttacttctaaataattatacagattttttcttctattaaatattattatttagaattgtttttgtattacatattcatgttaagaaccccgtcttcccttaaaatacattaaaattatgacatttttgctttgtgattgaatttcaaatagcagtatggtatccttttatctagttaatatatgaaagtggcttgaatatagtcaaatccattttaggtactctactgactttttccttcacttgccaagcccttttattgttcactgttagaaaaatagagaaggtgagacagctgggggaaaatgtggagtaaatgataatcaaatgttgaattctaaaagtctctacatttacctaggttggctttctcccccagttcagaagtttccagcttggccaatcatcagaatcacttgaggaacttagaaagaactccctggctgtagctcctatgtaggtttaggttgagactctggattccacaatttttaaaggttaccatctgaggtttctgatcatagtctacttttgaagcagctgctgctgtttctttattccattgaacaccctggaattgacataattttatctatcagcatttctccccttttagtttatttaataattaacccggtctccagggcagttttcatatgaccatgtgtatattcactgctcacgaaaaagtttaatgttagattaccaaatttaatatagttacagaattactgcataagggcttcccttcttggagactcttacccagcatgggaacagtgatctgcccacatgacagggtggtatgccaggcatagttaactgcttttggttgtgaggtactcatcttcctttagttacccttagttatgtggcacacatgtccttattgcctagttcgtcatccacactttggatcttgtgaaaatgctgttagtatccaaccttaaaatatattagtatatgggtttttattaaaagaattactttgaattttctatttaattcatatgtaaataaaggaacatttcatttcacttaaaaaaattatatcagttattaggctgggtgcagtggctcatgcctgtaatcccagcactttgggaggccaaggcgggtggattaccagagttcgggagtttgagaccagcttgaccaacatggagaaaccccgtctctactaaaaatacaaaattagccaggtgtggtggcgcatgcctgtaatcctggctactcaggaggctgaggcaggagaatcgcttgaaaacccaggagacagaggttgcggtgagctgagattgcgccattgtactccagcctgggcaagaagagcgaaactctgtctccaaaaaaaaaaaaaaaaaaatttattaatacttttaaagactgagctgtttaagaattttttggggaacatttctagcagtgatttttttggcctttaatgatagcgtaaagacaggagccttacaacttaggcaaagcatttcacatgcagtccttcttccatctcaaaatatgtacttattttacatacagaattttacactaaccattgaaaaataaagtaggatctgctacagtttcacctgaaaatttataaaaagtgttgagattggtagaaggtagtttttaagtacatgtgcactaccctaaaagacttgtctattgtcaataaagtgttagtatttgtgaaattattattcctgttcagaaatactatttcttaaatctcctgggaatttgtggcataataaagcacattcaaagttctaatgtatttatgagctcattttcaaaatagtaagtttgtcatctttaaaatgaacatgacttgcctccttgatttctgaaatgaattaattgaagattgctatagtaatctttatttcatctttctagagttgttgacaattttattatacaacagttaccattagagaaggagggaagggctttgggtgtgtatttataggtactaagggatttactaaatatagtagattagcactgtcacacttgttcaagtagtttcaaacatagaaaattaagtatcaggtatgtggagcaatgtagtttttttttttcttcagtttaaaaaatttttaattgtggtagaagcaatgtattcttaaggtgaaaaacctacctcggttacatgtggtttgtgttttttggattaatctggattttataattagaaataaaaatgtaagattttgaatccaaaaaaaaaaaaaaaaaaaaaaaaaaaaaaaaaaaaaaaaaaaaaaaaaagcgcaaaaccaagtacatagtgacgatggcttttatttggacaaatagcttttatattttcattaaaccatgcaaaaaatactacatctttctggcacataactgtctccttaaccactgaacagttcagccatttgaataaattgtacattgtaaagcttatagtagctgattgtattattgattgtattgtatactatattaaatgtgaatttgtaccccttcattttaaaaggtcattgtgttctactgcctattttagattactttggggttggggaagggtgttttggtaagcaggattttaagtcctctctctctcgattggttttatgaagatataaggttatgctcttactaccaagctcaggattcttgattttaaaggtacaaggatagttgtgggagttttatttttggttatatttgaactgtatgaatggtaggtctgaatattgagaatttccatggtcttatgtggaggtaaaatatacagataactgatcagtttgagtgactgcaacatgttctggttgcacaacagttaggcatgctatggtttatatttgtgaagtttggatgcctgtgaagaatgattaaatacatgtttctaatattttagtgttttgtatttaggttatttattctttgtatctaaaactgaacagctactgtgctatattgattttattggtagtattgagcagaccttgtttctgcatgaaactagttgcaaaacccactattttggaaataaaaatgtattttgacatatacaaataaaatgaataaaactattttaaatgtgaaaaaaaaaaa

SEQ ID NO: 355745 - DNA, 8686 bp, Homo sapiens
tgacgggtggccgtgctgggggcgggagggcttctgtggtaggaagggaggtccgctcggccgggtgcgccgccccagtgctctgtgggatactggaagtctcgagcgtcggctccgggttcccagccctcctctggcccgcactcatagaaacattcacacaccccctgcctcccctctcttccctctccgcctcccccttccccccctcgcgataagaagacccggcggcaggagaggggatgaagatggcggacgcgaagcagaagcggaacgagcagctgaaacgctggatcggctccgagacggacctcgagcctccggtggtgaagcgccagaagaccaaggtgaagttcgacgatggcgccgtcttcctggctgcttgctccagcggcgacacggacgaggtcctcaagctgctgcaccgcggcgccgacatcaattacgccaatgtggacggactcactgccctgcaccaggcttgcattgatgacaatgttgatatggtgaagtttctggtagaaaatggagcaaatattaatcaacctgataatgaaggctggataccactacatgcagcagcttcctgtggatatcttgatattgcagagtttttgattggtcaaggagcacatgtaggggctgtcaacagtgaaggagatacacctttagatattgcggaggaggaggcaatggaagagctacttcaaaatgaagttaatcggcaaggggttgatatagaagcagctcgaaaggaagaagaacggatcatgcttagagatgccaggcagtggctaaatagtggtcatataaatgatgtccggcatgcaaaatctggaggtacagcacttcacgttgcagctgctaaaggctatacggaagttttaaaacttttaatacaggcaggctatgatgttaatattaaagactatgatggctggacacctcttcatgctgcagctcattggggtaaagaagaagcatgtcgaattttagtggacaatctgtgtgatatggagatggtcaacaaagtgctccatagtgaaaaacgggacaagaaatctccactaattgaatcaacagcaaatatggacaataatcagtcacagaagacctttaaaaacaaagagacgttgattattgaaccagagaaaaatgcatcccgtattgaatctctggaacaagaaaaggttgatgaagaagaagaaggaaagaaggatgagtctagctgctctagtgaagaagatgaggaagatgactcggaatcagaagctgaaacagataagacaaaacccctggcttctgtaactaatgccaacacttctagtacacaagcagctcctgtagctgttacaacacctactgtgtcatcaggtcaagcaacacctacatcacctattaaaaagtttccaaccacagctacaaaaatttctcccaaagaagaagagagaaaagatgagtctcctgcaacttggaggttaggacttagaaagacgggcagctatggtgcacttgctgaaatcacagcatctaaagagggtcagaaagaaaaagatactgcaggtgttacacgttcagcttcaagtcccagactttcctcctctttggataataaagaaaaggagaaagatagtaaaggaactaggcttgcatatgttgcacctacaataccaagacgactagccagtacatctgacattgaagagaaagaaaacagagattcttcaagtttgcgaacaagtagttcatatacaaggagaaaatgggaagatgatcttaaaaaaaatagctcagttaatgaaggatcaacgtatcataaaagttgctcctttggtagaagacaagatgatttgattagttctagtgttccaagcaccacatcaacaccaacagttacctctgcagctgggcttcagaaaagcctgctttccagcacaagcactactacaaagattacaacgggttcttcctcagcaggcacacaaagcagtacctcaaatcgtttgtgggctgaggatagtactgagaaagaaaaggacagtgttcctacggcagtgaccattcctgttgctccaactgttgtaaatgctgcagcttctaccacaaccctgactacaactactgctggcactgtctcctccacaacagaggtcagggagagacgcagatcatacctcactcctgttagggatgaagagtctgaatcccaaagaaaagcaagatctagacaagcaagacaatctagaagatcaacacagggagtgacattaactgatcttcaagaagctgagaaaacaataggaagaagtcgttctacccgaaccagagaacaagaaaatgaagaaaaagaaaaagaggaaaaagagaaacaagataaagagaaacaagaagaaaagaaggagtcagaaacatctagagaagatgaatataaacaaaagtactccagaacgtatgatgagacttaccagcgttataggccagtatcaacttcaagttcaaccactccatcctcttcactttctactatgagcagttcactgtatgcttcaagtcaactaaacaggccaaatagtcttgtaggcataacttctgcttactccagaggaataacaaaagaaaatgaaagagagggagaaaaaagagaagaggagaaagaaggagaagataaatcacaacctaaatcaatcagagaacgacgacgaccaagagagaaaagaagatctacaggagtttcattttggacacaagatagtgatgaaaatgaacaagaacaacaatcagacacagaagagggatccaataagaaagaaactcagacggattccatttctagatatgaaaccagttctacatcagctggtgatcgatatgattccttgctgggtcgctctggatcatacagttacttagaagaaagaaaaccttacagcagcaggctagaaaaggatgactcaactgactttaaaaagctttatgaacaaattctagctgaaaatgaaaagctgaaggcacagctacatgatacaaatatggaactaacagatcttaaattacagttggaaaaggccacccagagacaagaaagatttgctgatagatcactgttggaaatggaaaaaagggaacgaagagctctagaaagaagaatatctgaaatggaagaagagctcaaagtaagtaaactatgttacttatgagagagagtgctgtttatgtattaatgtttaaaatactattatagatatggtttacattaattgttctcaaagctgattacccaatttgtgaactgtctatatctggtgcttctctttcttcctgaatccaggttttagtgagccagaagagggtctaaaacccaaatcttaacacctagccccgccggctgctgtgggagcggcggccgtccctctcctggaggtcgtctcctggcatcctcggggccgcaggaaggaagaggaggcagcggccggagccctggtgggcggcctgaggtgagagcccgaccggcccctttgggaatatggcgaccggtggctaccggaccagcagcggcctcggcggcagcaccacagacttcctggaggagtggaaggcgaaacgcgagaagatgcgcgccaagcagaaccccccgggcccggcccccccgggagggggcagcagcgacgccgctgggaagccccccgcgggggctctgggcaccccggcggccgccgctgccaacgagctcaacaacaacctcccgggcggcgcgccggccgcacctgccgtccccggtcccgggggcgtgaactgcgcggtcggctccgccatgctgacgcgggcggcccccggcccgcggcggtcggaggacgagcccccagccgcctctgcctcggctgcaccgccgccccagcgtgacgaggaggagccggacggcgtcccagagaagggcaagagctcgggccccagtgccaggaaaggcaaggggcagatcgagaagaggaagctgcgggagaagcggcgctccaccggcgtggtcaacatccctgccgcagagtgcttagatgagtacgaagatgatgaagcagggcagaaagagcggaaacgagaagatgcaattacacaacagaacactatacagaatgaagctgtaaacttactagatccaggcagttcctatctgctacaggagccacctagaacagtttcaggcagatataaaagcacaaccagtgtctctgaagaagatgtctcaagtagatattctcgaacagatagaagtgggttccctagatataacagggatgcaaatgtttcaggtactctggtttcaagtagcacactggaaaagaaaattgaagatcttgaaaaggaagtagtaagagaaagacaagaaaacctaagacttgtgagactgatgcaagataaagaggaaatgattggaaaactcaaagaagaaattgatttattaaatagagacctagatgacatagaagatgaaaatgaacagctaaagcaggaaaataaaactcttttgaaagttgtgggtcagctgaccaggtagaggattcaagactcaatgtggaaaaaatattttaaactactgattgaatgttaatggtcaatgctagcacaatattcctatgctgcaatacattaaaataactaagcaagtatatttatttctagcaaacagatgtttgttttcaaaatacttctttttcattattggttttaaaaaagcattatccttttatctcacaaataagtaatatctttcagttattaaatgatagataatgcctttttggttttgtgtggtattcaactaatacatggtttaaagtcacagccgtttgaatatattttatcttggtagtacattttctcccttaggaatatacatagtctttgtttacatgagttcaaatacttttgggatgttaccttcacatgtcctattactgatgtgtgcaaccttttatgtgttgatgactcactcataaaggtttttgtctactgtcatttgttctttccacttattctaagcatttagagtaatagagtcatacttttttataacagcaaccttttaaaaggaaagctcttataaagtcactgtcatgttttagttgactaaatataaatttaagagaatacttgaattgtgctatagtaaataaaaatttactattttgtgtttgaatattgaaaaattgaatcactttaactcctgaaaaacatacaattgtaatttcaatgtaaaatttcttatgtaggtactacctttttttatcgttccaaggtttgctagtgaacacaggatattttaaaagttttttattcttcgggcctggaaagtgtacaaagtcagtgtaggagaaaaaaatccatatttttatattagcatgcacactaaaaaccaaaatattattcatacttaaaacattcatacaaaacaatatgtaagcagaaatagtactaaaatactttgcctaatttctaagttgaagaataacactgggacacagttttttcatatgagagaatattccgctatttcaaatttaagggattttcttcctaacattgaaattttaaaaacagagttacttctaaataattatacagattttttcttctattaaatattattatttagaattgtttttgtattacatattcatgttaagaaccccgtcttcccttaaaatacattaaaattatgacatttttgctttgtgattgaatttcaaatagcagtatggtatccttttatctagttaatatatgaaagtggcttgaatatagtcaaatccattttaggtactctactgactttttccttcacttgccaagcccttttattgttcactgttagaaaaatagagaaggtgagacagctgggggaaaatgtggagtaaatgataatcaaatgttgaattctaaaagtctctacatttacctaggttggctttctcccccagttcagaagtttccagcttggccaatcatcagaatcacttgaggaacttagaaagaactccctggctgtagctcctatgtaggtttaggttgagactctggattccacaatttttaaaggttaccatctgaggtttctgatcatagtctacttttgaagcagctgctgctgtttctttattccattgaacaccctggaattgacataattttatctatcagcatttctccccttttagtttatttaataattaacccggtctccagggcagttttcatatgaccatgtgtatattcactgctcacgaaaaagtttaatgttagattaccaaatttaatatagttacagaattactgcataagggcttcccttcttggagactcttacccagcatgggaacagtgatctgcccacatgacagggtggtatgccaggcatagttaactgcttttggttgtgaggtactcatcttcctttagttacccttagttatgtggcacacatgtccttattgcctagttcgtcatccacactttggatcttgtgaaaatgctgttagtatccaaccttaaaatatattagtatatgggtttttattaaaagaattactttgaattttctatttaattcatatgtaaataaaggaacatttcatttcacttaaaaaaattatatcagttattaggctgggtgcagtggctcatgcctgtaatcccagcactttgggaggccaaggcgggtggattaccagagttcgggagtttgagaccagcttgaccaacatggagaaaccccgtctctactaaaaatacaaaattagccaggtgtggtggcgcatgcctgtaatcctggctactcaggaggctgaggcaggagaatcgcttgaaaacccaggagacagaggttgcggtgagctgagattgcgccattgtactccagcctgggcaagaagagcgaaactctgtctccaaaaaaaaaaaaaaaaaaatttattaatacttttaaagactgagctgtttaagaattttttggggaacatttctagcagtgatttttttggcctttaatgatagcgtaaagacaggagccttacaacttaggcaaagcatttcacatgcagtccttcttccatctcaaaatatgtacttattttacatacagaattttacactaaccattgaaaaataaagtaggatctgctacagtttcacctgaaaatttataaaaagtgttgagattggtagaaggtagtttttaagtacatgtgcactaccctaaaagacttgtctattgtcaataaagtgttagtatttgtgaaattattattcctgttcagaaatactatttcttaaatctcctgggaatttgtggcataataaagcacattcaaagttctaatgtatttatgagctcattttcaaaatagtaagtttgtcatctttaaaatgaacatgacttgcctccttgatttctgaaatgaattaattgaagattgctatagtaatctttatttcatctttctagagttgttgacaattttattatacaacagttaccattagagaaggagggaagggctttgggtgtgtatttataggtactaagggatttactaaatatagtagattagcactgtcacacttgttcaagtagtttcaaacatagaaaattaagtatcaggtatgtggagcaatgtagtttttttttttcttcagtttaaaaaatttttaattgtggtagaagcaatgtattcttaaggtgaaaaacctacctcggttacatgtggtttgtgttttttggattaatctggattttataattagaaataaaaatgtaagattttgaatccaaaaaaaaaaaaaaaaaaaaaaaaaaaaaaaaaaaaaaaaaaaaaaaaaagcgcaaaaccaagtacatagtgacgatggcttttatttggacaaatagcttttatattttcattaaaccatgcaaaaaatactacatctttctggcacataactgtctccttaaccactgaacagttcagccatttgaataaattgtacattgtaaagcttatagtagctgattgtattattgattgtattgtatactatattaaatgtgaatttgtaccccttcattttaaaaggtcattgtgttctactgcctattttagattactttggggttggggaagggtgttttggtaagcaggattttaagtcctctctctctcgattggttttatgaagatataaggttatgctcttactaccaagctcaggattcttgattttaaaggtacaaggatagttgtgggagttttatttttggttatatttgaactgtatgaatggtaggtctgaatattgagaatttccatggtcttatgtggaggtaaaatatacagataactgatcagtttgagtgactgcaacatgttctggttgcacaacagttaggcatgctatggtttatatttgtgaagtttggatgcctgtgaagaatgattaaatacatgtttctaatattttagtgttttgtatttaggttatttattctttgtatctaaaactgaacagctactgtgctatattgattttattggtagtattgagcagaccttgtttctgcatgaaactagttgcaaaacccactattttggaaataaaaatgtattttgacatatacaaataaaatgaataaaactattttaaatgtgaaaaaaaaaaa

SEQ ID NO: 355746 - DNA, 8762 bp, Homo sapiens
tgacgggtggccgtgctgggggcgggagggcttctgtggtaggaagggaggtccgctcggccgggtgcgccgccccagtgctctgtgggatactggaagtctcgagcgtcggctccgggttcccagccctcctctggcccgcactcatagaaacattcacacaccccctgcctcccctctcttccctctccgcctcccccttccccccctcgcgataagaagacccggcggcaggagaggggatgaagatggcggacgcgaagcagaagcggaacgagcagctgaaacgctggatcggctccgagacggacctcgagcctccggtggtgaagcgccagaagaccaaggtgaagttcgacgatggcgccgtcttcctggctgcttgctccagcggcgacacggacgaggtcctcaagctgctgcaccgcggcgccgacatcaattacgccaatgtggacggactcactgccctgcaccaggcttgcattgatgacaatgttgatatggtgaagtttctggtagaaaatggagcaaatattaatcaacctgataatgaaggctggataccactacatgcagcagcttcctgtggatatcttgatattgcagagtttttgattggtcaaggagcacatgtaggggctgtcaacagtgaaggagatacacctttagatattgcggaggaggaggcaatggaagagctacttcaaaatgaagttaatcggcaaggggttgatatagaagcagctcgaaaggaagaagaacggatcatgcttagagatgccaggcagtggctaaatagtggtcatataaatgatgtccggcatgcaaaatctggaggtacagcacttcacgttgcagctgctaaaggctatacggaagttttaaaacttttaatacaggcaggctatgatgttaatattaaagactatgatggctggacacctcttcatgctgcagctcattggggtaaagaagaagcatgtcgaattttagtggacaatctgtgtgatatggagatggtcaacaaagtgggccaaacagcctttgatgtagcagatgaagacattttaggatatttagaagagttgcaaaagaaacaaaatctgctccatagtgaaaaacgggacaagaaatctccactaattgaatcaacagcaaatatggacaataatcagtcacagaagacctttaaaaacaaagagacgttgattattgaaccagagaaaaatgcatcccgtattgaatctctggaacaagaaaaggttgatgaagaagaagaaggaaagaaggatgagtctagctgctctagtgaagaagatgaggaagatgactcggaatcagaagctgaaacagataagacaaaacccctggcttctgtaactaatgccaacacttctagtacacaagcagctcctgtagctgttacaacacctactgtgtcatcaggtcaagcaacacctacatcacctattaaaaagtttccaaccacagctacaaaaatttctcccaaagaagaagagagaaaagatgagtctcctgcaacttggaggttaggacttagaaagacgggcagctatggtgcacttgctgaaatcacagcatctaaagagggtcagaaagaaaaagatactgcaggtgttacacgttcagcttcaagtcccagactttcctcctctttggataataaagaaaaggagaaagatagtaaaggaactaggcttgcatatgttgcacctacaataccaagacgactagccagtacatctgacattgaagagaaagaaaacagagattcttcaagtttgcgaacaagtagttcatatacaaggagaaaatgggaagatgatcttaaaaaaaatagctcagttaatgaaggatcaacgtatcataaaagttgctcctttggtagaagacaagatgatttgattagttctagtgttccaagcaccacatcaacaccaacagttacctctgcagctgggcttcagaaaagcctgctttccagcacaagcactactacaaagattacaacgggttcttcctcagcaggcacacaaagcagtacctcaaatcgtttgtgggctgaggatagtactgagaaagaaaaggacagtgttcctacggcagtgaccattcctgttgctccaactgttgtaaatgctgcagcttctaccacaaccctgactacaactactgctggcactgtctcctccacaacagaggtcagggagagacgcagatcatacctcactcctgttagggatgaagagtctgaatcccaaagaaaagcaagatctagacaagcaagacaatctagaagatcaacacagggagtgacattaactgatcttcaagaagctgagaaaacaataggaagaagtcgttctacccgaaccagagaacaagaaaatgaagaaaaagaaaaagaggaaaaagagaaacaagataaagagaaacaagaagaaaagaaggagtcagaaacatctagagaagatgaatataaacaaaagtactccagaacgtatgatgagacttaccagcgttataggccagtatcaacttcaagttcaaccactccatcctcttcactttctactatgagcagttcactgtatgcttcaagtcaactaaacaggccaaatagtcttgtaggcataacttctgcttactccagaggaataacaaaagaaaatgaaagagagggagaaaaaagagaagaggagaaagaaggagaagataaatcacaacctaaatcaatcagagaacgacgacgaccaagagagaaaagaagatctacaggagtttcattttggacacaagatagtgatgaaaatgaacaagaacaacaatcagacacagaagagggatccaataagaaagaaactcagacggattccatttctagatatgaaaccagttctacatcagctggtgatcgatatgattccttgctgggtcgctctggatcatacagttacttagaagaaagaaaaccttacagcagcaggctagaaaaggatgactcaactgactttaaaaagctttatgaacaaattctagctgaaaatgaaaagctgaaggcacagctacatgatacaaatatggaactaacagatcttaaattacagttggaaaaggccacccagagacaagaaagatttgctgatagatcactgttggaaatggaaaaaagggaacgaagagctctagaaagaagaatatctgaaatggaagaagagctcaaagtaagtaaactatgttacttatgagagagagtgctgtttatgtattaatgtttaaaatactattatagatatggtttacattaattgttctcaaagctgattacccaatttgtgaactgtctatatctggtgcttctctttcttcctgaatccaggttttagtgagccagaagagggtctaaaacccaaatcttaacacctagccccgccggctgctgtgggagcggcggccgtccctctcctggaggtcgtctcctggcatcctcggggccgcaggaaggaagaggaggcagcggccggagccctggtgggcggcctgaggtgagagcccgaccggcccctttgggaatatggcgaccggtggctaccggaccagcagcggcctcggcggcagcaccacagacttcctggaggagtggaaggcgaaacgcgagaagatgcgcgccaagcagaaccccccgggcccggcccccccgggagggggcagcagcgacgccgctgggaagccccccgcgggggctctgggcaccccggcggccgccgctgccaacgagctcaacaacaacctcccgggcggcgcgccggccgcacctgccgtccccggtcccgggggcgtgaactgcgcggtcggctccgccatgctgacgcgggcggcccccggcccgcggcggtcggaggacgagcccccagccgcctctgcctcggctgcaccgccgccccagcgtgacgaggaggagccggacggcgtcccagagaagggcaagagctcgggccccagtgccaggaaaggcaaggggcagatcgagaagaggaagctgcgggagaagcggcgctccaccggcgtggtcaacatccctgccgcagagtgcttagatgagtacgaagatgatgaagcagggcagaaagagcggaaacgagaagatgcaattacacaacagaacactatacagaatgaagctgtaaacttactagatccaggcagttcctatctgctacaggagccacctagaacagtttcaggcagatataaaagcacaaccagtgtctctgaagaagatgtctcaagtagatattctcgaacagatagaagtgggttccctagatataacagggatgcaaatgtttcaggtactctggtttcaagtagcacactggaaaagaaaattgaagatcttgaaaaggaagtagtaagagaaagacaagaaaacctaagacttgtgagactgatgcaagataaagaggaaatgattggaaaactcaaagaagaaattgatttattaaatagaggacctagatgacatagaagatgaaaatgaacagctaaagcaggaaaataaaactcttttgaaagttgtgggtcagctgaccaggtagaggattcaagactcaatgtggaaaaaatattttaaactactgattgaatgttaatggtcaatgctagcacaatattcctatgctgcaatacattaaaataactaagcaagtatatttatttctagcaaacagatgtttgttttcaaaatacttctttttcattattggttttaaaaaagcattatccttttatctcacaaataagtaatatctttcagttattaaatgatagataatgcctttttggttttgtgtggtattcaactaatacatggtttaaagtcacagccgtttgaatatattttatcttggtagtacattttctcccttaggaatatacatagtctttgtttacatgagttcaaatacttttgggatgttaccttcacatgtcctattactgatgtgtgcaaccttttatgtgttgatgactcactcataaaggtttttgtctactgtcatttgttctttccacttattctaagcatttagagtaatagagtcatacttttttataacagcaaccttttaaaaggaaagctcttataaagtcactgtcatgttttagttgactaaatataaatttaagagaatacttgaattgtgctatagtaaataaaaatttactattttgtgtttgaatattgaaaaattgaatcactttaactcctgaaaaacatacaattgtaatttcaatgtaaaatttcttatgtaggtactacctttttttatcgttccaaggtttgctagtgaacacaggatattttaaaagttttttattcttcgggcctggaaagtgtacaaagtcagtgtaggagaaaaaaatccatatttttatattagcatgcacactaaaaaccaaaatattattcatacttaaaacattcatacaaaacaatatgtaagcagaaatagtactaaaatactttgcctaatttctaagttgaagaataacactgggacacagttttttcatatgagagaatattccgctatttcaaatttaagggattttcttcctaacattgaaattttaaaaacagagttacttctaaataattatacagattttttcttctattaaatattattatttagaattgtttttgtattacatattcatgttaagaaccccgtcttcccttaaaatacattaaaattatgacatttttgctttgtgattgaatttcaaatagcagtatggtatccttttatctagttaatatatgaaagtggcttgaatatagtcaaatccattttaggtactctactgactttttccttcacttgccaagcccttttattgttcactgttagaaaaatagagaaggtgagacagctgggggaaaatgtggagtaaatgataatcaaatgttgaattctaaaagtctctacatttacctaggttggctttctcccccagttcagaagtttccagcttggccaatcatcagaatcacttgaggaacttagaaagaactccctggctgtagctcctatgtaggtttaggttgagactctggattccacaatttttaaaggttaccatctgaggtttctgatcatagtctacttttgaagcagctgctgctgtttctttattccattgaacaccctggaattgacataattttatctatcagcatttctccccttttagtttatttaataattaacccggtctccagggcagttttcatatgaccatgtgtatattcactgctcacgaaaaagtttaatgttagattaccaaatttaatatagttacagaattactgcataagggcttcccttcttggagactcttacccagcatgggaacagtgatctgcccacatgacagggtggtatgccaggcatagttaactgcttttggttgtgaggtactcatcttcctttagttacccttagttatgtggcacacatgtccttattgcctagttcgtcatccacactttggatcttgtgaaaatgctgttagtatccaaccttaaaatatattagtatatgggtttttattaaaagaattactttgaattttctatttaattcatatgtaaataaaggaacatttcatttcacttaaaaaaattatatcagttattaggctgggtgcagtggctcatgcctgtaatcccagcactttgggaggccaaggcgggtggattaccagagttcgggagtttgagaccagcttgaccaacatggagaaaccccgtctctactaaaaatacaaaattagccaggtgtggtggcgcatgcctgtaatcctggctactcaggaggctgaggcaggagaatcgcttgaaaacccaggagacagaggttgcggtgagctgagattgcgccattgtactccagcctgggcaagaagagcgaaactctgtctccaaaaaaaaaaaaaaaaaaatttattaatacttttaaagactgagctgtttaagaattttttggggaacatttctagcagtgatttttttggcctttaatgatagcgtaaagacaggagccttacaacttaggcaaagcatttcacatgcagtccttcttccatctcaaaatatgtacttattttacatacagaattttacactaaccattgaaaaataaagtaggatctgctacagtttcacctgaaaatttataaaaagtgttgagattggtagaaggtagtttttaagtacatgtgcactaccctaaaagacttgtctattgtcaataaagtgttagtatttgtgaaattattattcctgttcagaaatactatttcttaaatctcctgggaatttgtggcataataaagcacattcaaagttctaatgtatttatgagctcattttcaaaatagtaagtttgtcatctttaaaatgaacatgacttgcctccttgatttctgaaatgaattaattgaagattgctatagtaatctttatttcatctttctagagttgttgacaattttattatacaacagttaccattagagaaggagggaagggctttgggtgtgtatttataggtactaagggatttactaaatatagtagattagcactgtcacacttgttcaagtagtttcaaacatagaaaattaagtatcaggtatgtggagcaatgtagtttttttttttcttcagtttaaaaaatttttaattgtggtagaagcaatgtattcttaaggtgaaaaacctacctcggttacatgtggtttgtgttttttggattaatctggattttataattagaaataaaaatgtaagattttgaatccaaaaaaaaaaaaaaaaaaaaaaaaaaaaaaaaaaaaaaaaaaaaaaaaaagcgcaaaaccaagtacatagtgacgatggcttttatttggacaaatagcttttatattttcattaaaccatgcaaaaaatactacatctttctggcacataactgtctccttaaccactgaacagttcagccatttgaataaattgtacattgtaaagcttatagtagctgattgtattattgattgtattgtatactatattaaatgtgaatttgtaccccttcattttaaaaggtcattgtgttctactgcctattttagattactttggggttggggaagggtgttttggtaagcaggattttaagtcctctctctctcgattggttttatgaagatataaggttatgctcttactaccaagctcaggattcttgattttaaaggtacaaggatagttgtgggagttttatttttggttatatttgaactgtatgaatggtaggtctgaatattgagaatttccatggtcttatgtggaggtaaaatatacagataactgatcagtttgagtgactgcaacatgttctggttgcacaacagttaggcatgctatggtttatatttgtgaagtttggatgcctgtgaagaatgattaaatacatgtttctaatattttagtgttttgtatttaggttatttattctttgtatctaaaactgaacagctactgtgctatattgattttattggtagtattgagcagaccttgtttctgcatgaaactagttgcaaaacccactattttggaaataaaaatgtattttgacatatacaaataaaatgaataaaactattttaaatgtgaaaaaaaaaaa

SEQ ID NO: 355747 - DNA, 9439 bp, Homo sapiens
tgacgggtggccgtgctgggggcgggagggcttctgtggtaggaagggaggtccgctcggccgggtgcgccgccccagtgctctgtgggatactggaagtctcgagcgtcggctccgggttcccagccctcctctggcccgcactcatagaaacattcacacaccccctgcctcccctctcttccctctccgcctcccccttccccccctcgcgataagaagacccggcggcaggagaggggatgaagatggcggacgcgaagcagaagcggaacgagcagctgaaacgctggatcggctccgagacggacctcgagcctccggtggtgaagcgccagaagaccaaggtgaagttcgacgatggcgccgtcttcctggctgcttgctccagcggcgacacggacgaggtcctcaagctgctgcaccgcggcgccgacatcaattacgccaatgtggacggactcactgccctgcaccaggcttgcattgatgacaatgttgatatggtgaagtttctggtagaaaatggagcaaatattaatcaacctgataatgaaggctggataccactacatgcagcagcttcctgtggatatcttgatattgcagagtttttgattggtcaaggagcacatgtaggggctgtcaacagtgaaggagatacacctttagatattgcggaggaggaggcaatggaagagctacttcaaaatgaagttaatcggcaaggggttgatatagaagcagctcgaaaggaagaagaacggatcatgcttagagatgccaggcagtggctaaatagtggtcatataaatgatgtccggcatgcaaaatctggaggtacagcacttcacgttgcagctgctaaaggctatacggaagttttaaaacttttaatacaggcaggctatgatgttaatattaaagactatgatggctggacacctcttcatgctgcagctcattggggtaaagaagaagcatgtcgaattttagtggacaatctgtgtgatatggagatggtcaacaaagtgggccaaacagcctttgatgtagcagatgaagacattttaggatatttagaagagttgcaaaagaaacaaaatctgctccatagtgaaaaacgggacaagaaatctccactaattgaatcaacagcaaatatggacaataatcagtcacagaagacctttaaaaacaaagagacgttgattattgaaccagagaaaaatgcatcccgtattgaatctctggaacaagaaaaggttgatgaagaagaagaaggaaagaaggatgagtctagctgctctagtgaagaagatgaggaagatgactcggaatcagaagctgaaacagataagacaaaacccctggcttctgtaactaatgccaacacttctagtacacaagcagctcctgtagctgttacaacacctactgtgtcatcaggtcaagcaacacctacatcacctattaaaaagtttccaaccacagctacaaaaatttctcccaaagaagaagagagaaaagatgagtctcctgcaacttggaggttaggacttagaaagacgggcagctatggtgcacttgctgaaatcacagcatctaaagagggtcagaaagaaaaagatactgcaggtgttacacgttcagcttcaagtcccagactttcctcctctttggataataaagaaaaggagaaagatagtaaaggaactaggcttgcatatgttgcacctacaataccaagacgactagccagtacatctgacattgaagagaaagaaaacagagattcttcaagtttgcgaacaagtagttcatatacaaggagaaaatgggaagatgatcttaaaaaaaatagctcagttaatgaaggatcaacgtatcataaaagttgctcctttggtagaagacaagatgatttgattagttctagtgttccaagcaccacatcaacaccaacagttacctctgcagctgggcttcagaaaagcctgctttccagcacaagcactactacaaagattacaacgggttcttcctcagcaggcacacaaagcagtacctcaaatcgtttgtgggctgaggatagtactgagaaagaaaaggacagtgttcctacggcagtgaccattcctgttgctccaactgttgtaaatgctgcagcttctaccacaaccctgactacaactactgctggcactgtctcctccacaacagaggtcagggagagacgcagatcatacctcactcctgttagggatgaagagtctgaatcccaaagaaaagcaagatctagacaagcaagacaatctagaagatcaacacagggagtgacattaactgatcttcaagaagctgagaaaacaataggaagaagtcgttctacccgaaccagagaacaagaaaatgaagaaaaagaaaaagaggaaaaagagaaacaagataaagagaaacaagaagaaaagaaggagtcagaaacatctagagaagatgaatataaacaaaagtactccagaacgtatgatgagacttaccagcgttataggccagtatcaacttcaagttcaaccactccatcctcttcactttctactatgagcagttcactgtatgcttcaagtcaactaaacaggccaaatagtcttgtaggcataacttctgcttactccagaggaataacaaaagaaaatgaaagagagggagaaaaaagagaagaggagaaagaaggagaagataaatcacaacctaaatcaatcagagaacgacgacgaccaagagagaaaagaagatctacaggagtttcattttggacacaagatagtgatgaaaatgaacaagaacaacaatcagacacagaagagggatccaataagaaagaaactcagacggattccatttctagatatgaaaccagttctacatcagctggtgatcgatatgattccttgctgggtcgctctggatcatacagttacttagaagaaagaaaaccttacagcagcaggctagaaaaggatgactcaactgactttaaaaagctttatgaacaaattctagctgaaaatgaaaagctgaaggcacagctacatgatacaaatatggaactaacagatcttaaattacagttggaaaaggccacccagagacaagaaagatttgctgatagatcactgttggaaatggaaaaaagggaacgaagagctctagaaagaagaatatctgaaatggaagaagagctcaaagtaagtaaactatgttacttatgagagagagtgctgtttatgtattaatgtttaaaatactattatagatatggtttacattaattgttctcaaagctgattacccaatttgtgaactgtctatatctggtgcttctctttcttcctgaatccaggttttagtgagccagaagagggtctaaaacccaaatcttaacacctagccccgccggctgctgtgggagcggcggccgtccctctcctggaggtcgtctcctggcatcctcggggccgcaggaaggaagaggaggcagcggccggagccctggtgggcggcctgaggtgagagcccgaccggcccctttgggaatatggcgaccggtggctaccggaccagcagcggcctcggcggcagcaccacagacttcctggaggagtggaaggcgaaacgcgagaagatgcgcgccaagcagaaccccccgggcccggcccccccgggagggggcagcagcgacgccgctgggaagccccccgcgggggctctgggcaccccggcggccgccgctgccaacgagctcaacaacaacctcccgggcggcgcgccggccgcacctgccgtccccggtcccgggggcgtgaactgcgcggtcggctccgccatgctgacgcgggcggcccccggcccgcggcggtcggaggacgagcccccagccgcctctgcctcggctgcaccgccgccccagcgtgacgaggaggagccggacggcgtcccagagaagggcaagagctcgggccccagtgccaggaaaggcaaggggcagatcgagaagaggaagctgcgggagaagcggcgctccaccggcgtggtcaacatccctgccgcagagtgcttagatgagtacgaagatgatgaagcagggcagaaagagcggaaacgagaagatgcaattacacaacagaacactatacagaatgaagctgtaaacttactagatccaggcagttcctatctgctacaggagccacctagaacagtttcaggcagatataaaagcacaaccagtgtctctgaagaagatgtctcaagtagatattctcgaacagatagaagtgggttccctagatataacagggatgcaaatgtttcaggtactctggtttcaagtagcacactggaaaagaaaattgaagatcttgaaaaggaagtagtaagagaaagacaagaaaacctaagacttgtgagactgatgcaagataaagaggaaatgattggaaaactcaaagaagaaattgatttattaaatagagacctagatgacatagaagatgaaaatgaacagctaaagcaggaaaataaaactcttttgaaagttgtgggtcagctgaccaggtagaggattcaagactcaatgtggaaaaaatattttaaactactgattgaatgttaatggtcaatgctagcacaatattcctatgctgcaatacattaaaataactaagcaagtatatttatttctagcaaacagatgtttgttttcaaaatacttctttttcattattggttttaaaaaagcattatccttttatctcacaaataagtaatatctttcagttattaaatgatagataatgcctttttggttttgtgtggtattcaactaatacatggtttaaagtcacagccgtttgaatatattttatcttggtagtacattttctcccttaggaatatacatagtctttgtttacatgagttcaaatacttttgggatgttaccttcacatgtcctattactgatgtgtgcaaccttttatgtgttgatgactcactcataaaggtttttgtctactgtcatttgttctttccacttattctaagcatttagagtaatagagtcatacttttttataacagcaaccttttaaaaggaaagctcttataaagtcactgtcatgttttagttgactaaatataaatttaagagaatacttgaattgtgctatagtaaataaaaatttactattttgtgtttgaatattgaaaaattgaatcactttaactcctgaaaaacatacaattgtaatttcaatgtaaaatttcttatgtaggtactacctttttttatcgttccaaggtttgctagtgaacacaggatattttaaaagttttttattcttcgggcctggaaagtgtacaaagtcagtgtaggagaaaaaaatccatatttttatattagcatgcacactaaaaaccaaaatattattcatacttaaaacattcatacaaaacaatatgtaagcagaaatagtactaaaatactttgcctaatttctaagttgaagaataacactgggacacagttttttcatatgagagaatattccgctatttcaaatttaagggattttcttcctaacattgaaattttaaaaacagagttacttctaaataattatacagattttttcttctattaaatattattatttagaattgtttttgtattacatattcatgttaagaaccccgtcttcccttaaaatacattaaaattatgacatttttgctttgtgattgaatttcaaatagcagtatggtatccttttatctagttaatatatgaaagtggcttgaatatagtcaaatccattttaggtactctactgactttttccttcacttgccaagcccttttattgttcactgttagaaaaatagagaaggtgagacagctgggggaaaatgtggagtaaatgataatcaaatgttgaattctaaaagtctctacatttacctaggttggctttctcccccagttcagaagtttccagcttggccaatcatcagaatcacttgaggaacttagaaagaactccctggctgtagctcctatgtaggtttaggttgagactctggattccacaatttttaaaggttaccatctgaggtttctgatcatagtctacttttgaagcagctgctgctgtttctttattccattgaacaccctggaattgacataattttatctatcagcatttctccccttttagtttatttaataattaacccggtctccagggcagttttcatatgaccatgtgtatattcactgctcacgaaaaagtttaatgttagattaccaaatttaatatagttacagaattactgcataagggcttcccttcttggagactcttacccagcatgggaacagtgatctgcccacatgacagggtggtatgccaggcatagttaactgcttttggttgtgaggtactcatcttcctttagttacccttagttatgtggcacacatgtccttattgcctagttcgtcatccacactttggatcttgtgaaaatgctgttagtatccaaccttaaaatatattagtatatgggtttttattaaaagaattactttgaattttctatttaattcatatgtaaataaaggaacatttcatttcacttaaaaaaattatatcagttattaggctgggtgcagtggctcatgcctgtaatcccagcactttgggaggccaaggcgggtggattaccagagttcgggagtttgagaccagcttgaccaacatggagaaaccccgtctctactaaaaatacaaaattagccaggtgtggtggcgcatgcctgtaatcctggctactcaggaggctgaggcaggagaatcgcttgaaaacccaggagacagaggttgcggtgagctgagattgcgccattgtactccagcctgggcaagaagagcgaaactctgtctccaaaaaaaaaaaaaaaaaaatttattaatacttttaaagactgagctgtttaagaattttttggggaacatttctagcagtgatttttttggcctttaatgatagcgtaaagacaggagccttacaacttaggcaaagcatttcacatgcagtccttcttccatctcaaaatatgtacttattttacatacagaattttacactaaccattgaaaaataaagtaggatctgctacagtttcacctgaaaatttataaaaagtgttgagattggtagaaggtagtttttaagtacatgtgcactaccctaaaagacttgtctattgtcaataaagtgttagtatttgtgaaattattattcctgttcagaaatactatttcttaaatctcctgggaatttgtggcataataaagcacattcaaagttctaatgtatttatgagctcattttcaaaatagtaagtttgtcatctttaaaatgaacatgacttgcctccttgatttctgaaatgaattaattgaagattgctatagtaatctttatttcatctttctagagttgttgacaattttattatacaacagttaccattagagaaggagggaagggctttgggtgtgtatttataggtactaagggatttactaaatatagtagattagcactgtcacacttgttcaagtagtttcaaacatagaaaattaagtatcaggtatgtggagcaatgtagtttttttttttcttcagtttaaaaaatttttaattgtggtagaagcaatgtattcttaaggtgaaaaacctacctcggttacatgtggtttgtgttttttggattaatctggattttataattagaaataaaaatgtaagattttgaatccacttaatttcttgaaaatagtacaagtcagtgtaatagagaagcattcatatattcaacactgtaagacaaaacagcagagaccttggatttgataattgatctgatatcctggacagtattcatatgtacagtgataggtatctttctttggagttttttttttgtgcatatgtgtatagttttatgggttctgagttggtgaccagtaagttgcatgtagtgctggcacttacttaataactattcatgatattgttaataacttgttataggattgtattcccaattacagtctctaagattgtaattgatattatctgagaggtagtgtgacaactttcttttgttgttacattaagccgaaaacataatactaatagacaactaacagtttgcttatcaggcacatcaactaaggcacctccccccatgctaagtttctcctggatatatggaagttgattgtttcccagtttaaaaacttgaactaatatctcctaagaaaatctgagtccatatggtttttattttacttagctagaatctcatagcatgttaaagtcatatccttatccccactaaaaataactatgtctatgtgagaggaatatagtatgtgggagctgtattaaatactattacaggtgttacagaatctttaaataaatggacatggaccaactttccatctagtagtgtacgatctatatagtgcatgtcagtagcacaaaatgcagtcttagcattagcctgtctaatctgaatagtttactcaaaagtacttctttgtgttaagtattcagccactgtttttagatctagttaataggttctatttaatttgctacaacatttactgaatggtggagtgaaaaaactgatgcatactgggaaatatctaccattttttaaagataatgttaattaggaaaagaacacttttaaggaatttatagcagtgatgaaatgaattcagttatatcagatacaccaaactgttgatggtatttaaatgtgacttcaagttagtatttctgtatatattattgattactggtttgtttttagatatgtaagtctgttctaatctacagttcacatatcgacagttactctggtaataatagaatgttagtgatgatcacttggtggatgttgattaagtgcctgtgttttgtttcctcctctggataccaaataggtgtatgctacttttttggtgaacttatttcttggaagatttggctatgctattcagggtttttattcttatgtttttcttctaaatttaagtagcatcctgctgctaccatattaaagctaaaatttaacttttgctgaagaatcagctaattcaggtaatccaaatatttgtggaaaaacatctggataatttattgaacacattagtattgtgttagctttgatcattcccatttcataggtttttattgtggaatagtcaacttaatatagattcactttcaatttgcatgtataaagtaatactcaataaaatttttttcatttatttttcaaaagtgg

SEQ ID NO: 355748 - DNA, 8721 bp, Homo sapiens
tgacgggtggccgtgctgggggcgggagggcttctgtggtaggaagggaggtccgctcggccgggtgcgccgccccagtgctctgtgggatactggaagtctcgagcgtcggctccgggttcccagccctcctctggcccgcactcatagaaacattcacacaccccctgcctcccctctcttccctctccgcctcccccttccccccctcgcgataagaagacccggcggcaggagaggggatgaagatggcggacgcgaagcagaagcggaacgagcagctgaaacgctggatcggctccgagacggacctcgagcctccggtggtgaagcgccagaagaccaaggtgaagttcgacgatggcgccgtcttcctggctgcttgctccagcggcgacacggacgaggtcctcaagctgctgcaccgcggcgccgacatcaattacgccaatgtggacggactcactgccctgcaccaggcttgcattgatgacaatgttgatatggtgaagtttctggtagaaaatggagcaaatattaatcaacctgataatgaaggctggataccactacatgcagcagcttcctgtggatatcttgatattgcagagtttttgattggtcaaggagcacatgtaggggctgtcaacagtgaaggagatacacctttagatattgcggaggaggaggcaatggaagagctacttcaaaatgaagttaatcggcaaggggttgatatagaagcagctcgaaaggaagaagaacggatcatgcttagagatgccaggcagtggctaaatagtggtcatataaatgatgtccggcatgcaaaatctggaggtacagcacttcacgttgcagctgctaaaggctatacggaagttttaaaacttttaatacaggcaggctatgatgttaatattaaagactatgatggctggacacctcttcatgctgcagctcattggggtaaagaagaagcatgtcgaattttagtggacaatctgtgtgatatggagatggtcaacaaagtgggccaaacagcctttgatgtagcagatgaagacattttaggatatttagaagagttgcaaaagaaacaaaatctgctccatagtgaaaaacgggacaagaaatctccactaattgaatcaacagcaaatatggacaataatcagtcacagaagacctttaaaaacaaagagacgttgattattgaaccagagaaaaatgcatcccgtattgaatctctggaacaagaaaaggttgatgaagaagaagaaggaaagaaggatgagtctagctgctctagtgaagaagatgaggaagatgactcggaatcagaagctgaaacagataagacaaaacccctggcttctgtaactaatgccaacacttctagtacacaagcagctcctgtagctgttacaacacctactgtgtcatcaggtcaagcaacacctacatcacctattaaaaagtttccaaccacagctacaaaaatttctcccaaagaagaagagagaaaagatgagtctcctgcaacttggaggttaggacttagaaagacgggcagctatggtgcacttgctgaaatcacagcatctaaagagggtcagaaagaaaaagatactgcaggtgttacacgttcagcttcaagtcccagactttcctcctctttggataataaagaaaaggagaaagatagtaaaggaactaggcttgcatatgttgcacctacaataccaagacgactagccagtacatctgacattgaagagaaagaaaacagagattcttcaagtttgcgaacaagtagttcatatacaaggagaaaatgggaagatgatcttaaaaaaaatagctcagttaatgaaggatcaacgtatcataaactagtgttccaagcaccacatcaacaccaacagttacctctgcagctgggcttcagaaaagcctgctttccagcacaagcactactacaaagattacaacgggttcttcctcagcaggcacacaaagcagtacctcaaatcgtttgtgggctgaggatagtactgagaaagaaaaggacagtgttcctacggcagtgaccattcctgttgctccaactgttgtaaatgctgcagcttctaccacaaccctgactacaactactgctggcactgtctcctccacaacagaggtcagggagagacgcagatcatacctcactcctgttagggatgaagagtctgaatcccaaagaaaagcaagatctagacaagcaagacaatctagaagatcaacacagggagtgacattaactgatcttcaagaagctgagaaaacaataggaagaagtcgttctacccgaaccagagaacaagaaaatgaagaaaaagaaaaagaggaaaaagagaaacaagataaagagaaacaagaagaaaagaaggagtcagaaacatctagagaagatgaatataaacaaaagtactccagaacgtatgatgagacttaccagcgttataggccagtatcaacttcaagttcaaccactccatcctcttcactttctactatgagcagttcactgtatgcttcaagtcaactaaacaggccaaatagtcttgtaggcataacttctgcttactccagaggaataacaaaagaaaatgaaagagagggagaaaaaagagaagaggagaaagaaggagaagataaatcacaacctaaatcaatcagagaacgacgacgaccaagagagaaaagaagatctacaggagtttcattttggacacaagatagtgatgaaaatgaacaagaacaacaatcagacacagaagagggatccaataagaaagaaactcagacggattccatttctagatatgaaaccagttctacatcagctggtgatcgatatgattccttgctgggtcgctctggatcatacagttacttagaagaaagaaaaccttacagcagcaggctagaaaaggatgactcaactgactttaaaaagctttatgaacaaattctagctgaaaatgaaaagctgaaggcacagctacatgatacaaatatggaactaacagatcttaaattacagttggaaaaggccacccagagacaagaaagatttgctgatagatcactgttggaaatggaaaaaagggaacgaagagctctagaaagaagaatatctgaaatggaagaagagctcaaagtaagtaaactatgttacttatgagagagagtgctgtttatgtattaatgtttaaaatactattatagatatggtttacattaattgttctcaaagctgattacccaatttgtgaactgtctatatctggtgcttctctttcttcctgaatccaggttttagtgagccagaagagggtctaaaacccaaatcttaacacctagccccgccggctgctgtgggagcggcggccgtccctctcctggaggtcgtctcctggcatcctcggggccgcaggaaggaagaggaggcagcggccggagccctggtgggcggcctgaggtgagagcccgaccggcccctttgggaatatggcgaccggtggctaccggaccagcagcggcctcggcggcagcaccacagacttcctggaggagtggaaggcgaaacgcgagaagatgcgcgccaagcagaaccccccgggcccggcccccccgggagggggcagcagcgacgccgctgggaagccccccgcgggggctctgggcaccccggcggccgccgctgccaacgagctcaacaacaacctcccgggcggcgcgccggccgcacctgccgtccccggtcccgggggcgtgaactgcgcggtcggctccgccatgctgacgcgggcggcccccggcccgcggcggtcggaggacgagcccccagccgcctctgcctcggctgcaccgccgccccagcgtgacgaggaggagccggacggcgtcccagagaagggcaagagctcgggccccagtgccaggaaaggcaaggggcagatcgagaagaggaagctgcgggagaagcggcgctccaccggcgtggtcaacatccctgccgcagagtgcttagatgagtacgaagatgatgaagcagggcagaaagagcggaaacgagaagatgcaattacacaacagaacactatacagaatgaagctgtaaacttactagatccaggcagttcctatctgctacaggagccacctagaacagtttcaggcagatataaaagcacaaccagtgtctctgaagaagatgtctcaagtagatattctcgaacagatagaagtgggttccctagatataacagggatgcaaatgtttcaggtactctggtttcaagtagcacactggaaaagaaaattgaagatcttgaaaaggaagtagtaagagaaagacaagaaaacctaagacttgtgagactgatgcaagataaagaggaaatgattggaaaactcaaagaagaaattgatttattaaatagagacctagatgacatagaagatgaaaatgaacagctaaagcaggaaaataaaactcttttgaaagttgtgggtcagctgaccaggtagaggattcaagactcaatgtggaaaaaatattttaaactactgattgaatgttaatggtcaatgctagcacaatattcctatgctgcaatacattaaaataactaagcaagtatatttatttctagcaaacagatgtttgttttcaaaatacttctttttcattattggttttaaaaaagcattatccttttatctcacaaataagtaatatctttcagttattaaatgatagataatgcctttttggttttgtgtggtattcaactaatacatggtttaaagtcacagccgtttgaatatattttatcttggtagtacattttctcccttaggaatatacatagtctttgtttacatgagttcaaatacttttgggatgttaccttcacatgtcctattactgatgtgtgcaaccttttatgtgttgatgactcactcataaaggtttttgtctactgtcatttgttctttccacttattctaagcatttagagtaatagagtcatacttttttataacagcaaccttttaaaaggaaagctcttataaagtcactgtcatgttttagttgactaaatataaatttaagagaatacttgaattgtgctatagtaaataaaaatttactattttgtgtttgaatattgaaaaattgaatcactttaactcctgaaaaacatacaattgtaatttcaatgtaaaatttcttatgtaggtactacctttttttatcgttccaaggtttgctagtgaacacaggatattttaaaagttttttattcttcgggcctggaaagtgtacaaagtcagtgtaggagaaaaaaatccatatttttatattagcatgcacactaaaaaccaaaatattattcatacttaaaacattcatacaaaacaatatgtaagcagaaatagtactaaaatactttgcctaatttctaagttgaagaataacactgggacacagttttttcatatgagagaatattccgctatttcaaatttaagggattttcttcctaacattgaaattttaaaaacagagttacttctaaataattatacagattttttcttctattaaatattattatttagaattgtttttgtattacatattcatgttaagaaccccgtcttcccttaaaatacattaaaattatgacatttttgctttgtgattgaatttcaaatagcagtatggtatccttttatctagttaatatatgaaagtggcttgaatatagtcaaatccattttaggtactctactgactttttccttcacttgccaagcccttttattgttcactgttagaaaaatagagaaggtgagacagctgggggaaaatgtggagtaaatgataatcaaatgttgaattctaaaagtctctacatttacctaggttggctttctcccccagttcagaagtttccagcttggccaatcatcagaatcacttgaggaacttagaaagaactccctggctgtagctcctatgtaggtttaggttgagactctggattccacaatttttaaaggttaccatctgaggtttctgatcatagtctacttttgaagcagctgctgctgtttctttattccattgaacaccctggaattgacataattttatctatcagcatttctccccttttagtttatttaataattaacccggtctccagggcagttttcatatgaccatgtgtatattcactgctcacgaaaaagtttaatgttagattaccaaatttaatatagttacagaattactgcataagggcttcccttcttggagactcttacccagcatgggaacagtgatctgcccacatgacagggtggtatgccaggcatagttaactgcttttggttgtgaggtactcatcttcctttagttacccttagttatgtggcacacatgtccttattgcctagttcgtcatccacactttggatcttgtgaaaatgctgttagtatccaaccttaaaatatattagtatatgggtttttattaaaagaattactttgaattttctatttaattcatatgtaaataaaggaacatttcatttcacttaaaaaaattatatcagttattaggctgggtgcagtggctcatgcctgtaatcccagcactttgggaggccaaggcgggtggattaccagagttcgggagtttgagaccagcttgaccaacatggagaaaccccgtctctactaaaaatacaaaattagccaggtgtggtggcgcatgcctgtaatcctggctactcaggaggctgaggcaggagaatcgcttgaaaacccaggagacagaggttgcggtgagctgagattgcgccattgtactccagcctgggcaagaagagcgaaactctgtctccaaaaaaaaaaaaaaaaaaatttattaatacttttaaagactgagctgtttaagaattttttggggaacatttctagcagtgatttttttggcctttaatgatagcgtaaagacaggagccttacaacttaggcaaagcatttcacatgcagtccttcttccatctcaaaatatgtacttattttacatacagaattttacactaaccattgaaaaataaagtaggatctgctacagtttcacctgaaaatttataaaaagtgttgagattggtagaaggtagtttttaagtacatgtgcactaccctaaaagacttgtctattgtcaataaagtgttagtatttgtgaaattattattcctgttcagaaatactatttcttaaatctcctgggaatttgtggcataataaagcacattcaaagttctaatgtatttatgagctcattttcaaaatagtaagtttgtcatctttaaaatgaacatgacttgcctccttgatttctgaaatgaattaattgaagattgctatagtaatctttatttcatctttctagagttgttgacaattttattatacaacagttaccattagagaaggagggaagggctttgggtgtgtatttataggtactaagggatttactaaatatagtagattagcactgtcacacttgttcaagtagtttcaaacatagaaaattaagtatcaggtatgtggagcaatgtagtttttttttttcttcagtttaaaaaatttttaattgtggtagaagcaatgtattcttaaggtgaaaaacctacctcggttacatgtggtttgtgttttttggattaatctggattttataattagaaataaaaatgtaagattttgaatccaaaaaaaaaaaaaaaaaaaaaaaaaaaaaaaaaaaaaaaaaaaaaaaaaagcgcaaaaccaagtacatagtgacgatggcttttatttggacaaatagcttttatattttcattaaaccatgcaaaaaatactacatctttctggcacataactgtctccttaaccactgaacagttcagccatttgaataaattgtacattgtaaagcttatagtagctgattgtattattgattgtattgtatactatattaaatgtgaatttgtaccccttcattttaaaaggtcattgtgttctactgcctattttagattactttggggttggggaagggtgttttggtaagcaggattttaagtcctctctctctcgattggttttatgaagatataaggttatgctcttactaccaagctcaggattcttgattttaaaggtacaaggatagttgtgggagttttatttttggttatatttgaactgtatgaatggtaggtctgaatattgagaatttccatggtcttatgtggaggtaaaatatacagataactgatcagtttgagtgactgcaacatgttctggttgcacaacagttaggcatgctatggtttatatttgtgaagtttggatgcctgtgaagaatgattaaatacatgtttctaatattttagtgttttgtatttaggttatttattctttgtatctaaaactgaacagctactgtgctatattgattttattggtagtattgagcagaccttgtttctgcatgaaactagttgcaaaacccactattttggaaataaaaatgtattttgacatatacaaataaaatgaataaaactattttaaatgtgaaaaaaaaaaa

SEQ ID NO: 355749 - DNA, 8834 bp, Homo sapiens
tgacgggtggccgtgctgggggcgggagggcttctgtggtaggaagggaggtccgctcggccgggtgcgccgccccagtgctctgtgggatactggaagtctcgagcgtcggctccgggttcccagccctcctctggcccgcactcatagaaacattcacacaccccctgcctcccctctcttccctctccgcctcccccttccccccctcgcgataagaagacccggcggcaggagaggggatgaagatggcggacgcgaagcagaagcggaacgagcagctgaaacgctggatcggctccgagacggacctcgagcctccggtggtgaagcgccagaagaccaaggtgaagttcgacgatggcgccgtcttcctggctgcttgctccagcggcgacacggacgaggtcctcaagctgctgcaccgcggcgccgacatcaattacgccaatgtggacggactcactgccctgcaccaggcttgcattgatgacaatgttgatatggtgaagtttctggtagaaaatggagcaaatattaatcaacctgataatgaaggctggataccactacatgcagcagcttcctgtggatatcttgatattgcagagtttttgattggtcaaggagcacatgtaggggctgtcaacagtgaaggagatacacctttagatattgcggaggaggaggcaatggaagagctacttcaaaatgaagttaatcggcaaggggttgatatagaagcagctcgaaaggaagaagaacggatcatgcttagagatgccaggcagtggctaaatagtggtcatataaatgatgtccggcatgcaaaatctggaggtacagcacttcacgttgcagctgctaaaggctatacggaagttttaaaacttttaatacaggcaggctatgatgttaatattaaagactatgatggctggacacctcttcatgctgcagctcattggggtaaagaagaagcatgtcgaattttagtggacaatctgtgtgatatggagatggtcaacaaagtgggccaaacagcctttgatgtagcagatgaagacattttaggatatttagaagagttgcaaaagaaacaaaatctgctccatagtgaaaaacgggacaagaaatctccactaattgaatcaacagcaaatatggacaataatcagtcacagaagacctttaaaaacaaagagacgttgattattgaaccagagaaaaatgcatcccgtattgaatctctggaacaagaaaaggttgatgaagaagaagaaggaaagaaggatgagtctagctgctctagtgaagaagatgaggaagatgactcggaatcagaagctgaaacagataagacaaaacccctggcttctgtaactaatgccaacacttctagtacacaagcagctcctgtagctgttacaacacctactgtgtcatcaggtcaagcaacacctacatcacctattaaaaagtttccaaccacagctacaaaaatttctcccaaagaagaagagagaaaagatgagtctcctgcaacttggaggttaggacttagaaagacgggcagctatggtgcacttgctgaaatcacagcatctaaagagggtcagaaagaaaaagatactgcaggtgttacacgttcagcttcaagtcccagactttcctcctctttggataataaagaaaaggagaaagatagtaaaggaactaggcttgcatatgttgcacctacaataccaagacgactagccagtacatctgacattgaagagaaagaaaacagagattcttcaagtttgcgaacaagtagttcatatacaaggagaaaatgggaagatgatcttaaaaaaaatagctcagttaatgaaggatcaacgtatcataaaagttgctcctttggtagaagacaagatgatttgattagttctagtgttccaagcaccacatcaacaccaacagttacctctgcagctgggcttcagaaaagcctgctttccagcacaagcactactacaaagattacaacgggttcttcctcagcaggcacacaaagcagtacctcaaatcgtttgtgggctgaggatagtactgagaaagaaaaggacagtgttcctacggcagtgaccattcctgttgctccaactgttgtaaatgctgcagcttctaccacaaccctgactacaactactgctggcactgtctcctccacaacagaggtcagggagagacgcagatcatacctcactcctgttagggatgaagagtctgaatcccaaagaaaagcaagatctagacaagcaagacaatctagaagatcaacacagggagtgacattaactgatcttcaagaagctgagaaaacaataggaagaagtcgttctacccgaaccagagaacaagaaaatgaagaaaaagaaaaagaggaaaaagagaaacaagataaagagaaacaagaagaaaagaaggagtcagaaacatctagagaagatgaatataaacaaaagtactccagaacgtatgatgagacttaccagcgttataggccagtatcaacttcaagttcaaccactccatcctcttcactttctactatgagcagttcactgtatgcttcaagtcaactaaacaggccaaatagtcttgtaggcataacttctgcttactccagaggaataacaaaagaaaatgaaagagagggagaaaaaagagaagaggagaaagaaggagaagataaatcacaacctaaatcaatcagagaacgacgacgaccaagagagaaaagaagatctacaggagtttcattttggacacaagatagtgatgaaaatgaacaagaacaacaatcagacacagaagagggatccaataagaaagaaactcagacggattccatttctagatatgaaaccagttctacatcagctggtgatcgatatgattccttgctgggtcgctctggatcatacagttacttagaagaaagaaaaccttacagcagcaggctagaaaaggatgactcaactgactttaaaaagctttatgaacaaattctagctgaaaatgaaaagctgaaggcacagctacatgatacaaatatggaactaacagatcttaaattacagttggaaaaggccacccagagacaagaaagatttgctgatagatcactgttggaaatggaaaaaagggaacgaagagctctagaaagaagaatatctgaaatggaagaagagctcaaagtaagtaaactatgttacttatgagagagagtgctgtttatgtattaatgtttaaaatactattatagatatggtttacattaattgttctcaaagctgattacccaatttgtgaactgtctatatctggtgcttctctttcttcctgaatccaggttttagtgagccagaagagggtctaaaacccaaatcttaacacctagccccgccggctgctgtgggagcggcggccgtccctctcctggaggtcgtctcctggcatcctcggggccgcaggaaggaagaggaggcagcggccggagccctggtgggcggcctgaggtgagagcccgaccggcccctttgggaatatggcgaccggtggctaccggaccagcagcggcctcggcggcagcaccacagacttcctggaggagtggaaggcgaaacgcgagaagatgcgcgccaagcagaaccccccgggcccggcccccccgggagggggcagcagcgacgccgctgggaagccccccgcgggggctctgggcaccccggcggccgccgctgccaacgagctcaacaacaacctcccgggcggcgcgccggccgcacctgccgtccccggtcccgggggcgtgaactgcgcggtcggctccgccatgctgacgcgggcggcccccggcccgcggcggtcggaggacgagcccccagccgcctctgcctcggctgcaccgccgccccagcgtgacgaggaggagccggacggcgtcccagagaagggcaagagctcgggccccagtgccaggaaaggcaaggggcagatcgagaagaggaagctgcgggagaagcggcgctccaccggcgtggtcaacatccctgccgcagaggatagccgtcttctggaaaaatctttgtatacatttacaaatcctgtacttctcctgctttgtttttatagagtgcttagatgagtacgaagatgatgaagcagggcagaaagagcggaaacgagaagatgcaattacacaacagaacactatacagaatgaagctgtaaacttactagatccaggcagttcctatctgctacaggagccacctagaacagtttcaggcagatataaaagcacaaccagtgtctctgaagaagatgtctcaagtagatattctcgaacagatagaagtgggttccctagatataacagggatgcaaatgtttcaggtactctggtttcaagtagcacactggaaaagaaaattgaagatcttgaaaaggaagtagtaagagaaagacaagaaaacctaagacttgtgagactgatgcaagataaagaggaaatgattggaaaactcaaagaagaaattgatttattaaatagagacctagatgacatagaagatgaaaatgaacagctaaagcaggaaaataaaactcttttgaaagttgtgggtcagctgaccaggtagaggattcaagactcaatgtggaaaaaatattttaaactactgattgaatgttaatggtcaatgctagcacaatattcctatgctgcaatacattaaaataactaagcaagtatatttatttctagcaaacagatgtttgttttcaaaatacttctttttcattattggttttaaaaaagcattatccttttatctcacaaataagtaatatctttcagttattaaatgatagataatgcctttttggttttgtgtggtattcaactaatacatggtttaaagtcacagccgtttgaatatattttatcttggtagtacattttctcccttaggaatatacatagtctttgtttacatgagttcaaatacttttgggatgttaccttcacatgtcctattactgatgtgtgcaaccttttatgtgttgatgactcactcataaaggtttttgtctactgtcatttgttctttccacttattctaagcatttagagtaatagagtcatacttttttataacagcaaccttttaaaaggaaagctcttataaagtcactgtcatgttttagttgactaaatataaatttaagagaatacttgaattgtgctatagtaaataaaaatttactattttgtgtttgaatattgaaaaattgaatcactttaactcctgaaaaacatacaattgtaatttcaatgtaaaatttcttatgtaggtactacctttttttatcgttccaaggtttgctagtgaacacaggatattttaaaagttttttattcttcgggcctggaaagtgtacaaagtcagtgtaggagaaaaaaatccatatttttatattagcatgcacactaaaaaccaaaatattattcatacttaaaacattcatacaaaacaatatgtaagcagaaatagtactaaaatactttgcctaatttctaagttgaagaataacactgggacacagttttttcatatgagagaatattccgctatttcaaatttaagggattttcttcctaacattgaaattttaaaaacagagttacttctaaataattatacagattttttcttctattaaatattattatttagaattgtttttgtattacatattcatgttaagaaccccgtcttcccttaaaatacattaaaattatgacatttttgctttgtgattgaatttcaaatagcagtatggtatccttttatctagttaatatatgaaagtggcttgaatatagtcaaatccattttaggtactctactgactttttccttcacttgccaagcccttttattgttcactgttagaaaaatagagaaggtgagacagctgggggaaaatgtggagtaaatgataatcaaatgttgaattctaaaagtctctacatttacctaggttggctttctcccccagttcagaagtttccagcttggccaatcatcagaatcacttgaggaacttagaaagaactccctggctgtagctcctatgtaggtttaggttgagactctggattccacaatttttaaaggttaccatctgaggtttctgatcatagtctacttttgaagcagctgctgctgtttctttattccattgaacaccctggaattgacataattttatctatcagcatttctccccttttagtttatttaataattaacccggtctccagggcagttttcatatgaccatgtgtatattcactgctcacgaaaaagtttaatgttagattaccaaatttaatatagttacagaattactgcataagggcttcccttcttggagactcttacccagcatgggaacagtgatctgcccacatgacagggtggtatgccaggcatagttaactgcttttggttgtgaggtactcatcttcctttagttacccttagttatgtggcacacatgtccttattgcctagttcgtcatccacactttggatcttgtgaaaatgctgttagtatccaaccttaaaatatattagtatatgggtttttattaaaagaattactttgaattttctatttaattcatatgtaaataaaggaacatttcatttcacttaaaaaaattatatcagttattaggctgggtgcagtggctcatgcctgtaatcccagcactttgggaggccaaggcgggtggattaccagagttcgggagtttgagaccagcttgaccaacatggagaaaccccgtctctactaaaaatacaaaattagccaggtgtggtggcgcatgcctgtaatcctggctactcaggaggctgaggcaggagaatcgcttgaaaacccaggagacagaggttgcggtgagctgagattgcgccattgtactccagcctgggcaagaagagcgaaactctgtctccaaaaaaaaaaaaaaaaaaatttattaatacttttaaagactgagctgtttaagaattttttggggaacatttctagcagtgatttttttggcctttaatgatagcgtaaagacaggagccttacaacttaggcaaagcatttcacatgcagtccttcttccatctcaaaatatgtacttattttacatacagaattttacactaaccattgaaaaataaagtaggatctgctacagtttcacctgaaaatttataaaaagtgttgagattggtagaaggtagtttttaagtacatgtgcactaccctaaaagacttgtctattgtcaataaagtgttagtatttgtgaaattattattcctgttcagaaatactatttcttaaatctcctgggaatttgtggcataataaagcacattcaaagttctaatgtatttatgagctcattttcaaaatagtaagtttgtcatctttaaaatgaacatgacttgcctccttgatttctgaaatgaattaattgaagattgctatagtaatctttatttcatctttctagagttgttgacaattttattatacaacagttaccattagagaaggagggaagggctttgggtgtgtatttataggtactaagggatttactaaatatagtagattagcactgtcacacttgttcaagtagtttcaaacatagaaaattaagtatcaggtatgtggagcaatgtagtttttttttttcttcagtttaaaaaatttttaattgtggtagaagcaatgtattcttaaggtgaaaaacctacctcggttacatgtggtttgtgttttttggattaatctggattttataattagaaataaaaatgtaagattttgaatccaaaaaaaaaaaaaaaaaaaaaaaaaaaaaaaaaaaaaaaaaaaaaaaaaagcgcaaaaccaagtacatagtgacgatggcttttatttggacaaatagcttttatattttcattaaaccatgcaaaaaatactacatctttctggcacataactgtctccttaaccactgaacagttcagccatttgaataaattgtacattgtaaagcttatagtagctgattgtattattgattgtattgtatactatattaaatgtgaatttgtaccccttcattttaaaaggtcattgtgttctactgcctattttagattactttggggttggggaagggtgttttggtaagcaggattttaagtcctctctctctcgattggttttatgaagatataaggttatgctcttactaccaagctcaggattcttgattttaaaggtacaaggatagttgtgggagttttatttttggttatatttgaactgtatgaatggtaggtctgaatattgagaatttccatggtcttatgtggaggtaaaatatacagataactgatcagtttgagtgactgcaacatgttctggttgcacaacagttaggcatgctatggtttatatttgtgaagtttggatgcctgtgaagaatgattaaatacatgtttctaatattttagtgttttgtatttaggttatttattctttgtatctaaaactgaacagctactgtgctatattgattttattggtagtattgagcagaccttgtttctgcatgaaactagttgcaaaacccactattttggaaataaaaatgtattttgacatatacaaataaaatgaataaaactattttaaatgtgaaaaaaaaaaa

SEQ ID NO: 355750 - DNA, 8593 bp, Homo sapiens
tgacgggtggccgtgctgggggcgggagggcttctgtggtaggaagggaggtccgctcggccgggtgcgccgccccagtgctctgtgggatactggaagtctcgagcgtcggctccgggttcccagccctcctctggcccgcactcatagaaacattcacacaccccctgcctcccctctcttccctctccgcctcccccttccccccctcgcgataagaagacccggcggcaggagaggggatgaagatggcggacgcgaagcagaagcggaacgagcagctgaaacgctggatcggctccgagacggacctcgagcctccggtggtgaagcgccagaagaccaaggtgaagttcgacgatggcgccgtcttcctggctgcttgctccagcggcgacacggacgaggtcctcaagctgctgcaccgcggcgccgacatcaattacgccaatgtggacggactcactgccctgcaccaggcttgcattgatgacaatgttgatatggtgaagtttctggtagaaaatggagcaaatattaatcaacctgataatgaaggctggataccactacatgcagcagcttcctgtggatatcttgatattgcagagtttttgattggtcaaggagcacatgtaggggctgtcaacagtgaaggagatacacctttagatattgcggaggaggaggcaatggaagagctacttcaaaatgaagttaatcggcaaggggttgatatagaagcagctcgaaaggaagaagaacggatcatgcttagagatgccaggcagtggctaaatagtggtcatataaatgatgtccggcatgcaaaatctggaggtacagcacttcacgttgcagctgctaaaggctatacggaagttttaaaacttttaatacaggcaggctatgatgttaatattaaagactatgatggctggacacctcttcatgctgcagctcattggggtaaagaagaagcatgtcgaattttagtggacaatctgtgtgatatggagatggtcaacaaagtgggccaaacagcctttgatgtagcagatgaagacattttaggatatttagaagagttgcaaaagaaacaaaatctgctccatagtgaaaaacgggacaagaaatctccactaattgaatcaacagcaaatatggacaataatcagtcacagaagacctttaaaaacaaagagacgttgattattgaaccagagaaaaatgcatcccgtattgaatctctggaacaagaaaaggttgatgaagaagaagaaggaaagaaggatgagtctagctgctctagtgaagaagatgaggaagatgactcggaatcagaagctgaaacagataagacaaaacccctggcttctgtaactaatgccaacacttctagtacacaagcagctcctgtagctgttacaacacctactgtgtcatcaggtcaagcaacacctacatcacctattaaaaagtttccaaccacagctacaaaaatttctcccaaagaagaagagagaaaagatgagtctcctgcaacttggaggttaggacttagaaagacgggcagctatggtgcacttgctgaaatcacagcatctaaagagggtcagaaagaaaaagatactgcaggtgttacacgttcagcttcaagtcccagactttcctcctctttggataataaagaaaaggagaaagatagtaaaggaactaggcttgcatatgttgcacctacaataccaagacgactagccagtacatctgacattgaagagaaagaaaacagagattcttcaagtttgcgaacaagtagttcatatacaaggagaaaatgggaagatgatcttaaaaaaaatagctcagttaatgaaggatcaacgtatcataaaagtacctcaaatcgtttgtgggctgaggatagtactgagaaagaaaaggacagtgttcctacggcagtgaccattcctgttgctccaactgttgtaaatgctgcagcttctaccacaaccctgactacaactactgctggcactgtctcctccacaacagaggtcagggagagacgcagatcatacctcactcctgttagggatgaagagtctgaatcccaaagaaaagcaagatctagacaagcaagacaatctagaagatcaacacagggagtgacattaactgatcttcaagaagctgagaaaacaataggaagaagtcgttctacccgaaccagagaacaagaaaatgaagaaaaagaaaaagaggaaaaagagaaacaagataaagagaaacaagaagaaaagaaggagtcagaaacatctagagaagatgaatataaacaaaagtactccagaacgtatgatgagacttaccagcgttataggccagtatcaacttcaagttcaaccactccatcctcttcactttctactatgagcagttcactgtatgcttcaagtcaactaaacaggccaaatagtcttgtaggcataacttctgcttactccagaggaataacaaaagaaaatgaaagagagggagaaaaaagagaagaggagaaagaaggagaagataaatcacaacctaaatcaatcagagaacgacgacgaccaagagagaaaagaagatctacaggagtttcattttggacacaagatagtgatgaaaatgaacaagaacaacaatcagacacagaagagggatccaataagaaagaaactcagacggattccatttctagatatgaaaccagttctacatcagctggtgatcgatatgattccttgctgggtcgctctggatcatacagttacttagaagaaagaaaaccttacagcagcaggctagaaaaggatgactcaactgactttaaaaagctttatgaacaaattctagctgaaaatgaaaagctgaaggcacagctacatgatacaaatatggaactaacagatcttaaattacagttggaaaaggccacccagagacaagaaagatttgctgatagatcactgttggaaatggaaaaaagggaacgaagagctctagaaagaagaatatctgaaatggaagaagagctcaaagtaagtaaactatgttacttatgagagagagtgctgtttatgtattaatgtttaaaatactattatagatatggtttacattaattgttctcaaagctgattacccaatttgtgaactgtctatatctggtgcttctctttcttcctgaatccaggttttagtgagccagaagagggtctaaaacccaaatcttaacacctagccccgccggctgctgtgggagcggcggccgtccctctcctggaggtcgtctcctggcatcctcggggccgcaggaaggaagaggaggcagcggccggagccctggtgggcggcctgaggtgagagcccgaccggcccctttgggaatatggcgaccggtggctaccggaccagcagcggcctcggcggcagcaccacagacttcctggaggagtggaaggcgaaacgcgagaagatgcgcgccaagcagaaccccccgggcccggcccccccgggagggggcagcagcgacgccgctgggaagccccccgcgggggctctgggcaccccggcggccgccgctgccaacgagctcaacaacaacctcccgggcggcgcgccggccgcacctgccgtccccggtcccgggggcgtgaactgcgcggtcggctccgccatgctgacgcgggcggcccccggcccgcggcggtcggaggacgagcccccagccgcctctgcctcggctgcaccgccgccccagcgtgacgaggaggagccggacggcgtcccagagaagggcaagagctcgggccccagtgccaggaaaggcaaggggcagatcgagaagaggaagctgcgggagaagcggcgctccaccggcgtggtcaacatccctgccgcagagtgcttagatgagtacgaagatgatgaagcagggcagaaagagcggaaacgagaagatgcaattacacaacagaacactatacagaatgaagctgtaaacttactagatccaggcagttcctatctgctacaggagccacctagaacagtttcaggcagatataaaagcacaaccagtgtctctgaagaagatgtctcaagtagatattctcgaacagatagaagtgggttccctagatataacagggatgcaaatgtttcaggtactctggtttcaagtagcacactggaaaagaaaattgaagatcttgaaaaggaagtagtaagagaaagacaagaaaacctaagacttgtgagactgatgcaagataaagaggaaatgattggaaaactcaaagaagaaattgatttattaaatagagacctagatgacatagaagatgaaaatgaacagctaaagcaggaaaataaaactcttttgaaagttgtgggtcagctgaccaggtagaggattcaagactcaatgtggaaaaaatattttaaactactgattgaatgttaatggtcaatgctagcacaatattcctatgctgcaatacattaaaataactaagcaagtatatttatttctagcaaacagatgtttgttttcaaaatacttctttttcattattggttttaaaaaagcattatccttttatctcacaaataagtaatatctttcagttattaaatgatagataatgcctttttggttttgtgtggtattcaactaatacatggtttaaagtcacagccgtttgaatatattttatcttggtagtacattttctcccttaggaatatacatagtctttgtttacatgagttcaaatacttttgggatgttaccttcacatgtcctattactgatgtgtgcaaccttttatgtgttgatgactcactcataaaggtttttgtctactgtcatttgttctttccacttattctaagcatttagagtaatagagtcatacttttttataacagcaaccttttaaaaggaaagctcttataaagtcactgtcatgttttagttgactaaatataaatttaagagaatacttgaattgtgctatagtaaataaaaatttactattttgtgtttgaatattgaaaaattgaatcactttaactcctgaaaaacatacaattgtaatttcaatgtaaaatttcttatgtaggtactacctttttttatcgttccaaggtttgctagtgaacacaggatattttaaaagttttttattcttcgggcctggaaagtgtacaaagtcagtgtaggagaaaaaaatccatatttttatattagcatgcacactaaaaaccaaaatattattcatacttaaaacattcatacaaaacaatatgtaagcagaaatagtactaaaatactttgcctaatttctaagttgaagaataacactgggacacagttttttcatatgagagaatattccgctatttcaaatttaagggattttcttcctaacattgaaattttaaaaacagagttacttctaaataattatacagattttttcttctattaaatattattatttagaattgtttttgtattacatattcatgttaagaaccccgtcttcccttaaaatacattaaaattatgacatttttgctttgtgattgaatttcaaatagcagtatggtatccttttatctagttaatatatgaaagtggcttgaatatagtcaaatccattttaggtactctactgactttttccttcacttgccaagcccttttattgttcactgttagaaaaatagagaaggtgagacagctgggggaaaatgtggagtaaatgataatcaaatgttgaattctaaaagtctctacatttacctaggttggctttctcccccagttcagaagtttccagcttggccaatcatcagaatcacttgaggaacttagaaagaactccctggctgtagctcctatgtaggtttaggttgagactctggattccacaatttttaaaggttaccatctgaggtttctgatcatagtctacttttgaagcagctgctgctgtttctttattccattgaacaccctggaattgacataattttatctatcagcatttctccccttttagtttatttaataattaacccggtctccagggcagttttcatatgaccatgtgtatattcactgctcacgaaaaagtttaatgttagattaccaaatttaatatagttacagaattactgcataagggcttcccttcttggagactcttacccagcatgggaacagtgatctgcccacatgacagggtggtatgccaggcatagttaactgcttttggttgtgaggtactcatcttcctttagttacccttagttatgtggcacacatgtccttattgcctagttcgtcatccacactttggatcttgtgaaaatgctgttagtatccaaccttaaaatatattagtatatgggtttttattaaaagaattactttgaattttctatttaattcatatgtaaataaaggaacatttcatttcacttaaaaaaattatatcagttattaggctgggtgcagtggctcatgcctgtaatcccagcactttgggaggccaaggcgggtggattaccagagttcgggagtttgagaccagcttgaccaacatggagaaaccccgtctctactaaaaatacaaaattagccaggtgtggtggcgcatgcctgtaatcctggctactcaggaggctgaggcaggagaatcgcttgaaaacccaggagacagaggttgcggtgagctgagattgcgccattgtactccagcctgggcaagaagagcgaaactctgtctccaaaaaaaaaaaaaaaaaaatttattaatacttttaaagactgagctgtttaagaattttttggggaacatttctagcagtgatttttttggcctttaatgatagcgtaaagacaggagccttacaacttaggcaaagcatttcacatgcagtccttcttccatctcaaaatatgtacttattttacatacagaattttacactaaccattgaaaaataaagtaggatctgctacagtttcacctgaaaatttataaaaagtgttgagattggtagaaggtagtttttaagtacatgtgcactaccctaaaagacttgtctattgtcaataaagtgttagtatttgtgaaattattattcctgttcagaaatactatttcttaaatctcctgggaatttgtggcataataaagcacattcaaagttctaatgtatttatgagctcattttcaaaatagtaagtttgtcatctttaaaatgaacatgacttgcctccttgatttctgaaatgaattaattgaagattgctatagtaatctttatttcatctttctagagttgttgacaattttattatacaacagttaccattagagaaggagggaagggctttgggtgtgtatttataggtactaagggatttactaaatatagtagattagcactgtcacacttgttcaagtagtttcaaacatagaaaattaagtatcaggtatgtggagcaatgtagtttttttttttcttcagtttaaaaaatttttaattgtggtagaagcaatgtattcttaaggtgaaaaacctacctcggttacatgtggtttgtgttttttggattaatctggattttataattagaaataaaaatgtaagattttgaatccaaaaaaaaaaaaaaaaaaaaaaaaaaaaaaaaaaaaaaaaaaaaaaaaaagcgcaaaaccaagtacatagtgacgatggcttttatttggacaaatagcttttatattttcattaaaccatgcaaaaaatactacatctttctggcacataactgtctccttaaccactgaacagttcagccatttgaataaattgtacattgtaaagcttatagtagctgattgtattattgattgtattgtatactatattaaatgtgaatttgtaccccttcattttaaaaggtcattgtgttctactgcctattttagattactttggggttggggaagggtgttttggtaagcaggattttaagtcctctctctctcgattggttttatgaagatataaggttatgctcttactaccaagctcaggattcttgattttaaaggtacaaggatagttgtgggagttttatttttggttatatttgaactgtatgaatggtaggtctgaatattgagaatttccatggtcttatgtggaggtaaaatatacagataactgatcagtttgagtgactgcaacatgttctggttgcacaacagttaggcatgctatggtttatatttgtgaagtttggatgcctgtgaagaatgattaaatacatgtttctaatattttagtgttttgtatttaggttatttattctttgtatctaaaactgaacagctactgtgctatattgattttattggtagtattgagcagaccttgtttctgcatgaaactagttgcaaaacccactattttggaaataaaaatgtattttgacatatacaaataaaatgaataaaactattttaaatgtgaaaaaaaaaaa

SEQ ID NO: 355751 - DNA, 8595 bp, Homo sapiens
tgacgggtggccgtgctgggggcgggagggcttctgtggtaggaagggaggtccgctcggccgggtgcgccgccccagtgctctgtgggatactggaagtctcgagcgtcggctccgggttcccagccctcctctggcccgcactcatagaaacattcacacaccccctgcctcccctctcttccctctccgcctcccccttccccccctcgcgataagaagacccggcggcaggagaggggatgaagatggcggacgcgaagcagaagcggaacgagcagctgaaacgctggatcggctccgagacggacctcgagcctccggtggtgaagcgccagaagaccaaggtgaagttcgacgatggcgccgtcttcctggctgcttgctccagcggcgacacggacgaggtcctcaagctgctgcaccgcggcgccgacatcaattacgccaatgtggacggactcactgccctgcaccaggcttgcattgatgacaatgttgatatggtgaagtttctggtagaaaatggagcaaatattaatcaacctgataatgaaggctggataccactacatgcagcagcttcctgtggatatcttgatattgcagagtttttgattggtcaaggagcacatgtaggggctgtcaacagtgaaggagatacacctttagatattgcggaggaggaggcaatggaagagctacttcaaaatgaagttaatcggcaaggggttgatatagaagcagctcgaaaggaagaagaacggatcatgcttagagatgccaggcagtggctaaatagtggtcatataaatgatgtccggcatgcaaaatctggaggtacagcacttcacgttgcagctgctaaaggctatacggaagttttaaaacttttaatacaggcaggctatgatgttaatattaaagactatgatggctggacacctcttcatgctgcagctcattggggtaaagaagaagcatgtcgaattttagtggacaatctgtgtgatatggagatggtcaacaaagtgggccaaacagcctttgatgtagcagatgaagacattttaggatatttagaagagttgcaaaagaaacaaaatctgctccatagtgaaaaacgggacaagaaatctccactaattgaatcaacagcaaatatggacaataatcagtcacagaagacctttaaaaacaaagagacgttgattattgaaccagagaaaaatgcatcccgtattgaatctctggaacaagaaaaggttgatgaagaagaagaaggaaagaaggatgagtctagctgctctagtgaagaagatgaggaagatgactcggaatcagaagctgaaacagataagacaaaacccctggcttctgtaactaatgccaacacttctagtacacaagcagctcctgtagctgttacaacacctactgtgtcatcaggtcaagcaacacctacatcacctattaaaaagtttccaaccacagctacaaaaattcctcctctttggataataaagaaaaggagaaagatagtaaaggaactaggcttgcatatgttgcacctacaataccaagacgactagccagtacatctgacattgaagagaaagaaaacagagattcttcaagtttgcgaacaagtagttcatatacaaggagaaaatgggaagatgatcttaaaaaaaatagctcagttaatgaaggatcaacgtatcataaaagttgctcctttggtagaagacaagatgatttgattagttctagtgttccaagcaccacatcaacaccaacagttacctctgcagctgggcttcagaaaagcctgctttccagcacaagcactactacaaagattacaacgggttcttcctcagcaggcacacaaagcagtacctcaaatcgtttgtgggctgaggatagtactgagaaagaaaaggacagtgttcctacggcagtgaccattcctgttgctccaactgttgtaaatgctgcagcttctaccacaaccctgactacaactactgctggcactgtctcctccacaacagaggtcagggagagacgcagatcatacctcactcctgttagggatgaagagtctgaatcccaaagaaaagcaagatctagacaagcaagacaatctagaagatcaacacagggagtgacattaactgatcttcaagaagctgagaaaacaataggaagaagtcgttctacccgaaccagagaacaagaaaatgaagaaaaagaaaaagaggaaaaagagaaacaagataaagagaaacaagaagaaaagaaggagtcagaaacatctagagaagatgaatataaacaaaagtactccagaacgtatgatgagacttaccagcgttataggccagtatcaacttcaagttcaaccactccatcctcttcactttctactatgagcagttcactgtatgcttcaagtcaactaaacaggccaaatagtcttgtaggcataacttctgcttactccagaggaataacaaaagaaaatgaaagagagggagaaaaaagagaagaggagaaagaaggagaagataaatcacaacctaaatcaatcagagaacgacgacgaccaagagagaaaagaagatctacaggagtttcattttggacacaagatagtgatgaaaatgaacaagaacaacaatcagacacagaagagggatccaataagaaagaaactcagacggattccatttctagatatgaaaccagttctacatcagctggtgatcgatatgattccttgctgggtcgctctggatcatacagttacttagaagaaagaaaaccttacagcagcaggctagaaaaggatgactcaactgactttaaaaagctttatgaacaaattctagctgaaaatgaaaagctgaaggcacagctacatgatacaaatatggaactaacagatcttaaattacagttggaaaaggccacccagagacaagaaagatttgctgatagatcactgttggaaatggaaaaaagggaacgaagagctctagaaagaagaatatctgaaatggaagaagagctcaaagtaagtaaactatgttacttatgagagagagtgctgtttatgtattaatgtttaaaatactattatagatatggtttacattaattgttctcaaagctgattacccaatttgtgaactgtctatatctggtgcttctctttcttcctgaatccaggttttagtgagccagaagagggtctaaaacccaaatcttaacacctagccccgccggctgctgtgggagcggcggccgtccctctcctggaggtcgtctcctggcatcctcggggccgcaggaaggaagaggaggcagcggccggagccctggtgggcggcctgaggtgagagcccgaccggcccctttgggaatatggcgaccggtggctaccggaccagcagcggcctcggcggcagcaccacagacttcctggaggagtggaaggcgaaacgcgagaagatgcgcgccaagcagaaccccccgggcccggcccccccgggagggggcagcagcgacgccgctgggaagccccccgcgggggctctgggcaccccggcggccgccgctgccaacgagctcaacaacaacctcccgggcggcgcgccggccgcacctgccgtccccggtcccgggggcgtgaactgcgcggtcggctccgccatgctgacgcgggcggcccccggcccgcggcggtcggaggacgagcccccagccgcctctgcctcggctgcaccgccgccccagcgtgacgaggaggagccggacggcgtcccagagaagggcaagagctcgggccccagtgccaggaaaggcaaggggcagatcgagaagaggaagctgcgggagaagcggcgctccaccggcgtggtcaacatccctgccgcagagtgcttagatgagtacgaagatgatgaagcagggcagaaagagcggaaacgagaagatgcaattacacaacagaacactatacagaatgaagctgtaaacttactagatccaggcagttcctatctgctacaggagccacctagaacagtttcaggcagatataaaagcacaaccagtgtctctgaagaagatgtctcaagtagatattctcgaacagatagaagtgggttccctagatataacagggatgcaaatgtttcaggtactctggtttcaagtagcacactggaaaagaaaattgaagatcttgaaaaggaagtagtaagagaaagacaagaaaacctaagacttgtgagactgatgcaagataaagaggaaatgattggaaaactcaaagaagaaattgatttattaaatagagacctagatgacatagaagatgaaaatgaacagctaaagcaggaaaataaaactcttttgaaagttgtgggtcagctgaccaggtagaggattcaagactcaatgtggaaaaaatattttaaactactgattgaatgttaatggtcaatgctagcacaatattcctatgctgcaatacattaaaataactaagcaagtatatttatttctagcaaacagatgtttgttttcaaaatacttctttttcattattggttttaaaaaagcattatccttttatctcacaaataagtaatatctttcagttattaaatgatagataatgcctttttggttttgtgtggtattcaactaatacatggtttaaagtcacagccgtttgaatatattttatcttggtagtacattttctcccttaggaatatacatagtctttgtttacatgagttcaaatacttttgggatgttaccttcacatgtcctattactgatgtgtgcaaccttttatgtgttgatgactcactcataaaggtttttgtctactgtcatttgttctttccacttattctaagcatttagagtaatagagtcatacttttttataacagcaaccttttaaaaggaaagctcttataaagtcactgtcatgttttagttgactaaatataaatttaagagaatacttgaattgtgctatagtaaataaaaatttactattttgtgtttgaatattgaaaaattgaatcactttaactcctgaaaaacatacaattgtaatttcaatgtaaaatttcttatgtaggtactacctttttttatcgttccaaggtttgctagtgaacacaggatattttaaaagttttttattcttcgggcctggaaagtgtacaaagtcagtgtaggagaaaaaaatccatatttttatattagcatgcacactaaaaaccaaaatattattcatacttaaaacattcatacaaaacaatatgtaagcagaaatagtactaaaatactttgcctaatttctaagttgaagaataacactgggacacagttttttcatatgagagaatattccgctatttcaaatttaagggattttcttcctaacattgaaattttaaaaacagagttacttctaaataattatacagattttttcttctattaaatattattatttagaattgtttttgtattacatattcatgttaagaaccccgtcttcccttaaaatacattaaaattatgacatttttgctttgtgattgaatttcaaatagcagtatggtatccttttatctagttaatatatgaaagtggcttgaatatagtcaaatccattttaggtactctactgactttttccttcacttgccaagcccttttattgttcactgttagaaaaatagagaaggtgagacagctgggggaaaatgtggagtaaatgataatcaaatgttgaattctaaaagtctctacatttacctaggttggctttctcccccagttcagaagtttccagcttggccaatcatcagaatcacttgaggaacttagaaagaactccctggctgtagctcctatgtaggtttaggttgagactctggattccacaatttttaaaggttaccatctgaggtttctgatcatagtctacttttgaagcagctgctgctgtttctttattccattgaacaccctggaattgacataattttatctatcagcatttctccccttttagtttatttaataattaacccggtctccagggcagttttcatatgaccatgtgtatattcactgctcacgaaaaagtttaatgttagattaccaaatttaatatagttacagaattactgcataagggcttcccttcttggagactcttacccagcatgggaacagtgatctgcccacatgacagggtggtatgccaggcatagttaactgcttttggttgtgaggtactcatcttcctttagttacccttagttatgtggcacacatgtccttattgcctagttcgtcatccacactttggatcttgtgaaaatgctgttagtatccaaccttaaaatatattagtatatgggtttttattaaaagaattactttgaattttctatttaattcatatgtaaataaaggaacatttcatttcacttaaaaaaattatatcagttattaggctgggtgcagtggctcatgcctgtaatcccagcactttgggaggccaaggcgggtggattaccagagttcgggagtttgagaccagcttgaccaacatggagaaaccccgtctctactaaaaatacaaaattagccaggtgtggtggcgcatgcctgtaatcctggctactcaggaggctgaggcaggagaatcgcttgaaaacccaggagacagaggttgcggtgagctgagattgcgccattgtactccagcctgggcaagaagagcgaaactctgtctccaaaaaaaaaaaaaaaaaaatttattaatacttttaaagactgagctgtttaagaattttttggggaacatttctagcagtgatttttttggcctttaatgatagcgtaaagacaggagccttacaacttaggcaaagcatttcacatgcagtccttcttccatctcaaaatatgtacttattttacatacagaattttacactaaccattgaaaaataaagtaggatctgctacagtttcacctgaaaatttataaaaagtgttgagattggtagaaggtagtttttaagtacatgtgcactaccctaaaagacttgtctattgtcaataaagtgttagtatttgtgaaattattattcctgttcagaaatactatttcttaaatctcctgggaatttgtggcataataaagcacattcaaagttctaatgtatttatgagctcattttcaaaatagtaagtttgtcatctttaaaatgaacatgacttgcctccttgatttctgaaatgaattaattgaagattgctatagtaatctttatttcatctttctagagttgttgacaattttattatacaacagttaccattagagaaggagggaagggctttgggtgtgtatttataggtactaagggatttactaaatatagtagattagcactgtcacacttgttcaagtagtttcaaacatagaaaattaagtatcaggtatgtggagcaatgtagtttttttttttcttcagtttaaaaaatttttaattgtggtagaagcaatgtattcttaaggtgaaaaacctacctcggttacatgtggtttgtgttttttggattaatctggattttataattagaaataaaaatgtaagattttgaatccaaaaaaaaaaaaaaaaaaaaaaaaaaaaaaaaaaaaaaaaaaaaaaaaaagcgcaaaaccaagtacatagtgacgatggcttttatttggacaaatagcttttatattttcattaaaccatgcaaaaaatactacatctttctggcacataactgtctccttaaccactgaacagttcagccatttgaataaattgtacattgtaaagcttatagtagctgattgtattattgattgtattgtatactatattaaatgtgaatttgtaccccttcattttaaaaggtcattgtgttctactgcctattttagattactttggggttggggaagggtgttttggtaagcaggattttaagtcctctctctctcgattggttttatgaagatataaggttatgctcttactaccaagctcaggattcttgattttaaaggtacaaggatagttgtgggagttttatttttggttatatttgaactgtatgaatggtaggtctgaatattgagaatttccatggtcttatgtggaggtaaaatatacagataactgatcagtttgagtgactgcaacatgttctggttgcacaacagttaggcatgctatggtttatatttgtgaagtttggatgcctgtgaagaatgattaaatacatgtttctaatattttagtgttttgtatttaggttatttattctttgtatctaaaactgaacagctactgtgctatattgattttattggtagtattgagcagaccttgtttctgcatgaaactagttgcaaaacccactattttggaaataaaaatgtattttgacatatacaaataaaatgaataaaactattttaaatgtgaaaaaaaaaaa

SEQ ID NO: 355752 - DNA, 9159 bp, Homo sapiens
tgacgggtggccgtgctgggggcgggagggcttctgtggtaggaagggaggtccgctcggccgggtgcgccgccccagtgctctgtgggatactggaagtctcgagcgtcggctccgggttcccagccctcctctggcccgcactcatagaaacattcacacaccccctgcctcccctctcttccctctccgcctcccccttccccccctcgcgataagaagacccggcggcaggagaggggatgaagatggcggacgcgaagcagaagcggaacgagcagctgaaacgctggatcggctccgagacggacctcgagcctccggtggtgaagcgccagaagaccaaggtgaagttcgacgatggcgccgtcttcctggctgcttgctccagcggcgacacggacgaggtcctcaagctgctgcaccgcggcgccgacatcaattacgccaatgtggacggactcactgccctgcaccaggcttgcattgatgacaatgttgatatggtgaagtttctggtagaaaatggagcaaatattaatcaacctgataatgaaggctggataccactacatgcagcagcttcctgtggatatcttgatattgcagagtttttgattggtcaaggagcacatgtaggggctgtcaacagtgaaggagatacacctttagatattgcggaggaggaggcaatggaagagctacttcaaaatgaagttaatcggcaaggggttgatatagaagcagctcgaaaggaagaagaacggatcatgcttagagatgccaggcagtggctaaatagtggtcatataaatgatgtccggcatgcaaaatctggaggtacagcacttcacgttgcagctgctaaaggctatacggaagttttaaaacttttaatacaggcaggctatgatgttaatattaaagactatgatggctggacacctcttcatgctgcagctcattggggtaaagaagaagcatgtcgaattttagtggacaatctgtgtgatatggagatggtcaacaaagtgggccaaacagcctttgatgtagcagatgaagacattttaggatatttagaagagttgcaaaagaaacaaaatctgctccatagtgaaaaacgggacaagaaatctccactaattgaatcaacagcaaatatggacaataatcagtcacagaagacctttaaaaacaaagagacgttgattattgaaccagagaaaaatgcatcccgtattgaatctctggaacaagaaaaggttgatgaagaagaagaaggaaagaaggatgagtctagctgctctagtgaagaagatgaggaagatgactcggaatcagaagctgaaacagataagacaaaacccctggcttctgtaactaatgccaacacttctagtacacaagcagctcctgtagctgttacaacacctactgtgtcatcaggtcaagcaacacctacatcacctattaaaaagtttccaaccacagctacaaaaatttctcccaaagaagaagagagaaaagatgagtctcctgcaacttggaggttaggacttagaaagacgggcagctatggtgcacttgctgaaatcacagcatctaaagagggtcagaaagaaaaagatactgcaggtgttacacgttcagcttcaagtcccagactttcctcctctttggataataaagaaaaggagaaagatagtaaaggaactaggcttgcatatgttgcacctacaataccaagacgactagccagtacatctgacattgaagagaaagaaaacagagattcttcaagtttgcgaacaagtagttcatatacaaggagaaaatgggaagatgatcttaaaaaaaatagctcagttaatgaaggatcaacgtatcataaaagttgctcctttggtagaagacaagatgatttgattagttctagtgttccaagcaccacatcaacaccaacagttacctctgcagctgggcttcagaaaagcctgctttccagcacaagcactactacaaagattacaacgggttcttcctcagcaggcacacaaagcaggtaagtcacagatacattttgtgctcaggtctactgtgtgcttatgtatgtgcatgcgtttttgtttagaagattgtggggctctggattttttcatttatcttgttaaatttatttgcagaccaaaattggttcccaaatgaggcaattatgcatgtctgggggaaattttaagttcctgaactatgaactttccttgaattagactgcttaaaatgtaaatttctctctttgaccactctgggtgagctttttggttcataatttaaggatgtctcaccttgcgttttaaaaaaatccatccctgtagtcatgtgttttcagctgctagaaagtgctttcattgtttagctgttttccttttctctttttttgtgttgctgcttatgatgctatagtacctcaaatcgtttgtgggctgaggatagtactgagaaagaaaaggacagtgttcctacggcagtgaccattcctgttgctccaactgttgtaaatgctgcagcttctaccacaaccctgactacaactactgctggcactgtctcctccacaacagaggtcagggagagacgcagatcatacctcactcctgttagggatgaagagtctgaatcccaaagaaaagcaagatctagacaagcaagacaatctagaagatcaacacagggagtgacattaactgatcttcaagaagctgagaaaacaataggaagaagtcgttctacccgaaccagagaacaagaaaatgaagaaaaagaaaaagaggaaaaagagaaacaagataaagagaaacaagaagaaaagaaggagtcagaaacatctagagaagatgaatataaacaaaagtactccagaacgtatgatgagacttaccagcgttataggccagtatcaacttcaagttcaaccactccatcctcttcactttctactatgagcagttcactgtatgcttcaagtcaactaaacaggccaaatagtcttgtaggcataacttctgcttactccagaggaataacaaaagaaaatgaaagagagggagaaaaaagagaagaggagaaagaaggagaagataaatcacaacctaaatcaatcagagaacgacgacgaccaagagagaaaagaagatctacaggagtttcattttggacacaagatagtgatgaaaatgaacaagaacaacaatcagacacagaagagggatccaataagaaagaaactcagacggattccatttctagatatgaaaccagttctacatcagctggtgatcgatatgattccttgctgggtcgctctggatcatacagttacttagaagaaagaaaaccttacagcagcaggctagaaaaggatgactcaactgactttaaaaagctttatgaacaaattctagctgaaaatgaaaagctgaaggcacagctacatgatacaaatatggaactaacagatcttaaattacagttggaaaaggccacccagagacaagaaagatttgctgatagatcactgttggaaatggaaaaaagggaacgaagagctctagaaagaagaatatctgaaatggaagaagagctcaaagtaagtaaactatgttacttatgagagagagtgctgtttatgtattaatgtttaaaatactattatagatatggtttacattaattgttctcaaagctgattacccaatttgtgaactgtctatatctggtgcttctctttcttcctgaatccaggttttagtgagccagaagagggtctaaaacccaaatcttaacacctagccccgccggctgctgtgggagcggcggccgtccctctcctggaggtcgtctcctggcatcctcggggccgcaggaaggaagaggaggcagcggccggagccctggtgggcggcctgaggtgagagcccgaccggcccctttgggaatatggcgaccggtggctaccggaccagcagcggcctcggcggcagcaccacagacttcctggaggagtggaaggcgaaacgcgagaagatgcgcgccaagcagaaccccccgggcccggcccccccgggagggggcagcagcgacgccgctgggaagccccccgcgggggctctgggcaccccggcggccgccgctgccaacgagctcaacaacaacctcccgggcggcgcgccggccgcacctgccgtccccggtcccgggggcgtgaactgcgcggtcggctccgccatgctgacgcgggcggcccccggcccgcggcggtcggaggacgagcccccagccgcctctgcctcggctgcaccgccgccccagcgtgacgaggaggagccggacggcgtcccagagaagggcaagagctcgggccccagtgccaggaaaggcaaggggcagatcgagaagaggaagctgcgggagaagcggcgctccaccggcgtggtcaacatccctgccgcagagtgcttagatgagtacgaagatgatgaagcagggcagaaagagcggaaacgagaagatgcaattacacaacagaacactatacagaatgaagctgtaaacttactagatccaggcagttcctatctgctacaggagccacctagaacagtttcaggcagatataaaagcacaaccagtgtctctgaagaagatgtctcaagtagatattctcgaacagatagaagtgggttccctagatataacagggatgcaaatgtttcaggtactctggtttcaagtagcacactggaaaagaaaattgaagatcttgaaaaggaagtagtaagagaaagacaagaaaacctaagacttgtgagactgatgcaagataaagaggaaatgattggaaaactcaaagaagaaattgatttattaaatagagacctagatgacatagaagatgaaaatgaacagctaaagcaggaaaataaaactcttttgaaagttgtgggtcagctgaccaggtagaggattcaagactcaatgtggaaaaaatattttaaactactgattgaatgttaatggtcaatgctagcacaatattcctatgctgcaatacattaaaataactaagcaagtatatttatttctagcaaacagatgtttgttttcaaaatacttctttttcattattggttttaaaaaagcattatccttttatctcacaaataagtaatatctttcagttattaaatgatagataatgcctttttggttttgtgtggtattcaactaatacatggtttaaagtcacagccgtttgaatatattttatcttggtagtacattttctcccttaggaatatacatagtctttgtttacatgagttcaaatacttttgggatgttaccttcacatgtcctattactgatgtgtgcaaccttttatgtgttgatgactcactcataaaggtttttgtctactgtcatttgttctttccacttattctaagcatttagagtaatagagtcatacttttttataacagcaaccttttaaaaggaaagctcttataaagtcactgtcatgttttagttgactaaatataaatttaagagaatacttgaattgtgctatagtaaataaaaatttactattttgtgtttgaatattgaaaaattgaatcactttaactcctgaaaaacatacaattgtaatttcaatgtaaaatttcttatgtaggtactacctttttttatcgttccaaggtttgctagtgaacacaggatattttaaaagttttttattcttcgggcctggaaagtgtacaaagtcagtgtaggagaaaaaaatccatatttttatattagcatgcacactaaaaaccaaaatattattcatacttaaaacattcatacaaaacaatatgtaagcagaaatagtactaaaatactttgcctaatttctaagttgaagaataacactgggacacagttttttcatatgagagaatattccgctatttcaaatttaagggattttcttcctaacattgaaattttaaaaacagagttacttctaaataattatacagattttttcttctattaaatattattatttagaattgtttttgtattacatattcatgttaagaaccccgtcttcccttaaaatacattaaaattatgacatttttgctttgtgattgaatttcaaatagcagtatggtatccttttatctagttaatatatgaaagtggcttgaatatagtcaaatccattttaggtactctactgactttttccttcacttgccaagcccttttattgttcactgttagaaaaatagagaaggtgagacagctgggggaaaatgtggagtaaatgataatcaaatgttgaattctaaaagtctctacatttacctaggttggctttctcccccagttcagaagtttccagcttggccaatcatcagaatcacttgaggaacttagaaagaactccctggctgtagctcctatgtaggtttaggttgagactctggattccacaatttttaaaggttaccatctgaggtttctgatcatagtctacttttgaagcagctgctgctgtttctttattccattgaacaccctggaattgacataattttatctatcagcatttctccccttttagtttatttaataattaacccggtctccagggcagttttcatatgaccatgtgtatattcactgctcacgaaaaagtttaatgttagattaccaaatttaatatagttacagaattactgcataagggcttcccttcttggagactcttacccagcatgggaacagtgatctgcccacatgacagggtggtatgccaggcatagttaactgcttttggttgtgaggtactcatcttcctttagttacccttagttatgtggcacacatgtccttattgcctagttcgtcatccacactttggatcttgtgaaaatgctgttagtatccaaccttaaaatatattagtatatgggtttttattaaaagaattactttgaattttctatttaattcatatgtaaataaaggaacatttcatttcacttaaaaaaattatatcagttattaggctgggtgcagtggctcatgcctgtaatcccagcactttgggaggccaaggcgggtggattaccagagttcgggagtttgagaccagcttgaccaacatggagaaaccccgtctctactaaaaatacaaaattagccaggtgtggtggcgcatgcctgtaatcctggctactcaggaggctgaggcaggagaatcgcttgaaaacccaggagacagaggttgcggtgagctgagattgcgccattgtactccagcctgggcaagaagagcgaaactctgtctccaaaaaaaaaaaaaaaaaaatttattaatacttttaaagactgagctgtttaagaattttttggggaacatttctagcagtgatttttttggcctttaatgatagcgtaaagacaggagccttacaacttaggcaaagcatttcacatgcagtccttcttccatctcaaaatatgtacttattttacatacagaattttacactaaccattgaaaaataaagtaggatctgctacagtttcacctgaaaatttataaaaagtgttgagattggtagaaggtagtttttaagtacatgtgcactaccctaaaagacttgtctattgtcaataaagtgttagtatttgtgaaattattattcctgttcagaaatactatttcttaaatctcctgggaatttgtggcataataaagcacattcaaagttctaatgtatttatgagctcattttcaaaatagtaagtttgtcatctttaaaatgaacatgacttgcctccttgatttctgaaatgaattaattgaagattgctatagtaatctttatttcatctttctagagttgttgacaattttattatacaacagttaccattagagaaggagggaagggctttgggtgtgtatttataggtactaagggatttactaaatatagtagattagcactgtcacacttgttcaagtagtttcaaacatagaaaattaagtatcaggtatgtggagcaatgtagtttttttttttcttcagtttaaaaaatttttaattgtggtagaagcaatgtattcttaaggtgaaaaacctacctcggttacatgtggtttgtgttttttggattaatctggattttataattagaaataaaaatgtaagattttgaatccaaaaaaaaaaaaaaaaaaaaaaaaaaaaaaaaaaaaaaaaaaaaaaaaaagcgcaaaaccaagtacatagtgacgatggcttttatttggacaaatagcttttatattttcattaaaccatgcaaaaaatactacatctttctggcacataactgtctccttaaccactgaacagttcagccatttgaataaattgtacattgtaaagcttatagtagctgattgtattattgattgtattgtatactatattaaatgtgaatttgtaccccttcattttaaaaggtcattgtgttctactgcctattttagattactttggggttggggaagggtgttttggtaagcaggattttaagtcctctctctctcgattggttttatgaagatataaggttatgctcttactaccaagctcaggattcttgattttaaaggtacaaggatagttgtgggagttttatttttggttatatttgaactgtatgaatggtaggtctgaatattgagaatttccatggtcttatgtggaggtaaaatatacagataactgatcagtttgagtgactgcaacatgttctggttgcacaacagttaggcatgctatggtttatatttgtgaagtttggatgcctgtgaagaatgattaaatacatgtttctaatattttagtgttttgtatttaggttatttattctttgtatctaaaactgaacagctactgtgctatattgattttattggtagtattgagcagaccttgtttctgcatgaaactagttgcaaaacccactattttggaaataaaaatgtattttgacatatacaaataaaatgaataaaactattttaaatgtgaaaaaaaaaaa

SEQ ID NO: 355753 - DNA, 8005 bp, Homo sapiens
tgacgggtggccgtgctgggggcgggagggcttctgtggtaggaagggaggtccgctcggccgggtgcgccgccccagtgctctgtgggatactggaagtctcgagcgtcggctccgggttcccagccctcctctggcccgcactcatagaaacattcacacaccccctgcctcccctctcttccctctccgcctcccccttccccccctcgcgataagaagacccggcggcaggagaggggatgaagatggcggacgcgaagcagaagcggaacgagcagctgaaacgctggatcggctccgagacggacctcgagcctccggtggtgaagcgccagaagaccaaggtgaagttcgacgatggcgccgtcttcctggctgcttgctccagcggcgacacggacgaggtcctcaagctgctgcaccgcggcgccgacatcaattacgccaatgtggacggactcactgccctgcaccaggcttgcattgatgacaatgttgatatggtgaagtttctggtagaaaatggagcaaatattaatcaacctgataatgaaggctggataccactacatgcagcagcttcctgtggatatcttgatattgcagagtttttgattggtcaaggagcacatgtaggggctgtcaacagtgaaggagatacacctttagatattgcggaggaggaggcaatggaagagctacttcaaaatgaagttaatcggcaaggggttgatatagaagcagctcgaaaggaagaagaacggatcatgcttagagatgccaggcagtggctaaatagtggtcatataaatgatgtccggcatgcaaaatctggaggtacagcacttcacgttgcagctgctaaaggctatacggaagttttaaaacttttaatacaggcaggctatgatgttaatattaaagactatgatggctggacacctcttcatgctgcagctcattggggtaaagaagaagcatgtcgaattttagtggacaatctgtgtgatatggagatggtcaacaaagtgggccaaacagcctttgatgtagcagatgaagacattttaggatatttagaagagttgcaaaagaaacaaaatctgctccatagtgaaaaacgggacaagaaatctccactaattgaatcaacagcaaatatggacaataatcagtcacagaagacctttaaaaacaaagagacgttgattattgaaccagagaaaaatgcatcccgtattgaatctctggaacaagaaaaggttgatgaagaagaagaaggaaagaaggatgagtctagctgctctagtgaagaagatgaggaagatgactcggaatcagaagctgaaacagataagacaaaacccctggcttctgtaactaatgccaacacttctagtacacaagcagctcctgtagctgttacaacacctactgtgtcatcaggtcaagcaacacctacatcacctattaaaaagtttccaaccacagctacaaaaatttctcccaaagaagaagagagaaaagatgagtctcctgcaacttggaggttaggacttagaaagacgggcagctatggtgcacttgctgaaatcacagcatctaaagagggtcagaaagaaaaagatactgcaggtgttacacgttcagcttcaagtcccagactttcctcctctttggataataaagaaaaggagaaagatagtaaaggaactaggcttgcatatgttgcacctacaataccaagacgactagccagtacatctgacattgaagagaaagaaaacagagattcttcaagtttgcgaacaagtagttcatatacaaggagaaaatgggaagatgatcttaaaaaaaatagctcagttaatgaaggatcaacgtatcataaaagttgctcctttggtagaagacaagatgatttgattagttctagtgttccaagcaccacatcaacaccaacagttacctctgcagctgggcttcagaaaagcctgctttccagcacaagcactactacaaagattacaacgggttcttcctcagcaggcacacaaagcagtacctcaaatcgtttgtgggctgaggatagtactgagaaagaaaaggacagtgttcctacggcagtgaccattcctgttgctccaactgttgtaaatgctgcagcttctaccacaaccctgactacaactactgctggcactgtctcctccacaacagaggtcagggagagacgcagatcatacctcactcctgttagggatgaagagtctgaatcccaaagaaaagcaagatctagacaagcaagacaatctagaagatcaacacagggagtgacattaactgatcttcaagaagctgagaaaacaataggaagaagtcgttctacccgaaccagagaacaagaaaatgaagaaaaagaaaaagaggaaaaagagaaacaagataaagagaaacaagaagaaaagaaggagtcagaaacatctagagaagatgaatataaacaaaagtactccagaacgtatgatgagacttaccagcgttataggccagtatcaacttcaagttcaaccactccatcctcttcactttctactatgagcagttcactgtatgcttcaagtcaactaaacaggccaaatagtcttgtaggcataacttctgcttactccagaggaataacaaaagaaaatgaaagagagggagaaaaaagagaagaggagaaagaaggagaagataaatcacaacctaaatcaatcagagaacgacgacgaccaagagagaaaagaagatctacaggagtttcattttggacacaagatagtgatgaaaatgaacaagaacaacaatcagacacagaagagggatccaataagaaagaaactcagacggattccatttctagatatgaaaccagttctacatcagctggtgatcgatatgattccttgctgggtcgctctggatcatacagttacttagaagaaagaaaaccttacagcagcaggctagaaaaggatgactcaactgactttaaaaagctttatgaacaaattctagctgaaaatgaaaagctgaaggcacagctacatgatacaaatatggaactaacagatcttaaattacagttggaaaaggccacccagagacaagaaagatttgctgatagatcactgttggaaatggaaaaaagggaacgaagagctctagaaagaagaatatctgaaatggaagaagagctcaaagtaagtaaactatgttacttatgagagagagtgctgtttatgtattaatgtttaaaatactattatagatatggtttacattaattgttctcaaagctgattacccaatttgtgaactgtctatatctggtgcttctctttcttcctgaatccaggttttagtgagccagaagagggtctaaaacccaaatcttaacacctagccccgccggctgctgtgggagcggcggccgtccctctcctggaggtcgtctcctggcatcctcggggccgcaggaaggaagaggaggcagcggccggagccctggtgggcggcctgaggtgagagcccgaccggcccctttgggaatatggcgaccggtggctaccggaccagcagcggcctcggcggcagcaccacagacttcctggaggagtggaaggcgaaacgcgagaagatgcgcgccaagcagaaccccccgggcccggcccccccgggagggggcagcagcgacgccgctgggaagccccccgcgggggctctgggcaccccggcggccgccgctgccaacgagctcaacaacaacctcccgggcggcgcgccggccgcacctgccgtccccggtcccgggggcgtgaactgcgcggtcggctccgccatgctgacgcgggcggcccccggcccgcggcggtcggaggacgagcccccagccgcctctgcctcggctgcaccgccgccccagcgtgacgaggaggagccggacggcgtcccagagaagggcaagagctcgggccccagtgccaggaaaggcaaggggcagatcgagaagaggaagctgcgggagaagcggcgctccaccggcgtggtcaacatccctgccgcagagtgcttagatgagtacgaagatgatgaagcagggcagaaagagcggaaacgagaagatgcaattacacaacagaacactatacagaatgaagctgtaaacttactagatccaggcagttcctatctgctacaggagccacctagaacagtttcaggcagatataaaagcacaaccagtgtctctgaagaagatgtctcaagtagatattctcgaacagatagaagtgggttccctagatataacagggatgcaaatgtttcaggtactctggtttcaagtagcacactggaaaagaaaattgaagatcttgaaaaggaagtagtaagagaaagacaagaaaacctaagacttgtgagactgatgcaagataaagaggaaatgattggaaaactcaaagaagaaattgatttattaaatagagacctagatgacatagaagatgaaaatgaacagctaaagcaggaaaataaaactcttttgaaagttgtgggtcagctgaccaggtagaggattcaagactcaatgtggaaaaaatattttaaactactgattgaatgttaatggtcaatgctagcacaatattcctatgctgcaatacattaaaataactaagcaagtatatttatttctagcaaacagatgtttgttttcaaaatacttctttttcattattggttttaaaaaagcattatccttttatctcacaaataagtaatatctttcagttattaaatgatagataatgcctttttggttttgtgtggtattcaactaatacatggtttaaagtcacagccgtttgaatatattttatcttggtagtacattttctcccttaggaatatacatagtctttgtttacatgagttcaaatacttttgggatgttaccttcacatgtcctattactgatgtgtgcaaccttttatgtgttgatgactcactcataaaggtttttgtctactgtcatttgttctttccacttattctaagcatttagagtaatagagtcatacttttttataacagcaaccttttaaaaggaaagctcttataaagtcactgtcatgttttagttgactaaatataaatttaagagaatacttgaattgtgctatagtaaataaaaatttactattttgtgtttgaatattgaaaaattgaatcactttaactcctgaaaaacatacaattgtaatttcaatgtaaaatttcttatgtaggtactacctttttttatcgttccaaggtttgctagtgaacacaggatattttaaaagttttttattcttcgggcctggaaagtgtacaaagtcagtgtaggagaaaaaaatccatatttttatattagcatgcacactaaaaaccaaaatattattcatacttaaaacattcatacaaaacaatatgtaagcagaaatagtactaaaatactttgcctaatttctaagttgaagaataacactgggacacagttttttcatatgagagaatattccgctatttcaaatttaagggattttcttcctaacattgaaattttaaaaacagagttacttctaaataattatacagattttttcttctattaaatattattatttagaattgtttttgtattacatattcatgttaagaaccccgtcttcccttaaaatacattaaaattatgacatttttgctttgtgattgaatttcaaatagcagtatggtatccttttatctagttaatatatgaaagtggcttgaatatagtcaaatccattttaggtactctactgactttttccttcacttgccaagcccttttattgttcactgttagaaaaatagagaaggtgagacagctgggggaaaatgtggagtaaatgataatcaaatgttgaattctaaaagtctctacatttacctaggttggctttctcccccagttcagaagtttccagcttgaccaacatggagaaaccccgtctctactaaaaatacaaaattagccaggtgtggtggcgcatgcctgtaatcctggctactcaggaggctgaggcaggagaatcgcttgaaaacccaggagacagaggttgcggtgagctgagattgcgccattgtactccagcctgggcaagaagagcgaaactctgtctccaaaaaaaaaaaaaaaaaaatttattaatacttttaaagactgagctgtttaagaattttttggggaacatttctagcagtgatttttttggcctttaatgatagcgtaaagacaggagccttacaacttaggcaaagcatttcacatgcagtccttcttccatctcaaaatatgtacttattttacatacagaattttacactaaccattgaaaaataaagtaggatctgctacagtttcacctgaaaatttataaaaagtgttgagattggtagaaggtagtttttaagtacatgtgcactaccctaaaagacttgtctattgtcaataaagtgttagtatttgtgaaattattattcctgttcagaaatactatttcttaaatctcctgggaatttgtggcataataaagcacattcaaagttctaatgtatttatgagctcattttcaaaatagtaagtttgtcatctttaaaatgaacatgacttgcctccttgatttctgaaatgaattaattgaagattgctatagtaatctttatttcatctttctagagttgttgacaattttattatacaacagttaccattagagaaggagggaagggctttgggtgtgtatttataggtactaagggatttactaaatatagtagattagcactgtcacacttgttcaagtagtttcaaacatagaaaattaagtatcaggtatgtggagcaatgtagtttttttttttcttcagtttaaaaaatttttaattgtggtagaagcaatgtattcttaaggtgaaaaacctacctcggttacatgtggtttgtgttttttggattaatctggattttataattagaaataaaaatgtaagattttgaatccaaaaaaaaaaaaaaaaaaaaaaaaaaaaaaaaaaaaaaaaaaaaaaaaaagcgcaaaaccaagtacatagtgacgatggcttttatttggacaaatagcttttatattttcattaaaccatgcaaaaaatactacatctttctggcacataactgtctccttaaccactgaacagttcagccatttgaataaattgtacattgtaaagcttatagtagctgattgtattattgattgtattgtatactatattaaatgtgaatttgtaccccttcattttaaaaggtcattgtgttctactgcctattttagattactttggggttggggaagggtgttttggtaagcaggattttaagtcctctctctctcgattggttttatgaagatataaggttatgctcttactaccaagctcaggattcttgattttaaaggtacaaggatagttgtgggagttttatttttggttatatttgaactgtatgaatggtaggtctgaatattgagaatttccatggtcttatgtggaggtaaaatatacagataactgatcagtttgagtgactgcaacatgttctggttgcacaacagttaggcatgctatggtttatatttgtgaagtttggatgcctgtgaagaatgattaaatacatgtttctaatattttagtgttttgtatttaggttatttattctttgtatctaaaactgaacagctactgtgctatattgattttattggtagtattgagcagaccttgtttctgcatgaaactagttgcaaaacccactattttggaaataaaaatgtattttgacatatacaaataaaatgaataaaactattttaaatgtgaaaaaaaaaaa

SEQ ID NO: 355754 - DNA, 7445 bp, Homo sapiens
tgacgggtggccgtgctgggggcgggagggcttctgtggtaggaagggaggtccgctcggccgggtgcgccgccccagtgctctgtgggatactggaagtctcgagcgtcggctccgggttcccagccctcctctggcccgcactcatagaaacattcacacaccccctgcctcccctctcttccctctccgcctcccccttccccccctcgcgataagaagacccggcggcaggagaggggatgaagatggcggacgcgaagcagaagcggaacgagcagctgaaacgctggatcggctccgagacggacctcgagcctccggtggtgaagcgccagaagaccaaggtgaagttcgacgatggcgccgtcttcctggctgcttgctccagcggcgacacggacgaggtcctcaagctgctgcaccgcggcgccgacatcaattacgccaatgtggacggactcactgccctgcaccaggcttgcattgatgacaatgttgatatggtgaagtttctggtagaaaatggagcaaatattaatcaacctgataatgaaggctggataccactacatgcagcagcttcctgtggatatcttgatattgcagagtttttgattggtcaaggagcacatgtaggggctgtcaacagtgaaggagatacacctttagatattgcggaggaggaggcaatggaagagctacttcaaaatgaagttaatcggcaaggggttgatatagaagcagctcgaaaggaagaagaacggatcatgcttagagatgccaggcagtggctaaatagtggtcatataaatgatgtccggcatgcaaaatctggaggtacagcacttcacgttgcagctgctaaaggctatacggaagttttaaaacttttaatacaggcaggctatgatgttaatattaaagactatgatggctggacacctcttcatgctgcagctcattggggtaaagaagaagcatgtcgaattttagtggacaatctgtgtgatatggagatggtcaacaaagtgggccaaacagcctttgatgtagcagatgaagacattttaggatatttagaagagttgcaaaagaaacaaaatctgctccatagtgaaaaacgggacaagaaatctccactaattgaatcaacagcaaatatggacaataatcagtcacagaagacctttaaaaacaaagagacgttgattattgaaccagagaaaaatgcatcccgtattgaatctctggaacaagaaaaggttgatgaagaagaagaaggaaagaaggatgagtctagctgctctagtgaagaagatgaggaagatgactcggaatcagaagctgaaacagataagacaaaacccctggcttctgtaactaatgccaacacttctagtacacaagcagctcctgtagctgttacaacacctactgtgtcatcaggtcaagcaacacctacatcacctattaaaaagtttccaaccacagctacaaaaatttctcccaaagaagaagagagaaaagatgagtctcctgcaacttggaggttaggacttagaaagacgggcagctatggtgcacttgctgaaatcacagcatctaaagagggtcagaaagaaaaagatactgcaggtgttacacgttcagcttcaagtcccagactttcctcctctttggataataaagaaaaggagaaagatagtaaaggaactaggcttgcatatgttgcacctacaataccaagacgactagccagtacatctgacattgaagagaaagaaaacagagattcttcaagtttgcgaacaagtagttcatatacaaggagaaaatgggaagatgatcttaaaaaaaatagctcagttaatgaaggatcaacgtatcataaaagttgctcctttggtagaagacaagatgatttgattagttctagtgttccaagcaccacatcaacaccaacagttacctctgcagctgggcttcagaaaagcctgctttccagcacaagcactactacaaagattacaacgggttcttcctcagcaggcacacaaagcagtacctcaaatcgtttgtgggctgaggatagtactgagaaagaaaaggacagtgttcctacggcagtgaccattcctgttgctccaactgttgtaaatgctgcagcttctaccacaaccctgactacaactactgctggcactgtctcctccacaacagaggtcagggagagacgcagatcatacctcactcctgttagggatgaagagtctgaatcccaaagaaaagcaagatctagacaagcaagacaatctagaagatcaacacagggagtgacattaactgatcttcaagaagctgagaaaacaataggaagaagtcgttctacccgaaccagagaacaagaaaatgaagaaaaagaaaaagaggaaaaagagaaacaagataaagagaaacaagaagaaaagaaggagtcagaaacatctagagaagatgaatataaacaaaagtactccagaacgtatgatgagacttaccagcgttataggccagtatcaacttcaagttcaaccactccatcctcttcactttctactatgagcagttcactgtatgcttcaagtcaactaaacaggccaaatagtcttgtaggcataacttctgcttactccagaggaataacaaaagaaaatgaaagagagggagaaaaaagagaagaggagaaagaaggagaagataaatcacaacctaaatcaatcagagaacgacgacgaccaagagagaaaagaagatctacaggagtttcattttggacacaagatagtgatgaaaatgaacaagaacaacaatcagacacagaagagggatccaataagaaagaaactcagacggattccatttctagatatgaaaccagttctacatcagctggtgatcgatatgattccttgctgggtcgctctggatcatacagttacttagaagaaagaaaaccttacagcagcaggctagaaaaggatgactcaactgactttaaaaagctttatgaacaaattctagctgaaaatgaaaagctgaaggcacagctacatgatacaaatatggaactaacagatcttaaattacagttggaaaaggccacccagagacaagaaagatttgctgatagatcactgttggaaatggaaaaaagggaacgaagagctctagaaagaagaatatctgaaatggaagaagagctcaaagtaagtaaactatgttacttatgagagagagtgctgtttatgtattaatgtttaaaatactattatagatatggtttacattaattgttctcaaagctgattacccaatttgtgaactgtctatatctggtgcttctctttcttcctgaatccaggttttagtgagccagaagagggtctaaaacccaaatcttaacacctagccccgccggctgctgtgggagcggcggccgtccctctcctggaggtcgtctcctggcatcctcggggccgcaggaaggaagaggaggcagcggccggagccctggtgggcggcctgaggtgagagcccgaccggcccctttgggaatatggcgaccggtggctaccggaccagcagcggcctcggcggcagcaccacagacttcctggaggagtggaaggcgaaacgcgagaagatgcgcgccaagcagaaccccccgggcccggcccccccgggagggggcagcagcgacgccgctgggaagccccccgcgggggctctgggcaccccggcggccgccgctgccaacgagctcaacaacaacctcccgggcggcgcgccggccgcacctgccgtccccggtcccgggggcgtgaactgcgcggtcggctccgccatgctgacgcgggcggcccccggcccgcggcggtcggaggacgagcccccagccgcctctgcctcggctgcaccgccgccccagcgtgacgaggaggagccggacggcgtcccagagaagggcaagagctcgggccccagtgccaggaaaggcaaggggcagatcgagaagaggaagctgcgggagaagcggcgctccaccggcgtggtcaacatccctgccgcagagtgcttagatgagtacgaagatgatgaagcagggcagaaagagcggaaacgagaagatgcaattacacaacagaacactatacagaatgaagctgtaaacttactagatccaggcagttcctatctgctacaggagccacctagaacagtttcaggcagatataaaagcacaaccagtgtctctgaagaagatgtctcaagtagatattctcgaacagatagaagtgggttccctagatataacagggatgcaaatgtttcaggtactctggtttcaagtagcacactggaaaagaaaattgaagatcttgaaaaggaagtagtaagagaaagacaagaaaacctaagacttgtgagactgatgcaagataaagaggaaatgattggaaaactcaaagaagaaattgatttattaaatagagacctagatgacatagaagatgaaaatgaacagctaaagcaggaaaataaaactcttttgaaagttgtgggtcagctgaccaggtagaggattcaagactcaatgtggaaaaaatattttaaactactgattgaatgttaatggtcaatgctagcacaatattcctatgctgcaatacattaaaataactaagcaagtatatttatttctagcaaacagatgtttgttttcaaaatacttctttttcattattggttttaaaaaagcattatccttttatctcacaaataagtaatatctttcagttattaaatgatagataatgcctttttggttttgtgtggtattcaactaatacatggtttaaagtcacagccgtttgaatatattttatcttggtagtacattttctcccttaggaatatacatagtctttgtttacatgagttcaaatacttttgggatgttaccttcacatgtcctattactgatgtgtgcaaccttttatgtgttgatgactcactcataaaggtttttgtctactgtcatttgttctttccacttattctaagcatttagagtaatagagtcatacttttttataacagcaaccttttaaaaggaaagctcttataaagtcactgtcatgttttagttgactaaatataaatttaagagaatacttgaattgtgctatagtaaataaaaatttactattttgtgtttgaatattgaaaaattgaatcactttaactcctgaaaaacatacaattgtaatttcaatgtaaaatttcttatgtaggtactacctttttttatcgttccaaggtttgctagtgaacacaggatattttaaaagttttttattcttcgggcctggaaagtgtacaaagtcagtgtaggagaaaaaaatccatatttttatattagcatgcacactaaaaaccaaaatattattcatacttaaaacattcatacaaaacaatatgtaagcagaaatagtactaaaatactttgcctaatttctaagttgaagaataacactgggacacagttttttcatatgagagaatattccgctatttcaaatttaagggattttcttcctaacattgaaattttaaaaacagagttacttctaaataattatacagattttttcttctattaaatattattatttagaattgtttttgtattacatattcatgttaagaaccccgtcttcccttaaaatacattaaaattatgacatttttgctttgtgattgaatttcaaatagcagtatggtatccttttatctagttaatatatgaaagtggcttgaatatagtcaaatccattttaggtactctactgactttttccttcacttgccaagcccttttattgttcactgttagaaaaatagagaaggtgagacagctgggggaaaatgtggagtaaatgataatcaaatgttgaattctaaaagtctctacatttacctaggttggctttctcccccagttcagaagtttccagcttggccaatcatcagaatcacttgaggaacttagaaagaactccctggctgtagctcctatgtaggtttaggttgagactctggattccacaatttttaaaggttaccatctgaggtttctgatcatagtctacttttgaagcagctgctgctgtttctttattccattgaacaccctggaattgacataattttatctatcagcatttctccccttttagtttatttaataattaacccggtctccagggcagttttcatatgaccatgtgtatattcactgctcacgaaaaagtttaatgttagattaccaaatttaatatagttacagaattactgcataagggcttcccttcttggagactcttacccagcatgggaacagtgatctgcccacatgacagggtggtatgccaggcatagttaactgcttttggttgtgaggtactcatcttcctttagttacccttagttatgtggcacacatgtccttattgcctagttcgtcatccacactttggatcttgtgaaaatgctgttagtatccaaccttaaaatatattagtatatgggtttttattaaaagaattactttgaattttctatttaattcatatgtaaataaaggaacatttcatttcacttaaaaaaattatatcagttattaggctgggtgcagtggctcatgcctgtaatcccagcactttgggaggccaaggcgggtggattaccagagttcgggagtttgagaccagcttgaccaacatggagaaaccccgtctctactaaaaatacaaaattagccaggtgtggtggcgcatgcctgtaatcctggctactcaggaggctgaggcaggagaatcgcttgaaaacccaggagacagaggttgcggtgagctgagattgcgccattgtactccagcctgggcaagaagagcgaaactctgtctccaaaaaaaaaaaaaaaaaaatttattaatacttttaaagactgagctgtttaagaattttttggggaacatttctagcagtgatttttttggcctttaatgatagcgtaaagacaggagccttacaacttaggcaaagcatttcacatgcagtccttcttccatctcaaaatatgtacttattttacatacagaattttacactaaccattgaaaaataaagtaggatctgctacagtttcacctgaaaatttataaaaagtgttgagattggtagaaggtagtttttaagtacatgtgcactaccctaaaagacttgtctattgtcaataaagtgttagtatttgtgaaattattattcctgttcagaaatactatttcttaaatctcctgggaatttgtggcataataaagcacattcaaagttctaatgta

SEQ ID NO: 355755 - DNA, 8416 bp, Homo sapiens
tgacgggtggccgtgctgggggcgggagggcttctgtggtaggaagggaggtccgctcggccgggtgcgccgccccagtgctctgtgggatactggaagtctcgagcgtcggctccgggttcccagccctcctctggcccgcactcatagaaacattcacacaccccctgcctcccctctcttccctctccgcctcccccttccccccctcgcgataagaagacccggcggcaggagaggggatgaagatggcggacgcgaagcagaagcggaacgagcagctgaaacgctggatcggctccgagacggacctcgagcctccggtggtgaagcgccagaagaccaaggtgaagttcgacgatggcgccgtcttcctggctgcttgctccagcggcgacacggacgaggtcctcaagctgctgcaccgcggcgccgacatcaattacgccaatgtggacggactcactgccctgcaccaggcttgcattgatgacaatgttgatatggtgaagtttctggtagaaaatggagcaaatattaatcaacctgataatgaaggctggataccactacatgcagcagcttcctgtggatatcttgatattgcagagtttttgattggtcaaggagcacatgtaggggctgtcaacagtgaaggagatacacctttagatattgcggaggaggaggcaatggaagagctacttcaaaatgaagttaatcggcaaggggttgatatagaagcagctcgaaaggaagaagaacggatcatgcttagagatgccaggcagtggctaaatagtggtcatataaatgatgtccggcatgcaaaatctggaggtacagcacttcacgttgcagctgctaaaggctatacggaagttttaaaacttttaatacaggcaggctatgatgttaatattaaagactatgatggctggacacctcttcatgctgcagctcattggggtaaagaagaagcatgtcgaattttagtggacaatctgtgtgatatggagatggtcaacaaagtgggccaaacagcctttgatgtagcagatgaagacattttaggatatttagaagagttgcaaaagaaacaaaatctgctccatagtgaaaaacgggacaagaaatctccactaattgaatcaacagcaaatatggacaataatcagtcacagaagacctttaaaaacaaagagacgttgattattgaaccagagaaaaatgcatcccgtattgaatctctggaacaagaaaaggttgatgaagaagaagaaggaaagaaggatgagtctagctgctctagtgaagaagatgaggaagatgactcggaatcagaagctgaaacagataagacaaaacccctggcttctgtaactaatgccaacacttctagtacacaagcagctcctgtagctgttacaacacctactgtgtcatcaggtcaagcaacacctacatcacctattaaaaagtttccaaccacagctacaaaaatttctcccaaagaagaagagagaaaagatgagtctcctgcaacttggaggttaggacttagaaagacgggcagctatggtgcacttgctgaaatcacagcatctaaagagggtcagaaagaaaaagatactgcaggtgttacacgttcagcttcaagtcccagactttcctcctctttggataataaagaaaaggagaaagatagtaaaggaactaggcttgcatatgttgcacctacaataccaagacgactagccagtacatctgacattgaagagaaagaaaacagagattcttcaagtttgcgaacaagtagttcatatacaaggagaaaatgggaagatgatcttaaaaaaaatagctcagttaatgaaggatcaacgtatcataaaagatcatacctcactcctgttagggatgaagagtctgaatcccaaagaaaagcaagatctagacaagcaagacaatctagaagatcaacacagggagtgacattaactgatcttcaagaagctgagaaaacaataggaagaagtcgttctacccgaaccagagaacaagaaaatgaagaaaaagaaaaagaggaaaaagagaaacaagataaagagaaacaagaagaaaagaaggagtcagaaacatctagagaagatgaatataaacaaaagtactccagaacgtatgatgagacttaccagcgttataggccagtatcaacttcaagttcaaccactccatcctcttcactttctactatgagcagttcactgtatgcttcaagtcaactaaacaggccaaatagtcttgtaggcataacttctgcttactccagaggaataacaaaagaaaatgaaagagagggagaaaaaagagaagaggagaaagaaggagaagataaatcacaacctaaatcaatcagagaacgacgacgaccaagagagaaaagaagatctacaggagtttcattttggacacaagatagtgatgaaaatgaacaagaacaacaatcagacacagaagagggatccaataagaaagaaactcagacggattccatttctagatatgaaaccagttctacatcagctggtgatcgatatgattccttgctgggtcgctctggatcatacagttacttagaagaaagaaaaccttacagcagcaggctagaaaaggatgactcaactgactttaaaaagctttatgaacaaattctagctgaaaatgaaaagctgaaggcacagctacatgatacaaatatggaactaacagatcttaaattacagttggaaaaggccacccagagacaagaaagatttgctgatagatcactgttggaaatggaaaaaagggaacgaagagctctagaaagaagaatatctgaaatggaagaagagctcaaagtaagtaaactatgttacttatgagagagagtgctgtttatgtattaatgtttaaaatactattatagatatggtttacattaattgttctcaaagctgattacccaatttgtgaactgtctatatctggtgcttctctttcttcctgaatccaggttttagtgagccagaagagggtctaaaacccaaatcttaacacctagccccgccggctgctgtgggagcggcggccgtccctctcctggaggtcgtctcctggcatcctcggggccgcaggaaggaagaggaggcagcggccggagccctggtgggcggcctgaggtgagagcccgaccggcccctttgggaatatggcgaccggtggctaccggaccagcagcggcctcggcggcagcaccacagacttcctggaggagtggaaggcgaaacgcgagaagatgcgcgccaagcagaaccccccgggcccggcccccccgggagggggcagcagcgacgccgctgggaagccccccgcgggggctctgggcaccccggcggccgccgctgccaacgagctcaacaacaacctcccgggcggcgcgccggccgcacctgccgtccccggtcccgggggcgtgaactgcgcggtcggctccgccatgctgacgcgggcggcccccggcccgcggcggtcggaggacgagcccccagccgcctctgcctcggctgcaccgccgccccagcgtgacgaggaggagccggacggcgtcccagagaagggcaagagctcgggccccagtgccaggaaaggcaaggggcagatcgagaagaggaagctgcgggagaagcggcgctccaccggcgtggtcaacatccctgccgcagagtgcttagatgagtacgaagatgatgaagcagggcagaaagagcggaaacgagaagatgcaattacacaacagaacactatacagaatgaagctgtaaacttactagatccaggcagttcctatctgctacaggagccacctagaacagtttcaggcagatataaaagcacaaccagtgtctctgaagaagatgtctcaagtagatattctcgaacagatagaagtgggttccctagatataacagggatgcaaatgtttcaggtactctggtttcaagtagcacactggaaaagaaaattgaagatcttgaaaaggaagtagtaagagaaagacaagaaaacctaagacttgtgagactgatgcaagataaagaggaaatgattggaaaactcaaagaagaaattgatttattaaatagagacctagatgacatagaagatgaaaatgaacagctaaagcaggaaaataaaactcttttgaaagttgtgggtcagctgaccaggtagaggattcaagactcaatgtggaaaaaatattttaaactactgattgaatgttaatggtcaatgctagcacaatattcctatgctgcaatacattaaaataactaagcaagtatatttatttctagcaaacagatgtttgttttcaaaatacttctttttcattattggttttaaaaaagcattatccttttatctcacaaataagtaatatctttcagttattaaatgatagataatgcctttttggttttgtgtggtattcaactaatacatggtttaaagtcacagccgtttgaatatattttatcttggtagtacattttctcccttaggaatatacatagtctttgtttacatgagttcaaatacttttgggatgttaccttcacatgtcctattactgatgtgtgcaaccttttatgtgttgatgactcactcataaaggtttttgtctactgtcatttgttctttccacttattctaagcatttagagtaatagagtcatacttttttataacagcaaccttttaaaaggaaagctcttataaagtcactgtcatgttttagttgactaaatataaatttaagagaatacttgaattgtgctatagtaaataaaaatttactattttgtgtttgaatattgaaaaattgaatcactttaactcctgaaaaacatacaattgtaatttcaatgtaaaatttcttatgtaggtactacctttttttatcgttccaaggtttgctagtgaacacaggatattttaaaagttttttattcttcgggcctggaaagtgtacaaagtcagtgtaggagaaaaaaatccatatttttatattagcatgcacactaaaaaccaaaatattattcatacttaaaacattcatacaaaacaatatgtaagcagaaatagtactaaaatactttgcctaatttctaagttgaagaataacactgggacacagttttttcatatgagagaatattccgctatttcaaatttaagggattttcttcctaacattgaaattttaaaaacagagttacttctaaataattatacagattttttcttctattaaatattattatttagaattgtttttgtattacatattcatgttaagaaccccgtcttcccttaaaatacattaaaattatgacatttttgctttgtgattgaatttcaaatagcagtatggtatccttttatctagttaatatatgaaagtggcttgaatatagtcaaatccattttaggtactctactgactttttccttcacttgccaagcccttttattgttcactgttagaaaaatagagaaggtgagacagctgggggaaaatgtggagtaaatgataatcaaatgttgaattctaaaagtctctacatttacctaggttggctttctcccccagttcagaagtttccagcttggccaatcatcagaatcacttgaggaacttagaaagaactccctggctgtagctcctatgtaggtttaggttgagactctggattccacaatttttaaaggttaccatctgaggtttctgatcatagtctacttttgaagcagctgctgctgtttctttattccattgaacaccctggaattgacataattttatctatcagcatttctccccttttagtttatttaataattaacccggtctccagggcagttttcatatgaccatgtgtatattcactgctcacgaaaaagtttaatgttagattaccaaatttaatatagttacagaattactgcataagggcttcccttcttggagactcttacccagcatgggaacagtgatctgcccacatgacagggtggtatgccaggcatagttaactgcttttggttgtgaggtactcatcttcctttagttacccttagttatgtggcacacatgtccttattgcctagttcgtcatccacactttggatcttgtgaaaatgctgttagtatccaaccttaaaatatattagtatatgggtttttattaaaagaattactttgaattttctatttaattcatatgtaaataaaggaacatttcatttcacttaaaaaaattatatcagttattaggctgggtgcagtggctcatgcctgtaatcccagcactttgggaggccaaggcgggtggattaccagagttcgggagtttgagaccagcttgaccaacatggagaaaccccgtctctactaaaaatacaaaattagccaggtgtggtggcgcatgcctgtaatcctggctactcaggaggctgaggcaggagaatcgcttgaaaacccaggagacagaggttgcggtgagctgagattgcgccattgtactccagcctgggcaagaagagcgaaactctgtctccaaaaaaaaaaaaaaaaaaatttattaatacttttaaagactgagctgtttaagaattttttggggaacatttctagcagtgatttttttggcctttaatgatagcgtaaagacaggagccttacaacttaggcaaagcatttcacatgcagtccttcttccatctcaaaatatgtacttattttacatacagaattttacactaaccattgaaaaataaagtaggatctgctacagtttcacctgaaaatttataaaaagtgttgagattggtagaaggtagtttttaagtacatgtgcactaccctaaaagacttgtctattgtcaataaagtgttagtatttgtgaaattattattcctgttcagaaatactatttcttaaatctcctgggaatttgtggcataataaagcacattcaaagttctaatgtatttatgagctcattttcaaaatagtaagtttgtcatctttaaaatgaacatgacttgcctccttgatttctgaaatgaattaattgaagattgctatagtaatctttatttcatctttctagagttgttgacaattttattatacaacagttaccattagagaaggagggaagggctttgggtgtgtatttataggtactaagggatttactaaatatagtagattagcactgtcacacttgttcaagtagtttcaaacatagaaaattaagtatcaggtatgtggagcaatgtagtttttttttttcttcagtttaaaaaatttttaattgtggtagaagcaatgtattcttaaggtgaaaaacctacctcggttacatgtggtttgtgttttttggattaatctggattttataattagaaataaaaatgtaagattttgaatccaaaaaaaaaaaaaaaaaaaaaaaaaaaaaaaaaaaaaaaaaaaaaaaaaagcgcaaaaccaagtacatagtgacgatggcttttatttggacaaatagcttttatattttcattaaaccatgcaaaaaatactacatctttctggcacataactgtctccttaaccactgaacagttcagccatttgaataaattgtacattgtaaagcttatagtagctgattgtattattgattgtattgtatactatattaaatgtgaatttgtaccccttcattttaaaaggtcattgtgttctactgcctattttagattactttggggttggggaagggtgttttggtaagcaggattttaagtcctctctctctcgattggttttatgaagatataaggttatgctcttactaccaagctcaggattcttgattttaaaggtacaaggatagttgtgggagttttatttttggttatatttgaactgtatgaatggtaggtctgaatattgagaatttccatggtcttatgtggaggtaaaatatacagataactgatcagtttgagtgactgcaacatgttctggttgcacaacagttaggcatgctatggtttatatttgtgaagtttggatgcctgtgaagaatgattaaatacatgtttctaatattttagtgttttgtatttaggttatttattctttgtatctaaaactgaacagctactgtgctatattgattttattggtagtattgagcagaccttgtttctgcatgaaactagttgcaaaacccactattttggaaataaaaatgtattttgacatatacaaataaaatgaataaaactattttaaatgtgaaaaaaaaaaa

SEQ ID NO: 355756 - DNA, 8313 bp, Homo sapiens
tgacgggtggccgtgctgggggcgggagggcttctgtggtaggaagggaggtccgctcggccgggtgcgccgccccagtgctctgtgggatactggaagtctcgagcgtcggctccgggttcccagccctcctctggcccgcactcatagaaacattcacacaccccctgcctcccctctcttccctctccgcctcccccttccccccctcgcgataagaagacccggcggcaggagaggggatgaagatggcggacgcgaagcagaagcggaacgagcagctgaaacgctggatcggctccgagacggacctcgagcctccggtggtgaagcgccagaagaccaaggtgaagttcgacgatggcgccgtcttcctggctgcttgctccagcggcgacacggacgaggtcctcaagctgctgcaccgcggcgccgacatcaattacgccaatgtggacggactcactgccctgcaccaggcttgcattgatgacaatgttgatatggtgaagtttctggtagaaaatggagcaaatattaatcaacctgataatgaaggctggataccactacatgcagcagcttcctgtggatatcttgatattgcagagtttttgattggtcaaggagcacatgtaggggctgtcaacagtgaaggagatacacctttagatattgcggaggaggaggcaatggaagagctacttcaaaatgaagttaatcggcaaggggttgatatagaagcagctcgaaaggaagaagaacggatcatgcttagagatgccaggcagtggctaaatagtggtcatataaatgatgtccggcatgcaaaatctggaggtacagcacttcacgttgcagctgctaaaggctatacggaagttttaaaacttttaatacaggcaggctatgatgttaatattaaagactatgatggctggacacctcttcatgctgcagctcattggggtaaagaagaagcatgtcgaattttagtggacaatctgtgtgatatggagatggtcaacaaagtgggccaaacagcctttgatgtagcagatgaagacattttaggatatttagaagagttgcaaaagaaacaaaatctgctccatagtgaaaaacgggacaagaaatctccactaattgaatcaacagcaaatatggacaataatcagtcacagaagacctttaaaaacaaagagacgttgattattgaaccagagaaaaatgcatcccgtattgaatctctggaacaagaaaaggttgatgaagaagaagaaggaaagaaggatgagtctagctgctctagtgaagaagatgaggaagatgactcggaatcagaagctgaaacagataagacaaaacccctggcttctgtaactaatgccaacacttctagtacacaagcagctcctgtagctgttacaacacctactgtgtcatcaggtcaagcaacacctacatcacctattaaaaagtttccaaccacagctacaaaaatttctcccaaagaagaagagagaaaagatgagtctcctgcaacttggaggttaggacttagaaagacgggcagctatggtgcacttgctgaaatcacagcatctaaagagggtcagaaagaaaaagatactgcaggtgttacacgttcagcttcaagtcccagactttcctcctctttggataataaagaaaaggagaaagatagtaaaggaactaggcttgcatatgttgcacctacaataccaagacgactagccagtacatctgacattgaagagaaagaaaacagagattcttcaagtttgcgaacaagtagttcatatacaaggagaaaatgggaagatgatcttaaaaaaaatagctcagttaatgaaggatcaacgtatcataaaagttgctcctttggtagaagacaagatgatttgattagttctagtgttccaagcaccacatcaacaccaacagttacctctgcagctgggcttcagaaaagcctgctttccagcacaagcactactacaaagattacaacgggttcttcctcagcaggcacacaaagcagtacctcaaatcgtttgtgggctgaggatagtactgagaaagaaaaggacagtgttcctacggcagtgaccattcctgttgctccaactgttgtaaatgctgcagcttctaccacaaccctgactacaactactgctggcactgtctcctccacaacagaggtcagggagagacgcagatcatacctcactcctgttagggatgaagagtctgaatcccaaagaaaagcaagatctagacaagcaagacaatctagaagatcaacacagggagtgacattaactgatcttcaagaagctgagaaaacaataggaagaagtcgttctacccgaaccagagaacaagaaaatgaagaaaaagaaaaagaggaaaaagagaaacaagataaagagaaacaagaagaaaagaaggagtcagaaacatctagagaagatgaatataaacaaaagtactccagaacgtatgatgagacttaccagcgttataggccagtatcaacttcaagttcaaccactccatcctcttcactttctactatgagcagttcactgtatgcttcaagtcaactaaacaggccaaatagtcttgtaggcataacttctgcttactccagaggaataacaaaagaaaatgaaagagagggagaaaaaagagaagaggagaaagaaggagaagataaatcacaacctaaatcaatcagagaacgacgacgaccaagagagaaaagaagatctacaggagtttcattttggacacaagatagtgatgaaaatgaacaagaacaacaatcagacacagaagagggatccaataagaaagaaactcagacggattccatttctagatatgaaaccagttctacatcagctggtgatcgatatgattccttgctgggtcgctctggatcatacagttacttagaagaaagaaaaccttacagcagcaggctagaaaaggatgactcaactgactttaaaaagctttatgaacaaattctagctgaaaatgaaaagctgaaggcacagctacatgatacaaatatggaactaacagatcttaaattacagttggaaaaggccacccagagacaagaaagatttgctgatagatcactgttggaaatggaaaaaagggaacgaagagctctagaaagaagaatatctgaaatggaagaagagctcaaagtaagtaaactatgttacttatgagagagagtgctgtttatgtattaatgtttaaaatactattatagatatggtttacattaattgttctcaaagctgattacccaatttgtgaactgtctatatctggtgcttctctttcttcctgaatccaggttttagtgagccagaagagggtctaaaacccaaatcttaacacctagccccgccggctgctgtgggagcggcggccgtccctctcctggaggtcgtctcctggcatcctcggggccgcaggaaggaagaggaggcagcggccggagccctggtgggcggcctgaggtgagagcccgaccggcccctttgggaatatggcgaccggtggctaccggaccagcagcggcctcggcggcagcaccacagacttcctggaggagtggaaggcgaaacgcgagaagatgcgcgccaagcagaaccccccgggcccggcccccccgggagggggcagcagcgacgccgctgggaagccccccgcgggggctctgggcaccccggcggccgccgctgccaacgagctcaacaacaacctcccgggcggcgcgccggccgcacctgccgtccccggtcccgggggcgtgaactgcgcggtcggctccgccatgctgacgcgggcggcccccggcccgcggcggtcggaggacgagcccccagccgcctctgcctcggctgcaccgccgccccagcgtgacgaggaggagccggacggcgtcccagagaagggcaagagctcgggccccagtgccaggaaaggcaaggggcagatcgagaagaggaagctgcgggagaagcggcgctccaccggcgtggtcaacatccctgccgcagagtgcttagatgagtacgaagatgatgaagcagggcagaaagagcggaaacgagaagatgcaattacacaacagaacactatacagaatgaagctgtaaacttactagatccaggcagttcctatctgctacaggagccacctagaacagtttcaggcagatataaaagcacaaccagtgtctctgaagaagatgtctcaagtagatattctcgaacagatagaagtgggttccctagatataacagggatgcaaatgtttcaggtactctggtttcaagtagcacactggaaaagaaaattgaagatcttgaaaaggaagtagtaagagaaagacaagaaaacctaagacttgtgagactgatgcaagataaagaggaaatgattggaaaactcaaagaagaaattgatttattaaatagagacctagatgacatagaagatgaaaatgaacagctaaagcaggaaaataaaactcttttgaaagttgtgggtcagctgaccaggtagaggattcaagactcaatgtggaaaaaatattttaaactactgattgaatgttaatggtcaatgctagcacaatattcctatgctgcaatacattaaaataactaagcaagtatatttatttctagcaaacagatgtttgttttcaaaatacttctttttcattattggttttaaaaaagcattatccttttatctcacaaataagtaatatctttcagttattaaatgatagataatgcctttttggttttgtgtggtattcaactaatacatggtttaaagtcacagccgtttgaatatattttatcttggtagtacattttctcccttaggaatatacatagtctttgtttacatgagttcaaatacttttgggatgttaccttcacatgtcctattactgatgtgtgcaaccttttatgtgttgatgactcactcataaaggtttttgtctactgtcatttgttctttccacttattctaagcatttagagtaatagagtcatacttttttataacagcaaccttttaaaaggaaagctcttataaagtcactgtcatgttttagttgactaaatataaatttaagagaatacttgaattgtgctatagtaaataaaaatttactattttgtgtttgaatattgaaaaattgaatcactttaactcctgaaaaacatacaattgtaatttcaatgtaaaatttcttatgtaggtactacctttttttatcgttccaaggtttgctagtgaacacaggatattttaaaagttttttattcttcgggcctggaaagtgtacaaagtcagtgtaggagaaaaaaatccatatttttatattagcatgcacactaaaaaccaaaatattattcatacttaaaacattcatacaaaacaatatgtaagcagaaatagtactaaaatactttgcctaatttctaagttgaagaataacactgggacacagttttttcatatgagagaatattccgctatttcaaatttaagggattttcttcctaacattgaaattttaaaaacagagttacttctaaataattatacagattttttcttctattaaatattattatttagaattgtttttgtattacatattcatgttaagaaccccgtcttcccttaaaatacattaaaattatgacatttttgctttgtgattgaatttcaaatagcagtatggtatccttttatctagttaatatatgaaagtggcttgaatatagtcaaatccattttaggtactctactgactttttccttcacttgccaagcccttttattgttcactgttagaaaaatagagaaggtgagacagctgggggaaaatgtggagtaaatgataatcaaatgttgaattctaaaagtctctacatttacctaggttggctttctcccccagttcagaagtttccagcttggccaatcatcagaatcacttgaggaacttagaaagaactccctggctgtagctcctatgtaggtttaggttgagactctggattccacaatttttaaaggttaccatctgaggtttctgatcatagtctacttttgaagcagctgctgctgtttctttattccattgaacaccctggaattgacataattttatctatcagcatttctccccttttagtttatttaataattaacccggtctccagggcagttttcatatgaccatgtgtatattcactgctcacgaaaaagtttaatgttagattaccaaatttaatatagttacagaattactgcataagggcttcccttcttggagactcttacccagcatgggaacagtgatctgcccacatgacagggtggtatgccaggcatagttaactgcttttggttgtgaggtactcatcttcctttagttacccttagttatgtggcacacatgtccttattgcctagttcgtcatccacactttggatcttgtgaaaatgctgttagtatccaaccttaaaatatattagtatatgggtttttattaaaagaattactttgaattttctatttaattcatatgtaaataaaggaacatttcatttcacttaaaaaaattatatcagttattaggctgggtgcagtggctcatgcctgtaatcccagcactttgggaggccaaggcgggtggattaccagagttcgggagtttgagaccagcttgaccaacatggagaaaccccgtctctactaaaaatacaaaattagccaggtgtggtggcgcatgcctgtaatcctggctactcaggaggctgaggcaggagaatcgcttgaaaacccaggagacagaggttgcggtgagctgagattgcgccattgtactccagcctgggcaagaagagcgaaactctgtctccaaaaaaaaaaaaaaaaaaatttattaatacttttaaagactgagctgtttaagaattttttggggaacatttctagcagtgatttttttggcctttaatgatagcgtaaagacaggagccttacaacttaggcaaagcatttcacatgcagtccttcttccatctcaaaatatgtacttattttacatacagaattttacactaaccattgaaaaataaagtaggatctgctacagtttcacctgaaaatttataaaaagtgttgagattggtagaaggtagtttttaagtacatgtgcactaccctaaaagacttgtctattgtcaataaagtgttagtatttgtgaaattattattcctgttcagaaatactatttcttaaatctcctgggaatttgtggcataataaagcacattcaaagttctaatgtatttatgagctcattttcaaaatagtaagtttgtcatctttaaaatgaacatgacttgcctccttgatttctgaaatgaattaattgaagattgctatagtaatctttatttcatctttctagagttgttgacaattttattatacaacagttaccattagagaaggagggaagggctttgggtgtgtatttataggtactaagggatttactaaatatagtagattagcactgtcacacttgttcaagtagtttcaaacatagaaaattaagtatcaggtatgtggagcaatgtagtttttttttttcttcagtttaaaaaatttttaattgtggtagaagcaatgtattcttaaggtgaaaaacctacctcggttacatgtggtttgtgttttttggattaatctggattttataattagaaataaaaatgtaagattttgaatccacttaatttcttgaaaatagtacaagtcagtgtaatagagaagcattcatatattcaacactgtaagacaaaacagcagagaccttggatttgataattgatctgatatcctggacagtattcatatgtacagtgataggtatctttctttggagttttttttttgtgcatatgtgtatagttttatgggttctgagttggtgaccagtaagttgcatgtagtgctggcacttacttaataactattcatgatattgttaataacttgttataggattgtattcccaattacagtctctaagattgtaattgatattatctgagaggtagtgtgacaactttcttttgttgttacattaagccgaaaacataatactaacttcacgactccgatttccagatttactgggatcctctagaa

SEQ ID NO: 355757 - DNA, 8568 bp, Homo sapiens
  misc_feature (8568)..(8568): n is a, c, g, or t
tgacgggtggccgtgctgggggcgggagggcttctgtggtaggaagggaggtccgctcggccgggtgcgccgccccagtgctctgtgggatactggaagtctcgagcgtcggctccgggttcccagccctcctctggcccgcactcatagaaacattcacacaccccctgcctcccctctcttccctctccgcctcccccttccccccctcgcgataagaagacccggcggcaggagaggggatgaagatggcggacgcgaagcagaagcggaacgagcagctgaaacgctggatcggctccgagacggacctcgagcctccggtggtgaagcgccagaagaccaaggtgaagttcgacgatggcgccgtcttcctggctgcttgctccagcggcgacacggacgaggtcctcaagctgctgcaccgcggcgccgacatcaattacgccaatgtggacggactcactgccctgcaccaggcttgcattgatgacaatgttgatatggtgaagtttctggtagaaaatggagcaaatattaatcaacctgataatgaaggctggataccactacatgcagcagcttcctgtggatatcttgatattgcagagtttttgattggtcaaggagcacatgtaggggctgtcaacagtgaaggagatacacctttagatattgcggaggaggaggcaatggaagagctacttcaaaatgaagttaatcggcaaggggttgatatagaagcagctcgaaaggaagaagaacggatcatgcttagagatgccaggcagtggctaaatagtggtcatataaatgatgtccggcatgcaaaatctggaggtacagcacttcacgttgcagctgctaaaggctatacggaagttttaaaacttttaatacaggcaggctatgatgttaatattaaagactatgatggctggacacctcttcatgctgcagctcattggggtaaagaagaagcatgtcgaattttagtggacaatctgtgtgatatggagatggtcaacaaagtgggccaaacagcctttgatgtagcagatgaagacattttaggatatttagaagagttgcaaaagaaacaaaatctgctccatagtgaaaaacgggacaagaaatctccactaattgaatcaacagcaaatatggacaataatcagtcacagaagacctttaaaaacaaagagacgttgattattgaaccagagaaaaatgcatcccgtattgaatctctggaacaagaaaaggttgatgaagaagaagaaggaaagaaggatgagtctagctgctctagtgaagaagatgaggaagatgactcggaatcagaagctgaaacagataagacaaaacccctggcttctgtaactaatgccaacacttctagtacacaagcagctcctgtagctgttacaacacctactgtgtcatcaggtcaagcaacacctacatcacctattaaaaagtttccaaccacagctacaaaaatttctcccaaagaagaagagagaaaagatgagtctcctgcaacttggaggttaggacttagaaagacgggcagctatggtgcacttgctgaaatcacagcatctaaagagggtcagaaagaaaaagatactgcaggtgttacacgttcagcttcaagtcccagactttcctcctctttggataataaagaaaaggagaaagatagtaaaggaactaggcttgcatatgttgcacctacaataccaagacgactagccagtacatctgacattgaagagaaagaaaacagagattcttcaagtttgcgaacaagtagttcatatacaaggagaaaatgggaagatgatcttaaaaaaaatagctcagttaatgaaggatcaacgtatcataaaagttgctcctttggtagaagacaagatgatttgattagttctagtgttccaagcaccacatcaacaccaacagttacctctgcagctgggcttcagaaaagcctgctttccagcacaagcactactacaaagattacaacgggttcttcctcagcaggcacacaaagcagtacctcaaatcgtttgtgggctgaggatagtactgagaaagaaaaggacagtgttcctacggcagtgaccattcctgttgctccaactgttgtaaatgctgcagcttctaccacaaccctgactacaactactgctggcactgtctcctccacaacagaggtcagggagagacgcagatcatacctcactcctgttagggatgaagagtctgaatcccaaagaaaagcaagatctagacaagcaagacaatctagaagatcaacacagggagtgacattaactgatcttcaagaagctgagaaaacaataggaagaagtcgttctacccgaaccagagaacaagaaaatgaagaaaaagaaaaagaggaaaaagagaaacaagataaagagaaacaagaagaaaagaaggagtcagaaacatctagagaagatgaatataaacaaaagtactccagaacgtatgatgagacttaccagcgttataggccagtatcaacttcaagttcaaccactccatcctcttcactttctactatgagcagttcactgtatgcttcaagtcaactaaacaggccaaatagtcttgtaggcataacttctgcttactccagaggaataacaaaagaaaatgaaagagagggagaaaaaagagaagaggagaaagaaggagaagataaatcacaacctaaatcaatcagagaacgacgacgaccaagagagaaaagaagatctacaggagtttcattttggacacaagatagtgatgaaaatgaacaagaacaacaatcagacacagaagagggatccaataagaaagaaactcagacggattccatttctagatatgaaaccagttctacatcagctggtgatcgatatgattccttgctgggtcgctctggatcatacagttacttagaagaaagaaaaccttacagcagcaggctagaaaaggatgactcaactgactttaaaaagctttatgaacaaattctagctgaaaatgaaaagctgaaggcacagctacatgatacaaatatggaactaacagatcttaaattacagttggaaaaggccacccagagacaagaaagatttgctgatagatcactgttggaaatggaaaaaagggaacgaagagctctagaaagaagaatatctgaaatggaagaagagctcaaagtaagtaaactatgttacttatgagagagagtgctgtttatgtattaatgtttaaaatactattatagatatggtttacattaattgttctcaaagctgattacccaatttgtgaactgtctatatctggtgcttctctttcttcctgaatccaggttttagtgagccagaagagggtctaaaacccaaatcttaacacctagccccgccggctgctgtgggagcggcggccgtccctctcctggaggtcgtctcctggcatcctcggggccgcaggaaggaagaggaggcagcggccggagccctggtgggcggcctgaggtgagagcccgaccggcccctttgggaatatggcgaccggtggctaccggaccagcagcggcctcggcggcagcaccacagacttcctggaggagtggaaggcgaaacgcgagaagatgcgcgccaagcagaaccccccgggcccggcccccccgggagggggcagcagcgacgccgctgggaagccccccgcgggggctctgggcaccccggcggccgccgctgccaacgagctcaacaacaacctcccgggcggcgcgccggccgcacctgccgtccccggtcccgggggcgtgaactgcgcggtcggctccgccatgctgacgcgggcggcccccggcccgcggcggtcggaggacgagcccccagccgcctctgcctcggctgcaccgccgccccagcgtgacgaggaggagccggacggcgtcccagagaagggcaagagctcgggccccagtgccaggaaaggcaaggggcagatcgagaagaggaagctgcgggagaagcggcgctccaccggcgtggtcaacatccctgccgcagagtgcttagatgagtacgaagatgatgaagcagggcagaaagagcggaaacgagaagatgcaattacacaacagaacactatacagaatgaagctgtaaacttactagatccaggcagttcctatctgctacaggagccacctagaacagtttcaggcagatataaaagcacaaccagtgtctctgaagaagatgtctcaagtagatattctcgaacagatagaagtgggttccctagatataacagggatgcaaatgtttcaggtactctggtttcaagtagcacactggaaaagaaaattgaagatcttgaaaaggaagtagtaagagaaagacaagaaaacctaagacttgtgagactgatgcaagataaagaggaaatgattggaaaactcaaagaagaaattgatttattaaatagagacctagatgacatagaagatgaaaatgaacagctaaagcaggaaaataaaactcttttgaaagttgtgggtcagctgaccaggtagaggattcaagactcaatgtggaaaaaatattttaaactactgattgaatgttaatggtcaatgctagcacaatattcctatgctgcaatacattaaaataactaagcaagtatatttatttctagcaaacagatgtttgttttcaaaatacttctttttcattattggttttaaaaaagcattatccttttatctcacaaataagtaatatctttcagttattaaatgatagataatgcctttttggttttgtgtggtattcaactaatacatggtttaaagtcacagccgtttgaatatattttatcttggtagtacattttctcccttaggaatatacatagtctttgtttacatgagttcaaatacttttgggatgttaccttcacatgtcctattactgatgtgtgcaaccttttatgtgttgatgactcactcataaaggtttttgtctactgtcatttgttctttccacttattctaagcatttagagtaatagagtcatacttttttataacagcaaccttttaaaaggaaagctcttataaagtcactgtcatgttttagttgactaaatataaatttaagagaatacttgaattgtgctatagtaaataaaaatttactattttgtgtttgaatattgaaaaattgaatcactttaactcctgaaaaacatacaattgtaatttcaatgtaaaatttcttatgtaggtactacctttttttatcgttccaaggtttgctagtgaacacaggatattttaaaagttttttattcttcgggcctggaaagtgtacaaagtcagtgtaggagaaaaaaatccatatttttatattagcatgcacactaaaaaccaaaatattattcatacttaaaacattcatacaaaacaatatgtaagcagaaatagtactaaaatactttgcctaatttctaagttgaagaataacactgggacacagttttttcatatgagagaatattccgctatttcaaatttaagggattttcttcctaacattgaaattttaaaaacagagttacttctaaataattatacagattttttcttctattaaatattattatttagaattgtttttgtattacatattcatgttaagaaccccgtcttcccttaaaatacattaaaattatgacatttttgctttgtgattgaatttcaaatagcagtatggtatccttttatctagttaatatatgaaagtggcttgaatatagtcaaatccattttaggtactctactgactttttccttcacttgccaagcccttttattgttcactgttagaaaaatagagaaggtgagacagctgggggaaaatgtggagtaaatgataatcaaatgttgaattctaaaagtctctacatttacctaggttggctttctcccccagttcagaagtttccagcttggccaatcatcagaatcacttgaggaacttagaaagaactccctggctgtagctcctatgtaggtttaggttgagactctggattccacaatttttaaaggttaccatctgaggtttctgatcatagtctacttttgaagcagctgctgctgtttctttattccattgaacaccctggaattgacataattttatctatcagcatttctccccttttagtttatttaataattaacccggtctccagggcagttttcatatgaccatgtgtatattcactgctcacgaaaaagtttaatgttagattaccaaatttaatatagttacagaattactgcataagggcttcccttcttggagactcttacccagcatgggaacagtgatctgcccacatgacagggtggtatgccaggcatagttaactgcttttggttgtgaggtactcatcttcctttagttacccttagttatgtggcacacatgtccttattgcctagttcgtcatccacactttggatcttgtgaaaatgctgttagtatccaaccttaaaatatattagtatatgggtttttattaaaagaattactttgaattttctatttaattcatatgtaaataaaggaacatttcatttcacttaaaaaaattatatcagttattaggctgggtgcagtggctcatgcctgtaatcccagcactttgggaggccaaggcgggtggattaccagagttcgggagtttgagaccagcttgaccaacatggagaaaccccgtctctactaaaaatacaaaattagccaggtgtggtggcgcatgcctgtaatcctggctactcaggaggctgaggcaggagaatcgcttgaaaacccaggagacagaggttgcggtgagctgagattgcgccattgtactccagcctgggcaagaagagcgaaactctgtctccaaaaaaaaaaaaaaaaaaatttattaatacttttaaagactgagctgtttaagaattttttggggaacatttctagcagtgatttttttggcctttaatgatagcgtaaagacaggagccttacaacttaggcaaagcatttcacatgcagtccttcttccatctcaaaatatgtacttattttacatacagaattttacactaaccattgaaaaataaagtaggatctgctacagtttcacctgaaaatttataaaaagtgttgagattggtagaaggtagtttttaagtacatgtgcactaccctaaaagacttgtctattgtcaataaagtgttagtatttgtgaaattattattcctgttcagaaatactatttcttaaatctcctgggaatttgtggcataataaagcacattcaaagttctaatgtatttatgagctcattttcaaaatagtaagtttgtcatctttaaaatgaacatgacttgcctccttgatttctgaaatgaattaattgaagattgctatagtaatctttatttcatctttctagagttgttgacaattttattatacaacagttaccattagagaaggagggaagggctttgggtgtgtatttataggtactaagggatttactaaatatagtagattagcactgtcacacttgttcaagtagtttcaaacatagaaaattaagtatcaggtatgtggagcaatgtagtttttttttttcttcagtttaaaaaatttttaattgtggtagaagcaatgtattcttaaggtgaaaaacctacctcggttacatgtggtttgtgttttttggattaatctggattttataattagaaataaaaatgtaagattttgaatccaaaaaaaaaaaaaaaaaaaaaaaaaaaaaaaaaaaaaaaaaatcccgaaaattttccccggggggccgggggtggccgcgcgcgtgggagtgtggggcgcccggggaacccggttaggagaccgagccatcagatttcaccagggggagaacctggtagaggaagacagggcggagggagagtagaccaatctggcagcgatggggggggggctgcgccgttaagaccccggagggcgccgcaaagctgtggagaccccgcgaggcagctcggggcaggtagtggggcccccgagggagcgacgggcacttttacccgggagcacaccacacgcctggtgtggggcgacgggagcgcaccaaagaaatggggggcatgagagacgcatggggtcgctagagcaagcgcgggagagcacccggcacgcccagagcagaggaaataaaaaagacgcctctcggggggagaaaacgccgcgggggaacaggccaagaaaaattcgccccccaacgaaaaggaggggggcgcccagacagcgagaccgggagaccctcggggagaaaaatattttcccccctccacaaacgccgggtgtggcacaaaacccgcattcgccaaataatacactaccccacctacagaagaggagggagatcaccccgggcccacggcggcn

SEQ ID NO: 355758 - DNA, 8386 bp, Homo sapiens
tgacgggtggccgtgctgggggcgggagggcttctgtggtaggaagggaggtccgctcggccgggtgcgccgccccagtgctctgtgggatactggaagtctcgagcgtcggctccgggttcccagccctcctctggcccgcactcatagaaacattcacacaccccctgcctcccctctcttccctctccgcctcccccttccccccctcgcgataagaagacccggcggcaggagaggggatgaagatggcggacgcgaagcagaagcggaacgagcagctgaaacgctggatcggctccgagacggacctcgagcctccggtggtgaagcgccagaagaccaaggtgaagttcgacgatggcgccgtcttcctggctgcttgctccagcggcgacacggacgaggtcctcaagctgctgcaccgcggcgccgacatcaattacgccaatgtggacggactcactgccctgcaccaggcttgcattgatgacaatgttgatatggtgaagtttctggtagaaaatggagcaaatattaatcaacctgataatgaaggctggataccactacatgcagcagcttcctgtggatatcttgatattgcagagtttttgattggtcaaggagcacatgtaggggctgtcaacagtgaaggagatacacctttagatattgcggaggaggaggcaatggaagagctacttcaaaatgaagttaatcggcaaggggttgatatagaagcagctcgaaaggaagaagaacggatcatgcttagagatgccaggcagtggctaaatagtggtcatataaatgatgtccggcatgcaaaatctggaggtacagcacttcacgttgcagctgctaaaggctatacggaagttttaaaacttttaatacaggcaggctatgatgttaatattaaagactatgatggctggacacctcttcatgctgcagctcattggggtaaagaagaagcatgtcgaattttagtggacaatctgtgtgatatggagatggtcaacaaagtgggccaaacagcctttgatgtagcagatgaagacattttaggatatttagaagagttgcaaaagaaacaaaatctgctccatagtgaaaaacgggacaagaaatctccactaattgaatcaacagcaaatatggacaataatcagtcacagaagacctttaaaaacaaagagacgttgattattgaaccagagaaaaatgcatcccgtattgaatctctggaacaagaaaaggttgatgaagaagaagaaggaaagaaggatgagtctagctgctctagtgaagaagatgaggaagatgactcggaatcagaagctgaaacagataagacaaaacccctggcttctgtaactaatgccaacacttctagtacacaagcagctcctgtagctgttacaacacctactgtgtcatcaggtcaagcaacacctacatcacctattaaaaagtttccaaccacagctacaaaaatttctcccaaagaagaagagagaaaagatgagtctcctgcaacttggaggttaggacttagaaagacgggcagctatggtgcacttgctgaaatcacagcatctaaagagggtcagaaagaaaaagatactgcaggtgttacacgttcagcttcaagtcccagactttcctcctctttggataataaagaaaaggagaaagatagtaaaggaactaggcttgcatatgttgcacctacaataccaagacgactagccagtacatctgacattgaagagaaagaaaacagagattcttcaagtttgcgaacaagtagttcatatacaaggagaaaatgggaagatgatcttaaaaaaaatagctcagttaatgaaggatcaacgtatcataaaagttgctcctttggtagaagacaagatgatttgattagttctagtgttccaagcaccacatcaacaccaacagttacctctgcagctgggcttcagaaaagcctgctttccagcacaagcactactacaaagattacaacgggttcttcctcagcaggcacacaaagcagtacctcaaatcgtttgtgggctgaggatagtactgagaaagaaaaggacagtgttcctacggcagtgaccattcctgttgctccaactgttgtaaatgctgcagcttctaccacaaccctgactacaactactgctggcactgtctcctccacaacagaggtcagggagagacgcagatcatacctcactcctgttagggatgaagagtctgaatcccaaagaaaagcaagatctagacaagcaagacaatctagaagatcaacacagggagtgacattaactgatcttcaagaagctgagaaaacaataggaagaagtcgttctacccgaaccagagaacaagaaaatgaagaaaaagaaaaagaggaaaaagagaaacaagataaagagaaacaagaagaaaagaaggagtcagaaacatctagagaagatgaatataaacaaaagtactccagaacgtatgatgagacttaccagcgttataggccagtatcaacttcaagttcaaccactccatcctcttcactttctactatgagcagttcactgtatgcttcaagtcaactaaacaggccaaatagtcttgtaggcataacttctgcttactccagaggaataacaaaagaaaatgaaagagagggagaaaaaagagaagaggagaaagaaggagaagataaatcacaacctaaatcaatcagagaacgacgacgaccaagagagaaaagaagatctacaggagtttcattttggacacaagatagtgatgaaaatgaacaagaacaacaatcagacacagaagagggatccaataagaaagaaactcagacggattccatttctagatatgaaaccagttctacatcagctggtgatcgatatgattccttgctgggtcgctctggatcatacagttacttagaagaaagaaaaccttacagcagcaggctagaaaaggatgactcaactgactttaaaaagctttatgaacaaattctagctgaaaatgaaaagctgaaggcacagctacatgatacaaatatggaactaacagatcttaaattacagttggaaaaggccacccagagacaagaaagatttgctgatagatcactgttggaaatggaaaaaagggaacgaagagctctagaaagaagaatatctgaaatggaagaagagctcaaagtaagtaaactatgttacttatgagagagagtgctgtttatgtattaatgtttaaaatactattatagatatggtttacattaattgttctcaaagctgattacccaatttgtgaactgtctatatctggtgcttctctttcttcctgaatccaggttttagtgagccagaagagggtctaaaacccaaatcttaacacctagccccgccggctgctgtgggagcggcggccgtccctctcctggaggtcgtctcctggcatcctcggggccgcaggaaggaagaggaggcagcggccggagccctggtgggcggcctgaggtgagagcccgaccggcccctttgggaatatggcgaccggtggctaccggaccagcagcggcctcggcggcagcaccacagacttcctggaggagtggaaggcgaaacgcgagaagatgcgcgccaagcagaaccccccgggcccggcccccccgggagggggcagcagcgacgccgctgggaagccccccgcgggggctctgggcaccccggcggccgccgctgccaacgagctcaacaacaacctcccgggcggcgcgccggccgcacctgccgtccccggtcccgggggcgtgaactgcgcggtcggctccgccatgctgacgcgggcggcccccggcccgcggcggtcggaggacgagcccccagccgcctctgcctcggctgcaccgccgccccagcgtgacgaggaggagccggacggcgtcccagagaagggcaagagctcgggccccagtgccaggaaaggcaaggggcagatcgagaagaggaagctgcgggagaagcggcgctccaccggcgtggtcaacatccctgccgcagagtgcttagatgagtacgaagatgatgaagcagggcagaaagagcggaaacgagaagatgcaattacacaacagaacactatacagaatgaagctgtaaacttactagatccaggcagttcctatctgctacaggagccacctagaacagtttcaggcagatataaaagcacaaccagtgtctctgaagaagatgtctcaagtagatattctcgaacagatagaagtgggttccctagatataacagggatgcaaatgtttcaggtactctggtttcaagtagcacactggaaaagaaaattgaagatcttgaaaaggaagtagtaagagaaagacaagaaaacctaagacttgtgagactgatgcaagataaagaggaaatgattggaaaactcaaagaagaaattgatttattaaatagagacctagatgacatagaagatgaaaatgaacagctaaagcaggaaaataaaactcttttgaaagttgtgggtcagctgaccaggtagaggattcaagactcaatgtggaaaaaatattttaaactactgattgaatgttaatggtcaatgctagcacaatattcctatgctgcaatacattaaaataactaagcaagtatatttatttctagcaaacagatgtttgttttcaaaatacttctttttcattattggttttaaaaaagcattatccttttatctcacaaataagtaatatctttcagttattaaatgatagataatgcctttttggttttgtgtggtattcaactaatacatggtttaaagtcacagccgtttgaatatattttatcttggtagtacattttctcccttaggaatatacatagtctttgtttacatgagttcaaatacttttgggatgttaccttcacatgtcctattactgatgtgtgcaaccttttatgtgttgatgactcactcataaaggtttttgtctactgtcatttgttctttccacttattctaagcatttagagtaatagagtcatacttttttataacagcaaccttttaaaaggaaagctcttataaagtcactgtcatgttttagttgactaaatataaatttaagagaatacttgaattgtgctatagtaaataaaaatttactattttgtgtttgaatattgaaaaattgaatcactttaactcctgaaaaacatacaattgtaatttcaatgtaaaatttcttatgtaggtactacctttttttatcgttccaaggtttgctagtgaacacaggatattttaaaagttttttattcttcgggcctggaaagtgtacaaagtcagtgtaggagaaaaaaatccatatttttatattagcatgcacactaaaaaccaaaatattattcatacttaaaacattcatacaaaacaatatgtaagcagaaatagtactaaaatactttgcctaatttctaagttgaagaataacactgggacacagttttttcatatgagagaatattccgctatttcaaatttaagggattttcttcctaacattgaaattttaaaaacagagttacttctaaataattatacagattttttcttctattaaatattattatttagaattgtttttgtattacatattcatgttaagaaccccgtcttcccttaaaatacattaaaattatgacatttttgctttgtgattgaatttcaaatagcagtatggtatccttttatctagttaatatatgaaagtggcttgaatatagtcaaatccattttaggtactctactgactttttccttcacttgccaagcccttttattgttcactgttagaaaaatagagaaggtgagacagctgggggaaaatgtggagtaaatgataatcaaatgttgaattctaaaagtctctacatttacctaggttggctttctcccccagttcagaagtttccagcttggccaatcatcagaatcacttgaggaacttagaaagaactccctggctgtagctcctatgtaggtttaggttgagactctggattccacaatttttaaaggttaccatctgaggtttctgatcatagtctacttttgaagcagctgctgctgtttctttattccattgaacaccctggaattgacataattttatctatcagcatttctccccttttagtttatttaataattaacccggtctccagggcagttttcatatgaccatgtgtatattcactgctcacgaaaaagtttaatgttagattaccaaatttaatatagttacagaattactgcataagggcttcccttcttggagactcttacccagcatgggaacagtgatctgcccacatgacagggtggtatgccaggcatagttaactgcttttggttgtgaggtactcatcttcctttagttacccttagttatgtggcacacatgtccttattgcctagttcgtcatccacactttggatcttgtgaaaatgctgttagtatccaaccttaaaatatattagtatatgggtttttattaaaagaattactttgaattttctatttaattcatatgtaaataaaggaacatttcatttcacttaaaaaaattatatcagttattaggctgggtgcagtggctcatgcctgtaatcccagcactttgggaggccaaggcgggtggattaccagagttcgggagtttgagaccagcttgaccaacatggagaaaccccgtctctactaaaaatacaaaattagccaggtgtggtggcgcatgcctgtaatcctggctactcaggaggctgaggcaggagaatcgcttgaaaacccaggagacagaggttgcggtgagctgagattgcgccattgtactccagcctgggcaagaagagcgaaactctgtctccaaaaaaaaaaaaaaaaaaatttattaatacttttaaagactgagctgtttaagaattttttggggaacatttctagcagtgatttttttggcctttaatgatagcgtaaagacaggagccttacaacttaggcaaagcatttcacatgcagtccttcttccatctcaaaatatgtacttattttacatacagaattttacactaaccattgaaaaataaagtaggatctgctacagtttcacctgaaaatttataaaaagtgttgagattggtagaaggtagtttttaagtacatgtgcactaccctaaaagacttgtctattgtcaataaagtgttagtatttgtgaaattattattcctgttcagaaatactatttcttaaatctcctgggaatttgtggcataataaagcacattcaaagttctaatgtatttatgagctcattttcaaaatagtaagtttgtcatctttaaaatgaacatgacttgcctccttgatttctgaaatgaattaattgaagattgctatagtaatctttatttcatctttctagagttgttgacaattttattatacaacagttaccattagagaaggagggaagggctttgggtgtgtatttataggtactaagggatttactaaatatagtagattagcactgtcacacttgttcaagtagtttcaaacatagaaaattaagtatcaggtatgtggagcaatgtagtttttttttttcttcagtttaaaaaatttttaattgtggtagaagcaatgtattcttaaggtgaaaaacctacctcggttacatgtggtttgtgttttttggattaatctggattttataattagaaataaaaatgtaagattttgaatccaaaaaaaaaaaaaaaaaaaaaaaaaaaaaaaaaaaaaaaaaactgcaaaattgtgtttctcccggggggcccgggggtgtgcgcgggcgttgggccccggaagcgtatggaacacgcattgcgtttcccgggggcgaagcggctgtgcgaacgatagagagcgaggaaaaacacattttggcccggctgggtttagggagtccagcttgaactcggagaggacacacacagctgtggaaccacggaagaaggccatgaggaggagattaggggcgcacaggaggcgacaggaccatataccccggatgcaccagcgtctggtggaggatcgaccaccccggaagagggggcattagcagaggccctaagaacacgagagacggatcacggacgaattaaaagcctccggcgcgacccggaggaggtggcaaaaatgcccccacaaaggagggtgccacatccggcccggacctggaaaatatcccctcacaccg

SEQ ID NO: 355759 - DNA, 5474 bp, Homo sapiens
gtgcgtgggagaaactttgcagggtggggacccggcggctgctggccggtagtgactggtgggcgcgctcgaggactccaaggggcgcagcccgggggcagacccttgggtcgggcggggatcttacgcttcccttacccgcccccttttgtctttcacctcagccccgccggctgctgtgggagcggcggccgtccctctcctggaggtcgtctcctggcatcctcggggccgcaggaaggaagaggaggcagcggccggagccctggtgggcggcctgaggtgagagcccgaccggcccctttgggaatatggcgaccggtggctaccggaccagcagcggcctcggcggcagcaccacagacttcctggaggagtggaaggcgaaacgcgagaagatgcgcgccaagcagaaccccccgggcccggcccccccgggagggggcagcagcgacgccgctgggaagccccccgcgggggctctgggcaccccggcggccgccgctgccaacgagctcaacaacaacctcccgggcggcgcgccggccgcacctgccgtccccggtcccgggggcgtgaactgcgcggtcggctccgccatgctgacgcgggcggcccccggcccgcggcggtcggaggacgagcccccagccgcctctgcctcggctgcaccgccgccccagcgtgacgaggaggagccggacggcgtcccagagaagggcaagagctcgggccccagtgccaggaaaggcaaggggcagatcgagaagaggaagctgcgggagaagcggcgctccaccggcgtggtcaacatccctgccgcagagtgcttagatgagtacgaagatgatgaagcagggcagaaagagcggaaacgagaagatgcaattacacaacagaacactatacagaatgaagctgtaaacttactagatccaggcagttcctatctgctacaggagccacctagaacagtttcaggcagatataaaagcacaaccagtgtctctgaagaagatgtctcaagtagatattctcgaacagatagaagtgggttccctagatataacagggatgcaaatgtttcaggtactctggtttcaagtagcacactggaaaagaaaattgaagatcttgaaaaggaagtagtaagagaaagacaagaaaacctaagacttgtgagactgatgcaagataaagaggaaatgattggaaaactcaaagaagaaattgatttattaaatagagacctagatgacatagaagatgaaaatgaacagctaaagcaggaaaataaaactcttttgaaagttgtgggtcagctgaccaggtagaggattcaagactcaatgtggaaaaaatattttaaactactgattgaatgttaatggtcaatgctagcacaatattcctatgctgcaatacattaaaataactaagcaagtatatttatttctagcaaacagatgtttgttttcaaaatacttctttttcattattggttttaaaaaagcattatccttttatctcacaaataagtaatatctttcagttattaaatgatagataatgcctttttggttttgtgtggtattcaactaatacatggtttaaagtcacagccgtttgaatatattttatcttggtagtacattttctcccttaggaatatacatagtctttgtttacatgagttcaaatacttttgggatgttaccttcacatgtcctattactgatgtgtgcaaccttttatgtgttgatgactcactcataaaggtttttgtctactgtcatttgttctttccacttattctaagcatttagagtaatagagtcatacttttttataacagcaaccttttaaaaggaaagctcttataaagtcactgtcatgttttagttgactaaatataaatttaagagaatacttgaattgtgctatagtaaataaaaatttactattttgtgtttgaatattgaaaaattgaatcactttaactcctgaaaaacatacaattgtaatttcaatgtaaaatttcttatgtaggtactacctttttttatcgttccaaggtttgctagtgaacacaggatattttaaaagttttttattcttcgggcctggaaagtgtacaaagtcagtgtaggagaaaaaaatccatatttttatattagcatgcacactaaaaaccaaaatattattcatacttaaaacattcatacaaaacaatatgtaagcagaaatagtactaaaatactttgcctaatttctaagttgaagaataacactgggacacagttttttcatatgagagaatattccgctatttcaaatttaagggattttcttcctaacattgaaattttaaaaacagagttacttctaaataattatacagattttttcttctattaaatattattatttagaattgtttttgtattacatattcatgttaagaaccccgtcttcccttaaaatacattaaaattatgacatttttgctttgtgattgaatttcaaatagcagtatggtatccttttatctagttaatatatgaaagtggcttgaatatagtcaaatccattttaggtactctactgactttttccttcacttgccaagcccttttattgttcactgttagaaaaatagagaaggtgagacagctgggggaaaatgtggagtaaatgataatcaaatgttgaattctaaaagtctctacatttacctaggttggctttctcccccagttcagaagtttccagcttggccaatcatcagaatcacttgaggaacttagaaagaactccctggctgtagctcctatgtaggtttaggttgagactctggattccacaatttttaaaggttaccatctgaggtttctgatcatagtctacttttgaagcagctgctgctgtttctttattccattgaacaccctggaattgacataattttatctatcagcatttctccccttttagtttatttaataattaacccggtctccagggcagttttcatatgaccatgtgtatattcactgctcacgaaaaagtttaatgttagattaccaaatttaatatagttacagaattactgcataagggcttcccttcttggagactcttacccagcatgggaacagtgatctgcccacatgacagggtggtatgccaggcatagttaactgcttttggttgtgaggtactcatcttcctttagttacccttagttatgtggcacacatgtccttattgcctagttcgtcatccacactttggatcttgtgaaaatgctgttagtatccaaccttaaaatatattagtatatgggtttttattaaaagaattactttgaattttctatttaattcatatgtaaataaaggaacatttcatttcacttaaaaaaattatatcagttattaggctgggtgcagtggctcatgcctgtaatcccagcactttgggaggccaaggcgggtggattaccagagttcgggagtttgagaccagcttgaccaacatggagaaaccccgtctctactaaaaatacaaaattagccaggtgtggtggcgcatgcctgtaatcctggctactcaggaggctgaggcaggagaatcgcttgaaaacccaggagacagaggttgcggtgagctgagattgcgccattgtactccagcctgggcaagaagagcgaaactctgtctccaaaaaaaaaaaaaaaaaaatttattaatacttttaaagactgagctgtttaagaattttttggggaacatttctagcagtgatttttttggcctttaatgatagcgtaaagacaggagccttacaacttaggcaaagcatttcacatgcagtccttcttccatctcaaaatatgtacttattttacatacagaattttacactaaccattgaaaaataaagtaggatctgctacagtttcacctgaaaatttataaaaagtgttgagattggtagaaggtagtttttaagtacatgtgcactaccctaaaagacttgtctattgtcaataaagtgttagtatttgtgaaattattattcctgttcagaaatactatttcttaaatctcctgggaatttgtggcataataaagcacattcaaagttctaatgtatttatgagctcattttcaaaatagtaagtttgtcatctttaaaatgaacatgacttgcctccttgatttctgaaatgaattaattgaagattgctatagtaatctttatttcatctttctagagttgttgacaattttattatacaacagttaccattagagaaggagggaagggctttgggtgtgtatttataggtactaagggatttactaaatatagtagattagcactgtcacacttgttcaagtagtttcaaacatagaaaattaagtatcaggtatgtggagcaatgtagtttttttttttcttcagtttaaaaaatttttaattgtggtagaagcaatgtattcttaaggtgaaaaacctacctcggttacatgtggtttgtgttttttggattaatctggattttataattagaaataaaaatgtaagattttgaatccaaaaaaaaaaaaaaaaaaaaaaaaaaaaaaaaaaaaaaaaaaaaaaaaaagcgcaaaaccaagtacatagtgacgatggcttttatttggacaaatagcttttatattttcattaaaccatgcaaaaaatactacatctttctggcacataactgtctccttaaccactgaacagttcagccatttgaataaattgtacattgtaaagcttatagtagctgattgtattattgattgtattgtatactatattaaatgtgaatttgtaccccttcattttaaaaggtcattgtgttctactgcctattttagattactttggggttggggaagggtgttttggtaagcaggattttaagtcctctctctctcgattggttttatgaagatataaggttatgctcttactaccaagctcaggattcttgattttaaaggtacaaggatagttgtgggagttttatttttggttatatttgaactgtatgaatggtaggtctgaatattgagaatttccatggtcttatgtggaggtaaaatatacagataactgatcagtttgagtgactgcaacatgttctggttgcacaacagttaggcatgctatggtttatatttgtgaagtttggatgcctgtgaagaatgattaaatacatgtttctaatattttagtgttttgtatttaggttatttattctttgtatctaaaactgaacagctactgtgctatattgattttattggtagtattgagcagaccttgtttctgcatgaaactagttgcaaaacccactattttggaaataaaaatgtattttgacatatacaaataaaatgaataaaactattttaaatgtgaaaaaaaaaaa

SEQ ID NO: 355760 - DNA, 6304 bp, Homo sapiens
ggtgcttttccatcccttaaagccaagcttatatatcaggatttcatcagctttgagctggtcagatagtacaggaagtggaaaaaatgaaaggcctgagctcaccagcagaagaaagctgtacagctagaatttcttataagtgaaagtggatgtgaaccaattgtggagcatggatgattggaaaagaaacctagagtgtgagccaagaccaagatagctgtgggagaagataaaaaggccagtttactggtctggctgcatggatacagagtcattcaacctgctgatgaatatatttcaatcaaggtcctggaatctgaccattctgattagccactcctgatggtgtaggaaaggaaagaatttgagcttcagaaggaaagctacagtttttttttgtttttcttccacatactcactcaccctcacgcccagctaaactatgaaagttcctggggaaaagtgatagagaacataaaatgagagctctggttaccattctatttctaaacattcattgcactctttattattttaatacaaatcctgttttctctttgctttactcacgaacctgtgttttactccacttgaatattgtgatttaatacctattaaaagagaattactgtggtcacccctgaacttttttgcacttatctcttttataatttcttactttgttgcagagacaagaaagatttgctgatagatcactgttggaaatggaaaaaagggaacgaagagctctagaaagaagaatatctgaaatggaagaagagctcaaagtaagtaaactatgttacttatgagagagagtgctgtttatgtattaatgtttaaaatactattatagatatggtttacattaattgttctcaaagctgattacccaatttgtgaactgtctatatctggtgcttctctttcttcctgaatccaggttttagtgagccagaagagggtctaaaacccaaatcttaacacctagccccgccggctgctgtgggagcggcggccgtccctctcctggaggtcgtctcctggcatcctcggggccgcaggaaggaagaggaggcagcggccggagccctggtgggcggcctgaggtgagagcccgaccggcccctttgggaatatggcgaccggtggctaccggaccagcagcggcctcggcggcagcaccacagacttcctggaggagtggaaggcgaaacgcgagaagatgcgcgccaagcagaaccccccgggcccggcccccccgggagggggcagcagcgacgccgctgggaagccccccgcgggggctctgggcaccccggcggccgccgctgccaacgagctcaacaacaacctcccgggcggcgcgccggccgcacctgccgtccccggtcccgggggcgtgaactgcgcggtcggctccgccatgctgacgcgggcggcccccggcccgcggcggtcggaggacgagcccccagccgcctctgcctcggctgcaccgccgccccagcgtgacgaggaggagccggacggcgtcccagagaagggcaagagctcgggccccagtgccaggaaaggcaaggggcagatcgagaagaggaagctgcgggagaagcggcgctccaccggcgtggtcaacatccctgccgcagagtgcttagatgagtacgaagatgatgaagcagggcagaaagagcggaaacgagaagatgcaattacacaacagaacactatacagaatgaagctgtaaacttactagatccaggcagttcctatctgctacaggagccacctagaacagtttcaggcagatataaaagcacaaccagtgtctctgaagaagatgtctcaagtagatattctcgaacagatagaagtgggttccctagatataacagggatgcaaatgtttcaggtactctggtttcaagtagcacactggaaaagaaaattgaagatcttgaaaaggaagtagtaagagaaagacaagaaaacctaagacttgtgagactgatgcaagataaagaggaaatgattggaaaactcaaagaagaaattgatttattaaatagagacctagatgacatagaagatgaaaatgaacagctaaagcaggaaaataaaactcttttgaaagttgtgggtcagctgaccaggtagaggattcaagactcaatgtggaaaaaatattttaaactactgattgaatgttaatggtcaatgctagcacaatattcctatgctgcaatacattaaaataactaagcaagtatatttatttctagcaaacagatgtttgttttcaaaatacttctttttcattattggttttaaaaaagcattatccttttatctcacaaataagtaatatctttcagttattaaatgatagataatgcctttttggttttgtgtggtattcaactaatacatggtttaaagtcacagccgtttgaatatattttatcttggtagtacattttctcccttaggaatatacatagtctttgtttacatgagttcaaatacttttgggatgttaccttcacatgtcctattactgatgtgtgcaaccttttatgtgttgatgactcactcataaaggtttttgtctactgtcatttgttctttccacttattctaagcatttagagtaatagagtcatacttttttataacagcaaccttttaaaaggaaagctcttataaagtcactgtcatgttttagttgactaaatataaatttaagagaatacttgaattgtgctatagtaaataaaaatttactattttgtgtttgaatattgaaaaattgaatcactttaactcctgaaaaacatacaattgtaatttcaatgtaaaatttcttatgtaggtactacctttttttatcgttccaaggtttgctagtgaacacaggatattttaaaagttttttattcttcgggcctggaaagtgtacaaagtcagtgtaggagaaaaaaatccatatttttatattagcatgcacactaaaaaccaaaatattattcatacttaaaacattcatacaaaacaatatgtaagcagaaatagtactaaaatactttgcctaatttctaagttgaagaataacactgggacacagttttttcatatgagagaatattccgctatttcaaatttaagggattttcttcctaacattgaaattttaaaaacagagttacttctaaataattatacagattttttcttctattaaatattattatttagaattgtttttgtattacatattcatgttaagaaccccgtcttcccttaaaatacattaaaattatgacatttttgctttgtgattgaatttcaaatagcagtatggtatccttttatctagttaatatatgaaagtggcttgaatatagtcaaatccattttaggtactctactgactttttccttcacttgccaagcccttttattgttcactgttagaaaaatagagaaggtgagacagctgggggaaaatgtggagtaaatgataatcaaatgttgaattctaaaagtctctacatttacctaggttggctttctcccccagttcagaagtttccagcttggccaatcatcagaatcacttgaggaacttagaaagaactccctggctgtagctcctatgtaggtttaggttgagactctggattccacaatttttaaaggttaccatctgaggtttctgatcatagtctacttttgaagcagctgctgctgtttctttattccattgaacaccctggaattgacataattttatctatcagcatttctccccttttagtttatttaataattaacccggtctccagggcagttttcatatgaccatgtgtatattcactgctcacgaaaaagtttaatgttagattaccaaatttaatatagttacagaattactgcataagggcttcccttcttggagactcttacccagcatgggaacagtgatctgcccacatgacagggtggtatgccaggcatagttaactgcttttggttgtgaggtactcatcttcctttagttacccttagttatgtggcacacatgtccttattgcctagttcgtcatccacactttggatcttgtgaaaatgctgttagtatccaaccttaaaatatattagtatatgggtttttattaaaagaattactttgaattttctatttaattcatatgtaaataaaggaacatttcatttcacttaaaaaaattatatcagttattaggctgggtgcagtggctcatgcctgtaatcccagcactttgggaggccaaggcgggtggattaccagagttcgggagtttgagaccagcttgaccaacatggagaaaccccgtctctactaaaaatacaaaattagccaggtgtggtggcgcatgcctgtaatcctggctactcaggaggctgaggcaggagaatcgcttgaaaacccaggagacagaggttgcggtgagctgagattgcgccattgtactccagcctgggcaagaagagcgaaactctgtctccaaaaaaaaaaaaaaaaaaatttattaatacttttaaagactgagctgtttaagaattttttggggaacatttctagcagtgatttttttggcctttaatgatagcgtaaagacaggagccttacaacttaggcaaagcatttcacatgcagtccttcttccatctcaaaatatgtacttattttacatacagaattttacactaaccattgaaaaataaagtaggatctgctacagtttcacctgaaaatttataaaaagtgttgagattggtagaaggtagtttttaagtacatgtgcactaccctaaaagacttgtctattgtcaataaagtgttagtatttgtgaaattattattcctgttcagaaatactatttcttaaatctcctgggaatttgtggcataataaagcacattcaaagttctaatgtatttatgagctcattttcaaaatagtaagtttgtcatctttaaaatgaacatgacttgcctccttgatttctgaaatgaattaattgaagattgctatagtaatctttatttcatctttctagagttgttgacaattttattatacaacagttaccattagagaaggagggaagggctttgggtgtgtatttataggtactaagggatttactaaatatagtagattagcactgtcacacttgttcaagtagtttcaaacatagaaaattaagtatcaggtatgtggagcaatgtagtttttttttttcttcagtttaaaaaatttttaattgtggtagaagcaatgtattcttaaggtgaaaaacctacctcggttacatgtggtttgtgttttttggattaatctggattttataattagaaataaaaatgtaagattttgaatccaaaaaaaaaaaaaaaaaaaaaaaaaaaaaaaaaaaaaaaaaaaaaaaaaagcgcaaaaccaagtacatagtgacgatggcttttatttggacaaatagcttttatattttcattaaaccatgcaaaaaatactacatctttctggcacataactgtctccttaaccactgaacagttcagccatttgaataaattgtacattgtaaagcttatagtagctgattgtattattgattgtattgtatactatattaaatgtgaatttgtaccccttcattttaaaaggtcattgtgttctactgcctattttagattactttggggttggggaagggtgttttggtaagcaggattttaagtcctctctctctcgattggttttatgaagatataaggttatgctcttactaccaagctcaggattcttgattttaaaggtacaaggatagttgtgggagttttatttttggttatatttgaactgtatgaatggtaggtctgaatattgagaatttccatggtcttatgtggaggtaaaatatacagataactgatcagtttgagtgactgcaacatgttctggttgcacaacagttaggcatgctatggtttatatttgtgaagtttggatgcctgtgaagaatgattaaatacatgtttctaatattttagtgttttgtatttaggttatttattctttgtatctaaaactgaacagctactgtgctatattgattttattggtagtattgagcagaccttgtttctgcatgaaactagttgcaaaacccactattttggaaataaaaatgtattttgacatatacaaataaaatgaataaaactattttaaatgtgaaaaaaaaaaa

SEQ ID NO: 355761 - DNA, 5336 bp, Homo sapiens
gcgatcgtcggggtccgtactgtaagccccgccggctgctgtgggagcggcggccgtccctctcctggaggtcgtctcctggcatcctcggggccgcaggaaggaagaggaggcagcggccggagccctggtgggcggcctgaggtgagagcccgaccggcccctttgggaatatggcgaccggtggctaccggaccagcagcggcctcggcggcagcaccacagacttcctggaggagtggaaggcgaaacgcgagaagatgcgcgccaagcagaaccccccgggcccggcccccccgggagggggcagcagcgacgccgctgggaagccccccgcgggggctctgggcaccccggcggccgccgctgccaacgagctcaacaacaacctcccgggcggcgcgccggccgcacctgccgtccccggtcccgggggcgtgaactgcgcggtcggctccgccatgctgacgcgggcggcccccggcccgcggcggtcggaggacgagcccccagccgcctctgcctcggctgcaccgccgccccagcgtgacgaggaggagccggacggcgtcccagagaagggcaagagctcgggccccagtgccaggaaaggcaaggggcagatcgagaagaggaagctgcgggagaagcggcgctccaccggcgtggtcaacatccctgccgcagagtgcttagatgagtacgaagatgatgaagcagggcagaaagagcggaaacgagaagatgcaattacacaacagaacactatacagaatgaagctgtaaacttactagatccaggcagttcctatctgctacaggagccacctagaacagtttcaggcagatataaaagcacaaccagtgtctctgaagaagatgtctcaagtagatattctcgaacagatagaagtgggttccctagatataacagggatgcaaatgtttcaggtactctggtttcaagtagcacactggaaaagaaaattgaagatcttgaaaaggaagtagtaagagaaagacaagaaaacctaagacttgtgagactgatgcaagataaagaggaaatgattggaaaactcaaagaagaaattgatttattaaatagagacctagatgacatagaagatgaaaatgaacagctaaagcaggaaaataaaactcttttgaaagttgtgggtcagctgaccaggtagaggattcaagactcaatgtggaaaaaatattttaaactactgattgaatgttaatggtcaatgctagcacaatattcctatgctgcaatacattaaaataactaagcaagtatatttatttctagcaaacagatgtttgttttcaaaatacttctttttcattattggttttaaaaaagcattatccttttatctcacaaataagtaatatctttcagttattaaatgatagataatgcctttttggttttgtgtggtattcaactaatacatggtttaaagtcacagccgtttgaatatattttatcttggtagtacattttctcccttaggaatatacatagtctttgtttacatgagttcaaatacttttgggatgttaccttcacatgtcctattactgatgtgtgcaaccttttatgtgttgatgactcactcataaaggtttttgtctactgtcatttgttctttccacttattctaagcatttagagtaatagagtcatacttttttataacagcaaccttttaaaaggaaagctcttataaagtcactgtcatgttttagttgactaaatataaatttaagagaatacttgaattgtgctatagtaaataaaaatttactattttgtgtttgaatattgaaaaattgaatcactttaactcctgaaaaacatacaattgtaatttcaatgtaaaatttcttatgtaggtactacctttttttatcgttccaaggtttgctagtgaacacaggatattttaaaagttttttattcttcgggcctggaaagtgtacaaagtcagtgtaggagaaaaaaatccatatttttatattagcatgcacactaaaaaccaaaatattattcatacttaaaacattcatacaaaacaatatgtaagcagaaatagtactaaaatactttgcctaatttctaagttgaagaataacactgggacacagttttttcatatgagagaatattccgctatttcaaatttaagggattttcttcctaacattgaaattttaaaaacagagttacttctaaataattatacagattttttcttctattaaatattattatttagaattgtttttgtattacatattcatgttaagaaccccgtcttcccttaaaatacattaaaattatgacatttttgctttgtgattgaatttcaaatagcagtatggtatccttttatctagttaatatatgaaagtggcttgaatatagtcaaatccattttaggtactctactgactttttccttcacttgccaagcccttttattgttcactgttagaaaaatagagaaggtgagacagctgggggaaaatgtggagtaaatgataatcaaatgttgaattctaaaagtctctacatttacctaggttggctttctcccccagttcagaagtttccagcttggccaatcatcagaatcacttgaggaacttagaaagaactccctggctgtagctcctatgtaggtttaggttgagactctggattccacaatttttaaaggttaccatctgaggtttctgatcatagtctacttttgaagcagctgctgctgtttctttattccattgaacaccctggaattgacataattttatctatcagcatttctccccttttagtttatttaataattaacccggtctccagggcagttttcatatgaccatgtgtatattcactgctcacgaaaaagtttaatgttagattaccaaatttaatatagttacagaattactgcataagggcttcccttcttggagactcttacccagcatgggaacagtgatctgcccacatgacagggtggtatgccaggcatagttaactgcttttggttgtgaggtactcatcttcctttagttacccttagttatgtggcacacatgtccttattgcctagttcgtcatccacactttggatcttgtgaaaatgctgttagtatccaaccttaaaatatattagtatatgggtttttattaaaagaattactttgaattttctatttaattcatatgtaaataaaggaacatttcatttcacttaaaaaaattatatcagttattaggctgggtgcagtggctcatgcctgtaatcccagcactttgggaggccaaggcgggtggattaccagagttcgggagtttgagaccagcttgaccaacatggagaaaccccgtctctactaaaaatacaaaattagccaggtgtggtggcgcatgcctgtaatcctggctactcaggaggctgaggcaggagaatcgcttgaaaacccaggagacagaggttgcggtgagctgagattgcgccattgtactccagcctgggcaagaagagcgaaactctgtctccaaaaaaaaaaaaaaaaaaatttattaatacttttaaagactgagctgtttaagaattttttggggaacatttctagcagtgatttttttggcctttaatgatagcgtaaagacaggagccttacaacttaggcaaagcatttcacatgcagtccttcttccatctcaaaatatgtacttattttacatacagaattttacactaaccattgaaaaataaagtaggatctgctacagtttcacctgaaaatttataaaaagtgttgagattggtagaaggtagtttttaagtacatgtgcactaccctaaaagacttgtctattgtcaataaagtgttagtatttgtgaaattattattcctgttcagaaatactatttcttaaatctcctgggaatttgtggcataataaagcacattcaaagttctaatgtatttatgagctcattttcaaaatagtaagtttgtcatctttaaaatgaacatgacttgcctccttgatttctgaaatgaattaattgaagattgctatagtaatctttatttcatctttctagagttgttgacaattttattatacaacagttaccattagagaaggagggaagggctttgggtgtgtatttataggtactaagggatttactaaatatagtagattagcactgtcacacttgttcaagtagtttcaaacatagaaaattaagtatcaggtatgtggagcaatgtagtttttttttttcttcagtttaaaaaatttttaattgtggtagaagcaatgtattcttaaggtgaaaaacctacctcggttacatgtggtttgtgttttttggattaatctggattttataattagaaataaaaatgtaagattttgaatccaaaaaaaaaaaaaaaaaaaaaaaaaaaaaaaaaaaaaaaaaaaaaaaaaagcgcaaaaccaagtacatagtgacgatggcttttatttggacaaatagcttttatattttcattaaaccatgcaaaaaatactacatctttctggcacataactgtctccttaaccactgaacagttcagccatttgaataaattgtacattgtaaagcttatagtagctgattgtattattgattgtattgtatactatattaaatgtgaatttgtaccccttcattttaaaaggtcattgtgttctactgcctattttagattactttggggttggggaagggtgttttggtaagcaggattttaagtcctctctctctcgattggttttatgaagatataaggttatgctcttactaccaagctcaggattcttgattttaaaggtacaaggatagttgtgggagttttatttttggttatatttgaactgtatgaatggtaggtctgaatattgagaatttccatggtcttatgtggaggtaaaatatacagataactgatcagtttgagtgactgcaacatgttctggttgcacaacagttaggcatgctatggtttatatttgtgaagtttggatgcctgtgaagaatgattaaatacatgtttctaatattttagtgttttgtatttaggttatttattctttgtatctaaaactgaacagctactgtgctatattgattttattggtagtattgagcagaccttgtttctgcatgaaactagttgcaaaacccactattttggaaataaaaatgtattttgacatatacaaataaaatgaataaaactattttaaatgtgaaaaaaaaaaa

SEQ ID NO: 355762 - DNA, 5008 bp, Homo sapiens
tgacgggtggccgtgctgggggcgggagggcttctgtggtaggaagggaggtccgctcggccgggtgcgccgccccagtgctctgtgggatactggaagtctcgagcgtcggctccgggttcccagccctcctctggcccgcactcatagaaacattcacacaccccctgcctcccctctcttccctctccgcctcccccttccccccctcgcgataagaagacccggcggcaggagaggggatgaagatggcggacgcgaagcagaagcggaacgagcagctgaaacgctggatcggctccgagacggacctcgagcctccggtggtgaagcgccagaagaccaaggtgaagttcgacgatggcgccgtcttcctggctgcttgctccagcggcgacacggacgaggtcctcaagctgctgcaccgcggcgccgacatcaattacgccaatgtggacggactcactgccctgcaccaggcttgcattgatgacaatgttgatatggtgaagtttctggtagaaaatggagcaaatattaatcaacctgataatgaaggctggataccactacatgcagcagcttcctgtggatatcttgatattgcagagtttttgattggtcaaggagcacatgtaggggctgtcaacagtgaaggagatacacctttagatattgcggaggaggaggcaatggaagagctacttcaaaatgaagttaatcggcaaggggttgatatagaagcagctcgaaaggaagaagaacggatcatgcttagagatgccaggcagtggctaaatagtggtcatataaatgatgtccggcatgcaaaatctggaggtacagcacttcacgttgcagctgctaaaggctatacggaagttttaaaacttttaatacaggcaggctatgatgttaatattaaagactatgatggctggacacctcttcatgctgcagctcattggggtaaagaagaagcatgtcgaattttagtggacaatctgtgtgatatggagatggtcaacaaagtgggccaaacagcctttgatgtagcagatgaagacattttaggatatttagaagagttgcaaaagaaacaaaatctgctccatagtgaaaaacgggacaagaaatctccactaattgaatcaacagcaaatatggacaataatcagtcacagaagacctttaaaaacaaagagacgttgattattgaaccagagaaaaatgcatcccgtattgaatctctggaacaagaaaaggttgatgaagaagaagaaggaaagaaggatgagtctagctgctctagtgaagaagatgaggaagatgactcggaatcagaagctgaaacagataagacaaaacccctggcttctgtaactaatgccaacacttctagtacacaagcagctcctgtagctgttacaacacctactgtgtcatcaggtcaagcaacacctacatcacctattaaaaagtttccaaccacagctacaaaaatttctcccaaagaagaagagagaaaagatgagtctcctgcaacttggaggttaggacttagaaagacgggcagctatggtgcacttgctgaaatcacagcatctaaagagggtcagaaagaaaaagatactgcaggtgttacacgttcagcttcaagtcccagactttcctcctctttggataataaagaaaaggagaaagatagtaaaggaactaggcttgcatatgttgcacctacaataccaagacgactagccagtacatctgacattgaagagaaagaaaacagagattcttcaagtttgcgaacaagtagttcatatacaaggagaaaatgggaagatgatcttaaaaaaaatagctcagttaatgaaggatcaacgtatcataaaagttgctcctttggtagaagacaagatgatttgattagttctagtgttccaagcaccacatcaacaccaacagttacctctgcagctgggcttcagaaaagcctgctttccagcacaagcactactacaaagattacaacgggttcttcctcagcaggcacacaaagcagtacctcaaatcgtttgtgggctgaggatagtactgagaaagaaaaggacagtgttcctacggcagtgaccattcctgttgctccaactgttgtaaatgctgcagcttctaccacaaccctgactacaactactgctggcactgtctcctccacaacagaggtcagggagagacgcagatcatacctcactcctgttagggatgaagagtctgaatcccaaagaaaagcaagatctagacaagcaagacaatctagaagatcaacacagggagtgacattaactgatcttcaagaagctgagaaaacaataggaagaagtcgttctacccgaaccagagaacaagaaaatgaagaaaaagaaaaagaggaaaaagagaaacaagataaagagaaacaagaagaaaagaaggagtcagaaacatctagagaagatgaatataaacaaaagtactccagaacgtatgatgagacttaccagcgttataggccagtatcaacttcaagttcaaccactccatcctcttcactttctactatgagcagttcactgtatgcttcaagtcaactaaacaggccaaatagtcttgtaggcataacttctgcttactccagaggaataacaaaagaaaatgaaagagagggagaaaaaagagaagaggagaaagaaggagaagataaatcacaacctaaatcaatcagagaacgacgacgaccaagagagaaaagaagatctacaggagtttcattttggacacaagatagtgatgaaaatgaacaagaacaacaatcagacacagaagagggatccaataagaaagaaactcagacggattccatttctagatatgaaaccagttctacatcagctggtgatcgatatgattccttgctgggtcgctctggatcatacagttacttagaagaaagaaaaccttacagcagcaggctagaaaaggatgactcaactgactttaaaaagctttatgaacaaattctagctgaaaatgaaaagctgaaggcacagctacatgatacaaatatggaactaacagatcttaaattacagttggaaaaggccacccagagacaagaaagatttgctgatagatcactgttggaaatggaaaaaagggaacgaagagctctagaaagaagaatatctgaaatggaagaagagctcaaagtaagtaaactatgttacttatgagagagagtgctgtttatgtattaatgtttaaaatactattatagatatggtttacattaattgttctcaaagctgattacccaatttgtgaactgtctatatctggtgcttctctttcttcctgaatccaggttttagtgagccagaagagggtctaaaacccaaatcttaacacctagccccgccggctgctgtgggagcggcggccgtccctctcctggaggtcgtctcctggcatcctcggggccgcaggaaggaagaggaggcagcggccggagccctggtgggcggcctgaggtgagagcccgaccggcccctttgggaatatggcgaccggtggctaccggaccagcagcggcctcggcggcagcaccacagacttcctggaggagtggaaggcgaaacgcgagaagatgcgcgccaagcagaaccccccgggcccggcccccccgggagggggcagcagcgacgccgctgggaagccccccgcgggggctctgggcaccccggcggccgccgctgccaacgagctcaacaacaacctcccgggcggcgcgccggccgcacctgccgtccccggtcccgggggcgtgaactgcgcggtcggctccgccatgctgacgcgggcggcccccggcccgcggcggtcggaggacgagcccccagccgcctctgcctcggctgcaccgccgccccagcgtgacgaggaggagccggacggcgtcccagagaagggcaagagctcgggccccagtgccaggaaaggcaaggggcagatcgagaagaggaagctgcgggagaagcggcgctccaccggcgtggtcaacatccctgccgcagagtgcttagatgagtacgaagatgatgaagcagggcagaaagagcggaaacgagaagatgcaattacacaacagaacactatacagaatgaagctgtaaacttactagatccaggcagttcctatctgctacaggagccacctagaacagtttcaggcagatataaaagcacaaccagtgtctctgaagaagatgtctcaagtagatattctcgaacagatagaagtgggttccctagatataacagggatgcaaatgtttcaggtactctggtttcaagtagcacactggaaaagaaaattgaagatcttgaaaaggaagtagtaagagaaagacaagaaaacctaagacttgtgagactgatgcaagataaagaggaaatgattggaaaactcaaagaagaaattgatttattaaatagagacctagatgacatagaagatgaaaatgaacagctaaagcaggaaaataaaactcttttgaaagttgtgggtcagctgaccagctcctgatctttgttggttatgttgcaaaagattgtatcaggagaagcctcagcatggacattggcatcctgacataacccccattaatttagtattctttctgaaactcaaatggattctcaagtccaagagactatggaataaaatcattgtttgtctgtgttaagttttatctctgttattgcctgaagacttttggtaacaataatgcgctttcatcaaacttttaagacttgattggaaaaaataaatgtatgtttcatcagttatacaatttgttttgtatgtgttttgtatgggtggtccctgaggagcctgaatcttcaaaatatactttctgtgagctcagaaaatgaatagcacttttgagctaattgatcagtgtggaga

SEQ ID NO: 355763 - DNA, 5009 bp, Homo sapiens
tgacgggtggccgtgctgggggcgggagggcttctgtggtaggaagggaggtccgctcggccgggtgcgccgccccagtgctctgtgggatactggaagtctcgagcgtcggctccgggttcccagccctcctctggcccgcactcatagaaacattcacacaccccctgcctcccctctcttccctctccgcctcccccttccccccctcgcgataagaagacccggcggcaggagaggggatgaagatggcggacgcgaagcagaagcggaacgagcagctgaaacgctggatcggctccgagacggacctcgagcctccggtggtgaagcgccagaagaccaaggtgaagttcgacgatggcgccgtcttcctggctgcttgctccagcggcgacacggacgaggtcctcaagctgctgcaccgcggcgccgacatcaattacgccaatgtggacggactcactgccctgcaccaggcttgcattgatgacaatgttgatatggtgaagtttctggtagaaaatggagcaaatattaatcaacctgataatgaaggctggataccactacatgcagcagcttcctgtggatatcttgatattgcagagtttttgattggtcaaggagcacatgtaggggctgtcaacagtgaaggagatacacctttagatattgcggaggaggaggcaatggaagagctacttcaaaatgaagttaatcggcaaggggttgatatagaagcagctcgaaaggaagaagaacggatcatgcttagagatgccaggcagtggctaaatagtggtcatataaatgatgtccggcatgcaaaatctggaggtacagcacttcacgttgcagctgctaaaggctatacggaagttttaaaacttttaatacaggcaggctatgatgttaatattaaagactatgatggctggacacctcttcatgctgcagctcattggggtaaagaagaagcatgtcgaattttagtggacaatctgtgtgatatggagatggtcaacaaagtgggccaaacagcctttgatgtagcagatgaagacattttaggatatttagaagagttgcaaaagaaacaaaatctgctccatagtgaaaaacgggacaagaaatctccactaattgaatcaacagcaaatatggacaataatcagtcacagaagacctttaaaaacaaagagacgttgattattgaaccagagaaaaatgcatcccgtattgaatctctggaacaagaaaaggttgatgaagaagaagaaggaaagaaggatgagtctagctgctctagtgaagaagatgaggaagatgactcggaatcagaagctgaaacagataagacaaaacccctggcttctgtaactaatgccaacacttctagtacacaagcagctcctgtagctgttacaacacctactgtgtcatcaggtcaagcaacacctacatcacctattaaaaagtttccaaccacagctacaaaaatttctcccaaagaagaagagagaaaagatgagtctcctgcaacttggaggttaggacttagaaagacgggcagctatggtgcacttgctgaaatcacagcatctaaagagggtcagaaagaaaaagatactgcaggtgttacacgttcagcttcaagtcccagactttcctcctctttggataataaagaaaaggagaaagatagtaaaggaactaggcttgcatatgttgcacctacaataccaagacgactagccagtacatctgacattgaagagaaagaaaacagagattcttcaagtttgcgaacaagtagttcatatacaaggagaaaatgggaagatgatcttaaaaaaaatagctcagttaatgaaggatcaacgtatcataaaagttgctcctttggtagaagacaagatgatttgattagttctagtgttccaagcaccacatcaacaccaacagttacctctgcagctgggcttcagaaaagcctgctttccagcacaagcactactacaaagattacaacgggttcttcctcagcaggcacacaaagcagtacctcaaatcgtttgtgggctgaggatagtactgagaaagaaaaggacagtgttcctacggcagtgaccattcctgttgctccaactgttgtaaatgctgcagcttctaccacaaccctgactacaactactgctggcactgtctcctccacaacagaggtcagggagagacgcagatcatacctcactcctgttagggatgaagagtctgaatcccaaagaaaagcaagatctagacaagcaagacaatctagaagatcaacacagggagtgacattaactgatcttcaagaagctgagaaaacaataggaagaagtcgttctacccgaaccagagaacaagaaaatgaagaaaaagaaaaagaggaaaaagagaaacaagataaagagaaacaagaagaaaagaaggagtcagaaacatctagagaagatgaatataaacaaaagtactccagaacgtatgatgagacttaccagcgttataggccagtatcaacttcaagttcaaccactccatcctcttcactttctactatgagcagttcactgtatgcttcaagtcaactaaacaggccaaatagtcttgtaggcataacttctgcttactccagaggaataacaaaagaaaatgaaagagagggagaaaaaagagaagaggagaaagaaggagaagataaatcacaacctaaatcaatcagagaacgacgacgaccaagagagaaaagaagatctacaggagtttcattttggacacaagatagtgatgaaaatgaacaagaacaacaatcagacacagaagagggatccaataagaaagaaactcagacggattccatttctagatatgaaaccagttctacatcagctggtgatcgatatgattccttgctgggtcgctctggatcatacagttacttagaagaaagaaaaccttacagcagcaggctagaaaaggatgactcaactgactttaaaaagctttatgaacaaattctagctgaaaatgaaaagctgaaggcacagctacatgatacaaatatggaactaacagatcttaaattacagttggaaaaggccacccagagacaagaaagatttgctgatagatcactgttggaaatggaaaaaagggaacgaagagctctagaaagaagaatatctgaaatggaagaagagctcaaagtaagtaaactatgttacttatgagagagagtgctgtttatgtattaatgtttaaaatactattatagatatggtttacattaattgttctcaaagctgattacccaatttgtgaactgtctatatctggtgcttctctttcttcctgaatccaggttttagtgagccagaagagggtctaaaacccaaatcttaacacctagccccgccggctgctgtgggagcggcggccgtccctctcctggaggtcgtctcctggcatcctcggggccgcaggaaggaagaggaggcagcggccggagccctggtgggcggcctgaggtgagagcccgaccggcccctttgggaatatggcgaccggtggctaccggaccagcagcggcctcggcggcagcaccacagacttcctggaggagtggaaggcgaaacgcgagaagatgcgcgccaagcagaaccccccgggcccggcccccccgggagggggcagcagcgacgccgctgggaagccccccgcgggggctctgggcaccccggcggccgccgctgccaacgagctcaacaacaacctcccgggcggcgcgccggccgcacctgccgtccccggtcccgggggcgtgaactgcgcggtcggctccgccatgctgacgcgggcggcccccggcccgcggcggtcggaggacgagcccccagccgcctctgcctcggctgcaccgccgccccagcgtgacgaggaggagccggacggcgtcccagagaagggcaagagctcgggccccagtgccaggaaaggcaaggggcagatcgagaagaggaagctgcgggagaagcggcgctccaccggcgtggtcaacatccctgccgcagagtgcttagatgagtacgaagatgatgaagcagggcagaaagagcggaaacgagaagatgcaattacacaacagaacactatacagaatgaagctgtaaacttactagatccaggcagttcctatctgctacaggagccacctagaacagtttcaggcagatataaaagcacaaccagtgtctctgaagaagatgtctcaagtagatattctcgaacagatagaagtgggttccctagatataacagggatgcaaatgtttcaggtactctggtttcaagtagcacactggaaaagaaaattgaagatcttgaaaaggaagtagtaagagaaagacaagaaaacctaagacttgtgagactgatgcaagataaagaggaaatgattggaaaactcaaagaagaaattgatttattaaatagaggacctagatgacatagaagatgaaaatgaacagctaaagcaggaaaataaaactcttttgaaagttgtgggtcagctgaccagctcctgatctttgttggttatgttgcaaaagattgtatcaggagaagcctcagcatggacattggcatcctgacataacccccattaatttagtattctttctgaaactcaaatggattctcaagtccaagagactatggaataaaatcattgtttgtctgtgttaagttttatctctgttattgcctgaagacttttggtaacaataatgcgctttcatcaaacttttaagacttgattggaaaaaataaatgtatgtttcatcagttatacaatttgttttgtatgtgttttgtatgggtggtccctgaggagcctgaatcttcaaaatatactttctgtgagctcagaaaatgaatagcacttttgagctaattgatcagtgtggaga

SEQ ID NO: 355764 - DNA, 3458 bp, Homo sapiens
tgacgggtggccgtgctgggggcgggagggcttctgtggtaggaagggaggtccgctcggccgggtgcgccgccccagtgctctgtgggatactggaagtctcgagcgtcggctccgggttcccagccctcctctggcccgcactcatagaaacattcacacaccccctgcctcccctctcttccctctccgcctcccccttccccccctcgcgataagaagacccggcggcaggagaggggatgaagatggcggacgcgaagcagaagcggaacgagcagctgaaacgctggatcggctccgagacggacctcgagcctccggtggtgaagcgccagaagaccaaggtgaagttcgacgatggcgccgtcttcctggctgcttgctccagcggcgacacggacgaggtcctcaagctgctgcaccgcggcgccgacatcaattacgccaatgtggacggactcactgccctgcaccaggcttgcattgatgacaatgttgatatggtgaagtttctggtagaaaatggagcaaatattaatcaacctgataatgaaggctggataccactacatgcagcagcttcctgtggatatcttgatattgcagagtttttgattggtcaaggagcacatgtaggggctgtcaacagtgaaggagatacacctttagatattgcggaggaggaggcaatggaagagctacttcaaaatgaagttaatcggcaaggggttgatatagaagcagctcgaaaggaagaagaacggatcatgcttagagatgccaggcagtggctaaatagtggtcatataaatgatgtccggcatgcaaaatctggaggtacagcacttcacgttgcagctgctaaaggctatacggaagttttaaaacttttaatacaggcaggctatgatgttaatattaaagactatgatggctggacacctcttcatgctgcagctcattggggtaaagaagaagcatgtcgaattttagtggacaatctgtgtgatatggagatggtcaacaaagtgggccaaacagcctttgatgtagcagatgaagacattttaggatatttagaagagttgcaaaagaaacaaaatctgctccatagtgaaaaacgggacaagaaatctccactaattgaatcaacagcaaatatggacaataatcagtcacagaagacctttaaaaacaaagagacgttgattattgaaccagagaaaaatgcatcccgtattgaatctctggaacaagaaaaggttgatgaagaagaagaaggaaagaaggatgagtctagctgctctagtgaagaagatgaggaagatgactcggaatcagaagctgaaacagataagacaaaacccctggcttctgtaactaatgccaacacttctagtacacaagcagctcctgtagctgttacaacacctactgtgtcatcaggtcaagcaacacctacatcacctattaaaaagtttccaaccacagctacaaaaatttctcccaaagaagaagagagaaaagatgagtctcctgcaacttggaggttaggacttagaaagacgggcagctatggtgcacttgctgaaatcacagcatctaaagagggtcagaaagaaaaagatactgcaggtgttacacgttcagcttcaagtcccagactttcctcctctttggataataaagaaaaggagaaagatagtaaaggaactaggcttgcatatgttgcacctacaataccaagacgactagccagtacatctgacattgaagagaaagaaaacagagattcttcaagtttgcgaacaagtagttcatatacaaggagaaaatgggaagatgatcttaaaaaaaatagctcagttaatgaaggatcaacgtatcataaaagttgctcctttggtagaagacaagatgatttgattagttctagtgttccaagcaccacatcaacaccaacagttacctctgcagctgggcttcagaaaagcctgctttccagcacaagcactactacaaagattacaacgggttcttcctcagcaggcacacaaagcagtacctcaaatcgtttgtgggctgaggatagtactgagaaagaaaaggacagtgttcctacggcagtgaccattcctgttgctccaactgttgtaaatgctgcagcttctaccacaaccctgactacaactactgctggcactgtctcctccacaacagaggtcagggagagacgcagatcatacctcactcctgttagggatgaagagtctgaatcccaaagaaaagcaagatctagacaagcaagacaatctagaagatcaacacagggagtgacattaactgatcttcaagaagctgagaaaacaataggaagaagtcgttctacccgaaccagagaacaagaaaatgaagaaaaagaaaaagaggaaaaagagaaacaagataaagagaaacaagaagaaaagaaggagtcagaaacatctagagaagatgaatataaacaaaagtactccagaacgtatgatgagacttaccagcgttataggccagtatcaacttcaagttcaaccactccatcctcttcactttctactatgagcagttcactgtatgcttcaagtcaactaaacaggccaaatagtcttgtaggcataacttctgcttactccagaggaataacaaaagaaaatgaaagagagggagaaaaaagagaagaggagaaagaaggagaagataaatcacaacctaaatcaatcagagaacgacgacgaccaagagagaaaagaagatctacaggagtttcattttggacacaagatagtgatgaaaatgaacaagaacaacaatcagacacagaagagggatccaataagaaagaaactcagacggattccatttctagatatgaaaccagttctacatcagctggtgatcgatatgattccttgctgggtcgctctggatcatacagttacttagaagaaagaaaaccttacagcagcaggctagaaaaggatgactcaactgactttaaaaagctttatgaacaaattctagctgaaaatgaaaagctgaaggcacagctacatgatacaaatatggaactaacagatcttaaattacagttggaaaaggccacccagagacaagaaagatttgctgatagatcactgttggaaatggaaaaaagggaacgaagagctctagaaagaagaatatctgaaatggaagaagagctcaaaatgttaccagacctaaaagcagacaaccagaggctaaaggatgaaaatggggccttgatcagagttataagcaaactttccaaataaaaaaaaaaaaaaaacttcaagggggggcccggtccccaaattggccttttgggaggccgattacaatttaactggccgttgtttttacaacgtctggaactgggaaaacctgtggggtaccca

SEQ ID NO: 355765 - DNA, 4509 bp, Homo sapiens
tgacgggtggccgtgctgggggcgggagggcttctgtggtaggaagggaggtccgctcggccgggtgcgccgccccagtgctctgtgggatactggaagtctcgagcgtcggctccgggttcccagccctcctctggcccgcactcatagaaacattcacacaccccctgcctcccctctcttccctctccgcctcccccttccccccctcgcgataagaagacccggcggcaggagaggggatgaagatggcggacgcgaagcagaagcggaacgagcagctgaaacgctggatcggctccgagacggacctcgagcctccggtggtgaagcgccagaagaccaaggtgaagttcgacgatggcgccgtcttcctggctgcttgctccagcggcgacacggacgaggtcctcaagctgctgcaccgcggcgccgacatcaattacgccaatgtggacggactcactgccctgcaccaggcttgcattgatgacaatgttgatatggtgaagtttctggtagaaaatggagcaaatattaatcaacctgataatgaaggctggataccactacatgcagcagcttcctgtggatatcttgatattgcagagtttttgattggtcaaggagcacatgtaggggctgtcaacagtgaaggagatacacctttagatattgcggaggaggaggcaatggaagagctacttcaaaatgaagttaatcggcaaggggttgatatagaagcagctcgaaaggaagaagaacggatcatgcttagagatgccaggcagtggctaaatagtggtcatataaatgatgtccggcatgcaaaatctggaggtacagcacttcacgttgcagctgctaaaggctatacggaagttttaaaacttttaatacaggcaggctatgatgttaatattaaagactatgatggctggacacctcttcatgctgcagctcattggggtaaagaagaagcatgtcgaattttagtggacaatctgtgtgatatggagatggtcaacaaagtgggccaaacagcctttgatgtagcagatgaagacattttaggatatttagaagagttgcaaaagaaacaaaatctgctccatagtgaaaaacgggacaagaaatctccactaattgaatcaacagcaaatatggacaataatcagtcacagaagacctttaaaaacaaagagacgttgattattgaaccagagaaaaatgcatcccgtattgaatctctggaacaagaaaaggttgatgaagaagaagaaggaaagaaggatgagtctagctgctctagtgaagaagatgaggaagatgactcggaatcagaagctgaaacagataagacaaaacccctggcttctgtaactaatgccaacacttctagtacacaagcagctcctgtagctgttacaacacctactgtgtcatcaggtcaagcaacacctacatcacctattaaaaagtttccaaccacagctacaaaaatttctcccaaagaagaagagagaaaagatgagtctcctgcaacttggaggttaggacttagaaagacgggcagctatggtgcacttgctgaaatcacagcatctaaagagggtcagaaagaaaaagatactgcaggtgttacacgttcagcttcaagtcccagactttcctcctctttggataataaagaaaaggagaaagatagtaaaggaactaggcttgcatatgttgcacctacaataccaagacgactagccagtacatctgacattgaagagaaagaaaacagagattcttcaagtttgcgaacaagtagttcatatacaaggagaaaatgggaagatgatcttaaaaaaaatagctcagttaatgaaggatcaacgtatcataaaagttgctcctttggtagaagacaagatgatttgattagttctagtgttccaagcaccacatcaacaccaacagttacctctgcagctgggcttcagaaaagcctgctttccagcacaagcactactacaaagattacaacgggttcttcctcagcaggcacacaaagcagtacctcaaatcgtttgtgggctgaggatagtactgagaaagaaaaggacagtgttcctacggcagtgaccattcctgttgctccaactgttgtaaatgctgcagcttctaccacaaccctgactacaactactgctggcactgtctcctccacaacagaggtcagggagagacgcagatcatacctcactcctgttagggatgaagagtctgaatcccaaagaaaagcaagatctagacaagcaagacaatctagaagatcaacacagggagtgacattaactgatcttcaagaagctgagaaaacaataggaagaagtcgttctacccgaaccagagaacaagaaaatgaagaaaaagaaaaagaggaaaaagagaaacaagataaagagaaacaagaagaaaagaaggagtcagaaacatctagagaagatgaatataaacaaaagtactccagaacgtatgatgagacttaccagcgttataggccagtatcaacttcaagttcaaccactccatcctcttcactttctactatgagcagttcactgtatgcttcaagtcaactaaacaggccaaatagtcttgtaggcataacttctgcttactccagaggaataacaaaagaaaatgaaagagagggagaaaaaagagaagaggagaaagaaggagaagataaatcacaacctaaatcaatcagagaacgacgacgaccaagagagaaaagaagatctacaggagtttcattttggacacaagatagtgatgaaaatgaacaagaacaacaatcagacacagaagagggatccaataagaaagaaactcagacggattccatttctagatatgaaaccagttctacatcagctggtgatcgatatgattccttgctgggtcgctctggatcatacagttacttagaagaaagaaaaccttacagcagcaggctagaaaaggatgactcaactgactttaaaaagctttatgaacaaattctagctgaaaatgaaaagctgaaggcacagctacatgatacaaatatggaactaacagatcttaaattacagttggaaaaggccacccagagacaagaaagatttgctgatagatcactgttggaaatggaaaaaagggaacgaagagctctagaaagaagaatatctgaaatggaagaagagctcaaagtaagtaaactatgttacttatgagagagagtgctgtttatgtattaatgtttaaaatactattatagatatggtttacattaattgttctcaaagctgattacccaatttgtgaactgtctatatctggtgcttctctttcttcctgaatccaggttttagtgagccagaagagggtctaaaacccaaatcttaacacctagccccgccggctgctgtgggagcggcggccgtccctctcctggaggtcgtctcctggcatcctcggggccgcaggaaggaagaggaggcagcggccggagccctggtgggcggcctgaggtgagagcccgaccggcccctttgggaatatggcgaccggtggctaccggaccagcagcggcctcggcggcagcaccacagacttcctggaggagtggaaggcgaaacgcgagaagatgcgcgccaagcagaaccccccgggcccggcccccccgggagggggcagcagcgacgccgctgggaagccccccgcgggggctctgggcaccccggcggccgccgctgccaacgagctcaacaacaacctcccgggcggcgcgccggccgcacctgccgtccccggtcccgggggcgtgaactgcgcggtcggctccgccatgctgacgcgggcggcccccggcccgcggcggtcggaggacgagcccccagccgcctctgcctcggctgcaccgccgccccagcgtgacgaggaggagccggacggcgtcccagagaagggcaagagctcgggccccagtgccaggaaaggcaaggggcagatcgagaagaggaagctgcgggagaagcggcgctccaccggcgtggtcaacatccctgccgcagagtgcttagatgagtacgaagatgatgaagcagggcagaaagagcggaaacgagaagatgcaattacacaacagaacactatacagaatgaagctgtaaacttactagatccaggcagttcctatctgctacaggagccacctagaacagtttcaggcagatataaaagcacaaccagtgtctctgaagaagatgtctcaagtagatattctcgaacagatagaagtgggttctctaaataactaaaccggaattctgaagctgaagaatacagtaactgaccttgcaaaaaaaaaattataggggatcacagcagactttattaagcaagagaaagaatcagcaaactcaagacaggtcattgaaattattgagacaaaggaatcaccggtaccgg

SEQ ID NO: 355766 - DNA, 4745 bp, Homo sapiens
gaaagagcggaaacgagaagatgcaattacacaacagaacactatgcagaatgaagctgtaaacttactagatccaggcagttcctatctgctacagtgcttagatgagtacgaagatgatgaagcagggcagaaagagcggaaacgagaagatgcaattacacaacagaacactatacagaatgaagctgtaaacttactagatccaggcagttcctatctgctacaggagccacctagaacagtttcaggcagatataaaagcacaaccagtgtctctgaagaagatgtctcaagtagatattctcgaacagatagaagtgggttccctagatataacagggatgcaaatgtttcaggtactctggtttcaagtagcacactggaaaagaaaattgaagatcttgaaaaggaagtagtaagagaaagacaagaaaacctaagacttgtgagactgatgcaagataaagaggaaatgattggaaaactcaaagaagaaattgatttattaaatagaggacctagatgacatagaagatgaaaatgaacagctaaagcaggaaaataaaactcttttgaaagttgtgggtcagctgaccaggtagaggattcaagactcaatgtggaaaaaatattttaaactactgattgaatgttaatggtcaatgctagcacaatattcctatgctgcaatacattaaaataactaagcaagtatatttatttctagcaaacagatgtttgttttcaaaatacttctttttcattattggttttaaaaaagcattatccttttatctcacaaataagtaatatctttcagttattaaatgatagataatgcctttttggttttgtgtggtattcaactaatacatggtttaaagtcacagccgtttgaatatattttatcttggtagtacattttctcccttaggaatatacatagtctttgtttacatgagttcaaatacttttgggatgttaccttcacatgtcctattactgatgtgtgcaaccttttatgtgttgatgactcactcataaaggtttttgtctactgtcatttgttctttccacttattctaagcatttagagtaatagagtcatacttttttataacagcaaccttttaaaaggaaagctcttataaagtcactgtcatgttttagttgactaaatataaatttaagagaatacttgaattgtgctatagtaaataaaaatttactattttgtgtttgaatattgaaaaattgaatcactttaactcctgaaaaacatacaattgtaatttcaatgtaaaatttcttatgtaggtactacctttttttatcgttccaaggtttgctagtgaacacaggatattttaaaagttttttattcttcgggcctggaaagtgtacaaagtcagtgtaggagaaaaaaatccatatttttatattagcatgcacactaaaaaccaaaatattattcatacttaaaacattcatacaaaacaatatgtaagcagaaatagtactaaaatactttgcctaatttctaagttgaagaataacactgggacacagttttttcatatgagagaatattccgctatttcaaatttaagggattttcttcctaacattgaaattttaaaaacagagttacttctaaataattatacagattttttcttctattaaatattattatttagaattgtttttgtattacatattcatgttaagaaccccgtcttcccttaaaatacattaaaattatgacatttttgctttgtgattgaatttcaaatagcagtatggtatccttttatctagttaatatatgaaagtggcttgaatatagtcaaatccattttaggtactctactgactttttccttcacttgccaagcccttttattgttcactgttagaaaaatagagaaggtgagacagctgggggaaaatgtggagtaaatgataatcaaatgttgaattctaaaagtctctacatttacctaggttggctttctcccccagttcagaagtttccagcttggccaatcatcagaatcacttgaggaacttagaaagaactccctggctgtagctcctatgtaggtttaggttgagactctggattccacaatttttaaaggttaccatctgaggtttctgatcatagtctacttttgaagcagctgctgctgtttctttattccattgaacaccctggaattgacataattttatctatcagcatttctccccttttagtttatttaataattaacccggtctccagggcagttttcatatgaccatgtgtatattcactgctcacgaaaaagtttaatgttagattaccaaatttaatatagttacagaattactgcataagggcttcccttcttggagactcttacccagcatgggaacagtgatctgcccacatgacagggtggtatgccaggcatagttaactgcttttggttgtgaggtactcatcttcctttagttacccttagttatgtggcacacatgtccttattgcctagttcgtcatccacactttggatcttgtgaaaatgctgttagtatccaaccttaaaatatattagtatatgggtttttattaaaagaattactttgaattttctatttaattcatatgtaaataaaggaacatttcatttcacttaaaaaaattatatcagttattaggctgggtgcagtggctcatgcctgtaatcccagcactttgggaggccaaggcgggtggattaccagagttcgggagtttgagaccagcttgaccaacatggagaaaccccgtctctactaaaaatacaaaattagccaggtgtggtggcgcatgcctgtaatcctggctactcaggaggctgaggcaggagaatcgcttgaaaacccaggagacagaggttgcggtgagctgagattgcgccattgtactccagcctgggcaagaagagcgaaactctgtctccaaaaaaaaaaaaaaaaaaatttattaatacttttaaagactgagctgtttaagaattttttggggaacatttctagcagtgatttttttggcctttaatgatagcgtaaagacaggagccttacaacttaggcaaagcatttcacatgcagtccttcttccatctcaaaatatgtacttattttacatacagaattttacactaaccattgaaaaataaagtaggatctgctacagtttcacctgaaaatttataaaaagtgttgagattggtagaaggtagtttttaagtacatgtgcactaccctaaaagacttgtctattgtcaataaagtgttagtatttgtgaaattattattcctgttcagaaatactatttcttaaatctcctgggaatttgtggcataataaagcacattcaaagttctaatgtatttatgagctcattttcaaaatagtaagtttgtcatctttaaaatgaacatgacttgcctccttgatttctgaaatgaattaattgaagattgctatagtaatctttatttcatctttctagagttgttgacaattttattatacaacagttaccattagagaaggagggaagggctttgggtgtgtatttataggtactaagggatttactaaatatagtagattagcactgtcacacttgttcaagtagtttcaaacatagaaaattaagtatcaggtatgtggagcaatgtagtttttttttttcttcagtttaaaaaatttttaattgtggtagaagcaatgtattcttaaggtgaaaaacctacctcggttacatgtggtttgtgttttttggattaatctggattttataattagaaataaaaatgtaagattttgaatccaaaaaaaaaaaaaaaaaaaaaaaaaaaaaaaaaaaaaaaaaaaaaaaaaagcgcaaaaccaagtacatagtgacgatggcttttatttggacaaatagcttttatattttcattaaaccatgcaaaaaatactacatctttctggcacataactgtctccttaaccactgaacagttcagccatttgaataaattgtacattgtaaagcttatagtagctgattgtattattgattgtattgtatactatattaaatgtgaatttgtaccccttcattttaaaaggtcattgtgttctactgcctattttagattactttggggttggggaagggtgttttggtaagcaggattttaagtcctctctctctcgattggttttatgaagatataaggttatgctcttactaccaagctcaggattcttgattttaaaggtacaaggatagttgtgggagttttatttttggttatatttgaactgtatgaatggtaggtctgaatattgagaatttccatggtcttatgtggaggtaaaatatacagataactgatcagtttgagtgactgcaacatgttctggttgcacaacagttaggcatgctatggtttatatttgtgaagtttggatgcctgtgaagaatgattaaatacatgtttctaatattttagtgttttgtatttaggttatttattctttgtatctaaaactgaacagctactgtgctatattgattttattggtagtattgagcagaccttgtttctgcatgaaactagttgcaaaacccactattttggaaataaaaatgtattttgacatatacaaataaaatgaataaaactattttaaatgtgaaaaaaaaaaa

SEQ ID NO: 355767 - DNA, 4648 bp, Homo sapiens
ttttcattgtgtgggaataatgattaacttctacagttacaaataagttgctactataaccatatgtccttggggaatgttaatttttttaagctcaatagaaaatattcttggcatttttcttgctgaatactagggattttaataaaatgtttatatttccacagcacaaccagtgtctctgaagaagatgtctcaagtagatattctcgaacagatagaagtgggttccctagatataacagggatgcaaatgtttcaggtactctggtttcaagtagcacactggaaaagaaaattgaagatcttgaaaaggaagtagtaagagaaagacaagaaaacctaagacttgtgagactgatgcaagataaagaggaaatgattggaaaactcaaagaagaaattgatttattaaatagaggacctagatgacatagaagatgaaaatgaacagctaaagcaggaaaataaaactcttttgaaagttgtgggtcagctgaccaggtagaggattcaagactcaatgtggaaaaaatattttaaactactgattgaatgttaatggtcaatgctagcacaatattcctatgctgcaatacattaaaataactaagcaagtatatttatttctagcaaacagatgtttgttttcaaaatacttctttttcattattggttttaaaaaagcattatccttttatctcacaaataagtaatatctttcagttattaaatgatagataatgcctttttggttttgtgtggtattcaactaatacatggtttaaagtcacagccgtttgaatatattttatcttggtagtacattttctcccttaggaatatacatagtctttgtttacatgagttcaaatacttttgggatgttaccttcacatgtcctattactgatgtgtgcaaccttttatgtgttgatgactcactcataaaggtttttgtctactgtcatttgttctttccacttattctaagcatttagagtaatagagtcatacttttttataacagcaaccttttaaaaggaaagctcttataaagtcactgtcatgttttagttgactaaatataaatttaagagaatacttgaattgtgctatagtaaataaaaatttactattttgtgtttgaatattgaaaaattgaatcactttaactcctgaaaaacatacaattgtaatttcaatgtaaaatttcttatgtaggtactacctttttttatcgttccaaggtttgctagtgaacacaggatattttaaaagttttttattcttcgggcctggaaagtgtacaaagtcagtgtaggagaaaaaaatccatatttttatattagcatgcacactaaaaaccaaaatattattcatacttaaaacattcatacaaaacaatatgtaagcagaaatagtactaaaatactttgcctaatttctaagttgaagaataacactgggacacagttttttcatatgagagaatattccgctatttcaaatttaagggattttcttcctaacattgaaattttaaaaacagagttacttctaaataattatacagattttttcttctattaaatattattatttagaattgtttttgtattacatattcatgttaagaaccccgtcttcccttaaaatacattaaaattatgacatttttgctttgtgattgaatttcaaatagcagtatggtatccttttatctagttaatatatgaaagtggcttgaatatagtcaaatccattttaggtactctactgactttttccttcacttgccaagcccttttattgttcactgttagaaaaatagagaaggtgagacagctgggggaaaatgtggagtaaatgataatcaaatgttgaattctaaaagtctctacatttacctaggttggctttctcccccagttcagaagtttccagcttggccaatcatcagaatcacttgaggaacttagaaagaactccctggctgtagctcctatgtaggtttaggttgagactctggattccacaatttttaaaggttaccatctgaggtttctgatcatagtctacttttgaagcagctgctgctgtttctttattccattgaacaccctggaattgacataattttatctatcagcatttctccccttttagtttatttaataattaacccggtctccagggcagttttcatatgaccatgtgtatattcactgctcacgaaaaagtttaatgttagattaccaaatttaatatagttacagaattactgcataagggcttcccttcttggagactcttacccagcatgggaacagtgatctgcccacatgacagggtggtatgccaggcatagttaactgcttttggttgtgaggtactcatcttcctttagttacccttagttatgtggcacacatgtccttattgcctagttcgtcatccacactttggatcttgtgaaaatgctgttagtatccaaccttaaaatatattagtatatgggtttttattaaaagaattactttgaattttctatttaattcatatgtaaataaaggaacatttcatttcacttaaaaaaattatatcagttattaggctgggtgcagtggctcatgcctgtaatcccagcactttgggaggccaaggcgggtggattaccagagttcgggagtttgagaccagcttgaccaacatggagaaaccccgtctctactaaaaatacaaaattagccaggtgtggtggcgcatgcctgtaatcctggctactcaggaggctgaggcaggagaatcgcttgaaaacccaggagacagaggttgcggtgagctgagattgcgccattgtactccagcctgggcaagaagagcgaaactctgtctccaaaaaaaaaaaaaaaaaaatttattaatacttttaaagactgagctgtttaagaattttttggggaacatttctagcagtgatttttttggcctttaatgatagcgtaaagacaggagccttacaacttaggcaaagcatttcacatgcagtccttcttccatctcaaaatatgtacttattttacatacagaattttacactaaccattgaaaaataaagtaggatctgctacagtttcacctgaaaatttataaaaagtgttgagattggtagaaggtagtttttaagtacatgtgcactaccctaaaagacttgtctattgtcaataaagtgttagtatttgtgaaattattattcctgttcagaaatactatttcttaaatctcctgggaatttgtggcataataaagcacattcaaagttctaatgtatttatgagctcattttcaaaatagtaagtttgtcatctttaaaatgaacatgacttgcctccttgatttctgaaatgaattaattgaagattgctatagtaatctttatttcatctttctagagttgttgacaattttattatacaacagttaccattagagaaggagggaagggctttgggtgtgtatttataggtactaagggatttactaaatatagtagattagcactgtcacacttgttcaagtagtttcaaacatagaaaattaagtatcaggtatgtggagcaatgtagtttttttttttcttcagtttaaaaaatttttaattgtggtagaagcaatgtattcttaaggtgaaaaacctacctcggttacatgtggtttgtgttttttggattaatctggattttataattagaaataaaaatgtaagattttgaatccaaaaaaaaaaaaaaaaaaaaaaaaaaaaaaaaaaaaaaaaaaaaaaaaaagcgcaaaaccaagtacatagtgacgatggcttttatttggacaaatagcttttatattttcattaaaccatgcaaaaaatactacatctttctggcacataactgtctccttaaccactgaacagttcagccatttgaataaattgtacattgtaaagcttatagtagctgattgtattattgattgtattgtatactatattaaatgtgaatttgtaccccttcattttaaaaggtcattgtgttctactgcctattttagattactttggggttggggaagggtgttttggtaagcaggattttaagtcctctctctctcgattggttttatgaagatataaggttatgctcttactaccaagctcaggattcttgattttaaaggtacaaggatagttgtgggagttttatttttggttatatttgaactgtatgaatggtaggtctgaatattgagaatttccatggtcttatgtggaggtaaaatatacagataactgatcagtttgagtgactgcaacatgttctggttgcacaacagttaggcatgctatggtttatatttgtgaagtttggatgcctgtgaagaatgattaaatacatgtttctaatattttagtgttttgtatttaggttatttattctttgtatctaaaactgaacagctactgtgctatattgattttattggtagtattgagcagaccttgtttctgcatgaaactagttgcaaaacccactattttggaaataaaaatgtattttgacatatacaaataaaatgaataaaactattttaaatgtgaaaaaaaaaaa

SEQ ID NO: 355768 - DNA, 4386 bp, Homo sapiens
tgacgggtggccgtgctgggggcgggagggcttctgtggtaggaagggaggtccgctcggccgggtgcgccgccccagtgctctgtgggatactggaagtctcgagcgtcggctccgggttcccagccctcctctggcccgcactcatagaaacattcacacaccccctgcctcccctctcttccctctccgcctcccccttccccccctcgcgataagaagacccggcggcaggagaggggatgaagatggcggacgcgaagcagaagcggaacgagcagctgaaacgctggatcggctccgagacggacctcgagcctccggtggtgaagcgccagaagaccaaggtgaagttcgacgatggcgccgtcttcctggctgcttgctccagcggcgacacggacgaggtcctcaagctgctgcaccgcggcgccgacatcaattacgccaatgtggacggactcactgccctgcaccaggcttgcattgatgacaatgttgatatggtgaagtttctggtagaaaatggagcaaatattaatcaacctgataatgaaggctggataccactacatgcagcagcttcctgtggatatcttgatattgcagagtttttgattggtcaaggagcacatgtaggggctgtcaacagtgaaggagatacacctttagatattgcggaggaggaggcaatggaagagctacttcaaaatgaagttaatcggcaaggggttgatatagaagcagctcgaaaggaagaagaacggatcatgcttagagatgccaggcagtggctaaatagtggtcatataaatgatgtccggcatgcaaaatctggaggtacagcacttcacgttgcagctgctaaaggctatacggaagttttaaaacttttaatacaggcaggctatgatgttaatattaaagactatgatggctggacacctcttcatgctgcagctcattggggtaaagaagaagcatgtcgaattttagtggacaatctgtgtgatatggagatggtcaacaaagtgggccaaacagcctttgatgtagcagatgaagacattttaggatatttagaagagttgcaaaagaaacaaaatctgctccatagtgaaaaacgggacaagaaatctccactaattgaatcaacagcaaatatggacaataatcagtcacagaagacctttaaaaacaaagagacgttgattattgaaccagagaaaaatgcatcccgtattgaatctctggaacaagaaaaggttgatgaagaagaagaaggaaagaaggatgagtctagctgctctagtgaagaagatgaggaagatgactcggaatcagaagctgaaacagataagacaaaacccctggcttctgtaactaatgccaacacttctagtacacaagcagctcctgtagctgttacaacacctactgtgtcatcaggtcaagcaacacctacatcacctattaaaaagtttccaaccacagctacaaaaatttctcccaaagaagaagagagaaaagatgagtctcctgcaacttggaggttaggacttagaaagacgggcagctatggtgcacttgctgaaatcacagcatctaaagagggtcagaaagaaaaagatactgcaggtgttacacgttcagcttcaagtcccagactttcctcctctttggataataaagaaaaggagaaagatagtaaaggaactaggcttgcatatgttgcacctacaataccaagacgactagccagtacatctgacattgaagagaaagaaaacagagattcttcaagtttgcgaacaagtagttcatatacaaggagaaaatgggaagatgatcttaaaaaaaatagctcagttaatgaaggatcaacgtatcataaaagttgctcctttggtagaagacaagatgatttgattagttctagtgttccaagcaccacatcaacaccaacagttacctctgcagctgggcttcagaaaagcctgctttccagcacaagcactactacaaagattacaacgggttcttcctcagcaggcacacaaagcagtacctcaaatcgtttgtgggctgaggatagtactgagaaagaaaaggacagtgttcctacggcagtgaccattcctgttgctccaactgttgtaaatgctgcagcttctaccacaaccctgactacaactactgctggcactgtctcctccacaacagaggtcagggagagacgcagatcatacctcactcctgttagggatgaagagtctgaatcccaaagaaaagcaagatctagacaagcaagacaatctagaagatcaacacagggagtgacattaactgatcttcaagaagctgagaaaacaataggaagaagtcgttctacccgaaccagagaacaagaaaatgaagaaaaagaaaaagaggaaaaagagaaacaagataaagagaaacaagaagaaaagaaggagtcagaaacatctagagaagatgaatataaacaaaagtactccagaacgtatgatgagacttaccagcgttataggccagtatcaacttcaagttcaaccactccatcctcttcactttctactatgagcagttcactgtatgcttcaagtcaactaaacaggccaaatagtcttgtaggcataacttctgcttactccagaggaataacaaaagaaaatgaaagagagggagaaaaaagagaagaggagaaagaaggagaagataaatcacaacctaaatcaatcagagaacgacgacgaccaagagagaaaagaagatctacaggagtttcattttggacacaagatagtgatgaaaatgaacaagaacaacaatcagacacagaagagggatccaataagaaagaaactcagacggattccatttctagatatgaaaccagttctacatcagctggtgatcgatatgattccttgctgggtcgctctggatcatacagttacttagaagaaagaaaaccttacagcagcaggctagaaaaggatgactcaactgactttaaaaagctttatgaacaaattctagctgaaaatgaaaagctgaaggcacagctacatgatacaaatatggaactaacagatcttaaattacagttggaaaaggccacccagagacaagaaagatttgctgatagatcactgttggaaatggaaaaaagggtaagtgtcccacttattaaataattatttttttctttcttgttttaggtaaacaatggtaggttttttgtttttattttgttattatggatgacagttttaattagtttaaatatttattgagttaatgtattttgcagcaacttctttatagaattctatcggggtttctctaggtacgaaatgaccttgttaaataaaatttaatttaccacataattcttttaatgaatttaaaaaaactgtcttgccttgattctgaaatgtactatacacattttgatagtgaatttgatatttttgaaatgccgtttatctcttatggcctgtacctaaaacgttttaatcataaatacatttattttaattctttataaacctaaaatactttcgttcttgaaataaagtttctaaatctggaacatcaaattttcaaattctttttaaagttaatttaataattttttaaaattttgagtttaaatatttaacttaagtaggctattttaaacaaaaaaaagattacaagaaaatccttatgccacttgatgtctttctgcaagtttttattgattgtaatacattcacttgtatttctcttcacttattgttgctcaaaggtctaggagtagtcataggaataactgtacaagtttagcctcatcagttgaaaatgtataaatgatccaaaagttaaaggaaaagtgcccaaagattgtttgtagtgtagctgagcagtagctagacttggtagggtttcgaccagagaagaaatgacatgctggtagctatgatcaaagagtaaatacttaggagctattgatataaaaacatttttcttccattctattttaaaataaccaatttgcccttttcaccaaaaaaaagagaaatggttaaaaaaaaagaatataaaaatagtgttataatgtctgtcatttgctagttgtaccttgcaatagctaccattttattatgctttctgcaagttttaaaaattagtgttctgagtcatgttttcaaaatggacataataattgctaaaatattgttttaataaatttaatattattatatcctgttagaatatttaactgttactgaattttatctccaggataggcagaaataataaaatcagttctctgttatactaacggttgagatgaaaggcatggataacaaactg

SEQ ID NO: 355769 - DNA, 2828 bp, Homo sapiens
cagctggtactccgtctcatttttgggaatgcaagagagagtgatgggcagaaaatctcacggactccaaataaagatcacagtgactccttagccctagctgcagttgctgtgcaggtatgtggtccctctttatcagataactgaatcttttttaagataacctgaaaagtccaatttttctgtgaagtcttgatttttgaatactggaactaattttaagactttatatgggacaaacacacttgcataacgaacagtctctgctttgcaaccatgaaggattttttaaatgtatcctttatagctcatatgctacattaagctgttttaatattgcaaagtaatcaatgagaaattttaaagtaataggagagcagaaaagtaatttgttcttttaccctaatttttatagctttatgaacaaattctagctgaaaatgaaaagctgaaggcacagctacatgatacaaatatggaactaacagatcttaaattacagttggaaaaggccacccagagacaagaaagatttgctgatagatcactgttggaaatggaaaaaagggaacgaagagctctagaaagaagaatatctgaaatggaagaagagctcaaaatgttaccagacctaaaagcagacaaccagaggctaaaggatgaaaatggggccttgatcagagttataagcaaactttccaaataaaaaaaaaaaagcagcaagtaatggaattgcacatattagtaacccagtggaccataattggcagtcactggaagtctgggaagaatccttggagactgtcattttcggatatcctgccaaatgccctcttatctagaatttttgtttcattttgtttaattttctggggtgtttttgttgttgttggtttgttttttgtttttttttttaatcaagaccattgtttcatgttaatgcagctgctgagaagatttttttttaatgactgagaaaacttgtttacagctccagcatataaggaaagtgttcaaggccagatatgcctcagatatttaaccagtaagccttagttgtacataaatacttttgtgtcaacaaaaactttcagctctcacagaagacagttactcaacattttttgatgtgccacagtttcgagtttttcgatatttaaattttttggcttttcatctaagtttgggtttgtattttttccttctaaactcttcatgtggcagagtcttctatgttttcacagctttttcattacagaaaagaacacttgctcttctgtgattattgtcatgtattaggctaatgctgtgttgtctcccacctggaactgaattgcttggtggaacatatgctttcactgtttgtgcaatatgcatttatttcttatatgaatgctttaaagtcatttgaggttagatcttttaattcctattttctgcttcattggtcactttttttttattgtagtataagatgttagattctgtaatcttcacattcattttagcaggtactgagtgatgctgtatatacaaataagtgtattgttttgatttttagaccaccacatggcatgcttgactatttcttatttcaaatgtctgctaatgcagagtaggctactccatgatagtgttaaaaaacaaaatttgctaacaatgtgatataaagactttaaaagttacacattatgtggagccctatctttacaaaagtttcctactgtaaagtgcttttattttcagttttcacttgatagtactcaaccataattaaagttgcataagataattgctttacatttcacatacctatatttatctgagtgctgtctaaaactgttgtgctagccaaagtaatgctatgaaatcatttgcagaattaacccgtgagttaatgttaaatgcactgttattgccatgtgaagaggcatcgactttgataccaccatcatgttcagaccattttatacatttcagtggccttttttttttttaaggaaaaaaaagcgcaaaaccaagtacatagtgacgatggcttttatttggacaaatagcttttatattttcattaaaccatgcaaaaaatactacatctttctggcacataactgtctccttaaccactgaacagttcagccatttgaataaattgtacattgtaaagcttatagtagctgattgtattattgattgtattgtatactatattaaatgtgaatttgtaccccttcattttaaaaggtcattgtgttctactgcctattttagattactttggggttggggaagggtgttttggtaagcaggattttaagtcctctctctctcgattggttttatgaagatataaggttatgctcttactaccaagctcaggattcttgattttaaaggtacaaggatagttgtgggagttttatttttggttatatttgaactgtatgaatggtaggtctgaatattgagaatttccatggtcttatgtggaggtaaaatatacagataactgatcagtttgagtgactgcaacatgttctggttgcacaacagttaggcatgctatggtttatatttgtgaagtttggatgcctgtgaagaatgattaaatacatgtttctaatattttagtgttttgtatttaggttatttattctttgtatctaaaactgaacagctactgtgctatattgattttattggtagtattgagcagaccttgtttctgcatgaaactagttgcaaaacccactattttggaaataaaaatgtattttgacatatacaaataaaatgaataaaactattttaaatgtgaaaaaaaaaaa

SEQ ID NO: 355770 - DNA, 3000 bp, Homo sapiens
ggtgcttttccatcccttaaagccaagcttatatatcaggatttcatcagctttgagctggtcagatagtacaggaagtggaaaaaatgaaaggcctgagctcaccagcagaagaaagctgtacagctagaatttcttataagtgaaagtggatgtgaaccaattgtggagcatggatgattggaaaagaaacctagagtgtgagccaagaccaagatagctgtgggagaagataaaaaggccagtttactggtctggctgcatggatacagagtcattcaacctgctgatgaatatatttcaatcaaggtcctggaatctgaccattctgattagccactcctgatggtgtaggaaaggaaagaatttgagcttcagaaggaaagctacagtttttttttgtttttcttccacatactcactcaccctcacgcccagctaaactatgaaagttcctggggaaaagtgatagagaacataaaatgagagctctggttaccattctatttctaaacattcattgcactctttattattttaatacaaatcctgttttctctttgctttactcacgaacctgtgttttactccacttgaatattgtgatttaatacctattaaaagagaattactgtggtcacccctgaacttttttgcacttatctcttttataatttcttactttgttgcagagacaagaaagatttgctgatagatcactgttggaaatggaaaaaagggaacgaagagctctagaaagaagaatatctgaaatggaagaagagctcaaaatgttaccagacctaaaagcagacaaccagaggctaaaggatgaaaatggggccttgatcagagttataagcaaactttccaaataaaaaaaaaaaagcagcaagtaatggaattgcacatattagtaacccagtggaccataattggcagtcactggaagtctgggaagaatccttggagactgtcattttcggatatcctgccaaatgccctcttatctagaatttttgtttcattttgtttaattttctggggtgtttttgttgttgttggtttgttttttgtttttttttttaatcaagaccattgtttcatgttaatgcagctgctgagaagatttttttttaatgactgagaaaacttgtttacagctccagcatataaggaaagtgttcaaggccagatatgcctcagatatttaaccagtaagccttagttgtacataaatacttttgtgtcaacaaaaactttcagctctcacagaagacagttactcaacattttttgatgtgccacagtttcgagtttttcgatatttaaattttttggcttttcatctaagtttgggtttgtattttttccttctaaactcttcatgtggcagagtcttctatgttttcacagctttttcattacagaaaagaacacttgctcttctgtgattattgtcatgtattaggctaatgctgtgttgtctcccacctggaactgaattgcttggtggaacatatgctttcactgtttgtgcaatatgcatttatttcttatatgaatgctttaaagtcatttgaggttagatcttttaattcctattttctgcttcattggtcactttttttttattgtagtataagatgttagattctgtaatcttcacattcattttagcaggtactgagtgatgctgtatatacaaataagtgtattgttttgatttttagaccaccacatggcatgcttgactatttcttatttcaaatgtctgctaatgcagagtaggctactccatgatagtgttaaaaaacaaaatttgctaacaatgtgatataaagactttaaaagttacacattatgtggagccctatctttacaaaagtttcctactgtaaagtgcttttattttcagttttcacttgatagtactcaaccataattaaagttgcataagataattgctttacatttcacatacctatatttatctgagtgctgtctaaaactgttgtgctagccaaagtaatgctatgaaatcatttgcagaattaacccgtgagttaatgttaaatgcactgttattgccatgtgaagaggcatcgactttgataccaccatcatgttcagaccattttatacatttcagtggccttttttttttttaaggaaaaaaaagcgcaaaaccaagtacatagtgacgatggcttttatttggacaaatagcttttatattttcattaaaccatgcaaaaaatactacatctttctggcacataactgtctccttaaccactgaacagttcagccatttgaataaattgtacattgtaaagcttatagtagctgattgtattattgattgtattgtatactatattaaatgtgaatttgtaccccttcattttaaaaggtcattgtgttctactgcctattttagattactttggggttggggaagggtgttttggtaagcaggattttaagtcctctctctctcgattggttttatgaagatataaggttatgctcttactaccaagctcaggattcttgattttaaaggtacaaggatagttgtgggagttttatttttggttatatttgaactgtatgaatggtaggtctgaatattgagaatttccatggtcttatgtggaggtaaaatatacagataactgatcagtttgagtgactgcaacatgttctggttgcacaacagttaggcatgctatggtttatatttgtgaagtttggatgcctgtgaagaatgattaaatacatgtttctaatattttagtgttttgtatttaggttatttattctttgtatctaaaactgaacagctactgtgctatattgattttattggtagtattgagcagaccttgtttctgcatgaaactagttgcaaaacccactattttggaaataaaaatgtattttgacatatacaaataaaatgaataaaactattttaaatgtgaaaaaaaaaaa

SEQ ID NO: 355771 - DNA, 3290 bp, Homo sapiens
tgacgggtggccgtgctgggggcgggagggcttctgtggtaggaagggaggtccgctcggccgggtgcgccgccccagtgctctgtgggatactggaagtctcgagcgtcggctccgggttcccagccctcctctggcccgcactcatagaaacattcacacaccccctgcctcccctctcttccctctccgcctcccccttccccccctcgcgataagaagacccggcggcaggagaggggatgaagatggcggacgcgaagcagaagcggaacgagcagctgaaacgctggatcggctccgagacggacctcgagcctccggtggtgaagcgccagaagaccaaggtgaagttcgacgatggcgccgtcttcctggctgcttgctccagcggcgacacggacgaggtcctcaagctgctgcaccgcggcgccgacatcaattacgccaatgtggacggactcactgccctgcaccaggcttgcattgatgacaatgttgatatggtgaagtttctggtagaaaatggagcaaatattaatcaacctgataatgaaggctggataccactacatgcagcagcttcctgtggatatcttgatattgcagagtttttgattggtcaaggagcacatgtaggggctgtcaacagtgaaggagatacacctttagatattgcggaggaggaggcaatggaagagctacttcaaaatgaagttaatcggcaaggggttgatatagaagcagctcgaaaggaagaagaacggatcatgcttagagatgccaggcagtggctaaatagtggtcatataaatgatgtccggcatgcaaaatctggaggtacagcacttcacgttgcagctgctaaaggctatacggaagttttaaaacttttaatacaggcaggctatgatgttaatattaaagactatgatggctggacacctcttcatgctgcagctcattggggtaaagaagaagcatgtcgaattttagtggacaatctgtgtgatatggagatggtcaacaaagtgggccaaacagcctttgatgtagcagatgaagacattttaggatatttagaagagttgcaaaagaaacaaaatctgctccatagtgaaaaacgggacaagaaatctccactaattgaatcaacagcaaatatggacaataatcagtcacagaagacctttaaaaacaaagagacgttgattattgaaccagagaaaaatgcatcccgtattgaatctctggaacaagaaaaggttgatgaagaagaagaaggaaagaaggatgagtctagctgctctagtgaagaagatgaggaagatgactcggaatcagaagctgaaacagataagacaaaacccctggcttctgtaactaatgccaacacttctagtacacaagcagctcctgtagctgttacaacacctactgtgtcatcaggtcaagcaacacctacatcacctattaaaaagtttccaaccacagctacaaaaatttctcccaaagaagaagagagaaaagatgagtctcctgcaacttggaggttaggacttagaaagacgggcagctatggtgcacttgctgaaatcacagcatctaaagagggtcagaaagaaaaagatactgcaggtgttacacgttcagcttcaagtcccagactttcctcctctttggataataaagaaaaggagaaagatagtaaaggaactaggcttgcatatgttgcacctacaataccaagacgactagccagtacatctgacattgaagagaaagaaaacagagattcttcaagtttgcgaacaagtagttcatatacaaggagaaaatgggaagatgatcttaaaaaaaatagctcagttaatgaaggatcaacgtatcataaaagttgctcctttggtagaagacaagatgatttgattagttctagtgttccaagcaccacatcaacaccaacagttacctctgcagctgggcttcagaaaagcctgctttccagcacaagcactactacaaagattacaacgggttcttcctcagcaggcacacaaagcagtacctcaaatcgtttgtgggctgaggatagtactgagaaagaaaaggacagtgttcctacggcagtgaccattcctgttgctccaactgttgtaaatgctgcagcttctaccacaaccctgactacaactactgctggcactgtctcctccacaacagaggtcagggagagacgcagatcatacctcactcctgttagggatgaagagtctgaatcccaaagaaaagcaagatctagacaagcaagacaatctagaagatcaacacagggagtgacattaactgatcttcaagaagctgagaaaacaataggaagaagtcgttctacccgaaccagagaacaagaaaatgaagaaaaagaaaaagaggaaaaagagaaacaagataaagagaaacaagaagaaaagaaggagtcagaaacatctagagaagatgaatataaacaaaagtactccagaacgtatgatgagacttaccagcgttataggccagtatcaacttcaagttcaaccactccatcctcttcactttctactatgagcagttcactgtatgcttcaagtcaactaaacaggccaaatagtcttgtaggcataacttctgcttactccagaggaataacaaaagaaaatgaaagagagggagaaaaaagagaagaggagaaagaaggagaagataaatcacaacctaaatcaatcagagaacgacgacgaccaagagagaaaagaagatctacaggagtttcattttggacacaagatagtgatgaaaatgaacaagaacaacaatcagacacagaagagggatccaataagaaagaaactcagacggattccatttctagatatgaaaccagttctacatcagctggtgatcgatatgattccttgctgggtcgctctggatcatacagttacttagaagaaagaaaaccttacagcagcaggctagaaaaggatgactcaactgactttaaaaagctttatgaacaaattctagctgaaaatgaaaagctgaaggcacagctacatgatacaaatatggaactaacagatcttaaattacagttggaaaaggccaccattttcatcctttagcctctggttgtctgcttttaggtctggtaacattttgagctcttcttccatttcagatattcttctttctagagctcttcgttccgcccagaagatactgactcttgccggtcagtcgacgcggccggc

SEQ ID NO: 355772 - DNA, 2838 bp, Homo sapiens
ttgagacagagttttgctctagttgcccaggctggagtgcaatggcgcaatctcagctcactgcaatctccacctcccaggttcaagcagttctcctgcctcagcctcctgagtagctaggattacaggcatgcgccaccacgcccggctaattttgtatttttaatagagatggggtttctccatgttggtcaggctggtctcaaactcctgaactctggattccacaatttttaaaggttaccatctgaggtttctgatcatagtctacttttgaagcagctgctgctgtttctttattccattgaacaccctggaattgacataattttatctatcagcatttctccccttttagtttatttaataattaacccggtctccagggcagttttcatatgaccatgtgtatattcactgctcacgaaaaagtttaatgttagattaccaaatttaatatagttacagaattactgcataagggcttcccttcttggagactcttacccagcatgggaacagtgatctgcccacatgacagggtggtatgccaggcatagttaactgcttttggttgtgaggtactcatcttcctttagttacccttagttatgtggcacacatgtccttattgcctagttcgtcatccacactttggatcttgtgaaaatgctgttagtatccaaccttaaaatatattagtatatgggtttttattaaaagaattactttgaattttctatttaattcatatgtaaataaaggaacatttcatttcacttaaaaaaattatatcagttattaggctgggtgcagtggctcatgcctgtaatcccagcactttgggaggccaaggcgggtggattaccagagttcgggagtttgagaccagcttgaccaacatggagaaaccccgtctctactaaaaatacaaaattagccaggtgtggtggcgcatgcctgtaatcctggctactcaggaggctgaggcaggagaatcgcttgaaaacccaggagacagaggttgcggtgagctgagattgcgccattgtactccagcctgggcaagaagagcgaaactctgtctccaaaaaaaaaaaaaaaaaaatttattaatacttttaaagactgagctgtttaagaattttttggggaacatttctagcagtgatttttttggcctttaatgatagcgtaaagacaggagccttacaacttaggcaaagcatttcacatgcagtccttcttccatctcaaaatatgtacttattttacatacagaattttacactaaccattgaaaaataaagtaggatctgctacagtttcacctgaaaatttataaaaagtgttgagattggtagaaggtagtttttaagtacatgtgcactaccctaaaagacttgtctattgtcaataaagtgttagtatttgtgaaattattattcctgttcagaaatactatttcttaaatctcctgggaatttgtggcataataaagcacattcaaagttctaatgtatttatgagctcattttcaaaatagtaagtttgtcatctttaaaatgaacatgacttgcctccttgatttctgaaatgaattaattgaagattgctatagtaatctttatttcatctttctagagttgttgacaattttattatacaacagttaccattagagaaggagggaagggctttgggtgtgtatttataggtactaagggatttactaaatatagtagattagcactgtcacacttgttcaagtagtttcaaacatagaaaattaagtatcaggtatgtggagcaatgtagtttttttttttcttcagtttaaaaaatttttaattgtggtagaagcaatgtattcttaaggtgaaaaacctacctcggttacatgtggtttgtgttttttggattaatctggattttataattagaaataaaaatgtaagattttgaatccaaaaaaaaaaaaaaaaaaaaaaaaaaaaaaaaaaaaaaaaaaaaaaaaaagcgcaaaaccaagtacatagtgacgatggcttttatttggacaaatagcttttatattttcattaaaccatgcaaaaaatactacatctttctggcacataactgtctccttaaccactgaacagttcagccatttgaataaattgtacattgtaaagcttatagtagctgattgtattattgattgtattgtatactatattaaatgtgaatttgtaccccttcattttaaaaggtcattgtgttctactgcctattttagattactttggggttggggaagggtgttttggtaagcaggattttaagtcctctctctctcgattggttttatgaagatataaggttatgctcttactaccaagctcaggattcttgattttaaaggtacaaggatagttgtgggagttttatttttggttatatttgaactgtatgaatggtaggtctgaatattgagaatttccatggtcttatgtggaggtaaaatatacagataactgatcagtttgagtgactgcaacatgttctggttgcacaacagttaggcatgctatggtttatatttgtgaagtttggatgcctgtgaagaatgattaaatacatgtttctaatattttagtgttttgtatttaggttatttattctttgtatctaaaactgaacagctactgtgctatattgattttattggtagtattgagcagaccttgtttctgcatgaaactagttgcaaaacccactattttggaaataaaaatgtattttgacatatacaaataaaatgaataaaactattttaaatgtgaaaaaaaaaaa

SEQ ID NO: 355773 - DNA, 2634 bp, Homo sapiens
ttttggggaaaaaatttttccccaaaaaaaaaaaaaggggttttccccataaaaaaactctttttttgaaaagcaagcttgtgcttgtttctttattccattgaacaccctggaattgacataattttatctatcagcatttctccccttttagtttatttaataattaacccggtctccagggcagttttcatatgaccatgtgtatattcactgctcacgaaaaagtttaatgttagattaccaaatttaatatagttacagaattactgcataagggcttcccttcttggagactcttacccagcatgggaacagtgatctgcccacatgacagggtggtatgccaggcatagttaactgcttttggttgtgaggtactcatcttcctttagttacccttagttatgtggcacacatgtccttattgcctagttcgtcatccacactttggatcttgtgaaaatgctgttagtatccaaccttaaaatatattagtatatgggtttttattaaaagaattactttgaattttctatttaattcatatgtaaataaaggaacatttcatttcacttaaaaaaattatatcagttattaggctgggtgcagtggctcatgcctgtaatcccagcactttgggaggccaaggcgggtggattaccagagttcgggagtttgagaccagcttgaccaacatggagaaaccccgtctctactaaaaatacaaaattagccaggtgtggtggcgcatgcctgtaatcctggctactcaggaggctgaggcaggagaatcgcttgaaaacccaggagacagaggttgcggtgagctgagattgcgccattgtactccagcctgggcaagaagagcgaaactctgtctccaaaaaaaaaaaaaaaaaaatttattaatacttttaaagactgagctgtttaagaattttttggggaacatttctagcagtgatttttttggcctttaatgatagcgtaaagacaggagccttacaacttaggcaaagcatttcacatgcagtccttcttccatctcaaaatatgtacttattttacatacagaattttacactaaccattgaaaaataaagtaggatctgctacagtttcacctgaaaatttataaaaagtgttgagattggtagaaggtagtttttaagtacatgtgcactaccctaaaagacttgtctattgtcaataaagtgttagtatttgtgaaattattattcctgttcagaaatactatttcttaaatctcctgggaatttgtggcataataaagcacattcaaagttctaatgtatttatgagctcattttcaaaatagtaagtttgtcatctttaaaatgaacatgacttgcctccttgatttctgaaatgaattaattgaagattgctatagtaatctttatttcatctttctagagttgttgacaattttattatacaacagttaccattagagaaggagggaagggctttgggtgtgtatttataggtactaagggatttactaaatatagtagattagcactgtcacacttgttcaagtagtttcaaacatagaaaattaagtatcaggtatgtggagcaatgtagtttttttttttcttcagtttaaaaaatttttaattgtggtagaagcaatgtattcttaaggtgaaaaacctacctcggttacatgtggtttgtgttttttggattaatctggattttataattagaaataaaaatgtaagattttgaatccaaaaaaaaaaaaaaaaaaaaaaaaaaaaaaaaaaaaaaaaaaaaaaaaaagcgcaaaaccaagtacatagtgacgatggcttttatttggacaaatagcttttatattttcattaaaccatgcaaaaaatactacatctttctggcacataactgtctccttaaccactgaacagttcagccatttgaataaattgtacattgtaaagcttatagtagctgattgtattattgattgtattgtatactatattaaatgtgaatttgtaccccttcattttaaaaggtcattgtgttctactgcctattttagattactttggggttggggaagggtgttttggtaagcaggattttaagtcctctctctctcgattggttttatgaagatataaggttatgctcttactaccaagctcaggattcttgattttaaaggtacaaggatagttgtgggagttttatttttggttatatttgaactgtatgaatggtaggtctgaatattgagaatttccatggtcttatgtggaggtaaaatatacagataactgatcagtttgagtgactgcaacatgttctggttgcacaacagttaggcatgctatggtttatatttgtgaagtttggatgcctgtgaagaatgattaaatacatgtttctaatattttagtgttttgtatttaggttatttattctttgtatctaaaactgaacagctactgtgctatattgattttattggtagtattgagcagaccttgtttctgcatgaaactagttgcaaaacccactattttggaaataaaaatgtattttgacatatacaaataaaatgaataaaactattttaaatgtgaaaaaaaaaaa

SEQ ID NO: 355774 - DNA, 955 bp, Homo sapiens
gaccagatacagaatgcacagtatttgctgcagaacagtgttcctgtaatggtaatgatccgatcttcggatcccttctaaaggctcatcaattttgatcctcgagttttttttttttttttttaaggaaaaaaaagcgcaaaaccaagtacatagtgacgatggcttttatttggacaaatagcttttatattttcattaaaccatgcaaaaaatactacatctttctggcacataactgtctccttaaccactgaacagttcagccatttgaataaattgtacattgtaaagcttatagtagctgattgtattattgattgtattgtatactatattaaatgtgaatttgtaccccttcattttaaaaggtcattgtgttctactgcctattttagattactttggggttggggaagggtgttttggtaagcaggattttaagtcctctctctctcgattggttttatgaagatataaggttatgctcttactaccaagctcaggattcttgattttaaaggtacaaggatagttgtgggagttttatttttggttatatttgaactgtatgaatggtaggtctgaatattgagaatttccatggtcttatgtggaggtaaaatatacagataactgatcagtttgagtgactgcaacatgttctggttgcacaacagttaggcatgctatggtttatatttgtgaagtttggatgcctgtgaagaatgattaaatacatgtttctaatattttagtgttttgtatttaggttatttattctttgtatctaaaactgaacagctactgtgctatattgattttattggtagtattgagcagaccttgtttctgcatgaaactagttgcaaaacccactattttggaaataaaaatgtattttgacatatacaaataaaatgaataaaactattttaaatgtgaaaaaaaaaaa

SEQ ID NO: 355775 - DNA, 857 bp, Homo sapiens
aggcagatctgccctgtagagccttgcggttccactgctggcctccggattcccgggagcccccagcccgacaggacaaccttccttccccgcttcctcctttccagacccggcggcaggagaggggatgaagatggcggacgcgaagcagaagcggaacgagcagctgaaacgctggatcggctccgagacggacctcgagcctccggtggtgaagcgccagaagaccaaggtgaagttcgacgatggcgccgtcttcctggctgcttgctccagcggcgacacggacgaggtcctcaagctgctgcaccgcggcgccgacatcaattacgccaatgtggacggactcactgccctgcaccaggcttgcattgatgacaatgttgatatggtgaagtttctggtagaaaatggagcaaatattaatcaacctgataatgaaggctggataccactacatgcagcagcttcctgtggatatcttgatattgcagagtttttgattggtcaaggagcacatgtaggggctgtcaacagtgaaggagatacacctttagatattgcggaggaggaggcaatggaagagctacttcaaaatgaagttaatcggcaaggtaaaataaaaagcaacctaaatggaaaaatgttttagaaagaatgtgatacttttccagcaaaaatatttgttgacattgaagggcaatcataatttcatgaaaaaaatgaattcagcttgcaaaacaatagtacagtatgtttctgttttctaaaatattctccactctatcttttaagtatttttaaagttaaaagaaatgttagaagcagcaggatcaggcataaaattatgtggaagt

SEQ ID NO: 355776 - DNA, 456 bp, Homo sapiens
cataaaagcaaaagtctttggtttaggtgctgacaggaacctcttttaagagcctatcctaacaaaaacaggcttgtcttggctgctggaatgtggtgtgcttgtgagtcataaaatcaagtgatttagtaaatttcaatggaaaatttggagagaataaacctttcattccagcatttatgaaactaattagctttacaaatccaggtgtggtttttttccttcttcctgatacatgttttagatactagaaatatatataactgacaaagcttgatcatgtgttttgtggtgaaaatataacatttattaagaataatgttttatcttttaatattgaaggtaaaacttgatcttcaatttttctctttatagatgttaccagacctaaaagcagacaaccagaggctaaaggatgaaaatggggccttgatcagagttataagcaaactttcc

SEQ ID NO: 355777 - DNA, 296 bp, Homo sapiens
attactttatcttcttgattagtattcctaagtgtcctcccaaaggtttttactagtttcagcttatactaatatttactagtgtaccgctttcttaatcctattttaaaattatgtaccagaatctgaagggtgttcttttaacagagattcttcaagtttgcgaacaagtagttcatatacaaggagaaaatgggaagatgatcttaaaaaaaatagctcagttaatgaaggatcaacgtatcataaaaggtaataatactattcttaagcggtttttatgtattcatttataa

SEQ ID NO: 355778 - DNA, 463 bp, Homo sapiens
cctgcaataaatcagttttacatacaaagtgattcatcagttttcgattttacattgaaaaattatgggcttttctgtgaaaatttcacttacaagtcatattaacaagaattaatcagtgtcacaccaaaccataagacttagagtcattaggaattaattaaaactgcattattatggcaatgactcaagatcctctttttctgagttttttctgagaattactttgtatttgccatagttaattcattgagggggaaggatgtaaattctgaaaagaaattaattgaaaattgtagttaaattgcatgatagatagcttttgatcatgatcatttatttctagattttaatgattgtctaattcactgtaatttctttagacttttaatacaggcaggctatgatgttaatattaaagactatgatggctggacacctcttcatgctgcagctcattggg

SEQ ID NO: 355779 - DNA, 735 bp, Homo sapiens
aacatgaatgaaccttgaaaacatgtagagtgaaagaagccagtcacaaagaaccatatattctatgattccatttataggaaatgcctagcataggtagacctatagagacagaaagtagattagtggttgccttgggctggatgcagacagtgactactaaagggtatgttcctacttcttagggtgataaaaatatttgaaattgattattttgatagttgtacaactctgaatatccataaaaccattgaattgtacactttaaatgagtgatttgtatggtatatgaattatatctcaataaagctgttaccaaaaaaataaggggagatattctcagcttctgtctcacataaatttcacatacattgccttagagttgtatgtttttacagtagttattgtatcataaccactgtaaaaaatgttatccaacgtctttatataaaattatacagaattactgaaggcattttatgatttattgacttttgaccatcaccatccccccttgtttcctacgtagggccaaacagcctttgatgtagcagatgaagacattttaggatatttagaagagttgcaaaagaaacaaaatctggtatgtttgatgactaataattgcctatattacttaccttaataattttgaatttgagacaattacaaaagtattcttgtgatgttttgtactttttggttttaagttatccttaagtttcactaaatgat

SEQ ID NO: 355780 - DNA, 403 bp, Homo sapiens
ctgggattacaggcgtgagccactgcgcctggcctgatagttttttaaaatttaaataatgtatatactgccctttattgctgctttatataggaactttcctcattggttatgcatttagttttatttcaatgataatatcttttgcttaactatttttcctttggttttacaggtttttgattggtcaaggagcacatgtaggggctgtcaacagtgaaggagatacacctttagatattgcggaggaggaggcaatggaagagctacttcaaaatgaagttaatcggcaaggtaaaataaaaagcaacctaaatggaaaaatgttttagaaagaatgtgatacttttccagcaaaaatatttgttgacattgaagggcaatcataatttcatgaaaaaaa

SEQ ID NO: 355781 - DNA, 1364 bp, Homo sapiens
tgacgggtggccgtgctgggggcgggagggcttctgtggtaggaagggaggtccgctcggccgggtgcgccgccccagtgctctgtgggatactggaagtctcgagcgtcggctccgggttcccagccctcctctggcccgcactcatagaaacattcacacaccccctgcctcccctctcttccctctccgcctcccccttccccccctcgcgataagaagacccggcggcaggagaggggatgaagatggcggacgcgaagcagaagcggaacgagcagctgaaacgctggatcggctccgagacggacctcgagcctccggtggtgaagcgccagaagaccaaggtgaagttcgacgatggcgccgtcttcctggctgcttgctccagcggcgacacggacgaggtcctcaagctgctgcaccgcggcgccgacatcaattacgccaatgtggacggactcactgccctgcaccaggcttgcattgatgacaatgttgatatggtgaagtttctggtagaaaatggagcaaatattaatcaacctgataatgaaggctggataccactacatgcagcagcttcctgtggatatcttgatattgcagagtttttgattggtcaaggagcacatgtaggggctgtcaacagtgaaggagatacacctttagatattgcggaggaggaggcaatggaagagctacttcaaaatgaagttaatcggcaaggggttgatatagaagcagctcgaaaggaagaagaacggatcatgcttagagatgccaggcagtggctaaatagtggtcatataaatgatgtccggcatgcaaaatctggaggtacagcacttcacgttgcagctgctaaaggctatacggaagttttaaaacttttaatacaggcaggctatgatgttaatattaaagactatgatggctggacacctcttcatgctgcagctcattggggtaaagaagaagcatgtcgaattttagtggacaatctgtgtgatatggagatggtcaacaaagtgggccaaacagcctttgatgtagcagatgaagacattttaggatatttagaagagttgcaaaagaaacaaaatctgctccatagtgaaaaacgggacaagaaatctccactaattgaatcaacagcaaatatggacaataatcagtcacagaagacctttaaaaacaaagagacgttgattattgaaccagagaaaaatgcatcccgtattgaatctctggaacaagaaaaggttgatgaagaagaagaaggaagaaagaaaaagaacgaaggaggaggagaggaaggagaaggaagaagaaaaagaaggagaaggaagaaggagaagaat

SEQ ID NO: 355782 - DNA, 5342 bp, Homo sapiens
aggcagatctgccctgtagagccttgcggttccactgctggcctccggattcccgggagcccccagcccgacaggacaaccttccttccccgcttcctcctttccagacccggcggcaggagaggggatgaagatggcggacgcgaagcagaagcggaacgagcagctgaaacgctggatcggctccgagacggacctcgagcctccggtggtgaagcgccagaagaccaaggtgaagttcgacgatggcgccgtcttcctggctgcttgctccagcggcgacacggacgaggtcctcaagctgctgcaccgcggcgccgacatcaattacgccaatgtggacggactcactgccctgcaccaggcttgcattgatgacaatgttgatatggtgaagtttctggtagaaaatggagcaaatattaatcaacctgataatgaaggctggataccactacatgcagcagcttcctgtggatatcttgatattgcagagtttttgattggtcaaggagcacatgtaggggctgtcaacagtgaaggagatacacctttagatattgcggaggaggaggcaatggaagagctacttcaaaatgaagttaatcggcaaggggttgatatagaagcagctcgaaaggaagaagaacggatcatgcttagagatgccaggcagtggctaaatagtggtcatataaatgatgtccggcatgcaaaatctggaggtacagcacttcacgttgcagctgctaaaggctatacggaagttttaaaacttttaatacaggcaggctatgatgttaatattaaagactatgatggctggacacctcttcatgctgcagctcattggggtaaagaagaagcatgtcgaattttagtggacaatctgtgtgatatggagatggtcaacaaagtgggccaaacagcctttgatgtagcagatgaagacattttaggatatttagaagagttgcaaaagaaacaaaatctgctccatagtgaaaaacgggacaagaaatctccactaattgaatcaacagcaaatatggacaataatcagtcacagaagacctttaaaaacaaagagacgttgattattgaaccagagaaaaatgcatcccgtattgaatctctggaacaagaaaaggttgatgaagaagaagaaggaaagaaggatgagtctagctgctctagtgaagaagatgaggaagatgactcggaatcagaagctgaaacagataagacaaaacccctggcttctgtaactaatgccaacacttctagtacacaagcagctcctgtagctgttacaacacctactgtgtcatcaggtcaagcaacacctacatcacctattaaaaagtttccaaccacagctacaaaaatttctcccaaagaagaagagagaaaagatgagtctcctgcaacttggaggttaggacttagaaagacgggcagctatggtgcacttgctgaaatcacagcatctaaagagggtcagaaagaaaaagatactgcaggtgttacacgttcagcttcaagtcccagactttcctcctctttggataataaagaaaaggagaaagatagtaaaggaactaggcttgcatatgttgcacctacaataccaagacgactagccagtacatctgacattgaagagaaagaaaacagagattcttcaagtttgcgaacaagtagttcatatacaaggagaaaatgggaagatgatcttaaaaaaaatagctcagttaatgaaggatcaacgtatcataaaagttgctcctttggtagaagacaagatgatttgattagttctagtgttccaagcaccacatcaacaccaacagttacctctgcagctgggcttcagaaaagcctgctttccagcacaagcactactacaaagattacaacgggttcttcctcagcaggcacacaaagcagtacctcaaatcgtttgtgggctgaggatagtactgagaaagaaaaggacagtgttcctacggcagtgaccattcctgttgctccaactgttgtaaatgctgcagcttctaccacaaccctgactacaactactgctggcactgtctcctccacaacagaggtcagggagagacgcagatcatacctcactcctgttagggatgaagagtctgaatcccaaagaaaagcaagatctagacaagcaagacaatctagaagatcaacacagggagtgacattaactgatcttcaagaagctgagaaaacaataggaagaagtcgttctacccgaaccagagaacaagaaaatgaagaaaaagaaaaagaggaaaaagagaaacaagataaagagaaacaagaagaaaagaaggagtcagaaacatctagagaagatgaatataaacaaaagtactccagaacgtatgatgagacttaccagcgttataggccagtatcaacttcaagttcaaccactccatcctcttcactttctactatgagcagttcactgtatgcttcaagtcaactaaacaggccaaatagtcttgtaggcataacttctgcttactccagaggaataacaaaagaaaatgaaagagagggagaaaaaagagaagaggagaaagaaggagaagataaatcacaacctaaatcaatcagagaacgacgacgaccaagagagaaaagaagatctacaggagtttcattttggacacaagatagtgatgaaaatgaacaagaacaacaatcagacacagaagagggatccaataagaaagaaactcagacggattccatttctagatatgaaaccagttctacatcagctggtgatcgatatgattccttgctgggtcgctctggatcatacagttacttagaagaaagaaaaccttacagcagcaggctagaaaaggatgactcaactgactttaaaaagctttatgaacaaattctagctgaaaatgaaaagctgaaggcacagctacatgatacaaatatggaactaacagatcttaaattacagttggaaaaggccacccagagacaagaaagatttgctgatagatcactgttggaaatggaaaaaagggaacgaagagctctagaaagaagaatatctgaaatggaagaagagctcaaaatgttaccagacctaaaagcagacaaccagaggctaaaggatgaaaatggggccttgatcagagttataagcaaactttccaaataaaaaaaaaaaagcagcaagtaatggaattgcacatattagtaacccagtggaccataattggcagtcactggaagtctgggaagaatccttggagactgtcattttcggatatcctgccaaatgccctcttatctagaatttttgtttcattttgtttaattttctggggtgtttttgttgttgttggtttgttttttgtttttttttttaatcaagaccattgtttcatgttaatgcagctgctgagaagatttttttttaatgactgagaaaacttgtttacagctccagcatataaggaaagtgttcaaggccagatatgcctcagatatttaaccagtaagccttagttgtacataaatacttttgtgtcaacaaaaactttcagctctcacagaagacagttactcaacattttttgatgtgccacagtttcgagtttttcgatatttaaattttttggcttttcatctaagtttgggtttgtattttttccttctaaactcttcatgtggcagagtcttctatgttttcacagctttttcattacagaaaagaacacttgctcttctgtgattattgtcatgtattaggctaatgctgtgttgtctcccacctggaactgaattgcttggtggaacatatgctttcactgtttgtgcaatatgcatttatttcttatatgaatgctttaaagtcatttgaggttagatcttttaattcctattttctgcttcattggtcactttttttttattgtagtataagatgttagattctgtaatcttcacattcattttagcaggtactgagtgatgctgtatatacaaataagtgtattgttttgatttttagaccaccacatggcatgcttgactatttcttatttcaaatgtctgctaatgcagagtaggctactccatgatagtgttaaaaaacaaaatttgctaacaatgtgatataaagactttaaaagttacacattatgtggagccctatctttacaaaagtttcctactgtaaagtgcttttattttcagttttcacttgatagtactcaaccataattaaagttgcataagataattgctttacatttcacatacctatatttatctgagtgctgtctaaaactgttgtgctagccaaagtaatgctatgaaatcatttgcagaattaacccgtgagttaatgttaaatgcactgttattgccatgtgaagaggcatcgactttgataccaccatcatgttcagaccattttatacatttcagtggccttttttttttttaaggaaaaaaaagcgcaaaaccaagtacatagtgacgatggcttttatttggacaaatagcttttatattttcattaaaccatgcaaaaaatactacatctttctggcacataactgtctccttaaccactgaacagttcagccatttgaataaattgtacattgtaaagcttatagtagctgattgtattattgattgtattgtatactatattaaatgtgaatttgtaccccttcattttaaaaggtcattgtgttctactgcctattttagattactttggggttggggaagggtgttttggtaagcaggattttaagtcctctctctctcgattggttttatgaagatataaggttatgctcttactaccaagctcaggattcttgattttaaaggtacaaggatagttgtgggagttttatttttggttatatttgaactgtatgaatggtaggtctgaatattgagaatttccatggtcttatgtggaggtaaaatatacagataactgatcagtttgagtgactgcaacatgttctggttgcacaacagttaggcatgctatggtttatatttgtgaagtttggatgcctgtgaagaatgattaaatacatgtttctaatattttagtgttttgtatttaggttatttattctttgtatctaaaactgaacagctactgtgctatattgattttattggtagtattgagcagaccttgtttctgcatgaaactagttgcaaaacccactattttggaaataaaaatgtattttgacatatacaaataaaatgaataaaactattttaaatgtgaaaaaaaaaaa

SEQ ID NO: 355783 - DNA, 5950 bp, Homo sapiens
tgacgggtggccgtgctgggggcgggagggcttctgtggtaggaagggaggtccgctcggccgggtgcgccgccccagtgctctgtgggatactggaagtctcgagcgtcggctccgggttcccagccctcctctggcccgcactcatagaaacattcacacaccccctgcctcccctctcttccctctccgcctcccccttccccccctcgcgataagaagacccggcggcaggagaggggatgaagatggcggacgcgaagcagaagcggaacgagcagctgaaacgctggatcggctccgagacggacctcgagcctccggtggtgaagcgccagaagaccaaggtgaagttcgacgatggcgccgtcttcctggctgcttgctccagcggcgacacggacgaggtcctcaagctgctgcaccgcggcgccgacatcaattacgccaatgtggacggactcactgccctgcaccaggcttgcattgatgacaatgttgatatggtgaagtttctggtagaaaatggagcaaatattaatcaacctgataatgaaggctggataccactacatgcagcagcttcctgtggatatcttgatattgcagagtttttgattggtcaaggagcacatgtaggggctgtcaacagtgaaggagatacacctttagatattgcggaggaggaggcaatggaagagctacttcaaaatgaagttaatcggcaaggggttgatatagaagcagctcgaaaggaagaagaacggatcatgcttagagatgccaggcagtggctaaatagtggtcatataaatgatgtccggcatgcaaaatctggaggtacagcacttcacgttgcagctgctaaaggctatacggaagttttaaaacttttaatacaggcaggctatgatgttaatattaaagactatgatggctggacacctcttcatgctgcagctcattggggtaaagaagaagcatgtcgaattttagtggacaatctgtgtgatatggagatggtcaacaaagtgggccaaacagcctttgatgtagcagatgaagacattttaggatatttagaagagttgcaaaagaaacaaaatctgctccatagtgaaaaacgggacaagaaatctccactaattgaatcaacagcaaatatggacaataatcagtcacagaagacctttaaaaacaaagagacgttgattattgaaccagagaaaaatgcatcccgtattgaatctctggaacaagaaaaggttgatgaagaagaagaaggaaagaaggatgagtctagctgctctagtgaagaagatgaggaagatgactcggaatcagaagctgaaacagataagacaaaacccctggcttctgtaactaatgccaacacttctagtacacaagcagctcctgtagctgttacaacacctactgtgtcatcaggtcaagcaacacctacatcacctattaaaaagtttccaaccacagctacaaaaatttctcccaaagaagaagagagaaaagatgagtctcctgcaacttggaggttaggacttagaaagacgggcagctatggtgcacttgctgaaatcacagcatctaaagagggtcagaaagaaaaagatactgcaggtgttacacgttcagcttcaagtcccagactttcctcctctttggataataaagaaaaggagaaagatagtaaaggaactaggcttgcatatgttgcacctacaataccaagacgactagccagtacatctgacattgaagagaaagaaaacagagattcttcaagtttgcgaacaagtagttcatatacaaggagaaaatgggaagatgatcttaaaaaaaatagctcagttaatgaaggatcaacgtatcataaaagttgctcctttggtagaagacaagatgatttgattagttctagtgttccaagcaccacatcaacaccaacagttacctctgcagctgggcttcagaaaagcctgctttccagcacaagcactactacaaagattacaacgggttcttcctcagcaggcacacaaagcagtacctcaaatcgtttgtgggctgaggatagtactgagaaagaaaaggacagtgttcctacggcagtgaccattcctgttgctccaactgttgtaaatgctgcagcttctaccacaaccctgactacaactactgctggcactgtctcctccacaacagaggtcagggagagacgcagatcatacctcactcctgttagggatgaagagtctgaatcccaaagaaaagcaagatctagacaagcaagacaatctagaagatcaacacagggagtgacattaactgatcttcaagaagctgagaaaacaataggaagaagtcgttctacccgaaccagagaacaagaaaatgaagaaaaagaaaaagaggaaaaagagaaacaagataaagagaaacaagaagaaaagaaggagtcagaaacatctagagaagatgaatataaacaaaagtactccagaacgtatgatgagacttaccagcgttataggccagtatcaacttcaagttcaaccactccatcctcttcactttctactatgagcagttcactgtatgcttcaagtcaactaaacaggccaaatagtcttgtaggcataacttctgcttactccagaggaataacaaaagaaaatgaaagagagggagaaaaaagagaagaggagaaagaaggagaagataaatcacaacctaaatcaatcagagaacgacgacgaccaagagagaaaagaagatctacaggagtttcattttggacacaagatagtgatgaaaatgaacaagaacaacaatcagacacagaagagggatccaataagaaagaaactcagacggattccatttctagatatgaaaccagttctacatcagctggtgatcgatatgattccttgctgggtcgctctggatcatacagttacttagaagaaagaaaaccttacagcagcaggctagaaaaggatgactcaactgactttaaaaagctttatgaacaaattctagctgaaaatgaaaagctgaaggcacagctacatgatacaaatatggaactaacagatcttaaattacagttggaaaaggccacccagagacaagaaagatttgctgatagatcactgttggaaatggaaaaaagggaacgaagagctctagaaagaagaatatctgaaatggaagaagagctcaaagtaagtaaactatgttacttatgagagagagtgctgtttatgtattaatgtttaaaatactattatagatatggtttacattaattgttctcaaagctgattacccaatttgtgaactgtctatatctggtgcttctctttcttcctgaatccaggttttagtgagccagaagagggtctaaaacccaaatcttaacacctagccccgccggctgctgtgggagcggcggccgtccctctcctggaggtcgtctcctggcatcctcggggccgcaggaaggaagaggaggcagcggccggagccctggtgggcggcctgaggtgagagcccgaccggcccctttgggaatatggcgaccggtggctaccggaccagcagcggcctcggcggcagcaccacagacttcctggaggagtggaaggcgaaacgcgagaagatgcgcgccaagcagaaccccccgggcccggcccccccgggagggggcagcagcgacgccgctgggaagccccccgcgggggctctgggcaccccggcggccgccgctgccaacgagctcaacaacaacctcccgggcggcgcgccggccgcacctgccgtccccggtcccgggggcgtgaactgcgcggtcggctccgccatgctgacgcgggcggcccccggcccgcggcggtcggaggacgagcccccagccgcctctgcctcggctgcaccgccgccccagcgtgacgaggaggagccggacggcgtcccagagaagggcaagagctcgggccccagtgccaggaaaggcaaggggcagatcgagaagaggaagctgcgggagaagcggcgctccaccggcgtggtcaacatccctgccgcagagtgcttagatgagtacgaagatgatgaagcagggcagaaagagcggaaacgagaagatgcaattacacaacagaacactatacagaatgaagctgtaaacttactagatccaggcagttcctatctgctacaggagccacctagaacagtttcaggcagatataaaagcacaaccagtgtctctgaagaagatgtctcaagtagatattctcgaacagatagaagtgggttccctagatataacagggatgcaaatgtttcaggtactctggtttcaagtagcacactggaaaagaaaattgaagatcttgaaaaggaagtagtaagagaaagacaagaaaacctaagacttgtgagactgatgcaagataaagaggaaatgattggaaaactcaaagaagaaattgatttattaaatagagacctagatgacatagaagatgaaaatgaacagctaaagcaggaaaataaaactcttttgaaagttgtgggtcagctgaccaggtagaggattcaagactcaatgtggaaaaaatattttaaactactgattgaatgttaatggtcaatgctagcacaatattcctatgctgcaatacattaaaataactaagcaagtatatttatttctagcaaacagatgtttgttttcaaaatacttctttttcattattggttttaaaaaagcattatccttttatctcacaaataagtaatatctttcagttattaaatgatagataatgcctttttggttttgtgtggtattcaactaatacatggtttaaagtcacagccgtttgaatatattttatcttggtagtacattttctcccttaggaatatacatagtctttgtttacatgagttcaaatacttttgggatgttaccttcacatgtcctattactgatgtgtgcaaccttttatgtgttgatgactcactcataaaggtttttgtctactgtcaaaaaaaaaaaaaaaaaaaaaaaaaaaaaaaaaaaaaaaaaaaaaaaaaagcgcaaaaccaagtacatagtgacgatggcttttatttggacaaatagcttttatattttcattaaaccatgcaaaaaatactacatctttctggcacataactgtctccttaaccactgaacagttcagccatttgaataaattgtacattgtaaagcttatagtagctgattgtattattgattgtattgtatactatattaaatgtgaatttgtaccccttcattttaaaaggtcattgtgttctactgcctattttagattactttggggttggggaagggtgttttggtaagcaggattttaagtcctctctctctcgattggttttatgaagatataaggttatgctcttactaccaagctcaggattcttgattttaaaggtacaaggatagttgtgggagttttatttttggttatatttgaactgtatgaatggtaggtctgaatattgagaatttccatggtcttatgtggaggtaaaatatacagataactgatcagtttgagtgactgcaacatgttctggttgcacaacagttaggcatgctatggtttatatttgtgaagtttggatgcctgtgaagaatgattaaatacatgtttctaatattttagtgttttgtatttaggttatttattctttgtatctaaaactgaacagctactgtgctatattgattttattggtagtattgagcagaccttgtttctgcatgaaactagttgcaaaacccactattttggaaataaaaatgtattttgacatatacaaataaaatgaataaaactattttaaatgtgaaaaaaaaaaa

SEQ ID NO: 355784 - DNA, 5489 bp, Homo sapiens
tgacgggtggccgtgctgggggcgggagggcttctgtggtaggaagggaggtccgctcggccgggtgcgccgccccagtgctctgtgggatactggaagtctcgagcgtcggctccgggttcccagccctcctctggcccgcactcatagaaacattcacacaccccctgcctcccctctcttccctctccgcctcccccttccccccctcgcgataagaagacccggcggcaggagaggggatgaagatggcggacgcgaagcagaagcggaacgagcagctgaaacgctggatcggctccgagacggacctcgagcctccggtggtgaagcgccagaagaccaaggtgaagttcgacgatggcgccgtcttcctggctgcttgctccagcggcgacacggacgaggtcctcaagctgctgcaccgcggcgccgacatcaattacgccaatgtggacggactcactgccctgcaccaggcttgcattgatgacaatgttgatatggtgaagtttctggtagaaaatggagcaaatattaatcaacctgataatgaaggctggataccactacatgcagcagcttcctgtggatatcttgatattgcagagtttttgattggtcaaggagcacatgtaggggctgtcaacagtgaaggagatacacctttagatattgcggaggaggaggcaatggaagagctacttcaaaatgaagttaatcggcaaggggttgatatagaagcagctcgaaaggaagaagaacggatcatgcttagagatgccaggcagtggctaaatagtggtcatataaatgatgtccggcatgcaaaatctggaggtacagcacttcacgttgcagctgctaaaggctatacggaagttttaaaacttttaatacaggcaggctatgatgttaatattaaagactatgatggctggacacctcttcatgctgcagctcattggggtaaagaagaagcatgtcgaattttagtggacaatctgtgtgatatggagatggtcaacaaagtgggccaaacagcctttgatgtagcagatgaagacattttaggatatttagaagagttgcaaaagaaacaaaatctgctccatagtgaaaaacgggacaagaaatctccactaattgaatcaacagcaaatatggacaataatcagtcacagaagacctttaaaaacaaagagacgttgattattgaaccagagaaaaatgcatcccgtattgaatctctggaacaagaaaaggttgatgaagaagaagaaggaaagaaggatgagtctagctgctctagtgaagaagatgaggaagatgactcggaatcagaagctgaaacagataagacaaaacccctggcttctgtaactaatgccaacacttctagtacacaagcagctcctgtagctgttacaacacctactgtgtcatcaggtcaagcaacacctacatcacctattaaaaagtttccaaccacagctacaaaaatttctcccaaagaagaagagagaaaagatgagtctcctgcaacttggaggttaggacttagaaagacgggcagctatggtgcacttgctgaaatcacagcatctaaagagggtcagaaagaaaaagatactgcaggtgttacacgttcagcttcaagtcccagactttcctcctctttggataataaagaaaaggagaaagatagtaaaggaactaggcttgcatatgttgcacctacaataccaagacgactagccagtacatctgacattgaagagaaagaaaacagagattcttcaagtttgcgaacaagtagttcatatacaaggagaaaatgggaagatgatcttaaaaaaaatagctcagttaatgaaggatcaacgtatcataaaagttgctcctttggtagaagacaagatgatttgattagttctagtgttccaagcaccacatcaacaccaacagttacctctgcagctgggcttcagaaaagcctgctttccagcacaagcactactacaaagattacaacgggttcttcctcagcaggcacacaaagcagtacctcaaatcgtttgtgggctgaggatagtactgagaaagaaaaggacagtgttcctacggcagtgaccattcctgttgctccaactgttgtaaatgctgcagcttctaccacaaccctgactacaactactgctggcactgtctcctccacaacagaggtcagggagagacgcagatcatacctcactcctgttagggatgaagagtctgaatcccaaagaaaagcaagatctagacaagcaagacaatctagaagatcaacacagggagtgacattaactgatcttcaagaagctgagaaaacaataggaagaagtcgttctacccgaaccagagaacaagaaaatgaagaaaaagaaaaagaggaaaaagagaaacaagataaagagaaacaagaagaaaagaaggagtcagaaacatctagagaagatgaatataaacaaaagtactccagaacgtatgatgagacttaccagcgttataggccagtatcaacttcaagttcaaccactccatcctcttcactttctactatgagcagttcactgtatgcttcaagtcaactaaacaggccaaatagtcttgtaggcataacttctgcttactccagaggaataacaaaagaaaatgaaagagagggagaaaaaagagaagaggagaaagaaggagaagataaatcacaacctaaatcaatcagagaacgacgacgaccaagagagaaaagaagatctacaggagtttcattttggacacaagatagtgatgaaaatgaacaagaacaacaatcagacacagaagagggatccaataagaaagaaactcagacggattccatttctagatatgaaaccagttctacatcagctggtgatcgatatgattccttgctgggtcgctctggatcatacagttacttagaagaaagaaaaccttacagcagcaggctagaaaaggatgactcaactgactttaaaaagctttatgaacaaattctagctgaaaatgaaaagctgaaggcacagctacatgatacaaatatggaactaacagatcttaaattacagttggaaaaggccacccagagacaagaaagatttgctgatagatcactgttggaaatggaaaaaagggtgaccggcaagagtcagtatcttctgggcgggaacgaagagctctagaaagaagaatatctgaaatggaagaagagctcaaaatgttaccagacctaaaagcagacaaccagaggctaaaggatgaaaatggggccttgatcagagttataagcaaactttccaaataaaaaaaaaaaagcagcaagtaatggaattgcacatattagtaacccagtggaccataattggcagtcactggaagtctgggaagaatccttggagactgtcattttcggatatcctgccaaatgccctcttatctagaatttttgtttcattttgtttaattttctggggtgtttttgttgttgttggtttgttttttgtttttttttttaatcaagaccattgtttcatgttaatgcagctgctgagaagatttttttttaatgactgagaaaacttgtttacagctccagcatataaggaaagtgttcaaggccagatatgcctcagatatttaaccagtaagccttagttgtacataaatacttttgtgtcaacaaaaactttcagctctcacagaagacagttactcaacattttttgatgtgccacagtttcgagtttttcgatatttaaattttttggcttttcatctaagtttgggtttgtattttttccttctaaactcttcatgtggcagagtcttctatgttttcacagctttttcattacagaaaagaacacttgctcttctgtgattattgtcatgtattaggctaatgctgtgttgtctcccacctggaactgaattgcttggtggaacatatgctttcactgtttgtgcaatatgcatttatttcttatatgaatgctttaaagtcatttgaggttagatcttttaattcctattttctgcttcattggtcactttttttttattgtagtataagatgttagattctgtaatcttcacattcattttagcaggtactgagtgatgctgtatatacaaataagtgtattgttttgatttttagaccaccacatggcatgcttgactatttcttatttcaaatgtctgctaatgcagagtaggctactccatgatagtgttaaaaaacaaaatttgctaacaatgtgatataaagactttaaaagttacacattatgtggagccctatctttacaaaagtttcctactgtaaagtgcttttattttcagttttcacttgatagtactcaaccataattaaagttgcataagataattgctttacatttcacatacctatatttatctgagtgctgtctaaaactgttgtgctagccaaagtaatgctatgaaatcatttgcagaattaacccgtgagttaatgttaaatgcactgttattgccatgtgaagaggcatcgactttgataccaccatcatgttcagaccattttatacatttcagtggccttttttttttttaaggaaaaaaaagcgcaaaaccaagtacatagtgacgatggcttttatttggacaaatagcttttatattttcattaaaccatgcaaaaaatactacatctttctggcacataactgtctccttaaccactgaacagttcagccatttgaataaattgtacattgtaaagcttatagtagctgattgtattattgattgtattgtatactatattaaatgtgaatttgtaccccttcattttaaaaggtcattgtgttctactgcctattttagattactttggggttggggaagggtgttttggtaagcaggattttaagtcctctctctctcgattggttttatgaagatataaggttatgctcttactaccaagctcaggattcttgattttaaaggtacaaggatagttgtgggagttttatttttggttatatttgaactgtatgaatggtaggtctgaatattgagaatttccatggtcttatgtggaggtaaaatatacagataactgatcagtttgagtgactgcaacatgttctggttgcacaacagttaggcatgctatggtttatatttgtgaagtttggatgcctgtgaagaatgattaaatacatgtttctaatattttagtgttttgtatttaggttatttattctttgtatctaaaactgaacagctactgtgctatattgattttattggtagtattgagcagaccttgtttctgcatgaaactagttgcaaaacccactattttggaaataaaaatgtattttgacatatacaaataaaatgaataaaactattttaaatgtgaaaaaaaaaaa

SEQ ID NO: 355785 - DNA, 7349 bp, Homo sapiens
aggcagatctgccctgtagagccttgcggttccactgctggcctccggattcccgggagcccccagcccgacaggacaaccttccttccccgcttcctcctttccagacccggcggcaggagaggggatgaagatggcggacgcgaagcagaagcggaacgagcagctgaaacgctggatcggctccgagacggacctcgagcctccggtggtgaagcgccagaagaccaaggtgaagttcgacgatggcgccgtcttcctggctgcttgctccagcggcgacacggacgaggtcctcaagctgctgcaccgcggcgccgacatcaattacgccaatgtggacggactcactgccctgcaccaggcttgcattgatgacaatgttgatatggtgaagtttctggtagaaaatggagcaaatattaatcaacctgataatgaaggctggataccactacatgcagcagcttcctgtggatatcttgatattgcagagtttttgattggtcaaggagcacatgtaggggctgtcaacagtgaaggagatacacctttagatattgcggaggaggaggcaatggaagagctacttcaaaatgaagttaatcggcaaggggttgatatagaagcagctcgaaaggaagaagaacggatcatgcttagagatgccaggcagtggctaaatagtggtcatataaatgatgtccggcatgcaaaatctggaggtacagcacttcacgttgcagctgctaaaggctatacggaagttttaaaacttttaatacaggcaggctatgatgttaatattaaagactatgatggctggacacctcttcatgctgcagctcattggggtaaagaagaagcatgtcgaattttagtggacaatctgtgtgatatggagatggtcaacaaagtcagggagtgacattaactgatcttcaagaagctgagaaaacaataggaagaagtcgttctacccgaaccagagaacaagaaaatgaagaaaaagaaaaagaggaaaaagagaaacaagataaagagaaacaagaagaaaagaaggagtcagaaacatctagagaagatgaatataaacaaaagtactccagaacgtatgatgagacttaccagcgttataggccagtatcaacttcaagttcaaccactccatcctcttcactttctactatgagcagttcactgtatgcttcaagtcaactaaacaggccaaatagtcttgtaggcataacttctgcttactccagaggaataacaaaagaaaatgaaagagagggagaaaaaagagaagaggagaaagaaggagaagataaatcacaacctaaatcaatcagagaacgacgacgaccaagagagaaaagaagatctacaggagtttcattttggacacaagatagtgatgaaaatgaacaagaacaacaatcagacacagaagagggatccaataagaaagaaactcagacggattccatttctagatatgaaaccagttctacatcagctggtgatcgatatgattccttgctgggtcgctctggatcatacagttacttagaagaaagaaaaccttacagcagcaggctagaaaaggatgactcaactgactttaaaaagctttatgaacaaattctagctgaaaatgaaaagctgaaggcacagctacatgatacaaatatggaactaacagatcttaaattacagttggaaaaggccacccagagacaagaaagatttgctgatagatcactgttggaaatggaaaaaagggaacgaagagctctagaaagaagaatatctgaaatggaagaagagctcaaagtaagtaaactatgttacttatgagagagagtgctgtttatgtattaatgtttaaaatactattatagatatggtttacattaattgttctcaaagctgattacccaatttgtgaactgtctatatctggtgcttctctttcttcctgaatccaggttttagtgagccagaagagggtctaaaacccaaatcttaacacctagccccgccggctgctgtgggagcggcggccgtccctctcctggaggtcgtctcctggcatcctcggggccgcaggaaggaagaggaggcagcggccggagccctggtgggcggcctgaggtgagagcccgaccggcccctttgggaatatggcgaccggtggctaccggaccagcagcggcctcggcggcagcaccacagacttcctggaggagtggaaggcgaaacgcgagaagatgcgcgccaagcagaaccccccgggcccggcccccccgggagggggcagcagcgacgccgctgggaagccccccgcgggggctctgggcaccccggcggccgccgctgccaacgagctcaacaacaacctcccgggcggcgcgccggccgcacctgccgtccccggtcccgggggcgtgaactgcgcggtcggctccgccatgctgacgcgggcggcccccggcccgcggcggtcggaggacgagcccccagccgcctctgcctcggctgcaccgccgccccagcgtgacgaggaggagccggacggcgtcccagagaagggcaagagctcgggccccagtgccaggaaaggcaaggggcagatcgagaagaggaagctgcgggagaagcggcgctccaccggcgtggtcaacatccctgccgcagagtgcttagatgagtacgaagatgatgaagcagggcagaaagagcggaaacgagaagatgcaattacacaacagaacactatacagaatgaagctgtaaacttactagatccaggcagttcctatctgctacaggagccacctagaacagtttcaggcagatataaaagcacaaccagtgtctctgaagaagatgtctcaagtagatattctcgaacagatagaagtgggttccctagatataacagggatgcaaatgtttcaggtactctggtttcaagtagcacactggaaaagaaaattgaagatcttgaaaaggaagtagtaagagaaagacaagaaaacctaagacttgtgagactgatgcaagataaagaggaaatgattggaaaactcaaagaagaaattgatttattaaatagagacctagatgacatagaagatgaaaatgaacagctaaagcaggaaaataaaactcttttgaaagttgtgggtcagctgaccaggtagaggattcaagactcaatgtggaaaaaatattttaaactactgattgaatgttaatggtcaatgctagcacaatattcctatgctgcaatacattaaaataactaagcaagtatatttatttctagcaaacagatgtttgttttcaaaatacttctttttcattattggttttaaaaaagcattatccttttatctcacaaataagtaatatctttcagttattaaatgatagataatgcctttttggttttgtgtggtattcaactaatacatggtttaaagtcacagccgtttgaatatattttatcttggtagtacattttctcccttaggaatatacatagtctttgtttacatgagttcaaatacttttgggatgttaccttcacatgtcctattactgatgtgtgcaaccttttatgtgttgatgactcactcataaaggtttttgtctactgtcatttgttctttccacttattctaagcatttagagtaatagagtcatacttttttataacagcaaccttttaaaaggaaagctcttataaagtcactgtcatgttttagttgactaaatataaatttaagagaatacttgaattgtgctatagtaaataaaaatttactattttgtgtttgaatattgaaaaattgaatcactttaactcctgaaaaacatacaattgtaatttcaatgtaaaatttcttatgtaggtactacctttttttatcgttccaaggtttgctagtgaacacaggatattttaaaagttttttattcttcgggcctggaaagtgtacaaagtcagtgtaggagaaaaaaatccatatttttatattagcatgcacactaaaaaccaaaatattattcatacttaaaacattcatacaaaacaatatgtaagcagaaatagtactaaaatactttgcctaatttctaagttgaagaataacactgggacacagttttttcatatgagagaatattccgctatttcaaatttaagggattttcttcctaacattgaaattttaaaaacagagttacttctaaataattatacagattttttcttctattaaatattattatttagaattgtttttgtattacatattcatgttaagaaccccgtcttcccttaaaatacattaaaattatgacatttttgctttgtgattgaatttcaaatagcagtatggtatccttttatctagttaatatatgaaagtggcttgaatatagtcaaatccattttaggtactctactgactttttccttcacttgccaagcccttttattgttcactgttagaaaaatagagaaggtgagacagctgggggaaaatgtggagtaaatgataatcaaatgttgaattctaaaagtctctacatttacctaggttggctttctcccccagttcagaagtttccagcttggccaatcatcagaatcacttgaggaacttagaaagaactccctggctgtagctcctatgtaggtttaggttgagactctggattccacaatttttaaaggttaccatctgaggtttctgatcatagtctacttttgaagcagctgctgctgtttctttattccattgaacaccctggaattgacataattttatctatcagcatttctccccttttagtttatttaataattaacccggtctccagggcagttttcatatgaccatgtgtatattcactgctcacgaaaaagtttaatgttagattaccaaatttaatatagttacagaattactgcataagggcttcccttcttggagactcttacccagcatgggaacagtgatctgcccacatgacagggtggtatgccaggcatagttaactgcttttggttgtgaggtactcatcttcctttagttacccttagttatgtggcacacatgtccttattgcctagttcgtcatccacactttggatcttgtgaaaatgctgttagtatccaaccttaaaatatattagtatatgggtttttattaaaagaattactttgaattttctatttaattcatatgtaaataaaggaacatttcatttcacttaaaaaaattatatcagttattaggctgggtgcagtggctcatgcctgtaatcccagcactttgggaggccaaggcgggtggattaccagagttcgggagtttgagaccagcttgaccaacatggagaaaccccgtctctactaaaaatacaaaattagccaggtgtggtggcgcatgcctgtaatcctggctactcaggaggctgaggcaggagaatcgcttgaaaacccaggagacagaggttgcggtgagctgagattgcgccattgtactccagcctgggcaagaagagcgaaactctgtctccaaaaaaaaaaaaaaaaaaatttattaatacttttaaagactgagctgtttaagaattttttggggaacatttctagcagtgatttttttggcctttaatgatagcgtaaagacaggagccttacaacttaggcaaagcatttcacatgcagtccttcttccatctcaaaatatgtacttattttacatacagaattttacactaaccattgaaaaataaagtaggatctgctacagtttcacctgaaaatttataaaaagtgttgagattggtagaaggtagtttttaagtacatgtgcactaccctaaaagacttgtctattgtcaataaagtgttagtatttgtgaaattattattcctgttcagaaatactatttcttaaatctcctgggaatttgtggcataataaagcacattcaaagttctaatgtatttatgagctcattttcaaaatagtaagtttgtcatctttaaaatgaacatgacttgcctccttgatttctgaaatgaattaattgaagattgctatagtaatctttatttcatctttctagagttgttgacaattttattatacaacagttaccattagagaaggagggaagggctttgggtgtgtatttataggtactaagggatttactaaatatagtagattagcactgtcacacttgttcaagtagtttcaaacatagaaaattaagtatcaggtatgtggagcaatgtagtttttttttttcttcagtttaaaaaatttttaattgtggtagaagcaatgtattcttaaggtgaaaaacctacctcggttacatgtggtttgtgttttttggattaatctggattttataattagaaataaaaatgtaagattttgaatccaaaaaaaaaaaaaaaaaaaaaaaaaaaaaaaaaaaaaaaaaaaaaaaaaagcgcaaaaccaagtacatagtgacgatggcttttatttggacaaatagcttttatattttcattaaaccatgcaaaaaatactacatctttctggcacataactgtctccttaaccactgaacagttcagccatttgaataaattgtacattgtaaagcttatagtagctgattgtattattgattgtattgtatactatattaaatgtgaatttgtaccccttcattttaaaaggtcattgtgttctactgcctattttagattactttggggttggggaagggtgttttggtaagcaggattttaagtcctctctctctcgattggttttatgaagatataaggttatgctcttactaccaagctcaggattcttgattttaaaggtacaaggatagttgtgggagttttatttttggttatatttgaactgtatgaatggtaggtctgaatattgagaatttccatggtcttatgtggaggtaaaatatacagataactgatcagtttgagtgactgcaacatgttctggttgcacaacagttaggcatgctatggtttatatttgtgaagtttggatgcctgtgaagaatgattaaatacatgtttctaatattttagtgttttgtatttaggttatttattctttgtatctaaaactgaacagctactgtgctatattgattttattggtagtattgagcagaccttgtttctgcatgaaactagttgcaaaacccactattttggaaataaaaatgtattttgacatatacaaataaaatgaataaaactattttaaatgtgaaaaaaaaaaa

SEQ ID NO: 355786 - DNA, 6463 bp, Homo sapiens
tgacgggtggccgtgctgggggcgggagggcttctgtggtaggaagggaggtccgctcggccgggtgcgccgccccagtgctctgtgggatactggaagtctcgagcgtcggctccgggttcccagccctcctctggcccgcactcatagaaacattcacacaccccctgcctcccctctcttccctctccgcctcccccttccccccctcgcgataagaagacccggcggcaggagaggggatgaagatggcggacgcgaagcagaagcggaacgagcagctgaaacgctggatcggctccgagacggacctcgagcctccggtggtgaagcgccagaagaccaaggtgaagttcgacgatggcgccgtcttcctggctgcttgctccagcggcgacacggacgaggtcctcaagctgctgcaccgcggcgccgacatcaattacgccaatgtggacggactcactgccctgcaccaggcttgcattgatgacaatgttgatatggtgaagtttctggtagaaaatggagcaaatattaatcaacctgataatgaaggctggataccactacatgcagcagcttcctgtggatatcttgatattgcagagtttttgattggtcaaggagcacatgtaggggctgtcaacagtgaaggagatacacctttagatattgcggaggaggaggcaatggaagagctacttcaaaatgaagttaatcggcaaggggttgatatagaagcagctcgaaaggaagaagaacggatcatgcttagagatgccaggcagtggctaaatagtggtcatataaatgatgtccggcatgcaaaatctggaggtacagcacttcacgttgcagctgctaaaggctatacggaagttttaaaacttttaatacaggcaggctatgatgttaatattaaagactatgatggctggacacctcttcatgctgcagctcattggggtaaagaagaagcatgtcgaattttagtggacaatctgtgtgatatggagatggtcaacaaagtgggccaaacagcctttgatgtagcagatgaagacattttaggatatttagaagagttgcaaaagaaacaaaatctgctccatagtgaaaaacgggacaagaaatctccactaattgaatcaacagcaaatatggacaataatcagtcacagaagacctttaaaaacaaagagacgttgattattgaaccagagaaaaatgcatcccgtattgaatctctggaacaagaaaaggttgatgaagaagaagaaggaaagaaggatgagtctagctgctctagtgaagaagatgaggaagatgactcggaatcagaagctgaaacagataagacaaaacccctggcttctgtaactaatgccaacacttctagtacacaagcagctcctgtagctgttacaacacctactgtgtcatcaggtcaagcaacacctacatcacctattaaaaagtttccaaccacagctacaaaaatttctcccaaagaagaagagagaaaagatgagtctcctgcaacttggaggttaggacttagaaagacgggcagctatggtgcacttgctgaaatcacagcatctaaagagggtcagaaagaaaaagatactgcaggtgttacacgttcagcttcaagtcccagactttcctcctctttggataataaagaaaaggagaaagatagtaaaggaactaggcttgcatatgttgcacctacaataccaagacgactagccagtacatctgacattgaagagaaagaaaacagagattcttcaagtttgcgaacaagtagttcatatacaaggagaaaatgggaagatgatcttaaaaaaaatagctcagttaatgaaggatcaacgtatcataaaagttgctcctttggtagaagacaagatgatttgattagttctagtgttccaagcaccacatcaacaccaacagttacctctgcagctgggcttcagaaaagcctgctttccagcacaagcactactacaaagattacaacgggttcttcctcagcaggcacacaaagcagtacctcaaatcgtttgtgggctgaggatagtactgagaaagaaaaggacagtgttcctacggcagtgaccattcctgttgctccaactgttgtaaatgctgcagcttctaccacaaccctgactacaactactgctggcactgtctcctccacaacagaggtcagggagagacgcagatcatacctcactcctgttagggatgaagagtctgaatcccaaagaaaagcaagatctagacaagcaagacaatctagaagatcaacacagggagtgacattaactgatcttcaagaagctgagaaaacaataggaagaagtcgttctacccgaaccagagaacaagaaaatgaagaaaaagaaaaagaggaaaaagagaaacaagataaagagaaacaagaagaaaagaaggagtcagaaacatctagagaagatgaatataaacaaaagtactccagaacgtatgatgagacttaccagcgttataggccagtatcaacttcaagttcaaccactccatcctcttcactttctactatgagcagttcactgtatgcttcaagtcaactaaacaggccaaatagtcttgtaggcataacttctgcttactccagaggaataacaaaagaaaatgaaagagagggagaaaaaagagaagaggagaaagaaggagaagataaatcacaacctaaatcaatcagagaacgacgacgaccaagagagaaaagaagatctacaggagtttcattttggacacaagatagtgatgaaaatgaacaagaacaacaatcagacacagaagagggatccaataagaaagaaactcagacggattccatttctagatatgaaaccagttctacatcagctggtgatcgatatgattccttgctgggtcgctctggatcatacagttacttagaagaaagaaaaccttacagcagcaggctagaaaaggatgactcaactgactttaaaaagctttatgaacaaattctagctgaaaatgaaaagctgaaggcacagctacatgatacaaatatggaactaacagatcttaaattacagttggaaaaggccacccagagacaagaaagatttgctgatagatcactgttggaaatggaaaaaagggaacgaagagctctagaaagaagaatatctgaaatggaagaagagctcaaagtaagtaaactatgttacttatgagagagagtgctgtttatgtattaatgtttaaaatactattatagatatggtttacattaattgttctcaaagctgattacccaatttgtgaactgtctatatctggtgcttctctttcttcctgaatccaggttttagtgagccagaagagggtctaaaacccaaatcttaacacctagccccgccggctgctgtgggagcggcggccgtccctctcctggaggtcgtctcctggcatcctcggggccgcaggaaggaagaggaggcagcggccggagccctggtgggcggcctgaggtgagagcccgaccggcccctttgggaatatggcgaccggtggctaccggaccagcagcggcctcggcggcagcaccacagacttcctggaggagtggaaggcgaaacgcgagaagatgcgcgccaagcagaaccccccgggcccggcccccccgggagggggcagcagcgacgccgctgggaagccccccgcgggggctctgggcaccccggcggccgccgctgccaacgagctcaacaacaacctcccgggcggcgcgccggccgcacctgccgtccccggtcccgggggcgtgaactgcgcggtcggctccgccatgctgacgcgggcggcccccggcccgcggcggtcggaggacgagcccccagccgcctctgcctcggctgcaccgccgccccagcgtgacgaggaggagccggacggcgtcccagagaagggcaagagctcgggccccagtgccaggaaaggcaaggggcagatcgagaagaggaagctgcgggagaagcggcgctccaccggcgtggtcaacatccctgccgcagagtgcttagatgagtacgaagatgatgaagcagggcagaaagagcggaaacgagaagatgcaattacacaacagaacactatacagaatgaagctgtaaacttactagatccaggcagttcctatctgctacaggagccacctagaacagtttcaggcagatataaaagcacaaccagtgtctctgaagaagatgtctcaagtagatattctcgaacagatagaagtgggttccctagatataacagggatgcaaatgtttcaggtactctggtttcaagtagcacactggaaaagaaaattgaagatcttgaaaaggaagtagtaagagaaagacaagaaaacctaagacttgtgagactgatgcaagataaagaggaaatgattggaaaactcaaagaagaaattgatttattaaatagagacctagatgacatagaagatgaaaatgaacagctaaagcaggaaaataaaactcttttgaaagttgtgggtcagctgaccaggtagaggattcaagactcaatgtggaaaaaatattttaaactactgattgaatgttaatggtcaatgctagcacaatattcctatgctgcaatacattaaaataactaagcaagtatatttatttctagcaaacagatgtttgttttcaaaatacttctttttcattattggttttaaaaaagcattatccttttatctcacaaataagtaatatctttcagttattaaatgatagataatgcctttttggttttgtgtggtattcaactaatacatggtttaaagtcacagccgtttgaatatattttatcttggtagtacattttctcccttaggaatatacatagtctttgtttacatgagttcaaatacttttgggatgttaccttcacatgtcctattactgatgtgtgcaaccttttatgtgttgatgactcactcataaaggtttttgtctactgtcatttgttctttccacttattctaagcatttagagtaatagagtcatacttttttataacagcaaccttttaaaaggaaagctcttataaagtcactgtcatgttttagttgactaaatataaatttaagagaatacttgaattgtgctatagtaaataaaaatttactattttgtgtttgaatattgaaaaattgaatcactttaactcctgaaaaacatacaattgtaatttcaatgtaaaatttcttatgtaggtactacctttttttatcgttccaaggtttgctagtgaacacaggatattttaaaagttttttattcttcgggcctggaaagtgtacaaagtcagtgtaggagaaaaaaatccatatttttatattagcatgcacactaaaaaccaaaatattattcatacttaaaacattcatacaaaacaatatgtaagcagaaatagtactaaaatactttgcctaatttctaagttgaagaataacactgggacacagttttttcatatgagagaatattccgctatttcaaatttaagggattttcttcctaacattgaaattttaaaaacagagttacttctaaataattatacagattttttcttctattaaatattattatttagaattgtttttgtattacatattcatgttaagaaccccgtcttcccttaaaatacattaaaattatgacatttttgctttgtgattgaatttcaaatagcagtatggtatccttttatctagttaatatatgaaagtggcttgaatatagtcaaatccattttaggtactctactgactttttccttcacttgccaagcccttttattgttcactgttagaaaaatagagaaggtgagacagctgggggaaaatgtggagtaaatgataatcaaatgttgaattctaaaagtctctacatttacctaggttggctttctcccccagttcagaagtttccagcttgtaaagactgagctgtttaagaattttttggggaacatttctagcagtgatttttttggcctttaatgatagcgtaaagacaggagccttacaacttaggcaaagcatttcacatgcagtccttcttccatctcaaaatatgtacttattttacatacagaattttacactaaccattgaaaaataaagtaggatctgctacagtttcacctgaaaatttataaaaagtgttgagattggtagaaggtagtttttaagtacatgtgcactaccctaaaagacttgtctattgtcaataaagtgttagtatttgtgaaattattattcctgttcagaaatactatttcttaaatctcctgggaatttgtggcataataaagcacattcaaagttctaatgta

SEQ ID NO: 355787 - DNA, 5262 bp, Homo sapiens
tgacgggtggccgtgctgggggcgggagggcttctgtggtaggaagggaggtccgctcggccgggtgcgccgccccagtgctctgtgggatactggaagtctcgagcgtcggctccgggttcccagccctcctctggcccgcactcatagaaacattcacacaccccctgcctcccctctcttccctctccgcctcccccttccccccctcgcgataagaagacccggcggcaggagaggggatgaagatggcggacgcgaagcagaagcggaacgagcagctgaaacgctggatcggctccgagacggacctcgagcctccggtggtgaagcgccagaagaccaaggtgaagttcgacgatggcgccgtcttcctggctgcttgctccagcggcgacacggacgaggtcctcaagctgctgcaccgcggcgccgacatcaattacgccaatgtggacggactcactgccctgcaccaggcttgcattgatgacaatgttgatatggtgaagtttctggtagaaaatggagcaaatattaatcaacctgataatgaaggctggataccactacatgcagcagcttcctgtggatatcttgatattgcagagtttttgattggtcaaggagcacatgtaggggctgtcaacagtgaaggagatacacctttagatattgcggaggaggaggcaatggaagagctacttcaaaatgaagttaatcggcaaggggttgatatagaagcagctcgaaaggaagaagaacggatcatgcttagagatgccaggcagtggctaaatagtggtcatataaatgatgtccggcatgcaaaatctggaggtacagcacttcacgttgcagctgctaaaggctatacggaagttttaaaacttttaatacaggcaggctatgatgttaatattaaagactatgatggctggacacctcttcatgctgcagctcattggggtaaagaagaagcatgtcgaattttagtggacaatctgtgtgatatggagatggtcaacaaagtgggccaaacagcctttgatgtagcagatgaagacattttaggatatttagaagagttgcaaaagaaacaaaatctgctccatagtgaaaaacgggacaagaaatctccactaattgaatcaacagcaaatatggacaataatcagtcacagaagacctttaaaaacaaagagacgttgattattgaaccagagaaaaatgcatcccgtattgaatctctggaacaagaaaaggttgatgaagaagaagaaggaaagaaggatgagtctagctgctctagtgaagaagatgaggaagatgactcggaatcagaagctgaaacagataagacaaaacccctggcttctgtaactaatgccaacacttctagtacacaagcagctcctgtagctgttacaacacctactgtgtcatcaggtcaagcaacacctacatcacctattaaaaagtttccaaccacagctacaaaaatttctcccaaagaagaagagagaaaagatgagtctcctgcaacttggaggttaggacttagaaagacgggcagctatggtgcacttgctgaaatcacagcatctaaagagggtcagaaagaaaaagatactgcaggtgttacacgttcagcttcaagtcccagactttcctcctctttggataataaagaaaaggagaaagatagtaaaggaactaggcttgcatatgttgcacctacaataccaagacgactagccagtacatctgacattgaagagaaagaaaacagagattcttcaagtttgcgaacaagtagttcatatacaaggagaaaatgggaagatgatcttaaaaaaaatagctcagttaatgaaggatcaacgtatcataaaagttgctcctttggtagaagacaagatgatttgattagttctagtgttccaagcaccacatcaacaccaacagttacctctgcagctgggcttcagaaaagcctgctttccagcacaagcactactacaaagattacaacgggttcttcctcagcaggcacacaaagcagtacctcaaatcgtttgtgggctgaggatagtactgagaaagaaaaggacagtgttcctacggcagtgaccattcctgttgctccaactgttgtaaatgctgcagcttctaccacaaccctgactacaactactgctggcactgtctcctccacaacagaggtcagggagagacgcagatcatacctcactcctgttagggatgaagagtctgaatcccaaagaaaagcaagatctagacaagcaagacaatctagaagatcaacacagggagtgacattaactgatcttcaagaagctgagaaaacaataggaagaagtcgttctacccgaaccagagaacaagaaaatgaagaaaaagaaaaagaggaaaaagagaaacaagataaagagaaacaagaagaaaagaaggagtcagaaacatctagagaagatgaatataaacaaaagtactccagaacgtatgatgagacttaccagcgttataggccagtatcaacttcaagttcaaccactccatcctcttcactttctactatgagcagttcactgtatgcttcaagtcaactaaacaggccaaatagtcttgtaggcataacttctgcttactccagaggaataacaaaagaaaatgaaagagagggagaaaaaagagaagaggagaaagaaggagaagataaatcacaacctaaatcaatcagagaacgacgacgaccaagagagaaaagaagatctacaggagtttcattttggacacaagatagtgatgaaaatgaacaagaacaacaatcagacacagaagagggatccaataagaaagaaactcagacggattccatttctagatatgaaaccagttctacatcagctggtgatcgatatgattccttgctgggtcgctctggatcatacagttacttagaagaaagaaaaccttacagcagcaggctagaaaaggatgactcaactgactttaaaaagctttatgaacaaattctagctgaaaatgaaaagctgaaggcacagctacatgatacaaatatggaactaacagatcttaaattacagttggaaaaggccacccagagacaagaaagatttgctgatagatcactgttggaaatggaaaaaagggaacgaagagctctagaaagaagaatatctgaaatggaagaagagctcaaagtaagtaaactatgttacttatgagagagagtgctgtttatgtattaatgtttaaaatactattatagatatggtttacattaattgttctcaaagctgattacccaatttgtgaactgtctatatctggtgcttctctttcttcctgaatccaggttttagtgagccagaagagggtctaaaacccaaatcttaacacctagccccgccggctgctgtgggagcggcggccgtccctctcctggaggtcgtctcctggcatcctcggggccgcaggaaggaagaggaggcagcggccggagccctggtgggcggcctgaggtgagagcccgaccggcccctttgggaatatggcgaccggtggctaccggaccagcagcggcctcggcggcagcaccacagacttcctggaggagtggaaggcgaaacgcgagaagatgcgcgccaagcagaaccccccgggcccggcccccccgggagggggcagcagcgacgccgctgggaagccccccgcgggggctctgggcaccccggcggccgccgctgccaacgagctcaacaacaacctcccgggcggcgcgccggccgcacctgccgtccccggtcccgggggcgtgaactgcgcggtcggctccgccatgctgacgcgggcggcccccggcccgcggcggtcggaggacgagcccccagccgcctctgcctcggctgcaccgccgccccagcgtgacgaggaggagccggacggcgtcccagagaagggcaagagctcgggccccagtgccaggaaaggcaaggggcagatcgagaagaggaagctgcgggagaagcggcgctccaccggcgtggtcaacatccctgccgcagagtgcttagatgagtacgaagatgatgaagcagggcagaaagagcggaaacgagaagatgcaattacacaacagaacactatacagaatgaagctgtaaacttactagatccaggcagttcctatctgctacaggagccacctagaacagtttcaggcagatataaaagcacaaccagtgtctctgaagaagatgtctcaagtagatattctcgaacagatagaagtgggttccctagatataacagggatgcaaatgtttcaggtactctggtttcaagtagcacactggaaaagaaaattgaagatcttgaaaaggaagtagtaagagaaagacaagaaaacctaagacttgtgagactgatgcaagataaagaggaaatgattggaaaactcaaagaagaaattgatttattaaatagaggacctagatgacatagaagatgaaaatgaacagctaaagcaggaaaataaaactcttttgaaagttgtgggtcagctgaccaggtagaggattcaagactcaatgtggaaaaaatattttaaactactgattgaatgttaatggtcaatgctagcacaatattcctatgctgcaatacattaaaataactaagcaagtatatttatttctagcaaacagatgtttgttttcaaaatacttctttttcattattggttttaaaaaagcattatccttttatctcacaaataagtaatatctttcagttattaaatgatagataatgcctttttggttttgtgtggtattcaactaatacatggtttaaagtcacagccgtttgaatatattttatcttggtagtacattttctcccttaggaatatacatagtctttgtttacatgagttcaaatacttttgggatgttaccttcacatgtcctattactgatgtgtgcaaccttttatgtgttgatgactcactcataaaggtttttgtctactgtcatttgttctttccacttattctaagcatttagagtaatagagtcatacttttttataacagcaaccttttaaaaggaaagctcttataaagtcactgtcatgttttagttgactaaatataaatttaagagaatacttgaattgtgctatagtaaataaaaatttactattttgtgtttg

SEQ ID NO: 355788 - DNA, 4393 bp, Homo sapiens
  misc_feature (4358)..(4358): n is a, c, g, or t
tgacgggtggccgtgctgggggcgggagggcttctgtggtaggaagggaggtccgctcggccgggtgcgccgccccagtgctctgtgggatactggaagtctcgagcgtcggctccgggttcccagccctcctctggcccgcactcatagaaacattcacacaccccctgcctcccctctcttccctctccgcctcccccttccccccctcgcgataagaagacccggcggcaggagaggggatgaagatggcggacgcgaagcagaagcggaacgagcagctgaaacgctggatcggctccgagacggacctcgagcctccggtggtgaagcgccagaagaccaaggtgaagttcgacgatggcgccgtcttcctggctgcttgctccagcggcgacacggacgaggtcctcaagctgctgcaccgcggcgccgacatcaattacgccaatgtggacggactcactgccctgcaccaggcttgcattgatgacaatgttgatatggtgaagtttctggtagaaaatggagcaaatattaatcaacctgataatgaaggctggataccactacatgcagcagcttcctgtggatatcttgatattgcagagtttttgattggtcaaggagcacatgtaggggctgtcaacagtgaaggagatacacctttagatattgcggaggaggaggcaatggaagagctacttcaaaatgaagttaatcggcaaggggttgatatagaagcagctcgaaaggaagaagaacggatcatgcttagagatgccaggcagtggctaaatagtggtcatataaatgatgtccggcatgcaaaatctggaggtacagcacttcacgttgcagctgctaaaggctatacggaagttttaaaacttttaatacaggcaggctatgatgttaatattaaagactatgatggctggacacctcttcatgctgcagctcattggggtaaagaagaagcatgtcgaattttagtggacaatctgtgtgatatggagatggtcaacaaagtgggccaaacagcctttgatgtagcagatgaagacattttaggatatttagaagagttgcaaaagaaacaaaatctgctccatagtgaaaaacgggacaagaaatctccactaattgaatcaacagcaaatatggacaataatcagtcacagaagacctttaaaaacaaagagacgttgattattgaaccagagaaaaatgcatcccgtattgaatctctggaacaagaaaaggttgatgaagaagaagaaggaaagaaggatgagtctagctgctctagtgaagaagatgaggaagatgactcggaatcagaagctgaaacagataagacaaaacccctggcttctgtaactaatgccaacacttctagtacacaagcagctcctgtagctgttacaacacctactgtgtcatcaggtcaagcaacacctacatcacctattaaaaagtttccaaccacagctacaaaaatttctcccaaagaagaagagagaaaagatgagtctcctgcaacttggaggttaggacttagaaagacgggcagctatggtgcacttgctgaaatcacagcatctaaagagggtcagaaagaaaaagatactgcaggtgttacacgttcagcttcaagtcccagactttcctcctctttggataataaagaaaaggagaaagatagtaaaggaactaggcttgcatatgttgcacctacaataccaagacgactagccagtacatctgacattgaagagaaagaaaacagagattcttcaagtttgcgaacaagtagttcatatacaaggagaaaatgggaagatgatcttaaaaaaaatagctcagttaatgaaggatcaacgtatcataaaagttgctcctttggtagaagacaagatgatttgattagttctagtgttccaagcaccacatcaacaccaacagttacctctgcagctgggcttcagaaaagcctgctttccagcacaagcactactacaaagattacaacgggttcttcctcagcaggcacacaaagcagtacctcaaatcgtttgtgggctgaggatagtactgagaaagaaaaggacagtgttcctacggcagtgaccattcctgttgctccaactgttgtaaatgctgcagcttctaccacaaccctgactacaactactgctggcactgtctcctccacaacagaggtcagggagagacgcagatcatacctcactcctgttagggatgaagagtctgaatcccaaagaaaagcaagatctagacaagcaagacaatctagaagatcaacacagggagtgacattaactgatcttcaagaagctgagaaaacaataggaagaagtcgttctacccgaaccagagaacaagaaaatgaagaaaaagaaaaagaggaaaaagagaaacaagataaagagaaacaagaagaaaagaaggagtcagaaacatctagagaagatgaatataaacaaaagtactccagaacgtatgatgagacttaccagcgttataggccagtatcaacttcaagttcaaccactccatcctcttcactttctactatgagcagttcactgtatgcttcaagtcaactaaacaggccaaatagtcttgtaggcataacttctgcttactccagaggaataacaaaagaaaatgaaagagagggagaaaaaagagaagaggagaaagaaggagaagataaatcacaacctaaatcaatcagagaacgacgacgaccaagagagaaaagaagatctacaggagtttcattttggacacaagatagtgatgaaaatgaacaagaacaacaatcagacacagaagagggatccaataagaaagaaactcagacggattccatttctagatatgaaaccagttctacatcagctggtgatcgatatgattccttgctgggtcgctctggatcatacagttacttagaagaaagaaaaccttacagcagcaggctagaaaaggatgactcaactgactttaaaaagctttatgaacaaattctagctgaaaatgaaaagctgaaggcacagctacatgatacaaatatggaactaacagatcttaaattacagttggaaaaggccacccagagacaagaaagatttgctgatagatcactgttggaaatggaaaaaagggaacgaagagctctagaaagaagaatatctgaaatggaagaagagctcaaagtaagtaaactatgttacttatgagagagagtgctgtttatgtattaatgtttaaaatactattatagatatggtttacattaattgttctcaaagctgattacccaatttgtgaactgtctatatctggtgcttctctttcttcctgaatccaggttttagtgagccagaagagggtctaaaacccaaatcttaacacctagccccgccggctgctgtgggagcggcggccgtccctctcctggaggtcgtctcctggcatcctcggggccgcaggaaggaagaggaggcagcggccggagccctggtgggcggcctgaggtgagagcccgaccggcccctttgggaatatggcgaccggtggctaccggaccagcagcggcctcggcggcagcaccacagacttcctggaggagtggaaggcgaaacgcgagaagatgcgcgccaagcagaaccccccgggcccggcccccccgggagggggcagcagcgacgccgctgggaagccccccgcgggggctctgggcaccccggcggccgccgctgccaacgagctcaacaacaacctcccgggcggcgcgccggccgcacctgccgtccccggtcccgggggcgtgaactgcgcggtcggctccgccatgctgacgcgggcggcccccggcccgcggcggtcggaggacgagcccccagccgcctctgcctcggctgcaccgccgccccagcgtgacgaggaggagccggacggcgtcccagagaagggcaagagctcgggccccagtgccaggaaaggcaaggggcagatcgagaagaggaagctgcgggagaagcggcgctccaccggcgtggtcaacatccctgccgcagagtgcttagatgagtacgaagatgatgaagcagggcagaaagagcggaaacgagaagatgcaattacacaacagaacactatacagaatgaagctgtaaacttactagatccaggcagttcctatctgctacaggagccacctagaacagtttcaggcagatataaaagcacaaccagtgtctctgaagaagatgtctcaagtagatattctcgaacagatagaagtgggggttcccccttaaggnaaatttttttttttttttaaaaaaccccccaaaag

SEQ ID NO: 355789 - DNA, 4862 bp, Homo sapiens
tgacgggtggccgtgctgggggcgggagggcttctgtggtaggaagggaggtccgctcggccgggtgcgccgccccagtgctctgtgggatactggaagtctcgagcgtcggctccgggttcccagccctcctctggcccgcactcatagaaacattcacacaccccctgcctcccctctcttccctctccgcctcccccttccccccctcgcgataagaagacccggcggcaggagaggggatgaagatggcggacgcgaagcagaagcggaacgagcagctgaaacgctggatcggctccgagacggacctcgagcctccggtggtgaagcgccagaagaccaaggtgaagttcgacgatggcgccgtcttcctggctgcttgctccagcggcgacacggacgaggtcctcaagctgctgcaccgcggcgccgacatcaattacgccaatgtggacggactcactgccctgcaccaggcttgcattgatgacaatgttgatatggtgaagtttctggtagaaaatggagcaaatattaatcaacctgataatgaaggctggataccactacatgcagcagcttcctgtggatatcttgatattgcagagtttttgattggtcaaggagcacatgtaggggctgtcaacagtgaaggagatacacctttagatattgcggaggaggaggcaatggaagagctacttcaaaatgaagttaatcggcaaggggttgatatagaagcagctcgaaaggaagaagaacggatcatgcttagagatgccaggcagtggctaaatagtggtcatataaatgatgtccggcatgcaaaatctggaggtacagcacttcacgttgcagctgctaaaggctatacggaagttttaaaacttttaatacaggcaggctatgatgttaatattaaagactatgatggctggacacctcttcatgctgcagctcattggggtaaagaagaagcatgtcgaattttagtggacaatctgtgtgatatggagatggtcaacaaagtgggccaaacagcctttgatgtagcagatgaagacattttaggatatttagaagagttgcaaaagaaacaaaatctgctccatagtgaaaaacgggacaagaaatctccactaattgaatcaacagcaaatatggacaataatcagtcacagaagacctttaaaaacaaagagacgttgattattgaaccagagaaaaatgcatcccgtattgaatctctggaacaagaaaaggttgatgaagaagaagaaggaaagaaggatgagtctagctgctctagtgaagaagatgaggaagatgactcggaatcagaagctgaaacagataagacaaaacccctggcttctgtaactaatgccaacacttctagtacacaagcagctcctgtagctgttacaacacctactgtgtcatcaggtcaagcaacacctacatcacctattaaaaagtttccaaccacagctacaaaaatttctcccaaagaagaagagagaaaagatgagtctcctgcaacttggaggttaggacttagaaagacgggcagctatggtgcacttgctgaaatcacagcatctaaagagggtcagaaagaaaaagatactgcaggtgttacacgttcagcttcaagtcccagactttcctcctctttggataataaagaaaaggagaaagatagtaaaggaactaggcttgcatatgttgcacctacaataccaagacgactagccagtacatctgacattgaagagaaagaaaacagagattcttcaagtttgcgaacaagtagttcatatacaaggagaaaatgggaagatgatcttaaaaaaaatagctcagttaatgaaggatcaacgtatcataaaagttgctcctttggtagaagacaagatgatttgattagttctagtgttccaagcaccacatcaacaccaacagttacctctgcagctgggcttcagaaaagcctgctttccagcacaagcactactacaaagattacaacgggttcttcctcagcaggcacacaaagcagtacctcaaatcgtttgtgggctgaggatagtactgagaaagaaaaggacagtgttcctacggcagtgaccattcctgttgctccaactgttgtaaatgctgcagcttctaccacaaccctgactacaactactgctggcactgtctcctccacaacagaggtcagggagagacgcagatcatacctcactcctgttagggatgaagagtctgaatcccaaagaaaagcaagatctagacaagcaagacaatctagaagatcaacacagggagtgacattaactgatcttcaagaagctgagaaaacaataggaagaagtcgttctacccgaaccagagaacaagaaaatgaagaaaaagaaaaagaggaaaaagagaaacaagataaagagaaacaagaagaaaagaaggagtcagaaacatctagagaagatgaatataaacaaaagtactccagaacgtatgatgagacttaccagcgttataggccagtatcaacttcaagttcaaccactccatcctcttcactttctactatgagcagttcactgtatgcttcaagtcaactaaacaggccaaatagtcttgtaggcataacttctgcttactccagaggaataacaaaagaaaatgaaagagagggagaaaaaagagaagaggagaaagaaggagaagataaatcacaacctaaatcaatcagagaacgacgacgaccaagagagaaaagaagatctacaggagtttcattttggacacaagatagtgatgaaaatgaacaagaacaacaatcagacacagaagagggatccaataagaaagaaactcagacggattccatttctagatatgaaaccagttctacatcagctggtgatcgatatgattccttgctgggtcgctctggatcatacagttacttagaagaaagaaaaccttacagcagcaggctagaaaaggatgactcaactgactttaaaaagctttatgaacaaattctagctgaaaatgaaaagctgaaggcacagctacatgatacaaatatggaactaacagatcttaaattacagttggaaaaggccacccagagacaagaaagatttgctgatagatcactgttggaaatggaaaaaagggaacgaagagctctagaaagaagaatatctgaaatggaagaagagctcaaagtaagtaaactatgttacttatgagagagagtgctgtttatgtattaatgtttaaaatactattatagatatggtttacattaattgttctcaaagctgattacccaatttgtgaactgtctatatctggtgcttctctttcttcctgaatccaggttttagtgagccagaagagggtctaaaacccaaatcttaacacctagccccgccggctgctgtgggagcggcggccgtccctctcctggaggtcgtctcctggcatcctcggggccgcaggaaggaagaggaggcagcggccggagccctggtgggcggcctgaggtgagagcccgaccggcccctttgggaatatggcgaccggtggctaccggaccagcagcggcctcggcggcagcaccacagacttcctggaggagtggaaggcgaaacgcgagaagatgcgcgccaagcagaaccccccgggcccggcccccccgggagggggcagcagcgacgccgctgggaagccccccgcgggggctctgggcaccccggcggccgccgctgccaacgagctcaacaacaacctcccgggcggcgcgccggccgcacctgccgtccccggtcccgggggcgtgaactgcgcggtcggctccgccatgctgacgcgggcggcccccggcccgcggcggtcggaggacgagcccccagccgcctctgcctcggctgcaccgccgccccagcgtgacgaggaggagccggacggcgtcccagagaagggcaagagctcgggccccagtgccaggaaaggcaaggggcagatcgagaagaggaagctgcgggagaagcggcgctccaccggcgtggtcaacatccctgccgcagagttaaaaatatgaagattaaggggaaattgaagacaaggctttggaaaagctacattcctcaacttgatttttaaaagtagctgatgatccaaataaaagaatttgtcattttcaatcttttcctcattgttcatctgacagcggtcttattttgggaaatatcttggcagatgttaaacttcactttttttctggctgcatgtgctaaaattatttttcaagtactttttttttttttaaacaagggtaatgtttactgggggaagtaagtagagtgtatcttgtgagatcctaagaaacatcttttgttaatacccctgctttgagtaagagaacatagtgctgagaatgtagatgacttcccactacaatggagtctaatactctggaatgtttttcgtttgggtgttggcaactcctaaatttaatcttccctgaaaacaaacaaaccaagggtacctttttttttgtctgtagagtttgaacctttttattgaatagggaattgaggactgctttcttttagtggtaactatgtctctgtccgtttcaagctgcaggacccaacaaaacagtaatgcttcactacagtatctaattaacagacatacttcttgagcgcctcctcctcatattttcttatttttcaaaacaacttatgtatttcagattattttaatagtggtaaaatatatgatgcaaaactttaaagctgagccattttcatgtgtttatattgttgcttttt

SEQ ID NO: 355790 - DNA, 4491 bp, Homo sapiens
tgacgggtggccgtgctgggggcgggagggcttctgtggtaggaagggaggtccgctcggccgggtgcgccgccccagtgctctgtgggatactggaagtctcgagcgtcggctccgggttcccagccctcctctggcccgcactcatagaaacattcacacaccccctgcctcccctctcttccctctccgcctcccccttccccccctcgcgataagaagacccggcggcaggagaggggatgaagatggcggacgcgaagcagaagcggaacgagcagctgaaacgctggatcggctccgagacggacctcgagcctccggtggtgaagcgccagaagaccaaggtgaagttcgacgatggcgccgtcttcctggctgcttgctccagcggcgacacggacgaggtcctcaagctgctgcaccgcggcgccgacatcaattacgccaatgtggacggactcactgccctgcaccaggcttgcattgatgacaatgttgatatggtgaagtttctggtagaaaatggagcaaatattaatcaacctgataatgaaggctggataccactacatgcagcagcttcctgtggatatcttgatattgcagagtttttgattggtcaaggagcacatgtaggggctgtcaacagtgaaggagatacacctttagatattgcggaggaggaggcaatggaagagctacttcaaaatgaagttaatcggcaaggggttgatatagaagcagctcgaaaggaagaagaacggatcatgcttagagatgccaggcagtggctaaatagtggtcatataaatgatgtccggcatgcaaaatctggaggtacagcacttcacgttgcagctgctaaaggctatacggaagttttaaaacttttaatacaggcaggctatgatgttaatattaaagactatgatggctggacacctcttcatgctgcagctcattggggtaaagaagaagcatgtcgaattttagtggacaatctgtgtgatatggagatggtcaacaaagtgggccaaacagcctttgatgtagcagatgaagacattttaggatatttagaagagttgcaaaagaaacaaaatctgctccatagtgaaaaacgggacaagaaatctccactaattgaatcaacagcaaatatggacaataatcagtcacagaagacctttaaaaacaaagagacgttgattattgaaccagagaaaaatgcatcccgtattgaatctctggaacaagaaaaggttgatgaagaagaagaaggaaagaaggatgagtctagctgctctagtgaagaagatgaggaagatgactcggaatcagaagctgaaacagataagacaaaacccctggcttctgtaactaatgccaacacttctagtacacaagcagctcctgtagctgttacaacacctactgtgtcatcaggtcaagcaacacctacatcacctattaaaaagtttccaaccacagctacaaaaatttctcccaaagaagaagagagaaaagatgagtctcctgcaacttggaggttaggacttagaaagacgggcagctatggtgcacttgctgaaatcacagcatctaaagagggtcagaaagaaaaagatactgcaggtgttacacgttcagcttcaagtcccagactttcctcctctttggataataaagaaaaggagaaagatagtaaaggaactaggcttgcatatgttgcacctacaataccaagacgactagccagtacatctgacattgaagagaaagaaaacagagattcttcaagtttgcgaacaagtagttcatatacaaggagaaaatgggaagatgatcttaaaaaaaatagctcagttaatgaaggatcaacgtatcataaaagttgctcctttggtagaagacaagatgatttgattagttctagtgttccaagcaccacatcaacaccaacagttacctctgcagctgggcttcagaaaagcctgctttccagcacaagcactactacaaagattacaacgggttcttcctcagcaggcacacaaagcagtacctcaaatcgtttgtgggctgaggatagtactgagaaagaaaaggacagtgttcctacggcagtgaccattcctgttgctccaactgttgtaaatgctgcagcttctaccacaaccctgactacaactactgctggcactgtctcctccacaacagaggtcagggagagacgcagatcatacctcactcctgttagggatgaagagtctgaatcccaaagaaaagcaagatctagacaagcaagacaatctagaagatcaacacagggagtgacattaactgatcttcaagaagctgagaaaacaataggaagaagtcgttctacccgaaccagagaacaagaaaatgaagaaaaagaaaaagaggaaaaagagaaacaagataaagagaaacaagaagaaaagaaggagtcagaaacatctagagaagatgaatataaacaaaagtactccagaacgtatgatgagacttaccagcgttataggccagtatcaacttcaagttcaaccactccatcctcttcactttctactatgagcagttcactgtatgcttcaagtcaactaaacaggccaaatagtcttgtaggcataacttctgcttactccagaggaataacaaaagaaaatgaaagagagggagaaaaaagagaagaggagaaagaaggagaagataaatcacaacctaaatcaatcagagaacgacgacgaccaagagagaaaagaagatctacaggagtttcattttggacacaagatagtgatgaaaatgaacaagaacaacaatcagacacagaagagggatccaataagaaagaaactcagacggattccatttctagatatgaaaccagttctacatcagctggtgatcgatatgattccttgctgggtcgctctggatcatacagttacttagaagaaagaaaaccttacagcagcaggctagaaaaggatgactcaactgactttaaaaagctttatgaacaaattctagctgaaaatgaaaagctgaaggcacagctacatgatacaaatatggaactaacagatcttaaattacagttggaaaaggccacccagagacaagaaagatttgctgatagatcactgttggaaatggaaaaaagggaacgaagagctctagaaagaagaatatctgaaatggaagaagagctcaaagtaagtaaactatgttacttatgagagagagtgctgtttatgtattaatgtttaaaatactattatagatatggtttacattaattgttctcaaagctgattacccaatttgtgaactgtctatatctggtgcttctctttcttcctgaatccaggttttagtgagccagaagagggtctaaaacccaaatcttaacacctagccccgccggctgctgtgggagcggcggccgtccctctcctggaggtcgtctcctggcatcctcggggccgcaggaaggaagaggaggcagcggccggagccctggtgggcggcctgaggtgagagcccgaccggcccctttgggaatatggcgaccggtggctaccggaccagcagcggcctcggcggcagcaccacagacttcctggaggagtggaaggcgaaacgcgagaagatgcgcgccaagcagaaccccccgggcccggcccccccgggagggggcagcagcgacgccgctgggaagccccccgcgggggctctgggcaccccggcggccgccgctgccaacgagctcaacaacaacctcccgggcggcgcgccggccgcacctgccgtccccggtcccgggggcgtgaactgcgcggtcggctccgccatgctgacgcgggcggcccccggcccgcggcggtcggaggacgagcccccagccgcctctgcctcggctgcaccgccgccccagcgtgacgaggaggagccggacggcgtcccagagaagggcaagagctcgggccccagtgccaggaaaggcaaggggcagatcgagaagaggaagctgcgggagaagcggcgctccaccggcgtggtcaacatccctgccgcagagtgcttagatgagtacgaagatgatgaagcagggcagaaagagcggaaacgagaagatgcaattacacaacagaacactatacagaatgaagctgtaaacttactagatccaggcagttcctatctgctacaggagccacctagaacggttcagggcgattttaattggacagagattatcctttatagagcgaggagctgttacaaggagtgggagtgttggaggggtaagagcatggggccgtgaagactctaaggggtggagccagtatgtagagttgggttgggagtctgatatatcggtcttcggtattgtgcttttctatagaggtgatacctcaggctgtgttatctcaggtagcgtatatgtatttctgg

SEQ ID NO: 355791 - DNA, 3402 bp, Homo sapiens
tgacgggtggccgtgctgggggcgggagggcttctgtggtaggaagggaggtccgctcggccgggtgcgccgccccagtgctctgtgggatactggaagtctcgagcgtcggctccgggttcccagccctcctctggcccgcactcatagaaacattcacacaccccctgcctcccctctcttccctctccgcctcccccttccccccctcgcgataagaagacccggcggcaggagaggggatgaagatggcggacgcgaagcagaagcggaacgagcagctgaaacgctggatcggctccgagacggacctcgagcctccggtggtgaagcgccagaagaccaaggtgaagttcgacgatggcgccgtcttcctggctgcttgctccagcggcgacacggacgaggtcctcaagctgctgcaccgcggcgccgacatcaattacgccaatgtggacggactcactgccctgcaccaggcttgcattgatgacaatgttgatatggtgaagtttctggtagaaaatggagcaaatattaatcaacctgataatgaaggctggataccactacatgcagcagcttcctgtggatatcttgatattgcagagtttttgattggtcaaggagcacatgtaggggctgtcaacagtgaaggagatacacctttagatattgcggaggaggaggcaatggaagagctacttcaaaatgaagttaatcggcaaggggttgatatagaagcagctcgaaaggaagaagaacggatcatgcttagagatgccaggcagtggctaaatagtggtcatataaatgatgtccggcatgcaaaatctggaggtacagcacttcacgttgcagctgctaaaggctatacggaagttttaaaacttttaatacaggcaggctatgatgttaatattaaagactatgatggctggacacctcttcatgctgcagctcattggggtaaagaagaagcatgtcgaattttagtggacaatctgtgtgatatggagatggtcaacaaagtgggccaaacagcctttgatgtagcagatgaagacattttaggatatttagaagagttgcaaaagaaacaaaatctgctccatagtgaaaaacgggacaagaaatctccactaattgaatcaacagcaaatatggacaataatcagtcacagaagacctttaaaaacaaagagacgttgattattgaaccagagaaaaatgcatcccgtattgaatctctggaacaagaaaaggttgatgaagaagaagaaggaaagaaggatgagtctagctgctctagtgaagaagatgaggaagatgactcggaatcagaagctgaaacagataagacaaaacccctggcttctgtaactaatgccaacacttctagtacacaagcagctcctgtagctgttacaacacctactgtgtcatcaggtcaagcaacacctacatcacctattaaaaagtttccaaccacagctacaaaaatttctcccaaagaagaagagagaaaagatgagtctcctgcaacttggaggttaggacttagaaagacgggcagctatggtgcacttgctgaaatcacagcatctaaagagggtcagaaagaaaaagatactgcaggtgttacacgttcagcttcaagtcccagactttcctcctctttggataataaagaaaaggagaaagatagtaaaggaactaggcttgcatatgttgcacctacaataccaagacgactagccagtacatctgacattgaagagaaagaaaacagagattcttcaagtttgcgaacaagtagttcatatacaaggagaaaatgggaagatgatcttaaaaaaaatagctcagttaatgaaggatcaacgtatcataaaagttgctcctttggtagaagacaagatgatttgattagttctagtgttccaagcaccacatcaacaccaacagttacctctgcagctgggcttcagaaaagcctgctttccagcacaagcactactacaaagattacaacgggttcttcctcagcaggcacacaaagcagtacctcaaatcgtttgtgggctgaggatagtactgagaaagaaaaggacagtgttcctacggcagtgaccattcctgttgctccaactgttgtaaatgctgcagcttctaccacaaccctgactacaactactgctggcactgtctcctccacaacagaggtcagggagagacgcagatcatacctcactcctgttagggatgaagagtctgaatcccaaagaaaagcaagatctagacaagcaagacaatctagaagatcaacacagggagtgacattaactgatcttcaagaagctgagaaaacaataggaagaagtcgttctacccgaaccagagaacaagaaaatgaagaaaaagaaaaagaggaaaaagagaaacaagataaagagaaacaagaagaaaagaaggagtcagaaacatctagagaagatgaatataaacaaaagtactccagaacgtatgatgagacttaccagcgttataggccagtatcaacttcaagttcaaccactccatcctcttcactttctactatgagcagttcactgtatgcttcaagtcaactaaacaggccaaatagtcttgtaggcataacttctgcttactccagaggaataacaaaagaaaatgaaagagagggagaaaaaagagaagaggagaaagaaggagaagataaatcacaacctaaatcaatcagagaacgacgacgaccaagagagaaaagaagatctacaggagtttcattttggacacaagatagtgatgaaaatgaacaagaacaacaatcagacacagaagagggatccaataagaaagaaactcagacggattccatttctagatatgaaaccagttctacatcagctggtgatcgatatgattccttgctgggtcgctctggatcatacagttacttagaagaaagaaaaccttacagcagcaggctagaaaaggatgactcaactgactttaaaaagctttatgaacaaattctagctgaaaatgaaaagctgaaggcacagctacatgatacaaatatggaactaacagatcttaaattacagttggaaaaggccaccagagctctccagtacaggatacaacagagacaagaaagatttgctgatagatcactgttgggaatgccaaaagggaacgaagaggtctagaaagagaattttgaatggggaagaggtcaaatggttcagactaaaagagagaaccgagggtaaggtggaaaaggggctggacaaggttaagcaattcaattaaaaaaaaagggggggaaaaaccaggggccgttggtcaatttggaaaaggccaaggggaaaaaag

SEQ ID NO: 355792 - DNA, 304 bp, Homo sapiens
caacacagtttctctgatgtcggcctcggctgtgcttcttctttgggggtgaagagagtggggaggcagtctccacccctgggaggcagaagccaggcatagcgcgctggctaggactccagtagtgtgagtgtgtgagcaacagtaccccattccagtcgtttcctgctgtgactaagtcagcaacagtctgaactccactgaattaaaccactggcatttgggggctgtttattatagcagtgcaaagagttcctttatcctccccaaggatggaaaaatacaatttattttgcttaccata

SEQ ID NO: 355793 - DNA, 5055 bp, Homo sapiens
gggagtctggattataatcgcgacctaagatactggtcaaacatgccttatttcgagatcgatagggtctcaccatgttgcccaggctggtcttgaactcctggactcatcctaaagtgctggcctctcattccctgtctgtgcacacctcacggcaagggccagcctgtttcctcccggtcacctccaaatcttgctgcttttaattcaactcagaggtatgcacttgaggtaggagggcaggggaagtggggatggcaggacatggatggcccttgaggcattggctctgggtgtcatgggctgtgagagtcaagaagggcagtggcctgcctgacttgggttcgaaagggtcactctggccactgcggtgagaactgaaactagccaggccaattctccattgttcctgctcttccaggtaggagaatattagattaggtctggagtcagaaggtagcaggggctgggggttgcagggggatgttgagaagaagtggtcctttggtcagggtgggaagccaacaggatttcctggtgcattggaggtgaaagggaagaggcgctggtggttgtgctttgggcctgagcagccagaagccgttgccatcacctatgacaagggagacagcgcctggggcagagcccagtatggggtgcattcagggtagatcaggaggtatgagtgggcagtgggcgagccaggctgggggttgtgggggaggcctgggttgcaggtttaagcgtgggacccacgtcagattggtggtgggtcatgcatgctggggtggctctcaggtcctccctgctggcttcccactcccaggggctttctcctcccagattccttagctgggtgaggggcaggacagagccctttcctagggaagcccggcaccccctgctgtccagggaaggggagtccttctagcccctgacagcttctctgcccctcccctggcctccccaggcctagccagggttgagttctcacccacctgtgccgccctgccttgttacctggaagcacagccttggggactgagcaggccctcactgtcactttaagaagggaatcagccactttgtgctcaccacctctggggaaggtgtgagaggagagaaggaagtggctgtttggctgctgacaacatgaagacttcctgcgatgagaacagaggcacaggtgccggccctgcagcccccagaacccggactggagggggccatggggcgccggaccctggccctgccctgggtgctgctgaccctgcgtgtcactgcagggaccccggaggtgtgagtacaagttcggatggaggccaccgagctctcgtccttcaccatccgttgtgggttcctggagtctggctccatctccctggtgactgtgagcagggggggccccgatggtgctggggggaccacgctggctgtgttgcacccggaacttggcatccagcaatgggcccctgctcgccaggcccgctgggaaacccagagcagcatctctctcatcctggaaggctctggggccagcagcccctgcgccaacaccaccttctgctgcaagtttgcgtccttccctgagggctcctgggaggcctgtgggagcctcccgcccagctcagacccaggtggggccggggtgaggggtccaggagggcagggaggggctcgggaactggccatccatctgattcttgcctctgtgcccagggctctctgtcccgccgactcctgcccccattctgcgggcagacctggccgggatcttgggggtctcaggagtccttctctttgactgtggctacctccttcatctgctgtgccgacagaagcaccgccctgcccctaggctccagccatcccacaccagctcctaggcactgagagcacgagcatgggcatagcgcgctggctaggactccagtaccgtgaagggaggcagtgagagcagacatctgtgcctcattcctgatctcaaggggaaagcaagaacaagacctgtgaagggaaggagggtggatcggcctgactggccctgggaagcacagaggagcctactgggaccagggaagagactgacaagagaagggaggcctgtccctgcctgcttctgtctcaagaagattgttatcacttcctctggtgaaatcctgccttcctgtccccacggcccctcagctgatgccaccttactctggagaggatgggcagagcctcctatggagggagccctgtgggtcaccaaagctccagtgaccacccccgggcaaagacctgcagatcccctgttagagacgggcccaggactttgtgcggggtgcccactgttgctctgagccttcacttcctcagggaggcttcctcaggatctcgaacctgcggaaggaggaccagtctgtgtacttctgccaagtccagctggacatacagatcagggaggctgtcgtggcagtccatcaaggggacccacctcaccatcacccagggtgagtccagctgccctggcaccaaggaaccttcctggttcagccataggctcaggtgtgtggagggaatgacctgaggggctgtatgagggaacaacctcctggggctcccctatgcctgagttcctgcaactcagaagttgaggcccagagatccaggtagagggggctccagtcctgggactgccctgcaagtcatgtggcctgggacagggcttctccaagctctgtcccctcctgtgtagggcagggaggtcagaggggaccctgcagatccagtctcatgtctgggggtcaaggggtggcctcgagagggaccagtctctgtgtaggggaccgtcagccccctcaccccttgagcaagactgtggtccctgcaccaagggagcaggcctggggtgggaagaggccagctgggctgtggtggtgcctggggactgcatgggagcccctgccagggagggagagggacagaggacaagctgggggctctggtgcttgggctgggggctgagcgcctgtgacctccactggcttcctccttctcctctctgaggactgaatctggggtgcagcagagcacagactcaggcccgcctttcctctccctgaaagagcctgcgctggccttggacagagaaagggatgagaagtgaggctgagtgcggtggggtctgcagggatccaggtgggaggggcccagccagccaaggtgaggcccagcccctcagcaggaagatgggcactggggcccttgggcagggctgacttgacacttttgtgtgacttgagccactgtgcccagcctgaacaccctttcctggtaaaacactccacaaaccaggaagagaaggaatgtactgcaacaaaataaaggccagtcatgcaaggcccatggctgaaagtctttcagtcattttagatgaaagactgaaatctttgcctccaagatcaggaacaagagaaggatgcccgctctcactacttctattcaacacaggatttgaagtcaggccgggcacagtggctcacgcctgtaatcccagcacttttggaggctgaggcgggcagattacttgagcctatgagtgtgagaccaccctggccaacatggcaaaaccccatctctactaaaaaaaaaaaaaaaaaaggatttgaagtcctggccggagcaattaggcaagggataaaaaggcacctaaggcccttttgcaataagaagccagatggataaaggaagtgctggtcaccctggaggtgtactggtttggggaaggtccccggcccccacagccctctggggagcctcaccctggctctccccactcacctcagccccctcaggcagcccctccacagggcccctctcctgcctggacagctctgctggtctccccgtcccctggagaagaacaaggccatgggtcggcccctgctgctgcccctgctgctcctgctgcagccgccagcatttctgcagcctggtggctccacaggatctggtccaagctacctttatggggtcactcaaccaaaacacctctcagcctccatgggtggctctgtggaaatccccttctccttctattacccctgggagttagccatagttcccaacgtgagaatatcctggagacggggccacttccacgggcagtccttctacagcacaaggccgccttccattcacaaggattatgtgaaccggctctttctgaactggacagagggtcaggagagcggcttcctcaggatctcaaacctgcggaaggaggaccagtctgtgtatttctgccgagtcgagctggacacccggagatcagggaggcagcagttgcagtccatcaaggggaccaaactcaccatcacccaggctgtcacaaccaccaccacctggaggcccagcagcacaaccaccatagccggcctcagggtcacagaaagcaaagggcactcagaatcatggcacctaagtctggacactgccatcagggttgcattggctgtcgctgtgctcaaaactgtcattttgggactgctgtgcctcctcctcctgtggtggaggagaaggaaaggtagcagggcgccaagcagtgacttctgaccaacagagtgtggggagaagggatgtgtattagccccggaggacgtgatgtgagacccgcttgtgagtcctccacactcgttccccattggcaagatacatggagagcaccctgaggacctttaaaaggcaaagccgcaaggcagaaggaggctgggtccctgaatcaccgactggaggagagttacctacaagagccttcatccaggagcatccacactgcaatgatataggaatgaggtctgaactccactgaattaaaccactggcatttgggggctgtttattatagcagtgcaaagagttcctttatcctccccaaggatggaaaaatacaatttattttgcttaccatacaccccttttctcctcgtccacattttccaatctgtatggtggctgtcttctatggcagaaggttttggggaataaatagcgtgaaatgctgctgacact

SEQ ID NO: 355794 - DNA, 4955 bp, Homo sapiens
gggagtctggattataatcgcgacctaagatactggtcaaacatgccttatttcgagatcgatagggtctcaccatgttgcccaggctggtcttgaactcctggactcatcctaaagtgctggcctctcattccctgtctgtgcacacctcacggcaagggccagcctgtttcctcccggtcacctccaaatcttgctgcttttaattcaactcagaggtatgcacttgaggtaggagggcaggggaagtggggatggcaggacatggatggcccttgaggcattggctctgggtgtcatgggctgtgagagtcaagaagggcagtggcctgcctgacttgggttcgaaagggtcactctggccactgcggtgagaactgaaactagccaggccaattctccattgttcctgctcttccaggtaggagaatattagattaggtctggagtcagaaggtagcaggggctgggggttgcagggggatgttgagaagaagtggtcctttggtcagggtgggaagccaacaggatttcctggtgcattggaggtgaaagggaagaggcgctggtggttgtgctttgggcctgagcagccagaagccgttgccatcacctatgacaagggagacagcgcctggggcagagcccagtatggggtgcattcagggtagatcaggaggtatgagtgggcagtgggcgagccaggctgggggttgtgggggaggcctgggttgcaggtttaagcgtgggacccacgtcagattggtggtgggtcatgcatgctggggtggctctcaggtcctccctgctggcttcccactcccaggggctttctcctcccagattccttagctgggtgaggggcaggacagagccctttcctagggaagcccggcaccccctgctgtccagggaaggggagtccttctagcccctgacagcttctctgcccctcccctggcctccccaggcctagccagggttgagttctcacccacctgtgccgccctgccttgttacctggaagcacagccttggggactgagcaggccctcactgtcactttaagaagggaatcagccactttgtgctcaccacctctggggaaggtgtgagaggagagaaggaagtggctgtttggctgctgacaacatgaagacttcctgcgatgagaacagaggcacaggtgccggccctgcagcccccagaacccggactggagggggccatggggcgccggaccctggccctgccctgggtgctgctgaccctgcgtgtcactgcagggaccccggaggtgtgagtacaagttcggatggaggccaccgagctctcgtccttcaccatccgttgtgggttcctggagtctggctccatctccctggtgactgtgagcagggggggccccgatggtgctggggggaccacgctggctgtgttgcacccggaacttggcatccagcaatgggcccctgctcgccaggcccgctgggaaacccagagcagcatctctctcatcctggaaggctctggggccagcagcccctgcgccaacaccaccttctgctgcaagtttgcgtccttccctgagggctcctgggaggcctgtgggagcctcccgcccagctcagacccaggtggggccggggtgaggggtccaggagggcagggaggggctcgggaactggccatccatctgattcttgcctctgtgcccagggctctctgtcccgccgactcctgcccccattctgcgggcagacctggccgggatcttgggggtctcaggagtccttctctttgactgtggctacctccttcatctgctgtgccgacagaagcaccgccctgcccctaggctccagccatcccacaccagctcctaggcactgagagcacgagcatgggcatagcgcgctggctaggactccagtaccgtgaagggaggcagtgagagcagacatctgtgcctcattcctgatctcaaggggaaagcaagaacaagacctgtgaagggaaggagggtggatcggcctgactggccctgggaagcacagaggagcctactgggaccagggaagagactgacaagagaagggaggcctgtccctgcctgcttctgtctcaagaagattgttatcacttcctctggtgaaatcctgccttcctgtccccacggcccctcagctgatgccaccttactctggagaggatgggcagagcctcctatggagggagccctgtgggtcaccaaagctccagtgaccacccccgggcaaagacctgcagatcccctgttagagacgggcccaggactttgtgcggggtgcccactgttgctctgagccttcacttcctcagggaggcttcctcaggatctcgaacctgcggaaggaggaccagtctgtgtacttctgccaagtccagctggacatacagatcagggaggctgtcgtggcagtccatcaaggggacccacctcaccatcacccagggtgagtccagctgccctggcaccaaggaaccttcctggttcagccataggctcaggtgtgtggagggaatgacctgaggggctgtatgagggaacaacctcctggggctcccctatgcctgagttcctgcaactcagaagttgaggcccagagatccaggtagagggggctccagtcctgggactgccctgcaagtcatgtggcctgggacagggcttctccaagctctgtcccctcctgtgtagggcagggaggtcagaggggaccctgcagatccagtctcatgtctgggggtcaaggggtggcctcgagagggaccagtctctgtgtaggggaccgtcagccccctcaccccttgagcaagactgtggtccctgcaccaagggagcaggcctggggtgggaagaggccagctgggctgtggtggtgcctggggactgcatgggagcccctgccagggagggagagggacagaggacaagctgggggctctggtgcttgggctgggggctgagcgcctgtgacctccactggcttcctccttctcctctctgaggactgaatctggggtgcagcagagcacagactcaggcccgcctttcctctccctgaaagagcctgcgctggccttggacagagaaagggatgagaagtgaggctgagtgcggtggggtctgcagggatccaggtgggaggggcccagccagccaaggtgaggcccagcccctcagcaggaagatgggcactggggcccttgggcagggctgacttgacacttttgtgtgacttgagccactgtgcccagcctgaacaccctttcctggtaaaacactccacaaaccaggaagagaaggaatgtactgcaacaaaataaaggccagtcatgcaaggcccatggctgaaagtctttcagtcattttagatgaaagactgaaatctttgcctccaagatcaggaacaagagaaggatgcccgctctcactacttctattcaacacaggatttgaagtcaggccgggcacagtggctcacgcctgtaatcccagcacttttggaggctgaggcgggcagattacttgagcctatgagtgtgagaccaccctggccaacatggcaaaaccccatctctactaaaaaaaaaaaaaaaaaaggatttgaagtcctggccggagcaattaggcaagggataaaaaggcacctaaggcccttttgcaataagaagccagatggataaaggaagtgctggtcaccctggaggtgtactggtttggggaaggtccccggcccccacagccctctggggagcctcaccctggctctccccactcacctcagccccctcaggcagcccctccacagggcccctctcctgcctggacagctctgctggtctccccgtcccctggagaagaacaaggccatgggtcggcccctgctgctgcccctgctgctcctgctgcagccgccagcatttctgcagcctggtggctccacaggatctggtccaagctacctttatggggtcactcaaccaaaacacctctcagcctccatgggtggctctgtggaaatccccttctccttctattacccctgggagttagccatagttcccaacgtgagaatatcctggagacggggccacttccacgggcagtccttctacagcacaaggccgccttccattcacaaggattatgtgaaccggctctttctgaactggacagagggtcaggagagcggcttcctcaggatctcaaacctgcggaaggaggaccagtctgtgtatttctgccgagtcgagctggacacccggagatcagggaggcagcagttgcagtccatcaaggggaccaaactcaccatcacccaggctgtcacaaccaccaccacctggaggcccagcagcacaaccaccatagccggcctcagggtcacagaaagcaaagggcactcagaatcatggcacctaagtctggacactgccatcagggttgcattggctgtcgctgtgctcaaaactgtcattttgggactgctgtgcctcctcctcctgtggtggaggagaaggaaaggtagcagggcgccaagcagtgacttctgaccaacagagtgtggggagaagggatgtgtattagccccggaggacgtgatgtgagacccgcttgtgagtcctccacactcgttccccattggcaagatacatggagagcaccctgaggacctttaaaaggcaaagccgcaaggcagaaggaggctgggtccctgaatcaccgactggaggagagttacctacaagagccttcatccaggagcatccacactgcaatgatataggaatgaggtctgaactccactgaattaaaccactggcatttgggggctgtttattatagcagtgcaaagagttcctttatcctccccaaggatggaaaaatacaatttattttgcttaccata

SEQ ID NO: 355795 - DNA, 3055 bp, Homo sapiens
  misc_feature (33)..(33): n is a, c, g, or t
tgcagcggactcggcactgagagcacgagcatnggcacccagccaggcctcccaggctgctctccacgtcccttatgccactatcaacaccagctgctgcccagctactttggacacagctcacccccgacagggggccgtcctgtcgtttcctgctgtgactaagtcagcaacacagttcctctgacatgggccttggctgtgcttctttgggggtgaagagattggggaggaagtctccacccctgggaggcagaagccaggcatagcgcgctggctaggactccagtaccgtgaagggaggcagtgagagcagacatctgtgcctcattcctgatctcaaggggaaagcaagaacaagggaggcttcctcaggatctcgaacctgcggaaggaggaccagtctgtgtacttctgccaagtccagctggacatacagatcagggaggctgtcgtggcagtccatcaaggggacccacctcaccatcacccagggtgagtccagctgccctggcaccaaggaaccttcctggttcagccataggctcaggtgtgtggagggaatgacctgaggggctgtatgagggaacaacctcctggggctcccctatgcctgagttcctgcaactcagaagttgaggcccagagatccaggtagagggggctccagtcctgggactgccctgcaagtcatgtggcctgggacagggcttctccaagctctgtcccctcctgtgtagggcagggaggtcagaggggaccctgcagatccagtctcatgtctgggggtcaaggggtggcctcgagagggaccagtctctgtgtaggggaccgtcagccccctcaccccttgagcaagactgtggtccctgcaccaagggagcaggcctggggtgggaagaggccagctgggctgtggtggtgcctggggactgcatgggagcccctgccagggagggagagggacagaggacaagctgggggctctggtgcttgggctgggggctgagcgcctgtgacctccactggcttcctccttctcctctctgaggactgaatctggggtgcagcagagcacagactcaggcccgcctttcctctccctgaaagagcctgcgctggccttggacagagaaagggatgagaagtgaggctgagtgcggtggggtctgcagggatccaggtgggaggggcccagccagccaaggtgaggcccagcccctcagcaggaagatgggcactggggcccttgggcagggctgacttgacacttttgtgtgacttgagccactgtgcccagcctgaacaccctttcctggtaaaacactccacaaaccaggaagagaaggaatgtactgcaacaaaataaaggccagtcatgcaaggcccatggctgaaagtctttcagtcattttagatgaaagactgaaatctttgcctccaagatcaggaacaagagaaggatgcccgctctcactacttctattcaacacaggatttgaagtcaggccgggcacagtggctcacgcctgtaatcccagcacttttggaggctgaggcgggcagattacttgagcctatgagtgtgagaccaccctggccaacatggcaaaaccccatctctactaaaaaaaaaaaaaaaaaaggatttgaagtcctggccggagcaattaggcaagggataaaaaggcacctaaggcccttttgcaataagaagccagatggataaaggaagtgctggtcaccctggaggtgtactggtttggggaaggtccccggcccccacagccctctggggagcctcaccctggctctccccactcacctcagccccctcaggcagcccctccacagggcccctctcctgcctggacagctctgctggtctccccgtcccctggagaagaacaaggccatgggtcggcccctgctgctgcccctgctgctcctgctgcagccgccagcatttctgcagcctggtggctccacaggatctggtccaagctacctttatggggtcactcaaccaaaacacctctcagcctccatgggtggctctgtggaaatccccttctccttctattacccctgggagttagccatagttcccaacgtgagaatatcctggagacggggccacttccacgggcagtccttctacagcacaaggccgccttccattcacaaggattatgtgaaccggctctttctgaactggacagagggtcaggagagcggcttcctcaggatctcaaacctgcggaaggaggaccagtctgtgtatttctgccgagtcgagctggacacccggagatcagggaggcagcagttgcagtccatcaaggggaccaaactcaccatcacccaggctgtcacaaccaccaccacctggaggcccagcagcacaaccaccatagccggcctcagggtcacagaaagcaaagggcactcagaatcatggcacctaagtctggacactgccatcagggttgcattggctgtcgctgtgctcaaaactgtcattttgggactgctgtgcctcctcctcctgtggtggaggagaaggaaaggtagcagggcgccaagcagtgacttctgaccaacagagtgtggggagaagggatgtgtattagccccggaggacgtgatgtgagacccgcttgtgagtcctccacactcgttccccattggcaagatacatggagagcaccctgaggacctttaaaaggcaaagccgcaaggcagaaggaggctgggtccctgaatcaccgactggaggagagttacctacaagagccttcatccaggagcatccacactgcaatgatataggaatgaggtctgaactccactgaattaaaccactggcatttgggggctgtttattatagcagtgcaaagagttcctttatcctccccaaggatggaaaaatacaatttattttgcttaccatacaccccttttctcctcgtccacattttccaatctgtatggtggctgtcttctatggcagaaggttttggggaataaatagcgtgaaatgctgctgacact

SEQ ID NO: 355796 - DNA, 3409 bp, Homo sapiens
gggagtctggattataatcgcgacctaagatactggtcaaacatgccttatttcgagatcgatagggtctcaccatgttgcccaggctggtcttgaactcctggactcatcctaaagtgctggcctctcattccctgtctgtgcacacctcacggcaagggccagcctgtttcctcccggtcacctccaaatcttgctgcttttaattcaactcagaggtatgcacttgaggtaggagggcaggggaagtggggatggcaggacatggatggcccttgaggcattggctctgggtgtcatgggctgtgagagtcaagaagggcagtggcctgcctgacttgggttcgaaagggtcactctggccactgcggtgagaactgaaactagccaggccaattctccattgttcctgctcttccaggtaggagaatattagattaggtctggagtcagaaggtagcaggggctgggggttgcagggggatgttgagaagaagtggtcctttggtcagggtgggaagccaacaggatttcctggtgcattggaggtgaaagggaagaggcgctggtggttgtgctttgggcctgagcagccagaagccgttgccatcacctatgacaagggagacagcgcctggggcagagcccagtatggggtgcattcagggtagatcaggaggtatgagtgggcagtgggcgagccaggctgggggttgtgggggaggcctgggttgcaggtttaagcgtgggacccacgtcagattggtggtgggtcatgcatgctggggtggctctcaggtcctccctgctggcttcccactcccaggggctttctcctcccagattccttagctgggtgaggggcaggacagagccctttcctagggaagcccggcaccccctgctgtccagggaaggggagtccttctagcccctgacagcttctctgcccctcccctggcctccccaggcctagccagggttgagttctcacccacctgtgccgccctgccttgttacctggaagcacagccttggggactgagcaggccctcactgtcactttaagaagggaatcagccactttgtgctcaccacctctggggaaggtgtgagaggagagaaggaagtggctgtttggctgctgacaacatgaagacttcctgcgatgagaacagaggcacaggtgccggccctgcagcccccagaacccggactggagggggccatggggcgccggaccctggccctgccctgggtgctgctgaccctgcgtgtcactgcagggaccccggaggtgtgagtacaagttcggatggaggccaccgagctctcgtccttcaccatccgttgtgggttcctggagtctggctccatctccctggtgactgtgagcagggggggccccgatggtgctggggggaccacgctggctgtgttgcacccggaacttggcatccagcaatgggcccctgctcgccaggcccgctgggaaacccagagcagcatctctctcatcctggaaggctctggggccagcagcccctgcgccaacaccaccttctgctgcaagtttgcgtccttccctgagggctcctgggaggcctgtgggagcctcccgcccagctcagacccaggtggggccggggtgaggggtccaggagggcagggaggggctcgggaactggccatccatctgattcttgcctctgtgcccagggctctctgtcccgccgactcctgcccccattctgcgggcagacctggccgggatcttgggggtctcaggagtccttctctttgactgtggctacctccttcatctgctgtgccgacagaagcaccgccctgcccctaggctccagccatcccacaccagctcctaggcactgagagcacgagcatgggcatagcgcgctggctaggactccagtaccgtgaagggaggcagtgagagcagacatctgtgcctcattcctgatctcaaggggaaagcaagaacaagacctgtgaagggaaggagggtggatcggcctgactggccctgggaagcacagaggagcctactgggaccagggaagagactgacaagagaagggaggcctgtccctgcctgcttctgtctcaagaagattgttatcacttcctctggtgaaatcctgccttcctgtccccacggcccctcagctgatgccaccttactctggagaggatgggcagagcctcctatggagggagccctgtgggtcaccaaagctccagtgaccacccccgggcaaagacctgcagatcccctgttagagacgggcccaggactttgtgcggggtgcccactgttgctctgagccttcacttcctcagggaggcttcctcaggatctcgaacctgcggaaggaggaccagtctgtgtacttctgccaagtccagctggacatacagatcagggaggctgtcgtggcagtccatcaaggggacccacctcaccatcacccaggccctcaggcagcccctccacagggcccctctcctgcctggacagctctgctggtctccccgtcccctggagaagaacaaggccatgggtcggcccctgctgctgcccctgctgctcctgctgcagccgccagcatttctgcagcctggattatgtgaaccggctctttctgaactggacagagggtcaggagagcggcttcctcaggatctcaaacctgcggaaggaggaccagtctgtgtatttctgccgagtcgagctggacacccggagatcagggaggcagcagttgcagtccatcaaggggaccaaactcaccatcacccaggctgtcacaaccaccaccacctggaggcccagcagcacaaccaccatagccggcctcagggtcacagaaagcaaagggcactcagaatcatggcacctaagtctggacactgccatcagggttgcattggctgtcgctgtgctcaaaactgtcattttgggactgctgtgcctcctcctcctgtggtggaggagaaggaaaggtagcagggcgccaagcagtgacttctgaccaacagagtgtggggagaagggatgtgtattagccccggaggacgtgatgtgagacccgcttgtgagtcctccacactcgttccccattggcaagatacatggagagcaccctgaggacctttaaaaggcaaagccgcaaggcagaaggaggctgggtccctgaatcaccgactggaggagagttacctacaagagccttcatccaggagcatccacactgcaatgatataggaatgaggtctgaactccactgaattaaaccactggcatttgggggctgtttattatagcagtgcaaagagttcctttatcctccccaaggatggaaaaatacaatttattttgcttaccata

SEQ ID NO: 355797 - DNA, 5212 bp, Homo sapiens
gggagtctggattataatcgcgacctaagatactggtcaaacatgccttatttcgagatcgatagggtctcaccatgttgcccaggctggtcttgaactcctggactcatcctaaagtgctggcctctcattccctgtctgtgcacacctcacggcaagggccagcctgtttcctcccggtcacctccaaatcttgctgcttttaattcaactcagaggtatgcacttgaggtaggagggcaggggaagtggggatggcaggacatggatggcccttgaggcattggctctgggtgtcatgggctgtgagagtcaagaagggcagtggcctgcctgacttgggttcgaaagggtcactctggccactgcggtgagaactgaaactagccaggccaattctccattgttcctgctcttccaggtaggagaatattagattaggtctggagtcagaaggtagcaggggctgggggttgcagggggatgttgagaagaagtggtcctttggtcagggtgggaagccaacaggatttcctggtgcattggaggtgaaagggaagaggcgctggtggttgtgctttgggcctgagcagccagaagccgttgccatcacctatgacaagggagacagcgcctggggcagagcccagtatggggtgcattcagggtagatcaggaggtatgagtgggcagtgggcgagccaggctgggggttgtgggggaggcctgggttgcaggtttaagcgtgggacccacgtcagattggtggtgggtcatgcatgctggggtggctctcaggtcctccctgctggcttcccactcccaggggctttctcctcccagattccttagctgggtgaggggcaggacagagccctttcctagggaagcccggcaccccctgctgtccagggaaggggagtccttctagcccctgacagcttctctgcccctcccctggcctccccaggcctagccagggttgagttctcacccacctgtgccgccctgccttgttacctggaagcacagccttggggactgagcaggccctcactgtcactttaagaagggaatcagccactttgtgctcaccacctctggggaaggtgtgagaggagagaaggaagtggctgtttggctgctgacaacatgaagacttcctgcgatgagaacagaggcacaggtgccggccctgcagcccccagaacccggactggagggggccatggggcgccggaccctggccctgccctgggtgctgctgaccctgcgtgtcactgcagggaccccggaggtgtgagtacaagttcggatggaggccaccgagctctcgtccttcaccatccgttgtgggttcctggagtctggctccatctccctggtgactgtgagcagggggggccccgatggtgctggggggaccacgctggctgtgttgcacccggaacttggcatccagcaatgggcccctgctcgccaggcccgctgggaaacccagagcagcatctctctcatcctggaaggctctggggccagcagcccctgcgccaacaccaccttctgctgcaagtttgcgtccttccctgagggctcctgggaggcctgtgggagcctcccgcccagctcagacccaggtggggccggggtgaggggtccaggagggcagggaggggctcgggaactggccatccatctgattcttgcctctgtgcccagggctctctgtcccgccgactcctgcccccattctgcgggcagacctggccgggatcttgggggtctcaggagtccttctctttgactgtggctacctccttcatctgctgtgccgacagaagcaccgccctgcccctaggctccagccatcccacaccagctcctaggcactgagagcacgagcatgggcatagcgcgctggctaggactccagtaccgtgaagggaggcagtgagagcagacatctgtgcctcattcctgatctcaaggggaaagcaagaacaagacctgtgaagggaaggagggtggatcggcctgactggccctgggaagcacagaggagcctactgggaccagggaagagactgacaagagaagggaggcctgtccctgcctgcttctgtctcaagaagattgttatcacttcctctggtgaaatcctgccttcctgtccccacggcccctcagctgatgccaccttactctggagaggatgggcagagcctcctatggagggagccctgtgggtcaccaaagctccagtgaccacccccgggcaaagacctgcagatcccctgttagagacgggcccaggactttgtgcggggtgcccactgttgctctgagccttcacttcctcagggaggcttcctcaggatctcgaacctgcggaaggaggaccagtctgtgtacttctgccaagtccagctggacatacagatcagggaggctgtcgtggcagtccatcaaggggacccacctcaccatcacccagggtgagtccagctgccctggcaccaaggaaccttcctggttcagccataggctcaggtgtgtggagggaatgacctgaggggctgtatgagggaacaacctcctggggctcccctatgcctgagttcctgcaactcagaagttgaggcccagagatccaggtagagggggctccagtcctgggactgccctgcaagtcatgtggcctgggacagggcttctccaagctctgtcccctcctgtgtagggcagggaggtcagaggggaccctgcagatccagtctcatgtctgggggtcaaggggtggcctcgagagggaccagtctctgtgtaggggaccgtcagccccctcaccccttgagcaagactgtggtccctgcaccaagggagcaggcctggggtgggaagaggccagctgggctgtggtggtgcctggggactgcatgggagcccctgccagggagggagagggacagaggacaagctgggggctctggtgcttgggctgggggctgagcgcctgtgacctccactggcttcctccttctcctctctgaggactgaatctggggtgcagcagagcacagactcaggcccgcctttcctctccctgaaagagcctgcgctggccttggacagagaaagggatgagaagtgaggctgagtgcggtggggtctgcagggatccaggtgggaggggcccagccagccaaggtgaggcccagcccctcagcaggaagatgggcactggggcccttgggcagggctgacttgacacttttgtgtgacttgagccactgtgcccagcctgaacaccctttcctggtaaaacactccacaaaccaggaagagaaggaatgtactgcaacaaaataaaggccagtcatgcaaggcccatggctgaaagtctttcagtcattttagatgaaagactgaaatctttgcctccaagatcaggaacaagagaaggatgcccgctctcactacttctattcaacacaggatttgaagtcaggccgggcacagtggctcacgcctgtaatcccagcacttttggaggctgaggcgggcagattacttgagcctatgagtgtgagaccaccctggccaacatggcaaaaccccatctctactaaaaaaaaaaaaaaaaaaggatttgaagtcctggccggagcaattaggcaagggataaaaaggcacctaaggcccttttgcaataagaagccagatggataaaggaagtgctggtcaccctggaggtgtactggtttggggaaggtccccggcccccacagccctctggggagcctcaccctggctctccccactcacctcagccccctcaggcagcccctccacagggcccctctcctgcctggacagctctgctggtctccccgtcccctggagaagaacaaggccatgggtcggcccctgctgctgcccctgctgctcctgctgcagccgccagcatttctgcagcctggtggctccacaggatctggtccaagctacctttatggggtcactcaaccaaaacacctctcagcctccatgggtggctctgtggaaatccccttctccttctattacccctgggagttagccatagttcccaacgtgagaatatcctggagacggggccacttccacgggcagtccttctacagcacaaggccgccttccattcacaaggattatgtgaaccggctctttctgaactggacagagggtcaggagagcggcttcctcaggatctcaaacctgcggaaggaggaccagtctgtgtatttctgccgagtcgagctggacacccggagatcagggaggcagcagttgcagtccatcaaggggaccaaactcaccatcacccagggtgagtccagctgccctgacacctgccttgcccaccgcagtgagggttttggtgaccactgatgtcttcacatttaaacccagtggtctggattgagagctgttagcatttcaccttgctaccccttccatgtctgggcttctgagagcagcttgctcatcctgaatgtccccaatctagaaagcagcacaccatgcctttcatccagacgccccacacccccagaagagggtctgctcattcctcatctcttccagctgtcacaaccaccaccacctggaggcccagcagcacaaccaccatagccggcctcagggtcacagaaagcaaagggcactcagaatcatggcacctaagtctggacactgccatcagggttgcattggctgtcgctgtgctcaaaactgtcattttgggactgctgtgcctcctcctcctgtggtggaggagaaggaaaggtagcagggcgccaagcagtgacttctgaccaacagagtgtggggagaagggatgtgtattagccccggaggacgtgatgtgagacccgcttgtgagtcctccacactcgttccccattggcaagatacatggagagcaccctgaggacctttaaaaggcaaagccgcaaggcagaaggaggctgggtccctgaatcaccgactggaggagagttacctacaagagccttcatccaggagcatccacactgcaatgatataggaatgaggtctgaactccactgaattaaaccactggcatttgggggctgtttattatagcagtgcaaagagttcctttatcctccccaaggatggaaaaatacaatttattttgcttaccata

SEQ ID NO: 355798 - DNA, 3822 bp, Homo sapiens
  misc_feature (33)..(33): n is a, c, g, or t
tgcagcggactcggcactgagagcacgagcatnggcacccagccaggcctcccaggctgctctccacgtcccttatgccactatcaacaccagctgctgcccagctactttggacacagctcacccccgacagggggccgtcctggtgggcatcactccccacccacaccgcacactggccccagggccctgctgcctgggcctccacatccatccctgcacatggcagctttgtctctgttgagaatggactctacgcttaggctgggcagaggcctccctgcactggtcctggcctcactcttttccctgacccttggggcccagggccatggagggacccttaggagttcaatgagagagaccatgaggccactgggctttccccttcccaggcctcctgggtgccacccccttacgttattcttgggcctctaataagtgtcccacaggtgcctggccaggcccacctgctgcagatgtggtctgtgtgtgtgcatgtgtgggtgtgtgtgggcacaggtgtgagtgtgtgagcaacagtaccccattccagtcgtttcctgctgtgactaagtcagcaacacagttcctctgacatgggccttggctgtgcttctttgggggtgaagagattggggaggaagtctccacccctgggaggcagaagccaggcatagcgcgctggctaggactccagtaccgtgaagggaggcagtgagagcagacatctgtgcctcattcctgatctcaaggggaaagcaagaacaagacctgtgaagggaaggagggtggatcggcctgactggccctgggaagcacagaggagcctactgggaccagggaagagactgacaagagaagggaggcctgtccctgcctgcttctgtctcaagaagattgttatcacttcctctggtgaaatcctgccttcctgtccccacggcccctcagctgatgccaccttactctggagaggatgggcagagcctcctatggagggagccctgtgggtcaccaaagctccagtgaccacccccgggcaaagacctgcagatcccctgttagagacgggcccaggactttgtgcggggtgcccactgttgctctgagccttcacttcctcagggaggcttcctcaggatctcgaacctgcggaaggaggaccagtctgtgtacttctgccaagtccagctggacatacagatcagggaggctgtcgtggcagtccatcaaggggacccacctcaccatcacccagggtgagtccagctgccctggcaccaaggaaccttcctggttcagccataggctcaggtgtgtggagggaatgacctgaggggctgtatgagggaacaacctcctggggctcccctatgcctgagttcctgcaactcagaagttgaggcccagagatccaggtagagggggctccagtcctgggactgccctgcaagtcatgtggcctgggacagggcttctccaagctctgtcccctcctgtgtagggcagggaggtcagaggggaccctgcagatccagtctcatgtctgggggtcaaggggtggcctcgagagggaccagtctctgtgtaggggaccgtcagccccctcaccccttgagcaagactgtggtccctgcaccaagggagcaggcctggggtgggaagaggccagctgggctgtggtggtgcctggggactgcatgggagcccctgccagggagggagagggacagaggacaagctgggggctctggtgcttgggctgggggctgagcgcctgtgacctccactggcttcctccttctcctctctgaggactgaatctggggtgcagcagagcacagactcaggcccgcctttcctctccctgaaagagcctgcgctggccttggacagagaaagggatgagaagtgaggctgagtgcggtggggtctgcagggatccaggtgggaggggcccagccagccaaggtgaggcccagcccctcagcaggaagatgggcactggggcccttgggcagggctgacttgacacttttgtgtgacttgagccactgtgcccagcctgaacaccctttcctggtaaaacactccacaaaccaggaagagaaggaatgtactgcaacaaaataaaggccagtcatgcaaggcccatggctgaaagtctttcagtcattttagatgaaagactgaaatctttgcctccaagatcaggaacaagagaaggatgcccgctctcactacttctattcaacacaggatttgaagtcaggccgggcacagtggctcacgcctgtaatcccagcacttttggaggctgaggcgggcagattacttgagcctatgagtgtgagaccaccctggccaacatggcaaaaccccatctctactaaaaaaaaaaaaaaaaaaggatttgaagtcctggccggagcaattaggcaagggataaaaaggcacctaaggcccttttgcaataagaagccagatggataaaggaagtgctggtcaccctggaggtgtactggtttggggaaggtccccggcccccacagccctctggggagcctcaccctggctctccccactcacctcagccccctcaggcagcccctccacagggcccctctcctgcctggacagctctgctggtctccccgtcccctggagaagaacaaggccatgggtcggcccctgctgctgcccctgctgctcctgctgcagccgccagcatttctgcagcctggtggctccacaggatctggtccaagctacctttatggggtcactcaaccaaaacacctctcagcctccatgggtggctctgtggaaatccccttctccttctattacccctgggagttagccatagttcccaacgtgagaatatcctggagacggggccacttccacgggcagtccttctacagcacaaggccgccttccattcacaaggattatgtgaaccggctctttctgaactggacagagggtcaggagagcggcttcctcaggatctcaaacctgcggaaggaggaccagtctgtgtatttctgccgagtcgagctggacacccggagatcagggaggcagcagttgcagtccatcaaggggaccaaactcaccatcacccaggctgtcacaaccaccaccacctggaggcccagcagcacaaccaccatagccggcctcagggtcacagaaagcaaagggcactcagaatcatggcacctaagtctggacactgccatcagggttgcattggctgtcgctgtgctcaaaactgtcattttgggactgctgtgcctcctcctcctgtggtggaggagaaggaaaggtagcagggcgccaagcagtgacttctgaccaacagagtgtggggagaagggatgtgtattagccccggaggacgtgatgtgagacccgcttgtgagtcctccacactcgttccccattggcaagatacatggagagcaccctgaggacctttaaaaggcaaagccgcaaggcagaaggaggctgggtccctgaatcaccgactggaggagagttacctacaagagccttcatccaggagcatccacactgcaatgatataggaatgaggtctgaactccactgaattaaaccactggcatttgggggctgtttattatagcagtgcaaagagttcctttatcctccccaaggatggaaaaatacaatttattttgcttaccatacaccccttttctcctcgtccacattttccaatctgtatggtggctgtcttctatggcagaaggttttggggaataaatagcgtgaaatgctgctgacact

SEQ ID NO: 355799 - DNA, 2937 bp, Homo sapiens
  misc_feature (33)..(33): n is a, c, g, or t
tgcagcggactcggcactgagagcacgagcatnggcacccagccaggcctcccaggctgctctccacgtcccttatgccactatcaacaccagctgctgcccagctactttggacacagctcacccccgacagggggccgtcctggcatagcgcgctggctaggactccagtaccgtgaagggaggcagtgagagcagacatctgtgcctcattcctgatctcaaggggaaagcaagaacaagggaggcttcctcaggatctcgaacctgcggaaggaggaccagtctgtgtacttctgccaagtccagctggacatacagatcagggaggctgtcgtggcagtccatcaaggggacccacctcaccatcacccagggtgagtccagctgccctggcaccaaggaaccttcctggttcagccataggctcaggtgtgtggagggaatgacctgaggggctgtatgagggaacaacctcctggggctcccctatgcctgagttcctgcaactcagaagttgaggcccagagatccaggtagagggggctccagtcctgggactgccctgcaagtcatgtggcctgggacagggcttctccaagctctgtcccctcctgtgtagggcagggaggtcagaggggaccctgcagatccagtctcatgtctgggggtcaaggggtggcctcgagagggaccagtctctgtgtaggggaccgtcagccccctcaccccttgagcaagactgtggtccctgcaccaagggagcaggcctggggtgggaagaggccagctgggctgtggtggtgcctggggactgcatgggagcccctgccagggagggagagggacagaggacaagctgggggctctggtgcttgggctgggggctgagcgcctgtgacctccactggcttcctccttctcctctctgaggactgaatctggggtgcagcagagcacagactcaggcccgcctttcctctccctgaaagagcctgcgctggccttggacagagaaagggatgagaagtgaggctgagtgcggtggggtctgcagggatccaggtgggaggggcccagccagccaaggtgaggcccagcccctcagcaggaagatgggcactggggcccttgggcagggctgacttgacacttttgtgtgacttgagccactgtgcccagcctgaacaccctttcctggtaaaacactccacaaaccaggaagagaaggaatgtactgcaacaaaataaaggccagtcatgcaaggcccatggctgaaagtctttcagtcattttagatgaaagactgaaatctttgcctccaagatcaggaacaagagaaggatgcccgctctcactacttctattcaacacaggatttgaagtcaggccgggcacagtggctcacgcctgtaatcccagcacttttggaggctgaggcgggcagattacttgagcctatgagtgtgagaccaccctggccaacatggcaaaaccccatctctactaaaaaaaaaaaaaaaaaaggatttgaagtcctggccggagcaattaggcaagggataaaaaggcacctaaggcccttttgcaataagaagccagatggataaaggaagtgctggtcaccctggaggtgtactggtttggggaaggtccccggcccccacagccctctggggagcctcaccctggctctccccactcacctcagccccctcaggcagcccctccacagggcccctctcctgcctggacagctctgctggtctccccgtcccctggagaagaacaaggccatgggtcggcccctgctgctgcccctgctgctcctgctgcagccgccagcatttctgcagcctggtggctccacaggatctggtccaagctacctttatggggtcactcaaccaaaacacctctcagcctccatgggtggctctgtggaaatccccttctccttctattacccctgggagttagccatagttcccaacgtgagaatatcctggagacggggccacttccacgggcagtccttctacagcacaaggccgccttccattcacaaggattatgtgaaccggctctttctgaactggacagagggtcaggagagcggcttcctcaggatctcaaacctgcggaaggaggaccagtctgtgtatttctgccgagtcgagctggacacccggagatcagggaggcagcagttgcagtccatcaaggggaccaaactcaccatcacccaggctgtcacaaccaccaccacctggaggcccagcagcacaaccaccatagccggcctcagggtcacagaaagcaaagggcactcagaatcatggcacctaagtctggacactgccatcagggttgcattggctgtcgctgtgctcaaaactgtcattttgggactgctgtgcctcctcctcctgtggtggaggagaaggaaaggtagcagggcgccaagcagtgacttctgaccaacagagtgtggggagaagggatgtgtattagccccggaggacgtgatgtgagacccgcttgtgagtcctccacactcgttccccattggcaagatacatggagagcaccctgaggacctttaaaaggcaaagccgcaaggcagaaggaggctgggtccctgaatcaccgactggaggagagttacctacaagagccttcatccaggagcatccacactgcaatgatataggaatgaggtctgaactccactgaattaaaccactggcatttgggggctgtttattatagcagtgcaaagagttcctttatcctccccaaggatggaaaaatacaatttattttgcttaccatacaccccttttctcctcgtccacattttccaatctgtatggtggctgtcttctatggcagaaggttttggggaataaatagcgtgaaatgctgctgacact

SEQ ID NO: 355800 - DNA, 4181 bp, Homo sapiens
gggagtctggattataatcgcgacctaagatactggtcaaacatgccttatttcgagatcgatagggtctcaccatgttgcccaggctggtcttgaactcctggactcatcctaaagtgctggcctctcattccctgtctgtgcacacctcacggcaagggccagcctgtttcctcccggtcacctccaaatcttgctgcttttaattcaactcagaggtatgcacttgaggtaggagggcaggggaagtggggatggcaggacatggatggcccttgaggcattggctctgggtgtcatgggctgtgagagtcaagaagggcagtggcctgcctgacttgggttcgaaagggtcactctggccactgcggtgagaactgaaactagccaggccaattctccattgttcctgctcttccaggtaggagaatattagattaggtctggagtcagaaggtagcaggggctgggggttgcagggggatgttgagaagaagtggtcctttggtcagggtgggaagccaacaggatttcctggtgcattggaggtgaaagggaagaggcgctggtggttgtgctttgggcctgagcagccagaagccgttgccatcacctatgacaagggagacagcgcctggggcagagcccagtatggggtgcattcagggtagatcaggaggtatgagtgggcagtgggcgagccaggctgggggttgtgggggaggcctgggttgcaggtttaagcgtgggacccacgtcagattggtggtgggtcatgcatgctggggtggctctcaggtcctccctgctggcttcccactcccaggggctttctcctcccagattccttagctgggtgaggggcaggacagagccctttcctagggaagcccggcaccccctgctgtccagggaaggggagtccttctagcccctgacagcttctctgcccctcccctggcctccccaggcctagccagggttgagttctcacccacctgtgccgccctgccttgttacctggaagcacagccttggggactgagcaggccctcactgtcactttaagaagggaatcagccactttgtgctcaccacctctggggaaggtgtgagaggagagaaggaagtggctgtttggctgctgacaacatgaagacttcctgcgatgagaacagaggcacaggtgccggccctgcagcccccagaacccggactggagggggccatggggcgccggaccctggccctgccctgggtgctgctgaccctgcgtgtcactgcagggaccccggaggtgtgagtacaagttcggatggaggccaccgagctctcgtccttcaccatccgttgtgggttcctggagtctggctccatctccctggtgactgtgagcagggggggccccgatggtgctggggggaccacgctggctgtgttgcacccggaacttggcatccagcaatgggcccctgctcgccaggcccgctgggaaacccagagcagcatctctctcatcctggaaggctctggggccagcagcccctgcgccaacaccaccttctgctgcaagtttgcgtccttccctgagggctcctgggaggcctgtgggagcctcccgcccagctcagacccaggtggggccggggtgaggggtccaggagggcagggaggggctcgggaactggccatccatctgattcttgcctctgtgcccagggctctctgtcccgccgactcctgcccccattctgcgggcagacctggccgggatcttgggggtctcaggagtccttctctttgactgtggctacctccttcatctgctgtgccgacagaagcaccgccctgcccctaggctccagccatcccacaccagctcctaggcactgagagcacgagcatgggcatagcgcgctggctaggactccagtaccgtgaagggaggcagtgagagcagacatctgtgcctcattcctgatctcaaggggaaagcaagaacaagacctgtgaagggaaggagggtggatcggcctgactggccctgggaagcacagaggagcctactgggaccagggaagagactgacaagagaagggaggcctgtccctgcctgcttctgtctcaagaagattgttatcacttcctctggtgaaatcctgccttcctgtccccacggcccctcagctgatgccaccttactctggagaggatgggcagagcctcctatggagggagccctgtgggtcaccaaagctccagtgaccacccccgggcaaagacctgcagatcccctgttagagacgggcccaggactttgtgcggggtgcccactgttgctctgagccttcacttcctcagggaggcttcctcaggatctcgaacctgcggaaggaggaccagtctgtgtacttctgccaagtccagctggacatacagatcagggaggctgtcgtggcagtccatcaaggggacccacctcaccatcacccagggtgagtccagctgccctggcaccaaggaaccttcctggttcagccataggctcaggtgtgtggagggaatgacctgaggggctgtatgagggaacaacctcctggggctcccctatgcctgagttcctgcaactcagaagttgaggcccagagatccaggtagagggggctccagtcctgggactgccctgcaagtcatgtggcctgggacagggcttctccaagctctgtcccctcctgtgtagggcagggaggtcagaggggaccctgcagatccagtctcatgtctgggggtcaaggggtggcctcgagagggaccagtctctgtgtaggggaccgtcagccccctcaccccttgagcaagactgtggtccctgcaccaagggagcaggcctggggtgggaagaggccagctgggctgtggtggtgcctggggactgcatgggagcccctgccagggagggagagggacagaggacaagctgggggctctggtgcttgggctgggggctgagcgcctgtgacctccactggcttcctccttctcctctctgaggactgaaccctcaggcagcccctccacagggcccctctcctgcctggacagctctgctggtctccccgtcccctggagaagaacaaggccatgggtcggcccctgctgctgcccctgctgctcctgctgcagccgccagcatttctgcagcctggtggctccacaggatctggtccaagctacctttatggggtcactcaaccaaaacacctctcagcctccatgggtggctctgtggaaatccccttctccttctattacccctgggagttagccatagttcccaacgtgagaatatcctggagacggggccacttccacgggcagtccttctacagcacaaggccgccttccattcacaaggattatgtgaaccggctctttctgaactggacagagggtcaggagagcggcttcctcaggatctcaaacctgcggaaggaggaccagtctgtgtatttctgccgagtcgagctggacacccggagatcagggaggcagcagttgcagtccatcaaggggaccaaactcaccatcacccaggctgtcacaaccaccaccacctggaggcccagcagcacaaccaccatagccggcctcagggtcacagaaagcaaagggcactcagaatcatggcacctaagtctggacactgccatcagggttgcattggctgtcgctgtgctcaaaactgtcattttgggactgctgtgcctcctcctcctgtggtggaggagaaggaaaggtagcagggcgccaagcagtgacttctgaccaacagagtgtggggagaagggatgtgtattagccccggaggacgtgatgtgagacccgcttgtgagtcctccacactcgttccccattggcaagatacatggagagcaccctgaggacctttaaaaggcaaagccgcaaggcagaaggaggctgggtccctgaatcaccgactggaggagagttacctacaagagccttcatccaggagcatccacactgcaatgatataggaatgaggtctgaactccactgaattaaaccactggcatttgggggctgtttattatagcagtgcaaagagttcctttatcctccccaaggatggaaaaatacaatttattttgcttaccata

SEQ ID NO: 355801 - DNA, 2906 bp, Homo sapiens
  misc_feature (33)..(33): n is a, c, g, or t
tgcagcggactcggcactgagagcacgagcatnggcacccagccaggcctcccaggctgctctccacgtcccttatgccactatcaacaccagctgctgcccagctactttggacacagctcacccccgacagggggccgtcctggtgggcatcactccccacccacaccgcacactggccccagggccctgctgcctgggcctccacatccatccctgcacatggcagctttgtctctgttgagaatggactctacgcttaggctgggcagaggcctccctgcactggtcctggcctcactcttttccctgacccttggggcccagggccatggagggacccttaggagttcaatgagagagaccatgaggccactgggctttccccttcccaggcctcctgggtgccacccccttacgttattcttgggcctctaataagtgtcccacaggtgcctggccaggcccacctgctgcagatgtggtctgtgtgtgtgcatgtgtgggtgtgtgtgggcacaggtgtgagtgtgtgagcaacagtaccccattccagtcgtttcctgctgtgactaagtcagcaacacagttcctctgacatgggccttggctgtgcttctttgggggtgaagagattggggaggaagtctccacccctgggaggcagaagccagtagagacgggtttcaccatgtttggctgggctggtctcgaactcctgacctcaggcatagcgcgctggctaggactccagtaccgtgaagggaggcagtgagagcagacatctgtgcctcattcctgatctcaaggggaaagcaagaacaagggaggcttcctcaggatctcgaacctgcggaaggaggaccagtctgtgtacttctgccaagtccagctggacatacagatcagtctggggtgcagcagagcacagactcaggcccgcctttcctctccctgaaagagcctgcgctggccttggacagagaaagggatgagaagtgaggctgagtgcggtggggtctgcagggatccaggtgggaggggcccagccagccaaggtgaggcccagcccctcagcaggaagatgggcactggggcccttgggcagggctgacttgacacttttgtgtgacttgagccactgtgcccagcctgaacaccctttcctggtaaaacactccacaaaccaggaagagaaggaatgtactgcaacaaaataaaggccagtcatgcaaggcccatggctgaaagtctttcagtcattttagatgaaagactgaaatctttgcctccaagatcaggaacaagagaaggatgcccgctctcactacttctattcaacacaggatttgaagtcaggccgggcacagtggctcacgcctgtaatcccagcacttttggaggctgaggcgggcagattacttgagcctatgagtgtgagaccaccctggccaacatggcaaaaccccatctctactaaaaaaaaaaaaaaaaaaggatttgaagtcctggccggagcaattaggcaagggataaaaaggcacctaaggcccttttgcaataagaagccagatggataaaggaagtgctggtcaccctggaggtgtactggtttggggaaggtccccggcccccacagccctctggggagcctcaccctggctctccccactcacctcagccccctcaggcagcccctccacagggcccctctcctgcctggacagctctgctggtctccccgtcccctggagaagaacaaggccatgggtcggcccctgctgctgcccctgctgctcctgctgcagccgccagcatttctgcagcctggtggctccacaggatctggtccaagctacctttatggggtcactcaaccaaaacacctctcagcctccatgggtggctctgtggaaatccccttctccttctattacccctgggagttagccatagttcccaacgtgagaatatcctggagacggggccacttccacgggcagtccttctacagcacaaggccgccttccattcacaaggattatgtgaaccggctctttctgaactggacagagggtcaggagagcggcttcctcaggatctcaaacctgcggaaggaggaccagtctgtgtatttctgccgagtcgagctggacacccggagatcagggaggcagcagttgcagtccatcaaggggaccaaactcaccatcacccaggctgtcacaaccaccaccacctggaggcccagcagcacaaccaccatagccggcctcagggtcacagaaagcaaagggcactcagaatcatggcacctaagtctggacactgccatcagggttgcattggctgtcgctgtgctcaaaactgtcattttgggactgctgtgcctcctcctcctgtggtggaggagaaggaaaggtagcagggcgccaagcagtgacttctgaccaacagagtgtggggagaagggatgtgtattagccccggaggacgtgatgtgagacccgcttgtgagtcctccacactcgttccccattggcaagatacatggagagcaccctgaggacctttaaaaggcaaagccgcaaggcagaaggaggctgggtccctgaatcaccgactggaggagagttacctacaagagccttcatccaggagcatccacactgcaatgatataggaatgaggtctgaactccactgaattaaaccactggcatttgggggctgtttattatagcagtgcaaagagttcctttatcctccccaaggatggaaaaatacaatttattttgcttaccatacaccccttttctcctcgtccacattttccaatctgtatggtggctgtcttctatggcagaaggttttggggaataaatagcgtgaaatgctgctgacact

SEQ ID NO: 355802 - DNA, 5089 bp, Homo sapiens
gggagtctggattataatcgcgacctaagatactggtcaaacatgccttatttcgagatcgatagggtctcaccatgttgcccaggctggtcttgaactcctggactcatcctaaagtgctggcctctcattccctgtctgtgcacacctcacggcaagggccagcctgtttcctcccggtcacctccaaatcttgctgcttttaattcaactcagaggtatgcacttgaggtaggagggcaggggaagtggggatggcaggacatggatggcccttgaggcattggctctgggtgtcatgggctgtgagagtcaagaagggcagtggcctgcctgacttgggttcgaaagggtcactctggccactgcggtgagaactgaaactagccaggccaattctccattgttcctgctcttccaggtaggagaatattagattaggtctggagtcagaaggtagcaggggctgggggttgcagggggatgttgagaagaagtggtcctttggtcagggtgggaagccaacaggatttcctggtgcattggaggtgaaagggaagaggcgctggtggttgtgctttgggcctgagcagccagaagccgttgccatcacctatgacaagggagacagcgcctggggcagagcccagtatggggtgcattcagggtagatcaggaggtatgagtgggcagtgggcgagccaggctgggggttgtgggggaggcctgggttgcaggtttaagcgtgggacccacgtcagattggtggtgggtcatgcatgctggggtggctctcaggtcctccctgctggcttcccactcccaggggctttctcctcccagattccttagctgggtgaggggcaggacagagccctttcctagggaagcccggcaccccctgctgtccagggaaggggagtccttctagcccctgacagcttctctgcccctcccctggcctccccaggcctagccagggttgagttctcacccacctgtgccgccctgccttgttacctggaagcacagccttggggactgagcaggccctcactgtcactttaagaagggaatcagccactttgtgctcaccacctctggggaaggtgtgagaggagagaaggaagtggctgtttggctgctgacaacatgaagacttcctgcgatgagaacagaggcacaggtgccggccctgcagcccccagaacccggactggagggggccatggggcgccggaccctggccctgccctgggtgctgctgaccctgcgtgtcactgcagggaccccggaggtgtgagtacaagttcggatggaggccaccgagctctcgtccttcaccatccgttgtgggttcctggagtctggctccatctccctggtgactgtgagcagggggggccccgatggtgctggggggaccacgctggctgtgttgcacccggaacttggcatccagcaatgggcccctgctcgccaggcccgctgggaaacccagagcagcatctctctcatcctggaaggctctggggccagcagcccctgcgccaacaccaccttctgctgcaagtttgcgtccttccctgagggctcctgggaggcctgtgggagcctcccgcccagctcagacccaggtggggccggggtgaggggtccaggagggcagggaggggctcgggaactggccatccatctgattcttgcctctgtgcccagggctctctgtcccgccgactcctgcccccattctgcgggcagacctggccgggatcttgggggtctcaggagtccttctctttgactgtggctacctccttcatctgctgtgccgacagaagcaccgccctgcccctaggctccagccatcccacaccagctcctaggcactgagagcacgagcatgggcatagcgcgctggctaggactccagtaccgtgaagggaggcagtgagagcagacatctgtgcctcattcctgatctcaaggggaaagcaagaacaagacctgtgaagggaaggagggtggatcggcctgactggccctgggaagcacagaggagcctactgggaccagggaagagactgacaagagaagggaggcctgtccctgcctgcttctgtctcaagaagattgttatcacttcctctggtgaaatcctgccttcctgtccccacggcccctcagctgatgccaccttactctggagaggatgggcagagcctcctatggagggagccctgtgggtcaccaaagctccagtgaccacccccgggcaaagacctgcagatcccctgttagagacgggcccaggactttgtgcggggtgcccactgttgctctgagccttcacttcctcagggaggcttcctcaggatctcgaacctgcggaaggaggaccagtctgtgtacttctgccaagtccagctggacatacagatcagggaggctgtcgtggcagtccatcaaggggacccacctcaccatcacccagggtgagtccagctgccctggcaccaaggaaccttcctggttcagccataggctcaggtgtgtggagggaatgacctgaggggctgtatgagggaacaacctcctggggctcccctatgcctgagttcctgcaactcagaagttgaggcccagagatccaggtagagggggctccagtcctgggactgccctgcaagtcatgtggcctgggacagggcttctccaagctctgtcccctcctgtgtagggcagggaggtcagaggggaccctgcagatccagtctcatgtctgggggtcaaggggtggcctcgagagggaccagtctctgtgtaggggaccgtcagccccctcaccccttgagcaagactgtggtccctgcaccaagggagcaggcctggggtgggaagaggccagctgggctgtggtggtgcctggggactgcatgggagcccctgccagggagggagagggacagaggacaagctgggggctctggtgcttgggctgggggctgagcgcctgtgacctccactggcttcctccttctcctctctgaggactgaatctggggtgcagcagagcacagactcaggcccgcctttcctctccctgaaagagcctgcgctggccttggacagagaaagggatgagaagtgaggctgagtgcggtggggtctgcagggatccaggtgggaggggcccagccagccaaggtgaggcccagcccctcagcaggaagatgggcactggggcccttgggcagggctgacttgacacttttgtgtgacttgagccactgtgcccagcctgaacaccctttcctggtaaaacactccacaaaccaggaagagaaggaatgtactgcaacaaaataaaggccagtcatgcaaggcccatggctgaaagtctttcagtcattttagatgaaagactgaaatctttgcctccaagatcaggaacaagagaaggatgcccgctctcactacttctattcaacacaggatttgaagtcaggccgggcacagtggctcacgcctgtaatcccagcacttttggaggctgaggcgggcagattacttgagcctatgagtgtgagaccaccctggccaacatggcaaaaccccatctctactaaaaaaaaaaaaaaaaaaggatttgaagtcctggccggagcaattaggcaagggataaaaaggcacctaaggcccttttgcaataagaagccagatggataaaggaagtgctggtcaccctggaggtgtactggtttggggaaggtccccggcccccacagccctctggggagcctcaccctggctctccccactcacctcagccccctcaggcagcccctccacagggcccctctcctgcctggacagctctgctggtctccccgtcccctggagaagaacaaggccatgggtcggcccctgctgctgcccctgctgctcctgctgcagccgccagcatttctgcagcctggtggctccacaggatctggtccaagctacctttatggggtcactcaaccaaaacacctctcagcctccatgggtggctctgtggaaatccccttctccttctattacccctgggagttagccatagttcccaacgtgagaatatcctggagacggggccacttccacgggcagtccttctacagcacaaggccgccttccattcacaaggattatgtgaaccggctctttctgaactggacagagggtcaggagagcggcttcctcaggatctcaaacctgcggaaggaggaccagtctgtgtatttctgccgagtcgagctggacacccggagatcagggaggcagcagttgcagtccatcaaggggaccaaactcaccatcacccaggctgtcacaaccaccaccacctggaggcccagcagcacaaccaccatagccggcctcagggtcacagaaagcaaagggcactcagaatcatggcacctaagtctggacactgccatcagggttgcattggctgtcgctgtgctcaaaactgtcattttgggactgctgtgcctcctcctcctgtggtggaggagaaggaaaggtcagcagcggactaaagccacaaccccagccaggtagcagggcgccaagcagtgacttctgaccaacagagtgtggggagaagggatgtgtattagccccggaggacgtgatgtgagacccgcttgtgagtcctccacactcgttccccattggcaagatacatggagagcaccctgaggacctttaaaaggcaaagccgcaaggcagaaggaggctgggtccctgaatcaccgactggaggagagttacctacaagagccttcatccaggagcatccacactgcaatgatataggaatgaggtctgaactccactgaattaaaccactggcatttgggggctgtttattatagcagtgcaaagagttcctttatcctccccaaggatggaaaaatacaatttattttgcttaccatacaccccttttctcctcgtccacattttccaatctgtatggtggctgtcttctatggcagaaggttttggggaataaatagcgtgaaatgctgctgacact

SEQ ID NO: 355803 - DNA, 1618 bp, Homo sapiens
  misc_feature (33)..(33): n is a, c, g, or t
tgcagcggactcggcactgagagcacgagcatnggcacccagccaggcctcccaggctgctctccacgtcccttatgccactatcaacaccagctgctgcccagctactttggacacagctcacccccgacagggggccgtcctgtcgtttcctgctgtgactaagtcagcaacacagttcctctgacatgggccttggctgtgcttctttgggggtgaagagattggggaggaagtctccacccctgggaggcagaagccaggcatagcgcgctggctaggactccagtaccgtgaagggaggcagtgagagcagacatctgtgcctcattcctgatctcaaggggaaagcaagaacaagggaggcttcctcaggatctcgaacctgcggaaggaggaccagtctgtgtacttctgccaagtccagctggacatacagatcagggaggctgtcgtggcagtccatcaaggggacccacctcaccatcacccaggccctcaggcagcccctccacagggcccctctcctgcctggacagctctgctggtctccccgtcccctggagaagaacaaggccatgggtcggcccctgctgctgcccctgctgctcctgctgcagccgccagcatttctgcagcctggtggctccacaggatctggtccaagctacctttatggggtcactcaaccaaaacacctctcagcctccatgggtggctctgtggaaatccccttctccttctattacccctgggagttagccatagttcccaacgtgagaatatcctggagacggggccacttccacgggcagtccttctacagcacaaggccgccttccattcacaaggattatgtgaaccggctctttctgaactggacagagggtcaggagagcggcttcctcaggatctcaaacctgcggaaggaggaccagtctgtgtatttctgccgagtcgagctggacacccggagatcagggaggcagcagttgcagtccatcaaggggaccaaactcaccatcacccaggctgtcacaaccaccaccacctggaggcccagcagcacaaccaccatagccggcctcagggtcacagaaagcaaagggcactcagaatcatggcacctaagtctggacactgccatcagggttgcattggctgtcgctgtgctcaaaactgtcattttgggactgctgtgcctcctcctcctgtggtggaggagaaggaaaggtagcagggcgccaagcagtgacttctgaccaacagagtgtggggagaagggatgtgtattagccccggaggacgtgatgtgagacccgcttgtgagtcctccacactcgttccccattggcaagatacatggagagcaccctgaggacctttaaaaggcaaagccgcaaggcagaaggaggctgggtccctgaatcaccgactggaggagagttacctacaagagccttcatccaggagcatccacactgcaatgatataggaatgaggtctgaactccactgaattaaaccactggcatttgggggctgtttattatagcagtgcaaagagttcctttatcctccccaaggatggaaaaatacaatttattttgcttaccata

SEQ ID NO: 355804 - DNA, 5346 bp, Homo sapiens
gggagtctggattataatcgcgacctaagatactggtcaaacatgccttatttcgagatcgatagggtctcaccatgttgcccaggctggtcttgaactcctggactcatcctaaagtgctggcctctcattccctgtctgtgcacacctcacggcaagggccagcctgtttcctcccggtcacctccaaatcttgctgcttttaattcaactcagaggtatgcacttgaggtaggagggcaggggaagtggggatggcaggacatggatggcccttgaggcattggctctgggtgtcatgggctgtgagagtcaagaagggcagtggcctgcctgacttgggttcgaaagggtcactctggccactgcggtgagaactgaaactagccaggccaattctccattgttcctgctcttccaggtaggagaatattagattaggtctggagtcagaaggtagcaggggctgggggttgcagggggatgttgagaagaagtggtcctttggtcagggtgggaagccaacaggatttcctggtgcattggaggtgaaagggaagaggcgctggtggttgtgctttgggcctgagcagccagaagccgttgccatcacctatgacaagggagacagcgcctggggcagagcccagtatggggtgcattcagggtagatcaggaggtatgagtgggcagtgggcgagccaggctgggggttgtgggggaggcctgggttgcaggtttaagcgtgggacccacgtcagattggtggtgggtcatgcatgctggggtggctctcaggtcctccctgctggcttcccactcccaggggctttctcctcccagattccttagctgggtgaggggcaggacagagccctttcctagggaagcccggcaccccctgctgtccagggaaggggagtccttctagcccctgacagcttctctgcccctcccctggcctccccaggcctagccagggttgagttctcacccacctgtgccgccctgccttgttacctggaagcacagccttggggactgagcaggccctcactgtcactttaagaagggaatcagccactttgtgctcaccacctctggggaaggtgtgagaggagagaaggaagtggctgtttggctgctgacaacatgaagacttcctgcgatgagaacagaggcacaggtgccggccctgcagcccccagaacccggactggagggggccatggggcgccggaccctggccctgccctgggtgctgctgaccctgcgtgtcactgcagggaccccggaggtgtgagtacaagttcggatggaggccaccgagctctcgtccttcaccatccgttgtgggttcctggagtctggctccatctccctggtgactgtgagcagggggggccccgatggtgctggggggaccacgctggctgtgttgcacccggaacttggcatccagcaatgggcccctgctcgccaggcccgctgggaaacccagagcagcatctctctcatcctggaaggctctggggccagcagcccctgcgccaacaccaccttctgctgcaagtttgcgtccttccctgagggctcctgggaggcctgtgggagcctcccgcccagctcagacccaggtggggccggggtgaggggtccaggagggcagggaggggctcgggaactggccatccatctgattcttgcctctgtgcccagggctctctgtcccgccgactcctgcccccattctgcgggcagacctggccgggatcttgggggtctcaggagtccttctctttgactgtggctacctccttcatctgctgtgccgacagaagcaccgccctgcccctaggctccagccatcccacaccagctcctaggcactgagagcacgagcatgggcatagcgcgctggctaggactccagtaccgtgaagggaggcagtgagagcagacatctgtgcctcattcctgatctcaaggggaaagcaagaacaagacctgtgaagggaaggagggtggatcggcctgactggccctgggaagcacagaggagcctactgggaccagggaagagactgacaagagaagggaggcctgtccctgcctgcttctgtctcaagaagattgttatcacttcctctggtgaaatcctgccttcctgtccccacggcccctcagctgatgccaccttactctggagaggatgggcagagcctcctatggagggagccctgtgggtcaccaaagctccagtgaccacccccgggcaaagacctgcagatcccctgttagagacgggcccaggactttgtgcggggtgcccactgttgctctgagccttcacttcctcagggaggcttcctcaggatctcgaacctgcggaaggaggaccagtctgtgtacttctgccaagtccagctggacatacagatcagggaggctgtcgtggcagtccatcaaggggacccacctcaccatcacccagggtgagtccagctgccctggcaccaaggaaccttcctggttcagccataggctcaggtgtgtggagggaatgacctgaggggctgtatgagggaacaacctcctggggctcccctatgcctgagttcctgcaactcagaagttgaggcccagagatccaggtagagggggctccagtcctgggactgccctgcaagtcatgtggcctgggacagggcttctccaagctctgtcccctcctgtgtagggcagggaggtcagaggggaccctgcagatccagtctcatgtctgggggtcaaggggtggcctcgagagggaccagtctctgtgtaggggaccgtcagccccctcaccccttgagcaagactgtggtccctgcaccaagggagcaggcctggggtgggaagaggccagctgggctgtggtggtgcctggggactgcatgggagcccctgccagggagggagagggacagaggacaagctgggggctctggtgcttgggctgggggctgagcgcctgtgacctccactggcttcctccttctcctctctgaggactgaatctggggtgcagcagagcacagactcaggcccgcctttcctctccctgaaagagcctgcgctggccttggacagagaaagggatgagaagtgaggctgagtgcggtggggtctgcagggatccaggtgggaggggcccagccagccaaggtgaggcccagcccctcagcaggaagatgggcactggggcccttgggcagggctgacttgacacttttgtgtgacttgagccactgtgcccagcctgaacaccctttcctggtaaaacactccacaaaccaggaagagaaggaatgtactgcaacaaaataaaggccagtcatgcaaggcccatggctgaaagtctttcagtcattttagatgaaagactgaaatctttgcctccaagatcaggaacaagagaaggatgcccgctctcactacttctattcaacacaggatttgaagtcaggccgggcacagtggctcacgcctgtaatcccagcacttttggaggctgaggcgggcagattacttgagcctatgagtgtgagaccaccctggccaacatggcaaaaccccatctctactaaaaaaaaaaaaaaaaaaggatttgaagtcctggccggagcaattaggcaagggataaaaaggcacctaaggcccttttgcaataagaagccagatggataaaggaagtgctggtcaccctggaggtgtactggtttggggaaggtccccggcccccacagccctctggggagcctcaccctggctctccccactcacctcagccccctcaggcagcccctccacagggcccctctcctgcctggacagctctgctggtctccccgtcccctggagaagaacaaggccatgggtcggcccctgctgctgcccctgctgctcctgctgcagccgccagcatttctgcagcctggtggctccacaggatctggtccaagctacctttatggggtcactcaaccaaaacacctctcagcctccatgggtggctctgtggaaatccccttctccttctattacccctgggagttagccatagttcccaacgtgagaatatcctggagacggggccacttccacgggcagtccttctacagcacaaggccgccttccattcacaaggattatgtgaaccggctctttctgaactggacagagggtcaggagagcggcttcctcaggatctcaaacctgcggaaggaggaccagtctgtgtatttctgccgagtcgagctggacacccggagatcagggaggcagcagttgcagtccatcaaggggaccaaactcaccatcacccagggtgagtccagctgccctgacacctgccttgcccaccgcagtgagggttttggtgaccactgatgtcttcacatttaaacccagtggtctggattgagagctgttagcatttcaccttgctaccccttccatgtctgggcttctgagagcagcttgctcatcctgaatgtccccaatctagaaagcagcacaccatgcctttcatccagacgccccacacccccagaagagggtctgctcattcctcatctcttccagctgtcacaaccaccaccacctggaggcccagcagcacaaccaccatagccggcctcagggtcacagaaagcaaagggcactcagaatcatggcacctaagtctggacactgccatcagggttgcattggctgtcgctgtgctcaaaactgtcattttgggactgctgtgcctcctcctcctgtggtggaggagaaggaaaggtcagcagcggactaaagccacaaccccagccaggtagcagggcgccaagcagtgacttctgaccaacagagtgtggggagaagggatgtgtattagccccggaggacgtgatgtgagacccgcttgtgagtcctccacactcgttccccattggcaagatacatggagagcaccctgaggacctttaaaaggcaaagccgcaaggcagaaggaggctgggtccctgaatcaccgactggaggagagttacctacaagagccttcatccaggagcatccacactgcaatgatataggaatgaggtctgaactccactgaattaaaccactggcatttgggggctgtttattatagcagtgcaaagagttcctttatcctccccaaggatggaaaaatacaatttattttgcttaccatacaccccttttctcctcgtccacattttccaatctgtatggtggctgtcttctatggcagaaggttttggggaataaatagcgtgaaatgctgctgacact

SEQ ID NO: 355805 - DNA, 2586 bp, Homo sapiens
gggagtctggattataatcgcgacctaagatactggtcaaacatgccttatttcgagatcgatagggtctcaccatgttgcccaggctggtcttgaactcctggactcatcctaaagtgctggcctctcattccctgtctgtgcacacctcacggcaagggccagcctgtttcctcccggtcacctccaaatcttgctgcttttaattcaactcagaggtatgcacttgaggtaggagggcaggggaagtggggatggcaggacatggatggcccttgaggcattggctctgggtgtcatgggctgtgagagtcaagaagggcagtggcctgcctgacttgggttcgaaagggtcactctggccactgcggtgagaactgaaactagccaggccaattctccattgttcctgctcttccaggtaggagaatattagattaggtctggagtcagaaggtagcaggggctgggggttgcagggggatgttgagaagaagtggtcctttggtcagggtgggaagccaacaggatttcctggtgcattggaggtgaaagggaagaggcgctggtggttgtgctttgggcctgagcagccagaagccgttgccatcacctatgacaagggagacagcgcctggggcagagcccagtatggggtgcattcagggtagatcaggaggtatgagtgggcagtgggcgagccaggctgggggttgtgggggaggcctgggttgcaggtttaagcgtgggacccacgtcagattggtggtgggtcatgcatgctggggtggctctcaggtcctccctgctggcttcccactcccaggggctttctcctcccagattccttagctgggtgaggggcaggacagagccctttcctagggaagcccggcaccccctgctgtccagggaaggggagtccttctagcccctgacagcttctctgcccctcccctggcctccccaggcctagccagggttgagttctcacccacctgtgccgccctgccttgttacctggaagcacagccttggggactgagcaggccctcactgtcactttaagaagggaatcagccactttgtgctcaccacctctggggaaggtgtgagaggagagaaggaagtggctgtttggctgctgacaacatgaagacttcctgcgatgagaacagaggcacaggtgccggccctgcagcccccagaacccggactggagggggccatggggcgccggaccctggccctgccctgggtgctgctgaccctgcgtgtcactgcagggaccccggaggtgtgagtacaagttcggatggaggccaccgagctctcgtccttcaccatccgttgtgggttcctggagtctggctccatctccctggtgactgtgagcagggggggccccgatggtgctggggggaccacgctggctgtgttgcacccggaacttggcatccagcaatgggcccctgctcgccaggcccgctgggaaacccagagcagcatctctctcatcctggaaggctctggggccagcagcccctgcgccaacaccaccttctgctgcaagtttgcgtccttccctgagggctcctgggaggcctgtgggagcctcccgcccagctcagacccaggtggggccggggtgaggggtccaggagggcagggaggggctcgggaactggccatccatctgattcttgcctctgtgcccagggctctctgtcccgccgactcctgcccccattctgcgggcagacctggccgggatcttgggggtctcaggagtccttctctttgactgtggctacctccttcatctgctgtgccgacagaagcaccgccctgcccctaggctccagccatcccacaccagctcctaggcactgagagcacgagcatgggcatagcgcgctggctaggactccagtaccgtgaagggaggcagtgagagcagacatctgtgcctcattcctgatctcaaggggaaagcaagaacaagggaggcttcctcaggatctcgaacctgcggaaggaggaccagtctgtgtacttctgccaagtccagctggacatacagatcagggaggctgtcgtggcagtccatcaaggggacccacctcaccatcacccaggccctcaggcagcccctccacagggcccctctcctgcctggacagctctgctggtctccccgtcccctggagaagaacaaggccatgggtcggcccctgctgctgcccctgctgctcctgctgcagccgccagcatttctgcagcctgagggtcaggagagcggcttcctcaggatctcaaacctgcggaaggaggaccagtctgtgtatttctgccgagtcgagctggacacccggagatcagggaggcagcagttgcagtccatcaagggacaactaccataccagctgacaccacacactgaggcagagcacacatacgctaggtcaaagaagcctaatatgcagtgcatgctagtgtgtgctggtacgattgcggccccggggagagcgcacctcaaggagtgtcggaagctcacctgaggcgagcgggcacggcctacatagc

SEQ ID NO: 355806 - DNA, 2190 bp, Homo sapiens
gggagtctggattataatcgcgacctaagatactggtcaaacatgccttatttcgagatcgatagggtctcaccatgttgcccaggctggtcttgaactcctggactcatcctaaagtgctggcctctcattccctgtctgtgcacacctcacggcaagggccagcctgtttcctcccggtcacctccaaatcttgctgcttttaattcaactcagaggtatgcacttgaggtaggagggcaggggaagtggggatggcaggacatggatggcccttgaggcattggctctgggtgtcatgggctgtgagagtcaagaagggcagtggcctgcctgacttgggttcgaaagggtcactctggccactgcggtgagaactgaaactagccaggccaattctccattgttcctgctcttccaggtaggagaatattagattaggtctggagtcagaaggtagcaggggctgggggttgcagggggatgttgagaagaagtggtcctttggtcagggtgggaagccaacaggatttcctggtgcattggaggtgaaagggaagaggcgctggtggttgtgctttgggcctgagcagccagaagccgttgccatcacctatgacaagggagacagcgcctggggcagagcccagtatggggtgcattcagggtagatcaggaggtatgagtgggcagtgggcgagccaggctgggggttgtgggggaggcctgggttgcaggtttaagcgtgggacccacgtcagattggtggtgggtcatgcatgctggggtggctctcaggtcctccctgctggcttcccactcccaggggctttctcctcccagattccttagctgggtgaggggcaggacagagccctttcctagggaagcccggcaccccctgctgtccagggaaggggagtccttctagcccctgacagcttctctgcccctcccctggcctccccaggcctagccagggttgagttctcacccacctgtgccgccctgccttgttacctggaagcacagccttggggactgagcaggccctcactgtcactttaagaagggaatcagccactttgtgctcaccacctctggggaaggtgtgagaggagagaaggaagtggctgtttggctgctgacaacatgaagacttcctgcgatgagaacagaggcacaggtgccggccctgcagcccccagaacccggactggagggggccatggggcgccggaccctggccctgccctgggtgctgctgaccctgcgtgtcactgcagggaccccggaggtgtgagtacaagttcggatggaggccaccgagctctcgtccttcaccatccgttgtgggttcctggagtctggctccatctccctggtgactgtgagcagggggggccccgatggtgctggggggaccacgctggctgtgttgcacccggaacttggcatccagcaatgggcccctgctcgccaggcccgctgggaaacccagagcagcatctctctcatcctggaaggctctggggccagcagcccctgcgccaacaccaccttctgctgcaagtttgcgtccttccctgagggctcctgggaggcctgtgggagcctcccgcccagctcagacccaggtggggccggggtgaggggtccaggagggcagggaggggctcgggaactggccatccatctgattcttgcctctgtgcccagggctctctgtcccgccgactcctgcccccattctgcgggcagacctggccgggatcttgggggtctcaggagtccttctctttgactgtggctacctccttcatctgctgtgccgacagaagcaccgccctgcccctaggctccagccatcccacaccagctcctaggcactgagagcacgagcatgggcatagcgcgctggctaggactccagtaccgtgaagggaggcagtgagagcagacatctgtgcctcattcctgatctcaaggggaaagcaagaacaagggaggcttcctcaggatctcgaacctgcggaaggaggaccagtctgtgtacttctgccaagtccagctggacatacagatcagggaggctgtcgtggcagtccatcaaggggacccacctcaccatcacccaggccctcccctcctctgtgctgacagcacagaggaggcagaggagggaggagg

SEQ ID NO: 355807 - DNA, 546 bp, Homo sapiens
  misc_feature (33)..(33): n is a, c, g, or t
tgcagcggactcggcactgagagcacgagcatnggcacccagccaggcctcccaggctgctctccacgtcccttatgccactatcaacaccagctgctgcccagctactttggacacagctcacccccgacagggggccgtcctgtcgtttcctgctgtgactaagtcagcaacacagttcctctgacatgggccttggctgtgcttctttgggggtgaagagattggggaggaagtctccacccctgggaggcagaagccaggcatagcgcgctggctaggactccagtaccgtgaagggaggcagtgagagcagacatctgtgcctcattcctgatctcaaggggaaagcaagaacaagggaggcttcctcaggatctcgaacctgcggaaggaggaccagtctgtgtacttctgccaagtccagctggacatacagatcagggaggctgtcgtggcagtccatcaaggggacccacctcaccatcacccaggccctcccctcctctgtgctgacagcacagaggaggcagaggagggaggagg

SEQ ID NO: 355808 - DNA, 914 bp, Homo sapiens
  misc_feature (33)..(33): n is a, c, g, or t
tgcagcggactcggcactgagagcacgagcatnggcacccagccaggcctcccaggctgctctccacgtcccttatgccactatcaacaccagctgctgcccagctactttggacacagctcacccccgacagggggccgtcctggtgggcatcactccccacccacaccgcacactggccccagggccctgctgcctgggcctccacatccatccctgcacatggcagctttgtctctgttgagaatggactctacgcttaggctgggcagaggcctccctgcactggtcctggcctcactcttttccctgacccttggggcccagggccatggagggacccttaggagttcaatgagagagaccatgaggccactgggctttccccttcccaggcctcctgggtgccacccccttacgttattcttgggcctctaataagtgtcccacaggtgcctggccaggcccacctgctgcagatgtggtctgtgtgtgtgcatgtgtgggtgtgtgtgggcacaggtgtgagtgtgtgagcaacagtaccccattccagtcgtttcctgctgtgactaagtcagcaacacagttcctctgacatgggccttggctgtgcttctttgggggtgaagagattggggaggaagtctccacccctgggaggcagaagccagtagagacgggtttcaccatgtttggctgggctggtctcgaactcctgacctcaggtgatccacccaccttggcctcccaaagtgctgagattacagacttgagccacggtgccccgcctgaataggagcttcttaatcaaaatttcagcatggctctgggtcaaaattgaccagctgatttaataagttgatgtaaaaattttacagtcagctacccctgggagggggagtctctcccta

SEQ ID NO: 355809 - DNA, 775 bp, Homo sapiens
  misc_feature (33)..(33): n is a, c, g, or t
tgcagcggactcggcactgagagcacgagcatnggcacccagccaggcctcccaggctgctctccacgtcccttatgccactatcaacaccagctgctgcccagctactttggacacagctcacccccgacagggggccgtcctggtgggcatcactccccacccacaccgcacactggccccagggccctgctgcctgggcctccacatccatccctgcacatggcagctttgtctctgttgagaatggactctacgcttaggctgggcagaggcctccctgcactggtcctggcctcactcttttccctgacccttggggcccagggccatggagggacccttaggagttcaatgagagagaccatgaggccactgggctttccccttcccaggcctcctgggtgccacccccttacgttattcttgggcctctaataagtgtcccacaggtgcctggccaggcccacctgctgcagatgtggtctgtgtgtgtgcatgtgtgggtgtgtgtgggcacaggtgtgagtgtgtgagcaacagtaccccattccagtcgtttcctgctgtgactaagtcagcaacacagttcctctgacatgggccttggctgtgcttctttgggggtgaagagattggggaggaagtctccacccctgggaggcagaagccaggtgagaaccagagtgggttggggcctccttgcagggctgggtttggcccagggagagggcagtgtcccagtcttagagatctgtcctggcttcttggggtg

SEQ ID NO: 355810 - DNA, 414 bp, Homo sapiens
ctgcatctaaaaacacttcccctcctgcaggtagcagggcgccaagcagtgacttctgaccaacagagtgtggggagaagggatgtgtattagccccggaggacgtgatgtgagacccgcttgtgagtcctccacactcgttccccattggcaagatacatggagagcaccctgaggacctttaaaaggcaaagccgcaaggcagaaggaggctgggtccctgaatcaccgactggaggagagttacctacaagagccttcatccaggagcatccacactgcaatgatataggaatgaggtctgaactccactgaattaaaccactggcatttgggggctgtttattatagcagtgcaaagagttcctttatcctccccaaggatggaaaaatacaatttattttgcttaccat

SEQ ID NO: 355811 - DNA, 4638 bp, Homo sapiens
gggagtctggattataatcgcgacctaagatactggtcaaacatgccttatttcgagatcgatagggtctcaccatgttgcccaggctggtcttgaactcctggactcatcctaaagtgctggcctctcattccctgtctgtgcacacctcacggcaagggccagcctgtttcctcccggtcacctccaaatcttgctgcttttaattcaactcagaggtatgcacttgaggtaggagggcaggggaagtggggatggcaggacatggatggcccttgaggcattggctctgggtgtcatgggctgtgagagtcaagaagggcagtggcctgcctgacttgggttcgaaagggtcactctggccactgcggtgagaactgaaactagccaggccaattctccattgttcctgctcttccaggtaggagaatattagattaggtctggagtcagaaggtagcaggggctgggggttgcagggggatgttgagaagaagtggtcctttggtcagggtgggaagccaacaggatttcctggtgcattggaggtgaaagggaagaggcgctggtggttgtgctttgggcctgagcagccagaagccgttgccatcacctatgacaagggagacagcgcctggggcagagcccagtatggggtgcattcagggtagatcaggaggtatgagtgggcagtgggcgagccaggctgggggttgtgggggaggcctgggttgcaggtttaagcgtgggacccacgtcagattggtggtgggtcatgcatgctggggtggctctcaggtcctccctgctggcttcccactcccaggggctttctcctcccagattccttagctgggtgaggggcaggacagagccctttcctagggaagcccggcaccccctgctgtccagggaaggggagtccttctagcccctgacagcttctctgcccctcccctggcctccccaggcctagccagggttgagttctcacccacctgtgccgccctgccttgttacctggaagcacagccttggggactgagcaggccctcactgtcactttaagaagggaatcagccactttgtgctcaccacctctggggaaggtgtgagaggagagaaggaagtggctgtttggctgctgacaacatgaagacttcctgcgatgagaacagaggcacaggtgccggccctgcagcccccagaacccggactggagggggccatggggcgccggaccctggccctgccctgggtgctgctgaccctgcgtgtcactgcagggaccccggaggtgtgagtacaagttcggatggaggccaccgagctctcgtccttcaccatccgttgtgggttcctggagtctggctccatctccctggtgactgtgagcagggggggccccgatggtgctggggggaccacgctggctgtgttgcacccggaacttggcatccagcaatgggcccctgctcgccaggcccgctgggaaacccagagcagcatctctctcatcctggaaggctctggggccagcagcccctgcgccaacaccaccttctgctgcaagtttgcgtccttccctgagggctcctgggaggcctgtgggagcctcccgcccagctcagacccaggtggggccggggtgaggggtccaggagggcagggaggggctcgggaactggccatccatctgattcttgcctctgtgcccagggctctctgtcccgccgactcctgcccccattctgcgggcagacctggccgggatcttgggggtctcaggagtccttctctttgactgtggctacctccttcatctgctgtgccgacagaagcaccggcatagcgcgctggctaggactccagtaccgtgaagggaggcagtgagagcagacatctgtgcctcattcctgatctcaaggggaaagcaagaacaagggaggcttcctcaggatctcgaacctgcggaaggaggaccagtctgtgtacttctgccaagtccagctggacatacagatcagggaggctgtcgtggcagtccatcaaggggacccacctcaccatcacccagggtgagtccagctgccctggcaccaaggaaccttcctggttcagccataggctcaggtgtgtggagggaatgacctgaggggctgtatgagggaacaacctcctggggctcccctatgcctgagttcctgcaactcagaagttgaggcccagagatccaggtagagggggctccagtcctgggactgccctgcaagtcatgtggcctgggacagggcttctccaagctctgtcccctcctgtgtagggcagggaggtcagaggggaccctgcagatccagtctcatgtctgggggtcaaggggtggcctcgagagggaccagtctctgtgtaggggaccgtcagccccctcaccccttgagcaagactgtggtccctgcaccaagggagcaggcctggggtgggaagaggccagctgggctgtggtggtgcctggggactgcatgggagcccctgccagggagggagagggacagaggacaagctgggggctctggtgcttgggctgggggctgagcgcctgtgacctccactggcttcctccttctcctctctgaggactgaatctggggtgcagcagagcacagactcaggcccgcctttcctctccctgaaagagcctgcgctggccttggacagagaaagggatgagaagtgaggctgagtgcggtggggtctgcagggatccaggtgggaggggcccagccagccaaggtgaggcccagcccctcagcaggaagatgggcactggggcccttgggcagggctgacttgacacttttgtgtgacttgagccactgtgcccagcctgaacaccctttcctggtaaaacactccacaaaccaggaagagaaggaatgtactgcaacaaaataaaggccagtcatgcaaggcccatggctgaaagtctttcagtcattttagatgaaagactgaaatctttgcctccaagatcaggaacaagagaaggatgcccgctctcactacttctattcaacacaggatttgaagtcaggccgggcacagtggctcacgcctgtaatcccagcacttttggaggctgaggcgggcagattacttgagcctatgagtgtgagaccaccctggccaacatggcaaaaccccatctctactaaaaaaaaaaaaaaaaaaggatttgaagtcctggccggagcaattaggcaagggataaaaaggcacctaaggcccttttgcaataagaagccagatggataaaggaagtgctggtcaccctggaggtgtactggtttggggaaggtccccggcccccacagccctctggggagcctcaccctggctctccccactcacctcagccccctcaggcagcccctccacagggcccctctcctgcctggacagctctgctggtctccccgtcccctggagaagaacaaggccatgggtcggcccctgctgctgcccctgctgctcctgctgcagccgccagcatttctgcagcctggtggctccacaggatctggtccaagctacctttatggggtcactcaaccaaaacacctctcagcctccatgggtggctctgtggaaatccccttctccttctattacccctgggagttagccatagttcccaacgtgagaatatcctggagacggggccacttccacgggcagtccttctacagcacaaggccgccttccattcacaaggattatgtgaaccggctctttctgaactggacagagggtcaggagagcggcttcctcaggatctcaaacctgcggaaggaggaccagtctgtgtatttctgccgagtcgagctggacacccggagatcagggaggcagcagttgcagtccatcaaggggaccaaactcaccatcacccaggctgtcacaaccaccaccacctggaggcccagcagcacaaccaccatagccggcctcagggtcacagaaagcaaagggcactcagaatcatggcacctaagtctggacactgccatcagggttgcattggctgtcgctgtgctcaaaactgtcattttgggactgctgtgcctcctcctcctgtggtggaggagaaggaaaggtagcagggcgccaagcagtgacttctgaccaacagagtgtggggagaagggatgtgtattagccccggaggacgtgatgtgagacccgcttgtgagtcctccacactcgttccccattggcaagatacatggagagcaccctgaggacctttaaaaggcaaagccgcaaggcagaaggaggctgggtccctgaatcaccgactggaggagagttacctacaagagccttcatccaggagcatccacactgcaatgatataggaatgaggtctgaactccactgaattaaaccactggcatttgggggctgtttattatagcagtgcaaagagttcctttatcctccccaaggatggaaaaatacaatttattttgcttaccatacaccccttttctcctcgtccacattttccaatctgtatggtggctgtcttctatggcagaaggttttggggaataaatagcgtgaaatgctgctgacact

SEQ ID NO: 355812 - DNA, 5149 bp, Homo sapiens
  misc_feature (5132)..(5132): n is a, c, g, or t
gggagtctggattataatcgcgacctaagatactggtcaaacatgccttatttcgagatcgatagggtctcaccatgttgcccaggctggtcttgaactcctggactcatcctaaagtgctggcctctcattccctgtctgtgcacacctcacggcaagggccagcctgtttcctcccggtcacctccaaatcttgctgcttttaattcaactcagaggtatgcacttgaggtaggagggcaggggaagtggggatggcaggacatggatggcccttgaggcattggctctgggtgtcatgggctgtgagagtcaagaagggcagtggcctgcctgacttgggttcgaaagggtcactctggccactgcggtgagaactgaaactagccaggccaattctccattgttcctgctcttccaggtaggagaatattagattaggtctggagtcagaaggtagcaggggctgggggttgcagggggatgttgagaagaagtggtcctttggtcagggtgggaagccaacaggatttcctggtgcattggaggtgaaagggaagaggcgctggtggttgtgctttgggcctgagcagccagaagccgttgccatcacctatgacaagggagacagcgcctggggcagagcccagtatggggtgcattcagggtagatcaggaggtatgagtgggcagtgggcgagccaggctgggggttgtgggggaggcctgggttgcaggtttaagcgtgggacccacgtcagattggtggtgggtcatgcatgctggggtggctctcaggtcctccctgctggcttcccactcccaggggctttctcctcccagattccttagctgggtgaggggcaggacagagccctttcctagggaagcccggcaccccctgctgtccagggaaggggagtccttctagcccctgacagcttctctgcccctcccctggcctccccaggcctagccagggttgagttctcacccacctgtgccgccctgccttgttacctggaagcacagccttggggactgagcaggccctcactgtcactttaagaagggaatcagccactttgtgctcaccacctctggggaaggtgtgagaggagagaaggaagtggctgtttggctgctgacaacatgaagacttcctgcgatgagaacagaggcacaggtgccggccctgcagcccccagaacccggactggagggggccatggggcgccggaccctggccctgccctgggtgctgctgaccctgcgtgtcactgcagggaccccggaggtgtgagtacaagttcggatggaggccaccgagctctcgtccttcaccatccgttgtgggttcctggagtctggctccatctccctggtgactgtgagcagggggggccccgatggtgctggggggaccacgctggctgtgttgcacccggaacttggcatccagcaatgggcccctgctcgccaggcccgctgggaaacccagagcagcatctctctcatcctggaaggctctggggccagcagcccctgcgccaacaccaccttctgctgcaagtttgcgtccttccctgagggctcctgggaggcctgtgggagcctcccgcccagctcagacccaggtggggccggggtgaggggtccaggagggcagggaggggctcgggaactggccatccatctgattcttgcctctgtgcccagggctctctgtcccgccgactcctgcccccattctgcgggcagacctggccgggatcttgggggtctcaggagtccttctctttgactgtggctacctccttcatctgctgtgccgacagaagcaccgccctgcccctaggctccagccatcccacaccagctcctaggcactgagagcacgagcatgggcatagcgcgctggctaggactccagtaccgtgaagggaggcagtgagagcagacatctgtgcctcattcctgatctcaaggggaaagcaagaacaagacctgtgaagggaaggagggtggatcggcctgactggccctgggaagcacagaggagcctactgggaccagggaagagactgacaagagaagggaggcctgtccctgcctgcttctgtctcaagaagattgttatcacttcctctggtgaaatcctgccttcctgtccccacggcccctcagctgatgccaccttactctggagaggatgggcagagcctcctatggagggagccctgtgggtcaccaaagctccagtgaccacccccgggcaaagacctgcagatcccctgttagagacgggcccaggactttgtgcggggtgcccactgttgctctgagccttcacttcctcagggaggcttcctcaggatctcgaacctgcggaaggaggaccagtctgtgtacttctgccaagtccagctggacatacagatcagggaggctgtcgtggcagtccatcaaggggacccacctcaccatcacccagggtgagtccagctgccctggcaccaaggaaccttcctggttcagccataggctcaggtgtgtggagggaatgacctgaggggctgtatgagggaacaacctcctggggctcccctatgcctgagttcctgcaactcagaagttgaggcccagagatccaggtagagggggctccagtcctgggactgccctgcaagtcatgtggcctgggacagggcttctccaagctctgtcccctcctgtgtagggcagggaggtcagaggggaccctgcagatccagtctcatgtctgggggtcaaggggtggcctcgagagggaccagtctctgtgtaggggaccgtcagccccctcaccccttgagcaagactgtggtccctgcaccaagggagcaggcctggggtgggaagaggccagctgggctgtggtggtgcctggggactgcatgggagcccctgccagggagggagagggacagaggacaagctgggggctctggtgcttgggctgggggctgagcgcctgtgacctccactggcttcctccttctcctctctgaggactgaatctggggtgcagcagagcacagactcaggcccgcctttcctctccctgaaagagcctgcgctggccttggacagagaaagggatgagaagtgaggctgagtgcggtggggtctgcagggatccaggtgggaggggcccagccagccaaggtgaggcccagcccctcagcaggaagatgggcactggggcccttgggcagggctgacttgacacttttgtgtgacttgagccactgtgcccagcctgaacaccctttcctggtaaaacactccacaaaccaggaagagaaggaatgtactgcaacaaaataaaggccagtcatgcaaggcccatggctgaaagtctttcagtcattttagatgaaagactgaaatctttgcctccaagatcaggaacaagagaaggatgcccgctctcactacttctattcaacacaggatttgaagtcaggccgggcacagtggctcacgcctgtaatcccagcacttttggaggctgaggcgggcagattacttgagcctatgagtgtgagaccaccctggccaacatggcaaaaccccatctctactaaaaaaaaaaaaaaaaaaggatttgaagtcctggccggagcaattaggcaagggataaaaaggcacctaaggcccttttgcaataagaagccagatggataaaggaagtgctggtcaccctggaggtgtactggtttggggaaggtccccggcccccacagccctctggggagcctcaccctggctctccccactcacctcagccccctcaggcagcccctccacagggcccctctcctgcctggacagctctgctggtctccccgtcccctggagaagaacaaggccatgggtcggcccctgctgctgcccctgctgctcctgctgcagccgccagcatttctgcagcctggtggctccacaggatctggtccaagctacctttatggggtcactcaaccaaaacacctctcagcctccatgggtggctctgtggaaatccccttctccttctattacccctgggagttagccatagttcccaacgtgagaatatcctggagacggggccacttccacgggcagtccttctacagcacaaggccgccttccattcacaaggattatgtgaaccggctctttctgaactggacagagggtcaggagagcggcttcctcaggatctcaaacctgcggaaggaggaccagtctgtgtatttctgccgagtcgagctggacacccggagatcagggaggcagcagttgcagtccatcaaggggaccaaactcaccatcacccaggctgtcacaaccaccaccacctggaggcccagcagcacaaccaccatagccggcctcagggtcacagaaagcaaagggcactcagaatcatggcacctaagtctggacactgccatcagggttgcattggctgtcgctgtgctcaaaactgtcattttgggactgctgtgcctcctcctcctgtggtggaggagaaggaaaggtagcagggcgccaagcagtgacttctgaccaacagagtgtggggagaagggatgtgtattagccccggaggacgtgatgtgagacccgcttgtgagtcctccacactcgttccccattggcaagatacatggagagcaccctgaggacctttaaaaggcaaagccgcaaggcagaaggaggctgggtccctgaatcaccgactggaggagagttacctacaagagccttcatccaggagcatccacactgcaatgatataggaatgaggtctgaactccactgaattaaaccactggcatttgggggctgtttattatagcagtgcaaagagttcctttatcctccccaaggatggaaaaatacaatttattttgcttaccatacaccccttttctcctcgtccacattttccaatctgtatggtggctgtcttctatggcagaaggttttggggaataaatagcgtgaaatgctgctgacacttataaaacatattcattaaacaaactttccttgaaggggggggccccggtcccccatttccgccctattatggggcnctttaacaatttaactg

SEQ ID NO: 355813 - DNA, 3262 bp, Homo sapiens
gggagtctggattataatcgcgacctaagatactggtcaaacatgccttatttcgagatcgatagggtctcaccatgttgcccaggctggtcttgaactcctggactcatcctaaagtgctggcctctcattccctgtctgtgcacacctcacggcaagggccagcctgtttcctcccggtcacctccaaatcttgctgcttttaattcaactcagaggtatgcacttgaggtaggagggcaggggaagtggggatggcaggacatggatggcccttgaggcattggctctgggtgtcatgggctgtgagagtcaagaagggcagtggcctgcctgacttgggttcgaaagggtcactctggccactgcggtgagaactgaaactagccaggccaattctccattgttcctgctcttccaggtaggagaatattagattaggtctggagtcagaaggtagcaggggctgggggttgcagggggatgttgagaagaagtggtcctttggtcagggtgggaagccaacaggatttcctggtgcattggaggtgaaagggaagaggcgctggtggttgtgctttgggcctgagcagccagaagccgttgccatcacctatgacaagggagacagcgcctggggcagagcccagtatggggtgcattcagggtagatcaggaggtatgagtgggcagtgggcgagccaggctgggggttgtgggggaggcctgggttgcaggtttaagcgtgggacccacgtcagattggtggtgggtcatgcatgctggggtggctctcaggtcctccctgctggcttcccactcccaggggctttctcctcccagattccttagctgggtgaggggcaggacagagccctttcctagggaagcccggcaccccctgctgtccagggaaggggagtccttctagcccctgacagcttctctgcccctcccctggcctccccaggcctagccagggttgagttctcacccacctgtgccgccctgccttgttacctggaagcacagccttggggactgagcaggccctcactgtcactttaagaagggaatcagccactttgtgctcaccacctctggggaaggtgtgagaggagagaaggaagtggctgtttggctgctgacaacatgaagacttcctgcgatgagaacagaggcacaggtgccggccctgcagcccccagaacccggactggagggggccatggggcgccggaccctggccctgccctgggtgctgctgaccctgcgtgtcactgcagggaccccggaggtgtgagtacaagttcggatggaggccaccgagctctcgtccttcaccatccgttgtgggttcctggagtctggctccatctccctggtgactgtgagcagggggggccccgatggtgctggggggaccacgctggctgtgttgcacccggaacttggcatccagcaatgggcccctgctcgccaggcccgctgggaaacccagagcagcatctctctcatcctggaaggctctggggccagcagcccctgcgccaacaccaccttctgctgcaagtttgcgtccttccctgagggctcctgggaggcctgtgggagcctcccgcccagctcagacccaggtggggccggggtgaggggtccaggagggcagggaggggctcgggaactggccatccatctgattcttgcctctgtgcccagggctctctgtcccgccgactcctgcccccattctgcgggcagacctggccgggatcttgggggtctcaggagtccttctctttgactgtggctacctccttcatctgctgtgccgacagaagcaccgccctgcccctaggctccagccatcccacaccagctcctaggcactgagagcacgagcatgggcatagcgcgctggctaggactccagtaccgtgaagggaggcagtgagagcagacatctgtgcctcattcctgatctcaaggggaaagcaagaacaagggaggcttcctcaggatctcgaacctgcggaaggaggaccagtctgtgtacttctgccaagtccagctggacatacagatcagggaggctgtcgtggcagtccatcaaggggacccacctcaccatcacccaggccctcaggcagcccctccacagggcccctctcctgcctggacagctctgctggtctccccgtcccctggagaagaacaaggccatgggtcggcccctgctgctgcccctgctgctcctgctgcagccgccagcatttctgcagcctggtggctccacaggatctggtccaagctacctttatggggtcactcaaccaaaacacctctcagcctccatgggtggctctgtggaaatccccttctccttctattacccctgggagttagccatagttcccaacgtgagaatatcctggagacggggccacttccacgggcagtccttctacagcacaaggccgccttccattcacaaggattatgtgaaccggctctttctgaactggacagagggtcaggagagcggcttcctcaggatctcaaacctgcggaaggaggaccagtctgtgtatttctgccgagtcgagctggacacccggagatcagggaggcagcagttgcagtccatcaaggggaccaaactcaccatcacccaggctgtcacaaccaccaccacctggaggcccagcagcacaaccaccatagccggcctcagggtcacagaaagcaaagggcactcagaatcatggcacctaagtctggacactgccatcagggttgcattggctgtcgctgtgctcaaaactgtcattttgggactgctgtgcctcctcctcctgtggtggaggagaaggaaaggtagcagggcgccaagcagtgacttctgaccaacagagtgtggggagaagggatgtgtattagccccggaggacgtgatgtgagacccgcttgtgagtcctccacactcgttccccattggcaagatacatggagagcaccctgaggacctttaaaaggcaaagccgcaaggcagaaggaggctgggtccctgaatcaccgactggaggagagttacctacaagagccttcatccaggagcatccacactgcaatgatataggaatgaggtctgaactccactgaattaaaccactggcatttgggggctgtttattatagcagtgcaaagagttcctttatcctccccaaggatggaaaaatacaatttattttgcttaccata

SEQ ID NO: 355814 - DNA, 3618 bp, Homo sapiens
gggagtctggattataatcgcgacctaagatactggtcaaacatgccttatttcgagatcgatagggtctcaccatgttgcccaggctggtcttgaactcctggactcatcctaaagtgctggcctctcattccctgtctgtgcacacctcacggcaagggccagcctgtttcctcccggtcacctccaaatcttgctgcttttaattcaactcagaggtatgcacttgaggtaggagggcaggggaagtggggatggcaggacatggatggcccttgaggcattggctctgggtgtcatgggctgtgagagtcaagaagggcagtggcctgcctgacttgggttcgaaagggtcactctggccactgcggtgagaactgaaactagccaggccaattctccattgttcctgctcttccaggtaggagaatattagattaggtctggagtcagaaggtagcaggggctgggggttgcagggggatgttgagaagaagtggtcctttggtcagggtgggaagccaacaggatttcctggtgcattggaggtgaaagggaagaggcgctggtggttgtgctttgggcctgagcagccagaagccgttgccatcacctatgacaagggagacagcgcctggggcagagcccagtatggggtgcattcagggtagatcaggaggtatgagtgggcagtgggcgagccaggctgggggttgtgggggaggcctgggttgcaggtttaagcgtgggacccacgtcagattggtggtgggtcatgcatgctggggtggctctcaggtcctccctgctggcttcccactcccaggggctttctcctcccagattccttagctgggtgaggggcaggacagagccctttcctagggaagcccggcaccccctgctgtccagggaaggggagtccttctagcccctgacagcttctctgcccctcccctggcctccccaggcctagccagggttgagttctcacccacctgtgccgccctgccttgttacctggaagcacagccttggggactgagcaggccctcactgtcactttaagaagggaatcagccactttgtgctcaccacctctggggaaggtgtgagaggagagaaggaagtggctgtttggctgctgacaacatgaagacttcctgcgatgagaacagaggcacaggtgccggccctgcagcccccagaacccggactggagggggccatggggcgccggaccctggccctgccctgggtgctgctgaccctgcgtgtcactgcagggaccccggaggtgtgagtacaagttcggatggaggccaccgagctctcgtccttcaccatccgttgtgggttcctggagtctggctccatctccctggtgactgtgagcagggggggccccgatggtgctggggggaccacgctggctgtgttgcacccggaacttggcatccagcaatgggcccctgctcgccaggcccgctgggaaacccagagcagcatctctctcatcctggaaggctctggggccagcagcccctgcgccaacaccaccttctgctgcaagtttgcgtccttccctgagggctcctgggaggcctgtgggagcctcccgcccagctcagacccaggtggggccggggtgaggggtccaggagggcagggaggggctcgggaactggccatccatctgattcttgcctctgtgcccagggctctctgtcccgccgactcctgcccccattctgcgggcagacctggccgggatcttgggggtctcaggagtccttctctttgactgtggctacctccttcatctgctgtgccgacagaagcaccgccctgcccctaggctccagccatcccacaccagctcctaggcactgagagcacgagcatgggcatagcgcgctggctaggactccagtaccgtgaagggaggcagtgagagcagacatctgtgcctcattcctgatctcaaggggaaagcaagaacaagacctgtgaagggaaggagggtggatcggcctgactggccctgggaagcacagaggagcctactgggaccagggaagagactgacaagagaagggaggcctgtccctgcctgcttctgtctcaagaagattgttatcacttcctctggtgaaatcctgccttcctgtccccacggcccctcagctgatgccaccttactctggagaggatgggcagagcctcctatggagggagccctgtgggtcaccaaagctccagtgaccacccccgggcaaagacctgcagatcccctgttagagacgggcccaggactttgtgcggggtgcccactgttgctctgagccttcacttcctcagggaggcttcctcaggatctcgaacctgcggaaggaggaccagtctgtgtacttctgccaagtccagctggacatacagatcagggaggctgtcgtggcagtccatcaaggggacccacctcaccatcacccaggccctcaggcagcccctccacagggcccctctcctgcctggacagctctgctggtctccccgtcccctggagaagaacaaggccatgggtcggcccctgctgctgcccctgctgctcctgctgcagccgccagcatttctgcagcctggtggctccacaggatctggtccaagctacctttatggggtcactcaaccaaaacacctctcagcctccatgggtggctctgtggaaatccccttctccttctattacccctgggagttagccatagttcccaacgtgagaatatcctggagacggggccacttccacgggcagtccttctacagcacaaggccgccttccattcacaaggattatgtgaaccggctctttctgaactggacagagggtcaggagagcggcttcctcaggatctcaaacctgcggaaggaggaccagtctgtgtatttctgccgagtcgagctggacacccggagatcagggaggcagcagttgcagtccatcaaggggaccaaactcaccatcacccaggctgtcacaaccaccaccacctggaggcccagcagcacaaccaccatagccggcctcagggtcacagaaagcaaagggcactcagaatcatggcacctaagtctggacactgccatcagggttgcattggctgtcgctgtgctcaaaactgtcattttgggactgctgtgcctcctcctcctgtggtggaggagaaggaaaggtagcagggcgccaagcagtgacttctgaccaacagagtgtggggagaagggatgtgtattagccccggaggacgtgatgtgagacccgcttgtgagtcctccacactcgttccccattggcaagatacatggagagcaccctgaggacctttaaaaggcaaagccgcaaggcagaaggaggctgggtccctgaatcaccgactggaggagagttacctacaagagccttcatccaggagcatccacactgcaatgatataggaatgaggtctgaactccactgaattaaaccactggcatttgggggctgtttattatagcagtgcaaagagttcctttatcctccccaaggatggaaaaatacaatttattttgcttaccata

SEQ ID NO: 355815 - DNA, 5702 bp, Homo sapiens
  misc_feature (4988)..(4989): n is a, c, g, or t
gggagtctggattataatcgcgacctaagatactggtcaaacatgccttatttcgagatcgatagggtctcaccatgttgcccaggctggtcttgaactcctggactcatcctaaagtgctggcctctcattccctgtctgtgcacacctcacggcaagggccagcctgtttcctcccggtcacctccaaatcttgctgcttttaattcaactcagaggtatgcacttgaggtaggagggcaggggaagtggggatggcaggacatggatggcccttgaggcattggctctgggtgtcatgggctgtgagagtcaagaagggcagtggcctgcctgacttgggttcgaaagggtcactctggccactgcggtgagaactgaaactagccaggccaattctccattgttcctgctcttccaggtaggagaatattagattaggtctggagtcagaaggtagcaggggctgggggttgcagggggatgttgagaagaagtggtcctttggtcagggtgggaagccaacaggatttcctggtgcattggaggtgaaagggaagaggcgctggtggttgtgctttgggcctgagcagccagaagccgttgccatcacctatgacaagggagacagcgcctggggcagagcccagtatggggtgcattcagggtagatcaggaggtatgagtgggcagtgggcgagccaggctgggggttgtgggggaggcctgggttgcaggtttaagcgtgggacccacgtcagattggtggtgggtcatgcatgctggggtggctctcaggtcctccctgctggcttcccactcccaggggctttctcctcccagattccttagctgggtgaggggcaggacagagccctttcctagggaagcccggcaccccctgctgtccagggaaggggagtccttctagcccctgacagcttctctgcccctcccctggcctccccaggcctagccagggttgagttctcacccacctgtgccgccctgccttgttacctggaagcacagccttggggactgagcaggccctcactgtcactttaagaagggaatcagccactttgtgctcaccacctctggggaaggtgtgagaggagagaaggaagtggctgtttggctgctgacaacatgaagacttcctgcgatgagaacagaggcacaggtgccggccctgcagcccccagaacccggactggagggggccatggggcgccggaccctggccctgccctgggtgctgctgaccctgcgtgtcactgcagggaccccggaggtgtgagtacaagttcggatggaggccaccgagctctcgtccttcaccatccgttgtgggttcctggagtctggctccatctccctggtgactgtgagcagggggggccccgatggtgctggggggaccacgctggctgtgttgcacccggaacttggcatccagcaatgggcccctgctcgccaggcccgctgggaaacccagagcagcatctctctcatcctggaaggctctggggccagcagcccctgcgccaacaccaccttctgctgcaagtttgcgtccttccctgagggctcctgggaggcctgtgggagcctcccgcccagctcagacccaggtggggccggggtgaggggtccaggagggcagggaggggctcgggaactggccatccatctgattcttgcctctgtgcccagggctctctgtcccgccgactcctgcccccattctgcgggcagacctggccgggatcttgggggtctcaggagtccttctctttgactgtggctacctccttcatctgctgtgccgacagaagcaccgccctgcccctaggctccagccatcccacaccagctcctaggcactgagagcacgagcatgggcatagcgcgctggctaggactccagtaccgtgaagggaggcagtgagagcagacatctgtgcctcattcctgatctcaaggggaaagcaagaacaagacctgtgaagggaaggagggtggatcggcctgactggccctgggaagcacagaggagcctactgggaccagggaagagactgacaagagaagggaggcctgtccctgcctgcttctgtctcaagaagattgttatcacttcctctggtgaaatcctgccttcctgtccccacggcccctcagctgatgccaccttactctggagaggatgggcagagcctcctatggagggagccctgtgggtcaccaaagctccagtgaccacccccgggcaaagacctgcagatcccctgttagagacgggcccaggactttgtgcggggtgcccactgttgctctgagccttcacttcctcagggaggcttcctcaggatctcgaacctgcggaaggaggaccagtctgtgtacttctgccaagtccagctggacatacagatcagggaggctgtcgtggcagtccatcaaggggacccacctcaccatcacccagggtgagtccagctgccctggcaccaaggaaccttcctggttcagccataggctcaggtgtgtggagggaatgacctgaggggctgtatgagggaacaacctcctggggctcccctatgcctgagttcctgcaactcagaagttgaggcccagagatccaggtagagggggctccagtcctgggactgccctgcaagtcatgtggcctgggacagggcttctccaagctctgtcccctcctgtgtagggcagggaggtcagaggggaccctgcagatccagtctcatgtctgggggtcaaggggtggcctcgagagggaccagtctctgtgtaggggaccgtcagccccctcaccccttgagcaagactgtggtccctgcaccaagggagcaggcctggggtgggaagaggccagctgggctgtggtggtgcctggggactgcatgggagcccctgccagggagggagagggacagaggacaagctgggggctctggtgcttgggctgggggctgagcgcctgtgacctccactggcttcctccttctcctctctgaggactgaatctggggtgcagcagagcacagactcaggcccgcctttcctctccctgaaagagcctgcgctggccttggacagagaaagggatgagaagtgaggctgagtgcggtggggtctgcagggatccaggtgggaggggcccagccagccaaggtgaggcccagcccctcagcaggaagatgggcactggggcccttgggcagggctgacttgacacttttgtgtgacttgagccactgtgcccagcctgaacaccctttcctggtaaaacactccacaaaccaggaagagaaggaatgtactgcaacaaaataaaggccagtcatgcaaggcccatggctgaaagtctttcagtcattttagatgaaagactgaaatctttgcctccaagatcaggaacaagagaaggatgcccgctctcactacttctattcaacacaggatttgaagtcaggccgggcacagtggctcacgcctgtaatcccagcacttttggaggctgaggcgggcagattacttgagcctatgagtgtgagaccaccctggccaacatggcaaaaccccatctctactaaaaaaaaaaaaaaaaaaggatttgaagtcctggccggagcaattaggcaagggataaaaaggcacctaaggcccttttgcaataagaagccagatggataaaggaagtgctggtcaccctggaggtgtactggtttggggaaggtccccggcccccacagccctctggggagcctcaccctggctctccccactcacctcagccccctcaggcagcccctccacagggcccctctcctgcctggacagctctgctggtctccccgtcccctggagaagaacaaggccatgggtcggcccctgctgctgcccctgctgctcctgctgcagccgccagcatttctgcagcctggtggctccacaggatctggtccaagctacctttatggggtcactcaaccaaaacacctctcagcctccatgggtggctctgtggaaatccccttctccttctattacccctgggagttagccatagttcccaacgtgagaatatcctggagacggggccacttccacgggcagtccttctacagcacaaggccgccttccattcacaaggattatgtgaaccggctctttctgaactggacagagggtcaggagagcggcttcctcaggatctcaaacctgcggaaggaggaccagtctgtgtatttctgccgagtcgagctggacacccggagatcagggaggcagcagttgcagtccatcaaggggaccaaactcaccatcacccaggctgtcacaaccaccaccacctggaggcccagcagcacaaccaccatagccggcctcagggtcacagaaagcaaagggcactcagaatcatggcacctaagtctggacactgccatcagggttgcattggctgtcgctgtgctcaaaactgtcattttgggactgctgtgcctcctcctcctgtggtggaggagaaggaaaggtagcagggcgccaagcagtgacttctgaccaacagagtgtggggagaagggatgtgtattagccccggaggacgtgatgtgagacccgcttgtgagtcctccacactcgttccccattggcaagatacatggagagcaccctgaggacctttaaaaggcaaagccgcaaggcagaaggaggctgggtccctgaatcaccgactggaggagagttacctacaagagccttcatccaggagcatccacactgcaatgatataggaatgaggtctgaactccactgaattaaaccactggcatttgggggctgtttattatagcagtgcaaagagttcctttatcctccccaaggatggaaaaatacaatttattttgcttaccataaaaaaaaaaaaaaaaaaaaaaaaaaaaaaaaannaaaaaaaaaaaaaaaaaaaaaagtgggggggggggggggcaagaaaggatttaaaaaacaggtggggggggggggggacaaataggggatagagaaagagatgcacacacaagcgtgccccccaaaaaaaaaactgagggcactaacacaacacgagggttcggggtgcctccccacaaaaaaaaaaagccaccgcggagaggaaacgcagcaccgtgttcggacaacaaacccaccgcagagagggcgtacagaggaaggacaaaaccgggcgagccatcacccagaggacgggcacacaagagacagcacgaaaaacaagtaccccccggcgggggggaaaacaacagcagcagcagcaggaagacaaaaggacaaggcaaagaggggcagacacagaacgcgggcggaacagcagagggaaccggccaaggacaacaggagcacaggagagggagcgaaagcggagagagaggacggagcgttgcacacgcgaagcagacaggcggagacaggaaggaggcgcgcgagaagggacacagcaagacgacaggagcgaaaacagaagcgagagacggggagcgagggcaacggacggcagcgacgcagagacgcggcgcagcgccagggagagaggagaaccgcgagagcgagaagacgcggggagggggaggaagacgcacaagaagcgccaggagcagccacgaggcggg

SEQ ID NO: 355816 - DNA, 3211 bp, Homo sapiens
gggagtctggattataatcgcgacctaagatactggtcaaacatgccttatttcgagatcgatagggtctcaccatgttgcccaggctggtcttgaactcctggactcatcctaaagtgctggcctctcattccctgtctgtgcacacctcacggcaagggccagcctgtttcctcccggtcacctccaaatcttgctgcttttaattcaactcagaggtatgcacttgaggtaggagggcaggggaagtggggatggcaggacatggatggcccttgaggcattggctctgggtgtcatgggctgtgagagtcaagaagggcagtggcctgcctgacttgggttcgaaagggtcactctggccactgcggtgagaactgaaactagccaggccaattctccattgttcctgctcttccaggtaggagaatattagattaggtctggagtcagaaggtagcaggggctgggggttgcagggggatgttgagaagaagtggtcctttggtcagggtgggaagccaacaggatttcctggtgcattggaggtgaaagggaagaggcgctggtggttgtgctttgggcctgagcagccagaagccgttgccatcacctatgacaagggagacagcgcctggggcagagcccagtatggggtgcattcagggtagatcaggaggtatgagtgggcagtgggcgagccaggctgggggttgtgggggaggcctgggttgcaggtttaagcgtgggacccacgtcagattggtggtgggtcatgcatgctggggtggctctcaggtcctccctgctggcttcccactcccaggggctttctcctcccagattccttagctgggtgaggggcaggacagagccctttcctagggaagcccggcaccccctgctgtccagggaaggggagtccttctagcccctgacagcttctctgcccctcccctggcctccccaggcctagccagggttgagttctcacccacctgtgccgccctgccttgttacctggaagcacagccttggggactgagcaggccctcactgtcactttaagaagggaatcagccactttgtgctcaccacctctggggaaggtgtgagaggagagaaggaagtggctgtttggctgctgacaacatgaagacttcctgcgatgagaacagaggcacaggtgccggccctgcagcccccagaacccggactggagggggccatggggcgccggaccctggccctgccctgggtgctgctgaccctgcgtgtcactgcagggaccccggaggtgtgagtacaagttcggatggaggccaccgagctctcgtccttcaccatccgttgtgggttcctggagtctggctccatctccctggtgactgtgagcagggggggccccgatggtgctggggggaccacgctggctgtgttgcacccggaacttggcatccagcaatgggcccctgctcgccaggcccgctgggaaacccagagcagcatctctctcatcctggaaggctctggggccagcagcccctgcgccaacaccaccttctgctgcaagtttgcgtccttccctgagggctcctgggaggcctgtgggagcctcccgcccagctcagacccaggtggggccggggtgaggggtccaggagggcagggaggggctcgggaactggccatccatctgattcttgcctctgtgcccagggctctctgtcccgccgactcctgcccccattctgcgggcagacctggccgggatcttgggggtctcaggagtccttctctttgactgtggctacctccttcatctgctgtgccgacagaagcaccgccctgcccctaggctccagccatcccacaccagctcctaggcactgagagcacgagcatgggcatagcgcgctggctaggactccagtaccgtgaagggaggcagtgagagcagacatctgtgcctcattcctgatctcaaggggaaagcaagaacaagggaggcttcctcaggatctcgaacctgcggaaggaggaccagtctgtgtacttctgccaagtccagctggacatacagatcagccctcaggcagcccctccacagggcccctctcctgcctggacagctctgctggtctccccgtcccctggagaagaacaaggccatgggtcggcccctgctgctgcccctgctgctcctgctgcagccgccagcatttctgcagcctggtggctccacaggatctggtccaagctacctttatggggtcactcaaccaaaacacctctcagcctccatgggtggctctgtggaaatccccttctccttctattacccctgggagttagccatagttcccaacgtgagaatatcctggagacggggccacttccacgggcagtccttctacagcacaaggccgccttccattcacaaggattatgtgaaccggctctttctgaactggacagagggtcaggagagcggcttcctcaggatctcaaacctgcggaaggaggaccagtctgtgtatttctgccgagtcgagctggacacccggagatcagggaggcagcagttgcagtccatcaaggggaccaaactcaccatcacccaggctgtcacaaccaccaccacctggaggcccagcagcacaaccaccatagccggcctcagggtcacagaaagcaaagggcactcagaatcatggcacctaagtctggacactgccatcagggttgcattggctgtcgctgtgctcaaaactgtcattttgggactgctgtgcctcctcctcctgtggtggaggagaaggaaaggtagcagggcgccaagcagtgacttctgaccaacagagtgtggggagaagggatgtgtattagccccggaggacgtgatgtgagacccgcttgtgagtcctccacactcgttccccattggcaagatacatggagagcaccctgaggacctttaaaaggcaaagccgcaaggcagaaggaggctgggtccctgaatcaccgactggaggagagttacctacaagagccttcatccaggagcatccacactgcaatgatataggaatgaggtctgaactccactgaattaaaccactggcatttgggggctgtttattatagcagtgcaaagagttcctttatcctccccaaggatggaaaaatacaatttattttgcttaccata

SEQ ID NO: 355817 - DNA, 5677 bp, Homo sapiens
  misc_feature (4963)..(4964): n is a, c, g, or t
gggagtctggattataatcgcgacctaagatactggtcaaacatgccttatttcgagatcgatagggtctcaccatgttgcccaggctggtcttgaactcctggactcatcctaaagtgctggcctctcattccctgtctgtgcacacctcacggcaagggccagcctgtttcctcccggtcacctccaaatcttgctgcttttaattcaactcagaggtatgcacttgaggtaggagggcaggggaagtggggatggcaggacatggatggcccttgaggcattggctctgggtgtcatgggctgtgagagtcaagaagggcagtggcctgcctgacttgggttcgaaagggtcactctggccactgcggtgagaactgaaactagccaggccaattctccattgttcctgctcttccaggtaggagaatattagattaggtctggagtcagaaggtagcaggggctgggggttgcagggggatgttgagaagaagtggtcctttggtcagggtgggaagccaacaggatttcctggtgcattggaggtgaaagggaagaggcgctggtggttgtgctttgggcctgagcagccagaagccgttgccatcacctatgacaagggagacagcgcctggggcagagcccagtatggggtgcattcagggtagatcaggaggtatgagtgggcagtgggcgagccaggctgggggttgtgggggaggcctgggttgcaggtttaagcgtgggacccacgtcagattggtggtgggtcatgcatgctggggtggctctcaggtcctccctgctggcttcccactcccaggggctttctcctcccagattccttagctgggtgaggggcaggacagagccctttcctagggaagcccggcaccccctgctgtccagggaaggggagtccttctagcccctgacagcttctctgcccctcccctggcctccccaggcctagccagggttgagttctcacccacctgtgccgccctgccttgttacctggaagcacagccttggggactgagcaggccctcactgtcactttaagaagggaatcagccactttgtgctcaccacctctggggaaggtgtgagaggagagaaggaagtggctgtttggctgctgacaacatgaagacttcctgcgatgagaacagaggcacaggtgccggccctgcagcccccagaacccggactggagggggccatggggcgccggaccctggccctgccctgggtgctgctgaccctgcgtgtcactgcagggaccccggaggtgtgagtacaagttcggatggaggccaccgagctctcgtccttcaccatccgttgtgggttcctggagtctggctccatctccctggtgactgtgagcagggggggccccgatggtgctggggggaccacgctggctgtgttgcacccggaacttggcatccagcaatgggcccctgctcgccaggcccgctgggaaacccagagcagcatctctctcatcctggaaggctctggggccagcagcccctgcgccaacaccaccttctgctgcaagtttgcgtccttccctgagggctcctgggaggcctgtgggagcctcccgcccagctcagacccaggtggggccggggtgaggggtccaggagggcagggaggggctcgggaactggccatccatctgattcttgcctctgtgcccagggctctctgtcccgccgactcctgcccccattctgcgggcagacctggccgggatcttgggggtctcaggagtccttctctttgactgtggctacctccttcatctgctgtgccgacagaagcaccgccctgcccctaggctccagccatcccacaccagctcctaggcactgagagcacgagcatgggcatagcgcgctggctaggactccagtaccgtgaagggaggcagtgagagcagacatctgtgcctcattcctgatctcaaggggaaagcaagaacaagacctgtgaagggaaggagggtggatcggcctgactggccctgggaagcacagaggagcctactgggaccagggaagagactgacaagagaagggaggcctgtccctgcctgcttctgtctcaagaagattgttatcacttcctctggtgaaatcctgccttcctgtccccacggcccctcagctgatgccaccttactctggagaggatgggcagagcctcctatggagggagccctgtgggtcaccaaagctccagtgaccacccccgggcaaagacctgcagatcccctgttagagacgggcccaggactttgtgcggggtgcccactgttgctctgagccttcacttcctcagggaggcttcctcaggatctcgaacctgcggaaggaggaccagtctgtgtacttctgccaagtccagctggacatacagatcagggaggctgtcgtggcagtccatcaaggggacccacctcaccatcacccagggtgagtccagctgccctggcaccaaggaaccttcctggttcagccataggctcaggtgtgtggagggaatgacctgaggggctgtatgagggaacaacctcctggggctcccctatgcctgagttcctgcaactcagaagttgaggcccagagatccaggtagagggggctccagtcctgggactgccctgcaagtcatgtggcctgggacagggcttctccaagctctgtcccctcctgtgtagggcagggaggtcagaggggaccctgcagatccagtctcatgtctgggggtcaaggggtggcctcgagagggaccagtctctgtgtaggggaccgtcagccccctcaccccttgagcaagactgtggtccctgcaccaagggagcaggcctggggtgggaagaggccagctgggctgtggtggtgcctggggactgcatgggagcccctgccagggagggagagggacagaggacaagctgggggctctggtgcttgggctgggggctgagcgcctgtgacctccactggcttcctccttctcctctctgaggactgaatctggggtgcagcagagcacagactcaggcccgcctttcctctccctgaaagagcctgcgctggccttggacagagaaagggatgagaagtgaggctgagtgcggtggggtctgcagggatccaggtgggaggggcccagccagccaaggtgaggcccagcccctcagcaggaagatgggcactggggcccttgggcagggctgacttgacacttttgtgtgacttgagccactgtgcccagcctgaacaccctttcctggtaaaacactccacaaaccaggaagagaaggaatgtactgcaacaaaataaaggccagtcatgcaaggcccatggctgaaagtctttcagtcattttagatgaaagactgaaatctttgcctccaagatcaggaacaagagaaggatgcccgctctcactacttctattcaacacaggatttgaagtcaggccgggcacagtggctcacgcctgtaatcccagcacttttggaggctgaggcgggcagattacttgagcctatgagtgtgagaccaccctggccaacatggcaaaaccccatctctactaaaaaaaaaaaaaaaaaaggatttgaagtcctggccggagcaattaggcaagggataaaaaggcacctaaggcccttttgcaataagaagccagatggataaaggaagtgctggtcaccctggaggtgtactggtttggggaaggtccccggcccccacagccctctggggagcctcaccctggctctccccactcacctcagccccctcaggcagcccctccacagggcccctctcctgcctggacagctctgctggtctccccgtcccctggagaagaacaaggccatgggtcggcccctgctgctgcccctgctgctcctgctgcagccgccagcatttctgcagcctggtggctccacaggatctggtccaagctacctttatggggtcactcaaccaaaacacctctcagcctccatgggtggctctgtggaaatccccttctccttctattacccctgggagttagccatagttcccaacgtgagaatatcctggagacggggccacttccacgggcagtccttctacagcacaaggccgccttccattcacaaggattatgtgaaccggctctttctgaactggacagagggtcaggagagcggcttcctcaggatctcaaacctgcggaaggaggaccagtctgtgtatttctgccgagtcgagctggacacccggagatcagggaggcagcagttgcagtccatcaaggggaccaaactcaccatcacccaggctgtcacaaccaccaccacctggaggcccagcagcacaaccaccatagccggcctcagggtcacagaaagcaaagggcactcagaatcatggcacctaagtctggacactgccatcagggttgcattggctgtcgctgtgctcaaaactgtcattttgggactgctgtgcctcctcctcctgtggtggaggagaaggaaaggtagcagggcgccaagcagtgacttctgaccaacagagtgtggggagaagggatgtgtattagccccggaggacgtgatgtgagacccgcttgtgagtcctccacactcgttccccattggcaagatacatggagagcaccctgaggacctttaaaaggcaaagccgcaaggcagaaggaggctgggtccctgaatcaccgactggaggagagttacctacaagagccttcatccaggagcatccacactgcaatgatataggaatgaggtctgaactccactgaattaaaccactggcatttgggggctgtttattatagcagtgcaaagagttcctttatcctccccaaggatggaaaaatacaatttattttgcttaccataaaaaaaannaaaaaaaaaaaaaaaaaaaaaagtgggggggggggggggcaagaaaggatttaaaaaacaggtggggggggggggggacaaataggggatagagaaagagatgcacacacaagcgtgccccccaaaaaaaaaactgagggcactaacacaacacgagggttcggggtgcctccccacaaaaaaaaaaagccaccgcggagaggaaacgcagcaccgtgttcggacaacaaacccaccgcagagagggcgtacagaggaaggacaaaaccgggcgagccatcacccagaggacgggcacacaagagacagcacgaaaaacaagtaccccccggcgggggggaaaacaacagcagcagcagcaggaagacaaaaggacaaggcaaagaggggcagacacagaacgcgggcggaacagcagagggaaccggccaaggacaacaggagcacaggagagggagcgaaagcggagagagaggacggagcgttgcacacgcgaagcagacaggcggagacaggaaggaggcgcgcgagaagggacacagcaagacgacaggagcgaaaacagaagcgagagacggggagcgagggcaacggacggcagcgacgcagagacgcggcgcagcgccagggagagaggagaaccgcgagagcgagaagacgcggggagggggaggaagacgcacaagaagcgccaggagcagccacgaggcggg

SEQ ID NO: 355818 - DNA, 3019 bp, Homo sapiens
gggagtctggattataatcgcgacctaagatactggtcaaacatgccttatttcgagatcgatagggtctcaccatgttgcccaggctggtcttgaactcctggactcatcctaaagtgctggcctctcattccctgtctgtgcacacctcacggcaagggccagcctgtttcctcccggtcacctccaaatcttgctgcttttaattcaactcagaggtatgcacttgaggtaggagggcaggggaagtggggatggcaggacatggatggcccttgaggcattggctctgggtgtcatgggctgtgagagtcaagaagggcagtggcctgcctgacttgggttcgaaagggtcactctggccactgcggtgagaactgaaactagccaggccaattctccattgttcctgctcttccaggtaggagaatattagattaggtctggagtcagaaggtagcaggggctgggggttgcagggggatgttgagaagaagtggtcctttggtcagggtgggaagccaacaggatttcctggtgcattggaggtgaaagggaagaggcgctggtggttgtgctttgggcctgagcagccagaagccgttgccatcacctatgacaagggagacagcgcctggggcagagcccagtatggggtgcattcagggtagatcaggaggtatgagtgggcagtgggcgagccaggctgggggttgtgggggaggcctgggttgcaggtttaagcgtgggacccacgtcagattggtggtgggtcatgcatgctggggtggctctcaggtcctccctgctggcttcccactcccaggggctttctcctcccagattccttagctgggtgaggggcaggacagagccctttcctagggaagcccggcaccccctgctgtccagggaaggggagtccttctagcccctgacagcttctctgcccctcccctggcctccccaggcctagccagggttgagttctcacccacctgtgccgccctgccttgttacctggaagcacagccttggggactgagcaggccctcactgtcactttaagaagggaatcagccactttgtgctcaccacctctggggaaggtgtgagaggagagaaggaagtggctgtttggctgctgacaacatgaagacttcctgcgatgagaacagaggcacaggtgccggccctgcagcccccagaacccggactggagggggccatggggcgccggaccctggccctgccctgggtgctgctgaccctgcgtgtcactgcagggaccccggaggtgtgagtacaagttcggatggaggccaccgagctctcgtccttcaccatccgttgtgggttcctggagtctggctccatctccctggtgactgtgagcagggggggccccgatggtgctggggggaccacgctggctgtgttgcacccggaacttggcatccagcaatgggcccctgctcgccaggcccgctgggaaacccagagcagcatctctctcatcctggaaggctctggggccagcagcccctgcgccaacaccaccttctgctgcaagtttgcgtccttccctgagggctcctgggaggcctgtgggagcctcccgcccagctcagacccaggtggggccggggtgaggggtccaggagggcagggaggggctcgggaactggccatccatctgattcttgcctctgtgcccagggctctctgtcccgccgactcctgcccccattctgcgggcagacctggccgggatcttgggggtctcaggagtccttctctttgactgtggctacctccttcatctgctgtgccgacagaagcaccgccctgcccctaggctccagccatcccacaccagctcctaggcactgagagcacgagcatgggcatagcgcgctggctaggactccagtaccgtgaagggaggcagtgagagcagacatctgtgcctcattcctgatctcaaggggaaagcaagaacaagggaggcttcctcaggatctcgaacctgcggaaggaggaccagtctgtgtacttctgccaagtccagctggacatacagatcagggaggctgtcgtggcagtccatcaaggggacccacctcaccatcacccaggccctcaggcagcccctccacagggcccctctcctgcctggacagctctgctggtctccccgtcccctggagaagaacaaggccatgggtcggcccctgctgctgcccctgctgctcctgctgcagccgccagcatttctgcagcctgagggtcaggagagcggcttcctcaggatctcaaacctgcggaaggaggaccagtctgtgtatttctgccgagtcgagctggacacccggagatcagggaggcagcagttgcagtccatcaaggggaccaaactcaccatcacccaggctgtcacaaccaccaccacctggaggcccagcagcacaaccaccatagccggcctcagggtcacagaaagcaaagggcactcagaatcatggcacctaagtctggacactgccatcagggttgcattggctgtcgctgtgctcaaaactgtcattttgggactgctgtgcctcctcctcctgtggtggaggagaaggaaaggtagcagggcgccaagcagtgacttctgaccaacagagtgtggggagaagggatgtgtattagccccggaggacgtgatgtgagacccgcttgtgagtcctccacactcgttccccattggcaagatacatggagagcaccctgaggacctttaaaaggcaaagccgcaaggcagaaggaggctgggtccctgaatcaccgactggaggagagttacctacaagagccttcatccaggagcatccacactgcaatgatataggaatgaggtctgaactccactgaattaaaccactggcatttgggggctgtttattatagcagtgcaaagagttcctttatcctccccaaggatggaaaaatacaatttattttgcttaccata

SEQ ID NO: 355819 - DNA, 4989 bp, Homo sapiens
gggagtctggattataatcgcgacctaagatactggtcaaacatgccttatttcgagatcgatagggtctcaccatgttgcccaggctggtcttgaactcctggactcatcctaaagtgctggcctctcattccctgtctgtgcacacctcacggcaagggccagcctgtttcctcccggtcacctccaaatcttgctgcttttaattcaactcagaggtatgcacttgaggtaggagggcaggggaagtggggatggcaggacatggatggcccttgaggcattggctctgggtgtcatgggctgtgagagtcaagaagggcagtggcctgcctgacttgggttcgaaagggtcactctggccactgcggtgagaactgaaactagccaggccaattctccattgttcctgctcttccaggtaggagaatattagattaggtctggagtcagaaggtagcaggggctgggggttgcagggggatgttgagaagaagtggtcctttggtcagggtgggaagccaacaggatttcctggtgcattggaggtgaaagggaagaggcgctggtggttgtgctttgggcctgagcagccagaagccgttgccatcacctatgacaagggagacagcgcctggggcagagcccagtatggggtgcattcagggtagatcaggaggtatgagtgggcagtgggcgagccaggctgggggttgtgggggaggcctgggttgcaggtttaagcgtgggacccacgtcagattggtggtgggtcatgcatgctggggtggctctcaggtcctccctgctggcttcccactcccaggggctttctcctcccagattccttagctgggtgaggggcaggacagagccctttcctagggaagcccggcaccccctgctgtccagggaaggggagtccttctagcccctgacagcttctctgcccctcccctggcctccccaggcctagccagggttgagttctcacccacctgtgccgccctgccttgttacctggaagcacagccttggggactgagcaggccctcactgtcactttaagaagggaatcagccactttgtgctcaccacctctggggaaggtgtgagaggagagaaggaagtggctgtttggctgctgacaacatgaagacttcctgcgatgagaacagaggcacaggtgccggccctgcagcccccagaacccggactggagggggccatggggcgccggaccctggccctgccctgggtgctgctgaccctgcgtgtcactgcagggaccccggaggtgtgagtacaagttcggatggaggccaccgagctctcgtccttcaccatccgttgtgggttcctggagtctggctccatctccctggtgactgtgagcagggggggccccgatggtgctggggggaccacgctggctgtgttgcacccggaacttggcatccagcaatgggcccctgctcgccaggcccgctgggaaacccagagcagcatctctctcatcctggaaggctctggggccagcagcccctgcgccaacaccaccttctgctgcaagtttgcgtccttccctgagggctcctgggaggcctgtgggagcctcccgcccagctcagacccaggtggggccggggtgaggggtccaggagggcagggaggggctcgggaactggccatccatctgattcttgcctctgtgcccagggctctctgtcccgccgactcctgcccccattctgcgggcagacctggccgggatcttgggggtctcaggagtccttctctttgactgtggctacctccttcatctgctgtgccgacagaagcaccgccctgcccctaggctccagccatcccacaccagctcctaggcactgagagcacgagcatgggcatagcgcgctggctaggactccagtaccgtgaagggaggcagtgagagcagacatctgtgcctcattcctgatctcaaggggaaagcaagaacaagacctgtgaagggaaggagggtggatcggcctgactggccctgggaagcacagaggagcctactgggaccagggaagagactgacaagagaagggaggcctgtccctgcctgcttctgtctcaagaagattgttatcacttcctctggtgaaatcctgccttcctgtccccacggcccctcagctgatgccaccttactctggagaggatgggcagagcctcctatggagggagccctgtgggtcaccaaagctccagtgaccacccccgggcaaagacctgcagatcccctgttagagacgggcccaggactttgtgcggggtgcccactgttgctctgagccttcacttcctcagggaggcttcctcaggatctcgaacctgcggaaggaggaccagtctgtgtacttctgccaagtccagctggacatacagatcagggaggctgtcgtggcagtccatcaaggggacccacctcaccatcacccagggtgagtccagctgccctggcaccaaggaaccttcctggttcagccataggctcaggtgtgtggagggaatgacctgaggggctgtatgagggaacaacctcctggggctcccctatgcctgagttcctgcaactcagaagttgaggcccagagatccaggtagagggggctccagtcctgggactgccctgcaagtcatgtggcctgggacagggcttctccaagctctgtcccctcctgtgtagggcagggaggtcagaggggaccctgcagatccagtctcatgtctgggggtcaaggggtggcctcgagagggaccagtctctgtgtaggggaccgtcagccccctcaccccttgagcaagactgtggtccctgcaccaagggagcaggcctggggtgggaagaggccagctgggctgtggtggtgcctggggactgcatgggagcccctgccagggagggagagggacagaggacaagctgggggctctggtgcttgggctgggggctgagcgcctgtgacctccactggcttcctccttctcctctctgaggactgaatctggggtgcagcagagcacagactcaggcccgcctttcctctccctgaaagagcctgcgctggccttggacagagaaagggatgagaagtgaggctgagtgcggtggggtctgcagggatccaggtgggaggggcccagccagccaaggtgaggcccagcccctcagcaggaagatgggcactggggcccttgggcagggctgacttgacacttttgtgtgacttgagccactgtgcccagcctgaacaccctttcctggtaaaacactccacaaaccaggaagagaaggaatgtactgcaacaaaataaaggccagtcatgcaaggcccatggctgaaagtctttcagtcattttagatgaaagactgaaatctttgcctccaagatcaggaacaagagaaggatgcccgctctcactacttctattcaacacaggatttgaagtcaggccgggcacagtggctcacgcctgtaatcccagcacttttggaggctgaggcgggcagattacttgagcctatgagtgtgagaccaccctggccaacatggcaaaaccccatctctactaaaaaaaaaaaaaaaaaaggatttgaagtcctggccggagcaattaggcaagggataaaaaggcacctaaggcccttttgcaataagaagccagatggataaaggaagtgctggtcaccctggaggtgtactggtttggggaaggtccccggcccccacagccctctggggagcctcaccctggctctccccactcacctcagccccctcaggcagcccctccacagggcccctctcctgcctggacagctctgctggtctccccgtcccctggagaagaacaaggccatgggtcggcccctgctgctgcccctgctgctcctgctgcagccgccagcatttctgcagcctggtggctccacaggatctggtccaagctacctttatggggtcactcaaccaaaacacctctcagcctccatgggtggctctgtggaaatccccttctccttctattacccctgggagttagccatagttcccaacgtgagaatatcctggagacggggccacttccacgggcagtccttctacagcacaaggccgccttccattcacaaggattatgtgaaccggctctttctgaactggacagagggtcaggagagcggcttcctcaggatctcaaacctgcggaaggaggaccagtctgtgtatttctgccgagtcgagctggacacccggagatcagggaggcagcagttgcagtccatcaaggggaccaaactcaccatcacccaggctgtcacaaccaccaccacctggaggcccagcagcacaaccaccatagccggcctcagggtcacagaaagcaaagggcactcagaatcatggcacctaagtctggacactgccatcagggttgcattggctgtcgctgtgctcaaaactgtcattttgggactgctgtgcctcctcctcctgtggtggaggagaaggaaaggtcagcagcggactaaagccacaaccccagccaggtagcagggcgccaagcagtgacttctgaccaacagagtgtggggagaagggatgtgtattagccccggaggacgtgatgtgagacccgcttgtgagtcctccacactcgttccccattggcaagatacatggagagcaccctgaggacctttaaaaggcaaagccgcaaggcagaaggaggctgggtccctgaatcaccgactggaggagagttacctacaagagccttcatccaggagcatccacactgcaatgatataggaatgaggtctgaactccactgaattaaaccactggcatttgggggctgtttattatagcagtgcaaagagttcctttatcctccccaaggatggaaaaatacaatttattttgcttaccata

SEQ ID NO: 355820 - DNA, 2671 bp, Homo sapiens
gggagtctggattataatcgcgacctaagatactggtcaaacatgccttatttcgagatcgatagggtctcaccatgttgcccaggctggtcttgaactcctggactcatcctaaagtgctggcctctcattccctgtctgtgcacacctcacggcaagggccagcctgtttcctcccggtcacctccaaatcttgctgcttttaattcaactcagaggtatgcacttgaggtaggagggcaggggaagtggggatggcaggacatggatggcccttgaggcattggctctgggtgtcatgggctgtgagagtcaagaagggcagtggcctgcctgacttgggttcgaaagggtcactctggccactgcggtgagaactgaaactagccaggccaattctccattgttcctgctcttccaggtaggagaatattagattaggtctggagtcagaaggtagcaggggctgggggttgcagggggatgttgagaagaagtggtcctttggtcagggtgggaagccaacaggatttcctggtgcattggaggtgaaagggaagaggcgctggtggttgtgctttgggcctgagcagccagaagccgttgccatcacctatgacaagggagacagcgcctggggcagagcccagtatggggtgcattcagggtagatcaggaggtatgagtgggcagtgggcgagccaggctgggggttgtgggggaggcctgggttgcaggtttaagcgtgggacccacgtcagattggtggtgggtcatgcatgctggggtggctctcaggtcctccctgctggcttcccactcccaggggctttctcctcccagattccttagctgggtgaggggcaggacagagccctttcctagggaagcccggcaccccctgctgtccagggaaggggagtccttctagcccctgacagcttctctgcccctcccctggcctccccaggcctagccagggttgagttctcacccacctgtgccgccctgccttgttacctggaagcacagccttggggactgagcaggccctcactgtcactttaagaagggaatcagccactttgtgctcaccacctctggggaaggtgtgagaggagagaaggaagtggctgtttggctgctgacaacatgaagacttcctgcgatgagaacagaggcacaggtgccggccctgcagcccccagaacccggactggagggggccatggggcgccggaccctggccctgccctgggtgctgctgaccctgcgtgtcactgcagggaccccggaggtgtgagtacaagttcggatggaggccaccgagctctcgtccttcaccatccgttgtgggttcctggagtctggctccatctccctggtgactgtgagcagggggggccccgatggtgctggggggaccacgctggctgtgttgcacccggaacttggcatccagcaatgggcccctgctcgccaggcccgctgggaaacccagagcagcatctctctcatcctggaaggctctggggccagcagcccctgcgccaacaccaccttctgctgcaagtttgcgtccttccctgagggctcctgggaggcctgtgggagcctcccgcccagctcagacccaggtggggccggggtgaggggtccaggagggcagggaggggctcgggaactggccatccatctgattcttgcctctgtgcccagggctctctgtcccgccgactcctgcccccattctgcgggcagacctggccgggatcttgggggtctcaggagtccttctctttgactgtggctacctccttcatctgctgtgccgacagaagcaccgccctgcccctaggctccagccatcccacaccagctcctaggcactgagagcacgagcatgggcatagcgcgctggctaggactccagtaccgtgaagggaggcagtgagagcagacatctgtgcctcattcctgatctcaaggggaaagcaagaacaagggaggcttcctcaggatctcgaacctgcggaaggaggaccagtctgtgtacttctgccaagtccagctggacatacagatcagggaggctgtcgtggcagtccatcaaggggacccacctcaccatcacccaggctgtcacaaccaccaccacctggaggcccagcagcacaaccaccatagccggcctcagggtcacagaaagcaaagggcactcagaatcatggcacctaagtctggacatgctgtgcctcctcctcctgtggtggaggagaaggaaaggtagcagggcgccaagcagtgacttctgaccaacagagtgtggggagaagggatgtgtattagccccggaggacgtgatgtgagacccgcttgtgagtcctccacactcgttccccattggcaagatacatggagagcaccctgaggacctttaaaaggcaaagccgcaaggcagaaggaggctgggtccctgaatcaccgactggaggagagttacctacaagagccttcatccaggagcatccacactgcaatgatataggaatgaggtctgaactccactgaattaaaccactggcatttgggggctgtttattatagcagtgcaaagagttcctttatcctccccaaggatggaaaaatacaatttattttgcttaccata

SEQ ID NO: 355821 - DNA, 2375 bp, Homo sapiens
gggagtctggattataatcgcgacctaagatactggtcaaacatgccttatttcgagatcgatagggtctcaccatgttgcccaggctggtcttgaactcctggactcatcctaaagtgctggcctctcattccctgtctgtgcacacctcacggcaagggccagcctgtttcctcccggtcacctccaaatcttgctgcttttaattcaactcagaggtatgcacttgaggtaggagggcaggggaagtggggatggcaggacatggatggcccttgaggcattggctctgggtgtcatgggctgtgagagtcaagaagggcagtggcctgcctgacttgggttcgaaagggtcactctggccactgcggtgagaactgaaactagccaggccaattctccattgttcctgctcttccaggtaggagaatattagattaggtctggagtcagaaggtagcaggggctgggggttgcagggggatgttgagaagaagtggtcctttggtcagggtgggaagccaacaggatttcctggtgcattggaggtgaaagggaagaggcgctggtggttgtgctttgggcctgagcagccagaagccgttgccatcacctatgacaagggagacagcgcctggggcagagcccagtatggggtgcattcagggtagatcaggaggtatgagtgggcagtgggcgagccaggctgggggttgtgggggaggcctgggttgcaggtttaagcgtgggacccacgtcagattggtggtgggtcatgcatgctggggtggctctcaggtcctccctgctggcttcccactcccaggggctttctcctcccagattccttagctgggtgaggggcaggacagagccctttcctagggaagcccggcaccccctgctgtccagggaaggggagtccttctagcccctgacagcttctctgcccctcccctggcctccccaggcctagccagggttgagttctcacccacctgtgccgccctgccttgttacctggaagcacagccttggggactgagcaggccctcactgtcactttaagaagggaatcagccactttgtgctcaccacctctggggaaggtgtgagaggagagaaggaagtggctgtttggctgctgacaacatgaagacttcctgcgatgagaacagaggcacaggtgccggccctgcagcccccagaacccggactggagggggccatggggcgccggaccctggccctgccctgggtgctgctgaccctgcgtgtcactgcagggaccccggaggtgtgagtacaagttcggatggaggccaccgagctctcgtccttcaccatccgttgtgggttcctggagtctggctccatctccctggtgactgtgagcagggggggccccgatggtgctggggggaccacgctggctgtgttgcacccggaacttggcatccagcaatgggcccctgctcgccaggcccgctgggaaacccagagcagcatctctctcatcctggaaggctctggggccagcagcccctgcgccaacaccaccttctgctgcaagtttgcgtccttccctgagggctcctgggaggcctgtgggagcctcccgcccagctcagacccaggtggggccggggtgaggggtccaggagggcagggaggggctcgggaactggccatccatctgattcttgcctctgtgcccagggctctctgtcccgccgactcctgcccccattctgcgggcagacctggccgggatcttgggggtctcaggagtccttctctttgactgtggctacctccttcatctgctgtgccgacagaagcaccggcatagcgcgctggctaggactccagtaccgtgaagggaggcagtgagagcagacatctgtgcctcattcctgatctcaaggggaaagcaagaacaagacctgtgaagggaaggagggtggatcggcctgactggccctgggaagcacagaggagcctactgggaccagggaagagactgacaagagaagggaggcctgtccctgcctgcttctgtctcaagaagattgttatcacttcctctggtgaaatcctgccttcctgtccccacggcccctcagctgatgccaccaagatgggtcagatggacgaggcctttgagtttgtgaagcagaggcgaagcatcatctctcaagatgggtcagatggactcgcactaaaacactgagatcggccaggtgcagtggctcagcctgtaatcccagcactttgggaggctgagctgggtggatcacctgagattaggagttcgagaccagcctgaccaacatggagaaaccccatctctactaaaaatacaaaattagcca

SEQ ID NO: 355822 - DNA, 294 bp, Homo sapiens
gcctcagggtcacagaaagcaaagggcactcagaatcatggcacctaagtctggacactgccatcagggttgcattggctgtcgctgtgctcaaaactgtcattttgggactgctgtgcctcctcctcctgtggtggaggagaaggaaagggtaagtgcccagaacgcactgtctcctcaagcttcccagctgggggtttctctgagcccacctgcagctaagggacttcagaaatatgcagaccctgctggctcccctcaagcccaccaaggccgactctggcctgtgctggg

SEQ ID NO: 355823 - DNA, 1300 bp, Homo sapiens
tttttttttaagagacaaggtctcactctgtcatccagactagagtgcagtggtgcaatcacaaatcacagctcacagaaacctcaaaccactggactcaagtgatcctcctgcctcagcctcccaagttgctgggactactacaggcaaatgctaccacacctggctacttttaattttttttttttttagagatggcagtcttgctatgctgcccaggatggtctccaactcctggcctcaagcaatcctcccacctcagccttacatagtgctgggattacaggcatgagctaccacacatagccaagtgtggctgttaaaagcagaggacgcagtgtttgctccaagagaaagtaaaggaaaagttgagaagtgggttttatagtataaatggaagaaactagagatatttttatgctgatggagtaaaagcaataaagggaaaggtgacccaagagaaaaagtaactaatagagatctctgagcagcagctgggcataggtggcaagactagtttgagagcaattaggacacaaattccagtgacagcagcataggaagaaatgacaggtgggacagagatatgtaagtttgttgagacagtggaaaagtagttcttgtgcaatggtttctattttctttataaaataaaataggtagtgagcataccagccaagaggcagggagcagggatagagtggttttctgaggaagaacgtggaaaagctctaaaatagccactactgaagaactgaccaggagcagagagaatgtggaacagctgaggctggagaccatgaatatgcagtggaccaacctgcaagactgatttttcctagtagcacccagcagtctacaagtacagagaaggcaggaacattgatccaaggctggatggatggaaggaaaaacaaggcaaaagctcacaataatggcaacaaagtcgttaaaatgatgtatcatggtgtgcctatgttggataagagagaaaaggcaggaaatggcgaaaagacagggagaaaaaaggtttggaatcagatcctaacatacagaattaagatgacaaataataggaccaactgggagctagatgaataggaggcaggggcaaaagaacagaaagtgtgaattaaagattttagtggcagagcaaatcccggtgatagtaaggcccaggctaaggctacatggaagactggctaaagtggtgtgggctgaaagtcaaaggagagtcaaaagaggtagagaaaacaagaggttatagtttttggtgagacatgctctttagtcccatagc

SEQ ID NO: 355824 - DNA, 597 bp, Homo sapiens
ctactagacacctgagcacataactgaagtctagaggaattgataagtccaggaaatatcaaccctcttaaattaaacaacttatcaaaatctctgacatgcaacaaaagcagtgctaaaaggaaagttcatagcattaaatgcctacatcaaaaagtctgaaagagaaggcaggaacattgatccaaggctggatggatggaaggaaaaacaaggcaaaagctcacaataatggcaacaaagtcgttaaaatgatgtatcatggtgtgcctatgttggataagagagaaaaggcaggaaatggcgaaaagacagggagaaaaaaggtttggaatcagatcctaacatacagaattaagatgacaaataataggaccaactgggagctagatgaataggaggcaggggcaaaagaacagaaagtgtgaattaaagattttagtggcagagcaaatcccggtgatagtaaggcccaggctaaggctacatggaagactggctaaagtggtgtgggctgaaagtcaaaggagagtcaaaagaggtagagaaaacaagaggttatagtttttggtgagacatgctctttagtcccatagc

SEQ ID NO: 355825 - DNA, 1716 bp, Homo sapiens
  misc_feature (1503)..(1503): n is a, c, g, or t
  misc_feature (1541)..(1541): n is a, c, g, or t
agacgactgtctgagagaggggccgctacgccgcacagcaaacaagctccgcgacgtttccaggacccggataatcccgcccttagagcagagccggaagaaggcgggacgaaccggaagagggtgaaatgctttcggtaggcactccacggctgtgaagatggcggcggctgcgtggcttcaggtgttgcctgtcattcttctgcttctgggagctcacccgtcaccactgtcgtttttcagtgcgggaccggcaaccgtagctgctgccgaccggtccaaatggcacattccgataccgtcggggaaaaattattttagttttggaaagatcctcttcagaaataccactatcttcctgaagtttgatggagaaccttgtgacctgtctttgaatataacctggtatctgaaaagcgctgattgttacaatgaaatctataacttcaaggcagaagaagtagagttgtatttggaaaaacttaaggaaaaaagaggcttgtctgggaaatatcaaacatcatcaaaattgttccagaactgcagtgaactctttaaaacacagaccttttctggagattttatgcatcgactgcctcttttaggagaaaaacaggaggctaaggagaatggaacaaaccttacctttattggagacaaaaccattcagatgcctttcttgaagaaacatttcttggattgttgaaagactttaataatttccaaagttccaaaagttgattttgatagtttttgccagtgttttcgttgcttttatggatgagtagattttcagagtttcttattctgccattctgaaagtgtctcactacctaaaccccagttttatttgtacagaattttaactgaatgtaagttaggcatgacagtctttgttaatttttttaaacaaaagatagccattaggactgggtacagtggctcacgcctgtaatgccaacactttgggaggccaaggtgggcagatgacttgaggttgggagttcgagaccagcttggccaatgtggtgaaactttgtctttactaaaaatacaaaaattagttgctcatggtggcaggcacctgtaatccaagctactcaggaggctgaggcaggagaatcgcgtgaacttgggaggtggaggctgcagtgagctgagatcacgctactgcactccagcctgggcagccagtgagattccatctcaaaaaaaaaagaaaaaagatattcattggattttctcttactaataggtatatattcactgtgaaaatggagacgatatacataaatgaaaagaagaaaatagtaatctataataccatgcagtgatatatttatcttcctattcttttgtatatgggcatgtttatattattttaaaaagggaatcttagagtatgtattatatgacttttttttgtagcttagcaatataacatggacatgtcgtcagtttggtaaatattgtattgcatcgttacttaaatgcttgtatagngtcttattgtatgagtacattgcaatttgttcaattcnctgttcttgaacttttatgagtttcattatcttggaattttatgcagtgttgtgattaatattttaactacatttgcttttaagtctttattttctgatctcagaagaattgtatattgggataagtttttaattctataacttaaaagtaaaaatcctttgtaattttatgttc

SEQ ID NO: 355826 - DNA, 1029 bp, Homo sapiens
agacgactgtctgagagaggggccgctacgccgcacagcaaacaagctccgcgacgtttccaggacccggataatcccgcccttagagcagagccggaagaaggcgggacgaaccggaagagggtgaaatgctttcggtaggcactccacggctgtgaagatggcggcggctgcgtggcttcaggtgttgcctgtcattcttctgcttctgggagctcacccgtcaccactgtcgtttttcagtgcgggaccggcaaccgtagctgctgccgaccggtccaaatggcacattccgataccgtcggtgagtattcacttcactaacgtctgaacctagaggagcaaggggtggggctacggcggcccaaggggtccatgaaggttccgcaaaagtctcttcaaaaggggtggggttgctgggatggtctgtgtggctagccaactgggacccacctccctggagtggaaagccgcgcacttctgtgattaggctagcgggaatgtaagggccacttcagcaacagaaaggagtggtggagcggcttctcatcagaaaaacagaactttcagtgcctgacttgagatgtaaacttgatgtacaaacggagagttgtttatctttcagatgtttcacagaatccagtgtccccgggttggataagaaagatatgtaaataggagtcttcatttctttctttctttttcttcctctgcacatcttggtccctgggtaattctgcttacgagatggttcgacttcgcttcaactttggaatggctattctaagctttactgtgtgactagaaagcatagagatttaagaaatgtgttttaacatgggaatggttaaaatggaagaaatagtacttaaaatttaatgtggtaaggctagtctttcatttggataattaactacatgggttgactctttctgccccttacccattttaaaccttatttcagtaacaggtatagtcctgtgagcagacaaaaaccagatgcagggaggaaatgctgaaaagcattag

SEQ ID NO: 355827 - DNA, 681 bp, Homo sapiens
agacgactgtctgagagaggggccgctacgccgcacagcaaacaagctccgcgacgtttccaggacccggataatcccgcccttagagcagagccggaagaaggcgggacgaaccggaagagggtgaaatgctttcggtaggcactccacggctgtgaagatggcggcggctgcgtggcttcaggtgttgcctgtcattcttctgcttctgggagctcacccgtcaccactgtcgtttttcagtgcgggaccggcaaccgtagctgctgccgaccggtccaaatggcacattccgataccgtcggggaaaaattattttagttttggaaagatcctcttcagaaataccactatcttcctgaagtttgatggagaaccttgtgacctgtctttgaatataacctggtatctgaaaagcgctgattgttacaatgaaatctataacttcaaggcagaagaagtagagttgtatttggaaaaacttaaggaaaaaagaggcttgtctgggaaatatcaaacatcatcaaaattgttccagaactgcagtgaactctttaaaacacagaccttttctggagattttatgcatcgactgcctcttttaggagaaaaacaggaggctaaggagaatggaacaaaccttaccttttatagaagaccataaataaaccactacagccc

SEQ ID NO: 355828 - DNA, 428 bp, Homo sapiens
ctagaggatcccccttttggggtctttgctcacagaatccagtgtccccgggttggataagaaagatatgtaaataggagtcttcatttctttctttctttttcttcctctgcacatcttggtccctgggtaattctgcttacgagatggttcgacttcgcttcaactttggaatggctattctaagctttactgtgtgactagaaagcatagagatttaagaaatgtgttttaacatgggaatggttaaaatggaagaaatagtacttaaaatttaatgtggtaaggctagtctttcatttggataattaactacatgggttgactctttctgccccttacccattttaaaccttatttcagtaacaggtatagtcctgtgagcagacaaaaaccagatgcagggaggaaatgctgaaaagcattag

SEQ ID NO: 355829 - DNA, 3009 bp, Homo sapiens
agacgactgtctgagagaggggccgctacgccgcacagcaaacaagctccgcgacgtttccaggacccggataatcccgcccttagagcagagccggaagaaggcgggacgaaccggaagagggtgaaatgctttcggtaggcactccacggctgtgaagatggcggcggctgcgtggcttcaggtgttgcctgtcattcttctgcttctgggagctcacccgtcaccactgtcgtttttcagtgcgggaccggcaaccgtagctgctgccgaccggtccaaatggcacattccgataccgtcggggaaaaattattttagttttggaaagatcctcttcagaaataccactatcttcctgaagtttgatggagaaccttgtgacctgtctttgaatataacctggtatctgaaaagcgctgattgttacaatgaaatctataacttcaaggcagaagaagtagagttgtatttggaaaaacttaaggaaaaaagaggcttgtctgggaaatatcaaacatcatcaaaattgttccagaactgcagtgaactctttaaaacacagaccttttctggagattttatgcatcgactgcctcttttaggagaaaaacaggaggctaaggagaatggaacaaaccttacctttattggagacaaaaccgcaatgcatgaaccattgcaaacttggcaagatgcaccatacatttttattgtacatattggcatttcatcctcaaaggaatcatcaaaagaaaattcactgagtaatctttttaccatgactgttgaagtgaagggtccctatgaatacctcacacttgaagactatcccttgatgatttttttcatggtgatgtgtattgtatatgtcctgtttggtgttctgtggctggcatggtctgcctgctactggagagatctcctgagaattcagttttggattggtgctgtcatcttcctgggaatgcttgagaaagctgtcttctatgcggaatttcagaatatccgatacaaaggagaatctgtccagggtgctttgatccttgcagagctgctttcagcagtgaaacgctcactggctcgaaccctggtcatcatagtcagtctgggatatggcatcgtcaagccacgccttggagtcactcttcataaggttgtagtagcaggagccctctatcttttgttctctggcatggaaggggtcctcagagttactggggcccagactgatcttgcttccttggcctttatccccttggctttcctagacactgccttgtgctggtggatatttattagcctgactcaaacaatgaagctattaaaacttcggaggaacattgtaaaactctctttgtatcggcatttcaccaacacgcttattttggcagtggcagcatccattgtgtttatcatctggacaaccatgaagttcagaatagtgacatgtcagtcggactggcgggagctgtgggtagacgatgccatctggcgcttgctgttctccatgatcctctttgtcatcatggttctctggcgaccatctgcaaacaaccagaggtttgccttttcaccattgtctgaggaagaggaggaggatgaacaaaaggagcctatgctgaaagaaagctttgaaggaatgaaaatgagaagtaccaaacaagaacccaatggaaatagtaaagttaacaaagcacaggaagatgatttgaagtgggtagaagagaatgttccttcttctgtgacagatgtagcacttccagcccttctggattcagatgaggaacgaatgatcacacactttgaaaggtccaaaatggagtaaggaatgggaagatttgcagttaaagatggctaccatcagggaagagatcagcatctgtgtcagtcttctgtacggctccatgggattaaaggaagcaatgacatcctgatctgttccttgatctttgggcattggagttggcgagaggtgtcagaacaaagagaacatcttactgaaaacaagttcataagatgagaaaaatctacgagcttcttatttacaacactgctgccccctttcctcccagactctgacatggatgttcatgcaacttaagtgtgttgttcctgaactttctgtaatgtttcattttttaaatctgacaaactaaaaagtttaacgtcttctaaaagattgtcatcaacaccataatatgtaatctccaggagcaactgcctgtaatttttatttatttagggagttacataggtgatgggggaaattgttaactacctttcattttcctgggaagtcaaggttacatcttgcagaggttgttttgagaaaaaagggcccttctgagttaaggagccatagttctatcaatgatcaaaagaaaaaaaaaaaaaagagaaactgttacagtatgattcagatcatttaaaaaagcaaaatcaagtgcaattttgtttacaaatggtgtatattaaagatttttctatttcagatgtactttaaagagaaatattagcttaactcttttgacatctgctattgtgacacatcccattgctggcaatgtggtgcacactccgaaacttttaactactgttttgtaagcctccaagggtggcattgcagggtccttaggcaatgttttgtttgcctttatgcagagaggtgctccaagtgctgtgattgagcaccgtgctagaggaactgtaatgcttcagaagttgtagcttatacaaaggaaacaggtcctgctggcttaatttaaacagttattgcatgaagtagcgtggaggccctggactgctgctcgttctttaggatggactgttctggtatctggtattggtttagagactgttaataagggacatcacaaggtgatgggattcatttgaagcactctatttctgttttaatggttttatccaattttgccttcccaagatttttgttctacataaaaagttcatgccactttttaatataaaaaaatttaacaaaattaa

SEQ ID NO: 355830 - DNA, 2768 bp, Homo sapiens
  misc_feature (20)..(20): n is a, c, g, or t
  misc_feature (22)..(22): n is a, c, g, or t
  misc_feature (38)..(38): n is a, c, g, or t
  misc_feature (40)..(42): n is a, c, g, or t
taggcctggtgatctagagnanccccacgcgcacacgntnnnatggcacatccgataccgtcggggaaaaattattttagttttggaaagatcctcttcagaaataccactatcttcctgaagtttgatggagaaccttgtgacctgtctttgaatataacctggtatctgaaaagcgctgattgttacaatgaaatctataacttcaaggcagaagaagtagagttgtatttggaaaaacttaaggaaaaaagaggcttgtctgggaaatatcaaacatcatcaaaattgttccagaactgcagtgaactctttaaaacacagaccttttctggagattttatgcatcgactgcctcttttaggagaaaaacaggaggctaaggagaatggaacaaaccttacctttattggagacaaaaccgcaatgcatgaaccattgcaaacttggcaagatgcaccatacatttttattgtacatattggcatttcatcctcaaaggaatcatcaaaagaaaattcactgagtaatctttttaccatgactgttgaagtgaagggtccctatgaatacctcacacttgaagactatcccttgatgatttttttcatggtgatgtgtattgtatatgtcctgtttggtgttctgtggctggcatggtctgcctgctactggagagatctcctgagaattcagttttggattggtgctgtcatcttcctgggaatgcttgagaaagctgtcttctatgcggaatttcagaatatccgatacaaaggagaatctgtccagggtgctttgatccttgcagagctgctttcagcagtgaaacgctcactggctcgaaccctggtcatcatagtcagtctgggatatggcatcgtcaagccacgccttggagtcactcttcataaggttgtagtagcaggagccctctatcttttgttctctggcatggaaggggtcctcagagttactggggcccagactgatcttgcttccttggcctttatccccttggctttcctagacactgccttgtgctggtggatatttattagcctgactcaaacaatgaagctattaaaacttcggaggaacattgtaaaactctctttgtatcggcatttcaccaacacgcttattttggcagtggcagcatccattgtgtttatcatctggacaaccatgaagttcagaatagtgacatgtcagtcggactggcgggagctgtgggtagacgatgccatctggcgcttgctgttctccatgatcctctttgtcatcatggttctctggcgaccatctgcaaacaaccagaggtttgccttttcaccattgtctgaggaagaggaggaggatgaacaaaaggagcctatgctgaaagaaagctttgaaggaatgaaaatgagaagtaccaaacaagaacccaatggaaatagtaaagttaacaaagcacaggaagatgatttgaagtgggtagaagagaatgttccttcttctgtgacagatgtagcacttccagcccttctggattcagatgaggaacgaatgatcacacactttgaaaggtccaaaatggagtaaggaatgggaagatttgcagttaaagatggctaccatcagggaagagatcagcatctgtgtcagtcttctgtacggctccatgggattaaaggaagcaatgacatcctgatctgttccttgatctttgggcattggagttggcgagaggtgtcagaacaaagagaacatcttactgaaaacaagttcataagatgagaaaaatctacgagcttcttatttacaacactgctgccccctttcctcccagactctgacatggatgttcatgcaacttaagtgtgttgttcctgaactttctgtaatgtttcattttttaaatctgacaaactaaaaagtttaacgtcttctaaaagattgtcatcaacaccataatatgtaatctccaggagcaactgcctgtaatttttatttatttagggagttacataggtgatgggggaaattgttaactacctttcattttcctgggaagtcaaggttacatcttgcagaggttgttttgagaaaaaagggcccttctgagttaaggagccatagttctatcaatgatcaaaagaaaaaaaaaaaaaagagaaactgttacagtatgattcagatcatttaaaaaagcaaaatcaagtgcaattttgtttacaaatggtgtatattaaagatttttctatttcagatgtactttaaagagaaatattagcttaactcttttgacatctgctattgtgacacatcccattgctggcaatgtggtgcacactccgaaacttttaactactgttttgtaagcctccaagggtggcattgcagggtccttaggcaatgttttgtttgcctttatgcagagaggtgctccaagtgctgtgattgagcaccgtgctagaggaactgtaatgcttcagaagttgtagcttatacaaaggaaacaggtcctgctggcttaatttaaacagttattgcatgaagtagcgtggaggccctggactgctgctcgttctttaggatggactgttctggtatctggtattggtttagagactgttaataagggacatcacaaggtgatgggattcatttgaagcactctatttctgttttaatggttttatccaattttgccttcccaagatttttgttctacataaaaagttcatgccactttttaatataaaaaaatttaacaaaattaa

SEQ ID NO: 355831 - DNA, 2948 bp, Homo sapiens
agacgactgtctgagagaggggccgctacgccgcacagcaaacaagctccgcgacgtttccaggacccggataatcccgcccttagagcagagccggaagaaggcgggacgaaccggaagagggtgaaatgctttcggtaggcactccacggctgtgaagatggcggcggctgcgtggcttcaggtgttgcctgtcattcttctgcttctgggagctcacccgtcaccactgtcgtttttcagtgcgggaccggcaaccgtagctgctgccgaccggtccaaatggcacattccgataccgtcgttgatggagaaccttgtgacctgtctttgaatataacctggtatctgaaaagcgctgattgttacaatgaaatctataacttcaaggcagaagaagtagagttgtatttggaaaaacttaaggaaaaaagaggcttgtctgggaaatatcaaacatcatcaaaattgttccagaactgcagtgaactctttaaaacacagaccttttctggagattttatgcatcgactgcctcttttaggagaaaaacaggaggctaaggagaatggaacaaaccttacctttattggagacaaaaccgcaatgcatgaaccattgcaaacttggcaagatgcaccatacatttttattgtacatattggcatttcatcctcaaaggaatcatcaaaagaaaattcactgagtaatctttttaccatgactgttgaagtgaagggtccctatgaatacctcacacttgaagactatcccttgatgatttttttcatggtgatgtgtattgtatatgtcctgtttggtgttctgtggctggcatggtctgcctgctactggagagatctcctgagaattcagttttggattggtgctgtcatcttcctgggaatgcttgagaaagctgtcttctatgcggaatttcagaatatccgatacaaaggagaatctgtccagggtgctttgatccttgcagagctgctttcagcagtgaaacgctcactggctcgaaccctggtcatcatagtcagtctgggatatggcatcgtcaagccacgccttggagtcactcttcataaggttgtagtagcaggagccctctatcttttgttctctggcatggaaggggtcctcagagttactggggcccagactgatcttgcttccttggcctttatccccttggctttcctagacactgccttgtgctggtggatatttattagcctgactcaaacaatgaagctattaaaacttcggaggaacattgtaaaactctctttgtatcggcatttcaccaacacgcttattttggcagtggcagcatccattgtgtttatcatctggacaaccatgaagttcagaatagtgacatgtcagtcggactggcgggagctgtgggtagacgatgccatctggcgcttgctgttctccatgatcctctttgtcatcatggttctctggcgaccatctgcaaacaaccagaggtttgccttttcaccattgtctgaggaagaggaggaggatgaacaaaaggagcctatgctgaaagaaagctttgaaggaatgaaaatgagaagtaccaaacaagaacccaatggaaatagtaaagttaacaaagcacaggaagatgatttgaagtgggtagaagagaatgttccttcttctgtgacagatgtagcacttccagcccttctggattcagatgaggaacgaatgatcacacactttgaaaggtccaaaatggagtaaggaatgggaagatttgcagttaaagatggctaccatcagggaagagatcagcatctgtgtcagtcttctgtacggctccatgggattaaaggaagcaatgacatcctgatctgttccttgatctttgggcattggagttggcgagaggtgtcagaacaaagagaacatcttactgaaaacaagttcataagatgagaaaaatctacgagcttcttatttacaacactgctgccccctttcctcccagactctgacatggatgttcatgcaacttaagtgtgttgttcctgaactttctgtaatgtttcattttttaaatctgacaaactaaaaagtttaacgtcttctaaaagattgtcatcaacaccataatatgtaatctccaggagcaactgcctgtaatttttatttatttagggagttacataggtgatgggggaaattgttaactacctttcattttcctgggaagtcaaggttacatcttgcagaggttgttttgagaaaaaagggcccttctgagttaaggagccatagttctatcaatgatcaaaagaaaaaaaaaaaaaagagaaactgttacagtatgattcagatcatttaaaaaagcaaaatcaagtgcaattttgtttacaaatggtgtatattaaagatttttctatttcagatgtactttaaagagaaatattagcttaactcttttgacatctgctattgtgacacatcccattgctggcaatgtggtgcacactccgaaacttttaactactgttttgtaagcctccaagggtggcattgcagggtccttaggcaatgttttgtttgcctttatgcagagaggtgctccaagtgctgtgattgagcaccgtgctagaggaactgtaatgcttcagaagttgtagcttatacaaaggaaacaggtcctgctggcttaatttaaacagttattgcatgaagtagcgtggaggccctggactgctgctcgttctttaggatggactgttctggtatctggtattggtttagagactgttaataagggacatcacaaggtgatgggattcatttgaagcactctatttctgttttaatggttttatccaattttgccttcccaagatttttgttctacataaaaagttcatgccactttttaatataaaaaaatttaacaaaattaa

SEQ ID NO: 355832 - DNA, 3496 bp, Homo sapiens
agacgactgtctgagagaggggccgctacgccgcacagcaaacaagctccgcgacgtttccaggacccggataatcccgcccttagagcagagccggaagaaggcgggacgaaccggaagagggtgaaatgctttcggtaggcactccacggctgtgaagatggcggcggctgcgtggcttcaggtgttgcctgtcattcttctgcttctgggagctcacccgtcaccactgtcgtttttcagtgcgggaccggcaaccgtagctgctgccgaccggtccaaatggcacattccgataccgtcggtgagtattcacttcactaacgtctgaacctagaggagcaaggggtggggctacggcggcccaaggggtccatgaaggttccgcaaaagtctcttcaaaaggggtggggttgctgggatggtctgtgtggctagccaactgggacccacctccctggagtggaaagccgcgcacttctgtgattaggctagcgggaatgtaagggccacttcagcaacagaaaggagtggtggagcggcttctcatcagaaaaacagaactttcagtgcctgacttgagatgtaaacttgatgtacaaacggagagttgtttatctttcagatgtttcacagaatccagtgtccccgggttggataagaaagatatgggaaaaattattttagttttggaaagatcctcttcagaaataccactatcttcctgaagtttgatggagaaccttgtgacctgtctttgaatataacctggtatctgaaaagcgctgattgttacaatgaaatctataacttcaaggcagaagaagtagagttgtatttggaaaaacttaaggaaaaaagaggcttgtctgggaaatatcaaacatcatcaaaattgttccagaactgcagtgaactctttaaaacacagactaggaggattggttggtcttttcttggatttgattatggaaagctacctgatgcatctggttgctggaggctgactacttttagatgtgctgtaatctttccagggtcttggcttattgaccttttctggagattttatgcatcgactgcctcttttaggagaaaaacaggaggctaaggagaatggaacaaaccttacctttattggagacaaaaccgcaatgcatgaaccattgcaaacttggcaagatgcaccatacatttttattgtacatattggcatttcatcctcaaaggaatcatcaaaagaaaattcactgagtaatctttttaccatgactgttgaagtgaagggtccctatgaatacctcacacttgaagactatcccttgatgatttttttcatggtgatgtgtattgtatatgtcctgtttggtgttctgtggctggcatggtctgcctgctactggagagatctcctgagaattcagttttggattggtgctgtcatcttcctgggaatgcttgagaaagctgtcttctatgcggaatttcagaatatccgatacaaaggagaatctgtccagggtgctttgatccttgcagagctgctttcagcagtgaaacgctcactggctcgaaccctggtcatcatagtcagtctgggatatggcatcgtcaagccacgccttggagtcactcttcataaggttgtagtagcaggagccctctatcttttgttctctggcatggaaggggtcctcagagttactggggcccagactgatcttgcttccttggcctttatccccttggctttcctagacactgccttgtgctggtggatatttattagcctgactcaaacaatgaagctattaaaacttcggaggaacattgtaaaactctctttgtatcggcatttcaccaacacgcttattttggcagtggcagcatccattgtgtttatcatctggacaaccatgaagttcagaatagtgacatgtcagtcggactggcgggagctgtgggtagacgatgccatctggcgcttgctgttctccatgatcctctttgtcatcatggttctctggcgaccatctgcaaacaaccagaggtttgccttttcaccattgtctgaggaagaggaggaggatgaacaaaaggagcctatgctgaaagaaagctttgaaggaatgaaaatgagaagtaccaaacaagaacccaatggaaatagtaaagttaacaaagcacaggaagatgatttgaagtgggtagaagagaatgttccttcttctgtgacagatgtagcacttccagcccttctggattcagatgaggaacgaatgatcacacactttgaaaggtccaaaatggagtaaggaatgggaagatttgcagttaaagatggctaccatcagggaagagatcagcatctgtgtcagtcttctgtacggctccatgggattaaaggaagcaatgacatcctgatctgttccttgatctttgggcattggagttggcgagaggtgtcagaacaaagagaacatcttactgaaaacaagttcataagatgagaaaaatctacgagcttcttatttacaacactgctgccccctttcctcccagactctgacatggatgttcatgcaacttaagtgtgttgttcctgaactttctgtaatgtttcattttttaaatctgacaaactaaaaagtttaacgtcttctaaaagattgtcatcaacaccataatatgtaatctccaggagcaactgcctgtaatttttatttatttagggagttacataggtgatgggggaaattgttaactacctttcattttcctgggaagtcaaggttacatcttgcagaggttgttttgagaaaaaagggcccttctgagttaaggagccatagttctatcaatgatcaaaagaaaaaaaaaaaaaagagaaactgttacagtatgattcagatcatttaaaaaagcaaaatcaagtgcaattttgtttacaaatggtgtatattaaagatttttctatttcagatgtactttaaagagaaatattagcttaactcttttgacatctgctattgtgacacatcccattgctggcaatgtggtgcacactccgaaacttttaactactgttttgtaagcctccaagggtggcattgcagggtccttaggcaatgttttgtttgcctttatgcagagaggtgctccaagtgctgtgattgagcaccgtgctagaggaactgtaatgcttcagaagttgtagcttatacaaaggaaacaggtcctgctggcttaatttaaacagttattgcatgaagtagcgtggaggccctggactgctgctcgttctttaggatggactgttctggtatctggtattggtttagagactgttaataagggacatcacaaggtgatgggattcatttgaagcactctatttctgttttaatggttttatccaattttgccttcccaagatttttgttctacataaaaagttcatgccactttttaatataaaaaaatttaacaaaattaa

SEQ ID NO: 355833 - DNA, 3321 bp, Homo sapiens
  misc_feature (3024)..(3024): n is a, c, g, or t
  misc_feature (3026)..(3026): n is a, c, g, or t
agacgactgtctgagagaggggccgctacgccgcacagcaaacaagctccgcgacgtttccaggacccggataatcccgcccttagagcagagccggaagaaggcgggacgaaccggaagagggtgaaatgctttcggtaggcactccacggctgtgaagatggcggcggctgcgtggcttcaggtgttgcctgtcattcttctgcttctgggagctcacccgtcaccactgtcgtttttcagtgcgggaccggcaaccgtagctgctgccgaccggtccaaatggcacattccgataccgtcggggaaaaattattttagttttggaaagatcctcttcagaaataccactatcttcctgaagtttgatggagaaccttgtgacctgtctttgaatataacctggtatctgaaaagcgctgattgttacaatgaaatctataacttcaaggcagaagaagtagagttgtatttggaaaaacttaaggaaaaaagaggcttgtctgggaaatatcaaacatcatcaaaattgttccagaactgcagtgaactctttaaaacacagaccttttctggagattttatgcatcgactgcctcttttaggagaaaaacaggaggctaaggagaatggaacaaaccttacctttattggagacaaaaccgcaatgcatgaaccattgcaaacttggcaagatgcaccatacatttttattgtacatattggcatttcatcctcaaaggaatcatcaaaagaaaattcactgagtaatctttttaccatgactgttgaagtgaagggtccctatgaatacctcacacttgaagactatcccttgatgatttttttcatggtgatgtgtattgtatatgtcctgtttggtgttctgtggctggcatggtctgcctgctactggagagatctcctgagaattcagttttggattggtgctgtcatcttcctgggaatgcttgagaaagctgtcttctatgcggaatttcagaatatccgatacaaaggagaatctgtccagggtgctttgatccttgcagagctgctttcagcagtgaaacgctcactggctcgaaccctggtcatcatagtcagtctgggatatggcatcgtcaagccacgccttggagtcactcttcataaggttgtagtagcaggagccctctatcttttgttctctggcatggaaggggtcctcagagttactggggcccagactgatcttgcttccttggcctttatccccttggctttcctagacactgccttgtgctggtggatatttattagcctgactcaaacaatgaagctattaaaacttcggaggaacattgtaaaactctctttgtatcggcatttcaccaacacgcttattttggcagtggcagcatccattgtgtttatcatctggacaaccatgaagttcagaatagtgacatgtcagtcggactggcgggagctgtgggtagacgatgccatctggcgcttgctgttctccatgatcctctttgtcatcatggttctctggcgaccatctgcaaacaaccagaggtttgccttttcaccattgtctgaggaagaggaggaggatgaacaaaaggagcctatgctgaaagaaagctttgaaggaatgaaaatgagaagtaccaaacaagaacccaatggaaatagtaaagttaacaaagcacaggaagatgatttgaagtgggtagaagagaatgttccttcttctgtgacagatgtagcacttccagcccttctggattcagatgaggaacgaatgatcacacactttgaaaggtccaaaatggagtaaggaatgggaagatttgcagttaaagatggctaccatcagggaagagatcagcatctgtgtcagtcttctgtacggctccatgggattaaaggaagcaatgacatcctgatctgttccttgatctttgggcattggagttggcgagaggtgtcagaacaaagagaacatcttactgaaaacaagttcataagatgagaaaaatctacgagcttcttatttacaacactgctgccccctttcctcccagactctgacatggatgttcatgcaacttaagtgtgttgttcctgaactttctgtaatgtttcattttttaaatctgacaaactaaaaagtttaacgtcttctaaaagattgtcatcaacaccataatatgtaatctccaggagcaactgcctgtaatttttatttatttagggagttacataggtgatgggggaaattgttaactacctttcattttcctgggaagtcaaggttacatcttgcagaggttgttttgagaaaaaagggcccttctgagttaaggagccatagttctatcaatgatcaaaagaaaaaaaaaaaaaagagaaactgttacagtatgattcagatcatttaaaaaagcaaaatcaagtgcaattttgtttacaaatggtgtatattaaagatttttctatttcagatgtactttaaagagaaatattagcttaactcttttgacatctgctattgtgacacatcccattgctggcaatgtggtgcacactccgaaacttttaactactgttttgtaagcctccaagggtggcattgcagggtccttaggcaatgttttgtttgcctttatgcagagaggtgctccaagtgctgtgattgagcaccgtgctagaggaactgtaatgcttcagaagttgtagcttatacaaaggaaacaggtcctgctggcttaatttaaacagttattgcatgaagtagcgtggaggccctggactgctgctcgttctttaggatggactgttctggtatctggtattggtttagagactgttaataagggacatcacaaggtgatgggattcatttgaagcactctatttctgttttaatggttttatccaattttgccttcccaagatttttgttctacataaaaagttcatgccactttttaatataaaaaaatttaacaaaattaaaaaaaaaaaaaaaananaaaaagagagacgagaaaaaaaaaaggggggggggggcggcaagagagtcccccggggggggccaggtagggggcccgagctttttgggaaaaggggggccacaaagagagaacaaataaaaacgcaacagggccaggataaaaaacgggaaggggaaacaggcacggggaactgggagaggccactaaacggggggggacaaaatgggaaaacacacaaaataaaaccccgggaaataaaataaaggaaggggcaaaccagaaaaagaggtaaaaatgaaaaaataaagaaata

SEQ ID NO: 355834 - DNA, 2306 bp, Homo sapiens
tattcttcattcatatcttctgcctcaaagagcctgccagaatggaaaagggaggctaactcaattaatcagtaattgattatgtatcacctgggtgcctggcactctgctgaactctagtgagtacagaggagtgttcccataggtgccagggagctggagaagggagcaggttagaggaaggacatcagcctatctggagcagagacctattaacttaggtatcagataagtagggtggggctaagtggaacactgggaaatctaggcctgccctgtgtgactacattctttttcctgtaagagtcagccttttgagaatctgtccagggtgctttgatccttgcagagctgctttcagcagtgaaacgctcactggctcgaaccctggtcatcatagtcagtctgggatatggcatcgtcaagccacgccttggagtcactcttcataaggttgtagtagcaggagccctctatcttttgttctctggcatggaaggggtcctcagagttactggggcccagactgatcttgcttccttggcctttatccccttggctttcctagacactgccttgtgctggtggatatttattagcctgactcaaacaatgaagctattaaaacttcggaggaacattgtaaaactctctttgtatcggcatttcaccaacacgcttattttggcagtggcagcatccattgtgtttatcatctggacaaccatgaagttcagaatagtgacatgtcagtcggactggcgggagctgtgggtagacgatgccatctggcgcttgctgttctccatgatcctctttgtcatcatggttctctggcgaccatctgcaaacaaccagaggtttgccttttcaccattgtctgaggaagaggaggaggatgaacaaaaggagcctatgctgaaagaaagctttgaaggaatgaaaatgagaagtaccaaacaagaacccaatggaaatagtaaagttaacaaagcacaggaagatgatttgaagtgggtagaagagaatgttccttcttctgtgacagatgtagcacttccagcccttctggattcagatgaggaacgaatgatcacacactttgaaaggtccaaaatggagtaaggaatgggaagatttgcagttaaagatggctaccatcagggaagagatcagcatctgtgtcagtcttctgtacggctccatgggattaaaggaagcaatgacatcctgatctgttccttgatctttgggcattggagttggcgagaggtgtcagaacaaagagaacatcttactgaaaacaagttcataagatgagaaaaatctacgagcttcttatttacaacactgctgccccctttcctcccagactctgacatggatgttcatgcaacttaagtgtgttgttcctgaactttctgtaatgtttcattttttaaatctgacaaactaaaaagtttaacgtcttctaaaagattgtcatcaacaccataatatgtaatctccaggagcaactgcctgtaatttttatttatttagggagttacataggtgatgggggaaattgttaactacctttcattttcctgggaagtcaaggttacatcttgcagaggttgttttgagaaaaaagggcccttctgagttaaggagccatagttctatcaatgatcaaaagaaaaaaaaaaaaaagagaaactgttacagtatgattcagatcatttaaaaaagcaaaatcaagtgcaattttgtttacaaatggtgtatattaaagatttttctatttcagatgtactttaaagagaaatattagcttaactcttttgacatctgctattgtgacacatcccattgctggcaatgtggtgcacactccgaaacttttaactactgttttgtaagcctccaagggtggcattgcagggtccttaggcaatgttttgtttgcctttatgcagagaggtgctccaagtgctgtgattgagcaccgtgctagaggaactgtaatgcttcagaagttgtagcttatacaaaggaaacaggtcctgctggcttaatttaaacagttattgcatgaagtagcgtggaggccctggactgctgctcgttctttaggatggactgttctggtatctggtattggtttagagactgttaataagggacatcacaaggtgatgggattcatttgaagcactctatttctgttttaatggttttatccaattttgccttcccaagatttttgttctacataaaaagttcatgccactttttaatataaaaaaatttaacaaaattaa

SEQ ID NO: 355835 - DNA, 2541 bp, Homo sapiens
agacgactgtctgagagaggggccgctacgccgcacagcaaacaagctccgcgacgtttccaggacccggataatcccgcccttagagcagagccggaagaaggcgggacgaaccggaagagggtgaaatgctttcggtaggcactccacggctgtgaagatggcggcggctgcgtggcttcaggtgttgcctgtcattcttctgcttctgggagctcacccgtcaccactgtcgtttttcagtgcgggaccggcaaccgtagctgctgccgaccggtccaaatggcacattccgataccgtcggggaaaaattattttagttttggaaagatcctcttcagaaataccactatcttcctgaagtttgatggagaaccttgtgacctgtctttgaatataacctggtatctgaaaagcgctgattgttacaatgaaatctataacttcaaggcagaagaagtagagttgtatttggaaaaacttaaggaaaaaagaggcttgtctgggaaatatcaaacatcatcaaaattgttccagaactgcagtgaactctttaaaacacagaccttttctggagattttatgcatcgactgcctcttttaggagaaaaacaggaggctaaggagaatggaacaaaccttacctttattggagacaaaaccgcaatgcatgaaccattgcaaacttggcaagatgcaccatacatttttattgtacatattggcatttcatcctcaaaggaatcatcaaaagaaaattcactgagtaatctttttaccatgactgttgaagtgaagggtccctatgaatacctcacacttgaagactatcccttgatgatttttttcatggtgatgtgtattgtatatgtcctgtttggtgttctgtggctggcatggtctgcctgctactggagagatctcctgagaattcagttttggattggtgctgtcatcttcctgggaatgcttgagaaagctgtcttctatgcggaatttcagaatatccgatacaaaggagaatctgtccagggtgctttgatccttgcagagctgctttcagcagtgaaacgctcactggctcgaaccctggtcatcatagtcagtctgggatatggcatcgtcaagccacgccttggagtcactcttcataaggttgtagtagcaggagccctctatcttttgttctctggcatggaaggggtcctcagagttactggggcccagactgatcttgcttccttggcctttatccccttggctttcctagacactgccttgtgctggtggatatttattagcctgactcaaacaatgaagctattaaaacttcggaggaacattgtaaaactctctttgtatcggcatttcaccaacacgcttattttggcagtggcagcatccattgtgtttatcatctggacaaccatgaagttcagaatagtgacatgtcagtcggactggcgggagctgtgggtagacgatgccatctggcgcttgctgttctccatgatcctctttgtcatcatggttctctggcgaccatctgcaaacaaccagaggtttgccttttcaccattgtctgaggaagaggaggaggatgaacaaaaggagcctatgctgaaagaaagctttgaaggaatgaaaatgagaagtaccaaacaagaacccaatggaaatagtaaagttaacaaagcacaggaagatgatttgaagtgggtagaagagaatgttccttcttctgtgacagatgtagcacttccagcccttctggattcagatgaggaacgaatgatcacacactttgaaaggtccaaaatggagtaaggaatgggaagatttgcagttaaagatggctaccatcagggaagagatcagcatctgtgtcagtcttctgtacggctccatgggattaaaggaagcaatgacatcctgatctgttccttgatctttgggcattggagttggcgagaggtgtcagaacaaagagaacatcttactgaaaacaagttcataagatgagaaaaatctacgagcttcttatttacaacactgctgccccctttcctcccagactctgacatggatgttcatgcaacttaagtgtgttgttcctgaactttctgtaatgtttcattttttaaatctgacaaactaaaaagtttaacgtcttctaaaagattgtcatcaacaccataatatgtaatctccaggagcaactgcctgtaatttttatttatttagggagttacataggtgatgggggaaattgttaactacctttcattttcctgggaagtcaaggttacatcttgcagaggttgttttgagaaaaaagggcccttctgagttaaggagccatagttctatcaatgatcaaaagaaaaaaaaaaaactcgaggtcgacggttccataagcttgtatttaaattcgcagctttcttacgggaagggaaaactttattcttaaaaagtggccccctaaaggttgttggcctttccccccccaaaaatttttttttacaaaaccaaaaaaaagg

SEQ ID NO: 355836 - DNA, 2514 bp, Homo sapiens
  misc_feature (2400)..(2400): n is a, c, g, or t
  misc_feature (2402)..(2402): n is a, c, g, or t
agacgactgtctgagagaggggccgctacgccgcacagcaaacaagctccgcgacgtttccaggacccggataatcccgcccttagagcagagccggaagaaggcgggacgaaccggaagagggtgaaatgctttcggtaggcactccacggctgtgaagatggcggcggctgcgtggcttcaggtgttgcctgtcattcttctgcttctgggagctcacccgtcaccactgtcgtttttcagtgcgggaccggcaaccgtagctgctgccgaccggtccaaatggcacattccgataccgtcggggaaaaattattttagttttggaaagatcctcttcagaaataccactatcttcctgaagtttgatggagaaccttgtgacctgtctttgaatataacctggtatctgaaaagcgctgattgttacaatgaaatctataacttcaaggcagaagaagtagagttgtatttggaaaaacttaaggaaaaaagaggcttgtctgggaaatatcaaacatcatcaaaattgttccagaactgcagtgaactctttaaaacacagaccttttctggagattttatgcatcgactgcctcttttaggagaaaaacaggaggctaaggagaatggaacaaaccttacctttattggagacaaaaccgcaatgcatgaaccattgcaaacttggcaagatgcaccatacatttttattgtacatattggcatttcatcctcaaaggaatcatcaaaagaaaattcactgagtaatctttttaccatgactgttgaagtgaagggtccctatgaatacctcacacttgaagactatcccttgatgatttttttcatggtgatgtgtattgtatatgtcctgtttggtgttctgtggctggcatggtctgcctgctactggagagatctcctgagaattcagttttggattggtgctgtcatcttcctgggaatgcttgagaaagctgtcttctatgcggaatttcagaatatccgatacaaaggagaatctgtccagggtgctttgatccttgcagagctgctttcagcagtgaaacgctcactggctcgaaccctggtcatcatagtcagtctgggatatggcatcgtcaagccacgccttggagtcactcttcataaggttgtagtagcaggagccctctatcttttgttctctggcatggaaggggtcctcagagttactggggcccagactgatcttgcttccttggcctttatccccttggctttcctagacactgccttgtgctggtggatatttattagcctgactcaaacaatgaagctattaaaacttcggaggaacattgtaaaactctctttgtatcggcatttcaccaacacgcttattttggcagtggcagcatccattgtgtttatcatctggacaaccatgaagttcagaatagtgacatgtcagtcggactggcgggagctgtgggtagacgatgccatctggcgcttgctgttctccatgatcctctttgtcatcatggttctctggcgaccatctgcaaacaaccagaggtttgccttttcaccattgtctgaggaagaggaggaggatgaacaaaaggagcctatgctgaaagaaagctttgaaggaatgaaaatgagaagtaccaaacaagaacccaatggaaatagtaaagttaacaaagcacaggaagatgatttgaagtgggtagaagagaatgttccttcttctgtgacagatgtagcacttccagcccttctggattcagatgaggaacgaatgatcacacactttgaaaggtccaaaatggagtaaggaatgggaagatttgcagttaaagatggctaccatcagggaagagatcagcatctgtgtcagtcttctgtacggctccatgggattaaaggaagcaatgacatcctgatctgttccttgatctttgggcattggagttggcgagaggtgtcagaacaaagagaacatcttactgaaaacaagttcataagatgagaaaaatctacgagcttcttatttacaacactgctgccccctttcctcccagactctgacatggatgttcatgcaacttaagtgtgttgttcctgaactttctgtaatgtttcattttttaaatctgacaaactaaaaagtttaacgtcttctaaaagattgtcatcaacaccataatatgtaatctccaggagcaactgcctgtaatttttatttatttagggagttacataggtgatgggggaaattgttaactacctttcattttcctgggaagtcaaggttacatcttgcagaggttgttttgagaaaaaagggcccttctgagttaaggagccatagttctatcaatgatcaaaagaaaaaaaaaaaaaaananaaaaaaaaaattctcttttcctcaaattaaaaaagaggaagagtttttacagagattataaactatttcagggcttagttacctctaattaaacctttctgcgttacaagaa

SEQ ID NO: 355837 - DNA, 1679 bp, Homo sapiens
tacatgatttttaaaaagtgtagtaaaaaacacataacaaatcaaccctcctaaccattctaaagtgcaaagtgctaactaggtgcacgtctttgccctcatccttcactgggtcttcaagtgaaattcctgaattagaggagttacacatttttattaaagcctaatcttatgtaaatatttgtttacataagatcttagctgactctatacatttccttctgagtgctgattttctgtccagaagcctagagcttttgatttagttgttcttgggtgaggtctggacatctgtatgttcaaaatcttcacaaatgtttaggaaccatttctctaaacatttaattaacataaagtactcgtggaagatgtttgcttggatagtctgtatagaagatatttggaatatagatcattttaacctaatatacttcaaccttttttttttttccctaggaacgaatgatcacacactttgaaaggtccaaaatggagtaaggaatgggaagatttgcagttaaagatggctaccatcagggaagagatcagcatctgtgtcagtcttctgtacggctccatgggattaaaggaagcaatgacatcctgatctgttccttgatctttgggcattggagttggcgagaggtgtcagaacaaagagaacatcttactgaaaacaagttcataagatgagaaaaatctacgagcttcttatttacaacactgctgccccctttcctcccagactctgacatggatgttcatgcaacttaagtgtgttgttcctgaactttctgtaatgtttcattttttaaatctgacaaactaaaaagtttaacgtcttctaaaagattgtcatcaacaccataatatgtaatctccaggagcaactgcctgtaatttttatttatttagggagttacataggtgatgggggaaattgttaactacctttcattttcctgggaagtcaaggttacatcttgcagaggttgttttgagaaaaaagggcccttctgagttaaggagccatagttctatcaatgatcaaaagaaaaaaaaaaaaaagagaaactgttacagtatgattcagatcatttaaaaaagcaaaatcaagtgcaattttgtttacaaatggtgtatattaaagatttttctatttcagatgtactttaaagagaaatattagcttaactcttttgacatctgctattgtgacacatcccattgctggcaatgtggtgcacactccgaaacttttaactactgttttgtaagcctccaagggtggcattgcagggtccttaggcaatgttttgtttgcctttatgcagagaggtgctccaagtgctgtgattgagcaccgtgctagaggaactgtaatgcttcagaagttgtagcttatacaaaggaaacaggtcctgctggcttaatttaaacagttattgcatgaagtagcgtggaggccctggactgctgctcgttctttaggatggactgttctggtatctggtattggtttagagactgttaataagggacatcacaaggtgatgggattcatttgaagcactctatttctgttttaatggttttatccaattttgccttcccaagatttttgttctacataaaaagttcatgccactttttaatataaaaaaatttaacaaaattaa
